United States Patent Application Publication US 2018/0305689 A1 - sequence listing, part 159

SEQ ID NO: 2300610 - RNA, 19 nt, Artificial Sequence
  Description of Artificial Sequence: Synthetic oligonucleotide
  Sense strand starting at position 3191 of SEQ ID NO: 1884900
cccucaagguacuuuagaa

SEQ ID NO: 2300611 - RNA, 19 nt, Artificial Sequence
  Description of Artificial Sequence: Synthetic oligonucleotide
  Antisense strand to SEQ ID NO: 2300610
uucuaaaguaccuugaggg

SEQ ID NO: 2300612 - RNA, 19 nt, Artificial Sequence
  Description of Artificial Sequence: Synthetic oligonucleotide
  Sense strand starting at position 3231 of SEQ ID NO: 1884900
cugggaucaugagcuuauc

SEQ ID NO: 2300613 - RNA, 19 nt, Artificial Sequence
  Description of Artificial Sequence: Synthetic oligonucleotide
  Antisense strand to SEQ ID NO: 2300612
gauaagcucaugaucccag

SEQ ID NO: 2300614 - RNA, 19 nt, Artificial Sequence
  Description of Artificial Sequence: Synthetic oligonucleotide
  Sense strand starting at position 3310 of SEQ ID NO: 1884900
caagauuucuaggagaugu

SEQ ID NO: 2300615 - RNA, 19 nt, Artificial Sequence
  Description of Artificial Sequence: Synthetic oligonucleotide
  Antisense strand to SEQ ID NO: 2300614
acaucuccuagaaaucuug

SEQ ID NO: 2300616 - RNA, 19 nt, Artificial Sequence
  Description of Artificial Sequence: Synthetic oligonucleotide
  Sense strand starting at position 3577 of SEQ ID NO: 1884900
uggaguuuccaauaucuau

SEQ ID NO: 2300617 - RNA, 19 nt, Artificial Sequence
  Description of Artificial Sequence: Synthetic oligonucleotide
  Antisense strand to SEQ ID NO: 2300616
auagauauuggaaacucca

SEQ ID NO: 2300618 - RNA, 19 nt, Artificial Sequence
  Description of Artificial Sequence: Synthetic oligonucleotide
  Sense strand starting at position 3658 of SEQ ID NO: 1884900
ucucucacuccgcaaagau

SEQ ID NO: 2300619 - RNA, 19 nt, Artificial Sequence
  Description of Artificial Sequence: Synthetic oligonucleotide
  Antisense strand to SEQ ID NO: 2300618
aucuuugcggagugagaga

SEQ ID NO: 2300620 - RNA, 19 nt, Artificial Sequence
  Description of Artificial Sequence: Synthetic oligonucleotide
  Sense strand starting at position 3711 of SEQ ID NO: 1884900
uaguaauuaugagcugaug

SEQ ID NO: 2300621 - RNA, 19 nt, Artificial Sequence
  Description of Artificial Sequence: Synthetic oligonucleotide
  Antisense strand to SEQ ID NO: 2300620
caucagcucauaauuacua

SEQ ID NO: 2300622 - RNA, 19 nt, Artificial Sequence
  Description of Artificial Sequence: Synthetic oligonucleotide
  Sense strand starting at position 3762 of SEQ ID NO: 1884900
gagggcacauaguuaacau

SEQ ID NO: 2300623 - RNA, 19 nt, Artificial Sequence
  Description of Artificial Sequence: Synthetic oligonucleotide
  Antisense strand to SEQ ID NO: 2300622
auguuaacuaugugcccuc

SEQ ID NO: 2300624 - RNA, 19 nt, Artificial Sequence
  Description of Artificial Sequence: Synthetic oligonucleotide
  Sense strand starting at position 129 of SEQ ID NO: 1884901
aggucaagugccugagaaa

SEQ ID NO: 2300625 - RNA, 19 nt, Artificial Sequence
  Description of Artificial Sequence: Synthetic oligonucleotide
  Antisense strand to SEQ ID NO: 2300624
uuucucaggcacuugaccu

SEQ ID NO: 2300626 - RNA, 19 nt, Artificial Sequence
  Description of Artificial Sequence: Synthetic oligonucleotide
  Sense strand starting at position 130 of SEQ ID NO: 1884901
ggucaagugccugagaaag

SEQ ID NO: 2300627 - RNA, 19 nt, Artificial Sequence
  Description of Artificial Sequence: Synthetic oligonucleotide
  Antisense strand to SEQ ID NO: 2300626
cuuucucaggcacuugacc

SEQ ID NO: 2300628 - RNA, 19 nt, Artificial Sequence
  Description of Artificial Sequence: Synthetic oligonucleotide
  Sense strand starting at position 796 of SEQ ID NO: 1884901
cacguaagccgggacaaua

SEQ ID NO: 2300629 - RNA, 19 nt, Artificial Sequence
  Description of Artificial Sequence: Synthetic oligonucleotide
  Antisense strand to SEQ ID NO: 2300628
uauugucccggcuuacgug

SEQ ID NO: 2300630 - RNA, 19 nt, Artificial Sequence
  Description of Artificial Sequence: Synthetic oligonucleotide
  Sense strand starting at position 994 of SEQ ID NO: 1884901
ugucacuugccuuaaggau

SEQ ID NO: 2300631 - RNA, 19 nt, Artificial Sequence
  Description of Artificial Sequence: Synthetic oligonucleotide
  Antisense strand to SEQ ID NO: 2300630
auccuuaaggcaagugaca

SEQ ID NO: 2300632 - RNA, 19 nt, Artificial Sequence
  Description of Artificial Sequence: Synthetic oligonucleotide
  Sense strand starting at position 1001 of SEQ ID NO: 1884901
ugccuuaaggaucaaaugu

SEQ ID NO: 2300633 - RNA, 19 nt, Artificial Sequence
  Description of Artificial Sequence: Synthetic oligonucleotide
  Antisense strand to SEQ ID NO: 2300632
acauuugauccuuaaggca

SEQ ID NO: 2300634 - RNA, 19 nt, Artificial Sequence
  Description of Artificial Sequence: Synthetic oligonucleotide
  Sense strand starting at position 1108 of SEQ ID NO: 1884901
aguuaacacgcugaggauu

SEQ ID NO: 2300635 - RNA, 19 nt, Artificial Sequence
  Description of Artificial Sequence: Synthetic oligonucleotide
  Antisense strand to SEQ ID NO: 2300634
aauccucagcguguuaacu

SEQ ID NO: 2300636 - RNA, 19 nt, Artificial Sequence
  Description of Artificial Sequence: Synthetic oligonucleotide
  Sense strand starting at position 1182 of SEQ ID NO: 1884901
cuacaaauugguuauggca

SEQ ID NO: 2300637 - RNA, 19 nt, Artificial Sequence
  Description of Artificial Sequence: Synthetic oligonucleotide
  Antisense strand to SEQ ID NO: 2300636
ugccauaaccaauuuguag

SEQ ID NO: 2300638 - RNA, 19 nt, Artificial Sequence
  Description of Artificial Sequence: Synthetic oligonucleotide
  Sense strand starting at position 1264 of SEQ ID NO: 1884901
gcaucaucugacuggagaa

SEQ ID NO: 2300639 - RNA, 19 nt, Artificial Sequence
  Description of Artificial Sequence: Synthetic oligonucleotide
  Antisense strand to SEQ ID NO: 2300638
uucuccagucagaugaugc

SEQ ID NO: 2300640 - RNA, 19 nt, Artificial Sequence
  Description of Artificial Sequence: Synthetic oligonucleotide
  Sense strand starting at position 1338 of SEQ ID NO: 1884901
uuaucuucuccacgaggga

SEQ ID NO: 2300641 - RNA, 19 nt, Artificial Sequence
  Description of Artificial Sequence: Synthetic oligonucleotide
  Antisense strand to SEQ ID NO: 2300640
ucccucguggagaagauaa

SEQ ID NO: 2300642 - RNA, 19 nt, Artificial Sequence
  Description of Artificial Sequence: Synthetic oligonucleotide
  Sense strand starting at position 1467 of SEQ ID NO: 1884901
uuguaaucuggucaguuaa

SEQ ID NO: 2300643 - RNA, 19 nt, Artificial Sequence
  Description of Artificial Sequence: Synthetic oligonucleotide
  Antisense strand to SEQ ID NO: 2300642
uuaacugaccagauuacaa

SEQ ID NO: 2300644 - RNA, 19 nt, Artificial Sequence
  Description of Artificial Sequence: Synthetic oligonucleotide
  Sense strand starting at position 1469 of SEQ ID NO: 1884901
guaaucuggucaguuaaua

SEQ ID NO: 2300645 - RNA, 19 nt, Artificial Sequence
  Description of Artificial Sequence: Synthetic oligonucleotide
  Antisense strand to SEQ ID NO: 2300644
uauuaacugaccagauuac

SEQ ID NO: 2300646 - RNA, 19 nt, Artificial Sequence
  Description of Artificial Sequence: Synthetic oligonucleotide
  Sense strand starting at position 1819 of SEQ ID NO: 1884901
cgcuuucugacagagaaua

SEQ ID NO: 2300647 - RNA, 19 nt, Artificial Sequence
  Description of Artificial Sequence: Synthetic oligonucleotide
  Antisense strand to SEQ ID NO: 2300646
uauucucugucagaaagcg

SEQ ID NO: 2300648 - RNA, 19 nt, Artificial Sequence
  Description of Artificial Sequence: Synthetic oligonucleotide
  Sense strand starting at position 1827 of SEQ ID NO: 1884901
gacagagaauaccaggaaa

SEQ ID NO: 2300649 - RNA, 19 nt, Artificial Sequence
  Description of Artificial Sequence: Synthetic oligonucleotide
  Antisense strand to SEQ ID NO: 2300648
uuuccugguauucucuguc

SEQ ID NO: 2300650 - RNA, 19 nt, Artificial Sequence
  Description of Artificial Sequence: Synthetic oligonucleotide
  Sense strand starting at position 1921 of SEQ ID NO: 1884901
acagacuuuggucaggcaa

SEQ ID NO: 2300651 - RNA, 19 nt, Artificial Sequence
  Description of Artificial Sequence: Synthetic oligonucleotide
  Antisense strand to SEQ ID NO: 2300650
uugccugaccaaagucugu

SEQ ID NO: 2300652 - RNA, 19 nt, Artificial Sequence
  Description of Artificial Sequence: Synthetic oligonucleotide
  Sense strand starting at position 2208 of SEQ ID NO: 1884901
uggacaggucaguacugau

SEQ ID NO: 2300653 - RNA, 19 nt, Artificial Sequence
  Description of Artificial Sequence: Synthetic oligonucleotide
  Antisense strand to SEQ ID NO: 2300652
aucaguacugaccugucca

SEQ ID NO: 2300654 - RNA, 19 nt, Artificial Sequence
  Description of Artificial Sequence: Synthetic oligonucleotide
  Sense strand starting at position 2510 of SEQ ID NO: 1884901
ggcguucgaaaugcuaagu

SEQ ID NO: 2300655 - RNA, 19 nt, Artificial Sequence
  Description of Artificial Sequence: Synthetic oligonucleotide
  Antisense strand to SEQ ID NO: 2300654
acuuagcauuucgaacgcc

SEQ ID NO: 2300656 - RNA, 19 nt, Artificial Sequence
  Description of Artificial Sequence: Synthetic oligonucleotide
  Sense strand starting at position 2546 of SEQ ID NO: 1884901
aaagccagucagugaagau

SEQ ID NO: 2300657 - RNA, 19 nt, Artificial Sequence
  Description of Artificial Sequence: Synthetic oligonucleotide
  Antisense strand to SEQ ID NO: 2300656
aucuucacugacuggcuuu

SEQ ID NO: 2300658 - RNA, 19 nt, Artificial Sequence
  Description of Artificial Sequence: Synthetic oligonucleotide
  Sense strand starting at position 2568 of SEQ ID NO: 1884901
gggaucucagcccagacuu

SEQ ID NO: 2300659 - RNA, 19 nt, Artificial Sequence
  Description of Artificial Sequence: Synthetic oligonucleotide
  Antisense strand to SEQ ID NO: 2300658
aagucugggcugagauccc

SEQ ID NO: 2300660 - RNA, 19 nt, Artificial Sequence
  Description of Artificial Sequence: Synthetic oligonucleotide
  Sense strand starting at position 2576 of SEQ ID NO: 1884901
agcccagacuuucugauua

SEQ ID NO: 2300661 - RNA, 19 nt, Artificial Sequence
  Description of Artificial Sequence: Synthetic oligonucleotide
  Antisense strand to SEQ ID NO: 2300660
uaaucagaaagucugggcu

SEQ ID NO: 2300662 - RNA, 19 nt, Artificial Sequence
  Description of Artificial Sequence: Synthetic oligonucleotide
  Sense strand starting at position 2614 of SEQ ID NO: 1884901
cugaguucccucuaugauc

SEQ ID NO: 2300663 - RNA, 19 nt, Artificial Sequence
  Description of Artificial Sequence: Synthetic oligonucleotide
  Antisense strand to SEQ ID NO: 2300662
gaucauagagggaacucag

SEQ ID NO: 2300664 - RNA, 19 nt, Artificial Sequence
  Description of Artificial Sequence: Synthetic oligonucleotide
  Sense strand starting at position 2692 of SEQ ID NO: 1884901
gaauuaguuguguaaugga

SEQ ID NO: 2300665 - RNA, 19 nt, Artificial Sequence
  Description of Artificial Sequence: Synthetic oligonucleotide
  Antisense strand to SEQ ID NO: 2300664
uccauuacacaacuaauuc

SEQ ID NO: 2300666 - RNA, 19 nt, Artificial Sequence
  Description of Artificial Sequence: Synthetic oligonucleotide
  Sense strand starting at position 2697 of SEQ ID NO: 1884901
aguuguguaauggagacaa

SEQ ID NO: 2300667 - RNA, 19 nt, Artificial Sequence
  Description of Artificial Sequence: Synthetic oligonucleotide
  Antisense strand to SEQ ID NO: 2300666
uugucuccauuacacaacu

SEQ ID NO: 2300668 - RNA, 19 nt, Artificial Sequence
  Description of Artificial Sequence: Synthetic oligonucleotide
  Sense strand starting at position 2882 of SEQ ID NO: 1884901
ucuaaaggcguugaauaua

SEQ ID NO: 2300669 - RNA, 19 nt, Artificial Sequence
  Description of Artificial Sequence: Synthetic oligonucleotide
  Antisense strand to SEQ ID NO: 2300668
uauauucaacgccuuuaga

SEQ ID NO: 2300670 - RNA, 19 nt, Artificial Sequence
  Description of Artificial Sequence: Synthetic oligonucleotide
  Sense strand starting at position 3089 of SEQ ID NO: 1884901
aggaguaaguaguuguuga

SEQ ID NO: 2300671 - RNA, 19 nt, Artificial Sequence
  Description of Artificial Sequence: Synthetic oligonucleotide
  Antisense strand to SEQ ID NO: 2300670
ucaacaacuacuuacuccu

SEQ ID NO: 2300672 - RNA, 19 nt, Artificial Sequence
  Description of Artificial Sequence: Synthetic oligonucleotide
  Sense strand starting at position 3126 of SEQ ID NO: 1884901
aaauguaggucuuuguaaa

SEQ ID NO: 2300673 - RNA, 19 nt, Artificial Sequence
  Description of Artificial Sequence: Synthetic oligonucleotide
  Antisense strand to SEQ ID NO: 2300672
uuuacaaagaccuacauuu

SEQ ID NO: 2300674 - RNA, 19 nt, Artificial Sequence
  Description of Artificial Sequence: Synthetic oligonucleotide
  Sense strand starting at position 3195 of SEQ ID NO: 1884901
aguggucacaugcaguaua

SEQ ID NO: 2300675 - RNA, 19 nt, Artificial Sequence
  Description of Artificial Sequence: Synthetic oligonucleotide
  Antisense strand to SEQ ID NO: 2300674
uauacugcaugugaccacu

SEQ ID NO: 2300676 - RNA, 19 nt, Artificial Sequence
  Description of Artificial Sequence: Synthetic oligonucleotide
  Sense strand starting at position 3225 of SEQ ID NO: 1884901
auguuuguggcugaauaga

SEQ ID NO: 2300677 - RNA, 19 nt, Artificial Sequence
  Description of Artificial Sequence: Synthetic oligonucleotide
  Antisense strand to SEQ ID NO: 2300676
ucuauucagccacaaacau

SEQ ID NO: 2300678 - RNA, 19 nt, Artificial Sequence
  Description of Artificial Sequence: Synthetic oligonucleotide
  Sense strand starting at position 3491 of SEQ ID NO: 1884901
uuucuagaccuuugaguga

SEQ ID NO: 2300679 - RNA, 19 nt, Artificial Sequence
  Description of Artificial Sequence: Synthetic oligonucleotide
  Antisense strand to SEQ ID NO: 2300678
ucacucaaaggucuagaaa

SEQ ID NO: 2300680 - RNA, 19 nt, Artificial Sequence
  Description of Artificial Sequence: Synthetic oligonucleotide
  Sense strand starting at position 3495 of SEQ ID NO: 1884901
uagaccuuugagugaaacu

SEQ ID NO: 2300681 - RNA, 19 nt, Artificial Sequence
  Description of Artificial Sequence: Synthetic oligonucleotide
  Antisense strand to SEQ ID NO: 2300680
aguuucacucaaaggucua

SEQ ID NO: 2300682 - RNA, 19 nt, Artificial Sequence
  Description of Artificial Sequence: Synthetic oligonucleotide
  Sense strand starting at position 3538 of SEQ ID NO: 1884901
ggagaccuccuggguugaa

SEQ ID NO: 2300683 - RNA, 19 nt, Artificial Sequence
  Description of Artificial Sequence: Synthetic oligonucleotide
  Antisense strand to SEQ ID NO: 2300682
uucaacccaggaggucucc

SEQ ID NO: 2300684 - RNA, 19 nt, Artificial Sequence
  Description of Artificial Sequence: Synthetic oligonucleotide
  Sense strand starting at position 3539 of SEQ ID NO: 1884901
gagaccuccuggguugaaa

SEQ ID NO: 2300685 - RNA, 19 nt, Artificial Sequence
  Description of Artificial Sequence: Synthetic oligonucleotide
  Antisense strand to SEQ ID NO: 2300684
uuucaacccaggaggucuc

SEQ ID NO: 2300686 - RNA, 19 nt, Artificial Sequence
  Description of Artificial Sequence: Synthetic oligonucleotide
  Sense strand starting at position 3541 of SEQ ID NO: 1884901
gaccuccuggguugaaaua

SEQ ID NO: 2300687 - RNA, 19 nt, Artificial Sequence
  Description of Artificial Sequence: Synthetic oligonucleotide
  Antisense strand to SEQ ID NO: 2300686
uauuucaacccaggagguc

SEQ ID NO: 2300688 - RNA, 19 nt, Artificial Sequence
  Description of Artificial Sequence: Synthetic oligonucleotide
  Sense strand starting at position 3731 of SEQ ID NO: 1884901
aagagagaauuccugcagu

SEQ ID NO: 2300689 - RNA, 19 nt, Artificial Sequence
  Description of Artificial Sequence: Synthetic oligonucleotide
  Antisense strand to SEQ ID NO: 2300688
acugcaggaauucucucuu

SEQ ID NO: 2300690 - RNA, 19 nt, Artificial Sequence
  Description of Artificial Sequence: Synthetic oligonucleotide
  Sense strand starting at position 3734 of SEQ ID NO: 1884901
agagaauuccugcaguuag

SEQ ID NO: 2300691 - RNA, 19 nt, Artificial Sequence
  Description of Artificial Sequence: Synthetic oligonucleotide
  Antisense strand to SEQ ID NO: 2300690
cuaacugcaggaauucucu

SEQ ID NO: 2300692 - RNA, 19 nt, Artificial Sequence
  Description of Artificial Sequence: Synthetic oligonucleotide
  Sense strand starting at position 3867 of SEQ ID NO: 1884901
uagugaguacuagaaaguc

SEQ ID NO: 2300693 - RNA, 19 nt, Artificial Sequence
  Description of Artificial Sequence: Synthetic oligonucleotide
  Antisense strand to SEQ ID NO: 2300692
gacuuucuaguacucacua

SEQ ID NO: 2300694 - RNA, 19 nt, Artificial Sequence
  Description of Artificial Sequence: Synthetic oligonucleotide
  Sense strand starting at position 3889 of SEQ ID NO: 1884901
gaagucuuugugcagguaa

SEQ ID NO: 2300695 - RNA, 19 nt, Artificial Sequence
  Description of Artificial Sequence: Synthetic oligonucleotide
  Antisense strand to SEQ ID NO: 2300694
uuaccugcacaaagacuuc

SEQ ID NO: 2300696 - RNA, 19 nt, Artificial Sequence
  Description of Artificial Sequence: Synthetic oligonucleotide
  Sense strand starting at position 3901 of SEQ ID NO: 1884901
cagguaagauuugaguaag

SEQ ID NO: 2300697 - RNA, 19 nt, Artificial Sequence
  Description of Artificial Sequence: Synthetic oligonucleotide
  Antisense strand to SEQ ID NO: 2300696
cuuacucaaaucuuaccug

SEQ ID NO: 2300698 - RNA, 19 nt, Artificial Sequence
  Description of Artificial Sequence: Synthetic oligonucleotide
  Sense strand starting at position 3912 of SEQ ID NO: 1884901
ugaguaaggcuuugaagaa

SEQ ID NO: 2300699 - RNA, 19 nt, Artificial Sequence
  Description of Artificial Sequence: Synthetic oligonucleotide
  Antisense strand to SEQ ID NO: 2300698
uucuucaaagccuuacuca

SEQ ID NO: 2300700 - RNA, 19 nt, Artificial Sequence
  Description of Artificial Sequence: Synthetic oligonucleotide
  Sense strand starting at position 3971 of SEQ ID NO: 1884901
aucuaagacuuggcuacua

SEQ ID NO: 2300701 - RNA, 19 nt, Artificial Sequence
  Description of Artificial Sequence: Synthetic oligonucleotide
  Antisense strand to SEQ ID NO: 2300700
uaguagccaagucuuagau

SEQ ID NO: 2300702 - RNA, 19 nt, Artificial Sequence
  Description of Artificial Sequence: Synthetic oligonucleotide
  Sense strand starting at position 3981 of SEQ ID NO: 1884901
uggcuacuagaaugacuau

SEQ ID NO: 2300703 - RNA, 19 nt, Artificial Sequence
  Description of Artificial Sequence: Synthetic oligonucleotide
  Antisense strand to SEQ ID NO: 2300702
auagucauucuaguagcca

SEQ ID NO: 2300704 - RNA, 19 nt, Artificial Sequence
  Description of Artificial Sequence: Synthetic oligonucleotide
  Sense strand starting at position 60 of SEQ ID NO: 1884902
gcaagcugacccugaguau

SEQ ID NO: 2300705 - RNA, 19 nt, Artificial Sequence
  Description of Artificial Sequence: Synthetic oligonucleotide
  Antisense strand to SEQ ID NO: 2300704
auacucagggucagcuugc

SEQ ID NO: 2300706 - RNA, 19 nt, Artificial Sequence
  Description of Artificial Sequence: Synthetic oligonucleotide
  Sense strand starting at position 61 of SEQ ID NO: 1884902
caagcugacccugaguaua

SEQ ID NO: 2300707 - RNA, 19 nt, Artificial Sequence
  Description of Artificial Sequence: Synthetic oligonucleotide
  Antisense strand to SEQ ID NO: 2300706
uauacucagggucagcuug

SEQ ID NO: 2300708 - RNA, 19 nt, Artificial Sequence
  Description of Artificial Sequence: Synthetic oligonucleotide
  Sense strand starting at position 258 of SEQ ID NO: 1884902
accauugauguauauugua

SEQ ID NO: 2300709 - RNA, 19 nt, Artificial Sequence
  Description of Artificial Sequence: Synthetic oligonucleotide
  Antisense strand to SEQ ID NO: 2300708
uacaauauacaucaauggu

SEQ ID NO: 2300710 - RNA, 19 nt, Artificial Sequence
  Description of Artificial Sequence: Synthetic oligonucleotide
  Sense strand starting at position 270 of SEQ ID NO: 1884902
uauuguacaguugggagaa

SEQ ID NO: 2300711 - RNA, 19 nt, Artificial Sequence
  Description of Artificial Sequence: Synthetic oligonucleotide
  Antisense strand to SEQ ID NO: 2300710
uucucccaacuguacaaua

SEQ ID NO: 2300712 - RNA, 19 nt, Artificial Sequence
  Description of Artificial Sequence: Synthetic oligonucleotide
  Sense strand starting at position 310 of SEQ ID NO: 1884902
ggaguaaacuuccaauaag

SEQ ID NO: 2300713 - RNA, 19 nt, Artificial Sequence
  Description of Artificial Sequence: Synthetic oligonucleotide
  Antisense strand to SEQ ID NO: 2300712
cuuauuggaaguuuacucc

SEQ ID NO: 2300714 - RNA, 19 nt, Artificial Sequence
  Description of Artificial Sequence: Synthetic oligonucleotide
  Sense strand starting at position 324 of SEQ ID NO: 1884902
auaaguuccuuugcaagau

SEQ ID NO: 2300715 - RNA, 19 nt, Artificial Sequence
  Description of Artificial Sequence: Synthetic oligonucleotide
  Antisense strand to SEQ ID NO: 2300714
aucuugcaaaggaacuuau

SEQ ID NO: 2300716 - RNA, 19 nt, Artificial Sequence
  Description of Artificial Sequence: Synthetic oligonucleotide
  Sense strand starting at position 347 of SEQ ID NO: 1884902
cagggaugcuaacaaugaa

SEQ ID NO: 2300717 - RNA, 19 nt, Artificial Sequence
  Description of Artificial Sequence: Synthetic oligonucleotide
  Antisense strand to SEQ ID NO: 2300716
uucauuguuagcaucccug

SEQ ID NO: 2300718 - RNA, 19 nt, Artificial Sequence
  Description of Artificial Sequence: Synthetic oligonucleotide
  Sense strand starting at position 461 of SEQ ID NO: 1884902
ggguguauaauuggaaaca

SEQ ID NO: 2300719 - RNA, 19 nt, Artificial Sequence
  Description of Artificial Sequence: Synthetic oligonucleotide
  Antisense strand to SEQ ID NO: 2300718
uguuuccaauuauacaccc

SEQ ID NO: 2300720 - RNA, 19 nt, Artificial Sequence
  Description of Artificial Sequence: Synthetic oligonucleotide
  Sense strand starting at position 462 of SEQ ID NO: 1884902
gguguauaauuggaaacaa

SEQ ID NO: 2300721 - RNA, 19 nt, Artificial Sequence
  Description of Artificial Sequence: Synthetic oligonucleotide
  Antisense strand to SEQ ID NO: 2300720
uuguuuccaauuauacacc

SEQ ID NO: 2300722 - RNA, 19 nt, Artificial Sequence
  Description of Artificial Sequence: Synthetic oligonucleotide
  Sense strand starting at position 685 of SEQ ID NO: 1884902
agccaacugagugaucagu

SEQ ID NO: 2300723 - RNA, 19 nt, Artificial Sequence
  Description of Artificial Sequence: Synthetic oligonucleotide
  Antisense strand to SEQ ID NO: 2300722
acugaucacucaguuggcu

SEQ ID NO: 2300724 - RNA, 19 nt, Artificial Sequence
  Description of Artificial Sequence: Synthetic oligonucleotide
  Sense strand starting at position 687 of SEQ ID NO: 1884902
ccaacugagugaucaguua

SEQ ID NO: 2300725 - RNA, 19 nt, Artificial Sequence
  Description of Artificial Sequence: Synthetic oligonucleotide
  Antisense strand to SEQ ID NO: 2300724
uaacugaucacucaguugg

SEQ ID NO: 2300726 - RNA, 19 nt, Artificial Sequence
  Description of Artificial Sequence: Synthetic oligonucleotide
  Sense strand starting at position 696 of SEQ ID NO: 1884902
ugaucaguuacuuguugua

SEQ ID NO: 2300727 - RNA, 19 nt, Artificial Sequence
  Description of Artificial Sequence: Synthetic oligonucleotide
  Antisense strand to SEQ ID NO: 2300726
uacaacaaguaacugauca

SEQ ID NO: 2300728 - RNA, 19 nt, Artificial Sequence
  Description of Artificial Sequence: Synthetic oligonucleotide
  Sense strand starting at position 698 of SEQ ID NO: 1884902
aucaguuacuuguuguaag

SEQ ID NO: 2300729 - RNA, 19 nt, Artificial Sequence
  Description of Artificial Sequence: Synthetic oligonucleotide
  Antisense strand to SEQ ID NO: 2300728
cuuacaacaaguaacugau

SEQ ID NO: 2300730 - RNA, 19 nt, Artificial Sequence
  Description of Artificial Sequence: Synthetic oligonucleotide
  Sense strand starting at position 754 of SEQ ID NO: 1884902
cccucaauguaagaagaaa

SEQ ID NO: 2300731 - RNA, 19 nt, Artificial Sequence
  Description of Artificial Sequence: Synthetic oligonucleotide
  Antisense strand to SEQ ID NO: 2300730
uuucuucuuacauugaggg

SEQ ID NO: 2300732 - RNA, 19 nt, Artificial Sequence
  Description of Artificial Sequence: Synthetic oligonucleotide
  Sense strand starting at position 789 of SEQ ID NO: 1884902
augugugguuacuucugaa

SEQ ID NO: 2300733 - RNA, 19 nt, Artificial Sequence
  Description of Artificial Sequence: Synthetic oligonucleotide
  Antisense strand to SEQ ID NO: 2300732
uucagaaguaaccacacau

SEQ ID NO: 2300734 - RNA, 19 nt, Artificial Sequence
  Description of Artificial Sequence: Synthetic oligonucleotide
  Sense strand starting at position 829 of SEQ ID NO: 1884902
uguuauacgcaagguagua

SEQ ID NO: 2300735 - RNA, 19 nt, Artificial Sequence
  Description of Artificial Sequence: Synthetic oligonucleotide
  Antisense strand to SEQ ID NO: 2300734
uacuaccuugcguauaaca

SEQ ID NO: 2300736 - RNA, 19 nt, Artificial Sequence
  Description of Artificial Sequence: Synthetic oligonucleotide
  Sense strand starting at position 872 of SEQ ID NO: 1884902
guuuaaagaguuuguaugu

SEQ ID NO: 2300737 - RNA, 19 nt, Artificial Sequence
  Description of Artificial Sequence: Synthetic oligonucleotide
  Antisense strand to SEQ ID NO: 2300736
acauacaaacucuuuaaac

SEQ ID NO: 2300738 - RNA, 19 nt, Artificial Sequence
  Description of Artificial Sequence: Synthetic oligonucleotide
  Sense strand starting at position 877 of SEQ ID NO: 1884902
aagaguuuguauguucuau

SEQ ID NO: 2300739 - RNA, 19 nt, Artificial Sequence
  Description of Artificial Sequence: Synthetic oligonucleotide
  Antisense strand to SEQ ID NO: 2300738
auagaacauacaaacucuu

SEQ ID NO: 2300740 - RNA, 19 nt, Artificial Sequence
  Description of Artificial Sequence: Synthetic oligonucleotide
  Sense strand starting at position 879 of SEQ ID NO: 1884902
gaguuuguauguucuaugu

SEQ ID NO: 2300741 - RNA, 19 nt, Artificial Sequence
  Description of Artificial Sequence: Synthetic oligonucleotide
  Antisense strand to SEQ ID NO: 2300740
acauagaacauacaaacuc

SEQ ID NO: 2300742 - RNA, 19 nt, Artificial Sequence
  Description of Artificial Sequence: Synthetic oligonucleotide
  Sense strand starting at position 883 of SEQ ID NO: 1884902
uuguauguucuaugucaaa

SEQ ID NO: 2300743 - RNA, 19 nt, Artificial Sequence
  Description of Artificial Sequence: Synthetic oligonucleotide
  Antisense strand to SEQ ID NO: 2300742
uuugacauagaacauacaa

SEQ ID NO: 2300744 - RNA, 19 nt, Artificial Sequence
  Description of Artificial Sequence: Synthetic oligonucleotide
  Sense strand starting at position 940 of SEQ ID NO: 1884902
agacacagaugugagaauu

SEQ ID NO: 2300745 - RNA, 19 nt, Artificial Sequence
  Description of Artificial Sequence: Synthetic oligonucleotide
  Antisense strand to SEQ ID NO: 2300744
aauucucacaucugugucu

SEQ ID NO: 2300746 - RNA, 19 nt, Artificial Sequence
  Description of Artificial Sequence: Synthetic oligonucleotide
  Sense strand starting at position 1091 of SEQ ID NO: 1884902
augccaucugcuugacagu

SEQ ID NO: 2300747 - RNA, 19 nt, Artificial Sequence
  Description of Artificial Sequence: Synthetic oligonucleotide
  Antisense strand to SEQ ID NO: 2300746
acugucaagcagauggcau

SEQ ID NO: 2300748 - RNA, 19 nt, Artificial Sequence
  Description of Artificial Sequence: Synthetic oligonucleotide
  Sense strand starting at position 1092 of SEQ ID NO: 1884902
ugccaucugcuugacaguu

SEQ ID NO: 2300749 - RNA, 19 nt, Artificial Sequence
  Description of Artificial Sequence: Synthetic oligonucleotide
  Antisense strand to SEQ ID NO: 2300748
aacugucaagcagauggca

SEQ ID NO: 2300750 - RNA, 19 nt, Artificial Sequence
  Description of Artificial Sequence: Synthetic oligonucleotide
  Sense strand starting at position 1126 of SEQ ID NO: 1884902
accauuuagugccagcauu

SEQ ID NO: 2300751 - RNA, 19 nt, Artificial Sequence
  Description of Artificial Sequence: Synthetic oligonucleotide
  Antisense strand to SEQ ID NO: 2300750
aaugcuggcacuaaauggu

SEQ ID NO: 2300752 - RNA, 19 nt, Artificial Sequence
  Description of Artificial Sequence: Synthetic oligonucleotide
  Sense strand starting at position 1522 of SEQ ID NO: 1884902
cucaaauuacguggucuua

SEQ ID NO: 2300753 - RNA, 19 nt, Artificial Sequence
  Description of Artificial Sequence: Synthetic oligonucleotide
  Antisense strand to SEQ ID NO: 2300752
uaagaccacguaauuugag

SEQ ID NO: 2300754 - RNA, 19 nt, Artificial Sequence
  Description of Artificial Sequence: Synthetic oligonucleotide
  Sense strand starting at position 1524 of SEQ ID NO: 1884902
caaauuacguggucuuaag

SEQ ID NO: 2300755 - RNA, 19 nt, Artificial Sequence
  Description of Artificial Sequence: Synthetic oligonucleotide
  Antisense strand to SEQ ID NO: 2300754
cuuaagaccacguaauuug

SEQ ID NO: 2300756 - RNA, 19 nt, Artificial Sequence
  Description of Artificial Sequence: Synthetic oligonucleotide
  Sense strand starting at position 1884 of SEQ ID NO: 1884902
gagucuagguccucaaauc

SEQ ID NO: 2300757 - RNA, 19 nt, Artificial Sequence
  Description of Artificial Sequence: Synthetic oligonucleotide
  Antisense strand to SEQ ID NO: 2300756
gauuugaggaccuagacuc

SEQ ID NO: 2300758 - RNA, 19 nt, Artificial Sequence
  Description of Artificial Sequence: Synthetic oligonucleotide
  Sense strand starting at position 1921 of SEQ ID NO: 1884902
ccgugguuggguugaguaa

SEQ ID NO: 2300759 - RNA, 19 nt, Artificial Sequence
  Description of Artificial Sequence: Synthetic oligonucleotide
  Antisense strand to SEQ ID NO: 2300758
uuacucaacccaaccacgg

SEQ ID NO: 2300760 - RNA, 19 nt, Artificial Sequence
  Description of Artificial Sequence: Synthetic oligonucleotide
  Sense strand starting at position 2150 of SEQ ID NO: 1884902
gcugaauagucccuucucu

SEQ ID NO: 2300761 - RNA, 19 nt, Artificial Sequence
  Description of Artificial Sequence: Synthetic oligonucleotide
  Antisense strand to SEQ ID NO: 2300760
agagaagggacuauucagc

SEQ ID NO: 2300762 - RNA, 19 nt, Artificial Sequence
  Description of Artificial Sequence: Synthetic oligonucleotide
  Sense strand starting at position 2437 of SEQ ID NO: 1884902
gugugcucugcuggagaca

SEQ ID NO: 2300763 - RNA, 19 nt, Artificial Sequence
  Description of Artificial Sequence: Synthetic oligonucleotide
  Antisense strand to SEQ ID NO: 2300762
ugucuccagcagagcacac

SEQ ID NO: 2300764 - RNA, 19 nt, Artificial Sequence
  Description of Artificial Sequence: Synthetic oligonucleotide
  Sense strand starting at position 2438 of SEQ ID NO: 1884902
ugugcucugcuggagacaa

SEQ ID NO: 2300765 - RNA, 19 nt, Artificial Sequence
  Description of Artificial Sequence: Synthetic oligonucleotide
  Antisense strand to SEQ ID NO: 2300764
uugucuccagcagagcaca

SEQ ID NO: 2300766 - RNA, 19 nt, Artificial Sequence
  Description of Artificial Sequence: Synthetic oligonucleotide
  Sense strand starting at position 2664 of SEQ ID NO: 1884902
cgguuuacgaaguaaauga

SEQ ID NO: 2300767 - RNA, 19 nt, Artificial Sequence
  Description of Artificial Sequence: Synthetic oligonucleotide
  Antisense strand to SEQ ID NO: 2300766
ucauuuacuucguaaaccg

SEQ ID NO: 2300768 - RNA, 19 nt, Artificial Sequence
  Description of Artificial Sequence: Synthetic oligonucleotide
  Sense strand starting at position 2712 of SEQ ID NO: 1884902
guggguuuguuauugguag

SEQ ID NO: 2300769 - RNA, 19 nt, Artificial Sequence
  Description of Artificial Sequence: Synthetic oligonucleotide
  Antisense strand to SEQ ID NO: 2300768
cuaccaauaacaaacccac

SEQ ID NO: 2300770 - RNA, 19 nt, Artificial Sequence
  Description of Artificial Sequence: Synthetic oligonucleotide
  Sense strand starting at position 3100 of SEQ ID NO: 1884902
ccagcaugugcuuaccuau

SEQ ID NO: 2300771 - RNA, 19 nt, Artificial Sequence
  Description of Artificial Sequence: Synthetic oligonucleotide
  Antisense strand to SEQ ID NO: 2300770
auagguaagcacaugcugg

SEQ ID NO: 2300772 - RNA, 19 nt, Artificial Sequence
  Description of Artificial Sequence: Synthetic oligonucleotide
  Sense strand starting at position 3230 of SEQ ID NO: 1884902
guaguacucucccucauug

SEQ ID NO: 2300773 - RNA, 19 nt, Artificial Sequence
  Description of Artificial Sequence: Synthetic oligonucleotide
  Antisense strand to SEQ ID NO: 2300772
caaugagggagaguacuac

SEQ ID NO: 2300774 - RNA, 19 nt, Artificial Sequence
  Description of Artificial Sequence: Synthetic oligonucleotide
  Sense strand starting at position 3232 of SEQ ID NO: 1884902
aguacucucccucauugau

SEQ ID NO: 2300775 - RNA, 19 nt, Artificial Sequence
  Description of Artificial Sequence: Synthetic oligonucleotide
  Antisense strand to SEQ ID NO: 2300774
aucaaugagggagaguacu

SEQ ID NO: 2300776 - RNA, 19 nt, Artificial Sequence
  Description of Artificial Sequence: Synthetic oligonucleotide
  Sense strand starting at position 3479 of SEQ ID NO: 1884902
gcguuguuggagguguuua

SEQ ID NO: 2300777 - RNA, 19 nt, Artificial Sequence
  Description of Artificial Sequence: Synthetic oligonucleotide
  Antisense strand to SEQ ID NO: 2300776
uaaacaccuccaacaacgc

SEQ ID NO: 2300778 - RNA, 19 nt, Artificial Sequence
  Description of Artificial Sequence: Synthetic oligonucleotide
  Sense strand starting at position 3551 of SEQ ID NO: 1884902
gugcguccuggagagugau

SEQ ID NO: 2300779 - RNA, 19 nt, Artificial Sequence
  Description of Artificial Sequence: Synthetic oligonucleotide
  Antisense strand to SEQ ID NO: 2300778
aucacucuccaggacgcac

SEQ ID NO: 2300780 - RNA, 19 nt, Artificial Sequence
  Description of Artificial Sequence: Synthetic oligonucleotide
  Sense strand starting at position 3554 of SEQ ID NO: 1884902
cguccuggagagugauaau

SEQ ID NO: 2300781 - RNA, 19 nt, Artificial Sequence
  Description of Artificial Sequence: Synthetic oligonucleotide
  Antisense strand to SEQ ID NO: 2300780
auuaucacucuccaggacg

SEQ ID NO: 2300782 - RNA, 19 nt, Artificial Sequence
  Description of Artificial Sequence: Synthetic oligonucleotide
  Sense strand starting at position 3563 of SEQ ID NO: 1884902
gagugauaaugugacggaa

SEQ ID NO: 2300783 - RNA, 19 nt, Artificial Sequence
  Description of Artificial Sequence: Synthetic oligonucleotide
  Antisense strand to SEQ ID NO: 2300782
uuccgucacauuaucacuc

SEQ ID NO: 2300784 - RNA, 19 nt, Artificial Sequence
  Description of Artificial Sequence: Synthetic oligonucleotide
  Sense strand starting at position 27 of SEQ ID NO: 1884903
cagagacuaugccuuguau

SEQ ID NO: 2300785 - RNA, 19 nt, Artificial Sequence
  Description of Artificial Sequence: Synthetic oligonucleotide
  Antisense strand to SEQ ID NO: 2300784
auacaaggcauagucucug

SEQ ID NO: 2300786 - RNA, 19 nt, Artificial Sequence
  Description of Artificial Sequence: Synthetic oligonucleotide
  Sense strand starting at position 82 of SEQ ID NO: 1884903
gagagauucuccuuacugc

SEQ ID NO: 2300787 - RNA, 19 nt, Artificial Sequence
  Description of Artificial Sequence: Synthetic oligonucleotide
  Antisense strand to SEQ ID NO: 2300786
gcaguaaggagaaucucuc

SEQ ID NO: 2300788 - RNA, 19 nt, Artificial Sequence
  Description of Artificial Sequence: Synthetic oligonucleotide
  Sense strand starting at position 111 of SEQ ID NO: 1884903
ccaagauggcagugagaca

SEQ ID NO: 2300789 - RNA, 19 nt, Artificial Sequence
  Description of Artificial Sequence: Synthetic oligonucleotide
  Antisense strand to SEQ ID NO: 2300788
ugucucacugccaucuugg

SEQ ID NO: 2300790 - RNA, 19 nt, Artificial Sequence
  Description of Artificial Sequence: Synthetic oligonucleotide
  Sense strand starting at position 132 of SEQ ID NO: 1884903
acuugcuuggguuacagaa

SEQ ID NO: 2300791 - RNA, 19 nt, Artificial Sequence
  Description of Artificial Sequence: Synthetic oligonucleotide
  Antisense strand to SEQ ID NO: 2300790
uucuguaacccaagcaagu

SEQ ID NO: 2300792 - RNA, 19 nt, Artificial Sequence
  Description of Artificial Sequence: Synthetic oligonucleotide
  Sense strand starting at position 598 of SEQ ID NO: 1884903
ugugucacucaauaaucua

SEQ ID NO: 2300793 - RNA, 19 nt, Artificial Sequence
  Description of Artificial Sequence: Synthetic oligonucleotide
  Antisense strand to SEQ ID NO: 2300792
uagauuauugagugacaca

SEQ ID NO: 2300794 - RNA, 19 nt, Artificial Sequence
  Description of Artificial Sequence: Synthetic oligonucleotide
  Sense strand starting at position 633 of SEQ ID NO: 1884903
guuaauccuguugaaauga

SEQ ID NO: 2300795 - RNA, 19 nt, Artificial Sequence
  Description of Artificial Sequence: Synthetic oligonucleotide
  Antisense strand to SEQ ID NO: 2300794
ucauuucaacaggauuaac

SEQ ID NO: 2300796 - RNA, 19 nt, Artificial Sequence
  Description of Artificial Sequence: Synthetic oligonucleotide
  Sense strand starting at position 674 of SEQ ID NO: 1884903
gccagaggauccucuuuga

SEQ ID NO: 2300797 - RNA, 19 nt, Artificial Sequence
  Description of Artificial Sequence: Synthetic oligonucleotide
  Antisense strand to SEQ ID NO: 2300796
ucaaagaggauccucuggc

SEQ ID NO: 2300798 - RNA, 19 nt, Artificial Sequence
  Description of Artificial Sequence: Synthetic oligonucleotide
  Sense strand starting at position 677 of SEQ ID NO: 1884903
agaggauccucuuugaccu

SEQ ID NO: 2300799 - RNA, 19 nt, Artificial Sequence
  Description of Artificial Sequence: Synthetic oligonucleotide
  Antisense strand to SEQ ID NO: 2300798
aggucaaagaggauccucu

SEQ ID NO: 2300800 - RNA, 19 nt, Artificial Sequence
  Description of Artificial Sequence: Synthetic oligonucleotide
  Sense strand starting at position 715 of SEQ ID NO: 1884903
ggugguaauggaugucaag

SEQ ID NO: 2300801 - RNA, 19 nt, Artificial Sequence
  Description of Artificial Sequence: Synthetic oligonucleotide
  Antisense strand to SEQ ID NO: 2300800
cuugacauccauuaccacc

SEQ ID NO: 2300802 - RNA, 19 nt, Artificial Sequence
  Description of Artificial Sequence: Synthetic oligonucleotide
  Sense strand starting at position 845 of SEQ ID NO: 1884903
uguuuaucaucucuaucag

SEQ ID NO: 2300803 - RNA, 19 nt, Artificial Sequence
  Description of Artificial Sequence: Synthetic oligonucleotide
  Antisense strand to SEQ ID NO: 2300802
cugauagagaugauaaaca

SEQ ID NO: 2300804 - RNA, 19 nt, Artificial Sequence
  Description of Artificial Sequence: Synthetic oligonucleotide
  Sense strand starting at position 846 of SEQ ID NO: 1884903
guuuaucaucucuaucagu

SEQ ID NO: 2300805 - RNA, 19 nt, Artificial Sequence
  Description of Artificial Sequence: Synthetic oligonucleotide
  Antisense strand to SEQ ID NO: 2300804
acugauagagaugauaaac

SEQ ID NO: 2300806 - RNA, 19 nt, Artificial Sequence
  Description of Artificial Sequence: Synthetic oligonucleotide
  Sense strand starting at position 948 of SEQ ID NO: 1884903
acugaaucuugggcauauu

SEQ ID NO: 2300807 - RNA, 19 nt, Artificial Sequence
  Description of Artificial Sequence: Synthetic oligonucleotide
  Antisense strand to SEQ ID NO: 2300806
aauaugcccaagauucagu

SEQ ID NO: 2300808 - RNA, 19 nt, Artificial Sequence
  Description of Artificial Sequence: Synthetic oligonucleotide
  Sense strand starting at position 2001 of SEQ ID NO: 1884903
augcauuaucccgaccuca

SEQ ID NO: 2300809 - RNA, 19 nt, Artificial Sequence
  Description of Artificial Sequence: Synthetic oligonucleotide
  Antisense strand to SEQ ID NO: 2300808
ugaggucgggauaaugcau

SEQ ID NO: 2300810 - RNA, 19 nt, Artificial Sequence
  Description of Artificial Sequence: Synthetic oligonucleotide
  Sense strand starting at position 2098 of SEQ ID NO: 1884903
ggaguaggcucauccuaau

SEQ ID NO: 2300811 - RNA, 19 nt, Artificial Sequence
  Description of Artificial Sequence: Synthetic oligonucleotide
  Antisense strand to SEQ ID NO: 2300810
auuaggaugagccuacucc

SEQ ID NO: 2300812 - RNA, 19 nt, Artificial Sequence
  Description of Artificial Sequence: Synthetic oligonucleotide
  Sense strand starting at position 2147 of SEQ ID NO: 1884903
aggcccuaucuccaaauga

SEQ ID NO: 2300813 - RNA, 19 nt, Artificial Sequence
  Description of Artificial Sequence: Synthetic oligonucleotide
  Antisense strand to SEQ ID NO: 2300812
ucauuuggagauagggccu

SEQ ID NO: 2300814 - RNA, 19 nt, Artificial Sequence
  Description of Artificial Sequence: Synthetic oligonucleotide
  Sense strand starting at position 2289 of SEQ ID NO: 1884903
agugguugugaaagugucu

SEQ ID NO: 2300815 - RNA, 19 nt, Artificial Sequence
  Description of Artificial Sequence: Synthetic oligonucleotide
  Antisense strand to SEQ ID NO: 2300814
agacacuuucacaaccacu

SEQ ID NO: 2300816 - RNA, 19 nt, Artificial Sequence
  Description of Artificial Sequence: Synthetic oligonucleotide
  Sense strand starting at position 2294 of SEQ ID NO: 1884903
uugugaaagugucucaaag

SEQ ID NO: 2300817 - RNA, 19 nt, Artificial Sequence
  Description of Artificial Sequence: Synthetic oligonucleotide
  Antisense strand to SEQ ID NO: 2300816
cuuugagacacuuucacaa

SEQ ID NO: 2300818 - RNA, 19 nt, Artificial Sequence
  Description of Artificial Sequence: Synthetic oligonucleotide
  Sense strand starting at position 2308 of SEQ ID NO: 1884903
caaagaggcuugguuccua

SEQ ID NO: 2300819 - RNA, 19 nt, Artificial Sequence
  Description of Artificial Sequence: Synthetic oligonucleotide
  Antisense strand to SEQ ID NO: 2300818
uaggaaccaagccucuuug

SEQ ID NO: 2300820 - RNA, 19 nt, Artificial Sequence
  Description of Artificial Sequence: Synthetic oligonucleotide
  Sense strand starting at position 2312 of SEQ ID NO: 1884903
gaggcuugguuccuagaag

SEQ ID NO: 2300821 - RNA, 19 nt, Artificial Sequence
  Description of Artificial Sequence: Synthetic oligonucleotide
  Antisense strand to SEQ ID NO: 2300820
cuucuaggaaccaagccuc

SEQ ID NO: 2300822 - RNA, 19 nt, Artificial Sequence
  Description of Artificial Sequence: Synthetic oligonucleotide
  Sense strand starting at position 2337 of SEQ ID NO: 1884903
agacaucugguuugucuga

SEQ ID NO: 2300823 - RNA, 19 nt, Artificial Sequence
  Description of Artificial Sequence: Synthetic oligonucleotide
  Antisense strand to SEQ ID NO: 2300822
ucagacaaaccagaugucu

SEQ ID NO: 2300824 - RNA, 19 nt, Artificial Sequence
  Description of Artificial Sequence: Synthetic oligonucleotide
  Sense strand starting at position 2338 of SEQ ID NO: 1884903
gacaucugguuugucugaa

SEQ ID NO: 2300825 - RNA, 19 nt, Artificial Sequence
  Description of Artificial Sequence: Synthetic oligonucleotide
  Antisense strand to SEQ ID NO: 2300824
uucagacaaaccagauguc

SEQ ID NO: 2300826 - RNA, 19 nt, Artificial Sequence
  Description of Artificial Sequence: Synthetic oligonucleotide
  Sense strand starting at position 2339 of SEQ ID NO: 1884903
acaucugguuugucugaaa

SEQ ID NO: 2300827 - RNA, 19 nt, Artificial Sequence
  Description of Artificial Sequence: Synthetic oligonucleotide
  Antisense strand to SEQ ID NO: 2300826
uuucagacaaaccagaugu

SEQ ID NO: 2300828 - RNA, 19 nt, Artificial Sequence
  Description of Artificial Sequence: Synthetic oligonucleotide
  Sense strand starting at position 2682 of SEQ ID NO: 1884903
guagguguauacucuagag

SEQ ID NO: 2300829 - RNA, 19 nt, Artificial Sequence
  Description of Artificial Sequence: Synthetic oligonucleotide
  Antisense strand to SEQ ID NO: 2300828
cucuagaguauacaccuac

SEQ ID NO: 2300830 - RNA, 19 nt, Artificial Sequence
  Description of Artificial Sequence: Synthetic oligonucleotide
  Sense strand starting at position 2862 of SEQ ID NO: 1884903
gggcauaccguauggauga

SEQ ID NO: 2300831 - RNA, 19 nt, Artificial Sequence
  Description of Artificial Sequence: Synthetic oligonucleotide
  Antisense strand to SEQ ID NO: 2300830
ucauccauacgguaugccc

SEQ ID NO: 2300832 - RNA, 19 nt, Artificial Sequence
  Description of Artificial Sequence: Synthetic oligonucleotide
  Sense strand starting at position 2864 of SEQ ID NO: 1884903
gcauaccguauggaugaau

SEQ ID NO: 2300833 - RNA, 19 nt, Artificial Sequence
  Description of Artificial Sequence: Synthetic oligonucleotide
  Antisense strand to SEQ ID NO: 2300832
auucauccauacgguaugc

SEQ ID NO: 2300834 - RNA, 19 nt, Artificial Sequence
  Description of Artificial Sequence: Synthetic oligonucleotide
  Sense strand starting at position 2956 of SEQ ID NO: 1884903
acgacauauugcuuagaau

SEQ ID NO: 2300835 - RNA, 19 nt, Artificial Sequence
  Description of Artificial Sequence: Synthetic oligonucleotide
  Antisense strand to SEQ ID NO: 2300834
auucuaagcaauaugucgu

SEQ ID NO: 2300836 - RNA, 19 nt, Artificial Sequence
  Description of Artificial Sequence: Synthetic oligonucleotide
  Sense strand starting at position 2957 of SEQ ID NO: 1884903
cgacauauugcuuagaaug

SEQ ID NO: 2300837 - RNA, 19 nt, Artificial Sequence
  Description of Artificial Sequence: Synthetic oligonucleotide
  Antisense strand to SEQ ID NO: 2300836
cauucuaagcaauaugucg

SEQ ID NO: 2300838 - RNA, 19 nt, Artificial Sequence
  Description of Artificial Sequence: Synthetic oligonucleotide
  Sense strand starting at position 2969 of SEQ ID NO: 1884903
uagaaugcauauguaagua

SEQ ID NO: 2300839 - RNA, 19 nt, Artificial Sequence
  Description of Artificial Sequence: Synthetic oligonucleotide
  Antisense strand to SEQ ID NO: 2300838
uacuuacauaugcauucua

SEQ ID NO: 2300840 - RNA, 19 nt, Artificial Sequence
  Description of Artificial Sequence: Synthetic oligonucleotide
  Sense strand starting at position 3003 of SEQ ID NO: 1884903
uaaagaagucugggccuga

SEQ ID NO: 2300841 - RNA, 19 nt, Artificial Sequence
  Description of Artificial Sequence: Synthetic oligonucleotide
  Antisense strand to SEQ ID NO: 2300840
ucaggcccagacuucuuua

SEQ ID NO: 2300842 - RNA, 19 nt, Artificial Sequence
  Description of Artificial Sequence: Synthetic oligonucleotide
  Sense strand starting at position 3004 of SEQ ID NO: 1884903
aaagaagucugggccugau

SEQ ID NO: 2300843 - RNA, 19 nt, Artificial Sequence
  Description of Artificial Sequence: Synthetic oligonucleotide
  Antisense strand to SEQ ID NO: 2300842
aucaggcccagacuucuuu

SEQ ID NO: 2300844 - RNA, 19 nt, Artificial Sequence
  Description of Artificial Sequence: Synthetic oligonucleotide
  Sense strand starting at position 3007 of SEQ ID NO: 1884903
gaagucugggccugauaaa

SEQ ID NO: 2300845 - RNA, 19 nt, Artificial Sequence
  Description of Artificial Sequence: Synthetic oligonucleotide
  Antisense strand to SEQ ID NO: 2300844
uuuaucaggcccagacuuc

SEQ ID NO: 2300846 - RNA, 19 nt, Artificial Sequence
  Description of Artificial Sequence: Synthetic oligonucleotide
  Sense strand starting at position 3008 of SEQ ID NO: 1884903
aagucugggccugauaaac

SEQ ID NO: 2300847 - RNA, 19 nt, Artificial Sequence
  Description of Artificial Sequence: Synthetic oligonucleotide
  Antisense strand to SEQ ID NO: 2300846
guuuaucaggcccagacuu

SEQ ID NO: 2300848 - RNA, 19 nt, Artificial Sequence
  Description of Artificial Sequence: Synthetic oligonucleotide
  Sense strand starting at position 3100 of SEQ ID NO: 1884903
aagaguacugguuaucuua

SEQ ID NO: 2300849 - RNA, 19 nt, Artificial Sequence
  Description of Artificial Sequence: Synthetic oligonucleotide
  Antisense strand to SEQ ID NO: 2300848
uaagauaaccaguacucuu

SEQ ID NO: 2300850 - RNA, 19 nt, Artificial Sequence
  Description of Artificial Sequence: Synthetic oligonucleotide
  Sense strand starting at position 3196 of SEQ ID NO: 1884903
cugagaugccagggacaau

SEQ ID NO: 2300851 - RNA, 19 nt, Artificial Sequence
  Description of Artificial Sequence: Synthetic oligonucleotide
  Antisense strand to SEQ ID NO: 2300850
auugucccuggcaucucag

SEQ ID NO: 2300852 - RNA, 19 nt, Artificial Sequence
  Description of Artificial Sequence: Synthetic oligonucleotide
  Sense strand starting at position 3214 of SEQ ID NO: 1884903
uuucuacucgugggaagau

SEQ ID NO: 2300853 - RNA, 19 nt, Artificial Sequence
  Description of Artificial Sequence: Synthetic oligonucleotide
  Antisense strand to SEQ ID NO: 2300852
aucuucccacgaguagaaa

SEQ ID NO: 2300854 - RNA, 19 nt, Artificial Sequence
  Description of Artificial Sequence: Synthetic oligonucleotide
  Sense strand starting at position 3270 of SEQ ID NO: 1884903
cagagucaauuaguuaaag

SEQ ID NO: 2300855 - RNA, 19 nt, Artificial Sequence
  Description of Artificial Sequence: Synthetic oligonucleotide
  Antisense strand to SEQ ID NO: 2300854
cuuuaacuaauugacucug

SEQ ID NO: 2300856 - RNA, 19 nt, Artificial Sequence
  Description of Artificial Sequence: Synthetic oligonucleotide
  Sense strand starting at position 3281 of SEQ ID NO: 1884903
aguuaaagacucugacauc

SEQ ID NO: 2300857 - RNA, 19 nt, Artificial Sequence
  Description of Artificial Sequence: Synthetic oligonucleotide
  Antisense strand to SEQ ID NO: 2300856
gaugucagagucuuuaacu

SEQ ID NO: 2300858 - RNA, 19 nt, Artificial Sequence
  Description of Artificial Sequence: Synthetic oligonucleotide
  Sense strand starting at position 3790 of SEQ ID NO: 1884903
uacagcaaucucgggaaau

SEQ ID NO: 2300859 - RNA, 19 nt, Artificial Sequence
  Description of Artificial Sequence: Synthetic oligonucleotide
  Antisense strand to SEQ ID NO: 2300858
auuucccgagauugcugua

SEQ ID NO: 2300860 - RNA, 19 nt, Artificial Sequence
  Description of Artificial Sequence: Synthetic oligonucleotide
  Sense strand starting at position 3792 of SEQ ID NO: 1884903
cagcaaucucgggaaauug

SEQ ID NO: 2300861 - RNA, 19 nt, Artificial Sequence
  Description of Artificial Sequence: Synthetic oligonucleotide
  Antisense strand to SEQ ID NO: 2300860
caauuucccgagauugcug

SEQ ID NO: 2300862 - RNA, 19 nt, Artificial Sequence
  Description of Artificial Sequence: Synthetic oligonucleotide
  Sense strand starting at position 3868 of SEQ ID NO: 1884903
gacccuccuguuggaaaga

SEQ ID NO: 2300863 - RNA, 19 nt, Artificial Sequence
  Description of Artificial Sequence: Synthetic oligonucleotide
  Antisense strand to SEQ ID NO: 2300862
ucuuuccaacaggaggguc

SEQ ID NO: 2300864 - RNA, 19 nt, Artificial Sequence
  Description of Artificial Sequence: Synthetic oligonucleotide
  Sense strand starting at position 483 of SEQ ID NO: 1884904
auagauaggucagcuuuaa

SEQ ID NO: 2300865 - RNA, 19 nt, Artificial Sequence
  Description of Artificial Sequence: Synthetic oligonucleotide
  Antisense strand to SEQ ID NO: 2300864
uuaaagcugaccuaucuau

SEQ ID NO: 2300866 - RNA, 19 nt, Artificial Sequence
  Description of Artificial Sequence: Synthetic oligonucleotide
  Sense strand starting at position 495 of SEQ ID NO: 1884904
gcuuuaauugccuuuccgu

SEQ ID NO: 2300867 - RNA, 19 nt, Artificial Sequence
  Description of Artificial Sequence: Synthetic oligonucleotide
  Antisense strand to SEQ ID NO: 2300866
acggaaaggcaauuaaagc

SEQ ID NO: 2300868 - RNA, 19 nt, Artificial Sequence
  Description of Artificial Sequence: Synthetic oligonucleotide
  Sense strand starting at position 501 of SEQ ID NO: 1884904
auugccuuuccguaugaaa

SEQ ID NO: 2300869 - RNA, 19 nt, Artificial Sequence
  Description of Artificial Sequence: Synthetic oligonucleotide
  Antisense strand to SEQ ID NO: 2300868
uuucauacggaaaggcaau

SEQ ID NO: 2300870 - RNA, 19 nt, Artificial Sequence
  Description of Artificial Sequence: Synthetic oligonucleotide
  Sense strand starting at position 681 of SEQ ID NO: 1884904
uguucuaagcuacaagauu

SEQ ID NO: 2300871 - RNA, 19 nt, Artificial Sequence
  Description of Artificial Sequence: Synthetic oligonucleotide
  Antisense strand to SEQ ID NO: 2300870
aaucuuguagcuuagaaca

SEQ ID NO: 2300872 - RNA, 19 nt, Artificial Sequence
  Description of Artificial Sequence: Synthetic oligonucleotide
  Sense strand starting at position 981 of SEQ ID NO: 1884904
guaacuugugcucaggacu

SEQ ID NO: 2300873 - RNA, 19 nt, Artificial Sequence
  Description of Artificial Sequence: Synthetic oligonucleotide
  Antisense strand to SEQ ID NO: 2300872
aguccugagcacaaguuac

SEQ ID NO: 2300874 - RNA, 19 nt, Artificial Sequence
  Description of Artificial Sequence: Synthetic oligonucleotide
  Sense strand starting at position 1063 of SEQ ID NO: 1884904
uugucuugauuucccagua

SEQ ID NO: 2300875 - RNA, 19 nt, Artificial Sequence
  Description of Artificial Sequence: Synthetic oligonucleotide
  Antisense strand to SEQ ID NO: 2300874
uacugggaaaucaagacaa

SEQ ID NO: 2300876 - RNA, 19 nt, Artificial Sequence
  Description of Artificial Sequence: Synthetic oligonucleotide
  Sense strand starting at position 1092 of SEQ ID NO: 1884904
ccuaaagcuugacugaguu

SEQ ID NO: 2300877 - RNA, 19 nt, Artificial Sequence
  Description of Artificial Sequence: Synthetic oligonucleotide
  Antisense strand to SEQ ID NO: 2300876
aacucagucaagcuuuagg

SEQ ID NO: 2300878 - RNA, 19 nt, Artificial Sequence
  Description of Artificial Sequence: Synthetic oligonucleotide
  Sense strand starting at position 1096 of SEQ ID NO: 1884904
aagcuugacugaguuuaug

SEQ ID NO: 2300879 - RNA, 19 nt, Artificial Sequence
  Description of Artificial Sequence: Synthetic oligonucleotide
  Antisense strand to SEQ ID NO: 2300878
cauaaacucagucaagcuu

SEQ ID NO: 2300880 - RNA, 19 nt, Artificial Sequence
  Description of Artificial Sequence: Synthetic oligonucleotide
  Sense strand starting at position 1228 of SEQ ID NO: 1884904
uguguuggguggcuaauuu

SEQ ID NO: 2300881 - RNA, 19 nt, Artificial Sequence
  Description of Artificial Sequence: Synthetic oligonucleotide
  Antisense strand to SEQ ID NO: 2300880
aaauuagccacccaacaca

SEQ ID NO: 2300882 - RNA, 19 nt, Artificial Sequence
  Description of Artificial Sequence: Synthetic oligonucleotide
  Sense strand starting at position 1408 of SEQ ID NO: 1884904
ccuagauaguucuugaguu

SEQ ID NO: 2300883 - RNA, 19 nt, Artificial Sequence
  Description of Artificial Sequence: Synthetic oligonucleotide
  Antisense strand to SEQ ID NO: 2300882
aacucaagaacuaucuagg

SEQ ID NO: 2300884 - RNA, 19 nt, Artificial Sequence
  Description of Artificial Sequence: Synthetic oligonucleotide
  Sense strand starting at position 1465 of SEQ ID NO: 1884904
ccugaaacuucucugauag

SEQ ID NO: 2300885 - RNA, 19 nt, Artificial Sequence
  Description of Artificial Sequence: Synthetic oligonucleotide
  Antisense strand to SEQ ID NO: 2300884
cuaucagagaaguuucagg

SEQ ID NO: 2300886 - RNA, 19 nt, Artificial Sequence
  Description of Artificial Sequence: Synthetic oligonucleotide
  Sense strand starting at position 1466 of SEQ ID NO: 1884904
cugaaacuucucugauagu

SEQ ID NO: 2300887 - RNA, 19 nt, Artificial Sequence
  Description of Artificial Sequence: Synthetic oligonucleotide
  Antisense strand to SEQ ID NO: 2300886
acuaucagagaaguuucag

SEQ ID NO: 2300888 - RNA, 19 nt, Artificial Sequence
  Description of Artificial Sequence: Synthetic oligonucleotide
  Sense strand starting at position 1671 of SEQ ID NO: 1884904
guggguguccugaauucgu

SEQ ID NO: 2300889 - RNA, 19 nt, Artificial Sequence
  Description of Artificial Sequence: Synthetic oligonucleotide
  Antisense strand to SEQ ID NO: 2300888
acgaauucaggacacccac

SEQ ID NO: 2300890 - RNA, 19 nt, Artificial Sequence
  Description of Artificial Sequence: Synthetic oligonucleotide
  Sense strand starting at position 1687 of SEQ ID NO: 1884904
cguucaugugaauacagga

SEQ ID NO: 2300891 - RNA, 19 nt, Artificial Sequence
  Description of Artificial Sequence: Synthetic oligonucleotide
  Antisense strand to SEQ ID NO: 2300890
uccuguauucacaugaacg

SEQ ID NO: 2300892 - RNA, 19 nt, Artificial Sequence
  Description of Artificial Sequence: Synthetic oligonucleotide
  Sense strand starting at position 1731 of SEQ ID NO: 1884904
gugagugcucgauacacaa

SEQ ID NO: 2300893 - RNA, 19 nt, Artificial Sequence
  Description of Artificial Sequence: Synthetic oligonucleotide
  Antisense strand to SEQ ID NO: 2300892
uuguguaucgagcacucac

SEQ ID NO: 2300894 - RNA, 19 nt, Artificial Sequence
  Description of Artificial Sequence: Synthetic oligonucleotide
  Sense strand starting at position 1841 of SEQ ID NO: 1884904
aacagaaaguuugcuuaga

SEQ ID NO: 2300895 - RNA, 19 nt, Artificial Sequence
  Description of Artificial Sequence: Synthetic oligonucleotide
  Antisense strand to SEQ ID NO: 2300894
ucuaagcaaacuuucuguu

SEQ ID NO: 2300896 - RNA, 19 nt, Artificial Sequence
  Description of Artificial Sequence: Synthetic oligonucleotide
  Sense strand starting at position 1842 of SEQ ID NO: 1884904
acagaaaguuugcuuagag

SEQ ID NO: 2300897 - RNA, 19 nt, Artificial Sequence
  Description of Artificial Sequence: Synthetic oligonucleotide
  Antisense strand to SEQ ID NO: 2300896
cucuaagcaaacuuucugu

SEQ ID NO: 2300898 - RNA, 19 nt, Artificial Sequence
  Description of Artificial Sequence: Synthetic oligonucleotide
  Sense strand starting at position 1843 of SEQ ID NO: 1884904
cagaaaguuugcuuagagu

SEQ ID NO: 2300899 - RNA, 19 nt, Artificial Sequence
  Description of Artificial Sequence: Synthetic oligonucleotide
  Antisense strand to SEQ ID NO: 2300898
acucuaagcaaacuuucug

SEQ ID NO: 2300900 - RNA, 19 nt, Artificial Sequence
  Description of Artificial Sequence: Synthetic oligonucleotide
  Sense strand starting at position 1993 of SEQ ID NO: 1884904
ggcccuaagcauuagacca

SEQ ID NO: 2300901 - RNA, 19 nt, Artificial Sequence
  Description of Artificial Sequence: Synthetic oligonucleotide
  Antisense strand to SEQ ID NO: 2300900
uggucuaaugcuuagggcc

SEQ ID NO: 2300902 - RNA, 19 nt, Artificial Sequence
  Description of Artificial Sequence: Synthetic oligonucleotide
  Sense strand starting at position 2018 of SEQ ID NO: 1884904
cuaaguagugguuaaagag

SEQ ID NO: 2300903 - RNA, 19 nt, Artificial Sequence
  Description of Artificial Sequence: Synthetic oligonucleotide
  Antisense strand to SEQ ID NO: 2300902
cucuuuaaccacuacuuag

SEQ ID NO: 2300904 - RNA, 19 nt, Artificial Sequence
  Description of Artificial Sequence: Synthetic oligonucleotide
  Sense strand starting at position 2607 of SEQ ID NO: 1884904
gacugauuucucugugucu

SEQ ID NO: 2300905 - RNA, 19 nt, Artificial Sequence
  Description of Artificial Sequence: Synthetic oligonucleotide
  Antisense strand to SEQ ID NO: 2300904
agacacagagaaaucaguc

SEQ ID NO: 2300906 - RNA, 19 nt, Artificial Sequence
  Description of Artificial Sequence: Synthetic oligonucleotide
  Sense strand starting at position 2609 of SEQ ID NO: 1884904
cugauuucucugugucugu

SEQ ID NO: 2300907 - RNA, 19 nt, Artificial Sequence
  Description of Artificial Sequence: Synthetic oligonucleotide
  Antisense strand to SEQ ID NO: 2300906
acagacacagagaaaucag

SEQ ID NO: 2300908 - RNA, 19 nt, Artificial Sequence
  Description of Artificial Sequence: Synthetic oligonucleotide
  Sense strand starting at position 2610 of SEQ ID NO: 1884904
ugauuucucugugucuguu

SEQ ID NO: 2300909 - RNA, 19 nt, Artificial Sequence
  Description of Artificial Sequence: Synthetic oligonucleotide
  Antisense strand to SEQ ID NO: 2300908
aacagacacagagaaauca

SEQ ID NO: 2300910 - RNA, 19 nt, Artificial Sequence
  Description of Artificial Sequence: Synthetic oligonucleotide
  Sense strand starting at position 2796 of SEQ ID NO: 1884904
gagaguagggcagguuaaa

SEQ ID NO: 2300911 - RNA, 19 nt, Artificial Sequence
  Description of Artificial Sequence: Synthetic oligonucleotide
  Antisense strand to SEQ ID NO: 2300910
uuuaaccugcccuacucuc

SEQ ID NO: 2300912 - RNA, 19 nt, Artificial Sequence
  Description of Artificial Sequence: Synthetic oligonucleotide
  Sense strand starting at position 2880 of SEQ ID NO: 1884904
gggcuaauagcacagaguu

SEQ ID NO: 2300913 - RNA, 19 nt, Artificial Sequence
  Description of Artificial Sequence: Synthetic oligonucleotide
  Antisense strand to SEQ ID NO: 2300912
aacucugugcuauuagccc

SEQ ID NO: 2300914 - RNA, 19 nt, Artificial Sequence
  Description of Artificial Sequence: Synthetic oligonucleotide
  Sense strand starting at position 2893 of SEQ ID NO: 1884904
agaguuaucucaccagcag

SEQ ID NO: 2300915 - RNA, 19 nt, Artificial Sequence
  Description of Artificial Sequence: Synthetic oligonucleotide
  Antisense strand to SEQ ID NO: 2300914
cugcuggugagauaacucu

SEQ ID NO: 2300916 - RNA, 19 nt, Artificial Sequence
  Description of Artificial Sequence: Synthetic oligonucleotide
  Sense strand starting at position 2894 of SEQ ID NO: 1884904
gaguuaucucaccagcagu

SEQ ID NO: 2300917 - RNA, 19 nt, Artificial Sequence
  Description of Artificial Sequence: Synthetic oligonucleotide
  Antisense strand to SEQ ID NO: 2300916
acugcuggugagauaacuc

SEQ ID NO: 2300918 - RNA, 19 nt, Artificial Sequence
  Description of Artificial Sequence: Synthetic oligonucleotide
  Sense strand starting at position 2945 of SEQ ID NO: 1884904
aguggcuaugagcaauagu

SEQ ID NO: 2300919 - RNA, 19 nt, Artificial Sequence
  Description of Artificial Sequence: Synthetic oligonucleotide
  Antisense strand to SEQ ID NO: 2300918
acuauugcucauagccacu

SEQ ID NO: 2300920 - RNA, 19 nt, Artificial Sequence
  Description of Artificial Sequence: Synthetic oligonucleotide
  Sense strand starting at position 2948 of SEQ ID NO: 1884904
ggcuaugagcaauaguuuc

SEQ ID NO: 2300921 - RNA, 19 nt, Artificial Sequence
  Description of Artificial Sequence: Synthetic oligonucleotide
  Antisense strand to SEQ ID NO: 2300920
gaaacuauugcucauagcc

SEQ ID NO: 2300922 - RNA, 19 nt, Artificial Sequence
  Description of Artificial Sequence: Synthetic oligonucleotide
  Sense strand starting at position 2981 of SEQ ID NO: 1884904
agggcagugccacaguaau

SEQ ID NO: 2300923 - RNA, 19 nt, Artificial Sequence
  Description of Artificial Sequence: Synthetic oligonucleotide
  Antisense strand to SEQ ID NO: 2300922
auuacuguggcacugcccu

SEQ ID NO: 2300924 - RNA, 19 nt, Artificial Sequence
  Description of Artificial Sequence: Synthetic oligonucleotide
  Sense strand starting at position 2989 of SEQ ID NO: 1884904
gccacaguaaucugggaac

SEQ ID NO: 2300925 - RNA, 19 nt, Artificial Sequence
  Description of Artificial Sequence: Synthetic oligonucleotide
  Antisense strand to SEQ ID NO: 2300924
guucccagauuacuguggc

SEQ ID NO: 2300926 - RNA, 19 nt, Artificial Sequence
  Description of Artificial Sequence: Synthetic oligonucleotide
  Sense strand starting at position 2991 of SEQ ID NO: 1884904
cacaguaaucugggaacuu

SEQ ID NO: 2300927 - RNA, 19 nt, Artificial Sequence
  Description of Artificial Sequence: Synthetic oligonucleotide
  Antisense strand to SEQ ID NO: 2300926
aaguucccagauuacugug

SEQ ID NO: 2300928 - RNA, 19 nt, Artificial Sequence
  Description of Artificial Sequence: Synthetic oligonucleotide
  Sense strand starting at position 3119 of SEQ ID NO: 1884904
accauuucuuagggauaag

SEQ ID NO: 2300929 - RNA, 19 nt, Artificial Sequence
  Description of Artificial Sequence: Synthetic oligonucleotide
  Antisense strand to SEQ ID NO: 2300928
cuuaucccuaagaaauggu

SEQ ID NO: 2300930 - RNA, 19 nt, Artificial Sequence
  Description of Artificial Sequence: Synthetic oligonucleotide
  Sense strand starting at position 3130 of SEQ ID NO: 1884904
gggauaagcugggaaauuu

SEQ ID NO: 2300931 - RNA, 19 nt, Artificial Sequence
  Description of Artificial Sequence: Synthetic oligonucleotide
  Antisense strand to SEQ ID NO: 2300930
aaauuucccagcuuauccc

SEQ ID NO: 2300932 - RNA, 19 nt, Artificial Sequence
  Description of Artificial Sequence: Synthetic oligonucleotide
  Sense strand starting at position 3309 of SEQ ID NO: 1884904
ugcauuggucuggacagga

SEQ ID NO: 2300933 - RNA, 19 nt, Artificial Sequence
  Description of Artificial Sequence: Synthetic oligonucleotide
  Antisense strand to SEQ ID NO: 2300932
uccuguccagaccaaugca

SEQ ID NO: 2300934 - RNA, 19 nt, Artificial Sequence
  Description of Artificial Sequence: Synthetic oligonucleotide
  Sense strand starting at position 3508 of SEQ ID NO: 1884904
ggaagcaguguguaucuau

SEQ ID NO: 2300935 - RNA, 19 nt, Artificial Sequence
  Description of Artificial Sequence: Synthetic oligonucleotide
  Antisense strand to SEQ ID NO: 2300934
auagauacacacugcuucc

SEQ ID NO: 2300936 - RNA, 19 nt, Artificial Sequence
  Description of Artificial Sequence: Synthetic oligonucleotide
  Sense strand starting at position 3517 of SEQ ID NO: 1884904
guguaucuaugauuauauc

SEQ ID NO: 2300937 - RNA, 19 nt, Artificial Sequence
  Description of Artificial Sequence: Synthetic oligonucleotide
  Antisense strand to SEQ ID NO: 2300936
gauauaaucauagauacac

SEQ ID NO: 2300938 - RNA, 19 nt, Artificial Sequence
  Description of Artificial Sequence: Synthetic oligonucleotide
  Sense strand starting at position 3523 of SEQ ID NO: 1884904
cuaugauuauaucucuguu

SEQ ID NO: 2300939 - RNA, 19 nt, Artificial Sequence
  Description of Artificial Sequence: Synthetic oligonucleotide
  Antisense strand to SEQ ID NO: 2300938
aacagagauauaaucauag

SEQ ID NO: 2300940 - RNA, 19 nt, Artificial Sequence
  Description of Artificial Sequence: Synthetic oligonucleotide
  Sense strand starting at position 3627 of SEQ ID NO: 1884904
uggccuuugacagguagga

SEQ ID NO: 2300941 - RNA, 19 nt, Artificial Sequence
  Description of Artificial Sequence: Synthetic oligonucleotide
  Antisense strand to SEQ ID NO: 2300940
uccuaccugucaaaggcca

SEQ ID NO: 2300942 - RNA, 19 nt, Artificial Sequence
  Description of Artificial Sequence: Synthetic oligonucleotide
  Sense strand starting at position 3883 of SEQ ID NO: 1884904
ugccuuauuuaugcugcaa

SEQ ID NO: 2300943 - RNA, 19 nt, Artificial Sequence
  Description of Artificial Sequence: Synthetic oligonucleotide
  Antisense strand to SEQ ID NO: 2300942
uugcagcauaaauaaggca

SEQ ID NO: 2300944 - RNA, 19 nt, Artificial Sequence
  Description of Artificial Sequence: Synthetic oligonucleotide
  Sense strand starting at position 21 of SEQ ID NO: 1884905
cugagcagucuccagaguu

SEQ ID NO: 2300945 - RNA, 19 nt, Artificial Sequence
  Description of Artificial Sequence: Synthetic oligonucleotide
  Antisense strand to SEQ ID NO: 2300944
aacucuggagacugcucag

SEQ ID NO: 2300946 - RNA, 19 nt, Artificial Sequence
  Description of Artificial Sequence: Synthetic oligonucleotide
  Sense strand starting at position 167 of SEQ ID NO: 1884905
ccuugugccaaugaggaaa

SEQ ID NO: 2300947 - RNA, 19 nt, Artificial Sequence
  Description of Artificial Sequence: Synthetic oligonucleotide
  Antisense strand to SEQ ID NO: 2300946
uuuccucauuggcacaagg

SEQ ID NO: 2300948 - RNA, 19 nt, Artificial Sequence
  Description of Artificial Sequence: Synthetic oligonucleotide
  Sense strand starting at position 214 of SEQ ID NO: 1884905
gagcucugacucgagucaa

SEQ ID NO: 2300949 - RNA, 19 nt, Artificial Sequence
  Description of Artificial Sequence: Synthetic oligonucleotide
  Antisense strand to SEQ ID NO: 2300948
uugacucgagucagagcuc

SEQ ID NO: 2300950 - RNA, 19 nt, Artificial Sequence
  Description of Artificial Sequence: Synthetic oligonucleotide
  Sense strand starting at position 218 of SEQ ID NO: 1884905
ucugacucgagucaaugaa

SEQ ID NO: 2300951 - RNA, 19 nt, Artificial Sequence
  Description of Artificial Sequence: Synthetic oligonucleotide
  Antisense strand to SEQ ID NO: 2300950
uucauugacucgagucaga

SEQ ID NO: 2300952 - RNA, 19 nt, Artificial Sequence
  Description of Artificial Sequence: Synthetic oligonucleotide
  Sense strand starting at position 258 of SEQ ID NO: 1884905
gcuuguugggugagaaguu

SEQ ID NO: 2300953 - RNA, 19 nt, Artificial Sequence
  Description of Artificial Sequence: Synthetic oligonucleotide
  Antisense strand to SEQ ID NO: 2300952
aacuucucacccaacaagc

SEQ ID NO: 2300954 - RNA, 19 nt, Artificial Sequence
  Description of Artificial Sequence: Synthetic oligonucleotide
  Sense strand starting at position 267 of SEQ ID NO: 1884905
gugagaaguuuccugguga

SEQ ID NO: 2300955 - RNA, 19 nt, Artificial Sequence
  Description of Artificial Sequence: Synthetic oligonucleotide
  Antisense strand to SEQ ID NO: 2300954
ucaccaggaaacuucucac

SEQ ID NO: 2300956 - RNA, 19 nt, Artificial Sequence
  Description of Artificial Sequence: Synthetic oligonucleotide
  Sense strand starting at position 321 of SEQ ID NO: 1884905
gguggacucacugauuagu

SEQ ID NO: 2300957 - RNA, 19 nt, Artificial Sequence
  Description of Artificial Sequence: Synthetic oligonucleotide
  Antisense strand to SEQ ID NO: 2300956
acuaaucagugaguccacc

SEQ ID NO: 2300958 - RNA, 19 nt, Artificial Sequence
  Description of Artificial Sequence: Synthetic oligonucleotide
  Sense strand starting at position 323 of SEQ ID NO: 1884905
uggacucacugauuaguga

SEQ ID NO: 2300959 - RNA, 19 nt, Artificial Sequence
  Description of Artificial Sequence: Synthetic oligonucleotide
  Antisense strand to SEQ ID NO: 2300958
ucacuaaucagugagucca

SEQ ID NO: 2300960 - RNA, 19 nt, Artificial Sequence
  Description of Artificial Sequence: Synthetic oligonucleotide
  Sense strand starting at position 535 of SEQ ID NO: 1884905
ccaccuguccaggguugaa

SEQ ID NO: 2300961 - RNA, 19 nt, Artificial Sequence
  Description of Artificial Sequence: Synthetic oligonucleotide
  Antisense strand to SEQ ID NO: 2300960
uucaacccuggacaggugg

SEQ ID NO: 2300962 - RNA, 19 nt, Artificial Sequence
  Description of Artificial Sequence: Synthetic oligonucleotide
  Sense strand starting at position 699 of SEQ ID NO: 1884905
gaauaaucacagugaguac

SEQ ID NO: 2300963 - RNA, 19 nt, Artificial Sequence
  Description of Artificial Sequence: Synthetic oligonucleotide
  Antisense strand to SEQ ID NO: 2300962
guacucacugugauuauuc

SEQ ID NO: 2300964 - RNA, 19 nt, Artificial Sequence
  Description of Artificial Sequence: Synthetic oligonucleotide
  Sense strand starting at position 733 of SEQ ID NO: 1884905
uggauacaauaagagaaua

SEQ ID NO: 2300965 - RNA, 19 nt, Artificial Sequence
  Description of Artificial Sequence: Synthetic oligonucleotide
  Antisense strand to SEQ ID NO: 2300964
uauucucuuauuguaucca

SEQ ID NO: 2300966 - RNA, 19 nt, Artificial Sequence
  Description of Artificial Sequence: Synthetic oligonucleotide
  Sense strand starting at position 892 of SEQ ID NO: 1884905
auaguaauuaugugagaga

SEQ ID NO: 2300967 - RNA, 19 nt, Artificial Sequence
  Description of Artificial Sequence: Synthetic oligonucleotide
  Antisense strand to SEQ ID NO: 2300966
ucucucacauaauuacuau

SEQ ID NO: 2300968 - RNA, 19 nt, Artificial Sequence
  Description of Artificial Sequence: Synthetic oligonucleotide
  Sense strand starting at position 1129 of SEQ ID NO: 1884905
guaguauguguauauagau

SEQ ID NO: 2300969 - RNA, 19 nt, Artificial Sequence
  Description of Artificial Sequence: Synthetic oligonucleotide
  Antisense strand to SEQ ID NO: 2300968
aucuauauacacauacuac

SEQ ID NO: 2300970 - RNA, 19 nt, Artificial Sequence
  Description of Artificial Sequence: Synthetic oligonucleotide
  Sense strand starting at position 1322 of SEQ ID NO: 1884905
uaaggaaacugagucaagu

SEQ ID NO: 2300971 - RNA, 19 nt, Artificial Sequence
  Description of Artificial Sequence: Synthetic oligonucleotide
  Antisense strand to SEQ ID NO: 2300970
acuugacucaguuuccuua

SEQ ID NO: 2300972 - RNA, 19 nt, Artificial Sequence
  Description of Artificial Sequence: Synthetic oligonucleotide
  Sense strand starting at position 1450 of SEQ ID NO: 1884905
uacugucccuggucagaga

SEQ ID NO: 2300973 - RNA, 19 nt, Artificial Sequence
  Description of Artificial Sequence: Synthetic oligonucleotide
  Antisense strand to SEQ ID NO: 2300972
ucucugaccagggacagua

SEQ ID NO: 2300974 - RNA, 19 nt, Artificial Sequence
  Description of Artificial Sequence: Synthetic oligonucleotide
  Sense strand starting at position 1559 of SEQ ID NO: 1884905
auauaugauuucuacugag

SEQ ID NO: 2300975 - RNA, 19 nt, Artificial Sequence
  Description of Artificial Sequence: Synthetic oligonucleotide
  Antisense strand to SEQ ID NO: 2300974
cucaguagaaaucauauau

SEQ ID NO: 2300976 - RNA, 19 nt, Artificial Sequence
  Description of Artificial Sequence: Synthetic oligonucleotide
  Sense strand starting at position 1747 of SEQ ID NO: 1884905
aguggucuuccagggaaga

SEQ ID NO: 2300977 - RNA, 19 nt, Artificial Sequence
  Description of Artificial Sequence: Synthetic oligonucleotide
  Antisense strand to SEQ ID NO: 2300976
ucuucccuggaagaccacu

SEQ ID NO: 2300978 - RNA, 19 nt, Artificial Sequence
  Description of Artificial Sequence: Synthetic oligonucleotide
  Sense strand starting at position 1748 of SEQ ID NO: 1884905
guggucuuccagggaagau

SEQ ID NO: 2300979 - RNA, 19 nt, Artificial Sequence
  Description of Artificial Sequence: Synthetic oligonucleotide
  Antisense strand to SEQ ID NO: 2300978
aucuucccuggaagaccac

SEQ ID NO: 2300980 - RNA, 19 nt, Artificial Sequence
  Description of Artificial Sequence: Synthetic oligonucleotide
  Sense strand starting at position 1757 of SEQ ID NO: 1884905
cagggaagauccucuugua

SEQ ID NO: 2300981 - RNA, 19 nt, Artificial Sequence
  Description of Artificial Sequence: Synthetic oligonucleotide
  Antisense strand to SEQ ID NO: 2300980
uacaagaggaucuucccug

SEQ ID NO: 2300982 - RNA, 19 nt, Artificial Sequence
  Description of Artificial Sequence: Synthetic oligonucleotide
  Sense strand starting at position 2062 of SEQ ID NO: 1884905
cggcauugagaguaucuga

SEQ ID NO: 2300983 - RNA, 19 nt, Artificial Sequence
  Description of Artificial Sequence: Synthetic oligonucleotide
  Antisense strand to SEQ ID NO: 2300982
ucagauacucucaaugccg

SEQ ID NO: 2300984 - RNA, 19 nt, Artificial Sequence
  Description of Artificial Sequence: Synthetic oligonucleotide
  Sense strand starting at position 2065 of SEQ ID NO: 1884905
cauugagaguaucugauug

SEQ ID NO: 2300985 - RNA, 19 nt, Artificial Sequence
  Description of Artificial Sequence: Synthetic oligonucleotide
  Antisense strand to SEQ ID NO: 2300984
caaucagauacucucaaug

SEQ ID NO: 2300986 - RNA, 19 nt, Artificial Sequence
  Description of Artificial Sequence: Synthetic oligonucleotide
  Sense strand starting at position 2069 of SEQ ID NO: 1884905
gagaguaucugauuggcca

SEQ ID NO: 2300987 - RNA, 19 nt, Artificial Sequence
  Description of Artificial Sequence: Synthetic oligonucleotide
  Antisense strand to SEQ ID NO: 2300986
uggccaaucagauacucuc

SEQ ID NO: 2300988 - RNA, 19 nt, Artificial Sequence
  Description of Artificial Sequence: Synthetic oligonucleotide
  Sense strand starting at position 2134 of SEQ ID NO: 1884905
uggaacaaucagugcugaa

SEQ ID NO: 2300989 - RNA, 19 nt, Artificial Sequence
  Description of Artificial Sequence: Synthetic oligonucleotide
  Antisense strand to SEQ ID NO: 2300988
uucagcacugauuguucca

SEQ ID NO: 2300990 - RNA, 19 nt, Artificial Sequence
  Description of Artificial Sequence: Synthetic oligonucleotide
  Sense strand starting at position 2197 of SEQ ID NO: 1884905
cggagaucaucuccaaaga

SEQ ID NO: 2300991 - RNA, 19 nt, Artificial Sequence
  Description of Artificial Sequence: Synthetic oligonucleotide
  Antisense strand to SEQ ID NO: 2300990
ucuuuggagaugaucuccg

SEQ ID NO: 2300992 - RNA, 19 nt, Artificial Sequence
  Description of Artificial Sequence: Synthetic oligonucleotide
  Sense strand starting at position 2337 of SEQ ID NO: 1884905
gcaaauacagggcauauua

SEQ ID NO: 2300993 - RNA, 19 nt, Artificial Sequence
  Description of Artificial Sequence: Synthetic oligonucleotide
  Antisense strand to SEQ ID NO: 2300992
uaauaugcccuguauuugc

SEQ ID NO: 2300994 - RNA, 19 nt, Artificial Sequence
  Description of Artificial Sequence: Synthetic oligonucleotide
  Sense strand starting at position 2374 of SEQ ID NO: 1884905
caaauaugugaguguauug

SEQ ID NO: 2300995 - RNA, 19 nt, Artificial Sequence
  Description of Artificial Sequence: Synthetic oligonucleotide
  Antisense strand to SEQ ID NO: 2300994
caauacacucacauauuug

SEQ ID NO: 2300996 - RNA, 19 nt, Artificial Sequence
  Description of Artificial Sequence: Synthetic oligonucleotide
  Sense strand starting at position 2481 of SEQ ID NO: 1884905
agcucuauuguauauauga

SEQ ID NO: 2300997 - RNA, 19 nt, Artificial Sequence
  Description of Artificial Sequence: Synthetic oligonucleotide
  Antisense strand to SEQ ID NO: 2300996
ucauauauacaauagagcu

SEQ ID NO: 2300998 - RNA, 19 nt, Artificial Sequence
  Description of Artificial Sequence: Synthetic oligonucleotide
  Sense strand starting at position 2559 of SEQ ID NO: 1884905
auuaguuguccauaucuaa

SEQ ID NO: 2300999 - RNA, 19 nt, Artificial Sequence
  Description of Artificial Sequence: Synthetic oligonucleotide
  Antisense strand to SEQ ID NO: 2300998
uuagauauggacaacuaau

SEQ ID NO: 2301000 - RNA, 19 nt, Artificial Sequence
  Description of Artificial Sequence: Synthetic oligonucleotide
  Sense strand starting at position 2562 of SEQ ID NO: 1884905
aguuguccauaucuaaaga

SEQ ID NO: 2301001 - RNA, 19 nt, Artificial Sequence
  Description of Artificial Sequence: Synthetic oligonucleotide
  Antisense strand to SEQ ID NO: 2301000
ucuuuagauauggacaacu

SEQ ID NO: 2301002 - RNA, 19 nt, Artificial Sequence
  Description of Artificial Sequence: Synthetic oligonucleotide
  Sense strand starting at position 2644 of SEQ ID NO: 1884905
guagguaacaucuauguag

SEQ ID NO: 2301003 - RNA, 19 nt, Artificial Sequence
  Description of Artificial Sequence: Synthetic oligonucleotide
  Antisense strand to SEQ ID NO: 2301002
cuacauagauguuaccuac

SEQ ID NO: 2301004 - RNA, 19 nt, Artificial Sequence
  Description of Artificial Sequence: Synthetic oligonucleotide
  Sense strand starting at position 2660 of SEQ ID NO: 1884905
uagcauuuccagugugcua

SEQ ID NO: 2301005 - RNA, 19 nt, Artificial Sequence
  Description of Artificial Sequence: Synthetic oligonucleotide
  Antisense strand to SEQ ID NO: 2301004
uagcacacuggaaaugcua

SEQ ID NO: 2301006 - RNA, 19 nt, Artificial Sequence
  Description of Artificial Sequence: Synthetic oligonucleotide
  Sense strand starting at position 2787 of SEQ ID NO: 1884905
ccugauaaguuagcugacu

SEQ ID NO: 2301007 - RNA, 19 nt, Artificial Sequence
  Description of Artificial Sequence: Synthetic oligonucleotide
  Antisense strand to SEQ ID NO: 2301006
agucagcuaacuuaucagg

SEQ ID NO: 2301008 - RNA, 19 nt, Artificial Sequence
  Description of Artificial Sequence: Synthetic oligonucleotide
  Sense strand starting at position 2892 of SEQ ID NO: 1884905
ggcagugaccuuugggaca

SEQ ID NO: 2301009 - RNA, 19 nt, Artificial Sequence
  Description of Artificial Sequence: Synthetic oligonucleotide
  Antisense strand to SEQ ID NO: 2301008
ugucccaaaggucacugcc

SEQ ID NO: 2301010 - RNA, 19 nt, Artificial Sequence
  Description of Artificial Sequence: Synthetic oligonucleotide
  Sense strand starting at position 3253 of SEQ ID NO: 1884905
uagauugagcccugagaac

SEQ ID NO: 2301011 - RNA, 19 nt, Artificial Sequence
  Description of Artificial Sequence: Synthetic oligonucleotide
  Antisense strand to SEQ ID NO: 2301010
guucucagggcucaaucua

SEQ ID NO: 2301012 - RNA, 19 nt, Artificial Sequence
  Description of Artificial Sequence: Synthetic oligonucleotide
  Sense strand starting at position 3265 of SEQ ID NO: 1884905
ugagaacuugucuauugua

SEQ ID NO: 2301013 - RNA, 19 nt, Artificial Sequence
  Description of Artificial Sequence: Synthetic oligonucleotide
  Antisense strand to SEQ ID NO: 2301012
uacaauagacaaguucuca

SEQ ID NO: 2301014 - RNA, 19 nt, Artificial Sequence
  Description of Artificial Sequence: Synthetic oligonucleotide
  Sense strand starting at position 3448 of SEQ ID NO: 1884905
uccucuccugacugaugau

SEQ ID NO: 2301015 - RNA, 19 nt, Artificial Sequence
  Description of Artificial Sequence: Synthetic oligonucleotide
  Antisense strand to SEQ ID NO: 2301014
aucaucagucaggagagga

SEQ ID NO: 2301016 - RNA, 19 nt, Artificial Sequence
  Description of Artificial Sequence: Synthetic oligonucleotide
  Sense strand starting at position 3591 of SEQ ID NO: 1884905
cagaaaggucaguagcaca

SEQ ID NO: 2301017 - RNA, 19 nt, Artificial Sequence
  Description of Artificial Sequence: Synthetic oligonucleotide
  Antisense strand to SEQ ID NO: 2301016
ugugcuacugaccuuucug

SEQ ID NO: 2301018 - RNA, 19 nt, Artificial Sequence
  Description of Artificial Sequence: Synthetic oligonucleotide
  Sense strand starting at position 3710 of SEQ ID NO: 1884905
acgagugucagguagaauu

SEQ ID NO: 2301019 - RNA, 19 nt, Artificial Sequence
  Description of Artificial Sequence: Synthetic oligonucleotide
  Antisense strand to SEQ ID NO: 2301018
aauucuaccugacacucgu

SEQ ID NO: 2301020 - RNA, 19 nt, Artificial Sequence
  Description of Artificial Sequence: Synthetic oligonucleotide
  Sense strand starting at position 3869 of SEQ ID NO: 1884905
cgguuauggagaugagacu

SEQ ID NO: 2301021 - RNA, 19 nt, Artificial Sequence
  Description of Artificial Sequence: Synthetic oligonucleotide
  Antisense strand to SEQ ID NO: 2301020
agucucaucuccauaaccg

SEQ ID NO: 2301022 - RNA, 19 nt, Artificial Sequence
  Description of Artificial Sequence: Synthetic oligonucleotide
  Sense strand starting at position 3878 of SEQ ID NO: 1884905
agaugagacuucccacgau

SEQ ID NO: 2301023 - RNA, 19 nt, Artificial Sequence
  Description of Artificial Sequence: Synthetic oligonucleotide
  Antisense strand to SEQ ID NO: 2301022
aucgugggaagucucaucu

SEQ ID NO: 2301024 - RNA, 19 nt, Artificial Sequence
  Description of Artificial Sequence: Synthetic oligonucleotide
  Sense strand starting at position 369 of SEQ ID NO: 1884906
agcuaagaaugauucuaau

SEQ ID NO: 2301025 - RNA, 19 nt, Artificial Sequence
  Description of Artificial Sequence: Synthetic oligonucleotide
  Antisense strand to SEQ ID NO: 2301024
auuagaaucauucuuagcu

SEQ ID NO: 2301026 - RNA, 19 nt, Artificial Sequence
  Description of Artificial Sequence: Synthetic oligonucleotide
  Sense strand starting at position 435 of SEQ ID NO: 1884906
guuggaugucuccacaaug

SEQ ID NO: 2301027 - RNA, 19 nt, Artificial Sequence
  Description of Artificial Sequence: Synthetic oligonucleotide
  Antisense strand to SEQ ID NO: 2301026
cauuguggagacauccaac

SEQ ID NO: 2301028 - RNA, 19 nt, Artificial Sequence
  Description of Artificial Sequence: Synthetic oligonucleotide
  Sense strand starting at position 440 of SEQ ID NO: 1884906
augucuccacaauggaaga

SEQ ID NO: 2301029 - RNA, 19 nt, Artificial Sequence
  Description of Artificial Sequence: Synthetic oligonucleotide
  Antisense strand to SEQ ID NO: 2301028
ucuuccauuguggagacau

SEQ ID NO: 2301030 - RNA, 19 nt, Artificial Sequence
  Description of Artificial Sequence: Synthetic oligonucleotide
  Sense strand starting at position 463 of SEQ ID NO: 1884906
agaggaauauuggagaaua

SEQ ID NO: 2301031 - RNA, 19 nt, Artificial Sequence
  Description of Artificial Sequence: Synthetic oligonucleotide
  Antisense strand to SEQ ID NO: 2301030
uauucuccaauauuccucu

SEQ ID NO: 2301032 - RNA, 19 nt, Artificial Sequence
  Description of Artificial Sequence: Synthetic oligonucleotide
  Sense strand starting at position 501 of SEQ ID NO: 1884906
guugcuaugagccauugaa

SEQ ID NO: 2301033 - RNA, 19 nt, Artificial Sequence
  Description of Artificial Sequence: Synthetic oligonucleotide
  Antisense strand to SEQ ID NO: 2301032
uucaauggcucauagcaac

SEQ ID NO: 2301034 - RNA, 19 nt, Artificial Sequence
  Description of Artificial Sequence: Synthetic oligonucleotide
  Sense strand starting at position 551 of SEQ ID NO: 1884906
gaaaucacucugggugcua

SEQ ID NO: 2301035 - RNA, 19 nt, Artificial Sequence
  Description of Artificial Sequence: Synthetic oligonucleotide
  Antisense strand to SEQ ID NO: 2301034
uagcacccagagugauuuc

SEQ ID NO: 2301036 - RNA, 19 nt, Artificial Sequence
  Description of Artificial Sequence: Synthetic oligonucleotide
  Sense strand starting at position 552 of SEQ ID NO: 1884906
aaaucacucugggugcuau

SEQ ID NO: 2301037 - RNA, 19 nt, Artificial Sequence
  Description of Artificial Sequence: Synthetic oligonucleotide
  Antisense strand to SEQ ID NO: 2301036
auagcacccagagugauuu

SEQ ID NO: 2301038 - RNA, 19 nt, Artificial Sequence
  Description of Artificial Sequence: Synthetic oligonucleotide
  Sense strand starting at position 553 of SEQ ID NO: 1884906
aaucacucugggugcuaua

SEQ ID NO: 2301039 - RNA, 19 nt, Artificial Sequence
  Description of Artificial Sequence: Synthetic oligonucleotide
  Antisense strand to SEQ ID NO: 2301038
uauagcacccagagugauu

SEQ ID NO: 2301040 - RNA, 19 nt, Artificial Sequence
  Description of Artificial Sequence: Synthetic oligonucleotide
  Sense strand starting at position 588 of SEQ ID NO: 1884906
uggagacauuaucugcaca

SEQ ID NO: 2301041 - RNA, 19 nt, Artificial Sequence
  Description of Artificial Sequence: Synthetic oligonucleotide
  Antisense strand to SEQ ID NO: 2301040
ugugcagauaaugucucca

SEQ ID NO: 2301042 - RNA, 19 nt, Artificial Sequence
  Description of Artificial Sequence: Synthetic oligonucleotide
  Sense strand starting at position 1492 of SEQ ID NO: 1884906
cgggcuuugaaguaaugua

SEQ ID NO: 2301043 - RNA, 19 nt, Artificial Sequence
  Description of Artificial Sequence: Synthetic oligonucleotide
  Antisense strand to SEQ ID NO: 2301042
uacauuacuucaaagcccg

SEQ ID NO: 2301044 - RNA, 19 nt, Artificial Sequence
  Description of Artificial Sequence: Synthetic oligonucleotide
  Sense strand starting at position 1619 of SEQ ID NO: 1884906
gaugaagucuggccaugag

SEQ ID NO: 2301045 - RNA, 19 nt, Artificial Sequence
  Description of Artificial Sequence: Synthetic oligonucleotide
  Antisense strand to SEQ ID NO: 2301044
cucauggccagacuucauc

SEQ ID NO: 2301046 - RNA, 19 nt, Artificial Sequence
  Description of Artificial Sequence: Synthetic oligonucleotide
  Sense strand starting at position 1636 of SEQ ID NO: 1884906
agcccugugggaggaaauu

SEQ ID NO: 2301047 - RNA, 19 nt, Artificial Sequence
  Description of Artificial Sequence: Synthetic oligonucleotide
  Antisense strand to SEQ ID NO: 2301046
aauuuccucccacagggcu

SEQ ID NO: 2301048 - RNA, 19 nt, Artificial Sequence
  Description of Artificial Sequence: Synthetic oligonucleotide
  Sense strand starting at position 1726 of SEQ ID NO: 1884906
gucucuugcgaauaugaga

SEQ ID NO: 2301049 - RNA, 19 nt, Artificial Sequence
  Description of Artificial Sequence: Synthetic oligonucleotide
  Antisense strand to SEQ ID NO: 2301048
ucucauauucgcaagagac

SEQ ID NO: 2301050 - RNA, 19 nt, Artificial Sequence
  Description of Artificial Sequence: Synthetic oligonucleotide
  Sense strand starting at position 1838 of SEQ ID NO: 1884906
ggcucaguaccucacagaa

SEQ ID NO: 2301051 - RNA, 19 nt, Artificial Sequence
  Description of Artificial Sequence: Synthetic oligonucleotide
  Antisense strand to SEQ ID NO: 2301050
uucugugagguacugagcc

SEQ ID NO: 2301052 - RNA, 19 nt, Artificial Sequence
  Description of Artificial Sequence: Synthetic oligonucleotide
  Sense strand starting at position 1899 of SEQ ID NO: 1884906
augaaauaugccugcuuag

SEQ ID NO: 2301053 - RNA, 19 nt, Artificial Sequence
  Description of Artificial Sequence: Synthetic oligonucleotide
  Antisense strand to SEQ ID NO: 2301052
cuaagcaggcauauuucau

SEQ ID NO: 2301054 - RNA, 19 nt, Artificial Sequence
  Description of Artificial Sequence: Synthetic oligonucleotide
  Sense strand starting at position 1915 of SEQ ID NO: 1884906
uaguucucagagcaagagu

SEQ ID NO: 2301055 - RNA, 19 nt, Artificial Sequence
  Description of Artificial Sequence: Synthetic oligonucleotide
  Antisense strand to SEQ ID NO: 2301054
acucuugcucugagaacua

SEQ ID NO: 2301056 - RNA, 19 nt, Artificial Sequence
  Description of Artificial Sequence: Synthetic oligonucleotide
  Sense strand starting at position 1983 of SEQ ID NO: 1884906
ccuucuuauguuggagaug

SEQ ID NO: 2301057 - RNA, 19 nt, Artificial Sequence
  Description of Artificial Sequence: Synthetic oligonucleotide
  Antisense strand to SEQ ID NO: 2301056
caucuccaacauaagaagg

SEQ ID NO: 2301058 - RNA, 19 nt, Artificial Sequence
  Description of Artificial Sequence: Synthetic oligonucleotide
  Sense strand starting at position 2746 of SEQ ID NO: 1884906
gugugcgagcuucuguuua

SEQ ID NO: 2301059 - RNA, 19 nt, Artificial Sequence
  Description of Artificial Sequence: Synthetic oligonucleotide
  Antisense strand to SEQ ID NO: 2301058
uaaacagaagcucgcacac

SEQ ID NO: 2301060 - RNA, 19 nt, Artificial Sequence
  Description of Artificial Sequence: Synthetic oligonucleotide
  Sense strand starting at position 2850 of SEQ ID NO: 1884906
ugugcaugaacagaaguau

SEQ ID NO: 2301061 - RNA, 19 nt, Artificial Sequence
  Description of Artificial Sequence: Synthetic oligonucleotide
  Antisense strand to SEQ ID NO: 2301060
auacuucuguucaugcaca

SEQ ID NO: 2301062 - RNA, 19 nt, Artificial Sequence
  Description of Artificial Sequence: Synthetic oligonucleotide
  Sense strand starting at position 2985 of SEQ ID NO: 1884906
guacguaguaucuauacac

SEQ ID NO: 2301063 - RNA, 19 nt, Artificial Sequence
  Description of Artificial Sequence: Synthetic oligonucleotide
  Antisense strand to SEQ ID NO: 2301062
guguauagauacuacguac

SEQ ID NO: 2301064 - RNA, 19 nt, Artificial Sequence
  Description of Artificial Sequence: Synthetic oligonucleotide
  Sense strand starting at position 2989 of SEQ ID NO: 1884906
guaguaucuauacacaggu

SEQ ID NO: 2301065 - RNA, 19 nt, Artificial Sequence
  Description of Artificial Sequence: Synthetic oligonucleotide
  Antisense strand to SEQ ID NO: 2301064
accuguguauagauacuac

SEQ ID NO: 2301066 - RNA, 19 nt, Artificial Sequence
  Description of Artificial Sequence: Synthetic oligonucleotide
  Sense strand starting at position 3104 of SEQ ID NO: 1884906
ggguuuaugggugagugca

SEQ ID NO: 2301067 - RNA, 19 nt, Artificial Sequence
  Description of Artificial Sequence: Synthetic oligonucleotide
  Antisense strand to SEQ ID NO: 2301066
ugcacucacccauaaaccc

SEQ ID NO: 2301068 - RNA, 19 nt, Artificial Sequence
  Description of Artificial Sequence: Synthetic oligonucleotide
  Sense strand starting at position 3141 of SEQ ID NO: 1884906
auguauaucaugugaguua

SEQ ID NO: 2301069 - RNA, 19 nt, Artificial Sequence
  Description of Artificial Sequence: Synthetic oligonucleotide
  Antisense strand to SEQ ID NO: 2301068
uaacucacaugauauacau

SEQ ID NO: 2301070 - RNA, 19 nt, Artificial Sequence
  Description of Artificial Sequence: Synthetic oligonucleotide
  Sense strand starting at position 3144 of SEQ ID NO: 1884906
uauaucaugugaguuauga

SEQ ID NO: 2301071 - RNA, 19 nt, Artificial Sequence
  Description of Artificial Sequence: Synthetic oligonucleotide
  Antisense strand to SEQ ID NO: 2301070
ucauaacucacaugauaua

SEQ ID NO: 2301072 - RNA, 19 nt, Artificial Sequence
  Description of Artificial Sequence: Synthetic oligonucleotide
  Sense strand starting at position 3157 of SEQ ID NO: 1884906
uuaugaauaugggugcaau

SEQ ID NO: 2301073 - RNA, 19 nt, Artificial Sequence
  Description of Artificial Sequence: Synthetic oligonucleotide
  Antisense strand to SEQ ID NO: 2301072
auugcacccauauucauaa

SEQ ID NO: 2301074 - RNA, 19 nt, Artificial Sequence
  Description of Artificial Sequence: Synthetic oligonucleotide
  Sense strand starting at position 3158 of SEQ ID NO: 1884906
uaugaauaugggugcaaug

SEQ ID NO: 2301075 - RNA, 19 nt, Artificial Sequence
  Description of Artificial Sequence: Synthetic oligonucleotide
  Antisense strand to SEQ ID NO: 2301074
cauugcacccauauucaua

SEQ ID NO: 2301076 - RNA, 19 nt, Artificial Sequence
  Description of Artificial Sequence: Synthetic oligonucleotide
  Sense strand starting at position 3160 of SEQ ID NO: 1884906
ugaauaugggugcaaugua

SEQ ID NO: 2301077 - RNA, 19 nt, Artificial Sequence
  Description of Artificial Sequence: Synthetic oligonucleotide
  Antisense strand to SEQ ID NO: 2301076
uacauugcacccauauuca

SEQ ID NO: 2301078 - RNA, 19 nt, Artificial Sequence
  Description of Artificial Sequence: Synthetic oligonucleotide
  Sense strand starting at position 3194 of SEQ ID NO: 1884906
gaguguguugugcuuguau

SEQ ID NO: 2301079 - RNA, 19 nt, Artificial Sequence
  Description of Artificial Sequence: Synthetic oligonucleotide
  Antisense strand to SEQ ID NO: 2301078
auacaagcacaacacacuc

SEQ ID NO: 2301080 - RNA, 19 nt, Artificial Sequence
  Description of Artificial Sequence: Synthetic oligonucleotide
  Sense strand starting at position 3197 of SEQ ID NO: 1884906
uguguugugcuuguaucua

SEQ ID NO: 2301081 - RNA, 19 nt, Artificial Sequence
  Description of Artificial Sequence: Synthetic oligonucleotide
  Antisense strand to SEQ ID NO: 2301080
uagauacaagcacaacaca

SEQ ID NO: 2301082 - RNA, 19 nt, Artificial Sequence
  Description of Artificial Sequence: Synthetic oligonucleotide
  Sense strand starting at position 3304 of SEQ ID NO: 1884906
guugugugaguugugugua

SEQ ID NO: 2301083 - RNA, 19 nt, Artificial Sequence
  Description of Artificial Sequence: Synthetic oligonucleotide
  Antisense strand to SEQ ID NO: 2301082
uacacacaacucacacaac

SEQ ID NO: 2301084 - RNA, 19 nt, Artificial Sequence
  Description of Artificial Sequence: Synthetic oligonucleotide
  Sense strand starting at position 3361 of SEQ ID NO: 1884906
cugugucuacucguacuuu

SEQ ID NO: 2301085 - RNA, 19 nt, Artificial Sequence
  Description of Artificial Sequence: Synthetic oligonucleotide
  Antisense strand to SEQ ID NO: 2301084
aaaguacgaguagacacag

SEQ ID NO: 2301086 - RNA, 19 nt, Artificial Sequence
  Description of Artificial Sequence: Synthetic oligonucleotide
  Sense strand starting at position 3371 of SEQ ID NO: 1884906
ucguacuuuauggguaaga

SEQ ID NO: 2301087 - RNA, 19 nt, Artificial Sequence
  Description of Artificial Sequence: Synthetic oligonucleotide
  Antisense strand to SEQ ID NO: 2301086
ucuuacccauaaaguacga

SEQ ID NO: 2301088 - RNA, 19 nt, Artificial Sequence
  Description of Artificial Sequence: Synthetic oligonucleotide
  Sense strand starting at position 3372 of SEQ ID NO: 1884906
cguacuuuauggguaagag

SEQ ID NO: 2301089 - RNA, 19 nt, Artificial Sequence
  Description of Artificial Sequence: Synthetic oligonucleotide
  Antisense strand to SEQ ID NO: 2301088
cucuuacccauaaaguacg

SEQ ID NO: 2301090 - RNA, 19 nt, Artificial Sequence
  Description of Artificial Sequence: Synthetic oligonucleotide
  Sense strand starting at position 3409 of SEQ ID NO: 1884906
auugugugagucgugugua

SEQ ID NO: 2301091 - RNA, 19 nt, Artificial Sequence
  Description of Artificial Sequence: Synthetic oligonucleotide
  Antisense strand to SEQ ID NO: 2301090
uacacacgacucacacaau

SEQ ID NO: 2301092 - RNA, 19 nt, Artificial Sequence
  Description of Artificial Sequence: Synthetic oligonucleotide
  Sense strand starting at position 3411 of SEQ ID NO: 1884906
ugugugagucguguguaca

SEQ ID NO: 2301093 - RNA, 19 nt, Artificial Sequence
  Description of Artificial Sequence: Synthetic oligonucleotide
  Antisense strand to SEQ ID NO: 2301092
uguacacacgacucacaca

SEQ ID NO: 2301094 - RNA, 19 nt, Artificial Sequence
  Description of Artificial Sequence: Synthetic oligonucleotide
  Sense strand starting at position 3707 of SEQ ID NO: 1884906
gucaugugagucgugugua

SEQ ID NO: 2301095 - RNA, 19 nt, Artificial Sequence
  Description of Artificial Sequence: Synthetic oligonucleotide
  Antisense strand to SEQ ID NO: 2301094
uacacacgacucacaugac

SEQ ID NO: 2301096 - RNA, 19 nt, Artificial Sequence
  Description of Artificial Sequence: Synthetic oligonucleotide
  Sense strand starting at position 3729 of SEQ ID NO: 1884906
gugugaugaauacauaugu

SEQ ID NO: 2301097 - RNA, 19 nt, Artificial Sequence
  Description of Artificial Sequence: Synthetic oligonucleotide
  Antisense strand to SEQ ID NO: 2301096
acauauguauucaucacac

SEQ ID NO: 2301098 - RNA, 19 nt, Artificial Sequence
  Description of Artificial Sequence: Synthetic oligonucleotide
  Sense strand starting at position 3737 of SEQ ID NO: 1884906
aauacauauguaugugagu

SEQ ID NO: 2301099 - RNA, 19 nt, Artificial Sequence
  Description of Artificial Sequence: Synthetic oligonucleotide
  Antisense strand to SEQ ID NO: 2301098
acucacauacauauguauu

SEQ ID NO: 2301100 - RNA, 19 nt, Artificial Sequence
  Description of Artificial Sequence: Synthetic oligonucleotide
  Sense strand starting at position 3960 of SEQ ID NO: 1884906
auauguuuaugggugagag

SEQ ID NO: 2301101 - RNA, 19 nt, Artificial Sequence
  Description of Artificial Sequence: Synthetic oligonucleotide
  Antisense strand to SEQ ID NO: 2301100
cucucacccauaaacauau

SEQ ID NO: 2301102 - RNA, 19 nt, Artificial Sequence
  Description of Artificial Sequence: Synthetic oligonucleotide
  Sense strand starting at position 3962 of SEQ ID NO: 1884906
auguuuaugggugagaggu

SEQ ID NO: 2301103 - RNA, 19 nt, Artificial Sequence
  Description of Artificial Sequence: Synthetic oligonucleotide
  Antisense strand to SEQ ID NO: 2301102
accucucacccauaaacau

SEQ ID NO: 2301104 - RNA, 19 nt, Artificial Sequence
  Description of Artificial Sequence: Synthetic oligonucleotide
  Sense strand starting at position 2679 of SEQ ID NO: 1884907
guucguccaucuucuagaa

SEQ ID NO: 2301105 - RNA, 19 nt, Artificial Sequence
  Description of Artificial Sequence: Synthetic oligonucleotide
  Antisense strand to SEQ ID NO: 2301104
uucuagaagauggacgaac

SEQ ID NO: 2301106 - RNA, 19 nt, Artificial Sequence
  Description of Artificial Sequence: Synthetic oligonucleotide
  Sense strand starting at position 2681 of SEQ ID NO: 1884907
ucguccaucuucuagaaac

SEQ ID NO: 2301107 - RNA, 19 nt, Artificial Sequence
  Description of Artificial Sequence: Synthetic oligonucleotide
  Antisense strand to SEQ ID NO: 2301106
guuucuagaagauggacga

SEQ ID NO: 2301108 - RNA, 19 nt, Artificial Sequence
  Description of Artificial Sequence: Synthetic oligonucleotide
  Sense strand starting at position 2683 of SEQ ID NO: 1884907
guccaucuucuagaaacga

SEQ ID NO: 2301109 - RNA, 19 nt, Artificial Sequence
  Description of Artificial Sequence: Synthetic oligonucleotide
  Antisense strand to SEQ ID NO: 2301108
ucguuucuagaagauggac

SEQ ID NO: 2301110 - RNA, 19 nt, Artificial Sequence
  Description of Artificial Sequence: Synthetic oligonucleotide
  Sense strand starting at position 2972 of SEQ ID NO: 1884907
cuaaauucugccugcagga

SEQ ID NO: 2301111 - RNA, 19 nt, Artificial Sequence
  Description of Artificial Sequence: Synthetic oligonucleotide
  Antisense strand to SEQ ID NO: 2301110
uccugcaggcagaauuuag

SEQ ID NO: 2301112 - RNA, 19 nt, Artificial Sequence
  Description of Artificial Sequence: Synthetic oligonucleotide
  Sense strand starting at position 2992 of SEQ ID NO: 1884907
cgguuauuguggcauccgu

SEQ ID NO: 2301113 - RNA, 19 nt, Artificial Sequence
  Description of Artificial Sequence: Synthetic oligonucleotide
  Antisense strand to SEQ ID NO: 2301112
acggaugccacaauaaccg

SEQ ID NO: 2301114 - RNA, 19 nt, Artificial Sequence
  Description of Artificial Sequence: Synthetic oligonucleotide
  Sense strand starting at position 2994 of SEQ ID NO: 1884907
guuauuguggcauccguuu

SEQ ID NO: 2301115 - RNA, 19 nt, Artificial Sequence
  Description of Artificial Sequence: Synthetic oligonucleotide
  Antisense strand to SEQ ID NO: 2301114
aaacggaugccacaauaac

SEQ ID NO: 2301116 - RNA, 19 nt, Artificial Sequence
  Description of Artificial Sequence: Synthetic oligonucleotide
  Sense strand starting at position 3637 of SEQ ID NO: 1884907
aaacuugguguauguugaa

SEQ ID NO: 2301117 - RNA, 19 nt, Artificial Sequence
  Description of Artificial Sequence: Synthetic oligonucleotide
  Antisense strand to SEQ ID NO: 2301116
uucaacauacaccaaguuu

SEQ ID NO: 2301118 - RNA, 19 nt, Artificial Sequence
  Description of Artificial Sequence: Synthetic oligonucleotide
  Sense strand starting at position 3675 of SEQ ID NO: 1884907
uguccugcauccucauuua

SEQ ID NO: 2301119 - RNA, 19 nt, Artificial Sequence
  Description of Artificial Sequence: Synthetic oligonucleotide
  Antisense strand to SEQ ID NO: 2301118
uaaaugaggaugcaggaca

SEQ ID NO: 2301120 - RNA, 19 nt, Artificial Sequence
  Description of Artificial Sequence: Synthetic oligonucleotide
  Sense strand starting at position 3697 of SEQ ID NO: 1884907
uccugcuuggcucgaguuu

SEQ ID NO: 2301121 - RNA, 19 nt, Artificial Sequence
  Description of Artificial Sequence: Synthetic oligonucleotide
  Antisense strand to SEQ ID NO: 2301120
aaacucgagccaagcagga

SEQ ID NO: 2301122 - RNA, 19 nt, Artificial Sequence
  Description of Artificial Sequence: Synthetic oligonucleotide
  Sense strand starting at position 3706 of SEQ ID NO: 1884907
gcucgaguuugaguuuaca

SEQ ID NO: 2301123 - RNA, 19 nt, Artificial Sequence
  Description of Artificial Sequence: Synthetic oligonucleotide
  Antisense strand to SEQ ID NO: 2301122
uguaaacucaaacucgagc

SEQ ID NO: 2301124 - RNA, 19 nt, Artificial Sequence
  Description of Artificial Sequence: Synthetic oligonucleotide
  Sense strand starting at position 3741 of SEQ ID NO: 1884907
ccaagagccuguuacagau

SEQ ID NO: 2301125 - RNA, 19 nt, Artificial Sequence
  Description of Artificial Sequence: Synthetic oligonucleotide
  Antisense strand to SEQ ID NO: 2301124
aucuguaacaggcucuugg

SEQ ID NO: 2301126 - RNA, 19 nt, Artificial Sequence
  Description of Artificial Sequence: Synthetic oligonucleotide
  Sense strand starting at position 3761 of SEQ ID NO: 1884907
ggcggucgugccuuaugaa

SEQ ID NO: 2301127 - RNA, 19 nt, Artificial Sequence
  Description of Artificial Sequence: Synthetic oligonucleotide
  Antisense strand to SEQ ID NO: 2301126
uucauaaggcacgaccgcc

SEQ ID NO: 2301128 - RNA, 19 nt, Artificial Sequence
  Description of Artificial Sequence: Synthetic oligonucleotide
  Sense strand starting at position 3762 of SEQ ID NO: 1884907
gcggucgugccuuaugaaa

SEQ ID NO: 2301129 - RNA, 19 nt, Artificial Sequence
  Description of Artificial Sequence: Synthetic oligonucleotide
  Antisense strand to SEQ ID NO: 2301128
uuucauaaggcacgaccgc

SEQ ID NO: 2301130 - RNA, 19 nt, Artificial Sequence
  Description of Artificial Sequence: Synthetic oligonucleotide
  Sense strand starting at position 3764 of SEQ ID NO: 1884907
ggucgugccuuaugaaauc

SEQ ID NO: 2301131 - RNA, 19 nt, Artificial Sequence
  Description of Artificial Sequence: Synthetic oligonucleotide
  Antisense strand to SEQ ID NO: 2301130
gauuucauaaggcacgacc

SEQ ID NO: 2301132 - RNA, 19 nt, Artificial Sequence
  Description of Artificial Sequence: Synthetic oligonucleotide
  Sense strand starting at position 3808 of SEQ ID NO: 1884907
guguuuguguguuccuguu

SEQ ID NO: 2301133 - RNA, 19 nt, Artificial Sequence
  Description of Artificial Sequence: Synthetic oligonucleotide
  Antisense strand to SEQ ID NO: 2301132
aacaggaacacacaaacac

SEQ ID NO: 2301134 - RNA, 19 nt, Artificial Sequence
  Description of Artificial Sequence: Synthetic oligonucleotide
  Sense strand starting at position 3843 of SEQ ID NO: 1884907
agcgguguuucucagaauu

SEQ ID NO: 2301135 - RNA, 19 nt, Artificial Sequence
  Description of Artificial Sequence: Synthetic oligonucleotide
  Antisense strand to SEQ ID NO: 2301134
aauucugagaaacaccgcu

SEQ ID NO: 2301136 - RNA, 19 nt, Artificial Sequence
  Description of Artificial Sequence: Synthetic oligonucleotide
  Sense strand starting at position 3845 of SEQ ID NO: 1884907
cgguguuucucagaauuga

SEQ ID NO: 2301137 - RNA, 19 nt, Artificial Sequence
  Description of Artificial Sequence: Synthetic oligonucleotide
  Antisense strand to SEQ ID NO: 2301136
ucaauucugagaaacaccg

SEQ ID NO: 2301138 - RNA, 19 nt, Artificial Sequence
  Description of Artificial Sequence: Synthetic oligonucleotide
  Sense strand starting at position 3886 of SEQ ID NO: 1884907
gacgauuggcuuuggagua

SEQ ID NO: 2301139 - RNA, 19 nt, Artificial Sequence
  Description of Artificial Sequence: Synthetic oligonucleotide
  Antisense strand to SEQ ID NO: 2301138
uacuccaaagccaaucguc

SEQ ID NO: 2301140 - RNA, 19 nt, Artificial Sequence
  Description of Artificial Sequence: Synthetic oligonucleotide
  Sense strand starting at position 3887 of SEQ ID NO: 1884907
acgauuggcuuuggaguaa

SEQ ID NO: 2301141 - RNA, 19 nt, Artificial Sequence
  Description of Artificial Sequence: Synthetic oligonucleotide
  Antisense strand to SEQ ID NO: 2301140
uuacuccaaagccaaucgu

SEQ ID NO: 2301142 - RNA, 19 nt, Artificial Sequence
  Description of Artificial Sequence: Synthetic oligonucleotide
  Sense strand starting at position 3934 of SEQ ID NO: 1884907
acugucgugugcagugauu

SEQ ID NO: 2301143 - RNA, 19 nt, Artificial Sequence
  Description of Artificial Sequence: Synthetic oligonucleotide
  Antisense strand to SEQ ID NO: 2301142
aaucacugcacacgacagu

SEQ ID NO: 2301144 - RNA, 19 nt, Artificial Sequence
  Description of Artificial Sequence: Synthetic oligonucleotide
  Sense strand starting at position 3936 of SEQ ID NO: 1884907
ugucgugugcagugauucu

SEQ ID NO: 2301145 - RNA, 19 nt, Artificial Sequence
  Description of Artificial Sequence: Synthetic oligonucleotide
  Antisense strand to SEQ ID NO: 2301144
agaaucacugcacacgaca

SEQ ID NO: 2301146 - RNA, 19 nt, Artificial Sequence
  Description of Artificial Sequence: Synthetic oligonucleotide
  Sense strand starting at position 3943 of SEQ ID NO: 1884907
ugcagugauucuuaucuag

SEQ ID NO: 2301147 - RNA, 19 nt, Artificial Sequence
  Description of Artificial Sequence: Synthetic oligonucleotide
  Antisense strand to SEQ ID NO: 2301146
cuagauaagaaucacugca

SEQ ID NO: 2301148 - RNA, 19 nt, Artificial Sequence
  Description of Artificial Sequence: Synthetic oligonucleotide
  Sense strand starting at position 3945 of SEQ ID NO: 1884907
cagugauucuuaucuagug

SEQ ID NO: 2301149 - RNA, 19 nt, Artificial Sequence
  Description of Artificial Sequence: Synthetic oligonucleotide
  Antisense strand to SEQ ID NO: 2301148
cacuagauaagaaucacug

SEQ ID NO: 2301150 - RNA, 19 nt, Artificial Sequence
  Description of Artificial Sequence: Synthetic oligonucleotide
  Sense strand starting at position 3946 of SEQ ID NO: 1884907
agugauucuuaucuagugu

SEQ ID NO: 2301151 - RNA, 19 nt, Artificial Sequence
  Description of Artificial Sequence: Synthetic oligonucleotide
  Antisense strand to SEQ ID NO: 2301150
acacuagauaagaaucacu

SEQ ID NO: 2301152 - RNA, 19 nt, Artificial Sequence
  Description of Artificial Sequence: Synthetic oligonucleotide
  Sense strand starting at position 3947 of SEQ ID NO: 1884907
gugauucuuaucuagugua

SEQ ID NO: 2301153 - RNA, 19 nt, Artificial Sequence
  Description of Artificial Sequence: Synthetic oligonucleotide
  Antisense strand to SEQ ID NO: 2301152
uacacuagauaagaaucac

SEQ ID NO: 2301154 - RNA, 19 nt, Artificial Sequence
  Description of Artificial Sequence: Synthetic oligonucleotide
  Sense strand starting at position 3962 of SEQ ID NO: 1884907
uguaccguguccucuugaa

SEQ ID NO: 2301155 - RNA, 19 nt, Artificial Sequence
  Description of Artificial Sequence: Synthetic oligonucleotide
  Antisense strand to SEQ ID NO: 2301154
uucaagaggacacgguaca

SEQ ID NO: 2301156 - RNA, 19 nt, Artificial Sequence
  Description of Artificial Sequence: Synthetic oligonucleotide
  Sense strand starting at position 6 of SEQ ID NO: 1884908
gacucaaccugguuucuga

SEQ ID NO: 2301157 - RNA, 19 nt, Artificial Sequence
  Description of Artificial Sequence: Synthetic oligonucleotide
  Antisense strand to SEQ ID NO: 2301156
ucagaaaccagguugaguc

SEQ ID NO: 2301158 - RNA, 19 nt, Artificial Sequence
  Description of Artificial Sequence: Synthetic oligonucleotide
  Sense strand starting at position 13 of SEQ ID NO: 1884908
ccugguuucugauuagaau

SEQ ID NO: 2301159 - RNA, 19 nt, Artificial Sequence
  Description of Artificial Sequence: Synthetic oligonucleotide
  Antisense strand to SEQ ID NO: 2301158
auucuaaucagaaaccagg

SEQ ID NO: 2301160 - RNA, 19 nt, Artificial Sequence
  Description of Artificial Sequence: Synthetic oligonucleotide
  Sense strand starting at position 14 of SEQ ID NO: 1884908
cugguuucugauuagaauc

SEQ ID NO: 2301161 - RNA, 19 nt, Artificial Sequence
  Description of Artificial Sequence: Synthetic oligonucleotide
  Antisense strand to SEQ ID NO: 2301160
gauucuaaucagaaaccag

SEQ ID NO: 2301162 - RNA, 19 nt, Artificial Sequence
  Description of Artificial Sequence: Synthetic oligonucleotide
  Sense strand starting at position 68 of SEQ ID NO: 1884908
auuggcuaacuuuggaauu

SEQ ID NO: 2301163 - RNA, 19 nt, Artificial Sequence
  Description of Artificial Sequence: Synthetic oligonucleotide
  Antisense strand to SEQ ID NO: 2301162
aauuccaaaguuagccaau

SEQ ID NO: 2301164 - RNA, 19 nt, Artificial Sequence
  Description of Artificial Sequence: Synthetic oligonucleotide
  Sense strand starting at position 475 of SEQ ID NO: 1884908
gagcuacuucugggacuga

SEQ ID NO: 2301165 - RNA, 19 nt, Artificial Sequence
  Description of Artificial Sequence: Synthetic oligonucleotide
  Antisense strand to SEQ ID NO: 2301164
ucagucccagaaguagcuc

SEQ ID NO: 2301166 - RNA, 19 nt, Artificial Sequence
  Description of Artificial Sequence: Synthetic oligonucleotide
  Sense strand starting at position 900 of SEQ ID NO: 1884908
aggcaucuuccuuagauuc

SEQ ID NO: 2301167 - RNA, 19 nt, Artificial Sequence
  Description of Artificial Sequence: Synthetic oligonucleotide
  Antisense strand to SEQ ID NO: 2301166
gaaucuaaggaagaugccu

SEQ ID NO: 2301168 - RNA, 19 nt, Artificial Sequence
  Description of Artificial Sequence: Synthetic oligonucleotide
  Sense strand starting at position 1146 of SEQ ID NO: 1884908
cagaaugugccucaucaug

SEQ ID NO: 2301169 - RNA, 19 nt, Artificial Sequence
  Description of Artificial Sequence: Synthetic oligonucleotide
  Antisense strand to SEQ ID NO: 2301168
caugaugaggcacauucug

SEQ ID NO: 2301170 - RNA, 19 nt, Artificial Sequence
  Description of Artificial Sequence: Synthetic oligonucleotide
  Sense strand starting at position 1192 of SEQ ID NO: 1884908
aaccauguugggugaugaa

SEQ ID NO: 2301171 - RNA, 19 nt, Artificial Sequence
  Description of Artificial Sequence: Synthetic oligonucleotide
  Antisense strand to SEQ ID NO: 2301170
uucaucacccaacaugguu

SEQ ID NO: 2301172 - RNA, 19 nt, Artificial Sequence
  Description of Artificial Sequence: Synthetic oligonucleotide
  Sense strand starting at position 1265 of SEQ ID NO: 1884908
gguaaaugauaacuuccuu

SEQ ID NO: 2301173 - RNA, 19 nt, Artificial Sequence
  Description of Artificial Sequence: Synthetic oligonucleotide
  Antisense strand to SEQ ID NO: 2301172
aaggaaguuaucauuuacc

SEQ ID NO: 2301174 - RNA, 19 nt, Artificial Sequence
  Description of Artificial Sequence: Synthetic oligonucleotide
  Sense strand starting at position 1378 of SEQ ID NO: 1884908
cuuucuuuaggucagggau

SEQ ID NO: 2301175 - RNA, 19 nt, Artificial Sequence
  Description of Artificial Sequence: Synthetic oligonucleotide
  Antisense strand to SEQ ID NO: 2301174
aucccugaccuaaagaaag

SEQ ID NO: 2301176 - RNA, 19 nt, Artificial Sequence
  Description of Artificial Sequence: Synthetic oligonucleotide
  Sense strand starting at position 1381 of SEQ ID NO: 1884908
ucuuuaggucagggaugau

SEQ ID NO: 2301177 - RNA, 19 nt, Artificial Sequence
  Description of Artificial Sequence: Synthetic oligonucleotide
  Antisense strand to SEQ ID NO: 2301176
aucaucccugaccuaaaga

SEQ ID NO: 2301178 - RNA, 19 nt, Artificial Sequence
  Description of Artificial Sequence: Synthetic oligonucleotide
  Sense strand starting at position 1384 of SEQ ID NO: 1884908
uuaggucagggaugauacu

SEQ ID NO: 2301179 - RNA, 19 nt, Artificial Sequence
  Description of Artificial Sequence: Synthetic oligonucleotide
  Antisense strand to SEQ ID NO: 2301178
aguaucaucccugaccuaa

SEQ ID NO: 2301180 - RNA, 19 nt, Artificial Sequence
  Description of Artificial Sequence: Synthetic oligonucleotide
  Sense strand starting at position 1439 of SEQ ID NO: 1884908
ucaugauugauaggaguac

SEQ ID NO: 2301181 - RNA, 19 nt, Artificial Sequence
  Description of Artificial Sequence: Synthetic oligonucleotide
  Antisense strand to SEQ ID NO: 2301180
guacuccuaucaaucauga

SEQ ID NO: 2301182 - RNA, 19 nt, Artificial Sequence
  Description of Artificial Sequence: Synthetic oligonucleotide
  Sense strand starting at position 1454 of SEQ ID NO: 1884908
guacuaauugaucaaagca

SEQ ID NO: 2301183 - RNA, 19 nt, Artificial Sequence
  Description of Artificial Sequence: Synthetic oligonucleotide
  Antisense strand to SEQ ID NO: 2301182
ugcuuugaucaauuaguac

SEQ ID NO: 2301184 - RNA, 19 nt, Artificial Sequence
  Description of Artificial Sequence: Synthetic oligonucleotide
  Sense strand starting at position 1512 of SEQ ID NO: 1884908
acuacuaauugauugguau

SEQ ID NO: 2301185 - RNA, 19 nt, Artificial Sequence
  Description of Artificial Sequence: Synthetic oligonucleotide
  Antisense strand to SEQ ID NO: 2301184
auaccaaucaauuaguagu

SEQ ID NO: 2301186 - RNA, 19 nt, Artificial Sequence
  Description of Artificial Sequence: Synthetic oligonucleotide
  Sense strand starting at position 1513 of SEQ ID NO: 1884908
cuacuaauugauugguauu

SEQ ID NO: 2301187 - RNA, 19 nt, Artificial Sequence
  Description of Artificial Sequence: Synthetic oligonucleotide
  Antisense strand to SEQ ID NO: 2301186
aauaccaaucaauuaguag

SEQ ID NO: 2301188 - RNA, 19 nt, Artificial Sequence
  Description of Artificial Sequence: Synthetic oligonucleotide
  Sense strand starting at position 1718 of SEQ ID NO: 1884908
aguguaagucacuaacaaa

SEQ ID NO: 2301189 - RNA, 19 nt, Artificial Sequence
  Description of Artificial Sequence: Synthetic oligonucleotide
  Antisense strand to SEQ ID NO: 2301188
uuuguuagugacuuacacu

SEQ ID NO: 2301190 - RNA, 19 nt, Artificial Sequence
  Description of Artificial Sequence: Synthetic oligonucleotide
  Sense strand starting at position 1813 of SEQ ID NO: 1884908
aggauaccucuuuguauau

SEQ ID NO: 2301191 - RNA, 19 nt, Artificial Sequence
  Description of Artificial Sequence: Synthetic oligonucleotide
  Antisense strand to SEQ ID NO: 2301190
auauacaaagagguauccu

SEQ ID NO: 2301192 - RNA, 19 nt, Artificial Sequence
  Description of Artificial Sequence: Synthetic oligonucleotide
  Sense strand starting at position 1955 of SEQ ID NO: 1884908
ucuauuuguugcuuucuga

SEQ ID NO: 2301193 - RNA, 19 nt, Artificial Sequence
  Description of Artificial Sequence: Synthetic oligonucleotide
  Antisense strand to SEQ ID NO: 2301192
ucagaaagcaacaaauaga

SEQ ID NO: 2301194 - RNA, 19 nt, Artificial Sequence
  Description of Artificial Sequence: Synthetic oligonucleotide
  Sense strand starting at position 1958 of SEQ ID NO: 1884908
auuuguugcuuucugaauu

SEQ ID NO: 2301195 - RNA, 19 nt, Artificial Sequence
  Description of Artificial Sequence: Synthetic oligonucleotide
  Antisense strand to SEQ ID NO: 2301194
aauucagaaagcaacaaau

SEQ ID NO: 2301196 - RNA, 19 nt, Artificial Sequence
  Description of Artificial Sequence: Synthetic oligonucleotide
  Sense strand starting at position 1968 of SEQ ID NO: 1884908
uucugaauucuaggugaau

SEQ ID NO: 2301197 - RNA, 19 nt, Artificial Sequence
  Description of Artificial Sequence: Synthetic oligonucleotide
  Antisense strand to SEQ ID NO: 2301196
auucaccuagaauucagaa

SEQ ID NO: 2301198 - RNA, 19 nt, Artificial Sequence
  Description of Artificial Sequence: Synthetic oligonucleotide
  Sense strand starting at position 1969 of SEQ ID NO: 1884908
ucugaauucuaggugaauu

SEQ ID NO: 2301199 - RNA, 19 nt, Artificial Sequence
  Description of Artificial Sequence: Synthetic oligonucleotide
  Antisense strand to SEQ ID NO: 2301198
aauucaccuagaauucaga

SEQ ID NO: 2301200 - RNA, 19 nt, Artificial Sequence
  Description of Artificial Sequence: Synthetic oligonucleotide
  Sense strand starting at position 1970 of SEQ ID NO: 1884908
cugaauucuaggugaauug

SEQ ID NO: 2301201 - RNA, 19 nt, Artificial Sequence
  Description of Artificial Sequence: Synthetic oligonucleotide
  Antisense strand to SEQ ID NO: 2301200
caauucaccuagaauucag

SEQ ID NO: 2301202 - RNA, 19 nt, Artificial Sequence
  Description of Artificial Sequence: Synthetic oligonucleotide
  Sense strand starting at position 1980 of SEQ ID NO: 1884908
ggugaauugccugauauua

SEQ ID NO: 2301203 - RNA, 19 nt, Artificial Sequence
  Description of Artificial Sequence: Synthetic oligonucleotide
  Antisense strand to SEQ ID NO: 2301202
uaauaucaggcaauucacc

SEQ ID NO: 2301204 - RNA, 19 nt, Artificial Sequence
  Description of Artificial Sequence: Synthetic oligonucleotide
  Sense strand starting at position 2024 of SEQ ID NO: 1884908
uaugacaugucuuuaagag

SEQ ID NO: 2301205 - RNA, 19 nt, Artificial Sequence
  Description of Artificial Sequence: Synthetic oligonucleotide
  Antisense strand to SEQ ID NO: 2301204
cucuuaaagacaugucaua

SEQ ID NO: 2301206 - RNA, 19 nt, Artificial Sequence
  Description of Artificial Sequence: Synthetic oligonucleotide
  Sense strand starting at position 2190 of SEQ ID NO: 1884908
cuagaucaguggguagaaa

SEQ ID NO: 2301207 - RNA, 19 nt, Artificial Sequence
  Description of Artificial Sequence: Synthetic oligonucleotide
  Antisense strand to SEQ ID NO: 2301206
uuucuacccacugaucuag

SEQ ID NO: 2301208 - RNA, 19 nt, Artificial Sequence
  Description of Artificial Sequence: Synthetic oligonucleotide
  Sense strand starting at position 2232 of SEQ ID NO: 1884908
uuaacagaagguuauguuu

SEQ ID NO: 2301209 - RNA, 19 nt, Artificial Sequence
  Description of Artificial Sequence: Synthetic oligonucleotide
  Antisense strand to SEQ ID NO: 2301208
aaacauaaccuucuguuaa

SEQ ID NO: 2301210 - RNA, 19 nt, Artificial Sequence
  Description of Artificial Sequence: Synthetic oligonucleotide
  Sense strand starting at position 2361 of SEQ ID NO: 1884908
aguggacucccuuagcaga

SEQ ID NO: 2301211 - RNA, 19 nt, Artificial Sequence
  Description of Artificial Sequence: Synthetic oligonucleotide
  Antisense strand to SEQ ID NO: 2301210
ucugcuaagggaguccacu

SEQ ID NO: 2301212 - RNA, 19 nt, Artificial Sequence
  Description of Artificial Sequence: Synthetic oligonucleotide
  Sense strand starting at position 2500 of SEQ ID NO: 1884908
ucgggagauucuuugauaa

SEQ ID NO: 2301213 - RNA, 19 nt, Artificial Sequence
  Description of Artificial Sequence: Synthetic oligonucleotide
  Antisense strand to SEQ ID NO: 2301212
uuaucaaagaaucucccga

SEQ ID NO: 2301214 - RNA, 19 nt, Artificial Sequence
  Description of Artificial Sequence: Synthetic oligonucleotide
  Sense strand starting at position 2513 of SEQ ID NO: 1884908
ugauaaguuagguauagcu

SEQ ID NO: 2301215 - RNA, 19 nt, Artificial Sequence
  Description of Artificial Sequence: Synthetic oligonucleotide
  Antisense strand to SEQ ID NO: 2301214
agcuauaccuaacuuauca

SEQ ID NO: 2301216 - RNA, 19 nt, Artificial Sequence
  Description of Artificial Sequence: Synthetic oligonucleotide
  Sense strand starting at position 2661 of SEQ ID NO: 1884908
augggaaggucuucgaaug

SEQ ID NO: 2301217 - RNA, 19 nt, Artificial Sequence
  Description of Artificial Sequence: Synthetic oligonucleotide
  Antisense strand to SEQ ID NO: 2301216
cauucgaagaccuucccau

SEQ ID NO: 2301218 - RNA, 19 nt, Artificial Sequence
  Description of Artificial Sequence: Synthetic oligonucleotide
  Sense strand starting at position 2666 of SEQ ID NO: 1884908
aaggucuucgaaugggauu

SEQ ID NO: 2301219 - RNA, 19 nt, Artificial Sequence
  Description of Artificial Sequence: Synthetic oligonucleotide
  Antisense strand to SEQ ID NO: 2301218
aaucccauucgaagaccuu

SEQ ID NO: 2301220 - RNA, 19 nt, Artificial Sequence
  Description of Artificial Sequence: Synthetic oligonucleotide
  Sense strand starting at position 3128 of SEQ ID NO: 1884908
aguagaauuaagggugacu

SEQ ID NO: 2301221 - RNA, 19 nt, Artificial Sequence
  Description of Artificial Sequence: Synthetic oligonucleotide
  Antisense strand to SEQ ID NO: 2301220
agucacccuuaauucuacu

SEQ ID NO: 2301222 - RNA, 19 nt, Artificial Sequence
  Description of Artificial Sequence: Synthetic oligonucleotide
  Sense strand starting at position 3130 of SEQ ID NO: 1884908
uagaauuaagggugacuuu

SEQ ID NO: 2301223 - RNA, 19 nt, Artificial Sequence
  Description of Artificial Sequence: Synthetic oligonucleotide
  Antisense strand to SEQ ID NO: 2301222
aaagucacccuuaauucua

SEQ ID NO: 2301224 - RNA, 19 nt, Artificial Sequence
  Description of Artificial Sequence: Synthetic oligonucleotide
  Sense strand starting at position 3308 of SEQ ID NO: 1884908
uaucuuauagguuaagagu

SEQ ID NO: 2301225 - RNA, 19 nt, Artificial Sequence
  Description of Artificial Sequence: Synthetic oligonucleotide
  Antisense strand to SEQ ID NO: 2301224
acucuuaaccuauaagaua

SEQ ID NO: 2301226 - RNA, 19 nt, Artificial Sequence
  Description of Artificial Sequence: Synthetic oligonucleotide
  Sense strand starting at position 3316 of SEQ ID NO: 1884908
agguuaagaguccaaugca

SEQ ID NO: 2301227 - RNA, 19 nt, Artificial Sequence
  Description of Artificial Sequence: Synthetic oligonucleotide
  Antisense strand to SEQ ID NO: 2301226
ugcauuggacucuuaaccu

SEQ ID NO: 2301228 - RNA, 19 nt, Artificial Sequence
  Description of Artificial Sequence: Synthetic oligonucleotide
  Sense strand starting at position 3319 of SEQ ID NO: 1884908
uuaagaguccaaugcaaau

SEQ ID NO: 2301229 - RNA, 19 nt, Artificial Sequence
  Description of Artificial Sequence: Synthetic oligonucleotide
  Antisense strand to SEQ ID NO: 2301228
auuugcauuggacucuuaa

SEQ ID NO: 2301230 - RNA, 19 nt, Artificial Sequence
  Description of Artificial Sequence: Synthetic oligonucleotide
  Sense strand starting at position 3527 of SEQ ID NO: 1884908
agacauaucuccucugaug

SEQ ID NO: 2301231 - RNA, 19 nt, Artificial Sequence
  Description of Artificial Sequence: Synthetic oligonucleotide
  Antisense strand to SEQ ID NO: 2301230
caucagaggagauaugucu

SEQ ID NO: 2301232 - RNA, 19 nt, Artificial Sequence
  Description of Artificial Sequence: Synthetic oligonucleotide
  Sense strand starting at position 3589 of SEQ ID NO: 1884908
uuaguuugaguuuaccuaa

SEQ ID NO: 2301233 - RNA, 19 nt, Artificial Sequence
  Description of Artificial Sequence: Synthetic oligonucleotide
  Antisense strand to SEQ ID NO: 2301232
uuagguaaacucaaacuaa

SEQ ID NO: 2301234 - RNA, 19 nt, Artificial Sequence
  Description of Artificial Sequence: Synthetic oligonucleotide
  Sense strand starting at position 3872 of SEQ ID NO: 1884908
cuaugugacccaugauaga

SEQ ID NO: 2301235 - RNA, 19 nt, Artificial Sequence
  Description of Artificial Sequence: Synthetic oligonucleotide
  Antisense strand to SEQ ID NO: 2301234
ucuaucaugggucacauag

SEQ ID NO: 2301236 - RNA, 19 nt, Artificial Sequence
  Description of Artificial Sequence: Synthetic oligonucleotide
  Sense strand starting at position 344 of SEQ ID NO: 1884909
cagcaaucggaacgaucaa

SEQ ID NO: 2301237 - RNA, 19 nt, Artificial Sequence
  Description of Artificial Sequence: Synthetic oligonucleotide
  Antisense strand to SEQ ID NO: 2301236
uugaucguuccgauugcug

SEQ ID NO: 2301238 - RNA, 19 nt, Artificial Sequence
  Description of Artificial Sequence: Synthetic oligonucleotide
  Sense strand starting at position 432 of SEQ ID NO: 1884909
gcgagagcucccguggcua

SEQ ID NO: 2301239 - RNA, 19 nt, Artificial Sequence
  Description of Artificial Sequence: Synthetic oligonucleotide
  Antisense strand to SEQ ID NO: 2301238
uagccacgggagcucucgc

SEQ ID NO: 2301240 - RNA, 19 nt, Artificial Sequence
  Description of Artificial Sequence: Synthetic oligonucleotide
  Sense strand starting at position 516 of SEQ ID NO: 1884909
cucggauuggcugauugau

SEQ ID NO: 2301241 - RNA, 19 nt, Artificial Sequence
  Description of Artificial Sequence: Synthetic oligonucleotide
  Antisense strand to SEQ ID NO: 2301240
aucaaucagccaauccgag

SEQ ID NO: 2301242 - RNA, 19 nt, Artificial Sequence
  Description of Artificial Sequence: Synthetic oligonucleotide
  Sense strand starting at position 522 of SEQ ID NO: 1884909
uuggcugauugauccgagu

SEQ ID NO: 2301243 - RNA, 19 nt, Artificial Sequence
  Description of Artificial Sequence: Synthetic oligonucleotide
  Antisense strand to SEQ ID NO: 2301242
acucggaucaaucagccaa

SEQ ID NO: 2301244 - RNA, 19 nt, Artificial Sequence
  Description of Artificial Sequence: Synthetic oligonucleotide
  Sense strand starting at position 524 of SEQ ID NO: 1884909
ggcugauugauccgaguca

SEQ ID NO: 2301245 - RNA, 19 nt, Artificial Sequence
  Description of Artificial Sequence: Synthetic oligonucleotide
  Antisense strand to SEQ ID NO: 2301244
ugacucggaucaaucagcc

SEQ ID NO: 2301246 - RNA, 19 nt, Artificial Sequence
  Description of Artificial Sequence: Synthetic oligonucleotide
  Sense strand starting at position 557 of SEQ ID NO: 1884909
cagaaagcgguucgacaau

SEQ ID NO: 2301247 - RNA, 19 nt, Artificial Sequence
  Description of Artificial Sequence: Synthetic oligonucleotide
  Antisense strand to SEQ ID NO: 2301246
auugucgaaccgcuuucug

SEQ ID NO: 2301248 - RNA, 19 nt, Artificial Sequence
  Description of Artificial Sequence: Synthetic oligonucleotide
  Sense strand starting at position 925 of SEQ ID NO: 1884909
uggauuagggcggagguau

SEQ ID NO: 2301249 - RNA, 19 nt, Artificial Sequence
  Description of Artificial Sequence: Synthetic oligonucleotide
  Antisense strand to SEQ ID NO: 2301248
auaccuccgcccuaaucca

SEQ ID NO: 2301250 - RNA, 19 nt, Artificial Sequence
  Description of Artificial Sequence: Synthetic oligonucleotide
  Sense strand starting at position 966 of SEQ ID NO: 1884909
ccgagaacugguugaucuu

SEQ ID NO: 2301251 - RNA, 19 nt, Artificial Sequence
  Description of Artificial Sequence: Synthetic oligonucleotide
  Antisense strand to SEQ ID NO: 2301250
aagaucaaccaguucucgg

SEQ ID NO: 2301252 - RNA, 19 nt, Artificial Sequence
  Description of Artificial Sequence: Synthetic oligonucleotide
  Sense strand starting at position 967 of SEQ ID NO: 1884909
cgagaacugguugaucuuu

SEQ ID NO: 2301253 - RNA, 19 nt, Artificial Sequence
  Description of Artificial Sequence: Synthetic oligonucleotide
  Antisense strand to SEQ ID NO: 2301252
aaagaucaaccaguucucg

SEQ ID NO: 2301254 - RNA, 19 nt, Artificial Sequence
  Description of Artificial Sequence: Synthetic oligonucleotide
  Sense strand starting at position 969 of SEQ ID NO: 1884909
agaacugguugaucuuuga

SEQ ID NO: 2301255 - RNA, 19 nt, Artificial Sequence
  Description of Artificial Sequence: Synthetic oligonucleotide
  Antisense strand to SEQ ID NO: 2301254
ucaaagaucaaccaguucu

SEQ ID NO: 2301256 - RNA, 19 nt, Artificial Sequence
  Description of Artificial Sequence: Synthetic oligonucleotide
  Sense strand starting at position 972 of SEQ ID NO: 1884909
acugguugaucuuugaucu

SEQ ID NO: 2301257 - RNA, 19 nt, Artificial Sequence
  Description of Artificial Sequence: Synthetic oligonucleotide
  Antisense strand to SEQ ID NO: 2301256
agaucaaagaucaaccagu

SEQ ID NO: 2301258 - RNA, 19 nt, Artificial Sequence
  Description of Artificial Sequence: Synthetic oligonucleotide
  Sense strand starting at position 973 of SEQ ID NO: 1884909
cugguugaucuuugaucuu

SEQ ID NO: 2301259 - RNA, 19 nt, Artificial Sequence
  Description of Artificial Sequence: Synthetic oligonucleotide
  Antisense strand to SEQ ID NO: 2301258
aagaucaaagaucaaccag

SEQ ID NO: 2301260 - RNA, 19 nt, Artificial Sequence
  Description of Artificial Sequence: Synthetic oligonucleotide
  Sense strand starting at position 976 of SEQ ID NO: 1884909
guugaucuuugaucuuaga

SEQ ID NO: 2301261 - RNA, 19 nt, Artificial Sequence
  Description of Artificial Sequence: Synthetic oligonucleotide
  Antisense strand to SEQ ID NO: 2301260
ucuaagaucaaagaucaac

SEQ ID NO: 2301262 - RNA, 19 nt, Artificial Sequence
  Description of Artificial Sequence: Synthetic oligonucleotide
  Sense strand starting at position 989 of SEQ ID NO: 1884909
cuuagauucugccugccuu

SEQ ID NO: 2301263 - RNA, 19 nt, Artificial Sequence
  Description of Artificial Sequence: Synthetic oligonucleotide
  Antisense strand to SEQ ID NO: 2301262
aaggcaggcagaaucuaag

SEQ ID NO: 2301264 - RNA, 19 nt, Artificial Sequence
  Description of Artificial Sequence: Synthetic oligonucleotide
  Sense strand starting at position 1264 of SEQ ID NO: 1884909
ccuagagaugggugcagaa

SEQ ID NO: 2301265 - RNA, 19 nt, Artificial Sequence
  Description of Artificial Sequence: Synthetic oligonucleotide
  Antisense strand to SEQ ID NO: 2301264
uucugcacccaucucuagg

SEQ ID NO: 2301266 - RNA, 19 nt, Artificial Sequence
  Description of Artificial Sequence: Synthetic oligonucleotide
  Sense strand starting at position 1464 of SEQ ID NO: 1884909
accuguuggagccauggua

SEQ ID NO: 2301267 - RNA, 19 nt, Artificial Sequence
  Description of Artificial Sequence: Synthetic oligonucleotide
  Antisense strand to SEQ ID NO: 2301266
uaccauggcuccaacaggu

SEQ ID NO: 2301268 - RNA, 19 nt, Artificial Sequence
  Description of Artificial Sequence: Synthetic oligonucleotide
  Sense strand starting at position 1561 of SEQ ID NO: 1884909
uccuacuuacugugauagu

SEQ ID NO: 2301269 - RNA, 19 nt, Artificial Sequence
  Description of Artificial Sequence: Synthetic oligonucleotide
  Antisense strand to SEQ ID NO: 2301268
acuaucacaguaaguagga

SEQ ID NO: 2301270 - RNA, 19 nt, Artificial Sequence
  Description of Artificial Sequence: Synthetic oligonucleotide
  Sense strand starting at position 1571 of SEQ ID NO: 1884909
ugugauaguccugguccca

SEQ ID NO: 2301271 - RNA, 19 nt, Artificial Sequence
  Description of Artificial Sequence: Synthetic oligonucleotide
  Antisense strand to SEQ ID NO: 2301270
ugggaccaggacuaucaca

SEQ ID NO: 2301272 - RNA, 19 nt, Artificial Sequence
  Description of Artificial Sequence: Synthetic oligonucleotide
  Sense strand starting at position 1888 of SEQ ID NO: 1884909
uguauauaccuuggcuuga

SEQ ID NO: 2301273 - RNA, 19 nt, Artificial Sequence
  Description of Artificial Sequence: Synthetic oligonucleotide
  Antisense strand to SEQ ID NO: 2301272
ucaagccaagguauauaca

SEQ ID NO: 2301274 - RNA, 19 nt, Artificial Sequence
  Description of Artificial Sequence: Synthetic oligonucleotide
  Sense strand starting at position 1904 of SEQ ID NO: 1884909
ugagucuguuaccugucua

SEQ ID NO: 2301275 - RNA, 19 nt, Artificial Sequence
  Description of Artificial Sequence: Synthetic oligonucleotide
  Antisense strand to SEQ ID NO: 2301274
uagacagguaacagacuca

SEQ ID NO: 2301276 - RNA, 19 nt, Artificial Sequence
  Description of Artificial Sequence: Synthetic oligonucleotide
  Sense strand starting at position 1908 of SEQ ID NO: 1884909
ucuguuaccugucuauagu

SEQ ID NO: 2301277 - RNA, 19 nt, Artificial Sequence
  Description of Artificial Sequence: Synthetic oligonucleotide
  Antisense strand to SEQ ID NO: 2301276
acuauagacagguaacaga

SEQ ID NO: 2301278 - RNA, 19 nt, Artificial Sequence
  Description of Artificial Sequence: Synthetic oligonucleotide
  Sense strand starting at position 1909 of SEQ ID NO: 1884909
cuguuaccugucuauaguu

SEQ ID NO: 2301279 - RNA, 19 nt, Artificial Sequence
  Description of Artificial Sequence: Synthetic oligonucleotide
  Antisense strand to SEQ ID NO: 2301278
aacuauagacagguaacag

SEQ ID NO: 2301280 - RNA, 19 nt, Artificial Sequence
  Description of Artificial Sequence: Synthetic oligonucleotide
  Sense strand starting at position 1916 of SEQ ID NO: 1884909
cugucuauaguuugaugau

SEQ ID NO: 2301281 - RNA, 19 nt, Artificial Sequence
  Description of Artificial Sequence: Synthetic oligonucleotide
  Antisense strand to SEQ ID NO: 2301280
aucaucaaacuauagacag

SEQ ID NO: 2301282 - RNA, 19 nt, Artificial Sequence
  Description of Artificial Sequence: Synthetic oligonucleotide
  Sense strand starting at position 1952 of SEQ ID NO: 1884909
ggcuuugucuuauucuuau

SEQ ID NO: 2301283 - RNA, 19 nt, Artificial Sequence
  Description of Artificial Sequence: Synthetic oligonucleotide
  Antisense strand to SEQ ID NO: 2301282
auaagaauaagacaaagcc

SEQ ID NO: 2301284 - RNA, 19 nt, Artificial Sequence
  Description of Artificial Sequence: Synthetic oligonucleotide
  Sense strand starting at position 1984 of SEQ ID NO: 1884909
uuagaauagugucuuaugu

SEQ ID NO: 2301285 - RNA, 19 nt, Artificial Sequence
  Description of Artificial Sequence: Synthetic oligonucleotide
  Antisense strand to SEQ ID NO: 2301284
acauaagacacuauucuaa

SEQ ID NO: 2301286 - RNA, 19 nt, Artificial Sequence
  Description of Artificial Sequence: Synthetic oligonucleotide
  Sense strand starting at position 3348 of SEQ ID NO: 1884909
agcuccuuccagggacaaa

SEQ ID NO: 2301287 - RNA, 19 nt, Artificial Sequence
  Description of Artificial Sequence: Synthetic oligonucleotide
  Antisense strand to SEQ ID NO: 2301286
uuugucccuggaaggagcu

SEQ ID NO: 2301288 - RNA, 19 nt, Artificial Sequence
  Description of Artificial Sequence: Synthetic oligonucleotide
  Sense strand starting at position 3626 of SEQ ID NO: 1884909
ugaaccagugucugauaca

SEQ ID NO: 2301289 - RNA, 19 nt, Artificial Sequence
  Description of Artificial Sequence: Synthetic oligonucleotide
  Antisense strand to SEQ ID NO: 2301288
uguaucagacacugguuca

SEQ ID NO: 2301290 - RNA, 19 nt, Artificial Sequence
  Description of Artificial Sequence: Synthetic oligonucleotide
  Sense strand starting at position 3717 of SEQ ID NO: 1884909
cugugauuacccgggauga

SEQ ID NO: 2301291 - RNA, 19 nt, Artificial Sequence
  Description of Artificial Sequence: Synthetic oligonucleotide
  Antisense strand to SEQ ID NO: 2301290
ucaucccggguaaucacag

SEQ ID NO: 2301292 - RNA, 19 nt, Artificial Sequence
  Description of Artificial Sequence: Synthetic oligonucleotide
  Sense strand starting at position 3718 of SEQ ID NO: 1884909
ugugauuacccgggaugag

SEQ ID NO: 2301293 - RNA, 19 nt, Artificial Sequence
  Description of Artificial Sequence: Synthetic oligonucleotide
  Antisense strand to SEQ ID NO: 2301292
cucaucccggguaaucaca

SEQ ID NO: 2301294 - RNA, 19 nt, Artificial Sequence
  Description of Artificial Sequence: Synthetic oligonucleotide
  Sense strand starting at position 3730 of SEQ ID NO: 1884909
ggaugagcccuugggauag

SEQ ID NO: 2301295 - RNA, 19 nt, Artificial Sequence
  Description of Artificial Sequence: Synthetic oligonucleotide
  Antisense strand to SEQ ID NO: 2301294
cuaucccaagggcucaucc

SEQ ID NO: 2301296 - RNA, 19 nt, Artificial Sequence
  Description of Artificial Sequence: Synthetic oligonucleotide
  Sense strand starting at position 3778 of SEQ ID NO: 1884909
gugacaucaguuuacucaa

SEQ ID NO: 2301297 - RNA, 19 nt, Artificial Sequence
  Description of Artificial Sequence: Synthetic oligonucleotide
  Antisense strand to SEQ ID NO: 2301296
uugaguaaacugaugucac

SEQ ID NO: 2301298 - RNA, 19 nt, Artificial Sequence
  Description of Artificial Sequence: Synthetic oligonucleotide
  Sense strand starting at position 3812 of SEQ ID NO: 1884909
ggaggacagaaaugugcua

SEQ ID NO: 2301299 - RNA, 19 nt, Artificial Sequence
  Description of Artificial Sequence: Synthetic oligonucleotide
  Antisense strand to SEQ ID NO: 2301298
uagcacauuucuguccucc

SEQ ID NO: 2301300 - RNA, 19 nt, Artificial Sequence
  Description of Artificial Sequence: Synthetic oligonucleotide
  Sense strand starting at position 3836 of SEQ ID NO: 1884909
uuuguuuaguggcuagagu

SEQ ID NO: 2301301 - RNA, 19 nt, Artificial Sequence
  Description of Artificial Sequence: Synthetic oligonucleotide
  Antisense strand to SEQ ID NO: 2301300
acucuagccacuaaacaaa

SEQ ID NO: 2301302 - RNA, 19 nt, Artificial Sequence
  Description of Artificial Sequence: Synthetic oligonucleotide
  Sense strand starting at position 3837 of SEQ ID NO: 1884909
uuguuuaguggcuagagua

SEQ ID NO: 2301303 - RNA, 19 nt, Artificial Sequence
  Description of Artificial Sequence: Synthetic oligonucleotide
  Antisense strand to SEQ ID NO: 2301302
uacucuagccacuaaacaa

SEQ ID NO: 2301304 - RNA, 19 nt, Artificial Sequence
  Description of Artificial Sequence: Synthetic oligonucleotide
  Sense strand starting at position 3851 of SEQ ID NO: 1884909
gaguauagacuguggcaau

SEQ ID NO: 2301305 - RNA, 19 nt, Artificial Sequence
  Description of Artificial Sequence: Synthetic oligonucleotide
  Antisense strand to SEQ ID NO: 2301304
auugccacagucuauacuc

SEQ ID NO: 2301306 - RNA, 19 nt, Artificial Sequence
  Description of Artificial Sequence: Synthetic oligonucleotide
  Sense strand starting at position 3879 of SEQ ID NO: 1884909
uuggguuuauauccuaacu

SEQ ID NO: 2301307 - RNA, 19 nt, Artificial Sequence
  Description of Artificial Sequence: Synthetic oligonucleotide
  Antisense strand to SEQ ID NO: 2301306
aguuaggauauaaacccaa

SEQ ID NO: 2301308 - RNA, 19 nt, Artificial Sequence
  Description of Artificial Sequence: Synthetic oligonucleotide
  Sense strand starting at position 3906 of SEQ ID NO: 1884909
uuacuauuugugcaagcuu

SEQ ID NO: 2301309 - RNA, 19 nt, Artificial Sequence
  Description of Artificial Sequence: Synthetic oligonucleotide
  Antisense strand to SEQ ID NO: 2301308
aagcuugcacaaauaguaa

SEQ ID NO: 2301310 - RNA, 19 nt, Artificial Sequence
  Description of Artificial Sequence: Synthetic oligonucleotide
  Sense strand starting at position 3943 of SEQ ID NO: 1884909
uuugguuucuuugucaagu

SEQ ID NO: 2301311 - RNA, 19 nt, Artificial Sequence
  Description of Artificial Sequence: Synthetic oligonucleotide
  Antisense strand to SEQ ID NO: 2301310
acuugacaaagaaaccaaa

SEQ ID NO: 2301312 - RNA, 19 nt, Artificial Sequence
  Description of Artificial Sequence: Synthetic oligonucleotide
  Sense strand starting at position 3975 of SEQ ID NO: 1884909
guaccaucauuaguuguca

SEQ ID NO: 2301313 - RNA, 19 nt, Artificial Sequence
  Description of Artificial Sequence: Synthetic oligonucleotide
  Antisense strand to SEQ ID NO: 2301312
ugacaacuaaugaugguac

SEQ ID NO: 2301314 - RNA, 19 nt, Artificial Sequence
  Description of Artificial Sequence: Synthetic oligonucleotide
  Sense strand starting at position 3979 of SEQ ID NO: 1884909
caucauuaguugucaugag

SEQ ID NO: 2301315 - RNA, 19 nt, Artificial Sequence
  Description of Artificial Sequence: Synthetic oligonucleotide
  Antisense strand to SEQ ID NO: 2301314
cucaugacaacuaaugaug

SEQ ID NO: 2301316 - RNA, 19 nt, Artificial Sequence
  Description of Artificial Sequence: Synthetic oligonucleotide
  Sense strand starting at position 821 of SEQ ID NO: 1884910
guucccucuguuuagaaca

SEQ ID NO: 2301317 - RNA, 19 nt, Artificial Sequence
  Description of Artificial Sequence: Synthetic oligonucleotide
  Antisense strand to SEQ ID NO: 2301316
uguucuaaacagagggaac

SEQ ID NO: 2301318 - RNA, 19 nt, Artificial Sequence
  Description of Artificial Sequence: Synthetic oligonucleotide
  Sense strand starting at position 929 of SEQ ID NO: 1884910
guuauucuuccacaaggca

SEQ ID NO: 2301319 - RNA, 19 nt, Artificial Sequence
  Description of Artificial Sequence: Synthetic oligonucleotide
  Antisense strand to SEQ ID NO: 2301318
ugccuuguggaagaauaac

SEQ ID NO: 2301320 - RNA, 19 nt, Artificial Sequence
  Description of Artificial Sequence: Synthetic oligonucleotide
  Sense strand starting at position 967 of SEQ ID NO: 1884910
ggcacucgccaugugugau

SEQ ID NO: 2301321 - RNA, 19 nt, Artificial Sequence
  Description of Artificial Sequence: Synthetic oligonucleotide
  Antisense strand to SEQ ID NO: 2301320
aucacacauggcgagugcc

SEQ ID NO: 2301322 - RNA, 19 nt, Artificial Sequence
  Description of Artificial Sequence: Synthetic oligonucleotide
  Sense strand starting at position 997 of SEQ ID NO: 1884910
gcauguggcuauuuacuua

SEQ ID NO: 2301323 - RNA, 19 nt, Artificial Sequence
  Description of Artificial Sequence: Synthetic oligonucleotide
  Antisense strand to SEQ ID NO: 2301322
uaaguaaauagccacaugc

SEQ ID NO: 2301324 - RNA, 19 nt, Artificial Sequence
  Description of Artificial Sequence: Synthetic oligonucleotide
  Sense strand starting at position 1116 of SEQ ID NO: 1884910
gcuggaaacacuugguuga

SEQ ID NO: 2301325 - RNA, 19 nt, Artificial Sequence
  Description of Artificial Sequence: Synthetic oligonucleotide
  Antisense strand to SEQ ID NO: 2301324
ucaaccaaguguuuccagc

SEQ ID NO: 2301326 - RNA, 19 nt, Artificial Sequence
  Description of Artificial Sequence: Synthetic oligonucleotide
  Sense strand starting at position 1118 of SEQ ID NO: 1884910
uggaaacacuugguugaau

SEQ ID NO: 2301327 - RNA, 19 nt, Artificial Sequence
  Description of Artificial Sequence: Synthetic oligonucleotide
  Antisense strand to SEQ ID NO: 2301326
auucaaccaaguguuucca

SEQ ID NO: 2301328 - RNA, 19 nt, Artificial Sequence
  Description of Artificial Sequence: Synthetic oligonucleotide
  Sense strand starting at position 1361 of SEQ ID NO: 1884910
agcagugcucugucaguau

SEQ ID NO: 2301329 - RNA, 19 nt, Artificial Sequence
  Description of Artificial Sequence: Synthetic oligonucleotide
  Antisense strand to SEQ ID NO: 2301328
auacugacagagcacugcu

SEQ ID NO: 2301330 - RNA, 19 nt, Artificial Sequence
  Description of Artificial Sequence: Synthetic oligonucleotide
  Sense strand starting at position 1490 of SEQ ID NO: 1884910
cuccuuggcccagacuuau

SEQ ID NO: 2301331 - RNA, 19 nt, Artificial Sequence
  Description of Artificial Sequence: Synthetic oligonucleotide
  Antisense strand to SEQ ID NO: 2301330
auaagucugggccaaggag

SEQ ID NO: 2301332 - RNA, 19 nt, Artificial Sequence
  Description of Artificial Sequence: Synthetic oligonucleotide
  Sense strand starting at position 1551 of SEQ ID NO: 1884910
aggcuuacucaaggaaaug

SEQ ID NO: 2301333 - RNA, 19 nt, Artificial Sequence
  Description of Artificial Sequence: Synthetic oligonucleotide
  Antisense strand to SEQ ID NO: 2301332
cauuuccuugaguaagccu

SEQ ID NO: 2301334 - RNA, 19 nt, Artificial Sequence
  Description of Artificial Sequence: Synthetic oligonucleotide
  Sense strand starting at position 1584 of SEQ ID NO: 1884910
gaauauugagccuguuaua

SEQ ID NO: 2301335 - RNA, 19 nt, Artificial Sequence
  Description of Artificial Sequence: Synthetic oligonucleotide
  Antisense strand to SEQ ID NO: 2301334
uauaacaggcucaauauuc

SEQ ID NO: 2301336 - RNA, 19 nt, Artificial Sequence
  Description of Artificial Sequence: Synthetic oligonucleotide
  Sense strand starting at position 1859 of SEQ ID NO: 1884910
guugaagccuacccuuuaa

SEQ ID NO: 2301337 - RNA, 19 nt, Artificial Sequence
  Description of Artificial Sequence: Synthetic oligonucleotide
  Antisense strand to SEQ ID NO: 2301336
uuaaaggguaggcuucaac

SEQ ID NO: 2301338 - RNA, 19 nt, Artificial Sequence
  Description of Artificial Sequence: Synthetic oligonucleotide
  Sense strand starting at position 1985 of SEQ ID NO: 1884910
cauauauggcuuugucuga

SEQ ID NO: 2301339 - RNA, 19 nt, Artificial Sequence
  Description of Artificial Sequence: Synthetic oligonucleotide
  Antisense strand to SEQ ID NO: 2301338
ucagacaaagccauauaug

SEQ ID NO: 2301340 - RNA, 19 nt, Artificial Sequence
  Description of Artificial Sequence: Synthetic oligonucleotide
  Sense strand starting at position 1986 of SEQ ID NO: 1884910
auauauggcuuugucugaa

SEQ ID NO: 2301341 - RNA, 19 nt, Artificial Sequence
  Description of Artificial Sequence: Synthetic oligonucleotide
  Antisense strand to SEQ ID NO: 2301340
uucagacaaagccauauau

SEQ ID NO: 2301342 - RNA, 19 nt, Artificial Sequence
  Description of Artificial Sequence: Synthetic oligonucleotide
  Sense strand starting at position 1989 of SEQ ID NO: 1884910
uauggcuuugucugaagga

SEQ ID NO: 2301343 - RNA, 19 nt, Artificial Sequence
  Description of Artificial Sequence: Synthetic oligonucleotide
  Antisense strand to SEQ ID NO: 2301342
uccuucagacaaagccaua

SEQ ID NO: 2301344 - RNA, 19 nt, Artificial Sequence
  Description of Artificial Sequence: Synthetic oligonucleotide
  Sense strand starting at position 2042 of SEQ ID NO: 1884910
gacauucuagaaugucaug

SEQ ID NO: 2301345 - RNA, 19 nt, Artificial Sequence
  Description of Artificial Sequence: Synthetic oligonucleotide
  Antisense strand to SEQ ID NO: 2301344
caugacauucuagaauguc

SEQ ID NO: 2301346 - RNA, 19 nt, Artificial Sequence
  Description of Artificial Sequence: Synthetic oligonucleotide
  Sense strand starting at position 2048 of SEQ ID NO: 1884910
cuagaaugucaugguucuu

SEQ ID NO: 2301347 - RNA, 19 nt, Artificial Sequence
  Description of Artificial Sequence: Synthetic oligonucleotide
  Antisense strand to SEQ ID NO: 2301346
aagaaccaugacauucuag

SEQ ID NO: 2301348 - RNA, 19 nt, Artificial Sequence
  Description of Artificial Sequence: Synthetic oligonucleotide
  Sense strand starting at position 2116 of SEQ ID NO: 1884910
ugaggaugguggcauuuga

SEQ ID NO: 2301349 - RNA, 19 nt, Artificial Sequence
  Description of Artificial Sequence: Synthetic oligonucleotide
  Antisense strand to SEQ ID NO: 2301348
ucaaaugccaccauccuca

SEQ ID NO: 2301350 - RNA, 19 nt, Artificial Sequence
  Description of Artificial Sequence: Synthetic oligonucleotide
  Sense strand starting at position 2144 of SEQ ID NO: 1884910
ggugcauucgacuauaagu

SEQ ID NO: 2301351 - RNA, 19 nt, Artificial Sequence
  Description of Artificial Sequence: Synthetic oligonucleotide
  Antisense strand to SEQ ID NO: 2301350
acuuauagucgaaugcacc

SEQ ID NO: 2301352 - RNA, 19 nt, Artificial Sequence
  Description of Artificial Sequence: Synthetic oligonucleotide
  Sense strand starting at position 2155 of SEQ ID NO: 1884910
cuauaaguuccuugagggu

SEQ ID NO: 2301353 - RNA, 19 nt, Artificial Sequence
  Description of Artificial Sequence: Synthetic oligonucleotide
  Antisense strand to SEQ ID NO: 2301352
acccucaaggaacuuauag

SEQ ID NO: 2301354 - RNA, 19 nt, Artificial Sequence
  Description of Artificial Sequence: Synthetic oligonucleotide
  Sense strand starting at position 2168 of SEQ ID NO: 1884910
gaggguguggaugagaguu

SEQ ID NO: 2301355 - RNA, 19 nt, Artificial Sequence
  Description of Artificial Sequence: Synthetic oligonucleotide
  Antisense strand to SEQ ID NO: 2301354
aacucucauccacacccuc

SEQ ID NO: 2301356 - RNA, 19 nt, Artificial Sequence
  Description of Artificial Sequence: Synthetic oligonucleotide
  Sense strand starting at position 2248 of SEQ ID NO: 1884910
gguucugugguucagaaug

SEQ ID NO: 2301357 - RNA, 19 nt, Artificial Sequence
  Description of Artificial Sequence: Synthetic oligonucleotide
  Antisense strand to SEQ ID NO: 2301356
cauucugaaccacagaacc

SEQ ID NO: 2301358 - RNA, 19 nt, Artificial Sequence
  Description of Artificial Sequence: Synthetic oligonucleotide
  Sense strand starting at position 2253 of SEQ ID NO: 1884910
ugugguucagaauggaugu

SEQ ID NO: 2301359 - RNA, 19 nt, Artificial Sequence
  Description of Artificial Sequence: Synthetic oligonucleotide
  Antisense strand to SEQ ID NO: 2301358
acauccauucugaaccaca

SEQ ID NO: 2301360 - RNA, 19 nt, Artificial Sequence
  Description of Artificial Sequence: Synthetic oligonucleotide
  Sense strand starting at position 2343 of SEQ ID NO: 1884910
guccaaaugucaucucacu

SEQ ID NO: 2301361 - RNA, 19 nt, Artificial Sequence
  Description of Artificial Sequence: Synthetic oligonucleotide
  Antisense strand to SEQ ID NO: 2301360
agugagaugacauuuggac

SEQ ID NO: 2301362 - RNA, 19 nt, Artificial Sequence
  Description of Artificial Sequence: Synthetic oligonucleotide
  Sense strand starting at position 2349 of SEQ ID NO: 1884910
augucaucucacugaguuu

SEQ ID NO: 2301363 - RNA, 19 nt, Artificial Sequence
  Description of Artificial Sequence: Synthetic oligonucleotide
  Antisense strand to SEQ ID NO: 2301362
aaacucagugagaugacau

SEQ ID NO: 2301364 - RNA, 19 nt, Artificial Sequence
  Description of Artificial Sequence: Synthetic oligonucleotide
  Sense strand starting at position 2428 of SEQ ID NO: 1884910
cgggauuugugucuguugu

SEQ ID NO: 2301365 - RNA, 19 nt, Artificial Sequence
  Description of Artificial Sequence: Synthetic oligonucleotide
  Antisense strand to SEQ ID NO: 2301364
acaacagacacaaaucccg

SEQ ID NO: 2301366 - RNA, 19 nt, Artificial Sequence
  Description of Artificial Sequence: Synthetic oligonucleotide
  Sense strand starting at position 2461 of SEQ ID NO: 1884910
acacaucaguguuugacau

SEQ ID NO: 2301367 - RNA, 19 nt, Artificial Sequence
  Description of Artificial Sequence: Synthetic oligonucleotide
  Antisense strand to SEQ ID NO: 2301366
augucaaacacugaugugu

SEQ ID NO: 2301368 - RNA, 19 nt, Artificial Sequence
  Description of Artificial Sequence: Synthetic oligonucleotide
  Sense strand starting at position 2467 of SEQ ID NO: 1884910
caguguuugacauggaguu

SEQ ID NO: 2301369 - RNA, 19 nt, Artificial Sequence
  Description of Artificial Sequence: Synthetic oligonucleotide
  Antisense strand to SEQ ID NO: 2301368
aacuccaugucaaacacug

SEQ ID NO: 2301370 - RNA, 19 nt, Artificial Sequence
  Description of Artificial Sequence: Synthetic oligonucleotide
  Sense strand starting at position 2480 of SEQ ID NO: 1884910
ggaguuggcccucauaaau

SEQ ID NO: 2301371 - RNA, 19 nt, Artificial Sequence
  Description of Artificial Sequence: Synthetic oligonucleotide
  Antisense strand to SEQ ID NO: 2301370
auuuaugagggccaacucc

SEQ ID NO: 2301372 - RNA, 19 nt, Artificial Sequence
  Description of Artificial Sequence: Synthetic oligonucleotide
  Sense strand starting at position 2524 of SEQ ID NO: 1884910
auggauacccauuguaaag

SEQ ID NO: 2301373 - RNA, 19 nt, Artificial Sequence
  Description of Artificial Sequence: Synthetic oligonucleotide
  Antisense strand to SEQ ID NO: 2301372
cuuuacaauggguauccau

SEQ ID NO: 2301374 - RNA, 19 nt, Artificial Sequence
  Description of Artificial Sequence: Synthetic oligonucleotide
  Sense strand starting at position 2561 of SEQ ID NO: 1884910
agauuuaccuaaggucaau

SEQ ID NO: 2301375 - RNA, 19 nt, Artificial Sequence
  Description of Artificial Sequence: Synthetic oligonucleotide
  Antisense strand to SEQ ID NO: 2301374
auugaccuuagguaaaucu

SEQ ID NO: 2301376 - RNA, 19 nt, Artificial Sequence
  Description of Artificial Sequence: Synthetic oligonucleotide
  Sense strand starting at position 2677 of SEQ ID NO: 1884910
gcaggaaggcuugagauac

SEQ ID NO: 2301377 - RNA, 19 nt, Artificial Sequence
  Description of Artificial Sequence: Synthetic oligonucleotide
  Antisense strand to SEQ ID NO: 2301376
guaucucaagccuuccugc

SEQ ID NO: 2301378 - RNA, 19 nt, Artificial Sequence
  Description of Artificial Sequence: Synthetic oligonucleotide
  Sense strand starting at position 2718 of SEQ ID NO: 1884910
uuuccaucugguggagaaa

SEQ ID NO: 2301379 - RNA, 19 nt, Artificial Sequence
  Description of Artificial Sequence: Synthetic oligonucleotide
  Antisense strand to SEQ ID NO: 2301378
uuucuccaccagauggaaa

SEQ ID NO: 2301380 - RNA, 19 nt, Artificial Sequence
  Description of Artificial Sequence: Synthetic oligonucleotide
  Sense strand starting at position 2735 of SEQ ID NO: 1884910
aacggaaauguaugcacau

SEQ ID NO: 2301381 - RNA, 19 nt, Artificial Sequence
  Description of Artificial Sequence: Synthetic oligonucleotide
  Antisense strand to SEQ ID NO: 2301380
augugcauacauuuccguu

SEQ ID NO: 2301382 - RNA, 19 nt, Artificial Sequence
  Description of Artificial Sequence: Synthetic oligonucleotide
  Sense strand starting at position 2736 of SEQ ID NO: 1884910
acggaaauguaugcacaua

SEQ ID NO: 2301383 - RNA, 19 nt, Artificial Sequence
  Description of Artificial Sequence: Synthetic oligonucleotide
  Antisense strand to SEQ ID NO: 2301382
uaugugcauacauuuccgu

SEQ ID NO: 2301384 - RNA, 19 nt, Artificial Sequence
  Description of Artificial Sequence: Synthetic oligonucleotide
  Sense strand starting at position 2843 of SEQ ID NO: 1884910
ggccuagaacuuuaguuac

SEQ ID NO: 2301385 - RNA, 19 nt, Artificial Sequence
  Description of Artificial Sequence: Synthetic oligonucleotide
  Antisense strand to SEQ ID NO: 2301384
guaacuaaaguucuaggcc

SEQ ID NO: 2301386 - RNA, 19 nt, Artificial Sequence
  Description of Artificial Sequence: Synthetic oligonucleotide
  Sense strand starting at position 3080 of SEQ ID NO: 1884910
gagggacagaaaugugguu

SEQ ID NO: 2301387 - RNA, 19 nt, Artificial Sequence
  Description of Artificial Sequence: Synthetic oligonucleotide
  Antisense strand to SEQ ID NO: 2301386
aaccacauuucugucccuc

SEQ ID NO: 2301388 - RNA, 19 nt, Artificial Sequence
  Description of Artificial Sequence: Synthetic oligonucleotide
  Sense strand starting at position 3403 of SEQ ID NO: 1884910
ggcuuugaagggugugaaa

SEQ ID NO: 2301389 - RNA, 19 nt, Artificial Sequence
  Description of Artificial Sequence: Synthetic oligonucleotide
  Antisense strand to SEQ ID NO: 2301388
uuucacacccuucaaagcc

SEQ ID NO: 2301390 - RNA, 19 nt, Artificial Sequence
  Description of Artificial Sequence: Synthetic oligonucleotide
  Sense strand starting at position 3514 of SEQ ID NO: 1884910
cugagaaccuucuuacugu

SEQ ID NO: 2301391 - RNA, 19 nt, Artificial Sequence
  Description of Artificial Sequence: Synthetic oligonucleotide
  Antisense strand to SEQ ID NO: 2301390
acaguaagaagguucucag

SEQ ID NO: 2301392 - RNA, 19 nt, Artificial Sequence
  Description of Artificial Sequence: Synthetic oligonucleotide
  Sense strand starting at position 3697 of SEQ ID NO: 1884910
ccuggauagcucugauucu

SEQ ID NO: 2301393 - RNA, 19 nt, Artificial Sequence
  Description of Artificial Sequence: Synthetic oligonucleotide
  Antisense strand to SEQ ID NO: 2301392
agaaucagagcuauccagg

SEQ ID NO: 2301394 - RNA, 19 nt, Artificial Sequence
  Description of Artificial Sequence: Synthetic oligonucleotide
  Sense strand starting at position 3850 of SEQ ID NO: 1884910
ugucauguaaccucguguu

SEQ ID NO: 2301395 - RNA, 19 nt, Artificial Sequence
  Description of Artificial Sequence: Synthetic oligonucleotide
  Antisense strand to SEQ ID NO: 2301394
aacacgagguuacaugaca

SEQ ID NO: 2301396 - RNA, 19 nt, Artificial Sequence
  Description of Artificial Sequence: Synthetic oligonucleotide
  Sense strand starting at position 5 of SEQ ID NO: 1884913
gucuuagauccagggugag

SEQ ID NO: 2301397 - RNA, 19 nt, Artificial Sequence
  Description of Artificial Sequence: Synthetic oligonucleotide
  Antisense strand to SEQ ID NO: 2301396
cucacccuggaucuaagac

SEQ ID NO: 2301398 - RNA, 19 nt, Artificial Sequence
  Description of Artificial Sequence: Synthetic oligonucleotide
  Sense strand starting at position 1894 of SEQ ID NO: 1884913
gaugguugugucugccaca

SEQ ID NO: 2301399 - RNA, 19 nt, Artificial Sequence
  Description of Artificial Sequence: Synthetic oligonucleotide
  Antisense strand to SEQ ID NO: 2301398
uguggcagacacaaccauc

SEQ ID NO: 2301400 - RNA, 19 nt, Artificial Sequence
  Description of Artificial Sequence: Synthetic oligonucleotide
  Sense strand starting at position 1977 of SEQ ID NO: 1884913
agagcaguuucuguugagu

SEQ ID NO: 2301401 - RNA, 19 nt, Artificial Sequence
  Description of Artificial Sequence: Synthetic oligonucleotide
  Antisense strand to SEQ ID NO: 2301400
acucaacagaaacugcucu

SEQ ID NO: 2301402 - RNA, 19 nt, Artificial Sequence
  Description of Artificial Sequence: Synthetic oligonucleotide
  Sense strand starting at position 1979 of SEQ ID NO: 1884913
agcaguuucuguugaguau

SEQ ID NO: 2301403 - RNA, 19 nt, Artificial Sequence
  Description of Artificial Sequence: Synthetic oligonucleotide
  Antisense strand to SEQ ID NO: 2301402
auacucaacagaaacugcu

SEQ ID NO: 2301404 - RNA, 19 nt, Artificial Sequence
  Description of Artificial Sequence: Synthetic oligonucleotide
  Sense strand starting at position 1980 of SEQ ID NO: 1884913
gcaguuucuguugaguauu

SEQ ID NO: 2301405 - RNA, 19 nt, Artificial Sequence
  Description of Artificial Sequence: Synthetic oligonucleotide
  Antisense strand to SEQ ID NO: 2301404
aauacucaacagaaacugc

SEQ ID NO: 2301406 - RNA, 19 nt, Artificial Sequence
  Description of Artificial Sequence: Synthetic oligonucleotide
  Sense strand starting at position 1983 of SEQ ID NO: 1884913
guuucuguugaguauuggu

SEQ ID NO: 2301407 - RNA, 19 nt, Artificial Sequence
  Description of Artificial Sequence: Synthetic oligonucleotide
  Antisense strand to SEQ ID NO: 2301406
accaauacucaacagaaac

SEQ ID NO: 2301408 - RNA, 19 nt, Artificial Sequence
  Description of Artificial Sequence: Synthetic oligonucleotide
  Sense strand starting at position 1992 of SEQ ID NO: 1884913
gaguauugguucccucuuu

SEQ ID NO: 2301409 - RNA, 19 nt, Artificial Sequence
  Description of Artificial Sequence: Synthetic oligonucleotide
  Antisense strand to SEQ ID NO: 2301408
aaagagggaaccaauacuc

SEQ ID NO: 2301410 - RNA, 19 nt, Artificial Sequence
  Description of Artificial Sequence: Synthetic oligonucleotide
  Sense strand starting at position 2125 of SEQ ID NO: 1884913
gaggauuugcuuggccauu

SEQ ID NO: 2301411 - RNA, 19 nt, Artificial Sequence
  Description of Artificial Sequence: Synthetic oligonucleotide
  Antisense strand to SEQ ID NO: 2301410
aauggccaagcaaauccuc

SEQ ID NO: 2301412 - RNA, 19 nt, Artificial Sequence
  Description of Artificial Sequence: Synthetic oligonucleotide
  Sense strand starting at position 2141 of SEQ ID NO: 1884913
auugucaagcugugaguca

SEQ ID NO: 2301413 - RNA, 19 nt, Artificial Sequence
  Description of Artificial Sequence: Synthetic oligonucleotide
  Antisense strand to SEQ ID NO: 2301412
ugacucacagcuugacaau

SEQ ID NO: 2301414 - RNA, 19 nt, Artificial Sequence
  Description of Artificial Sequence: Synthetic oligonucleotide
  Sense strand starting at position 2165 of SEQ ID NO: 1884913
acuggagagacggguuuaa

SEQ ID NO: 2301415 - RNA, 19 nt, Artificial Sequence
  Description of Artificial Sequence: Synthetic oligonucleotide
  Antisense strand to SEQ ID NO: 2301414
uuaaacccgucucuccagu

SEQ ID NO: 2301416 - RNA, 19 nt, Artificial Sequence
  Description of Artificial Sequence: Synthetic oligonucleotide
  Sense strand starting at position 2269 of SEQ ID NO: 1884913
gaggguaaaugccagcuua

SEQ ID NO: 2301417 - RNA, 19 nt, Artificial Sequence
  Description of Artificial Sequence: Synthetic oligonucleotide
  Antisense strand to SEQ ID NO: 2301416
uaagcuggcauuuacccuc

SEQ ID NO: 2301418 - RNA, 19 nt, Artificial Sequence
  Description of Artificial Sequence: Synthetic oligonucleotide
  Sense strand starting at position 2385 of SEQ ID NO: 1884913
ugugcaaacuaugaaaugu

SEQ ID NO: 2301419 - RNA, 19 nt, Artificial Sequence
  Description of Artificial Sequence: Synthetic oligonucleotide
  Antisense strand to SEQ ID NO: 2301418
acauuucauaguuugcaca

SEQ ID NO: 2301420 - RNA, 19 nt, Artificial Sequence
  Description of Artificial Sequence: Synthetic oligonucleotide
  Sense strand starting at position 2396 of SEQ ID NO: 1884913
ugaaauguacagugucuuu

SEQ ID NO: 2301421 - RNA, 19 nt, Artificial Sequence
  Description of Artificial Sequence: Synthetic oligonucleotide
  Antisense strand to SEQ ID NO: 2301420
aaagacacuguacauuuca

SEQ ID NO: 2301422 - RNA, 19 nt, Artificial Sequence
  Description of Artificial Sequence: Synthetic oligonucleotide
  Sense strand starting at position 2401 of SEQ ID NO: 1884913
uguacagugucuuuaacaa

SEQ ID NO: 2301423 - RNA, 19 nt, Artificial Sequence
  Description of Artificial Sequence: Synthetic oligonucleotide
  Antisense strand to SEQ ID NO: 2301422
uuguuaaagacacuguaca

SEQ ID NO: 2301424 - RNA, 19 nt, Artificial Sequence
  Description of Artificial Sequence: Synthetic oligonucleotide
  Sense strand starting at position 2432 of SEQ ID NO: 1884913
gggcgauguccacaggacu

SEQ ID NO: 2301425 - RNA, 19 nt, Artificial Sequence
  Description of Artificial Sequence: Synthetic oligonucleotide
  Antisense strand to SEQ ID NO: 2301424
aguccuguggacaucgccc

SEQ ID NO: 2301426 - RNA, 19 nt, Artificial Sequence
  Description of Artificial Sequence: Synthetic oligonucleotide
  Sense strand starting at position 2461 of SEQ ID NO: 1884913
gugccaaggugcucuaagu

SEQ ID NO: 2301427 - RNA, 19 nt, Artificial Sequence
  Description of Artificial Sequence: Synthetic oligonucleotide
  Antisense strand to SEQ ID NO: 2301426
acuuagagcaccuuggcac

SEQ ID NO: 2301428 - RNA, 19 nt, Artificial Sequence
  Description of Artificial Sequence: Synthetic oligonucleotide
  Sense strand starting at position 2821 of SEQ ID NO: 1884913
ggaugaguccagcagaguu

SEQ ID NO: 2301429 - RNA, 19 nt, Artificial Sequence
  Description of Artificial Sequence: Synthetic oligonucleotide
  Antisense strand to SEQ ID NO: 2301428
aacucugcuggacucaucc

SEQ ID NO: 2301430 - RNA, 19 nt, Artificial Sequence
  Description of Artificial Sequence: Synthetic oligonucleotide
  Sense strand starting at position 2823 of SEQ ID NO: 1884913
augaguccagcagaguuua

SEQ ID NO: 2301431 - RNA, 19 nt, Artificial Sequence
  Description of Artificial Sequence: Synthetic oligonucleotide
  Antisense strand to SEQ ID NO: 2301430
uaaacucugcuggacucau

SEQ ID NO: 2301432 - RNA, 19 nt, Artificial Sequence
  Description of Artificial Sequence: Synthetic oligonucleotide
  Sense strand starting at position 2990 of SEQ ID NO: 1884913
ggcguaguuaaggguccau

SEQ ID NO: 2301433 - RNA, 19 nt, Artificial Sequence
  Description of Artificial Sequence: Synthetic oligonucleotide
  Antisense strand to SEQ ID NO: 2301432
auggacccuuaacuacgcc

SEQ ID NO: 2301434 - RNA, 19 nt, Artificial Sequence
  Description of Artificial Sequence: Synthetic oligonucleotide
  Sense strand starting at position 2994 of SEQ ID NO: 1884913
uaguuaaggguccaugguu

SEQ ID NO: 2301435 - RNA, 19 nt, Artificial Sequence
  Description of Artificial Sequence: Synthetic oligonucleotide
  Antisense strand to SEQ ID NO: 2301434
aaccauggacccuuaacua

SEQ ID NO: 2301436 - RNA, 19 nt, Artificial Sequence
  Description of Artificial Sequence: Synthetic oligonucleotide
  Sense strand starting at position 3329 of SEQ ID NO: 1884913
ccuggauucugugggucua

SEQ ID NO: 2301437 - RNA, 19 nt, Artificial Sequence
  Description of Artificial Sequence: Synthetic oligonucleotide
  Antisense strand to SEQ ID NO: 2301436
uagacccacagaauccagg

SEQ ID NO: 2301438 - RNA, 19 nt, Artificial Sequence
  Description of Artificial Sequence: Synthetic oligonucleotide
  Sense strand starting at position 3331 of SEQ ID NO: 1884913
uggauucugugggucuaga

SEQ ID NO: 2301439 - RNA, 19 nt, Artificial Sequence
  Description of Artificial Sequence: Synthetic oligonucleotide
  Antisense strand to SEQ ID NO: 2301438
ucuagacccacagaaucca

SEQ ID NO: 2301440 - RNA, 19 nt, Artificial Sequence
  Description of Artificial Sequence: Synthetic oligonucleotide
  Sense strand starting at position 3366 of SEQ ID NO: 1884913
cggagugguggcugacaga

SEQ ID NO: 2301441 - RNA, 19 nt, Artificial Sequence
  Description of Artificial Sequence: Synthetic oligonucleotide
  Antisense strand to SEQ ID NO: 2301440
ucugucagccaccacuccg

SEQ ID NO: 2301442 - RNA, 19 nt, Artificial Sequence
  Description of Artificial Sequence: Synthetic oligonucleotide
  Sense strand starting at position 3459 of SEQ ID NO: 1884913
cagggagucugaguaucua

SEQ ID NO: 2301443 - RNA, 19 nt, Artificial Sequence
  Description of Artificial Sequence: Synthetic oligonucleotide
  Antisense strand to SEQ ID NO: 2301442
uagauacucagacucccug

SEQ ID NO: 2301444 - RNA, 19 nt, Artificial Sequence
  Description of Artificial Sequence: Synthetic oligonucleotide
  Sense strand starting at position 3467 of SEQ ID NO: 1884913
cugaguaucuauccgcuua

SEQ ID NO: 2301445 - RNA, 19 nt, Artificial Sequence
  Description of Artificial Sequence: Synthetic oligonucleotide
  Antisense strand to SEQ ID NO: 2301444
uaagcggauagauacucag

SEQ ID NO: 2301446 - RNA, 19 nt, Artificial Sequence
  Description of Artificial Sequence: Synthetic oligonucleotide
  Sense strand starting at position 3469 of SEQ ID NO: 1884913
gaguaucuauccgcuuaug

SEQ ID NO: 2301447 - RNA, 19 nt, Artificial Sequence
  Description of Artificial Sequence: Synthetic oligonucleotide
  Antisense strand to SEQ ID NO: 2301446
cauaagcggauagauacuc

SEQ ID NO: 2301448 - RNA, 19 nt, Artificial Sequence
  Description of Artificial Sequence: Synthetic oligonucleotide
  Sense strand starting at position 3528 of SEQ ID NO: 1884913
ugucaauucccuugaggau

SEQ ID NO: 2301449 - RNA, 19 nt, Artificial Sequence
  Description of Artificial Sequence: Synthetic oligonucleotide
  Antisense strand to SEQ ID NO: 2301448
auccucaagggaauugaca

SEQ ID NO: 2301450 - RNA, 19 nt, Artificial Sequence
  Description of Artificial Sequence: Synthetic oligonucleotide
  Sense strand starting at position 3529 of SEQ ID NO: 1884913
gucaauucccuugaggauu

SEQ ID NO: 2301451 - RNA, 19 nt, Artificial Sequence
  Description of Artificial Sequence: Synthetic oligonucleotide
  Antisense strand to SEQ ID NO: 2301450
aauccucaagggaauugac

SEQ ID NO: 2301452 - RNA, 19 nt, Artificial Sequence
  Description of Artificial Sequence: Synthetic oligonucleotide
  Sense strand starting at position 3572 of SEQ ID NO: 1884913
gcgugcugguccucucuga

SEQ ID NO: 2301453 - RNA, 19 nt, Artificial Sequence
  Description of Artificial Sequence: Synthetic oligonucleotide
  Antisense strand to SEQ ID NO: 2301452
ucagagaggaccagcacgc

SEQ ID NO: 2301454 - RNA, 19 nt, Artificial Sequence
  Description of Artificial Sequence: Synthetic oligonucleotide
  Sense strand starting at position 3576 of SEQ ID NO: 1884913
gcugguccucucugauguu

SEQ ID NO: 2301455 - RNA, 19 nt, Artificial Sequence
  Description of Artificial Sequence: Synthetic oligonucleotide
  Antisense strand to SEQ ID NO: 2301454
aacaucagagaggaccagc

SEQ ID NO: 2301456 - RNA, 19 nt, Artificial Sequence
  Description of Artificial Sequence: Synthetic oligonucleotide
  Sense strand starting at position 3595 of SEQ ID NO: 1884913
uuauuuaucugucccuguu

SEQ ID NO: 2301457 - RNA, 19 nt, Artificial Sequence
  Description of Artificial Sequence: Synthetic oligonucleotide
  Antisense strand to SEQ ID NO: 2301456
aacagggacagauaaauaa

SEQ ID NO: 2301458 - RNA, 19 nt, Artificial Sequence
  Description of Artificial Sequence: Synthetic oligonucleotide
  Sense strand starting at position 3597 of SEQ ID NO: 1884913
auuuaucugucccuguuga

SEQ ID NO: 2301459 - RNA, 19 nt, Artificial Sequence
  Description of Artificial Sequence: Synthetic oligonucleotide
  Antisense strand to SEQ ID NO: 2301458
ucaacagggacagauaaau

SEQ ID NO: 2301460 - RNA, 19 nt, Artificial Sequence
  Description of Artificial Sequence: Synthetic oligonucleotide
  Sense strand starting at position 3707 of SEQ ID NO: 1884913
gcuucuaucccugcgugga

SEQ ID NO: 2301461 - RNA, 19 nt, Artificial Sequence
  Description of Artificial Sequence: Synthetic oligonucleotide
  Antisense strand to SEQ ID NO: 2301460
uccacgcagggauagaagc

SEQ ID NO: 2301462 - RNA, 19 nt, Artificial Sequence
  Description of Artificial Sequence: Synthetic oligonucleotide
  Sense strand starting at position 3792 of SEQ ID NO: 1884913
uucucuuuccggugugguu

SEQ ID NO: 2301463 - RNA, 19 nt, Artificial Sequence
  Description of Artificial Sequence: Synthetic oligonucleotide
  Antisense strand to SEQ ID NO: 2301462
aaccacaccggaaagagaa

SEQ ID NO: 2301464 - RNA, 19 nt, Artificial Sequence
  Description of Artificial Sequence: Synthetic oligonucleotide
  Sense strand starting at position 3841 of SEQ ID NO: 1884913
ugccuucuuugagggucua

SEQ ID NO: 2301465 - RNA, 19 nt, Artificial Sequence
  Description of Artificial Sequence: Synthetic oligonucleotide
  Antisense strand to SEQ ID NO: 2301464
uagacccucaaagaaggca

SEQ ID NO: 2301466 - RNA, 19 nt, Artificial Sequence
  Description of Artificial Sequence: Synthetic oligonucleotide
  Sense strand starting at position 3886 of SEQ ID NO: 1884913
cugggaguggugugucagu

SEQ ID NO: 2301467 - RNA, 19 nt, Artificial Sequence
  Description of Artificial Sequence: Synthetic oligonucleotide
  Antisense strand to SEQ ID NO: 2301466
acugacacaccacucccag

SEQ ID NO: 2301468 - RNA, 19 nt, Artificial Sequence
  Description of Artificial Sequence: Synthetic oligonucleotide
  Sense strand starting at position 3887 of SEQ ID NO: 1884913
ugggaguggugugucagua

SEQ ID NO: 2301469 - RNA, 19 nt, Artificial Sequence
  Description of Artificial Sequence: Synthetic oligonucleotide
  Antisense strand to SEQ ID NO: 2301468
uacugacacaccacuccca

SEQ ID NO: 2301470 - RNA, 19 nt, Artificial Sequence
  Description of Artificial Sequence: Synthetic oligonucleotide
  Sense strand starting at position 3889 of SEQ ID NO: 1884913
ggaguggugugucaguaua

SEQ ID NO: 2301471 - RNA, 19 nt, Artificial Sequence
  Description of Artificial Sequence: Synthetic oligonucleotide
  Antisense strand to SEQ ID NO: 2301470
uauacugacacaccacucc

SEQ ID NO: 2301472 - RNA, 19 nt, Artificial Sequence
  Description of Artificial Sequence: Synthetic oligonucleotide
  Sense strand starting at position 3891 of SEQ ID NO: 1884913
aguggugugucaguauauu

SEQ ID NO: 2301473 - RNA, 19 nt, Artificial Sequence
  Description of Artificial Sequence: Synthetic oligonucleotide
  Antisense strand to SEQ ID NO: 2301472
aauauacugacacaccacu

SEQ ID NO: 2301474 - RNA, 19 nt, Artificial Sequence
  Description of Artificial Sequence: Synthetic oligonucleotide
  Sense strand starting at position 3929 of SEQ ID NO: 1884913
agucuuucucccugaaggu

SEQ ID NO: 2301475 - RNA, 19 nt, Artificial Sequence
  Description of Artificial Sequence: Synthetic oligonucleotide
  Antisense strand to SEQ ID NO: 2301474
accuucagggagaaagacu

SEQ ID NO: 2301476 - RNA, 19 nt, Artificial Sequence
  Description of Artificial Sequence: Synthetic oligonucleotide
  Sense strand starting at position 1 of SEQ ID NO: 1884912
aggagagucuuagauccag

SEQ ID NO: 2301477 - RNA, 19 nt, Artificial Sequence
  Description of Artificial Sequence: Synthetic oligonucleotide
  Antisense strand to SEQ ID NO: 2301476
cuggaucuaagacucuccu

SEQ ID NO: 2301478 - RNA, 19 nt, Artificial Sequence
  Description of Artificial Sequence: Synthetic oligonucleotide
  Sense strand starting at position 7 of SEQ ID NO: 1884912
gucuuagauccagggugag

SEQ ID NO: 2301479 - RNA, 19 nt, Artificial Sequence
  Description of Artificial Sequence: Synthetic oligonucleotide
  Antisense strand to SEQ ID NO: 2301478
cucacccuggaucuaagac

SEQ ID NO: 2301480 - RNA, 19 nt, Artificial Sequence
  Description of Artificial Sequence: Synthetic oligonucleotide
  Sense strand starting at position 1896 of SEQ ID NO: 1884912
gaugguugugucugccaca

SEQ ID NO: 2301481 - RNA, 19 nt, Artificial Sequence
  Description of Artificial Sequence: Synthetic oligonucleotide
  Antisense strand to SEQ ID NO: 2301480
uguggcagacacaaccauc

SEQ ID NO: 2301482 - RNA, 19 nt, Artificial Sequence
  Description of Artificial Sequence: Synthetic oligonucleotide
  Sense strand starting at position 1979 of SEQ ID NO: 1884912
agagcaguuucuguugagu

SEQ ID NO: 2301483 - RNA, 19 nt, Artificial Sequence
  Description of Artificial Sequence: Synthetic oligonucleotide
  Antisense strand to SEQ ID NO: 2301482
acucaacagaaacugcucu

SEQ ID NO: 2301484 - RNA, 19 nt, Artificial Sequence
  Description of Artificial Sequence: Synthetic oligonucleotide
  Sense strand starting at position 1982 of SEQ ID NO: 1884912
gcaguuucuguugaguauu

SEQ ID NO: 2301485 - RNA, 19 nt, Artificial Sequence
  Description of Artificial Sequence: Synthetic oligonucleotide
  Antisense strand to SEQ ID NO: 2301484
aauacucaacagaaacugc

SEQ ID NO: 2301486 - RNA, 19 nt, Artificial Sequence
  Description of Artificial Sequence: Synthetic oligonucleotide
  Sense strand starting at position 1985 of SEQ ID NO: 1884912
guuucuguugaguauuggu

SEQ ID NO: 2301487 - RNA, 19 nt, Artificial Sequence
  Description of Artificial Sequence: Synthetic oligonucleotide
  Antisense strand to SEQ ID NO: 2301486
accaauacucaacagaaac

SEQ ID NO: 2301488 - RNA, 19 nt, Artificial Sequence
  Description of Artificial Sequence: Synthetic oligonucleotide
  Sense strand starting at position 1994 of SEQ ID NO: 1884912
gaguauugguucccucuuu

SEQ ID NO: 2301489 - RNA, 19 nt, Artificial Sequence
  Description of Artificial Sequence: Synthetic oligonucleotide
  Antisense strand to SEQ ID NO: 2301488
aaagagggaaccaauacuc

SEQ ID NO: 2301490 - RNA, 19 nt, Artificial Sequence
  Description of Artificial Sequence: Synthetic oligonucleotide
  Sense strand starting at position 2127 of SEQ ID NO: 1884912
gaggauuugcuuggccauu

SEQ ID NO: 2301491 - RNA, 19 nt, Artificial Sequence
  Description of Artificial Sequence: Synthetic oligonucleotide
  Antisense strand to SEQ ID NO: 2301490
aauggccaagcaaauccuc

SEQ ID NO: 2301492 - RNA, 19 nt, Artificial Sequence
  Description of Artificial Sequence: Synthetic oligonucleotide
  Sense strand starting at position 2143 of SEQ ID NO: 1884912
auugucaagcugugaguca

SEQ ID NO: 2301493 - RNA, 19 nt, Artificial Sequence
  Description of Artificial Sequence: Synthetic oligonucleotide
  Antisense strand to SEQ ID NO: 2301492
ugacucacagcuugacaau

SEQ ID NO: 2301494 - RNA, 19 nt, Artificial Sequence
  Description of Artificial Sequence: Synthetic oligonucleotide
  Sense strand starting at position 2167 of SEQ ID NO: 1884912
acuggagagacggguuuaa

SEQ ID NO: 2301495 - RNA, 19 nt, Artificial Sequence
  Description of Artificial Sequence: Synthetic oligonucleotide
  Antisense strand to SEQ ID NO: 2301494
uuaaacccgucucuccagu

SEQ ID NO: 2301496 - RNA, 19 nt, Artificial Sequence
  Description of Artificial Sequence: Synthetic oligonucleotide
  Sense strand starting at position 2271 of SEQ ID NO: 1884912
gaggguaaaugccagcuua

SEQ ID NO: 2301497 - RNA, 19 nt, Artificial Sequence
  Description of Artificial Sequence: Synthetic oligonucleotide
  Antisense strand to SEQ ID NO: 2301496
uaagcuggcauuuacccuc

SEQ ID NO: 2301498 - RNA, 19 nt, Artificial Sequence
  Description of Artificial Sequence: Synthetic oligonucleotide
  Sense strand starting at position 2387 of SEQ ID NO: 1884912
ugugcaaacuaugaaaugu

SEQ ID NO: 2301499 - RNA, 19 nt, Artificial Sequence
  Description of Artificial Sequence: Synthetic oligonucleotide
  Antisense strand to SEQ ID NO: 2301498
acauuucauaguuugcaca

SEQ ID NO: 2301500 - RNA, 19 nt, Artificial Sequence
  Description of Artificial Sequence: Synthetic oligonucleotide
  Sense strand starting at position 2398 of SEQ ID NO: 1884912
ugaaauguacagugucuuu

SEQ ID NO: 2301501 - RNA, 19 nt, Artificial Sequence
  Description of Artificial Sequence: Synthetic oligonucleotide
  Antisense strand to SEQ ID NO: 2301500
aaagacacuguacauuuca

SEQ ID NO: 2301502 - RNA, 19 nt, Artificial Sequence
  Description of Artificial Sequence: Synthetic oligonucleotide
  Sense strand starting at position 2403 of SEQ ID NO: 1884912
uguacagugucuuuaacaa

SEQ ID NO: 2301503 - RNA, 19 nt, Artificial Sequence
  Description of Artificial Sequence: Synthetic oligonucleotide
  Antisense strand to SEQ ID NO: 2301502
uuguuaaagacacuguaca

SEQ ID NO: 2301504 - RNA, 19 nt, Artificial Sequence
  Description of Artificial Sequence: Synthetic oligonucleotide
  Sense strand starting at position 2434 of SEQ ID NO: 1884912
gggcgauguccacaggacu

SEQ ID NO: 2301505 - RNA, 19 nt, Artificial Sequence
  Description of Artificial Sequence: Synthetic oligonucleotide
  Antisense strand to SEQ ID NO: 2301504
aguccuguggacaucgccc

SEQ ID NO: 2301506 - RNA, 19 nt, Artificial Sequence
  Description of Artificial Sequence: Synthetic oligonucleotide
  Sense strand starting at position 2463 of SEQ ID NO: 1884912
gugccaaggugcucuaagu

SEQ ID NO: 2301507 - RNA, 19 nt, Artificial Sequence
  Description of Artificial Sequence: Synthetic oligonucleotide
  Antisense strand to SEQ ID NO: 2301506
acuuagagcaccuuggcac

SEQ ID NO: 2301508 - RNA, 19 nt, Artificial Sequence
  Description of Artificial Sequence: Synthetic oligonucleotide
  Sense strand starting at position 2823 of SEQ ID NO: 1884912
ggaugaguccagcagaguu

SEQ ID NO: 2301509 - RNA, 19 nt, Artificial Sequence
  Description of Artificial Sequence: Synthetic oligonucleotide
  Antisense strand to SEQ ID NO: 2301508
aacucugcuggacucaucc

SEQ ID NO: 2301510 - RNA, 19 nt, Artificial Sequence
  Description of Artificial Sequence: Synthetic oligonucleotide
  Sense strand starting at position 2825 of SEQ ID NO: 1884912
augaguccagcagaguuua

SEQ ID NO: 2301511 - RNA, 19 nt, Artificial Sequence
  Description of Artificial Sequence: Synthetic oligonucleotide
  Antisense strand to SEQ ID NO: 2301510
uaaacucugcuggacucau

SEQ ID NO: 2301512 - RNA, 19 nt, Artificial Sequence
  Description of Artificial Sequence: Synthetic oligonucleotide
  Sense strand starting at position 2992 of SEQ ID NO: 1884912
ggcguaguuaaggguccau

SEQ ID NO: 2301513 - RNA, 19 nt, Artificial Sequence
  Description of Artificial Sequence: Synthetic oligonucleotide
  Antisense strand to SEQ ID NO: 2301512
auggacccuuaacuacgcc

SEQ ID NO: 2301514 - RNA, 19 nt, Artificial Sequence
  Description of Artificial Sequence: Synthetic oligonucleotide
  Sense strand starting at position 2996 of SEQ ID NO: 1884912
uaguuaaggguccaugguu

SEQ ID NO: 2301515 - RNA, 19 nt, Artificial Sequence
  Description of Artificial Sequence: Synthetic oligonucleotide
  Antisense strand to SEQ ID NO: 2301514
aaccauggacccuuaacua

SEQ ID NO: 2301516 - RNA, 19 nt, Artificial Sequence
  Description of Artificial Sequence: Synthetic oligonucleotide
  Sense strand starting at position 3331 of SEQ ID NO: 1884912
ccuggauucugugggucua

SEQ ID NO: 2301517 - RNA, 19 nt, Artificial Sequence
  Description of Artificial Sequence: Synthetic oligonucleotide
  Antisense strand to SEQ ID NO: 2301516
uagacccacagaauccagg

SEQ ID NO: 2301518 - RNA, 19 nt, Artificial Sequence
  Description of Artificial Sequence: Synthetic oligonucleotide
  Sense strand starting at position 3333 of SEQ ID NO: 1884912
uggauucugugggucuaga

SEQ ID NO: 2301519 - RNA, 19 nt, Artificial Sequence
  Description of Artificial Sequence: Synthetic oligonucleotide
  Antisense strand to SEQ ID NO: 2301518
ucuagacccacagaaucca

SEQ ID NO: 2301520 - RNA, 19 nt, Artificial Sequence
  Description of Artificial Sequence: Synthetic oligonucleotide
  Sense strand starting at position 3368 of SEQ ID NO: 1884912
cggagugguggcugacaga

SEQ ID NO: 2301521 - RNA, 19 nt, Artificial Sequence
  Description of Artificial Sequence: Synthetic oligonucleotide
  Antisense strand to SEQ ID NO: 2301520
ucugucagccaccacuccg

SEQ ID NO: 2301522 - RNA, 19 nt, Artificial Sequence
  Description of Artificial Sequence: Synthetic oligonucleotide
  Sense strand starting at position 3461 of SEQ ID NO: 1884912
cagggagucugaguaucua

SEQ ID NO: 2301523 - RNA, 19 nt, Artificial Sequence
  Description of Artificial Sequence: Synthetic oligonucleotide
  Antisense strand to SEQ ID NO: 2301522
uagauacucagacucccug

SEQ ID NO: 2301524 - RNA, 19 nt, Artificial Sequence
  Description of Artificial Sequence: Synthetic oligonucleotide
  Sense strand starting at position 3469 of SEQ ID NO: 1884912
cugaguaucuauccgcuua

SEQ ID NO: 2301525 - RNA, 19 nt, Artificial Sequence
  Description of Artificial Sequence: Synthetic oligonucleotide
  Antisense strand to SEQ ID NO: 2301524
uaagcggauagauacucag

SEQ ID NO: 2301526 - RNA, 19 nt, Artificial Sequence
  Description of Artificial Sequence: Synthetic oligonucleotide
  Sense strand starting at position 3471 of SEQ ID NO: 1884912
gaguaucuauccgcuuaug

SEQ ID NO: 2301527 - RNA, 19 nt, Artificial Sequence
  Description of Artificial Sequence: Synthetic oligonucleotide
  Antisense strand to SEQ ID NO: 2301526
cauaagcggauagauacuc

SEQ ID NO: 2301528 - RNA, 19 nt, Artificial Sequence
  Description of Artificial Sequence: Synthetic oligonucleotide
  Sense strand starting at position 3530 of SEQ ID NO: 1884912
ugucaauucccuugaggau

SEQ ID NO: 2301529 - RNA, 19 nt, Artificial Sequence
  Description of Artificial Sequence: Synthetic oligonucleotide
  Antisense strand to SEQ ID NO: 2301528
auccucaagggaauugaca

SEQ ID NO: 2301530 - RNA, 19 nt, Artificial Sequence
  Description of Artificial Sequence: Synthetic oligonucleotide
  Sense strand starting at position 3531 of SEQ ID NO: 1884912
gucaauucccuugaggauu

SEQ ID NO: 2301531 - RNA, 19 nt, Artificial Sequence
  Description of Artificial Sequence: Synthetic oligonucleotide
  Antisense strand to SEQ ID NO: 2301530
aauccucaagggaauugac

SEQ ID NO: 2301532 - RNA, 19 nt, Artificial Sequence
  Description of Artificial Sequence: Synthetic oligonucleotide
  Sense strand starting at position 3574 of SEQ ID NO: 1884912
gcgugcugguccucucuga

SEQ ID NO: 2301533 - RNA, 19 nt, Artificial Sequence
  Description of Artificial Sequence: Synthetic oligonucleotide
  Antisense strand to SEQ ID NO: 2301532
ucagagaggaccagcacgc

SEQ ID NO: 2301534 - RNA, 19 nt, Artificial Sequence
  Description of Artificial Sequence: Synthetic oligonucleotide
  Sense strand starting at position 3578 of SEQ ID NO: 1884912
gcugguccucucugauguu

SEQ ID NO: 2301535 - RNA, 19 nt, Artificial Sequence
  Description of Artificial Sequence: Synthetic oligonucleotide
  Antisense strand to SEQ ID NO: 2301534
aacaucagagaggaccagc

SEQ ID NO: 2301536 - RNA, 19 nt, Artificial Sequence
  Description of Artificial Sequence: Synthetic oligonucleotide
  Sense strand starting at position 3597 of SEQ ID NO: 1884912
uuauuuaucugucccuguu

SEQ ID NO: 2301537 - RNA, 19 nt, Artificial Sequence
  Description of Artificial Sequence: Synthetic oligonucleotide
  Antisense strand to SEQ ID NO: 2301536
aacagggacagauaaauaa

SEQ ID NO: 2301538 - RNA, 19 nt, Artificial Sequence
  Description of Artificial Sequence: Synthetic oligonucleotide
  Sense strand starting at position 3599 of SEQ ID NO: 1884912
auuuaucugucccuguuga

SEQ ID NO: 2301539 - RNA, 19 nt, Artificial Sequence
  Description of Artificial Sequence: Synthetic oligonucleotide
  Antisense strand to SEQ ID NO: 2301538
ucaacagggacagauaaau

SEQ ID NO: 2301540 - RNA, 19 nt, Artificial Sequence
  Description of Artificial Sequence: Synthetic oligonucleotide
  Sense strand starting at position 3709 of SEQ ID NO: 1884912
gcuucuaucccugcgugga

SEQ ID NO: 2301541 - RNA, 19 nt, Artificial Sequence
  Description of Artificial Sequence: Synthetic oligonucleotide
  Antisense strand to SEQ ID NO: 2301540
uccacgcagggauagaagc

SEQ ID NO: 2301542 - RNA, 19 nt, Artificial Sequence
  Description of Artificial Sequence: Synthetic oligonucleotide
  Sense strand starting at position 3794 of SEQ ID NO: 1884912
uucucuuuccggugugguu

SEQ ID NO: 2301543 - RNA, 19 nt, Artificial Sequence
  Description of Artificial Sequence: Synthetic oligonucleotide
  Antisense strand to SEQ ID NO: 2301542
aaccacaccggaaagagaa

SEQ ID NO: 2301544 - RNA, 19 nt, Artificial Sequence
  Description of Artificial Sequence: Synthetic oligonucleotide
  Sense strand starting at position 3843 of SEQ ID NO: 1884912
ugccuucuuugagggucua

SEQ ID NO: 2301545 - RNA, 19 nt, Artificial Sequence
  Description of Artificial Sequence: Synthetic oligonucleotide
  Antisense strand to SEQ ID NO: 2301544
uagacccucaaagaaggca

SEQ ID NO: 2301546 - RNA, 19 nt, Artificial Sequence
  Description of Artificial Sequence: Synthetic oligonucleotide
  Sense strand starting at position 3888 of SEQ ID NO: 1884912
cugggaguggugugucagu

SEQ ID NO: 2301547 - RNA, 19 nt, Artificial Sequence
  Description of Artificial Sequence: Synthetic oligonucleotide
  Antisense strand to SEQ ID NO: 2301546
acugacacaccacucccag

SEQ ID NO: 2301548 - RNA, 19 nt, Artificial Sequence
  Description of Artificial Sequence: Synthetic oligonucleotide
  Sense strand starting at position 3889 of SEQ ID NO: 1884912
ugggaguggugugucagua

SEQ ID NO: 2301549 - RNA, 19 nt, Artificial Sequence
  Description of Artificial Sequence: Synthetic oligonucleotide
  Antisense strand to SEQ ID NO: 2301548
uacugacacaccacuccca

SEQ ID NO: 2301550 - RNA, 19 nt, Artificial Sequence
  Description of Artificial Sequence: Synthetic oligonucleotide
  Sense strand starting at position 3891 of SEQ ID NO: 1884912
ggaguggugugucaguaua

SEQ ID NO: 2301551 - RNA, 19 nt, Artificial Sequence
  Description of Artificial Sequence: Synthetic oligonucleotide
  Antisense strand to SEQ ID NO: 2301550
uauacugacacaccacucc

SEQ ID NO: 2301552 - RNA, 19 nt, Artificial Sequence
  Description of Artificial Sequence: Synthetic oligonucleotide
  Sense strand starting at position 3893 of SEQ ID NO: 1884912
aguggugugucaguauauu

SEQ ID NO: 2301553 - RNA, 19 nt, Artificial Sequence
  Description of Artificial Sequence: Synthetic oligonucleotide
  Antisense strand to SEQ ID NO: 2301552
aauauacugacacaccacu

SEQ ID NO: 2301554 - RNA, 19 nt, Artificial Sequence
  Description of Artificial Sequence: Synthetic oligonucleotide
  Sense strand starting at position 3931 of SEQ ID NO: 1884912
agucuuucucccugaaggu

SEQ ID NO: 2301555 - RNA, 19 nt, Artificial Sequence
  Description of Artificial Sequence: Synthetic oligonucleotide
  Antisense strand to SEQ ID NO: 2301554
accuucagggagaaagacu

SEQ ID NO: 2301556 - RNA, 19 nt, Artificial Sequence
  Description of Artificial Sequence: Synthetic oligonucleotide
  Sense strand starting at position 140 of SEQ ID NO: 1884911
aggagagucuuagauccag

SEQ ID NO: 2301557 - RNA, 19 nt, Artificial Sequence
  Description of Artificial Sequence: Synthetic oligonucleotide
  Antisense strand to SEQ ID NO: 2301556
cuggaucuaagacucuccu

SEQ ID NO: 2301558 - RNA, 19 nt, Artificial Sequence
  Description of Artificial Sequence: Synthetic oligonucleotide
  Sense strand starting at position 146 of SEQ ID NO: 1884911
gucuuagauccagggugag

SEQ ID NO: 2301559 - RNA, 19 nt, Artificial Sequence
  Description of Artificial Sequence: Synthetic oligonucleotide
  Antisense strand to SEQ ID NO: 2301558
cucacccuggaucuaagac

SEQ ID NO: 2301560 - RNA, 19 nt, Artificial Sequence
  Description of Artificial Sequence: Synthetic oligonucleotide
  Sense strand starting at position 2035 of SEQ ID NO: 1884911
gaugguugugucugccaca

SEQ ID NO: 2301561 - RNA, 19 nt, Artificial Sequence
  Description of Artificial Sequence: Synthetic oligonucleotide
  Antisense strand to SEQ ID NO: 2301560
uguggcagacacaaccauc

SEQ ID NO: 2301562 - RNA, 19 nt, Artificial Sequence
  Description of Artificial Sequence: Synthetic oligonucleotide
  Sense strand starting at position 2038 of SEQ ID NO: 1884911
gguugugucugccacagca

SEQ ID NO: 2301563 - RNA, 19 nt, Artificial Sequence
  Description of Artificial Sequence: Synthetic oligonucleotide
  Antisense strand to SEQ ID NO: 2301562
ugcuguggcagacacaacc

SEQ ID NO: 2301564 - RNA, 19 nt, Artificial Sequence
  Description of Artificial Sequence: Synthetic oligonucleotide
  Sense strand starting at position 2118 of SEQ ID NO: 1884911
agagcaguuucuguugagu

SEQ ID NO: 2301565 - RNA, 19 nt, Artificial Sequence
  Description of Artificial Sequence: Synthetic oligonucleotide
  Antisense strand to SEQ ID NO: 2301564
acucaacagaaacugcucu

SEQ ID NO: 2301566 - RNA, 19 nt, Artificial Sequence
  Description of Artificial Sequence: Synthetic oligonucleotide
  Sense strand starting at position 2120 of SEQ ID NO: 1884911
agcaguuucuguugaguau

SEQ ID NO: 2301567 - RNA, 19 nt, Artificial Sequence
  Description of Artificial Sequence: Synthetic oligonucleotide
  Antisense strand to SEQ ID NO: 2301566
auacucaacagaaacugcu

SEQ ID NO: 2301568 - RNA, 19 nt, Artificial Sequence
  Description of Artificial Sequence: Synthetic oligonucleotide
  Sense strand starting at position 2121 of SEQ ID NO: 1884911
gcaguuucuguugaguauu

SEQ ID NO: 2301569 - RNA, 19 nt, Artificial Sequence
  Description of Artificial Sequence: Synthetic oligonucleotide
  Antisense strand to SEQ ID NO: 2301568
aauacucaacagaaacugc

SEQ ID NO: 2301570 - RNA, 19 nt, Artificial Sequence
  Description of Artificial Sequence: Synthetic oligonucleotide
  Sense strand starting at position 2124 of SEQ ID NO: 1884911
guuucuguugaguauuggu

SEQ ID NO: 2301571 - RNA, 19 nt, Artificial Sequence
  Description of Artificial Sequence: Synthetic oligonucleotide
  Antisense strand to SEQ ID NO: 2301570
accaauacucaacagaaac

SEQ ID NO: 2301572 - RNA, 19 nt, Artificial Sequence
  Description of Artificial Sequence: Synthetic oligonucleotide
  Sense strand starting at position 2133 of SEQ ID NO: 1884911
gaguauugguucccucuuu

SEQ ID NO: 2301573 - RNA, 19 nt, Artificial Sequence
  Description of Artificial Sequence: Synthetic oligonucleotide
  Antisense strand to SEQ ID NO: 2301572
aaagagggaaccaauacuc

SEQ ID NO: 2301574 - RNA, 19 nt, Artificial Sequence
  Description of Artificial Sequence: Synthetic oligonucleotide
  Sense strand starting at position 2266 of SEQ ID NO: 1884911
gaggauuugcuuggccauu

SEQ ID NO: 2301575 - RNA, 19 nt, Artificial Sequence
  Description of Artificial Sequence: Synthetic oligonucleotide
  Antisense strand to SEQ ID NO: 2301574
aauggccaagcaaauccuc

SEQ ID NO: 2301576 - RNA, 19 nt, Artificial Sequence
  Description of Artificial Sequence: Synthetic oligonucleotide
  Sense strand starting at position 2282 of SEQ ID NO: 1884911
auugucaagcugugaguca

SEQ ID NO: 2301577 - RNA, 19 nt, Artificial Sequence
  Description of Artificial Sequence: Synthetic oligonucleotide
  Antisense strand to SEQ ID NO: 2301576
ugacucacagcuugacaau

SEQ ID NO: 2301578 - RNA, 19 nt, Artificial Sequence
  Description of Artificial Sequence: Synthetic oligonucleotide
  Sense strand starting at position 2306 of SEQ ID NO: 1884911
acuggagagacggguuuaa

SEQ ID NO: 2301579 - RNA, 19 nt, Artificial Sequence
  Description of Artificial Sequence: Synthetic oligonucleotide
  Antisense strand to SEQ ID NO: 2301578
uuaaacccgucucuccagu

SEQ ID NO: 2301580 - RNA, 19 nt, Artificial Sequence
  Description of Artificial Sequence: Synthetic oligonucleotide
  Sense strand starting at position 2410 of SEQ ID NO: 1884911
gaggguaaaugccagcuua

SEQ ID NO: 2301581 - RNA, 19 nt, Artificial Sequence
  Description of Artificial Sequence: Synthetic oligonucleotide
  Antisense strand to SEQ ID NO: 2301580
uaagcuggcauuuacccuc

SEQ ID NO: 2301582 - RNA, 19 nt, Artificial Sequence
  Description of Artificial Sequence: Synthetic oligonucleotide
  Sense strand starting at position 2526 of SEQ ID NO: 1884911
ugugcaaacuaugaaaugu

SEQ ID NO: 2301583 - RNA, 19 nt, Artificial Sequence
  Description of Artificial Sequence: Synthetic oligonucleotide
  Antisense strand to SEQ ID NO: 2301582
acauuucauaguuugcaca

SEQ ID NO: 2301584 - RNA, 19 nt, Artificial Sequence
  Description of Artificial Sequence: Synthetic oligonucleotide
  Sense strand starting at position 2537 of SEQ ID NO: 1884911
ugaaauguacagugucuuu

SEQ ID NO: 2301585 - RNA, 19 nt, Artificial Sequence
  Description of Artificial Sequence: Synthetic oligonucleotide
  Antisense strand to SEQ ID NO: 2301584
aaagacacuguacauuuca

SEQ ID NO: 2301586 - RNA, 19 nt, Artificial Sequence
  Description of Artificial Sequence: Synthetic oligonucleotide
  Sense strand starting at position 2542 of SEQ ID NO: 1884911
uguacagugucuuuaacaa

SEQ ID NO: 2301587 - RNA, 19 nt, Artificial Sequence
  Description of Artificial Sequence: Synthetic oligonucleotide
  Antisense strand to SEQ ID NO: 2301586
uuguuaaagacacuguaca

SEQ ID NO: 2301588 - RNA, 19 nt, Artificial Sequence
  Description of Artificial Sequence: Synthetic oligonucleotide
  Sense strand starting at position 2573 of SEQ ID NO: 1884911
gggcgauguccacaggacu

SEQ ID NO: 2301589 - RNA, 19 nt, Artificial Sequence
  Description of Artificial Sequence: Synthetic oligonucleotide
  Antisense strand to SEQ ID NO: 2301588
aguccuguggacaucgccc

SEQ ID NO: 2301590 - RNA, 19 nt, Artificial Sequence
  Description of Artificial Sequence: Synthetic oligonucleotide
  Sense strand starting at position 2602 of SEQ ID NO: 1884911
gugccaaggugcucuaagu

SEQ ID NO: 2301591 - RNA, 19 nt, Artificial Sequence
  Description of Artificial Sequence: Synthetic oligonucleotide
  Antisense strand to SEQ ID NO: 2301590
acuuagagcaccuuggcac

SEQ ID NO: 2301592 - RNA, 19 nt, Artificial Sequence
  Description of Artificial Sequence: Synthetic oligonucleotide
  Sense strand starting at position 2962 of SEQ ID NO: 1884911
ggaugaguccagcagaguu

SEQ ID NO: 2301593 - RNA, 19 nt, Artificial Sequence
  Description of Artificial Sequence: Synthetic oligonucleotide
  Antisense strand to SEQ ID NO: 2301592
aacucugcuggacucaucc

SEQ ID NO: 2301594 - RNA, 19 nt, Artificial Sequence
  Description of Artificial Sequence: Synthetic oligonucleotide
  Sense strand starting at position 2964 of SEQ ID NO: 1884911
augaguccagcagaguuua

SEQ ID NO: 2301595 - RNA, 19 nt, Artificial Sequence
  Description of Artificial Sequence: Synthetic oligonucleotide
  Antisense strand to SEQ ID NO: 2301594
uaaacucugcuggacucau

SEQ ID NO: 2301596 - RNA, 19 nt, Artificial Sequence
  Description of Artificial Sequence: Synthetic oligonucleotide
  Sense strand starting at position 3131 of SEQ ID NO: 1884911
ggcguaguuaaggguccau

SEQ ID NO: 2301597 - RNA, 19 nt, Artificial Sequence
  Description of Artificial Sequence: Synthetic oligonucleotide
  Antisense strand to SEQ ID NO: 2301596
auggacccuuaacuacgcc

SEQ ID NO: 2301598 - RNA, 19 nt, Artificial Sequence
  Description of Artificial Sequence: Synthetic oligonucleotide
  Sense strand starting at position 3135 of SEQ ID NO: 1884911
uaguuaaggguccaugguu

SEQ ID NO: 2301599 - RNA, 19 nt, Artificial Sequence
  Description of Artificial Sequence: Synthetic oligonucleotide
  Antisense strand to SEQ ID NO: 2301598
aaccauggacccuuaacua

SEQ ID NO: 2301600 - RNA, 19 nt, Artificial Sequence
  Description of Artificial Sequence: Synthetic oligonucleotide
  Sense strand starting at position 3470 of SEQ ID NO: 1884911
ccuggauucugugggucua

SEQ ID NO: 2301601 - RNA, 19 nt, Artificial Sequence
  Description of Artificial Sequence: Synthetic oligonucleotide
  Antisense strand to SEQ ID NO: 2301600
uagacccacagaauccagg

SEQ ID NO: 2301602 - RNA, 19 nt, Artificial Sequence
  Description of Artificial Sequence: Synthetic oligonucleotide
  Sense strand starting at position 3472 of SEQ ID NO: 1884911
uggauucugugggucuaga

SEQ ID NO: 2301603 - RNA, 19 nt, Artificial Sequence
  Description of Artificial Sequence: Synthetic oligonucleotide
  Antisense strand to SEQ ID NO: 2301602
ucuagacccacagaaucca

SEQ ID NO: 2301604 - RNA, 19 nt, Artificial Sequence
  Description of Artificial Sequence: Synthetic oligonucleotide
  Sense strand starting at position 3507 of SEQ ID NO: 1884911
cggagugguggcugacaga

SEQ ID NO: 2301605 - RNA, 19 nt, Artificial Sequence
  Description of Artificial Sequence: Synthetic oligonucleotide
  Antisense strand to SEQ ID NO: 2301604
ucugucagccaccacuccg

SEQ ID NO: 2301606 - RNA, 19 nt, Artificial Sequence
  Description of Artificial Sequence: Synthetic oligonucleotide
  Sense strand starting at position 3600 of SEQ ID NO: 1884911
cagggagucugaguaucua

SEQ ID NO: 2301607 - RNA, 19 nt, Artificial Sequence
  Description of Artificial Sequence: Synthetic oligonucleotide
  Antisense strand to SEQ ID NO: 2301606
uagauacucagacucccug

SEQ ID NO: 2301608 - RNA, 19 nt, Artificial Sequence
  Description of Artificial Sequence: Synthetic oligonucleotide
  Sense strand starting at position 3608 of SEQ ID NO: 1884911
cugaguaucuauccgcuua

SEQ ID NO: 2301609 - RNA, 19 nt, Artificial Sequence
  Description of Artificial Sequence: Synthetic oligonucleotide
  Antisense strand to SEQ ID NO: 2301608
uaagcggauagauacucag

SEQ ID NO: 2301610 - RNA, 19 nt, Artificial Sequence
  Description of Artificial Sequence: Synthetic oligonucleotide
  Sense strand starting at position 3610 of SEQ ID NO: 1884911
gaguaucuauccgcuuaug

SEQ ID NO: 2301611 - RNA, 19 nt, Artificial Sequence
  Description of Artificial Sequence: Synthetic oligonucleotide
  Antisense strand to SEQ ID NO: 2301610
cauaagcggauagauacuc

SEQ ID NO: 2301612 - RNA, 19 nt, Artificial Sequence
  Description of Artificial Sequence: Synthetic oligonucleotide
  Sense strand starting at position 3669 of SEQ ID NO: 1884911
ugucaauucccuugaggau

SEQ ID NO: 2301613 - RNA, 19 nt, Artificial Sequence
  Description of Artificial Sequence: Synthetic oligonucleotide
  Antisense strand to SEQ ID NO: 2301612
auccucaagggaauugaca

SEQ ID NO: 2301614 - RNA, 19 nt, Artificial Sequence
  Description of Artificial Sequence: Synthetic oligonucleotide
  Sense strand starting at position 3670 of SEQ ID NO: 1884911
gucaauucccuugaggauu

SEQ ID NO: 2301615 - RNA, 19 nt, Artificial Sequence
  Description of Artificial Sequence: Synthetic oligonucleotide
  Antisense strand to SEQ ID NO: 2301614
aauccucaagggaauugac

SEQ ID NO: 2301616 - RNA, 19 nt, Artificial Sequence
  Description of Artificial Sequence: Synthetic oligonucleotide
  Sense strand starting at position 3713 of SEQ ID NO: 1884911
gcgugcugguccucucuga

SEQ ID NO: 2301617 - RNA, 19 nt, Artificial Sequence
  Description of Artificial Sequence: Synthetic oligonucleotide
  Antisense strand to SEQ ID NO: 2301616
ucagagaggaccagcacgc

SEQ ID NO: 2301618 - RNA, 19 nt, Artificial Sequence
  Description of Artificial Sequence: Synthetic oligonucleotide
  Sense strand starting at position 3717 of SEQ ID NO: 1884911
gcugguccucucugauguu

SEQ ID NO: 2301619 - RNA, 19 nt, Artificial Sequence
  Description of Artificial Sequence: Synthetic oligonucleotide
  Antisense strand to SEQ ID NO: 2301618
aacaucagagaggaccagc

SEQ ID NO: 2301620 - RNA, 19 nt, Artificial Sequence
  Description of Artificial Sequence: Synthetic oligonucleotide
  Sense strand starting at position 3736 of SEQ ID NO: 1884911
uuauuuaucugucccuguu

SEQ ID NO: 2301621 - RNA, 19 nt, Artificial Sequence
  Description of Artificial Sequence: Synthetic oligonucleotide
  Antisense strand to SEQ ID NO: 2301620
aacagggacagauaaauaa

SEQ ID NO: 2301622 - RNA, 19 nt, Artificial Sequence
  Description of Artificial Sequence: Synthetic oligonucleotide
  Sense strand starting at position 3738 of SEQ ID NO: 1884911
auuuaucugucccuguuga

SEQ ID NO: 2301623 - RNA, 19 nt, Artificial Sequence
  Description of Artificial Sequence: Synthetic oligonucleotide
  Antisense strand to SEQ ID NO: 2301622
ucaacagggacagauaaau

SEQ ID NO: 2301624 - RNA, 19 nt, Artificial Sequence
  Description of Artificial Sequence: Synthetic oligonucleotide
  Sense strand starting at position 3848 of SEQ ID NO: 1884911
gcuucuaucccugcgugga

SEQ ID NO: 2301625 - RNA, 19 nt, Artificial Sequence
  Description of Artificial Sequence: Synthetic oligonucleotide
  Antisense strand to SEQ ID NO: 2301624
uccacgcagggauagaagc

SEQ ID NO: 2301626 - RNA, 19 nt, Artificial Sequence
  Description of Artificial Sequence: Synthetic oligonucleotide
  Sense strand starting at position 3933 of SEQ ID NO: 1884911
uucucuuuccggugugguu

SEQ ID NO: 2301627 - RNA, 19 nt, Artificial Sequence
  Description of Artificial Sequence: Synthetic oligonucleotide
  Antisense strand to SEQ ID NO: 2301626
aaccacaccggaaagagaa

SEQ ID NO: 2301628 - RNA, 19 nt, Artificial Sequence
  Description of Artificial Sequence: Synthetic oligonucleotide
  Sense strand starting at position 3982 of SEQ ID NO: 1884911
ugccuucuuugagggucua

SEQ ID NO: 2301629 - RNA, 19 nt, Artificial Sequence
  Description of Artificial Sequence: Synthetic oligonucleotide
  Antisense strand to SEQ ID NO: 2301628
uagacccucaaagaaggca

SEQ ID NO: 2301630 - RNA, 19 nt, Artificial Sequence
  Description of Artificial Sequence: Synthetic oligonucleotide
  Sense strand starting at position 97 of SEQ ID NO: 1884914
gucacacaucuaugugcaa

SEQ ID NO: 2301631 - RNA, 19 nt, Artificial Sequence
  Description of Artificial Sequence: Synthetic oligonucleotide
  Antisense strand to SEQ ID NO: 2301630
uugcacauagaugugugac

SEQ ID NO: 2301632 - RNA, 19 nt, Artificial Sequence
  Description of Artificial Sequence: Synthetic oligonucleotide
  Sense strand starting at position 172 of SEQ ID NO: 1884914
acaugaaaugugugagguc

SEQ ID NO: 2301633 - RNA, 19 nt, Artificial Sequence
  Description of Artificial Sequence: Synthetic oligonucleotide
  Antisense strand to SEQ ID NO: 2301632
gaccucacacauuucaugu

SEQ ID NO: 2301634 - RNA, 19 nt, Artificial Sequence
  Description of Artificial Sequence: Synthetic oligonucleotide
  Sense strand starting at position 219 of SEQ ID NO: 1884914
gaggacagcguauguaaau

SEQ ID NO: 2301635 - RNA, 19 nt, Artificial Sequence
  Description of Artificial Sequence: Synthetic oligonucleotide
  Antisense strand to SEQ ID NO: 2301634
auuuacauacgcuguccuc

SEQ ID NO: 2301636 - RNA, 19 nt, Artificial Sequence
  Description of Artificial Sequence: Synthetic oligonucleotide
  Sense strand starting at position 252 of SEQ ID NO: 1884914
ucaugagugaggcagagua

SEQ ID NO: 2301637 - RNA, 19 nt, Artificial Sequence
  Description of Artificial Sequence: Synthetic oligonucleotide
  Antisense strand to SEQ ID NO: 2301636
uacucugccucacucauga

SEQ ID NO: 2301638 - RNA, 19 nt, Artificial Sequence
  Description of Artificial Sequence: Synthetic oligonucleotide
  Sense strand starting at position 295 of SEQ ID NO: 1884914
ccgaaucugcauuguaaac

SEQ ID NO: 2301639 - RNA, 19 nt, Artificial Sequence
  Description of Artificial Sequence: Synthetic oligonucleotide
  Antisense strand to SEQ ID NO: 2301638
guuuacaaugcagauucgg

SEQ ID NO: 2301640 - RNA, 19 nt, Artificial Sequence
  Description of Artificial Sequence: Synthetic oligonucleotide
  Sense strand starting at position 376 of SEQ ID NO: 1884914
acauuuggguucugaggga

SEQ ID NO: 2301641 - RNA, 19 nt, Artificial Sequence
  Description of Artificial Sequence: Synthetic oligonucleotide
  Antisense strand to SEQ ID NO: 2301640
ucccucagaacccaaaugu

SEQ ID NO: 2301642 - RNA, 19 nt, Artificial Sequence
  Description of Artificial Sequence: Synthetic oligonucleotide
  Sense strand starting at position 493 of SEQ ID NO: 1884914
guagaauucuaauucugga

SEQ ID NO: 2301643 - RNA, 19 nt, Artificial Sequence
  Description of Artificial Sequence: Synthetic oligonucleotide
  Antisense strand to SEQ ID NO: 2301642
uccagaauuagaauucuac

SEQ ID NO: 2301644 - RNA, 19 nt, Artificial Sequence
  Description of Artificial Sequence: Synthetic oligonucleotide
  Sense strand starting at position 914 of SEQ ID NO: 1884914
uguagacauccacguaucu

SEQ ID NO: 2301645 - RNA, 19 nt, Artificial Sequence
  Description of Artificial Sequence: Synthetic oligonucleotide
  Antisense strand to SEQ ID NO: 2301644
agauacguggaugucuaca

SEQ ID NO: 2301646 - RNA, 19 nt, Artificial Sequence
  Description of Artificial Sequence: Synthetic oligonucleotide
  Sense strand starting at position 940 of SEQ ID NO: 1884914
agguaaagauacuagagau

SEQ ID NO: 2301647 - RNA, 19 nt, Artificial Sequence
  Description of Artificial Sequence: Synthetic oligonucleotide
  Antisense strand to SEQ ID NO: 2301646
aucucuaguaucuuuaccu

SEQ ID NO: 2301648 - RNA, 19 nt, Artificial Sequence
  Description of Artificial Sequence: Synthetic oligonucleotide
  Sense strand starting at position 1074 of SEQ ID NO: 1884914
gugggcuucgcgccuguaa

SEQ ID NO: 2301649 - RNA, 19 nt, Artificial Sequence
  Description of Artificial Sequence: Synthetic oligonucleotide
  Antisense strand to SEQ ID NO: 2301648
uuacaggcgcgaagcccac

SEQ ID NO: 2301650 - RNA, 19 nt, Artificial Sequence
  Description of Artificial Sequence: Synthetic oligonucleotide
  Sense strand starting at position 1075 of SEQ ID NO: 1884914
ugggcuucgcgccuguaau

SEQ ID NO: 2301651 - RNA, 19 nt, Artificial Sequence
  Description of Artificial Sequence: Synthetic oligonucleotide
  Antisense strand to SEQ ID NO: 2301650
auuacaggcgcgaagccca

SEQ ID NO: 2301652 - RNA, 19 nt, Artificial Sequence
  Description of Artificial Sequence: Synthetic oligonucleotide
  Sense strand starting at position 1122 of SEQ ID NO: 1884914
ggaucacuugcccaggagu

SEQ ID NO: 2301653 - RNA, 19 nt, Artificial Sequence
  Description of Artificial Sequence: Synthetic oligonucleotide
  Antisense strand to SEQ ID NO: 2301652
acuccugggcaagugaucc

SEQ ID NO: 2301654 - RNA, 19 nt, Artificial Sequence
  Description of Artificial Sequence: Synthetic oligonucleotide
  Sense strand starting at position 1420 of SEQ ID NO: 1884914
cuguaauuccagcagcacu

SEQ ID NO: 2301655 - RNA, 19 nt, Artificial Sequence
  Description of Artificial Sequence: Synthetic oligonucleotide
  Antisense strand to SEQ ID NO: 2301654
agugcugcuggaauuacag

SEQ ID NO: 2301656 - RNA, 19 nt, Artificial Sequence
  Description of Artificial Sequence: Synthetic oligonucleotide
  Sense strand starting at position 1458 of SEQ ID NO: 1884914
ggaucacgcggucaagaau

SEQ ID NO: 2301657 - RNA, 19 nt, Artificial Sequence
  Description of Artificial Sequence: Synthetic oligonucleotide
  Antisense strand to SEQ ID NO: 2301656
auucuugaccgcgugaucc

SEQ ID NO: 2301658 - RNA, 19 nt, Artificial Sequence
  Description of Artificial Sequence: Synthetic oligonucleotide
  Sense strand starting at position 1938 of SEQ ID NO: 1884914
cgccaucuucuuggacaau

SEQ ID NO: 2301659 - RNA, 19 nt, Artificial Sequence
  Description of Artificial Sequence: Synthetic oligonucleotide
  Antisense strand to SEQ ID NO: 2301658
auuguccaagaagauggcg

SEQ ID NO: 2301660 - RNA, 19 nt, Artificial Sequence
  Description of Artificial Sequence: Synthetic oligonucleotide
  Sense strand starting at position 2013 of SEQ ID NO: 1884914
ggaacuuuagcuuggacga

SEQ ID NO: 2301661 - RNA, 19 nt, Artificial Sequence
  Description of Artificial Sequence: Synthetic oligonucleotide
  Antisense strand to SEQ ID NO: 2301660
ucguccaagcuaaaguucc

SEQ ID NO: 2301662 - RNA, 19 nt, Artificial Sequence
  Description of Artificial Sequence: Synthetic oligonucleotide
  Sense strand starting at position 2881 of SEQ ID NO: 1884914
uuucguguuacggauuaau

SEQ ID NO: 2301663 - RNA, 19 nt, Artificial Sequence
  Description of Artificial Sequence: Synthetic oligonucleotide
  Antisense strand to SEQ ID NO: 2301662
auuaauccguaacacgaaa

SEQ ID NO: 2301664 - RNA, 19 nt, Artificial Sequence
  Description of Artificial Sequence: Synthetic oligonucleotide
  Sense strand starting at position 2892 of SEQ ID NO: 1884914
ggauuaaugcuggaacgug

SEQ ID NO: 2301665 - RNA, 19 nt, Artificial Sequence
  Description of Artificial Sequence: Synthetic oligonucleotide
  Antisense strand to SEQ ID NO: 2301664
cacguuccagcauuaaucc

SEQ ID NO: 2301666 - RNA, 19 nt, Artificial Sequence
  Description of Artificial Sequence: Synthetic oligonucleotide
  Sense strand starting at position 2904 of SEQ ID NO: 1884914
gaacguggcacggaaacuu

SEQ ID NO: 2301667 - RNA, 19 nt, Artificial Sequence
  Description of Artificial Sequence: Synthetic oligonucleotide
  Antisense strand to SEQ ID NO: 2301666
aaguuuccgugccacguuc

SEQ ID NO: 2301668 - RNA, 19 nt, Artificial Sequence
  Description of Artificial Sequence: Synthetic oligonucleotide
  Sense strand starting at position 2965 of SEQ ID NO: 1884914
uugagugcuaggcauacuu

SEQ ID NO: 2301669 - RNA, 19 nt, Artificial Sequence
  Description of Artificial Sequence: Synthetic oligonucleotide
  Antisense strand to SEQ ID NO: 2301668
aaguaugccuagcacucaa

SEQ ID NO: 2301670 - RNA, 19 nt, Artificial Sequence
  Description of Artificial Sequence: Synthetic oligonucleotide
  Sense strand starting at position 2976 of SEQ ID NO: 1884914
gcauacuuucgcguugugu

SEQ ID NO: 2301671 - RNA, 19 nt, Artificial Sequence
  Description of Artificial Sequence: Synthetic oligonucleotide
  Antisense strand to SEQ ID NO: 2301670
acacaacgcgaaaguaugc

SEQ ID NO: 2301672 - RNA, 19 nt, Artificial Sequence
  Description of Artificial Sequence: Synthetic oligonucleotide
  Sense strand starting at position 2977 of SEQ ID NO: 1884914
cauacuuucgcguuguguu

SEQ ID NO: 2301673 - RNA, 19 nt, Artificial Sequence
  Description of Artificial Sequence: Synthetic oligonucleotide
  Antisense strand to SEQ ID NO: 2301672
aacacaacgcgaaaguaug

SEQ ID NO: 2301674 - RNA, 19 nt, Artificial Sequence
  Description of Artificial Sequence: Synthetic oligonucleotide
  Sense strand starting at position 2979 of SEQ ID NO: 1884914
uacuuucgcguuguguuua

SEQ ID NO: 2301675 - RNA, 19 nt, Artificial Sequence
  Description of Artificial Sequence: Synthetic oligonucleotide
  Antisense strand to SEQ ID NO: 2301674
uaaacacaacgcgaaagua

SEQ ID NO: 2301676 - RNA, 19 nt, Artificial Sequence
  Description of Artificial Sequence: Synthetic oligonucleotide
  Sense strand starting at position 3188 of SEQ ID NO: 1884914
aaagaaugauguguugcua

SEQ ID NO: 2301677 - RNA, 19 nt, Artificial Sequence
  Description of Artificial Sequence: Synthetic oligonucleotide
  Antisense strand to SEQ ID NO: 2301676
uagcaacacaucauucuuu

SEQ ID NO: 2301678 - RNA, 19 nt, Artificial Sequence
  Description of Artificial Sequence: Synthetic oligonucleotide
  Sense strand starting at position 3223 of SEQ ID NO: 1884914
accugcuagcaugauuaau

SEQ ID NO: 2301679 - RNA, 19 nt, Artificial Sequence
  Description of Artificial Sequence: Synthetic oligonucleotide
  Antisense strand to SEQ ID NO: 2301678
auuaaucaugcuagcaggu

SEQ ID NO: 2301680 - RNA, 19 nt, Artificial Sequence
  Description of Artificial Sequence: Synthetic oligonucleotide
  Sense strand starting at position 3231 of SEQ ID NO: 1884914
gcaugauuaauugggucua

SEQ ID NO: 2301681 - RNA, 19 nt, Artificial Sequence
  Description of Artificial Sequence: Synthetic oligonucleotide
  Antisense strand to SEQ ID NO: 2301680
uagacccaauuaaucaugc

SEQ ID NO: 2301682 - RNA, 19 nt, Artificial Sequence
  Description of Artificial Sequence: Synthetic oligonucleotide
  Sense strand starting at position 3233 of SEQ ID NO: 1884914
augauuaauugggucuaag

SEQ ID NO: 2301683 - RNA, 19 nt, Artificial Sequence
  Description of Artificial Sequence: Synthetic oligonucleotide
  Antisense strand to SEQ ID NO: 2301682
cuuagacccaauuaaucau

SEQ ID NO: 2301684 - RNA, 19 nt, Artificial Sequence
  Description of Artificial Sequence: Synthetic oligonucleotide
  Sense strand starting at position 3378 of SEQ ID NO: 1884914
uauuacagucucgaaguua

SEQ ID NO: 2301685 - RNA, 19 nt, Artificial Sequence
  Description of Artificial Sequence: Synthetic oligonucleotide
  Antisense strand to SEQ ID NO: 2301684
uaacuucgagacuguaaua

SEQ ID NO: 2301686 - RNA, 19 nt, Artificial Sequence
  Description of Artificial Sequence: Synthetic oligonucleotide
  Sense strand starting at position 3387 of SEQ ID NO: 1884914
cucgaaguuaugcaaguga

SEQ ID NO: 2301687 - RNA, 19 nt, Artificial Sequence
  Description of Artificial Sequence: Synthetic oligonucleotide
  Antisense strand to SEQ ID NO: 2301686
ucacuugcauaacuucgag

SEQ ID NO: 2301688 - RNA, 19 nt, Artificial Sequence
  Description of Artificial Sequence: Synthetic oligonucleotide
  Sense strand starting at position 3403 of SEQ ID NO: 1884914
ugacaugcacuuugaaaga

SEQ ID NO: 2301689 - RNA, 19 nt, Artificial Sequence
  Description of Artificial Sequence: Synthetic oligonucleotide
  Antisense strand to SEQ ID NO: 2301688
ucuuucaaagugcauguca

SEQ ID NO: 2301690 - RNA, 19 nt, Artificial Sequence
  Description of Artificial Sequence: Synthetic oligonucleotide
  Sense strand starting at position 3484 of SEQ ID NO: 1884914
uucucauuuccaggcuagu

SEQ ID NO: 2301691 - RNA, 19 nt, Artificial Sequence
  Description of Artificial Sequence: Synthetic oligonucleotide
  Antisense strand to SEQ ID NO: 2301690
acuagccuggaaaugagaa

SEQ ID NO: 2301692 - RNA, 19 nt, Artificial Sequence
  Description of Artificial Sequence: Synthetic oligonucleotide
  Sense strand starting at position 3625 of SEQ ID NO: 1884914
cguuuauuaccucaugguu

SEQ ID NO: 2301693 - RNA, 19 nt, Artificial Sequence
  Description of Artificial Sequence: Synthetic oligonucleotide
  Antisense strand to SEQ ID NO: 2301692
aaccaugagguaauaaacg

SEQ ID NO: 2301694 - RNA, 19 nt, Artificial Sequence
  Description of Artificial Sequence: Synthetic oligonucleotide
  Sense strand starting at position 3640 of SEQ ID NO: 1884914
gguuucuguggccaggaau

SEQ ID NO: 2301695 - RNA, 19 nt, Artificial Sequence
  Description of Artificial Sequence: Synthetic oligonucleotide
  Antisense strand to SEQ ID NO: 2301694
auuccuggccacagaaacc

SEQ ID NO: 2301696 - RNA, 19 nt, Artificial Sequence
  Description of Artificial Sequence: Synthetic oligonucleotide
  Sense strand starting at position 3643 of SEQ ID NO: 1884914
uucuguggccaggaauuau

SEQ ID NO: 2301697 - RNA, 19 nt, Artificial Sequence
  Description of Artificial Sequence: Synthetic oligonucleotide
  Antisense strand to SEQ ID NO: 2301696
auaauuccuggccacagaa

SEQ ID NO: 2301698 - RNA, 19 nt, Artificial Sequence
  Description of Artificial Sequence: Synthetic oligonucleotide
  Sense strand starting at position 3655 of SEQ ID NO: 1884914
gaauuauggagaggcuuag

SEQ ID NO: 2301699 - RNA, 19 nt, Artificial Sequence
  Description of Artificial Sequence: Synthetic oligonucleotide
  Antisense strand to SEQ ID NO: 2301698
cuaagccucuccauaauuc

SEQ ID NO: 2301700 - RNA, 19 nt, Artificial Sequence
  Description of Artificial Sequence: Synthetic oligonucleotide
  Sense strand starting at position 3691 of SEQ ID NO: 1884914
ggaguaucucaugagguug

SEQ ID NO: 2301701 - RNA, 19 nt, Artificial Sequence
  Description of Artificial Sequence: Synthetic oligonucleotide
  Antisense strand to SEQ ID NO: 2301700
caaccucaugagauacucc

SEQ ID NO: 2301702 - RNA, 19 nt, Artificial Sequence
  Description of Artificial Sequence: Synthetic oligonucleotide
  Sense strand starting at position 3796 of SEQ ID NO: 1884914
auguuuguuggugauauua

SEQ ID NO: 2301703 - RNA, 19 nt, Artificial Sequence
  Description of Artificial Sequence: Synthetic oligonucleotide
  Antisense strand to SEQ ID NO: 2301702
uaauaucaccaacaaacau

SEQ ID NO: 2301704 - RNA, 19 nt, Artificial Sequence
  Description of Artificial Sequence: Synthetic oligonucleotide
  Sense strand starting at position 3804 of SEQ ID NO: 1884914
uggugauauuaggccaguu

SEQ ID NO: 2301705 - RNA, 19 nt, Artificial Sequence
  Description of Artificial Sequence: Synthetic oligonucleotide
  Antisense strand to SEQ ID NO: 2301704
aacuggccuaauaucacca

SEQ ID NO: 2301706 - RNA, 19 nt, Artificial Sequence
  Description of Artificial Sequence: Synthetic oligonucleotide
  Sense strand starting at position 3806 of SEQ ID NO: 1884914
gugauauuaggccaguuag

SEQ ID NO: 2301707 - RNA, 19 nt, Artificial Sequence
  Description of Artificial Sequence: Synthetic oligonucleotide
  Antisense strand to SEQ ID NO: 2301706
cuaacuggccuaauaucac

SEQ ID NO: 2301708 - RNA, 19 nt, Artificial Sequence
  Description of Artificial Sequence: Synthetic oligonucleotide
  Sense strand starting at position 3907 of SEQ ID NO: 1884914
uuuagaaagccaugaaguc

SEQ ID NO: 2301709 - RNA, 19 nt, Artificial Sequence
  Description of Artificial Sequence: Synthetic oligonucleotide
  Antisense strand to SEQ ID NO: 2301708
gacuucauggcuuucuaaa

SEQ ID NO: 2301710 - RNA, 19 nt, Artificial Sequence
  Description of Artificial Sequence: Synthetic oligonucleotide
  Sense strand starting at position 142 of SEQ ID NO: 1884915
agcaacaaucgugauagga

SEQ ID NO: 2301711 - RNA, 19 nt, Artificial Sequence
  Description of Artificial Sequence: Synthetic oligonucleotide
  Antisense strand to SEQ ID NO: 2301710
uccuaucacgauuguugcu

SEQ ID NO: 2301712 - RNA, 19 nt, Artificial Sequence
  Description of Artificial Sequence: Synthetic oligonucleotide
  Sense strand starting at position 292 of SEQ ID NO: 1884915
gguugauucuauccugauc

SEQ ID NO: 2301713 - RNA, 19 nt, Artificial Sequence
  Description of Artificial Sequence: Synthetic oligonucleotide
  Antisense strand to SEQ ID NO: 2301712
gaucaggauagaaucaacc

SEQ ID NO: 2301714 - RNA, 19 nt, Artificial Sequence
  Description of Artificial Sequence: Synthetic oligonucleotide
  Sense strand starting at position 381 of SEQ ID NO: 1884915
uaguuucuagugggaaacu

SEQ ID NO: 2301715 - RNA, 19 nt, Artificial Sequence
  Description of Artificial Sequence: Synthetic oligonucleotide
  Antisense strand to SEQ ID NO: 2301714
aguuucccacuagaaacua

SEQ ID NO: 2301716 - RNA, 19 nt, Artificial Sequence
  Description of Artificial Sequence: Synthetic oligonucleotide
  Sense strand starting at position 390 of SEQ ID NO: 1884915
gugggaaacuagguauaua

SEQ ID NO: 2301717 - RNA, 19 nt, Artificial Sequence
  Description of Artificial Sequence: Synthetic oligonucleotide
  Antisense strand to SEQ ID NO: 2301716
uauauaccuaguuucccac

SEQ ID NO: 2301718 - RNA, 19 nt, Artificial Sequence
  Description of Artificial Sequence: Synthetic oligonucleotide
  Sense strand starting at position 451 of SEQ ID NO: 1884915
gguaguuacuauucuaaga

SEQ ID NO: 2301719 - RNA, 19 nt, Artificial Sequence
  Description of Artificial Sequence: Synthetic oligonucleotide
  Antisense strand to SEQ ID NO: 2301718
ucuuagaauaguaacuacc

SEQ ID NO: 2301720 - RNA, 19 nt, Artificial Sequence
  Description of Artificial Sequence: Synthetic oligonucleotide
  Sense strand starting at position 538 of SEQ ID NO: 1884915
agaauaguaacuggaguuu

SEQ ID NO: 2301721 - RNA, 19 nt, Artificial Sequence
  Description of Artificial Sequence: Synthetic oligonucleotide
  Antisense strand to SEQ ID NO: 2301720
aaacuccaguuacuauucu

SEQ ID NO: 2301722 - RNA, 19 nt, Artificial Sequence
  Description of Artificial Sequence: Synthetic oligonucleotide
  Sense strand starting at position 560 of SEQ ID NO: 1884915
uuuccaaauguguggauga

SEQ ID NO: 2301723 - RNA, 19 nt, Artificial Sequence
  Description of Artificial Sequence: Synthetic oligonucleotide
  Antisense strand to SEQ ID NO: 2301722
ucauccacacauuuggaaa

SEQ ID NO: 2301724 - RNA, 19 nt, Artificial Sequence
  Description of Artificial Sequence: Synthetic oligonucleotide
  Sense strand starting at position 579 of SEQ ID NO: 1884915
agauaagguucccuucuca

SEQ ID NO: 2301725 - RNA, 19 nt, Artificial Sequence
  Description of Artificial Sequence: Synthetic oligonucleotide
  Antisense strand to SEQ ID NO: 2301724
ugagaagggaaccuuaucu

SEQ ID NO: 2301726 - RNA, 19 nt, Artificial Sequence
  Description of Artificial Sequence: Synthetic oligonucleotide
  Sense strand starting at position 636 of SEQ ID NO: 1884915
uuguacaagucauucugaa

SEQ ID NO: 2301727 - RNA, 19 nt, Artificial Sequence
  Description of Artificial Sequence: Synthetic oligonucleotide
  Antisense strand to SEQ ID NO: 2301726
uucagaaugacuuguacaa

SEQ ID NO: 2301728 - RNA, 19 nt, Artificial Sequence
  Description of Artificial Sequence: Synthetic oligonucleotide
  Sense strand starting at position 739 of SEQ ID NO: 1884915
gugagaaacuaauuagucu

SEQ ID NO: 2301729 - RNA, 19 nt, Artificial Sequence
  Description of Artificial Sequence: Synthetic oligonucleotide
  Antisense strand to SEQ ID NO: 2301728
agacuaauuaguuucucac

SEQ ID NO: 2301730 - RNA, 19 nt, Artificial Sequence
  Description of Artificial Sequence: Synthetic oligonucleotide
  Sense strand starting at position 814 of SEQ ID NO: 1884915
acuccugaaugcuuugaau

SEQ ID NO: 2301731 - RNA, 19 nt, Artificial Sequence
  Description of Artificial Sequence: Synthetic oligonucleotide
  Antisense strand to SEQ ID NO: 2301730
auucaaagcauucaggagu

SEQ ID NO: 2301732 - RNA, 19 nt, Artificial Sequence
  Description of Artificial Sequence: Synthetic oligonucleotide
  Sense strand starting at position 816 of SEQ ID NO: 1884915
uccugaaugcuuugaauga

SEQ ID NO: 2301733 - RNA, 19 nt, Artificial Sequence
  Description of Artificial Sequence: Synthetic oligonucleotide
  Antisense strand to SEQ ID NO: 2301732
ucauucaaagcauucagga

SEQ ID NO: 2301734 - RNA, 19 nt, Artificial Sequence
  Description of Artificial Sequence: Synthetic oligonucleotide
  Sense strand starting at position 862 of SEQ ID NO: 1884915
cuguaugugcgugugauga

SEQ ID NO: 2301735 - RNA, 19 nt, Artificial Sequence
  Description of Artificial Sequence: Synthetic oligonucleotide
  Antisense strand to SEQ ID NO: 2301734
ucaucacacgcacauacag

SEQ ID NO: 2301736 - RNA, 19 nt, Artificial Sequence
  Description of Artificial Sequence: Synthetic oligonucleotide
  Sense strand starting at position 921 of SEQ ID NO: 1884915
cccagagagccuggauuaa

SEQ ID NO: 2301737 - RNA, 19 nt, Artificial Sequence
  Description of Artificial Sequence: Synthetic oligonucleotide
  Antisense strand to SEQ ID NO: 2301736
uuaauccaggcucucuggg

SEQ ID NO: 2301738 - RNA, 19 nt, Artificial Sequence
  Description of Artificial Sequence: Synthetic oligonucleotide
  Sense strand starting at position 1346 of SEQ ID NO: 1884915
gacuaaggaucucugcaga

SEQ ID NO: 2301739 - RNA, 19 nt, Artificial Sequence
  Description of Artificial Sequence: Synthetic oligonucleotide
  Antisense strand to SEQ ID NO: 2301738
ucugcagagauccuuaguc

SEQ ID NO: 2301740 - RNA, 19 nt, Artificial Sequence
  Description of Artificial Sequence: Synthetic oligonucleotide
  Sense strand starting at position 1408 of SEQ ID NO: 1884915
gugggaaacuggucaacaa

SEQ ID NO: 2301741 - RNA, 19 nt, Artificial Sequence
  Description of Artificial Sequence: Synthetic oligonucleotide
  Antisense strand to SEQ ID NO: 2301740
uuguugaccaguuucccac

SEQ ID NO: 2301742 - RNA, 19 nt, Artificial Sequence
  Description of Artificial Sequence: Synthetic oligonucleotide
  Sense strand starting at position 1745 of SEQ ID NO: 1884915
cccugacugcuggacauaa

SEQ ID NO: 2301743 - RNA, 19 nt, Artificial Sequence
  Description of Artificial Sequence: Synthetic oligonucleotide
  Antisense strand to SEQ ID NO: 2301742
uuauguccagcagucaggg

SEQ ID NO: 2301744 - RNA, 19 nt, Artificial Sequence
  Description of Artificial Sequence: Synthetic oligonucleotide
  Sense strand starting at position 1797 of SEQ ID NO: 1884915
ggccaugguccuuacucua

SEQ ID NO: 2301745 - RNA, 19 nt, Artificial Sequence
  Description of Artificial Sequence: Synthetic oligonucleotide
  Antisense strand to SEQ ID NO: 2301744
uagaguaaggaccauggcc

SEQ ID NO: 2301746 - RNA, 19 nt, Artificial Sequence
  Description of Artificial Sequence: Synthetic oligonucleotide
  Sense strand starting at position 1851 of SEQ ID NO: 1884915
ggaugaagaugcuuaauug

SEQ ID NO: 2301747 - RNA, 19 nt, Artificial Sequence
  Description of Artificial Sequence: Synthetic oligonucleotide
  Antisense strand to SEQ ID NO: 2301746
caauuaagcaucuucaucc

SEQ ID NO: 2301748 - RNA, 19 nt, Artificial Sequence
  Description of Artificial Sequence: Synthetic oligonucleotide
  Sense strand starting at position 1880 of SEQ ID NO: 1884915
guauaauaauuaccggaug

SEQ ID NO: 2301749 - RNA, 19 nt, Artificial Sequence
  Description of Artificial Sequence: Synthetic oligonucleotide
  Antisense strand to SEQ ID NO: 2301748
cauccgguaauuauuauac

SEQ ID NO: 2301750 - RNA, 19 nt, Artificial Sequence
  Description of Artificial Sequence: Synthetic oligonucleotide
  Sense strand starting at position 2028 of SEQ ID NO: 1884915
cugggcucuggccaauaaa

SEQ ID NO: 2301751 - RNA, 19 nt, Artificial Sequence
  Description of Artificial Sequence: Synthetic oligonucleotide
  Antisense strand to SEQ ID NO: 2301750
uuuauuggccagagcccag

SEQ ID NO: 2301752 - RNA, 19 nt, Artificial Sequence
  Description of Artificial Sequence: Synthetic oligonucleotide
  Sense strand starting at position 2189 of SEQ ID NO: 1884915
cacacuugggauuguaaug

SEQ ID NO: 2301753 - RNA, 19 nt, Artificial Sequence
  Description of Artificial Sequence: Synthetic oligonucleotide
  Antisense strand to SEQ ID NO: 2301752
cauuacaaucccaagugug

SEQ ID NO: 2301754 - RNA, 19 nt, Artificial Sequence
  Description of Artificial Sequence: Synthetic oligonucleotide
  Sense strand starting at position 2374 of SEQ ID NO: 1884915
guacuuugacaacagguuu

SEQ ID NO: 2301755 - RNA, 19 nt, Artificial Sequence
  Description of Artificial Sequence: Synthetic oligonucleotide
  Antisense strand to SEQ ID NO: 2301754
aaaccuguugucaaaguac

SEQ ID NO: 2301756 - RNA, 19 nt, Artificial Sequence
  Description of Artificial Sequence: Synthetic oligonucleotide
  Sense strand starting at position 2496 of SEQ ID NO: 1884915
cugagauuaguagguaauu

SEQ ID NO: 2301757 - RNA, 19 nt, Artificial Sequence
  Description of Artificial Sequence: Synthetic oligonucleotide
  Antisense strand to SEQ ID NO: 2301756
aauuaccuacuaaucucag

SEQ ID NO: 2301758 - RNA, 19 nt, Artificial Sequence
  Description of Artificial Sequence: Synthetic oligonucleotide
  Sense strand starting at position 2497 of SEQ ID NO: 1884915
ugagauuaguagguaauug

SEQ ID NO: 2301759 - RNA, 19 nt, Artificial Sequence
  Description of Artificial Sequence: Synthetic oligonucleotide
  Antisense strand to SEQ ID NO: 2301758
caauuaccuacuaaucuca

SEQ ID NO: 2301760 - RNA, 19 nt, Artificial Sequence
  Description of Artificial Sequence: Synthetic oligonucleotide
  Sense strand starting at position 2659 of SEQ ID NO: 1884915
uccagucauccauauuggu

SEQ ID NO: 2301761 - RNA, 19 nt, Artificial Sequence
  Description of Artificial Sequence: Synthetic oligonucleotide
  Antisense strand to SEQ ID NO: 2301760
accaauauggaugacugga

SEQ ID NO: 2301762 - RNA, 19 nt, Artificial Sequence
  Description of Artificial Sequence: Synthetic oligonucleotide
  Sense strand starting at position 3216 of SEQ ID NO: 1884915
auguuucugaaagggucau

SEQ ID NO: 2301763 - RNA, 19 nt, Artificial Sequence
  Description of Artificial Sequence: Synthetic oligonucleotide
  Antisense strand to SEQ ID NO: 2301762
augacccuuucagaaacau

SEQ ID NO: 2301764 - RNA, 19 nt, Artificial Sequence
  Description of Artificial Sequence: Synthetic oligonucleotide
  Sense strand starting at position 3222 of SEQ ID NO: 1884915
cugaaagggucaucacuga

SEQ ID NO: 2301765 - RNA, 19 nt, Artificial Sequence
  Description of Artificial Sequence: Synthetic oligonucleotide
  Antisense strand to SEQ ID NO: 2301764
ucagugaugacccuuucag

SEQ ID NO: 2301766 - RNA, 19 nt, Artificial Sequence
  Description of Artificial Sequence: Synthetic oligonucleotide
  Sense strand starting at position 3241 of SEQ ID NO: 1884915
ggagcagagcuggacuaau

SEQ ID NO: 2301767 - RNA, 19 nt, Artificial Sequence
  Description of Artificial Sequence: Synthetic oligonucleotide
  Antisense strand to SEQ ID NO: 2301766
auuaguccagcucugcucc

SEQ ID NO: 2301768 - RNA, 19 nt, Artificial Sequence
  Description of Artificial Sequence: Synthetic oligonucleotide
  Sense strand starting at position 3384 of SEQ ID NO: 1884915
guaucuuugagaugaggca

SEQ ID NO: 2301769 - RNA, 19 nt, Artificial Sequence
  Description of Artificial Sequence: Synthetic oligonucleotide
  Antisense strand to SEQ ID NO: 2301768
ugccucaucucaaagauac

SEQ ID NO: 2301770 - RNA, 19 nt, Artificial Sequence
  Description of Artificial Sequence: Synthetic oligonucleotide
  Sense strand starting at position 3463 of SEQ ID NO: 1884915
gauaaacgacaauguuaga

SEQ ID NO: 2301771 - RNA, 19 nt, Artificial Sequence
  Description of Artificial Sequence: Synthetic oligonucleotide
  Antisense strand to SEQ ID NO: 2301770
ucuaacauugucguuuauc

SEQ ID NO: 2301772 - RNA, 19 nt, Artificial Sequence
  Description of Artificial Sequence: Synthetic oligonucleotide
  Sense strand starting at position 3591 of SEQ ID NO: 1884915
gcgugaacaccacaggaua

SEQ ID NO: 2301773 - RNA, 19 nt, Artificial Sequence
  Description of Artificial Sequence: Synthetic oligonucleotide
  Antisense strand to SEQ ID NO: 2301772
uauccugugguguucacgc

SEQ ID NO: 2301774 - RNA, 19 nt, Artificial Sequence
  Description of Artificial Sequence: Synthetic oligonucleotide
  Sense strand starting at position 3622 of SEQ ID NO: 1884915
uugucuauccuagaggagu

SEQ ID NO: 2301775 - RNA, 19 nt, Artificial Sequence
  Description of Artificial Sequence: Synthetic oligonucleotide
  Antisense strand to SEQ ID NO: 2301774
acuccucuaggauagacaa

SEQ ID NO: 2301776 - RNA, 19 nt, Artificial Sequence
  Description of Artificial Sequence: Synthetic oligonucleotide
  Sense strand starting at position 3624 of SEQ ID NO: 1884915
gucuauccuagaggaguca

SEQ ID NO: 2301777 - RNA, 19 nt, Artificial Sequence
  Description of Artificial Sequence: Synthetic oligonucleotide
  Antisense strand to SEQ ID NO: 2301776
ugacuccucuaggauagac

SEQ ID NO: 2301778 - RNA, 19 nt, Artificial Sequence
  Description of Artificial Sequence: Synthetic oligonucleotide
  Sense strand starting at position 3703 of SEQ ID NO: 1884915
uacagaguacagugguuaa

SEQ ID NO: 2301779 - RNA, 19 nt, Artificial Sequence
  Description of Artificial Sequence: Synthetic oligonucleotide
  Antisense strand to SEQ ID NO: 2301778
uuaaccacuguacucugua

SEQ ID NO: 2301780 - RNA, 19 nt, Artificial Sequence
  Description of Artificial Sequence: Synthetic oligonucleotide
  Sense strand starting at position 3759 of SEQ ID NO: 1884915
cuuguaucauuugccaagu

SEQ ID NO: 2301781 - RNA, 19 nt, Artificial Sequence
  Description of Artificial Sequence: Synthetic oligonucleotide
  Antisense strand to SEQ ID NO: 2301780
acuuggcaaaugauacaag

SEQ ID NO: 2301782 - RNA, 19 nt, Artificial Sequence
  Description of Artificial Sequence: Synthetic oligonucleotide
  Sense strand starting at position 3860 of SEQ ID NO: 1884915
ugcaguuagguugagauca

SEQ ID NO: 2301783 - RNA, 19 nt, Artificial Sequence
  Description of Artificial Sequence: Synthetic oligonucleotide
  Antisense strand to SEQ ID NO: 2301782
ugaucucaaccuaacugca

SEQ ID NO: 2301784 - RNA, 19 nt, Artificial Sequence
  Description of Artificial Sequence: Synthetic oligonucleotide
  Sense strand starting at position 3865 of SEQ ID NO: 1884915
uuagguugagaucauguga

SEQ ID NO: 2301785 - RNA, 19 nt, Artificial Sequence
  Description of Artificial Sequence: Synthetic oligonucleotide
  Antisense strand to SEQ ID NO: 2301784
ucacaugaucucaaccuaa

SEQ ID NO: 2301786 - RNA, 19 nt, Artificial Sequence
  Description of Artificial Sequence: Synthetic oligonucleotide
  Sense strand starting at position 3872 of SEQ ID NO: 1884915
gagaucaugugauuggguu

SEQ ID NO: 2301787 - RNA, 19 nt, Artificial Sequence
  Description of Artificial Sequence: Synthetic oligonucleotide
  Antisense strand to SEQ ID NO: 2301786
aacccaaucacaugaucuc

SEQ ID NO: 2301788 - RNA, 19 nt, Artificial Sequence
  Description of Artificial Sequence: Synthetic oligonucleotide
  Sense strand starting at position 3921 of SEQ ID NO: 1884915
guaggaucuucugcaagau

SEQ ID NO: 2301789 - RNA, 19 nt, Artificial Sequence
  Description of Artificial Sequence: Synthetic oligonucleotide
  Antisense strand to SEQ ID NO: 2301788
aucuugcagaagauccuac

SEQ ID NO: 2301790 - RNA, 19 nt, Artificial Sequence
  Description of Artificial Sequence: Synthetic oligonucleotide
  Sense strand starting at position 574 of SEQ ID NO: 1884916
acucuucuucccuauggga

SEQ ID NO: 2301791 - RNA, 19 nt, Artificial Sequence
  Description of Artificial Sequence: Synthetic oligonucleotide
  Antisense strand to SEQ ID NO: 2301790
ucccauagggaagaagagu

SEQ ID NO: 2301792 - RNA, 19 nt, Artificial Sequence
  Description of Artificial Sequence: Synthetic oligonucleotide
  Sense strand starting at position 607 of SEQ ID NO: 1884916
ggcuguuauuucccuucuu

SEQ ID NO: 2301793 - RNA, 19 nt, Artificial Sequence
  Description of Artificial Sequence: Synthetic oligonucleotide
  Antisense strand to SEQ ID NO: 2301792
aagaagggaaauaacagcc

SEQ ID NO: 2301794 - RNA, 19 nt, Artificial Sequence
  Description of Artificial Sequence: Synthetic oligonucleotide
  Sense strand starting at position 693 of SEQ ID NO: 1884916
cuaggcaaugcuugcuaga

SEQ ID NO: 2301795 - RNA, 19 nt, Artificial Sequence
  Description of Artificial Sequence: Synthetic oligonucleotide
  Antisense strand to SEQ ID NO: 2301794
ucuagcaagcauugccuag

SEQ ID NO: 2301796 - RNA, 19 nt, Artificial Sequence
  Description of Artificial Sequence: Synthetic oligonucleotide
  Sense strand starting at position 695 of SEQ ID NO: 1884916
aggcaaugcuugcuagagu

SEQ ID NO: 2301797 - RNA, 19 nt, Artificial Sequence
  Description of Artificial Sequence: Synthetic oligonucleotide
  Antisense strand to SEQ ID NO: 2301796
acucuagcaagcauugccu

SEQ ID NO: 2301798 - RNA, 19 nt, Artificial Sequence
  Description of Artificial Sequence: Synthetic oligonucleotide
  Sense strand starting at position 696 of SEQ ID NO: 1884916
ggcaaugcuugcuagagug

SEQ ID NO: 2301799 - RNA, 19 nt, Artificial Sequence
  Description of Artificial Sequence: Synthetic oligonucleotide
  Antisense strand to SEQ ID NO: 2301798
cacucuagcaagcauugcc

SEQ ID NO: 2301800 - RNA, 19 nt, Artificial Sequence
  Description of Artificial Sequence: Synthetic oligonucleotide
  Sense strand starting at position 726 of SEQ ID NO: 1884916
gugggaguuuaccugaacu

SEQ ID NO: 2301801 - RNA, 19 nt, Artificial Sequence
  Description of Artificial Sequence: Synthetic oligonucleotide
  Antisense strand to SEQ ID NO: 2301800
aguucagguaaacucccac

SEQ ID NO: 2301802 - RNA, 19 nt, Artificial Sequence
  Description of Artificial Sequence: Synthetic oligonucleotide
  Sense strand starting at position 908 of SEQ ID NO: 1884916
gcagcagccuucuuggaga

SEQ ID NO: 2301803 - RNA, 19 nt, Artificial Sequence
  Description of Artificial Sequence: Synthetic oligonucleotide
  Antisense strand to SEQ ID NO: 2301802
ucuccaagaaggcugcugc

SEQ ID NO: 2301804 - RNA, 19 nt, Artificial Sequence
  Description of Artificial Sequence: Synthetic oligonucleotide
  Sense strand starting at position 998 of SEQ ID NO: 1884916
gcuggugaugucugcauuu

SEQ ID NO: 2301805 - RNA, 19 nt, Artificial Sequence
  Description of Artificial Sequence: Synthetic oligonucleotide
  Antisense strand to SEQ ID NO: 2301804
aaaugcagacaucaccagc

SEQ ID NO: 2301806 - RNA, 19 nt, Artificial Sequence
  Description of Artificial Sequence: Synthetic oligonucleotide
  Sense strand starting at position 1000 of SEQ ID NO: 1884916
uggugaugucugcauuugu

SEQ ID NO: 2301807 - RNA, 19 nt, Artificial Sequence
  Description of Artificial Sequence: Synthetic oligonucleotide
  Antisense strand to SEQ ID NO: 2301806
acaaaugcagacaucacca

SEQ ID NO: 2301808 - RNA, 19 nt, Artificial Sequence
  Description of Artificial Sequence: Synthetic oligonucleotide
  Sense strand starting at position 1311 of SEQ ID NO: 1884916
uugguuugcuccuccucua

SEQ ID NO: 2301809 - RNA, 19 nt, Artificial Sequence
  Description of Artificial Sequence: Synthetic oligonucleotide
  Antisense strand to SEQ ID NO: 2301808
uagaggaggagcaaaccaa

SEQ ID NO: 2301810 - RNA, 19 nt, Artificial Sequence
  Description of Artificial Sequence: Synthetic oligonucleotide
  Sense strand starting at position 1314 of SEQ ID NO: 1884916
guuugcuccuccucuagau

SEQ ID NO: 2301811 - RNA, 19 nt, Artificial Sequence
  Description of Artificial Sequence: Synthetic oligonucleotide
  Antisense strand to SEQ ID NO: 2301810
aucuagaggaggagcaaac

SEQ ID NO: 2301812 - RNA, 19 nt, Artificial Sequence
  Description of Artificial Sequence: Synthetic oligonucleotide
  Sense strand starting at position 1613 of SEQ ID NO: 1884916
gguaguaugugacaaggga

SEQ ID NO: 2301813 - RNA, 19 nt, Artificial Sequence
  Description of Artificial Sequence: Synthetic oligonucleotide
  Antisense strand to SEQ ID NO: 2301812
ucccuugucacauacuacc

SEQ ID NO: 2301814 - RNA, 19 nt, Artificial Sequence
  Description of Artificial Sequence: Synthetic oligonucleotide
  Sense strand starting at position 1928 of SEQ ID NO: 1884916
gaagucgucuuggugagga

SEQ ID NO: 2301815 - RNA, 19 nt, Artificial Sequence
  Description of Artificial Sequence: Synthetic oligonucleotide
  Antisense strand to SEQ ID NO: 2301814
uccucaccaagacgacuuc

SEQ ID NO: 2301816 - RNA, 19 nt, Artificial Sequence
  Description of Artificial Sequence: Synthetic oligonucleotide
  Sense strand starting at position 2142 of SEQ ID NO: 1884916
ccuagaccucuuggaguuu

SEQ ID NO: 2301817 - RNA, 19 nt, Artificial Sequence
  Description of Artificial Sequence: Synthetic oligonucleotide
  Antisense strand to SEQ ID NO: 2301816
aaacuccaagaggucuagg

SEQ ID NO: 2301818 - RNA, 19 nt, Artificial Sequence
  Description of Artificial Sequence: Synthetic oligonucleotide
  Sense strand starting at position 2151 of SEQ ID NO: 1884916
cuuggaguuuccucugcca

SEQ ID NO: 2301819 - RNA, 19 nt, Artificial Sequence
  Description of Artificial Sequence: Synthetic oligonucleotide
  Antisense strand to SEQ ID NO: 2301818
uggcagaggaaacuccaag

SEQ ID NO: 2301820 - RNA, 19 nt, Artificial Sequence
  Description of Artificial Sequence: Synthetic oligonucleotide
  Sense strand starting at position 2153 of SEQ ID NO: 1884916
uggaguuuccucugccauc

SEQ ID NO: 2301821 - RNA, 19 nt, Artificial Sequence
  Description of Artificial Sequence: Synthetic oligonucleotide
  Antisense strand to SEQ ID NO: 2301820
gauggcagaggaaacucca

SEQ ID NO: 2301822 - RNA, 19 nt, Artificial Sequence
  Description of Artificial Sequence: Synthetic oligonucleotide
  Sense strand starting at position 2186 of SEQ ID NO: 1884916
ugaggucuugcuggucaca

SEQ ID NO: 2301823 - RNA, 19 nt, Artificial Sequence
  Description of Artificial Sequence: Synthetic oligonucleotide
  Antisense strand to SEQ ID NO: 2301822
ugugaccagcaagaccuca

SEQ ID NO: 2301824 - RNA, 19 nt, Artificial Sequence
  Description of Artificial Sequence: Synthetic oligonucleotide
  Sense strand starting at position 2231 of SEQ ID NO: 1884916
caggguccuucccuguaau

SEQ ID NO: 2301825 - RNA, 19 nt, Artificial Sequence
  Description of Artificial Sequence: Synthetic oligonucleotide
  Antisense strand to SEQ ID NO: 2301824
auuacagggaaggacccug

SEQ ID NO: 2301826 - RNA, 19 nt, Artificial Sequence
  Description of Artificial Sequence: Synthetic oligonucleotide
  Sense strand starting at position 2232 of SEQ ID NO: 1884916
aggguccuucccuguaauu

SEQ ID NO: 2301827 - RNA, 19 nt, Artificial Sequence
  Description of Artificial Sequence: Synthetic oligonucleotide
  Antisense strand to SEQ ID NO: 2301826
aauuacagggaaggacccu

SEQ ID NO: 2301828 - RNA, 19 nt, Artificial Sequence
  Description of Artificial Sequence: Synthetic oligonucleotide
  Sense strand starting at position 2343 of SEQ ID NO: 1884916
cuagauaucguccagcuuc

SEQ ID NO: 2301829 - RNA, 19 nt, Artificial Sequence
  Description of Artificial Sequence: Synthetic oligonucleotide
  Antisense strand to SEQ ID NO: 2301828
gaagcuggacgauaucuag

SEQ ID NO: 2301830 - RNA, 19 nt, Artificial Sequence
  Description of Artificial Sequence: Synthetic oligonucleotide
  Sense strand starting at position 2408 of SEQ ID NO: 1884916
acagaagcguccucuuacu

SEQ ID NO: 2301831 - RNA, 19 nt, Artificial Sequence
  Description of Artificial Sequence: Synthetic oligonucleotide
  Antisense strand to SEQ ID NO: 2301830
aguaagaggacgcuucugu

SEQ ID NO: 2301832 - RNA, 19 nt, Artificial Sequence
  Description of Artificial Sequence: Synthetic oligonucleotide
  Sense strand starting at position 2566 of SEQ ID NO: 1884916
gcauuaugguccucucuca

SEQ ID NO: 2301833 - RNA, 19 nt, Artificial Sequence
  Description of Artificial Sequence: Synthetic oligonucleotide
  Antisense strand to SEQ ID NO: 2301832
ugagagaggaccauaaugc

SEQ ID NO: 2301834 - RNA, 19 nt, Artificial Sequence
  Description of Artificial Sequence: Synthetic oligonucleotide
  Sense strand starting at position 2723 of SEQ ID NO: 1884916
ggcuguugccuggagggua

SEQ ID NO: 2301835 - RNA, 19 nt, Artificial Sequence
  Description of Artificial Sequence: Synthetic oligonucleotide
  Antisense strand to SEQ ID NO: 2301834
uacccuccaggcaacagcc

SEQ ID NO: 2301836 - RNA, 19 nt, Artificial Sequence
  Description of Artificial Sequence: Synthetic oligonucleotide
  Sense strand starting at position 2724 of SEQ ID NO: 1884916
gcuguugccuggaggguaa

SEQ ID NO: 2301837 - RNA, 19 nt, Artificial Sequence
  Description of Artificial Sequence: Synthetic oligonucleotide
  Antisense strand to SEQ ID NO: 2301836
uuacccuccaggcaacagc

SEQ ID NO: 2301838 - RNA, 19 nt, Artificial Sequence
  Description of Artificial Sequence: Synthetic oligonucleotide
  Sense strand starting at position 3106 of SEQ ID NO: 1884916
acuguaucccuccaggagu

SEQ ID NO: 2301839 - RNA, 19 nt, Artificial Sequence
  Description of Artificial Sequence: Synthetic oligonucleotide
  Antisense strand to SEQ ID NO: 2301838
acuccuggagggauacagu

SEQ ID NO: 2301840 - RNA, 19 nt, Artificial Sequence
  Description of Artificial Sequence: Synthetic oligonucleotide
  Sense strand starting at position 3304 of SEQ ID NO: 1884916
gguggaagauggcuagaau

SEQ ID NO: 2301841 - RNA, 19 nt, Artificial Sequence
  Description of Artificial Sequence: Synthetic oligonucleotide
  Antisense strand to SEQ ID NO: 2301840
auucuagccaucuuccacc

SEQ ID NO: 2301842 - RNA, 19 nt, Artificial Sequence
  Description of Artificial Sequence: Synthetic oligonucleotide
  Sense strand starting at position 3315 of SEQ ID NO: 1884916
gcuagaaucccagguggca

SEQ ID NO: 2301843 - RNA, 19 nt, Artificial Sequence
  Description of Artificial Sequence: Synthetic oligonucleotide
  Antisense strand to SEQ ID NO: 2301842
ugccaccugggauucuagc

SEQ ID NO: 2301844 - RNA, 19 nt, Artificial Sequence
  Description of Artificial Sequence: Synthetic oligonucleotide
  Sense strand starting at position 3385 of SEQ ID NO: 1884916
aauuauagauaggagagau

SEQ ID NO: 2301845 - RNA, 19 nt, Artificial Sequence
  Description of Artificial Sequence: Synthetic oligonucleotide
  Antisense strand to SEQ ID NO: 2301844
aucucuccuaucuauaauu

SEQ ID NO: 2301846 - RNA, 19 nt, Artificial Sequence
  Description of Artificial Sequence: Synthetic oligonucleotide
  Sense strand starting at position 3401 of SEQ ID NO: 1884916
gauggaagauaacaauguu

SEQ ID NO: 2301847 - RNA, 19 nt, Artificial Sequence
  Description of Artificial Sequence: Synthetic oligonucleotide
  Antisense strand to SEQ ID NO: 2301846
aacauuguuaucuuccauc

SEQ ID NO: 2301848 - RNA, 19 nt, Artificial Sequence
  Description of Artificial Sequence: Synthetic oligonucleotide
  Sense strand starting at position 3407 of SEQ ID NO: 1884916
agauaacaauguuccagua

SEQ ID NO: 2301849 - RNA, 19 nt, Artificial Sequence
  Description of Artificial Sequence: Synthetic oligonucleotide
  Antisense strand to SEQ ID NO: 2301848
uacuggaacauuguuaucu

SEQ ID NO: 2301850 - RNA, 19 nt, Artificial Sequence
  Description of Artificial Sequence: Synthetic oligonucleotide
  Sense strand starting at position 3409 of SEQ ID NO: 1884916
auaacaauguuccaguaag

SEQ ID NO: 2301851 - RNA, 19 nt, Artificial Sequence
  Description of Artificial Sequence: Synthetic oligonucleotide
  Antisense strand to SEQ ID NO: 2301850
cuuacuggaacauuguuau

SEQ ID NO: 2301852 - RNA, 19 nt, Artificial Sequence
  Description of Artificial Sequence: Synthetic oligonucleotide
  Sense strand starting at position 3426 of SEQ ID NO: 1884916
agaccuuuguaggcucuaa

SEQ ID NO: 2301853 - RNA, 19 nt, Artificial Sequence
  Description of Artificial Sequence: Synthetic oligonucleotide
  Antisense strand to SEQ ID NO: 2301852
uuagagccuacaaaggucu

SEQ ID NO: 2301854 - RNA, 19 nt, Artificial Sequence
  Description of Artificial Sequence: Synthetic oligonucleotide
  Sense strand starting at position 3718 of SEQ ID NO: 1884916
caaggagacuggugaauaa

SEQ ID NO: 2301855 - RNA, 19 nt, Artificial Sequence
  Description of Artificial Sequence: Synthetic oligonucleotide
  Antisense strand to SEQ ID NO: 2301854
uuauucaccagucuccuug

SEQ ID NO: 2301856 - RNA, 19 nt, Artificial Sequence
  Description of Artificial Sequence: Synthetic oligonucleotide
  Sense strand starting at position 3769 of SEQ ID NO: 1884916
guuagaugugaauggcaga

SEQ ID NO: 2301857 - RNA, 19 nt, Artificial Sequence
  Description of Artificial Sequence: Synthetic oligonucleotide
  Antisense strand to SEQ ID NO: 2301856
ucugccauucacaucuaac

SEQ ID NO: 2301858 - RNA, 19 nt, Artificial Sequence
  Description of Artificial Sequence: Synthetic oligonucleotide
  Sense strand starting at position 3826 of SEQ ID NO: 1884916
aagggagacuuccgaggaa

SEQ ID NO: 2301859 - RNA, 19 nt, Artificial Sequence
  Description of Artificial Sequence: Synthetic oligonucleotide
  Antisense strand to SEQ ID NO: 2301858
uuccucggaagucucccuu

SEQ ID NO: 2301860 - RNA, 19 nt, Artificial Sequence
  Description of Artificial Sequence: Synthetic oligonucleotide
  Sense strand starting at position 212 of SEQ ID NO: 1884917
ggcggaucaguugaacuua

SEQ ID NO: 2301861 - RNA, 19 nt, Artificial Sequence
  Description of Artificial Sequence: Synthetic oligonucleotide
  Antisense strand to SEQ ID NO: 2301860
uaaguucaacugauccgcc

SEQ ID NO: 2301862 - RNA, 19 nt, Artificial Sequence
  Description of Artificial Sequence: Synthetic oligonucleotide
  Sense strand starting at position 483 of SEQ ID NO: 1884917
cuaguagggucuccuuaau

SEQ ID NO: 2301863 - RNA, 19 nt, Artificial Sequence
  Description of Artificial Sequence: Synthetic oligonucleotide
  Antisense strand to SEQ ID NO: 2301862
auuaaggagacccuacuag

SEQ ID NO: 2301864 - RNA, 19 nt, Artificial Sequence
  Description of Artificial Sequence: Synthetic oligonucleotide
  Sense strand starting at position 537 of SEQ ID NO: 1884917
uuagaucucguuuggacuu

SEQ ID NO: 2301865 - RNA, 19 nt, Artificial Sequence
  Description of Artificial Sequence: Synthetic oligonucleotide
  Antisense strand to SEQ ID NO: 2301864
aaguccaaacgagaucuaa

SEQ ID NO: 2301866 - RNA, 19 nt, Artificial Sequence
  Description of Artificial Sequence: Synthetic oligonucleotide
  Sense strand starting at position 933 of SEQ ID NO: 1884917
agguuuguucuauaaguaa

SEQ ID NO: 2301867 - RNA, 19 nt, Artificial Sequence
  Description of Artificial Sequence: Synthetic oligonucleotide
  Antisense strand to SEQ ID NO: 2301866
uuacuuauagaacaaaccu

SEQ ID NO: 2301868 - RNA, 19 nt, Artificial Sequence
  Description of Artificial Sequence: Synthetic oligonucleotide
  Sense strand starting at position 1023 of SEQ ID NO: 1884917
aguuguguucaguaggagu

SEQ ID NO: 2301869 - RNA, 19 nt, Artificial Sequence
  Description of Artificial Sequence: Synthetic oligonucleotide
  Antisense strand to SEQ ID NO: 2301868
acuccuacugaacacaacu

SEQ ID NO: 2301870 - RNA, 19 nt, Artificial Sequence
  Description of Artificial Sequence: Synthetic oligonucleotide
  Sense strand starting at position 1193 of SEQ ID NO: 1884917
ucuuuaucaucucugaguu

SEQ ID NO: 2301871 - RNA, 19 nt, Artificial Sequence
  Description of Artificial Sequence: Synthetic oligonucleotide
  Antisense strand to SEQ ID NO: 2301870
aacucagagaugauaaaga

SEQ ID NO: 2301872 - RNA, 19 nt, Artificial Sequence
  Description of Artificial Sequence: Synthetic oligonucleotide
  Sense strand starting at position 1194 of SEQ ID NO: 1884917
cuuuaucaucucugaguua

SEQ ID NO: 2301873 - RNA, 19 nt, Artificial Sequence
  Description of Artificial Sequence: Synthetic oligonucleotide
  Antisense strand to SEQ ID NO: 2301872
uaacucagagaugauaaag

SEQ ID NO: 2301874 - RNA, 19 nt, Artificial Sequence
  Description of Artificial Sequence: Synthetic oligonucleotide
  Sense strand starting at position 1219 of SEQ ID NO: 1884917
auacauaucugggccauga

SEQ ID NO: 2301875 - RNA, 19 nt, Artificial Sequence
  Description of Artificial Sequence: Synthetic oligonucleotide
  Antisense strand to SEQ ID NO: 2301874
ucauggcccagauauguau

SEQ ID NO: 2301876 - RNA, 19 nt, Artificial Sequence
  Description of Artificial Sequence: Synthetic oligonucleotide
  Sense strand starting at position 1223 of SEQ ID NO: 1884917
auaucugggccaugagagu

SEQ ID NO: 2301877 - RNA, 19 nt, Artificial Sequence
  Description of Artificial Sequence: Synthetic oligonucleotide
  Antisense strand to SEQ ID NO: 2301876
acucucauggcccagauau

SEQ ID NO: 2301878 - RNA, 19 nt, Artificial Sequence
  Description of Artificial Sequence: Synthetic oligonucleotide
  Sense strand starting at position 1234 of SEQ ID NO: 1884917
augagaguaaugggugaau

SEQ ID NO: 2301879 - RNA, 19 nt, Artificial Sequence
  Description of Artificial Sequence: Synthetic oligonucleotide
  Antisense strand to SEQ ID NO: 2301878
auucacccauuacucucau

SEQ ID NO: 2301880 - RNA, 19 nt, Artificial Sequence
  Description of Artificial Sequence: Synthetic oligonucleotide
  Sense strand starting at position 1236 of SEQ ID NO: 1884917
gagaguaaugggugaaugu

SEQ ID NO: 2301881 - RNA, 19 nt, Artificial Sequence
  Description of Artificial Sequence: Synthetic oligonucleotide
  Antisense strand to SEQ ID NO: 2301880
acauucacccauuacucuc

SEQ ID NO: 2301882 - RNA, 19 nt, Artificial Sequence
  Description of Artificial Sequence: Synthetic oligonucleotide
  Sense strand starting at position 1425 of SEQ ID NO: 1884917
ugauguagggaagguuaau

SEQ ID NO: 2301883 - RNA, 19 nt, Artificial Sequence
  Description of Artificial Sequence: Synthetic oligonucleotide
  Antisense strand to SEQ ID NO: 2301882
auuaaccuucccuacauca

SEQ ID NO: 2301884 - RNA, 19 nt, Artificial Sequence
  Description of Artificial Sequence: Synthetic oligonucleotide
  Sense strand starting at position 1747 of SEQ ID NO: 1884917
uccuaagugcucucgccua

SEQ ID NO: 2301885 - RNA, 19 nt, Artificial Sequence
  Description of Artificial Sequence: Synthetic oligonucleotide
  Antisense strand to SEQ ID NO: 2301884
uaggcgagagcacuuagga

SEQ ID NO: 2301886 - RNA, 19 nt, Artificial Sequence
  Description of Artificial Sequence: Synthetic oligonucleotide
  Sense strand starting at position 1820 of SEQ ID NO: 1884917
gggacaacuugaguccuaa

SEQ ID NO: 2301887 - RNA, 19 nt, Artificial Sequence
  Description of Artificial Sequence: Synthetic oligonucleotide
  Antisense strand to SEQ ID NO: 2301886
uuaggacucaaguuguccc

SEQ ID NO: 2301888 - RNA, 19 nt, Artificial Sequence
  Description of Artificial Sequence: Synthetic oligonucleotide
  Sense strand starting at position 1872 of SEQ ID NO: 1884917
cgcacuuguccugcagacu

SEQ ID NO: 2301889 - RNA, 19 nt, Artificial Sequence
  Description of Artificial Sequence: Synthetic oligonucleotide
  Antisense strand to SEQ ID NO: 2301888
agucugcaggacaagugcg

SEQ ID NO: 2301890 - RNA, 19 nt, Artificial Sequence
  Description of Artificial Sequence: Synthetic oligonucleotide
  Sense strand starting at position 1965 of SEQ ID NO: 1884917
gcuucucuaguggauaauu

SEQ ID NO: 2301891 - RNA, 19 nt, Artificial Sequence
  Description of Artificial Sequence: Synthetic oligonucleotide
  Antisense strand to SEQ ID NO: 2301890
aauuauccacuagagaagc

SEQ ID NO: 2301892 - RNA, 19 nt, Artificial Sequence
  Description of Artificial Sequence: Synthetic oligonucleotide
  Sense strand starting at position 2282 of SEQ ID NO: 1884917
agagcaugucagcagaaga

SEQ ID NO: 2301893 - RNA, 19 nt, Artificial Sequence
  Description of Artificial Sequence: Synthetic oligonucleotide
  Antisense strand to SEQ ID NO: 2301892
ucuucugcugacaugcucu

SEQ ID NO: 2301894 - RNA, 19 nt, Artificial Sequence
  Description of Artificial Sequence: Synthetic oligonucleotide
  Sense strand starting at position 2596 of SEQ ID NO: 1884917
gcccucuggccuuaugaca

SEQ ID NO: 2301895 - RNA, 19 nt, Artificial Sequence
  Description of Artificial Sequence: Synthetic oligonucleotide
  Antisense strand to SEQ ID NO: 2301894
ugucauaaggccagagggc

SEQ ID NO: 2301896 - RNA, 19 nt, Artificial Sequence
  Description of Artificial Sequence: Synthetic oligonucleotide
  Sense strand starting at position 2622 of SEQ ID NO: 1884917
gggucuaacugagcuauag

SEQ ID NO: 2301897 - RNA, 19 nt, Artificial Sequence
  Description of Artificial Sequence: Synthetic oligonucleotide
  Antisense strand to SEQ ID NO: 2301896
cuauagcucaguuagaccc

SEQ ID NO: 2301898 - RNA, 19 nt, Artificial Sequence
  Description of Artificial Sequence: Synthetic oligonucleotide
  Sense strand starting at position 2633 of SEQ ID NO: 1884917
agcuauagaccgugaacua

SEQ ID NO: 2301899 - RNA, 19 nt, Artificial Sequence
  Description of Artificial Sequence: Synthetic oligonucleotide
  Antisense strand to SEQ ID NO: 2301898
uaguucacggucuauagcu

SEQ ID NO: 2301900 - RNA, 19 nt, Artificial Sequence
  Description of Artificial Sequence: Synthetic oligonucleotide
  Sense strand starting at position 2634 of SEQ ID NO: 1884917
gcuauagaccgugaacuaa

SEQ ID NO: 2301901 - RNA, 19 nt, Artificial Sequence
  Description of Artificial Sequence: Synthetic oligonucleotide
  Antisense strand to SEQ ID NO: 2301900
uuaguucacggucuauagc

SEQ ID NO: 2301902 - RNA, 19 nt, Artificial Sequence
  Description of Artificial Sequence: Synthetic oligonucleotide
  Sense strand starting at position 2756 of SEQ ID NO: 1884917
ccacuagagguaugaccaa

SEQ ID NO: 2301903 - RNA, 19 nt, Artificial Sequence
  Description of Artificial Sequence: Synthetic oligonucleotide
  Antisense strand to SEQ ID NO: 2301902
uuggucauaccucuagugg

SEQ ID NO: 2301904 - RNA, 19 nt, Artificial Sequence
  Description of Artificial Sequence: Synthetic oligonucleotide
  Sense strand starting at position 2954 of SEQ ID NO: 1884917
ggaacuuuguuauccucau

SEQ ID NO: 2301905 - RNA, 19 nt, Artificial Sequence
  Description of Artificial Sequence: Synthetic oligonucleotide
  Antisense strand to SEQ ID NO: 2301904
augaggauaacaaaguucc

SEQ ID NO: 2301906 - RNA, 19 nt, Artificial Sequence
  Description of Artificial Sequence: Synthetic oligonucleotide
  Sense strand starting at position 2958 of SEQ ID NO: 1884917
cuuuguuauccucaucugu

SEQ ID NO: 2301907 - RNA, 19 nt, Artificial Sequence
  Description of Artificial Sequence: Synthetic oligonucleotide
  Antisense strand to SEQ ID NO: 2301906
acagaugaggauaacaaag

SEQ ID NO: 2301908 - RNA, 19 nt, Artificial Sequence
  Description of Artificial Sequence: Synthetic oligonucleotide
  Sense strand starting at position 3080 of SEQ ID NO: 1884917
aaucuugugcgacaguauu

SEQ ID NO: 2301909 - RNA, 19 nt, Artificial Sequence
  Description of Artificial Sequence: Synthetic oligonucleotide
  Antisense strand to SEQ ID NO: 2301908
aauacugucgcacaagauu

SEQ ID NO: 2301910 - RNA, 19 nt, Artificial Sequence
  Description of Artificial Sequence: Synthetic oligonucleotide
  Sense strand starting at position 3215 of SEQ ID NO: 1884917
gcuacaaaucauuggguuu

SEQ ID NO: 2301911 - RNA, 19 nt, Artificial Sequence
  Description of Artificial Sequence: Synthetic oligonucleotide
  Antisense strand to SEQ ID NO: 2301910
aaacccaaugauuuguagc

SEQ ID NO: 2301912 - RNA, 19 nt, Artificial Sequence
  Description of Artificial Sequence: Synthetic oligonucleotide
  Sense strand starting at position 3232 of SEQ ID NO: 1884917
uuuacuagccaauggguaa

SEQ ID NO: 2301913 - RNA, 19 nt, Artificial Sequence
  Description of Artificial Sequence: Synthetic oligonucleotide
  Antisense strand to SEQ ID NO: 2301912
uuacccauuggcuaguaaa

SEQ ID NO: 2301914 - RNA, 19 nt, Artificial Sequence
  Description of Artificial Sequence: Synthetic oligonucleotide
  Sense strand starting at position 3283 of SEQ ID NO: 1884917
uuuguucuccucuagauau

SEQ ID NO: 2301915 - RNA, 19 nt, Artificial Sequence
  Description of Artificial Sequence: Synthetic oligonucleotide
  Antisense strand to SEQ ID NO: 2301914
auaucuagaggagaacaaa

SEQ ID NO: 2301916 - RNA, 19 nt, Artificial Sequence
  Description of Artificial Sequence: Synthetic oligonucleotide
  Sense strand starting at position 3308 of SEQ ID NO: 1884917
agauguguaagaugacacu

SEQ ID NO: 2301917 - RNA, 19 nt, Artificial Sequence
  Description of Artificial Sequence: Synthetic oligonucleotide
  Antisense strand to SEQ ID NO: 2301916
agugucaucuuacacaucu

SEQ ID NO: 2301918 - RNA, 19 nt, Artificial Sequence
  Description of Artificial Sequence: Synthetic oligonucleotide
  Sense strand starting at position 3422 of SEQ ID NO: 1884917
gacaguucucuuuggucau

SEQ ID NO: 2301919 - RNA, 19 nt, Artificial Sequence
  Description of Artificial Sequence: Synthetic oligonucleotide
  Antisense strand to SEQ ID NO: 2301918
augaccaaagagaacuguc

SEQ ID NO: 2301920 - RNA, 19 nt, Artificial Sequence
  Description of Artificial Sequence: Synthetic oligonucleotide
  Sense strand starting at position 3424 of SEQ ID NO: 1884917
caguucucuuuggucauga

SEQ ID NO: 2301921 - RNA, 19 nt, Artificial Sequence
  Description of Artificial Sequence: Synthetic oligonucleotide
  Antisense strand to SEQ ID NO: 2301920
ucaugaccaaagagaacug

SEQ ID NO: 2301922 - RNA, 19 nt, Artificial Sequence
  Description of Artificial Sequence: Synthetic oligonucleotide
  Sense strand starting at position 3426 of SEQ ID NO: 1884917
guucucuuuggucaugaga

SEQ ID NO: 2301923 - RNA, 19 nt, Artificial Sequence
  Description of Artificial Sequence: Synthetic oligonucleotide
  Antisense strand to SEQ ID NO: 2301922
ucucaugaccaaagagaac

SEQ ID NO: 2301924 - RNA, 19 nt, Artificial Sequence
  Description of Artificial Sequence: Synthetic oligonucleotide
  Sense strand starting at position 3429 of SEQ ID NO: 1884917
cucuuuggucaugagagca

SEQ ID NO: 2301925 - RNA, 19 nt, Artificial Sequence
  Description of Artificial Sequence: Synthetic oligonucleotide
  Antisense strand to SEQ ID NO: 2301924
ugcucucaugaccaaagag

SEQ ID NO: 2301926 - RNA, 19 nt, Artificial Sequence
  Description of Artificial Sequence: Synthetic oligonucleotide
  Sense strand starting at position 3451 of SEQ ID NO: 1884917
cgcagagcaguggaauuaa

SEQ ID NO: 2301927 - RNA, 19 nt, Artificial Sequence
  Description of Artificial Sequence: Synthetic oligonucleotide
  Antisense strand to SEQ ID NO: 2301926
uuaauuccacugcucugcg

SEQ ID NO: 2301928 - RNA, 19 nt, Artificial Sequence
  Description of Artificial Sequence: Synthetic oligonucleotide
  Sense strand starting at position 3493 of SEQ ID NO: 1884917
cuaaucaggccauguagau

SEQ ID NO: 2301929 - RNA, 19 nt, Artificial Sequence
  Description of Artificial Sequence: Synthetic oligonucleotide
  Antisense strand to SEQ ID NO: 2301928
aucuacauggccugauuag

SEQ ID NO: 2301930 - RNA, 19 nt, Artificial Sequence
  Description of Artificial Sequence: Synthetic oligonucleotide
  Sense strand starting at position 3587 of SEQ ID NO: 1884917
aggcguuguaaacagauaa

SEQ ID NO: 2301931 - RNA, 19 nt, Artificial Sequence
  Description of Artificial Sequence: Synthetic oligonucleotide
  Antisense strand to SEQ ID NO: 2301930
uuaucuguuuacaacgccu

SEQ ID NO: 2301932 - RNA, 19 nt, Artificial Sequence
  Description of Artificial Sequence: Synthetic oligonucleotide
  Sense strand starting at position 3675 of SEQ ID NO: 1884917
cgauguuguggguaaacca

SEQ ID NO: 2301933 - RNA, 19 nt, Artificial Sequence
  Description of Artificial Sequence: Synthetic oligonucleotide
  Antisense strand to SEQ ID NO: 2301932
ugguuuacccacaacaucg

SEQ ID NO: 2301934 - RNA, 19 nt, Artificial Sequence
  Description of Artificial Sequence: Synthetic oligonucleotide
  Sense strand starting at position 3705 of SEQ ID NO: 1884917
ucugguaucccucagauuc

SEQ ID NO: 2301935 - RNA, 19 nt, Artificial Sequence
  Description of Artificial Sequence: Synthetic oligonucleotide
  Antisense strand to SEQ ID NO: 2301934
gaaucugagggauaccaga

SEQ ID NO: 2301936 - RNA, 19 nt, Artificial Sequence
  Description of Artificial Sequence: Synthetic oligonucleotide
  Sense strand starting at position 3728 of SEQ ID NO: 1884917
ucucuucuguguccaaaca

SEQ ID NO: 2301937 - RNA, 19 nt, Artificial Sequence
  Description of Artificial Sequence: Synthetic oligonucleotide
  Antisense strand to SEQ ID NO: 2301936
uguuuggacacagaagaga

SEQ ID NO: 2301938 - RNA, 19 nt, Artificial Sequence
  Description of Artificial Sequence: Synthetic oligonucleotide
  Sense strand starting at position 3825 of SEQ ID NO: 1884917
aaggaagaugccugcucuu

SEQ ID NO: 2301939 - RNA, 19 nt, Artificial Sequence
  Description of Artificial Sequence: Synthetic oligonucleotide
  Antisense strand to SEQ ID NO: 2301938
aagagcaggcaucuuccuu

SEQ ID NO: 2301940 - RNA, 19 nt, Artificial Sequence
  Description of Artificial Sequence: Synthetic oligonucleotide
  Sense strand starting at position 238 of SEQ ID NO: 1884918
ccaacugauuccucugaug

SEQ ID NO: 2301941 - RNA, 19 nt, Artificial Sequence
  Description of Artificial Sequence: Synthetic oligonucleotide
  Antisense strand to SEQ ID NO: 2301940
caucagaggaaucaguugg

SEQ ID NO: 2301942 - RNA, 19 nt, Artificial Sequence
  Description of Artificial Sequence: Synthetic oligonucleotide
  Sense strand starting at position 258 of SEQ ID NO: 1884918
ggaccauagggauggcauu

SEQ ID NO: 2301943 - RNA, 19 nt, Artificial Sequence
  Description of Artificial Sequence: Synthetic oligonucleotide
  Antisense strand to SEQ ID NO: 2301942
aaugccaucccuauggucc

SEQ ID NO: 2301944 - RNA, 19 nt, Artificial Sequence
  Description of Artificial Sequence: Synthetic oligonucleotide
  Sense strand starting at position 342 of SEQ ID NO: 1884918
auaauucuccaugguuaag

SEQ ID NO: 2301945 - RNA, 19 nt, Artificial Sequence
  Description of Artificial Sequence: Synthetic oligonucleotide
  Antisense strand to SEQ ID NO: 2301944
cuuaaccauggagaauuau

SEQ ID NO: 2301946 - RNA, 19 nt, Artificial Sequence
  Description of Artificial Sequence: Synthetic oligonucleotide
  Sense strand starting at position 345 of SEQ ID NO: 1884918
auucuccaugguuaagauu

SEQ ID NO: 2301947 - RNA, 19 nt, Artificial Sequence
  Description of Artificial Sequence: Synthetic oligonucleotide
  Antisense strand to SEQ ID NO: 2301946
aaucuuaaccauggagaau

SEQ ID NO: 2301948 - RNA, 19 nt, Artificial Sequence
  Description of Artificial Sequence: Synthetic oligonucleotide
  Sense strand starting at position 392 of SEQ ID NO: 1884918
ugaauauaugauugcuaca

SEQ ID NO: 2301949 - RNA, 19 nt, Artificial Sequence
  Description of Artificial Sequence: Synthetic oligonucleotide
  Antisense strand to SEQ ID NO: 2301948
uguagcaaucauauauuca

SEQ ID NO: 2301950 - RNA, 19 nt, Artificial Sequence
  Description of Artificial Sequence: Synthetic oligonucleotide
  Sense strand starting at position 425 of SEQ ID NO: 1884918
ggccuuagaugacuuuaau

SEQ ID NO: 2301951 - RNA, 19 nt, Artificial Sequence
  Description of Artificial Sequence: Synthetic oligonucleotide
  Antisense strand to SEQ ID NO: 2301950
auuaaagucaucuaaggcc

SEQ ID NO: 2301952 - RNA, 19 nt, Artificial Sequence
  Description of Artificial Sequence: Synthetic oligonucleotide
  Sense strand starting at position 474 of SEQ ID NO: 1884918
uuaucuauggacugugaaa

SEQ ID NO: 2301953 - RNA, 19 nt, Artificial Sequence
  Description of Artificial Sequence: Synthetic oligonucleotide
  Antisense strand to SEQ ID NO: 2301952
uuucacaguccauagauaa

SEQ ID NO: 2301954 - RNA, 19 nt, Artificial Sequence
  Description of Artificial Sequence: Synthetic oligonucleotide
  Sense strand starting at position 483 of SEQ ID NO: 1884918
gacugugaaaggugguauu

SEQ ID NO: 2301955 - RNA, 19 nt, Artificial Sequence
  Description of Artificial Sequence: Synthetic oligonucleotide
  Antisense strand to SEQ ID NO: 2301954
aauaccaccuuucacaguc

SEQ ID NO: 2301956 - RNA, 19 nt, Artificial Sequence
  Description of Artificial Sequence: Synthetic oligonucleotide
  Sense strand starting at position 664 of SEQ ID NO: 1884918
uugugacucgcacaacauu

SEQ ID NO: 2301957 - RNA, 19 nt, Artificial Sequence
  Description of Artificial Sequence: Synthetic oligonucleotide
  Antisense strand to SEQ ID NO: 2301956
aauguugugcgagucacaa

SEQ ID NO: 2301958 - RNA, 19 nt, Artificial Sequence
  Description of Artificial Sequence: Synthetic oligonucleotide
  Sense strand starting at position 955 of SEQ ID NO: 1884918
cugauugagcaccauauau

SEQ ID NO: 2301959 - RNA, 19 nt, Artificial Sequence
  Description of Artificial Sequence: Synthetic oligonucleotide
  Antisense strand to SEQ ID NO: 2301958
auauauggugcucaaucag

SEQ ID NO: 2301960 - RNA, 19 nt, Artificial Sequence
  Description of Artificial Sequence: Synthetic oligonucleotide
  Sense strand starting at position 997 of SEQ ID NO: 1884918
gaggacacgugauuaguaa

SEQ ID NO: 2301961 - RNA, 19 nt, Artificial Sequence
  Description of Artificial Sequence: Synthetic oligonucleotide
  Antisense strand to SEQ ID NO: 2301960
uuacuaaucacguguccuc

SEQ ID NO: 2301962 - RNA, 19 nt, Artificial Sequence
  Description of Artificial Sequence: Synthetic oligonucleotide
  Sense strand starting at position 1005 of SEQ ID NO: 1884918
gugauuaguaaagggacau

SEQ ID NO: 2301963 - RNA, 19 nt, Artificial Sequence
  Description of Artificial Sequence: Synthetic oligonucleotide
  Antisense strand to SEQ ID NO: 2301962
augucccuuuacuaaucac

SEQ ID NO: 2301964 - RNA, 19 nt, Artificial Sequence
  Description of Artificial Sequence: Synthetic oligonucleotide
  Sense strand starting at position 1046 of SEQ ID NO: 1884918
cagucaaguagagguuaga

SEQ ID NO: 2301965 - RNA, 19 nt, Artificial Sequence
  Description of Artificial Sequence: Synthetic oligonucleotide
  Antisense strand to SEQ ID NO: 2301964
ucuaaccucuacuugacug

SEQ ID NO: 2301966 - RNA, 19 nt, Artificial Sequence
  Description of Artificial Sequence: Synthetic oligonucleotide
  Sense strand starting at position 1080 of SEQ ID NO: 1884918
uacgaauauggauguaaca

SEQ ID NO: 2301967 - RNA, 19 nt, Artificial Sequence
  Description of Artificial Sequence: Synthetic oligonucleotide
  Antisense strand to SEQ ID NO: 2301966
uguuacauccauauucgua

SEQ ID NO: 2301968 - RNA, 19 nt, Artificial Sequence
  Description of Artificial Sequence: Synthetic oligonucleotide
  Sense strand starting at position 1093 of SEQ ID NO: 1884918
guaacauagauguauaugu

SEQ ID NO: 2301969 - RNA, 19 nt, Artificial Sequence
  Description of Artificial Sequence: Synthetic oligonucleotide
  Antisense strand to SEQ ID NO: 2301968
acauauacaucuauguuac

SEQ ID NO: 2301970 - RNA, 19 nt, Artificial Sequence
  Description of Artificial Sequence: Synthetic oligonucleotide
  Sense strand starting at position 1189 of SEQ ID NO: 1884918
cugguauugcaucauacga

SEQ ID NO: 2301971 - RNA, 19 nt, Artificial Sequence
  Description of Artificial Sequence: Synthetic oligonucleotide
  Antisense strand to SEQ ID NO: 2301970
ucguaugaugcaauaccag

SEQ ID NO: 2301972 - RNA, 19 nt, Artificial Sequence
  Description of Artificial Sequence: Synthetic oligonucleotide
  Sense strand starting at position 1230 of SEQ ID NO: 1884918
uuuauuuaucagugcucag

SEQ ID NO: 2301973 - RNA, 19 nt, Artificial Sequence
  Description of Artificial Sequence: Synthetic oligonucleotide
  Antisense strand to SEQ ID NO: 2301972
cugagcacugauaaauaaa

SEQ ID NO: 2301974 - RNA, 19 nt, Artificial Sequence
  Description of Artificial Sequence: Synthetic oligonucleotide
  Sense strand starting at position 1402 of SEQ ID NO: 1884918
guguauggugaggaccaua

SEQ ID NO: 2301975 - RNA, 19 nt, Artificial Sequence
  Description of Artificial Sequence: Synthetic oligonucleotide
  Antisense strand to SEQ ID NO: 2301974
uaugguccucaccauacac

SEQ ID NO: 2301976 - RNA, 19 nt, Artificial Sequence
  Description of Artificial Sequence: Synthetic oligonucleotide
  Sense strand starting at position 1481 of SEQ ID NO: 1884918
aaccaauuggccugggaac

SEQ ID NO: 2301977 - RNA, 19 nt, Artificial Sequence
  Description of Artificial Sequence: Synthetic oligonucleotide
  Antisense strand to SEQ ID NO: 2301976
guucccaggccaauugguu

SEQ ID NO: 2301978 - RNA, 19 nt, Artificial Sequence
  Description of Artificial Sequence: Synthetic oligonucleotide
  Sense strand starting at position 1534 of SEQ ID NO: 1884918
aaagauuucuuggaugagu

SEQ ID NO: 2301979 - RNA, 19 nt, Artificial Sequence
  Description of Artificial Sequence: Synthetic oligonucleotide
  Antisense strand to SEQ ID NO: 2301978
acucauccaagaaaucuuu

SEQ ID NO: 2301980 - RNA, 19 nt, Artificial Sequence
  Description of Artificial Sequence: Synthetic oligonucleotide
  Sense strand starting at position 1566 of SEQ ID NO: 1884918
cauggacugucauuagaac

SEQ ID NO: 2301981 - RNA, 19 nt, Artificial Sequence
  Description of Artificial Sequence: Synthetic oligonucleotide
  Antisense strand to SEQ ID NO: 2301980
guucuaaugacaguccaug

SEQ ID NO: 2301982 - RNA, 19 nt, Artificial Sequence
  Description of Artificial Sequence: Synthetic oligonucleotide
  Sense strand starting at position 1720 of SEQ ID NO: 1884918
acauuaucugucugaaagc

SEQ ID NO: 2301983 - RNA, 19 nt, Artificial Sequence
  Description of Artificial Sequence: Synthetic oligonucleotide
  Antisense strand to SEQ ID NO: 2301982
gcuuucagacagauaaugu

SEQ ID NO: 2301984 - RNA, 19 nt, Artificial Sequence
  Description of Artificial Sequence: Synthetic oligonucleotide
  Sense strand starting at position 1853 of SEQ ID NO: 1884918
caugauggcccuugaaaga

SEQ ID NO: 2301985 - RNA, 19 nt, Artificial Sequence
  Description of Artificial Sequence: Synthetic oligonucleotide
  Antisense strand to SEQ ID NO: 2301984
ucuuucaagggccaucaug

SEQ ID NO: 2301986 - RNA, 19 nt, Artificial Sequence
  Description of Artificial Sequence: Synthetic oligonucleotide
  Sense strand starting at position 2053 of SEQ ID NO: 1884918
uagaaagaauucucuguug

SEQ ID NO: 2301987 - RNA, 19 nt, Artificial Sequence
  Description of Artificial Sequence: Synthetic oligonucleotide
  Antisense strand to SEQ ID NO: 2301986
caacagagaauucuuucua

SEQ ID NO: 2301988 - RNA, 19 nt, Artificial Sequence
  Description of Artificial Sequence: Synthetic oligonucleotide
  Sense strand starting at position 2055 of SEQ ID NO: 1884918
gaaagaauucucuguugga

SEQ ID NO: 2301989 - RNA, 19 nt, Artificial Sequence
  Description of Artificial Sequence: Synthetic oligonucleotide
  Antisense strand to SEQ ID NO: 2301988
uccaacagagaauucuuuc

SEQ ID NO: 2301990 - RNA, 19 nt, Artificial Sequence
  Description of Artificial Sequence: Synthetic oligonucleotide
  Sense strand starting at position 2056 of SEQ ID NO: 1884918
aaagaauucucuguuggag

SEQ ID NO: 2301991 - RNA, 19 nt, Artificial Sequence
  Description of Artificial Sequence: Synthetic oligonucleotide
  Antisense strand to SEQ ID NO: 2301990
cuccaacagagaauucuuu

SEQ ID NO: 2301992 - RNA, 19 nt, Artificial Sequence
  Description of Artificial Sequence: Synthetic oligonucleotide
  Sense strand starting at position 2059 of SEQ ID NO: 1884918
gaauucucuguuggaguga

SEQ ID NO: 2301993 - RNA, 19 nt, Artificial Sequence
  Description of Artificial Sequence: Synthetic oligonucleotide
  Antisense strand to SEQ ID NO: 2301992
ucacuccaacagagaauuc

SEQ ID NO: 2301994 - RNA, 19 nt, Artificial Sequence
  Description of Artificial Sequence: Synthetic oligonucleotide
  Sense strand starting at position 2078 of SEQ ID NO: 1884918
cagagugagggcuaucauc

SEQ ID NO: 2301995 - RNA, 19 nt, Artificial Sequence
  Description of Artificial Sequence: Synthetic oligonucleotide
  Antisense strand to SEQ ID NO: 2301994
gaugauagcccucacucug

SEQ ID NO: 2301996 - RNA, 19 nt, Artificial Sequence
  Description of Artificial Sequence: Synthetic oligonucleotide
  Sense strand starting at position 2271 of SEQ ID NO: 1884918
uggagagccucuguagaca

SEQ ID NO: 2301997 - RNA, 19 nt, Artificial Sequence
  Description of Artificial Sequence: Synthetic oligonucleotide
  Antisense strand to SEQ ID NO: 2301996
ugucuacagaggcucucca

SEQ ID NO: 2301998 - RNA, 19 nt, Artificial Sequence
  Description of Artificial Sequence: Synthetic oligonucleotide
  Sense strand starting at position 2369 of SEQ ID NO: 1884918
ucggaauccagaugugaaa

SEQ ID NO: 2301999 - RNA, 19 nt, Artificial Sequence
  Description of Artificial Sequence: Synthetic oligonucleotide
  Antisense strand to SEQ ID NO: 2301998
uuucacaucuggauuccga

SEQ ID NO: 2302000 - RNA, 19 nt, Artificial Sequence
  Description of Artificial Sequence: Synthetic oligonucleotide
  Sense strand starting at position 2498 of SEQ ID NO: 1884918
gggaccaugcucugacuaa

SEQ ID NO: 2302001 - RNA, 19 nt, Artificial Sequence
  Description of Artificial Sequence: Synthetic oligonucleotide
  Antisense strand to SEQ ID NO: 2302000
uuagucagagcaugguccc

SEQ ID NO: 2302002 - RNA, 19 nt, Artificial Sequence
  Description of Artificial Sequence: Synthetic oligonucleotide
  Sense strand starting at position 2612 of SEQ ID NO: 1884918
guugcuguuaugcugcaua

SEQ ID NO: 2302003 - RNA, 19 nt, Artificial Sequence
  Description of Artificial Sequence: Synthetic oligonucleotide
  Antisense strand to SEQ ID NO: 2302002
uaugcagcauaacagcaac

SEQ ID NO: 2302004 - RNA, 19 nt, Artificial Sequence
  Description of Artificial Sequence: Synthetic oligonucleotide
  Sense strand starting at position 2614 of SEQ ID NO: 1884918
ugcuguuaugcugcauauu

SEQ ID NO: 2302005 - RNA, 19 nt, Artificial Sequence
  Description of Artificial Sequence: Synthetic oligonucleotide
  Antisense strand to SEQ ID NO: 2302004
aauaugcagcauaacagca

SEQ ID NO: 2302006 - RNA, 19 nt, Artificial Sequence
  Description of Artificial Sequence: Synthetic oligonucleotide
  Sense strand starting at position 2615 of SEQ ID NO: 1884918
gcuguuaugcugcauauuu

SEQ ID NO: 2302007 - RNA, 19 nt, Artificial Sequence
  Description of Artificial Sequence: Synthetic oligonucleotide
  Antisense strand to SEQ ID NO: 2302006
aaauaugcagcauaacagc

SEQ ID NO: 2302008 - RNA, 19 nt, Artificial Sequence
  Description of Artificial Sequence: Synthetic oligonucleotide
  Sense strand starting at position 2934 of SEQ ID NO: 1884918
gaaugucuggguuacuaug

SEQ ID NO: 2302009 - RNA, 19 nt, Artificial Sequence
  Description of Artificial Sequence: Synthetic oligonucleotide
  Antisense strand to SEQ ID NO: 2302008
cauaguaacccagacauuc

SEQ ID NO: 2302010 - RNA, 19 nt, Artificial Sequence
  Description of Artificial Sequence: Synthetic oligonucleotide
  Sense strand starting at position 3241 of SEQ ID NO: 1884918
auccuaaggcccugaaauc

SEQ ID NO: 2302011 - RNA, 19 nt, Artificial Sequence
  Description of Artificial Sequence: Synthetic oligonucleotide
  Antisense strand to SEQ ID NO: 2302010
gauuucagggccuuaggau

SEQ ID NO: 2302012 - RNA, 19 nt, Artificial Sequence
  Description of Artificial Sequence: Synthetic oligonucleotide
  Sense strand starting at position 3326 of SEQ ID NO: 1884918
ucagacaugccuugugaua

SEQ ID NO: 2302013 - RNA, 19 nt, Artificial Sequence
  Description of Artificial Sequence: Synthetic oligonucleotide
  Antisense strand to SEQ ID NO: 2302012
uaucacaaggcaugucuga

SEQ ID NO: 2302014 - RNA, 19 nt, Artificial Sequence
  Description of Artificial Sequence: Synthetic oligonucleotide
  Sense strand starting at position 3507 of SEQ ID NO: 1884918
accagacauuccuuucugu

SEQ ID NO: 2302015 - RNA, 19 nt, Artificial Sequence
  Description of Artificial Sequence: Synthetic oligonucleotide
  Antisense strand to SEQ ID NO: 2302014
acagaaaggaaugucuggu

SEQ ID NO: 2302016 - RNA, 19 nt, Artificial Sequence
  Description of Artificial Sequence: Synthetic oligonucleotide
  Sense strand starting at position 3927 of SEQ ID NO: 1884918
guacaucuucuagguauug

SEQ ID NO: 2302017 - RNA, 19 nt, Artificial Sequence
  Description of Artificial Sequence: Synthetic oligonucleotide
  Antisense strand to SEQ ID NO: 2302016
caauaccuagaagauguac

SEQ ID NO: 2302018 - RNA, 19 nt, Artificial Sequence
  Description of Artificial Sequence: Synthetic oligonucleotide
  Sense strand starting at position 3936 of SEQ ID NO: 1884918
cuagguauugauugaugua

SEQ ID NO: 2302019 - RNA, 19 nt, Artificial Sequence
  Description of Artificial Sequence: Synthetic oligonucleotide
  Antisense strand to SEQ ID NO: 2302018
uacaucaaucaauaccuag

SEQ ID NO: 2302020 - RNA, 19 nt, Artificial Sequence
  Description of Artificial Sequence: Synthetic oligonucleotide
  Sense strand starting at position 239 of SEQ ID NO: 1884919
cuaggcaagccucacauau

SEQ ID NO: 2302021 - RNA, 19 nt, Artificial Sequence
  Description of Artificial Sequence: Synthetic oligonucleotide
  Antisense strand to SEQ ID NO: 2302020
auaugugaggcuugccuag

SEQ ID NO: 2302022 - RNA, 19 nt, Artificial Sequence
  Description of Artificial Sequence: Synthetic oligonucleotide
  Sense strand starting at position 553 of SEQ ID NO: 1884919
auugucucagagcaaugaa

SEQ ID NO: 2302023 - RNA, 19 nt, Artificial Sequence
  Description of Artificial Sequence: Synthetic oligonucleotide
  Antisense strand to SEQ ID NO: 2302022
uucauugcucugagacaau

SEQ ID NO: 2302024 - RNA, 19 nt, Artificial Sequence
  Description of Artificial Sequence: Synthetic oligonucleotide
  Sense strand starting at position 556 of SEQ ID NO: 1884919
gucucagagcaaugaauua

SEQ ID NO: 2302025 - RNA, 19 nt, Artificial Sequence
  Description of Artificial Sequence: Synthetic oligonucleotide
  Antisense strand to SEQ ID NO: 2302024
uaauucauugcucugagac

SEQ ID NO: 2302026 - RNA, 19 nt, Artificial Sequence
  Description of Artificial Sequence: Synthetic oligonucleotide
  Sense strand starting at position 580 of SEQ ID NO: 1884919
gggcuucuagaauagguuu

SEQ ID NO: 2302027 - RNA, 19 nt, Artificial Sequence
  Description of Artificial Sequence: Synthetic oligonucleotide
  Antisense strand to SEQ ID NO: 2302026
aaaccuauucuagaagccc

SEQ ID NO: 2302028 - RNA, 19 nt, Artificial Sequence
  Description of Artificial Sequence: Synthetic oligonucleotide
  Sense strand starting at position 582 of SEQ ID NO: 1884919
gcuucuagaauagguuuga

SEQ ID NO: 2302029 - RNA, 19 nt, Artificial Sequence
  Description of Artificial Sequence: Synthetic oligonucleotide
  Antisense strand to SEQ ID NO: 2302028
ucaaaccuauucuagaagc

SEQ ID NO: 2302030 - RNA, 19 nt, Artificial Sequence
  Description of Artificial Sequence: Synthetic oligonucleotide
  Sense strand starting at position 602 of SEQ ID NO: 1884919
agagaauuggagugaaguu

SEQ ID NO: 2302031 - RNA, 19 nt, Artificial Sequence
  Description of Artificial Sequence: Synthetic oligonucleotide
  Antisense strand to SEQ ID NO: 2302030
aacuucacuccaauucucu

SEQ ID NO: 2302032 - RNA, 19 nt, Artificial Sequence
  Description of Artificial Sequence: Synthetic oligonucleotide
  Sense strand starting at position 739 of SEQ ID NO: 1884919
cacguaggucauggaaaca

SEQ ID NO: 2302033 - RNA, 19 nt, Artificial Sequence
  Description of Artificial Sequence: Synthetic oligonucleotide
  Antisense strand to SEQ ID NO: 2302032
uguuuccaugaccuacgug

SEQ ID NO: 2302034 - RNA, 19 nt, Artificial Sequence
  Description of Artificial Sequence: Synthetic oligonucleotide
  Sense strand starting at position 814 of SEQ ID NO: 1884919
gaacaugugcuggauugga

SEQ ID NO: 2302035 - RNA, 19 nt, Artificial Sequence
  Description of Artificial Sequence: Synthetic oligonucleotide
  Antisense strand to SEQ ID NO: 2302034
uccaauccagcacauguuc

SEQ ID NO: 2302036 - RNA, 19 nt, Artificial Sequence
  Description of Artificial Sequence: Synthetic oligonucleotide
  Sense strand starting at position 945 of SEQ ID NO: 1884919
gagagaaagucugcaguua

SEQ ID NO: 2302037 - RNA, 19 nt, Artificial Sequence
  Description of Artificial Sequence: Synthetic oligonucleotide
  Antisense strand to SEQ ID NO: 2302036
uaacugcagacuuucucuc

SEQ ID NO: 2302038 - RNA, 19 nt, Artificial Sequence
  Description of Artificial Sequence: Synthetic oligonucleotide
  Sense strand starting at position 946 of SEQ ID NO: 1884919
agagaaagucugcaguuaa

SEQ ID NO: 2302039 - RNA, 19 nt, Artificial Sequence
  Description of Artificial Sequence: Synthetic oligonucleotide
  Antisense strand to SEQ ID NO: 2302038
uuaacugcagacuuucucu

SEQ ID NO: 2302040 - RNA, 19 nt, Artificial Sequence
  Description of Artificial Sequence: Synthetic oligonucleotide
  Sense strand starting at position 980 of SEQ ID NO: 1884919
uggaucuguaucugggaca

SEQ ID NO: 2302041 - RNA, 19 nt, Artificial Sequence
  Description of Artificial Sequence: Synthetic oligonucleotide
  Antisense strand to SEQ ID NO: 2302040
ugucccagauacagaucca

SEQ ID NO: 2302042 - RNA, 19 nt, Artificial Sequence
  Description of Artificial Sequence: Synthetic oligonucleotide
  Sense strand starting at position 1150 of SEQ ID NO: 1884919
cugggaugaugcucagauc

SEQ ID NO: 2302043 - RNA, 19 nt, Artificial Sequence
  Description of Artificial Sequence: Synthetic oligonucleotide
  Antisense strand to SEQ ID NO: 2302042
gaucugagcaucaucccag

SEQ ID NO: 2302044 - RNA, 19 nt, Artificial Sequence
  Description of Artificial Sequence: Synthetic oligonucleotide
  Sense strand starting at position 1175 of SEQ ID NO: 1884919
aagugcuauccuuaugagu

SEQ ID NO: 2302045 - RNA, 19 nt, Artificial Sequence
  Description of Artificial Sequence: Synthetic oligonucleotide
  Antisense strand to SEQ ID NO: 2302044
acucauaaggauagcacuu

SEQ ID NO: 2302046 - RNA, 19 nt, Artificial Sequence
  Description of Artificial Sequence: Synthetic oligonucleotide
  Sense strand starting at position 1276 of SEQ ID NO: 1884919
agaguccuuuccucaugaa

SEQ ID NO: 2302047 - RNA, 19 nt, Artificial Sequence
  Description of Artificial Sequence: Synthetic oligonucleotide
  Antisense strand to SEQ ID NO: 2302046
uucaugaggaaaggacucu

SEQ ID NO: 2302048 - RNA, 19 nt, Artificial Sequence
  Description of Artificial Sequence: Synthetic oligonucleotide
  Sense strand starting at position 1288 of SEQ ID NO: 1884919
ucaugaaggccuugacagu

SEQ ID NO: 2302049 - RNA, 19 nt, Artificial Sequence
  Description of Artificial Sequence: Synthetic oligonucleotide
  Antisense strand to SEQ ID NO: 2302048
acugucaaggccuucauga

SEQ ID NO: 2302050 - RNA, 19 nt, Artificial Sequence
  Description of Artificial Sequence: Synthetic oligonucleotide
  Sense strand starting at position 1680 of SEQ ID NO: 1884919
aguuguuugccacacaaug

SEQ ID NO: 2302051 - RNA, 19 nt, Artificial Sequence
  Description of Artificial Sequence: Synthetic oligonucleotide
  Antisense strand to SEQ ID NO: 2302050
cauuguguggcaaacaacu

SEQ ID NO: 2302052 - RNA, 19 nt, Artificial Sequence
  Description of Artificial Sequence: Synthetic oligonucleotide
  Sense strand starting at position 1792 of SEQ ID NO: 1884919
agaagaaaguuuguguuau

SEQ ID NO: 2302053 - RNA, 19 nt, Artificial Sequence
  Description of Artificial Sequence: Synthetic oligonucleotide
  Antisense strand to SEQ ID NO: 2302052
auaacacaaacuuucuucu

SEQ ID NO: 2302054 - RNA, 19 nt, Artificial Sequence
  Description of Artificial Sequence: Synthetic oligonucleotide
  Sense strand starting at position 1794 of SEQ ID NO: 1884919
aagaaaguuuguguuauga

SEQ ID NO: 2302055 - RNA, 19 nt, Artificial Sequence
  Description of Artificial Sequence: Synthetic oligonucleotide
  Antisense strand to SEQ ID NO: 2302054
ucauaacacaaacuuucuu

SEQ ID NO: 2302056 - RNA, 19 nt, Artificial Sequence
  Description of Artificial Sequence: Synthetic oligonucleotide
  Sense strand starting at position 1808 of SEQ ID NO: 1884919
uaugauccugugugacaca

SEQ ID NO: 2302057 - RNA, 19 nt, Artificial Sequence
  Description of Artificial Sequence: Synthetic oligonucleotide
  Antisense strand to SEQ ID NO: 2302056
ugugucacacaggaucaua

SEQ ID NO: 2302058 - RNA, 19 nt, Artificial Sequence
  Description of Artificial Sequence: Synthetic oligonucleotide
  Sense strand starting at position 1858 of SEQ ID NO: 1884919
ggaggaaauuggaguagau

SEQ ID NO: 2302059 - RNA, 19 nt, Artificial Sequence
  Description of Artificial Sequence: Synthetic oligonucleotide
  Antisense strand to SEQ ID NO: 2302058
aucuacuccaauuuccucc

SEQ ID NO: 2302060 - RNA, 19 nt, Artificial Sequence
  Description of Artificial Sequence: Synthetic oligonucleotide
  Sense strand starting at position 1989 of SEQ ID NO: 1884919
cuggucugaccucacaauu

SEQ ID NO: 2302061 - RNA, 19 nt, Artificial Sequence
  Description of Artificial Sequence: Synthetic oligonucleotide
  Antisense strand to SEQ ID NO: 2302060
aauugugaggucagaccag

SEQ ID NO: 2302062 - RNA, 19 nt, Artificial Sequence
  Description of Artificial Sequence: Synthetic oligonucleotide
  Sense strand starting at position 2015 of SEQ ID NO: 1884919
gguagauguugacuuaaag

SEQ ID NO: 2302063 - RNA, 19 nt, Artificial Sequence
  Description of Artificial Sequence: Synthetic oligonucleotide
  Antisense strand to SEQ ID NO: 2302062
cuuuaagucaacaucuacc

SEQ ID NO: 2302064 - RNA, 19 nt, Artificial Sequence
  Description of Artificial Sequence: Synthetic oligonucleotide
  Sense strand starting at position 2042 of SEQ ID NO: 1884919
gcuacuuaucuugggaaau

SEQ ID NO: 2302065 - RNA, 19 nt, Artificial Sequence
  Description of Artificial Sequence: Synthetic oligonucleotide
  Antisense strand to SEQ ID NO: 2302064
auuucccaagauaaguagc

SEQ ID NO: 2302066 - RNA, 19 nt, Artificial Sequence
  Description of Artificial Sequence: Synthetic oligonucleotide
  Sense strand starting at position 2055 of SEQ ID NO: 1884919
ggaaauaacuucccacagu

SEQ ID NO: 2302067 - RNA, 19 nt, Artificial Sequence
  Description of Artificial Sequence: Synthetic oligonucleotide
  Antisense strand to SEQ ID NO: 2302066
acugugggaaguuauuucc

SEQ ID NO: 2302068 - RNA, 19 nt, Artificial Sequence
  Description of Artificial Sequence: Synthetic oligonucleotide
  Sense strand starting at position 2140 of SEQ ID NO: 1884919
agauaagaacccuggccau

SEQ ID NO: 2302069 - RNA, 19 nt, Artificial Sequence
  Description of Artificial Sequence: Synthetic oligonucleotide
  Antisense strand to SEQ ID NO: 2302068
auggccaggguucuuaucu

SEQ ID NO: 2302070 - RNA, 19 nt, Artificial Sequence
  Description of Artificial Sequence: Synthetic oligonucleotide
  Sense strand starting at position 2269 of SEQ ID NO: 1884919
cugcccuugggucaugaga

SEQ ID NO: 2302071 - RNA, 19 nt, Artificial Sequence
  Description of Artificial Sequence: Synthetic oligonucleotide
  Antisense strand to SEQ ID NO: 2302070
ucucaugacccaagggcag

SEQ ID NO: 2302072 - RNA, 19 nt, Artificial Sequence
  Description of Artificial Sequence: Synthetic oligonucleotide
  Sense strand starting at position 2277 of SEQ ID NO: 1884919
gggucaugagaaugaggcu

SEQ ID NO: 2302073 - RNA, 19 nt, Artificial Sequence
  Description of Artificial Sequence: Synthetic oligonucleotide
  Antisense strand to SEQ ID NO: 2302072
agccucauucucaugaccc

SEQ ID NO: 2302074 - RNA, 19 nt, Artificial Sequence
  Description of Artificial Sequence: Synthetic oligonucleotide
  Sense strand starting at position 2314 of SEQ ID NO: 1884919
uguagugccagagaccauu

SEQ ID NO: 2302075 - RNA, 19 nt, Artificial Sequence
  Description of Artificial Sequence: Synthetic oligonucleotide
  Antisense strand to SEQ ID NO: 2302074
aauggucucuggcacuaca

SEQ ID NO: 2302076 - RNA, 19 nt, Artificial Sequence
  Description of Artificial Sequence: Synthetic oligonucleotide
  Sense strand starting at position 2345 of SEQ ID NO: 1884919
uugugucauccacaaagug

SEQ ID NO: 2302077 - RNA, 19 nt, Artificial Sequence
  Description of Artificial Sequence: Synthetic oligonucleotide
  Antisense strand to SEQ ID NO: 2302076
cacuuuguggaugacacaa

SEQ ID NO: 2302078 - RNA, 19 nt, Artificial Sequence
  Description of Artificial Sequence: Synthetic oligonucleotide
  Sense strand starting at position 2477 of SEQ ID NO: 1884919
augccagcaccauguauuu

SEQ ID NO: 2302079 - RNA, 19 nt, Artificial Sequence
  Description of Artificial Sequence: Synthetic oligonucleotide
  Antisense strand to SEQ ID NO: 2302078
aaauacauggugcuggcau

SEQ ID NO: 2302080 - RNA, 19 nt, Artificial Sequence
  Description of Artificial Sequence: Synthetic oligonucleotide
  Sense strand starting at position 2548 of SEQ ID NO: 1884919
ggaaaugagcuaugucauc

SEQ ID NO: 2302081 - RNA, 19 nt, Artificial Sequence
  Description of Artificial Sequence: Synthetic oligonucleotide
  Antisense strand to SEQ ID NO: 2302080
gaugacauagcucauuucc

SEQ ID NO: 2302082 - RNA, 19 nt, Artificial Sequence
  Description of Artificial Sequence: Synthetic oligonucleotide
  Sense strand starting at position 2644 of SEQ ID NO: 1884919
uuagcaugacauuaacagu

SEQ ID NO: 2302083 - RNA, 19 nt, Artificial Sequence
  Description of Artificial Sequence: Synthetic oligonucleotide
  Antisense strand to SEQ ID NO: 2302082
acuguuaaugucaugcuaa

SEQ ID NO: 2302084 - RNA, 19 nt, Artificial Sequence
  Description of Artificial Sequence: Synthetic oligonucleotide
  Sense strand starting at position 2655 of SEQ ID NO: 1884919
uuaacagugagcuguaaga

SEQ ID NO: 2302085 - RNA, 19 nt, Artificial Sequence
  Description of Artificial Sequence: Synthetic oligonucleotide
  Antisense strand to SEQ ID NO: 2302084
ucuuacagcucacuguuaa

SEQ ID NO: 2302086 - RNA, 19 nt, Artificial Sequence
  Description of Artificial Sequence: Synthetic oligonucleotide
  Sense strand starting at position 2657 of SEQ ID NO: 1884919
aacagugagcuguaagaca

SEQ ID NO: 2302087 - RNA, 19 nt, Artificial Sequence
  Description of Artificial Sequence: Synthetic oligonucleotide
  Antisense strand to SEQ ID NO: 2302086
ugucuuacagcucacuguu

SEQ ID NO: 2302088 - RNA, 19 nt, Artificial Sequence
  Description of Artificial Sequence: Synthetic oligonucleotide
  Sense strand starting at position 2864 of SEQ ID NO: 1884919
aagaaucaggaguguuauu

SEQ ID NO: 2302089 - RNA, 19 nt, Artificial Sequence
  Description of Artificial Sequence: Synthetic oligonucleotide
  Antisense strand to SEQ ID NO: 2302088
aauaacacuccugauucuu

SEQ ID NO: 2302090 - RNA, 19 nt, Artificial Sequence
  Description of Artificial Sequence: Synthetic oligonucleotide
  Sense strand starting at position 3016 of SEQ ID NO: 1884919
uuaaauacuggaggcauau

SEQ ID NO: 2302091 - RNA, 19 nt, Artificial Sequence
  Description of Artificial Sequence: Synthetic oligonucleotide
  Antisense strand to SEQ ID NO: 2302090
auaugccuccaguauuuaa

SEQ ID NO: 2302092 - RNA, 19 nt, Artificial Sequence
  Description of Artificial Sequence: Synthetic oligonucleotide
  Sense strand starting at position 3085 of SEQ ID NO: 1884919
ggucuuacaguuuaauaaa

SEQ ID NO: 2302093 - RNA, 19 nt, Artificial Sequence
  Description of Artificial Sequence: Synthetic oligonucleotide
  Antisense strand to SEQ ID NO: 2302092
uuuauuaaacuguaagacc

SEQ ID NO: 2302094 - RNA, 19 nt, Artificial Sequence
  Description of Artificial Sequence: Synthetic oligonucleotide
  Sense strand starting at position 3244 of SEQ ID NO: 1884919
gcuaauauaguuuggagau

SEQ ID NO: 2302095 - RNA, 19 nt, Artificial Sequence
  Description of Artificial Sequence: Synthetic oligonucleotide
  Antisense strand to SEQ ID NO: 2302094
aucuccaaacuauauuagc

SEQ ID NO: 2302096 - RNA, 19 nt, Artificial Sequence
  Description of Artificial Sequence: Synthetic oligonucleotide
  Sense strand starting at position 3590 of SEQ ID NO: 1884919
guggcaaagaacuaguagu

SEQ ID NO: 2302097 - RNA, 19 nt, Artificial Sequence
  Description of Artificial Sequence: Synthetic oligonucleotide
  Antisense strand to SEQ ID NO: 2302096
acuacuaguucuuugccac

SEQ ID NO: 2302098 - RNA, 19 nt, Artificial Sequence
  Description of Artificial Sequence: Synthetic oligonucleotide
  Sense strand starting at position 3711 of SEQ ID NO: 1884919
agaauauauucugucuaug

SEQ ID NO: 2302099 - RNA, 19 nt, Artificial Sequence
  Description of Artificial Sequence: Synthetic oligonucleotide
  Antisense strand to SEQ ID NO: 2302098
cauagacagaauauauucu

SEQ ID NO: 2302100 - RNA, 19 nt, Artificial Sequence
  Description of Artificial Sequence: Synthetic oligonucleotide
  Sense strand starting at position 531 of SEQ ID NO: 1884920
accuaaagguaguucuuaa

SEQ ID NO: 2302101 - RNA, 19 nt, Artificial Sequence
  Description of Artificial Sequence: Synthetic oligonucleotide
  Antisense strand to SEQ ID NO: 2302100
uuaagaacuaccuuuaggu

SEQ ID NO: 2302102 - RNA, 19 nt, Artificial Sequence
  Description of Artificial Sequence: Synthetic oligonucleotide
  Sense strand starting at position 535 of SEQ ID NO: 1884920
aaagguaguucuuaaggcu

SEQ ID NO: 2302103 - RNA, 19 nt, Artificial Sequence
  Description of Artificial Sequence: Synthetic oligonucleotide
  Antisense strand to SEQ ID NO: 2302102
agccuuaagaacuaccuuu

SEQ ID NO: 2302104 - RNA, 19 nt, Artificial Sequence
  Description of Artificial Sequence: Synthetic oligonucleotide
  Sense strand starting at position 538 of SEQ ID NO: 1884920
gguaguucuuaaggcuaaa

SEQ ID NO: 2302105 - RNA, 19 nt, Artificial Sequence
  Description of Artificial Sequence: Synthetic oligonucleotide
  Antisense strand to SEQ ID NO: 2302104
uuuagccuuaagaacuacc

SEQ ID NO: 2302106 - RNA, 19 nt, Artificial Sequence
  Description of Artificial Sequence: Synthetic oligonucleotide
  Sense strand starting at position 613 of SEQ ID NO: 1884920
cagauugcauaaguagaua

SEQ ID NO: 2302107 - RNA, 19 nt, Artificial Sequence
  Description of Artificial Sequence: Synthetic oligonucleotide
  Antisense strand to SEQ ID NO: 2302106
uaucuacuuaugcaaucug

SEQ ID NO: 2302108 - RNA, 19 nt, Artificial Sequence
  Description of Artificial Sequence: Synthetic oligonucleotide
  Sense strand starting at position 712 of SEQ ID NO: 1884920
aauuauaaauccgugcuga

SEQ ID NO: 2302109 - RNA, 19 nt, Artificial Sequence
  Description of Artificial Sequence: Synthetic oligonucleotide
  Antisense strand to SEQ ID NO: 2302108
ucagcacggauuuauaauu

SEQ ID NO: 2302110 - RNA, 19 nt, Artificial Sequence
  Description of Artificial Sequence: Synthetic oligonucleotide
  Sense strand starting at position 713 of SEQ ID NO: 1884920
auuauaaauccgugcugau

SEQ ID NO: 2302111 - RNA, 19 nt, Artificial Sequence
  Description of Artificial Sequence: Synthetic oligonucleotide
  Antisense strand to SEQ ID NO: 2302110
aucagcacggauuuauaau

SEQ ID NO: 2302112 - RNA, 19 nt, Artificial Sequence
  Description of Artificial Sequence: Synthetic oligonucleotide
  Sense strand starting at position 730 of SEQ ID NO: 1884920
augggcauacuguguauaa

SEQ ID NO: 2302113 - RNA, 19 nt, Artificial Sequence
  Description of Artificial Sequence: Synthetic oligonucleotide
  Antisense strand to SEQ ID NO: 2302112
uuauacacaguaugcccau

SEQ ID NO: 2302114 - RNA, 19 nt, Artificial Sequence
  Description of Artificial Sequence: Synthetic oligonucleotide
  Sense strand starting at position 731 of SEQ ID NO: 1884920
ugggcauacuguguauaaa

SEQ ID NO: 2302115 - RNA, 19 nt, Artificial Sequence
  Description of Artificial Sequence: Synthetic oligonucleotide
  Antisense strand to SEQ ID NO: 2302114
uuuauacacaguaugccca

SEQ ID NO: 2302116 - RNA, 19 nt, Artificial Sequence
  Description of Artificial Sequence: Synthetic oligonucleotide
  Sense strand starting at position 732 of SEQ ID NO: 1884920
gggcauacuguguauaaag

SEQ ID NO: 2302117 - RNA, 19 nt, Artificial Sequence
  Description of Artificial Sequence: Synthetic oligonucleotide
  Antisense strand to SEQ ID NO: 2302116
cuuuauacacaguaugccc

SEQ ID NO: 2302118 - RNA, 19 nt, Artificial Sequence
  Description of Artificial Sequence: Synthetic oligonucleotide
  Sense strand starting at position 796 of SEQ ID NO: 1884920
gggacuguauaagagcaaa

SEQ ID NO: 2302119 - RNA, 19 nt, Artificial Sequence
  Description of Artificial Sequence: Synthetic oligonucleotide
  Antisense strand to SEQ ID NO: 2302118
uuugcucuuauacaguccc

SEQ ID NO: 2302120 - RNA, 19 nt, Artificial Sequence
  Description of Artificial Sequence: Synthetic oligonucleotide
  Sense strand starting at position 799 of SEQ ID NO: 1884920
acuguauaagagcaaaguu

SEQ ID NO: 2302121 - RNA, 19 nt, Artificial Sequence
  Description of Artificial Sequence: Synthetic oligonucleotide
  Antisense strand to SEQ ID NO: 2302120
aacuuugcucuuauacagu

SEQ ID NO: 2302122 - RNA, 19 nt, Artificial Sequence
  Description of Artificial Sequence: Synthetic oligonucleotide
  Sense strand starting at position 964 of SEQ ID NO: 1884920
guaauagaguaaugaacag

SEQ ID NO: 2302123 - RNA, 19 nt, Artificial Sequence
  Description of Artificial Sequence: Synthetic oligonucleotide
  Antisense strand to SEQ ID NO: 2302122
cuguucauuacucuauuac

SEQ ID NO: 2302124 - RNA, 19 nt, Artificial Sequence
  Description of Artificial Sequence: Synthetic oligonucleotide
  Sense strand starting at position 1689 of SEQ ID NO: 1884920
cuccuacuacauggagaau

SEQ ID NO: 2302125 - RNA, 19 nt, Artificial Sequence
  Description of Artificial Sequence: Synthetic oligonucleotide
  Antisense strand to SEQ ID NO: 2302124
auucuccauguaguaggag

SEQ ID NO: 2302126 - RNA, 19 nt, Artificial Sequence
  Description of Artificial Sequence: Synthetic oligonucleotide
  Sense strand starting at position 1764 of SEQ ID NO: 1884920
acuacaucuugggcuguaa

SEQ ID NO: 2302127 - RNA, 19 nt, Artificial Sequence
  Description of Artificial Sequence: Synthetic oligonucleotide
  Antisense strand to SEQ ID NO: 2302126
uuacagcccaagauguagu

SEQ ID NO: 2302128 - RNA, 19 nt, Artificial Sequence
  Description of Artificial Sequence: Synthetic oligonucleotide
  Sense strand starting at position 1766 of SEQ ID NO: 1884920
uacaucuugggcuguaauu

SEQ ID NO: 2302129 - RNA, 19 nt, Artificial Sequence
  Description of Artificial Sequence: Synthetic oligonucleotide
  Antisense strand to SEQ ID NO: 2302128
aauuacagcccaagaugua

SEQ ID NO: 2302130 - RNA, 19 nt, Artificial Sequence
  Description of Artificial Sequence: Synthetic oligonucleotide
  Sense strand starting at position 1795 of SEQ ID NO: 1884920
gcagaaguccagugagaca

SEQ ID NO: 2302131 - RNA, 19 nt, Artificial Sequence
  Description of Artificial Sequence: Synthetic oligonucleotide
  Antisense strand to SEQ ID NO: 2302130
ugucucacuggacuucugc

SEQ ID NO: 2302132 - RNA, 19 nt, Artificial Sequence
  Description of Artificial Sequence: Synthetic oligonucleotide
  Sense strand starting at position 1955 of SEQ ID NO: 1884920
gacugagucucugcaagug

SEQ ID NO: 2302133 - RNA, 19 nt, Artificial Sequence
  Description of Artificial Sequence: Synthetic oligonucleotide
  Antisense strand to SEQ ID NO: 2302132
cacuugcagagacucaguc

SEQ ID NO: 2302134 - RNA, 19 nt, Artificial Sequence
  Description of Artificial Sequence: Synthetic oligonucleotide
  Sense strand starting at position 2034 of SEQ ID NO: 1884920
agagacaacuuagauuacu

SEQ ID NO: 2302135 - RNA, 19 nt, Artificial Sequence
  Description of Artificial Sequence: Synthetic oligonucleotide
  Antisense strand to SEQ ID NO: 2302134
aguaaucuaaguugucucu

SEQ ID NO: 2302136 - RNA, 19 nt, Artificial Sequence
  Description of Artificial Sequence: Synthetic oligonucleotide
  Sense strand starting at position 2042 of SEQ ID NO: 1884920
cuuagauuacugugcuaaa

SEQ ID NO: 2302137 - RNA, 19 nt, Artificial Sequence
  Description of Artificial Sequence: Synthetic oligonucleotide
  Antisense strand to SEQ ID NO: 2302136
uuuagcacaguaaucuaag

SEQ ID NO: 2302138 - RNA, 19 nt, Artificial Sequence
  Description of Artificial Sequence: Synthetic oligonucleotide
  Sense strand starting at position 2072 of SEQ ID NO: 1884920
cauccuguucuaggaggaa

SEQ ID NO: 2302139 - RNA, 19 nt, Artificial Sequence
  Description of Artificial Sequence: Synthetic oligonucleotide
  Antisense strand to SEQ ID NO: 2302138
uuccuccuagaacaggaug

SEQ ID NO: 2302140 - RNA, 19 nt, Artificial Sequence
  Description of Artificial Sequence: Synthetic oligonucleotide
  Sense strand starting at position 2099 of SEQ ID NO: 1884920
gagcccagauuguuccaaa

SEQ ID NO: 2302141 - RNA, 19 nt, Artificial Sequence
  Description of Artificial Sequence: Synthetic oligonucleotide
  Antisense strand to SEQ ID NO: 2302140
uuuggaacaaucugggcuc

SEQ ID NO: 2302142 - RNA, 19 nt, Artificial Sequence
  Description of Artificial Sequence: Synthetic oligonucleotide
  Sense strand starting at position 2100 of SEQ ID NO: 1884920
agcccagauuguuccaaac

SEQ ID NO: 2302143 - RNA, 19 nt, Artificial Sequence
  Description of Artificial Sequence: Synthetic oligonucleotide
  Antisense strand to SEQ ID NO: 2302142
guuuggaacaaucugggcu

SEQ ID NO: 2302144 - RNA, 19 nt, Artificial Sequence
  Description of Artificial Sequence: Synthetic oligonucleotide
  Sense strand starting at position 2102 of SEQ ID NO: 1884920
cccagauuguuccaaacag

SEQ ID NO: 2302145 - RNA, 19 nt, Artificial Sequence
  Description of Artificial Sequence: Synthetic oligonucleotide
  Antisense strand to SEQ ID NO: 2302144
cuguuuggaacaaucuggg

SEQ ID NO: 2302146 - RNA, 19 nt, Artificial Sequence
  Description of Artificial Sequence: Synthetic oligonucleotide
  Sense strand starting at position 2139 of SEQ ID NO: 1884920
ugcuguguucucggcacau

SEQ ID NO: 2302147 - RNA, 19 nt, Artificial Sequence
  Description of Artificial Sequence: Synthetic oligonucleotide
  Antisense strand to SEQ ID NO: 2302146
augugccgagaacacagca

SEQ ID NO: 2302148 - RNA, 19 nt, Artificial Sequence
  Description of Artificial Sequence: Synthetic oligonucleotide
  Sense strand starting at position 2143 of SEQ ID NO: 1884920
guguucucggcacauucua

SEQ ID NO: 2302149 - RNA, 19 nt, Artificial Sequence
  Description of Artificial Sequence: Synthetic oligonucleotide
  Antisense strand to SEQ ID NO: 2302148
uagaaugugccgagaacac

SEQ ID NO: 2302150 - RNA, 19 nt, Artificial Sequence
  Description of Artificial Sequence: Synthetic oligonucleotide
  Sense strand starting at position 2150 of SEQ ID NO: 1884920
cggcacauucuauagcuau

SEQ ID NO: 2302151 - RNA, 19 nt, Artificial Sequence
  Description of Artificial Sequence: Synthetic oligonucleotide
  Antisense strand to SEQ ID NO: 2302150
auagcuauagaaugugccg

SEQ ID NO: 2302152 - RNA, 19 nt, Artificial Sequence
  Description of Artificial Sequence: Synthetic oligonucleotide
  Sense strand starting at position 2157 of SEQ ID NO: 1884920
uucuauagcuauuccgaaa

SEQ ID NO: 2302153 - RNA, 19 nt, Artificial Sequence
  Description of Artificial Sequence: Synthetic oligonucleotide
  Antisense strand to SEQ ID NO: 2302152
uuucggaauagcuauagaa

SEQ ID NO: 2302154 - RNA, 19 nt, Artificial Sequence
  Description of Artificial Sequence: Synthetic oligonucleotide
  Sense strand starting at position 2224 of SEQ ID NO: 1884920
agcccuguccugcaaauca

SEQ ID NO: 2302155 - RNA, 19 nt, Artificial Sequence
  Description of Artificial Sequence: Synthetic oligonucleotide
  Antisense strand to SEQ ID NO: 2302154
ugauuugcaggacagggcu

SEQ ID NO: 2302156 - RNA, 19 nt, Artificial Sequence
  Description of Artificial Sequence: Synthetic oligonucleotide
  Sense strand starting at position 2248 of SEQ ID NO: 1884920
aggcauucuccaggacaga

SEQ ID NO: 2302157 - RNA, 19 nt, Artificial Sequence
  Description of Artificial Sequence: Synthetic oligonucleotide
  Antisense strand to SEQ ID NO: 2302156
ucuguccuggagaaugccu

SEQ ID NO: 2302158 - RNA, 19 nt, Artificial Sequence
  Description of Artificial Sequence: Synthetic oligonucleotide
  Sense strand starting at position 2428 of SEQ ID NO: 1884920
accaauugaucagagaaga

SEQ ID NO: 2302159 - RNA, 19 nt, Artificial Sequence
  Description of Artificial Sequence: Synthetic oligonucleotide
  Antisense strand to SEQ ID NO: 2302158
ucuucucugaucaauuggu

SEQ ID NO: 2302160 - RNA, 19 nt, Artificial Sequence
  Description of Artificial Sequence: Synthetic oligonucleotide
  Sense strand starting at position 2462 of SEQ ID NO: 1884920
uagaauguacauugagauu

SEQ ID NO: 2302161 - RNA, 19 nt, Artificial Sequence
  Description of Artificial Sequence: Synthetic oligonucleotide
  Antisense strand to SEQ ID NO: 2302160
aaucucaauguacauucua

SEQ ID NO: 2302162 - RNA, 19 nt, Artificial Sequence
  Description of Artificial Sequence: Synthetic oligonucleotide
  Sense strand starting at position 2540 of SEQ ID NO: 1884920
gaaggaaauuuauaguucu

SEQ ID NO: 2302163 - RNA, 19 nt, Artificial Sequence
  Description of Artificial Sequence: Synthetic oligonucleotide
  Antisense strand to SEQ ID NO: 2302162
agaacuauaaauuuccuuc

SEQ ID NO: 2302164 - RNA, 19 nt, Artificial Sequence
  Description of Artificial Sequence: Synthetic oligonucleotide
  Sense strand starting at position 2744 of SEQ ID NO: 1884920
uccgaugaccagugaugua

SEQ ID NO: 2302165 - RNA, 19 nt, Artificial Sequence
  Description of Artificial Sequence: Synthetic oligonucleotide
  Antisense strand to SEQ ID NO: 2302164
uacaucacuggucaucgga

SEQ ID NO: 2302166 - RNA, 19 nt, Artificial Sequence
  Description of Artificial Sequence: Synthetic oligonucleotide
  Sense strand starting at position 2747 of SEQ ID NO: 1884920
gaugaccagugauguaaga

SEQ ID NO: 2302167 - RNA, 19 nt, Artificial Sequence
  Description of Artificial Sequence: Synthetic oligonucleotide
  Antisense strand to SEQ ID NO: 2302166
ucuuacaucacuggucauc

SEQ ID NO: 2302168 - RNA, 19 nt, Artificial Sequence
  Description of Artificial Sequence: Synthetic oligonucleotide
  Sense strand starting at position 2992 of SEQ ID NO: 1884920
cauagaaggugugaugguu

SEQ ID NO: 2302169 - RNA, 19 nt, Artificial Sequence
  Description of Artificial Sequence: Synthetic oligonucleotide
  Antisense strand to SEQ ID NO: 2302168
aaccaucacaccuucuaug

SEQ ID NO: 2302170 - RNA, 19 nt, Artificial Sequence
  Description of Artificial Sequence: Synthetic oligonucleotide
  Sense strand starting at position 3530 of SEQ ID NO: 1884920
ucuguccuuccagagaaac

SEQ ID NO: 2302171 - RNA, 19 nt, Artificial Sequence
  Description of Artificial Sequence: Synthetic oligonucleotide
  Antisense strand to SEQ ID NO: 2302170
guuucucuggaaggacaga

SEQ ID NO: 2302172 - RNA, 19 nt, Artificial Sequence
  Description of Artificial Sequence: Synthetic oligonucleotide
  Sense strand starting at position 3723 of SEQ ID NO: 1884920
auagcaauuugacaagaga

SEQ ID NO: 2302173 - RNA, 19 nt, Artificial Sequence
  Description of Artificial Sequence: Synthetic oligonucleotide
  Antisense strand to SEQ ID NO: 2302172
ucucuugucaaauugcuau

SEQ ID NO: 2302174 - RNA, 19 nt, Artificial Sequence
  Description of Artificial Sequence: Synthetic oligonucleotide
  Sense strand starting at position 3783 of SEQ ID NO: 1884920
ccaucauuguuugcugaug

SEQ ID NO: 2302175 - RNA, 19 nt, Artificial Sequence
  Description of Artificial Sequence: Synthetic oligonucleotide
  Antisense strand to SEQ ID NO: 2302174
caucagcaaacaaugaugg

SEQ ID NO: 2302176 - RNA, 19 nt, Artificial Sequence
  Description of Artificial Sequence: Synthetic oligonucleotide
  Sense strand starting at position 3784 of SEQ ID NO: 1884920
caucauuguuugcugauga

SEQ ID NO: 2302177 - RNA, 19 nt, Artificial Sequence
  Description of Artificial Sequence: Synthetic oligonucleotide
  Antisense strand to SEQ ID NO: 2302176
ucaucagcaaacaaugaug

SEQ ID NO: 2302178 - RNA, 19 nt, Artificial Sequence
  Description of Artificial Sequence: Synthetic oligonucleotide
  Sense strand starting at position 3788 of SEQ ID NO: 1884920
auuguuugcugaugauaua

SEQ ID NO: 2302179 - RNA, 19 nt, Artificial Sequence
  Description of Artificial Sequence: Synthetic oligonucleotide
  Antisense strand to SEQ ID NO: 2302178
uauaucaucagcaaacaau

SEQ ID NO: 2302180 - RNA, 19 nt, Artificial Sequence
  Description of Artificial Sequence: Synthetic oligonucleotide
  Sense strand starting at position 404 of SEQ ID NO: 1884921
ccauaaauauauguguaca

SEQ ID NO: 2302181 - RNA, 19 nt, Artificial Sequence
  Description of Artificial Sequence: Synthetic oligonucleotide
  Antisense strand to SEQ ID NO: 2302180
uguacacauauauuuaugg

SEQ ID NO: 2302182 - RNA, 19 nt, Artificial Sequence
  Description of Artificial Sequence: Synthetic oligonucleotide
  Sense strand starting at position 429 of SEQ ID NO: 1884921
uguacauaugcacagauau

SEQ ID NO: 2302183 - RNA, 19 nt, Artificial Sequence
  Description of Artificial Sequence: Synthetic oligonucleotide
  Antisense strand to SEQ ID NO: 2302182
auaucugugcauauguaca

SEQ ID NO: 2302184 - RNA, 19 nt, Artificial Sequence
  Description of Artificial Sequence: Synthetic oligonucleotide
  Sense strand starting at position 693 of SEQ ID NO: 1884921
cccauaaaguacgaguaga

SEQ ID NO: 2302185 - RNA, 19 nt, Artificial Sequence
  Description of Artificial Sequence: Synthetic oligonucleotide
  Antisense strand to SEQ ID NO: 2302184
ucuacucguacuuuauggg

SEQ ID NO: 2302186 - RNA, 19 nt, Artificial Sequence
  Description of Artificial Sequence: Synthetic oligonucleotide
  Sense strand starting at position 704 of SEQ ID NO: 1884921
cgaguagacacagaugcau

SEQ ID NO: 2302187 - RNA, 19 nt, Artificial Sequence
  Description of Artificial Sequence: Synthetic oligonucleotide
  Antisense strand to SEQ ID NO: 2302186
augcaucugugucuacucg

SEQ ID NO: 2302188 - RNA, 19 nt, Artificial Sequence
  Description of Artificial Sequence: Synthetic oligonucleotide
  Sense strand starting at position 1064 of SEQ ID NO: 1884921
guacacaccuguguauaga

SEQ ID NO: 2302189 - RNA, 19 nt, Artificial Sequence
  Description of Artificial Sequence: Synthetic oligonucleotide
  Antisense strand to SEQ ID NO: 2302188
ucuauacacagguguguac

SEQ ID NO: 2302190 - RNA, 19 nt, Artificial Sequence
  Description of Artificial Sequence: Synthetic oligonucleotide
  Sense strand starting at position 1334 of SEQ ID NO: 1884921
aggaaucacacgcguacau

SEQ ID NO: 2302191 - RNA, 19 nt, Artificial Sequence
  Description of Artificial Sequence: Synthetic oligonucleotide
  Antisense strand to SEQ ID NO: 2302190
auguacgcgugugauuccu

SEQ ID NO: 2302192 - RNA, 19 nt, Artificial Sequence
  Description of Artificial Sequence: Synthetic oligonucleotide
  Sense strand starting at position 1394 of SEQ ID NO: 1884921
ucauacuccugucuagaua

SEQ ID NO: 2302193 - RNA, 19 nt, Artificial Sequence
  Description of Artificial Sequence: Synthetic oligonucleotide
  Antisense strand to SEQ ID NO: 2302192
uaucuagacaggaguauga

SEQ ID NO: 2302194 - RNA, 19 nt, Artificial Sequence
  Description of Artificial Sequence: Synthetic oligonucleotide
  Sense strand starting at position 1401 of SEQ ID NO: 1884921
ccugucuagauaugugaag

SEQ ID NO: 2302195 - RNA, 19 nt, Artificial Sequence
  Description of Artificial Sequence: Synthetic oligonucleotide
  Antisense strand to SEQ ID NO: 2302194
cuucacauaucuagacagg

SEQ ID NO: 2302196 - RNA, 19 nt, Artificial Sequence
  Description of Artificial Sequence: Synthetic oligonucleotide
  Sense strand starting at position 1402 of SEQ ID NO: 1884921
cugucuagauaugugaaga

SEQ ID NO: 2302197 - RNA, 19 nt, Artificial Sequence
  Description of Artificial Sequence: Synthetic oligonucleotide
  Antisense strand to SEQ ID NO: 2302196
ucuucacauaucuagacag

SEQ ID NO: 2302198 - RNA, 19 nt, Artificial Sequence
  Description of Artificial Sequence: Synthetic oligonucleotide
  Sense strand starting at position 1403 of SEQ ID NO: 1884921
ugucuagauaugugaagag

SEQ ID NO: 2302199 - RNA, 19 nt, Artificial Sequence
  Description of Artificial Sequence: Synthetic oligonucleotide
  Antisense strand to SEQ ID NO: 2302198
cucuucacauaucuagaca

SEQ ID NO: 2302200 - RNA, 19 nt, Artificial Sequence
  Description of Artificial Sequence: Synthetic oligonucleotide
  Sense strand starting at position 1995 of SEQ ID NO: 1884921
ccuuucugcuuccuggaau

SEQ ID NO: 2302201 - RNA, 19 nt, Artificial Sequence
  Description of Artificial Sequence: Synthetic oligonucleotide
  Antisense strand to SEQ ID NO: 2302200
auuccaggaagcagaaagg

SEQ ID NO: 2302202 - RNA, 19 nt, Artificial Sequence
  Description of Artificial Sequence: Synthetic oligonucleotide
  Sense strand starting at position 2140 of SEQ ID NO: 1884921
ugacacucuugcucugaga

SEQ ID NO: 2302203 - RNA, 19 nt, Artificial Sequence
  Description of Artificial Sequence: Synthetic oligonucleotide
  Antisense strand to SEQ ID NO: 2302202
ucucagagcaagaguguca

SEQ ID NO: 2302204 - RNA, 19 nt, Artificial Sequence
  Description of Artificial Sequence: Synthetic oligonucleotide
  Sense strand starting at position 2142 of SEQ ID NO: 1884921
acacucuugcucugagaac

SEQ ID NO: 2302205 - RNA, 19 nt, Artificial Sequence
  Description of Artificial Sequence: Synthetic oligonucleotide
  Antisense strand to SEQ ID NO: 2302204
guucucagagcaagagugu

SEQ ID NO: 2302206 - RNA, 19 nt, Artificial Sequence
  Description of Artificial Sequence: Synthetic oligonucleotide
  Sense strand starting at position 2155 of SEQ ID NO: 1884921
gagaacuaagcaggcauau

SEQ ID NO: 2302207 - RNA, 19 nt, Artificial Sequence
  Description of Artificial Sequence: Synthetic oligonucleotide
  Antisense strand to SEQ ID NO: 2302206
auaugccugcuuaguucuc

SEQ ID NO: 2302208 - RNA, 19 nt, Artificial Sequence
  Description of Artificial Sequence: Synthetic oligonucleotide
  Sense strand starting at position 2213 of SEQ ID NO: 1884921
ggacuugcuucugugaggu

SEQ ID NO: 2302209 - RNA, 19 nt, Artificial Sequence
  Description of Artificial Sequence: Synthetic oligonucleotide
  Antisense strand to SEQ ID NO: 2302208
accucacagaagcaagucc

SEQ ID NO: 2302210 - RNA, 19 nt, Artificial Sequence
  Description of Artificial Sequence: Synthetic oligonucleotide
  Sense strand starting at position 2284 of SEQ ID NO: 1884921
ggcagacaucuuggaugau

SEQ ID NO: 2302211 - RNA, 19 nt, Artificial Sequence
  Description of Artificial Sequence: Synthetic oligonucleotide
  Antisense strand to SEQ ID NO: 2302210
aucauccaagaugucugcc

SEQ ID NO: 2302212 - RNA, 19 nt, Artificial Sequence
  Description of Artificial Sequence: Synthetic oligonucleotide
  Sense strand starting at position 2285 of SEQ ID NO: 1884921
gcagacaucuuggaugaug

SEQ ID NO: 2302213 - RNA, 19 nt, Artificial Sequence
  Description of Artificial Sequence: Synthetic oligonucleotide
  Antisense strand to SEQ ID NO: 2302212
caucauccaagaugucugc

SEQ ID NO: 2302214 - RNA, 19 nt, Artificial Sequence
  Description of Artificial Sequence: Synthetic oligonucleotide
  Sense strand starting at position 2303 of SEQ ID NO: 1884921
gggugagugcgaucggcua

SEQ ID NO: 2302215 - RNA, 19 nt, Artificial Sequence
  Description of Artificial Sequence: Synthetic oligonucleotide
  Antisense strand to SEQ ID NO: 2302214
uagccgaucgcacucaccc

SEQ ID NO: 2302216 - RNA, 19 nt, Artificial Sequence
  Description of Artificial Sequence: Synthetic oligonucleotide
  Sense strand starting at position 2332 of SEQ ID NO: 1884921
gucucauauucgcaagaga

SEQ ID NO: 2302217 - RNA, 19 nt, Artificial Sequence
  Description of Artificial Sequence: Synthetic oligonucleotide
  Antisense strand to SEQ ID NO: 2302216
ucucuugcgaauaugagac

SEQ ID NO: 2302218 - RNA, 19 nt, Artificial Sequence
  Description of Artificial Sequence: Synthetic oligonucleotide
  Sense strand starting at position 2335 of SEQ ID NO: 1884921
ucauauucgcaagagacuu

SEQ ID NO: 2302219 - RNA, 19 nt, Artificial Sequence
  Description of Artificial Sequence: Synthetic oligonucleotide
  Antisense strand to SEQ ID NO: 2302218
aagucucuugcgaauauga

SEQ ID NO: 2302220 - RNA, 19 nt, Artificial Sequence
  Description of Artificial Sequence: Synthetic oligonucleotide
  Sense strand starting at position 2707 of SEQ ID NO: 1884921
cguggcuaauguggugaaa

SEQ ID NO: 2302221 - RNA, 19 nt, Artificial Sequence
  Description of Artificial Sequence: Synthetic oligonucleotide
  Antisense strand to SEQ ID NO: 2302220
uuucaccacauuagccacg

SEQ ID NO: 2302222 - RNA, 19 nt, Artificial Sequence
  Description of Artificial Sequence: Synthetic oligonucleotide
  Sense strand starting at position 2851 of SEQ ID NO: 1884921
ccgaguucucacuacugca

SEQ ID NO: 2302223 - RNA, 19 nt, Artificial Sequence
  Description of Artificial Sequence: Synthetic oligonucleotide
  Antisense strand to SEQ ID NO: 2302222
ugcaguagugagaacucgg

SEQ ID NO: 2302224 - RNA, 19 nt, Artificial Sequence
  Description of Artificial Sequence: Synthetic oligonucleotide
  Sense strand starting at position 3169 of SEQ ID NO: 1884921
aggagauaauuugaagcca

SEQ ID NO: 2302225 - RNA, 19 nt, Artificial Sequence
  Description of Artificial Sequence: Synthetic oligonucleotide
  Antisense strand to SEQ ID NO: 2302224
uggcuucaaauuaucuccu

SEQ ID NO: 2302226 - RNA, 19 nt, Artificial Sequence
  Description of Artificial Sequence: Synthetic oligonucleotide
  Sense strand starting at position 3197 of SEQ ID NO: 1884921
guuugcagagcugaaauca

SEQ ID NO: 2302227 - RNA, 19 nt, Artificial Sequence
  Description of Artificial Sequence: Synthetic oligonucleotide
  Antisense strand to SEQ ID NO: 2302226
ugauuucagcucugcaaac

SEQ ID NO: 2302228 - RNA, 19 nt, Artificial Sequence
  Description of Artificial Sequence: Synthetic oligonucleotide
  Sense strand starting at position 3314 of SEQ ID NO: 1884921
cuuugugcauccucugaga

SEQ ID NO: 2302229 - RNA, 19 nt, Artificial Sequence
  Description of Artificial Sequence: Synthetic oligonucleotide
  Antisense strand to SEQ ID NO: 2302228
ucucagaggaugcacaaag

SEQ ID NO: 2302230 - RNA, 19 nt, Artificial Sequence
  Description of Artificial Sequence: Synthetic oligonucleotide
  Sense strand starting at position 3374 of SEQ ID NO: 1884921
gggacuucagcguggaaug

SEQ ID NO: 2302231 - RNA, 19 nt, Artificial Sequence
  Description of Artificial Sequence: Synthetic oligonucleotide
  Antisense strand to SEQ ID NO: 2302230
cauuccacgcugaaguccc

SEQ ID NO: 2302232 - RNA, 19 nt, Artificial Sequence
  Description of Artificial Sequence: Synthetic oligonucleotide
  Sense strand starting at position 3375 of SEQ ID NO: 1884921
ggacuucagcguggaauga

SEQ ID NO: 2302233 - RNA, 19 nt, Artificial Sequence
  Description of Artificial Sequence: Synthetic oligonucleotide
  Antisense strand to SEQ ID NO: 2302232
ucauuccacgcugaagucc

SEQ ID NO: 2302234 - RNA, 19 nt, Artificial Sequence
  Description of Artificial Sequence: Synthetic oligonucleotide
  Sense strand starting at position 3407 of SEQ ID NO: 1884921
ggugaucuuucugcucuca

SEQ ID NO: 2302235 - RNA, 19 nt, Artificial Sequence
  Description of Artificial Sequence: Synthetic oligonucleotide
  Antisense strand to SEQ ID NO: 2302234
ugagagcagaaagaucacc

SEQ ID NO: 2302236 - RNA, 19 nt, Artificial Sequence
  Description of Artificial Sequence: Synthetic oligonucleotide
  Sense strand starting at position 3427 of SEQ ID NO: 1884921
ccgcuguggucuucggaga

SEQ ID NO: 2302237 - RNA, 19 nt, Artificial Sequence
  Description of Artificial Sequence: Synthetic oligonucleotide
  Antisense strand to SEQ ID NO: 2302236
ucuccgaagaccacagcgg

SEQ ID NO: 2302238 - RNA, 19 nt, Artificial Sequence
  Description of Artificial Sequence: Synthetic oligonucleotide
  Sense strand starting at position 3428 of SEQ ID NO: 1884921
cgcuguggucuucggagau

SEQ ID NO: 2302239 - RNA, 19 nt, Artificial Sequence
  Description of Artificial Sequence: Synthetic oligonucleotide
  Antisense strand to SEQ ID NO: 2302238
aucuccgaagaccacagcg

SEQ ID NO: 2302240 - RNA, 19 nt, Artificial Sequence
  Description of Artificial Sequence: Synthetic oligonucleotide
  Sense strand starting at position 3429 of SEQ ID NO: 1884921
gcuguggucuucggagaug

SEQ ID NO: 2302241 - RNA, 19 nt, Artificial Sequence
  Description of Artificial Sequence: Synthetic oligonucleotide
  Antisense strand to SEQ ID NO: 2302240
caucuccgaagaccacagc

SEQ ID NO: 2302242 - RNA, 19 nt, Artificial Sequence
  Description of Artificial Sequence: Synthetic oligonucleotide
  Sense strand starting at position 3432 of SEQ ID NO: 1884921
guggucuucggagaugaga

SEQ ID NO: 2302243 - RNA, 19 nt, Artificial Sequence
  Description of Artificial Sequence: Synthetic oligonucleotide
  Antisense strand to SEQ ID NO: 2302242
ucucaucuccgaagaccac

SEQ ID NO: 2302244 - RNA, 19 nt, Artificial Sequence
  Description of Artificial Sequence: Synthetic oligonucleotide
  Sense strand starting at position 3462 of SEQ ID NO: 1884921
cagugagauugugcagaua

SEQ ID NO: 2302245 - RNA, 19 nt, Artificial Sequence
  Description of Artificial Sequence: Synthetic oligonucleotide
  Antisense strand to SEQ ID NO: 2302244
uaucugcacaaucucacug

SEQ ID NO: 2302246 - RNA, 19 nt, Artificial Sequence
  Description of Artificial Sequence: Synthetic oligonucleotide
  Sense strand starting at position 3619 of SEQ ID NO: 1884921
ucuuccauuguggagacau

SEQ ID NO: 2302247 - RNA, 19 nt, Artificial Sequence
  Description of Artificial Sequence: Synthetic oligonucleotide
  Antisense strand to SEQ ID NO: 2302246
augucuccacaauggaaga

SEQ ID NO: 2302248 - RNA, 19 nt, Artificial Sequence
  Description of Artificial Sequence: Synthetic oligonucleotide
  Sense strand starting at position 3675 of SEQ ID NO: 1884921
gcuugaacugccuaaauua

SEQ ID NO: 2302249 - RNA, 19 nt, Artificial Sequence
  Description of Artificial Sequence: Synthetic oligonucleotide
  Antisense strand to SEQ ID NO: 2302248
uaauuuaggcaguucaagc

SEQ ID NO: 2302250 - RNA, 19 nt, Artificial Sequence
  Description of Artificial Sequence: Synthetic oligonucleotide
  Sense strand starting at position 3828 of SEQ ID NO: 1884921
ccgcgguaguuugcugaga

SEQ ID NO: 2302251 - RNA, 19 nt, Artificial Sequence
  Description of Artificial Sequence: Synthetic oligonucleotide
  Antisense strand to SEQ ID NO: 2302250
ucucagcaaacuaccgcgg

SEQ ID NO: 2302252 - RNA, 19 nt, Artificial Sequence
  Description of Artificial Sequence: Synthetic oligonucleotide
  Sense strand starting at position 3829 of SEQ ID NO: 1884921
cgcgguaguuugcugagaa

SEQ ID NO: 2302253 - RNA, 19 nt, Artificial Sequence
  Description of Artificial Sequence: Synthetic oligonucleotide
  Antisense strand to SEQ ID NO: 2302252
uucucagcaaacuaccgcg

SEQ ID NO: 2302254 - RNA, 19 nt, Artificial Sequence
  Description of Artificial Sequence: Synthetic oligonucleotide
  Sense strand starting at position 3969 of SEQ ID NO: 1884921
gcauuuggguugguucaca

SEQ ID NO: 2302255 - RNA, 19 nt, Artificial Sequence
  Description of Artificial Sequence: Synthetic oligonucleotide
  Antisense strand to SEQ ID NO: 2302254
ugugaaccaacccaaaugc

SEQ ID NO: 2302256 - RNA, 19 nt, Artificial Sequence
  Description of Artificial Sequence: Synthetic oligonucleotide
  Sense strand starting at position 88 of SEQ ID NO: 1884922
ugagcugcucgaugaaaga

SEQ ID NO: 2302257 - RNA, 19 nt, Artificial Sequence
  Description of Artificial Sequence: Synthetic oligonucleotide
  Antisense strand to SEQ ID NO: 2302256
ucuuucaucgagcagcuca

SEQ ID NO: 2302258 - RNA, 19 nt, Artificial Sequence
  Description of Artificial Sequence: Synthetic oligonucleotide
  Sense strand starting at position 573 of SEQ ID NO: 1884922
gaagaagaauguuugucuu

SEQ ID NO: 2302259 - RNA, 19 nt, Artificial Sequence
  Description of Artificial Sequence: Synthetic oligonucleotide
  Antisense strand to SEQ ID NO: 2302258
aagacaaacauucuucuuc

SEQ ID NO: 2302260 - RNA, 19 nt, Artificial Sequence
  Description of Artificial Sequence: Synthetic oligonucleotide
  Sense strand starting at position 575 of SEQ ID NO: 1884922
agaagaauguuugucuuau

SEQ ID NO: 2302261 - RNA, 19 nt, Artificial Sequence
  Description of Artificial Sequence: Synthetic oligonucleotide
  Antisense strand to SEQ ID NO: 2302260
auaagacaaacauucuucu

SEQ ID NO: 2302262 - RNA, 19 nt, Artificial Sequence
  Description of Artificial Sequence: Synthetic oligonucleotide
  Sense strand starting at position 576 of SEQ ID NO: 1884922
gaagaauguuugucuuauc

SEQ ID NO: 2302263 - RNA, 19 nt, Artificial Sequence
  Description of Artificial Sequence: Synthetic oligonucleotide
  Antisense strand to SEQ ID NO: 2302262
gauaagacaaacauucuuc

SEQ ID NO: 2302264 - RNA, 19 nt, Artificial Sequence
  Description of Artificial Sequence: Synthetic oligonucleotide
  Sense strand starting at position 581 of SEQ ID NO: 1884922
auguuugucuuaucaggau

SEQ ID NO: 2302265 - RNA, 19 nt, Artificial Sequence
  Description of Artificial Sequence: Synthetic oligonucleotide
  Antisense strand to SEQ ID NO: 2302264
auccugauaagacaaacau

SEQ ID NO: 2302266 - RNA, 19 nt, Artificial Sequence
  Description of Artificial Sequence: Synthetic oligonucleotide
  Sense strand starting at position 585 of SEQ ID NO: 1884922
uugucuuaucaggaugcua

SEQ ID NO: 2302267 - RNA, 19 nt, Artificial Sequence
  Description of Artificial Sequence: Synthetic oligonucleotide
  Antisense strand to SEQ ID NO: 2302266
uagcauccugauaagacaa

SEQ ID NO: 2302268 - RNA, 19 nt, Artificial Sequence
  Description of Artificial Sequence: Synthetic oligonucleotide
  Sense strand starting at position 587 of SEQ ID NO: 1884922
gucuuaucaggaugcuaug

SEQ ID NO: 2302269 - RNA, 19 nt, Artificial Sequence
  Description of Artificial Sequence: Synthetic oligonucleotide
  Antisense strand to SEQ ID NO: 2302268
cauagcauccugauaagac

SEQ ID NO: 2302270 - RNA, 19 nt, Artificial Sequence
  Description of Artificial Sequence: Synthetic oligonucleotide
  Sense strand starting at position 613 of SEQ ID NO: 1884922
acgagccgauauuuguaaa

SEQ ID NO: 2302271 - RNA, 19 nt, Artificial Sequence
  Description of Artificial Sequence: Synthetic oligonucleotide
  Antisense strand to SEQ ID NO: 2302270
uuuacaaauaucggcucgu

SEQ ID NO: 2302272 - RNA, 19 nt, Artificial Sequence
  Description of Artificial Sequence: Synthetic oligonucleotide
  Sense strand starting at position 642 of SEQ ID NO: 1884922
gggugccugacacauaagu

SEQ ID NO: 2302273 - RNA, 19 nt, Artificial Sequence
  Description of Artificial Sequence: Synthetic oligonucleotide
  Antisense strand to SEQ ID NO: 2302272
acuuaugugucaggcaccc

SEQ ID NO: 2302274 - RNA, 19 nt, Artificial Sequence
  Description of Artificial Sequence: Synthetic oligonucleotide
  Sense strand starting at position 651 of SEQ ID NO: 1884922
acacauaaguguuugccaa

SEQ ID NO: 2302275 - RNA, 19 nt, Artificial Sequence
  Description of Artificial Sequence: Synthetic oligonucleotide
  Antisense strand to SEQ ID NO: 2302274
uuggcaaacacuuaugugu

SEQ ID NO: 2302276 - RNA, 19 nt, Artificial Sequence
  Description of Artificial Sequence: Synthetic oligonucleotide
  Sense strand starting at position 653 of SEQ ID NO: 1884922
acauaaguguuugccaaac

SEQ ID NO: 2302277 - RNA, 19 nt, Artificial Sequence
  Description of Artificial Sequence: Synthetic oligonucleotide
  Antisense strand to SEQ ID NO: 2302276
guuuggcaaacacuuaugu

SEQ ID NO: 2302278 - RNA, 19 nt, Artificial Sequence
  Description of Artificial Sequence: Synthetic oligonucleotide
  Sense strand starting at position 730 of SEQ ID NO: 1884922
auaguugcccuguggaaau

SEQ ID NO: 2302279 - RNA, 19 nt, Artificial Sequence
  Description of Artificial Sequence: Synthetic oligonucleotide
  Antisense strand to SEQ ID NO: 2302278
auuuccacagggcaacuau

SEQ ID NO: 2302280 - RNA, 19 nt, Artificial Sequence
  Description of Artificial Sequence: Synthetic oligonucleotide
  Sense strand starting at position 741 of SEQ ID NO: 1884922
guggaaaucugggugagga

SEQ ID NO: 2302281 - RNA, 19 nt, Artificial Sequence
  Description of Artificial Sequence: Synthetic oligonucleotide
  Antisense strand to SEQ ID NO: 2302280
uccucacccagauuuccac

SEQ ID NO: 2302282 - RNA, 19 nt, Artificial Sequence
  Description of Artificial Sequence: Synthetic oligonucleotide
  Sense strand starting at position 1041 of SEQ ID NO: 1884922
gagucuguggaguguagau

SEQ ID NO: 2302283 - RNA, 19 nt, Artificial Sequence
  Description of Artificial Sequence: Synthetic oligonucleotide
  Antisense strand to SEQ ID NO: 2302282
aucuacacuccacagacuc

SEQ ID NO: 2302284 - RNA, 19 nt, Artificial Sequence
  Description of Artificial Sequence: Synthetic oligonucleotide
  Sense strand starting at position 1050 of SEQ ID NO: 1884922
gaguguagaucgucugaug

SEQ ID NO: 2302285 - RNA, 19 nt, Artificial Sequence
  Description of Artificial Sequence: Synthetic oligonucleotide
  Antisense strand to SEQ ID NO: 2302284
caucagacgaucuacacuc

SEQ ID NO: 2302286 - RNA, 19 nt, Artificial Sequence
  Description of Artificial Sequence: Synthetic oligonucleotide
  Sense strand starting at position 1061 of SEQ ID NO: 1884922
gucugaugaagacgugauu

SEQ ID NO: 2302287 - RNA, 19 nt, Artificial Sequence
  Description of Artificial Sequence: Synthetic oligonucleotide
  Antisense strand to SEQ ID NO: 2302286
aaucacgucuucaucagac

SEQ ID NO: 2302288 - RNA, 19 nt, Artificial Sequence
  Description of Artificial Sequence: Synthetic oligonucleotide
  Sense strand starting at position 1067 of SEQ ID NO: 1884922
ugaagacgugauuaaggca

SEQ ID NO: 2302289 - RNA, 19 nt, Artificial Sequence
  Description of Artificial Sequence: Synthetic oligonucleotide
  Antisense strand to SEQ ID NO: 2302288
ugccuuaaucacgucuuca

SEQ ID NO: 2302290 - RNA, 19 nt, Artificial Sequence
  Description of Artificial Sequence: Synthetic oligonucleotide
  Sense strand starting at position 1234 of SEQ ID NO: 1884922
gacauucuccguggcacaa

SEQ ID NO: 2302291 - RNA, 19 nt, Artificial Sequence
  Description of Artificial Sequence: Synthetic oligonucleotide
  Antisense strand to SEQ ID NO: 2302290
uugugccacggagaauguc

SEQ ID NO: 2302292 - RNA, 19 nt, Artificial Sequence
  Description of Artificial Sequence: Synthetic oligonucleotide
  Sense strand starting at position 1301 of SEQ ID NO: 1884922
gaggcugucccuugacacu

SEQ ID NO: 2302293 - RNA, 19 nt, Artificial Sequence
  Description of Artificial Sequence: Synthetic oligonucleotide
  Antisense strand to SEQ ID NO: 2302292
agugucaagggacagccuc

SEQ ID NO: 2302294 - RNA, 19 nt, Artificial Sequence
  Description of Artificial Sequence: Synthetic oligonucleotide
  Sense strand starting at position 1363 of SEQ ID NO: 1884922
gagauugucgugggaggca

SEQ ID NO: 2302295 - RNA, 19 nt, Artificial Sequence
  Description of Artificial Sequence: Synthetic oligonucleotide
  Antisense strand to SEQ ID NO: 2302294
ugccucccacgacaaucuc

SEQ ID NO: 2302296 - RNA, 19 nt, Artificial Sequence
  Description of Artificial Sequence: Synthetic oligonucleotide
  Sense strand starting at position 1462 of SEQ ID NO: 1884922
gccacacuccgggaugauu

SEQ ID NO: 2302297 - RNA, 19 nt, Artificial Sequence
  Description of Artificial Sequence: Synthetic oligonucleotide
  Antisense strand to SEQ ID NO: 2302296
aaucaucccggaguguggc

SEQ ID NO: 2302298 - RNA, 19 nt, Artificial Sequence
  Description of Artificial Sequence: Synthetic oligonucleotide
  Sense strand starting at position 1512 of SEQ ID NO: 1884922
ggugguauaagguguacaa

SEQ ID NO: 2302299 - RNA, 19 nt, Artificial Sequence
  Description of Artificial Sequence: Synthetic oligonucleotide
  Antisense strand to SEQ ID NO: 2302298
uuguacaccuuauaccacc

SEQ ID NO: 2302300 - RNA, 19 nt, Artificial Sequence
  Description of Artificial Sequence: Synthetic oligonucleotide
  Sense strand starting at position 2060 of SEQ ID NO: 1884922
gcagucaacaaaugcgaau

SEQ ID NO: 2302301 - RNA, 19 nt, Artificial Sequence
  Description of Artificial Sequence: Synthetic oligonucleotide
  Antisense strand to SEQ ID NO: 2302300
auucgcauuuguugacugc

SEQ ID NO: 2302302 - RNA, 19 nt, Artificial Sequence
  Description of Artificial Sequence: Synthetic oligonucleotide
  Sense strand starting at position 2127 of SEQ ID NO: 1884922
aaaugagauggacguccau

SEQ ID NO: 2302303 - RNA, 19 nt, Artificial Sequence
  Description of Artificial Sequence: Synthetic oligonucleotide
  Antisense strand to SEQ ID NO: 2302302
auggacguccaucucauuu

SEQ ID NO: 2302304 - RNA, 19 nt, Artificial Sequence
  Description of Artificial Sequence: Synthetic oligonucleotide
  Sense strand starting at position 2284 of SEQ ID NO: 1884922
agccaauaucuaggcucau

SEQ ID NO: 2302305 - RNA, 19 nt, Artificial Sequence
  Description of Artificial Sequence: Synthetic oligonucleotide
  Antisense strand to SEQ ID NO: 2302304
augagccuagauauuggcu

SEQ ID NO: 2302306 - RNA, 19 nt, Artificial Sequence
  Description of Artificial Sequence: Synthetic oligonucleotide
  Sense strand starting at position 2285 of SEQ ID NO: 1884922
gccaauaucuaggcucauc

SEQ ID NO: 2302307 - RNA, 19 nt, Artificial Sequence
  Description of Artificial Sequence: Synthetic oligonucleotide
  Antisense strand to SEQ ID NO: 2302306
gaugagccuagauauuggc

SEQ ID NO: 2302308 - RNA, 19 nt, Artificial Sequence
  Description of Artificial Sequence: Synthetic oligonucleotide
  Sense strand starting at position 2520 of SEQ ID NO: 1884922
gggcgauaugaccauguca

SEQ ID NO: 2302309 - RNA, 19 nt, Artificial Sequence
  Description of Artificial Sequence: Synthetic oligonucleotide
  Antisense strand to SEQ ID NO: 2302308
ugacauggucauaucgccc

SEQ ID NO: 2302310 - RNA, 19 nt, Artificial Sequence
  Description of Artificial Sequence: Synthetic oligonucleotide
  Sense strand starting at position 2522 of SEQ ID NO: 1884922
gcgauaugaccaugucacu

SEQ ID NO: 2302311 - RNA, 19 nt, Artificial Sequence
  Description of Artificial Sequence: Synthetic oligonucleotide
  Antisense strand to SEQ ID NO: 2302310
agugacauggucauaucgc

SEQ ID NO: 2302312 - RNA, 19 nt, Artificial Sequence
  Description of Artificial Sequence: Synthetic oligonucleotide
  Sense strand starting at position 2576 of SEQ ID NO: 1884922
agaugugcaguuugaaaga

SEQ ID NO: 2302313 - RNA, 19 nt, Artificial Sequence
  Description of Artificial Sequence: Synthetic oligonucleotide
  Antisense strand to SEQ ID NO: 2302312
ucuuucaaacugcacaucu

SEQ ID NO: 2302314 - RNA, 19 nt, Artificial Sequence
  Description of Artificial Sequence: Synthetic oligonucleotide
  Sense strand starting at position 2615 of SEQ ID NO: 1884922
gauagaucaguugggugau

SEQ ID NO: 2302315 - RNA, 19 nt, Artificial Sequence
  Description of Artificial Sequence: Synthetic oligonucleotide
  Antisense strand to SEQ ID NO: 2302314
aucacccaacugaucuauc

SEQ ID NO: 2302316 - RNA, 19 nt, Artificial Sequence
  Description of Artificial Sequence: Synthetic oligonucleotide
  Sense strand starting at position 2618 of SEQ ID NO: 1884922
agaucaguugggugaugac

SEQ ID NO: 2302317 - RNA, 19 nt, Artificial Sequence
  Description of Artificial Sequence: Synthetic oligonucleotide
  Antisense strand to SEQ ID NO: 2302316
gucaucacccaacugaucu

SEQ ID NO: 2302318 - RNA, 19 nt, Artificial Sequence
  Description of Artificial Sequence: Synthetic oligonucleotide
  Sense strand starting at position 2721 of SEQ ID NO: 1884922
gguggaggcuaucucaguu

SEQ ID NO: 2302319 - RNA, 19 nt, Artificial Sequence
  Description of Artificial Sequence: Synthetic oligonucleotide
  Antisense strand to SEQ ID NO: 2302318
aacugagauagccuccacc

SEQ ID NO: 2302320 - RNA, 19 nt, Artificial Sequence
  Description of Artificial Sequence: Synthetic oligonucleotide
  Sense strand starting at position 2725 of SEQ ID NO: 1884922
gaggcuaucucaguuacac

SEQ ID NO: 2302321 - RNA, 19 nt, Artificial Sequence
  Description of Artificial Sequence: Synthetic oligonucleotide
  Antisense strand to SEQ ID NO: 2302320
guguaacugagauagccuc

SEQ ID NO: 2302322 - RNA, 19 nt, Artificial Sequence
  Description of Artificial Sequence: Synthetic oligonucleotide
  Sense strand starting at position 3169 of SEQ ID NO: 1884922
cauauaugcguauauguca

SEQ ID NO: 2302323 - RNA, 19 nt, Artificial Sequence
  Description of Artificial Sequence: Synthetic oligonucleotide
  Antisense strand to SEQ ID NO: 2302322
ugacauauacgcauauaug

SEQ ID NO: 2302324 - RNA, 19 nt, Artificial Sequence
  Description of Artificial Sequence: Synthetic oligonucleotide
  Sense strand starting at position 3191 of SEQ ID NO: 1884922
auagcauacguuuauguau

SEQ ID NO: 2302325 - RNA, 19 nt, Artificial Sequence
  Description of Artificial Sequence: Synthetic oligonucleotide
  Antisense strand to SEQ ID NO: 2302324
auacauaaacguaugcuau

SEQ ID NO: 2302326 - RNA, 19 nt, Artificial Sequence
  Description of Artificial Sequence: Synthetic oligonucleotide
  Sense strand starting at position 3307 of SEQ ID NO: 1884922
gacuguccucauuggaauc

SEQ ID NO: 2302327 - RNA, 19 nt, Artificial Sequence
  Description of Artificial Sequence: Synthetic oligonucleotide
  Antisense strand to SEQ ID NO: 2302326
gauuccaaugaggacaguc

SEQ ID NO: 2302328 - RNA, 19 nt, Artificial Sequence
  Description of Artificial Sequence: Synthetic oligonucleotide
  Sense strand starting at position 3361 of SEQ ID NO: 1884922
gacuguccuccuuggaacu

SEQ ID NO: 2302329 - RNA, 19 nt, Artificial Sequence
  Description of Artificial Sequence: Synthetic oligonucleotide
  Antisense strand to SEQ ID NO: 2302328
aguuccaaggaggacaguc

SEQ ID NO: 2302330 - RNA, 19 nt, Artificial Sequence
  Description of Artificial Sequence: Synthetic oligonucleotide
  Sense strand starting at position 3413 of SEQ ID NO: 1884922
cuuuguuugcugcucuauu

SEQ ID NO: 2302331 - RNA, 19 nt, Artificial Sequence
  Description of Artificial Sequence: Synthetic oligonucleotide
  Antisense strand to SEQ ID NO: 2302330
aauagagcagcaaacaaag

SEQ ID NO: 2302332 - RNA, 19 nt, Artificial Sequence
  Description of Artificial Sequence: Synthetic oligonucleotide
  Sense strand starting at position 3430 of SEQ ID NO: 1884922
uucuuaucacaacaguagu

SEQ ID NO: 2302333 - RNA, 19 nt, Artificial Sequence
  Description of Artificial Sequence: Synthetic oligonucleotide
  Antisense strand to SEQ ID NO: 2302332
acuacuguugugauaagaa

SEQ ID NO: 2302334 - RNA, 19 nt, Artificial Sequence
  Description of Artificial Sequence: Synthetic oligonucleotide
  Sense strand starting at position 3942 of SEQ ID NO: 1884922
gaacauucgcgugcaugua

SEQ ID NO: 2302335 - RNA, 19 nt, Artificial Sequence
  Description of Artificial Sequence: Synthetic oligonucleotide
  Antisense strand to SEQ ID NO: 2302334
uacaugcacgcgaauguuc

SEQ ID NO: 2302336 - RNA, 19 nt, Artificial Sequence
  Description of Artificial Sequence: Synthetic oligonucleotide
  Sense strand starting at position 150 of SEQ ID NO: 1884923
acacuauugucacucugga

SEQ ID NO: 2302337 - RNA, 19 nt, Artificial Sequence
  Description of Artificial Sequence: Synthetic oligonucleotide
  Antisense strand to SEQ ID NO: 2302336
uccagagugacaauagugu

SEQ ID NO: 2302338 - RNA, 19 nt, Artificial Sequence
  Description of Artificial Sequence: Synthetic oligonucleotide
  Sense strand starting at position 473 of SEQ ID NO: 1884923
guaaauaaucaugauugca

SEQ ID NO: 2302339 - RNA, 19 nt, Artificial Sequence
  Description of Artificial Sequence: Synthetic oligonucleotide
  Antisense strand to SEQ ID NO: 2302338
ugcaaucaugauuauuuac

SEQ ID NO: 2302340 - RNA, 19 nt, Artificial Sequence
  Description of Artificial Sequence: Synthetic oligonucleotide
  Sense strand starting at position 591 of SEQ ID NO: 1884923
gaacaaagauuguugaguu

SEQ ID NO: 2302341 - RNA, 19 nt, Artificial Sequence
  Description of Artificial Sequence: Synthetic oligonucleotide
  Antisense strand to SEQ ID NO: 2302340
aacucaacaaucuuuguuc

SEQ ID NO: 2302342 - RNA, 19 nt, Artificial Sequence
  Description of Artificial Sequence: Synthetic oligonucleotide
  Sense strand starting at position 595 of SEQ ID NO: 1884923
aaagauuguugaguuugau

SEQ ID NO: 2302343 - RNA, 19 nt, Artificial Sequence
  Description of Artificial Sequence: Synthetic oligonucleotide
  Antisense strand to SEQ ID NO: 2302342
aucaaacucaacaaucuuu

SEQ ID NO: 2302344 - RNA, 19 nt, Artificial Sequence
  Description of Artificial Sequence: Synthetic oligonucleotide
  Sense strand starting at position 661 of SEQ ID NO: 1884923
cagagcauuucugagggaa

SEQ ID NO: 2302345 - RNA, 19 nt, Artificial Sequence
  Description of Artificial Sequence: Synthetic oligonucleotide
  Antisense strand to SEQ ID NO: 2302344
uucccucagaaaugcucug

SEQ ID NO: 2302346 - RNA, 19 nt, Artificial Sequence
  Description of Artificial Sequence: Synthetic oligonucleotide
  Sense strand starting at position 734 of SEQ ID NO: 1884923
ggaugaaaccguugacaua

SEQ ID NO: 2302347 - RNA, 19 nt, Artificial Sequence
  Description of Artificial Sequence: Synthetic oligonucleotide
  Antisense strand to SEQ ID NO: 2302346
uaugucaacgguuucaucc

SEQ ID NO: 2302348 - RNA, 19 nt, Artificial Sequence
  Description of Artificial Sequence: Synthetic oligonucleotide
  Sense strand starting at position 784 of SEQ ID NO: 1884923
gugagaaaugagugaagca

SEQ ID NO: 2302349 - RNA, 19 nt, Artificial Sequence
  Description of Artificial Sequence: Synthetic oligonucleotide
  Antisense strand to SEQ ID NO: 2302348
ugcuucacucauuucucac

SEQ ID NO: 2302350 - RNA, 19 nt, Artificial Sequence
  Description of Artificial Sequence: Synthetic oligonucleotide
  Sense strand starting at position 805 of SEQ ID NO: 1884923
ccuuucugucuguaaauaa

SEQ ID NO: 2302351 - RNA, 19 nt, Artificial Sequence
  Description of Artificial Sequence: Synthetic oligonucleotide
  Antisense strand to SEQ ID NO: 2302350
uuauuuacagacagaaagg

SEQ ID NO: 2302352 - RNA, 19 nt, Artificial Sequence
  Description of Artificial Sequence: Synthetic oligonucleotide
  Sense strand starting at position 1250 of SEQ ID NO: 1884923
agaaauagucacugucaag

SEQ ID NO: 2302353 - RNA, 19 nt, Artificial Sequence
  Description of Artificial Sequence: Synthetic oligonucleotide
  Antisense strand to SEQ ID NO: 2302352
cuugacagugacuauuucu

SEQ ID NO: 2302354 - RNA, 19 nt, Artificial Sequence
  Description of Artificial Sequence: Synthetic oligonucleotide
  Sense strand starting at position 1469 of SEQ ID NO: 1884923
agucuagugacuugaagau

SEQ ID NO: 2302355 - RNA, 19 nt, Artificial Sequence
  Description of Artificial Sequence: Synthetic oligonucleotide
  Antisense strand to SEQ ID NO: 2302354
aucuucaagucacuagacu

SEQ ID NO: 2302356 - RNA, 19 nt, Artificial Sequence
  Description of Artificial Sequence: Synthetic oligonucleotide
  Sense strand starting at position 1489 of SEQ ID NO: 1884923
gccaguggacauuaaaugu

SEQ ID NO: 2302357 - RNA, 19 nt, Artificial Sequence
  Description of Artificial Sequence: Synthetic oligonucleotide
  Antisense strand to SEQ ID NO: 2302356
acauuuaauguccacuggc

SEQ ID NO: 2302358 - RNA, 19 nt, Artificial Sequence
  Description of Artificial Sequence: Synthetic oligonucleotide
  Sense strand starting at position 1496 of SEQ ID NO: 1884923
gacauuaaauguuccugga

SEQ ID NO: 2302359 - RNA, 19 nt, Artificial Sequence
  Description of Artificial Sequence: Synthetic oligonucleotide
  Antisense strand to SEQ ID NO: 2302358
uccaggaacauuuaauguc

SEQ ID NO: 2302360 - RNA, 19 nt, Artificial Sequence
  Description of Artificial Sequence: Synthetic oligonucleotide
  Sense strand starting at position 1498 of SEQ ID NO: 1884923
cauuaaauguuccuggaga

SEQ ID NO: 2302361 - RNA, 19 nt, Artificial Sequence
  Description of Artificial Sequence: Synthetic oligonucleotide
  Antisense strand to SEQ ID NO: 2302360
ucuccaggaacauuuaaug

SEQ ID NO: 2302362 - RNA, 19 nt, Artificial Sequence
  Description of Artificial Sequence: Synthetic oligonucleotide
  Sense strand starting at position 1500 of SEQ ID NO: 1884923
uuaaauguuccuggagacu

SEQ ID NO: 2302363 - RNA, 19 nt, Artificial Sequence
  Description of Artificial Sequence: Synthetic oligonucleotide
  Antisense strand to SEQ ID NO: 2302362
agucuccaggaacauuuaa

SEQ ID NO: 2302364 - RNA, 19 nt, Artificial Sequence
  Description of Artificial Sequence: Synthetic oligonucleotide
  Sense strand starting at position 1589 of SEQ ID NO: 1884923
gguaguaaauaagugguaa

SEQ ID NO: 2302365 - RNA, 19 nt, Artificial Sequence
  Description of Artificial Sequence: Synthetic oligonucleotide
  Antisense strand to SEQ ID NO: 2302364
uuaccacuuauuuacuacc

SEQ ID NO: 2302366 - RNA, 19 nt, Artificial Sequence
  Description of Artificial Sequence: Synthetic oligonucleotide
  Sense strand starting at position 1692 of SEQ ID NO: 1884923
gcucccauugagggaaaua

SEQ ID NO: 2302367 - RNA, 19 nt, Artificial Sequence
  Description of Artificial Sequence: Synthetic oligonucleotide
  Antisense strand to SEQ ID NO: 2302366
uauuucccucaaugggagc

SEQ ID NO: 2302368 - RNA, 19 nt, Artificial Sequence
  Description of Artificial Sequence: Synthetic oligonucleotide
  Sense strand starting at position 1703 of SEQ ID NO: 1884923
gggaaauaaggugguuuca

SEQ ID NO: 2302369 - RNA, 19 nt, Artificial Sequence
  Description of Artificial Sequence: Synthetic oligonucleotide
  Antisense strand to SEQ ID NO: 2302368
ugaaaccaccuuauuuccc

SEQ ID NO: 2302370 - RNA, 19 nt, Artificial Sequence
  Description of Artificial Sequence: Synthetic oligonucleotide
  Sense strand starting at position 1773 of SEQ ID NO: 1884923
guucucauucuuuggaaga

SEQ ID NO: 2302371 - RNA, 19 nt, Artificial Sequence
  Description of Artificial Sequence: Synthetic oligonucleotide
  Antisense strand to SEQ ID NO: 2302370
ucuuccaaagaaugagaac

SEQ ID NO: 2302372 - RNA, 19 nt, Artificial Sequence
  Description of Artificial Sequence: Synthetic oligonucleotide
  Sense strand starting at position 1978 of SEQ ID NO: 1884923
gggcauuguguugugucau

SEQ ID NO: 2302373 - RNA, 19 nt, Artificial Sequence
  Description of Artificial Sequence: Synthetic oligonucleotide
  Antisense strand to SEQ ID NO: 2302372
augacacaacacaaugccc

SEQ ID NO: 2302374 - RNA, 19 nt, Artificial Sequence
  Description of Artificial Sequence: Synthetic oligonucleotide
  Sense strand starting at position 2355 of SEQ ID NO: 1884923
ccucaagguggucacaauu

SEQ ID NO: 2302375 - RNA, 19 nt, Artificial Sequence
  Description of Artificial Sequence: Synthetic oligonucleotide
  Antisense strand to SEQ ID NO: 2302374
aauugugaccaccuugagg

SEQ ID NO: 2302376 - RNA, 19 nt, Artificial Sequence
  Description of Artificial Sequence: Synthetic oligonucleotide
  Sense strand starting at position 2364 of SEQ ID NO: 1884923
ggucacaauucuguuaaua

SEQ ID NO: 2302377 - RNA, 19 nt, Artificial Sequence
  Description of Artificial Sequence: Synthetic oligonucleotide
  Antisense strand to SEQ ID NO: 2302376
uauuaacagaauugugacc

SEQ ID NO: 2302378 - RNA, 19 nt, Artificial Sequence
  Description of Artificial Sequence: Synthetic oligonucleotide
  Sense strand starting at position 2391 of SEQ ID NO: 1884923
aucaaagugcuagaucacu

SEQ ID NO: 2302379 - RNA, 19 nt, Artificial Sequence
  Description of Artificial Sequence: Synthetic oligonucleotide
  Antisense strand to SEQ ID NO: 2302378
agugaucuagcacuuugau

SEQ ID NO: 2302380 - RNA, 19 nt, Artificial Sequence
  Description of Artificial Sequence: Synthetic oligonucleotide
  Sense strand starting at position 2396 of SEQ ID NO: 1884923
agugcuagaucacugagau

SEQ ID NO: 2302381 - RNA, 19 nt, Artificial Sequence
  Description of Artificial Sequence: Synthetic oligonucleotide
  Antisense strand to SEQ ID NO: 2302380
aucucagugaucuagcacu

SEQ ID NO: 2302382 - RNA, 19 nt, Artificial Sequence
  Description of Artificial Sequence: Synthetic oligonucleotide
  Sense strand starting at position 2491 of SEQ ID NO: 1884923
aaguauaguguugagcaau

SEQ ID NO: 2302383 - RNA, 19 nt, Artificial Sequence
  Description of Artificial Sequence: Synthetic oligonucleotide
  Antisense strand to SEQ ID NO: 2302382
auugcucaacacuauacuu

SEQ ID NO: 2302384 - RNA, 19 nt, Artificial Sequence
  Description of Artificial Sequence: Synthetic oligonucleotide
  Sense strand starting at position 2494 of SEQ ID NO: 1884923
uauaguguugagcaaugga

SEQ ID NO: 2302385 - RNA, 19 nt, Artificial Sequence
  Description of Artificial Sequence: Synthetic oligonucleotide
  Antisense strand to SEQ ID NO: 2302384
uccauugcucaacacuaua

SEQ ID NO: 2302386 - RNA, 19 nt, Artificial Sequence
  Description of Artificial Sequence: Synthetic oligonucleotide
  Sense strand starting at position 2566 of SEQ ID NO: 1884923
ucuauaguuugaguggaua

SEQ ID NO: 2302387 - RNA, 19 nt, Artificial Sequence
  Description of Artificial Sequence: Synthetic oligonucleotide
  Antisense strand to SEQ ID NO: 2302386
uauccacucaaacuauaga

SEQ ID NO: 2302388 - RNA, 19 nt, Artificial Sequence
  Description of Artificial Sequence: Synthetic oligonucleotide
  Sense strand starting at position 2686 of SEQ ID NO: 1884923
ugaaauuuguauuccugcu

SEQ ID NO: 2302389 - RNA, 19 nt, Artificial Sequence
  Description of Artificial Sequence: Synthetic oligonucleotide
  Antisense strand to SEQ ID NO: 2302388
agcaggaauacaaauuuca

SEQ ID NO: 2302390 - RNA, 19 nt, Artificial Sequence
  Description of Artificial Sequence: Synthetic oligonucleotide
  Sense strand starting at position 2870 of SEQ ID NO: 1884923
ggagauuucuauuaggaag

SEQ ID NO: 2302391 - RNA, 19 nt, Artificial Sequence
  Description of Artificial Sequence: Synthetic oligonucleotide
  Antisense strand to SEQ ID NO: 2302390
cuuccuaauagaaaucucc

SEQ ID NO: 2302392 - RNA, 19 nt, Artificial Sequence
  Description of Artificial Sequence: Synthetic oligonucleotide
  Sense strand starting at position 2872 of SEQ ID NO: 1884923
agauuucuauuaggaagaa

SEQ ID NO: 2302393 - RNA, 19 nt, Artificial Sequence
  Description of Artificial Sequence: Synthetic oligonucleotide
  Antisense strand to SEQ ID NO: 2302392
uucuuccuaauagaaaucu

SEQ ID NO: 2302394 - RNA, 19 nt, Artificial Sequence
  Description of Artificial Sequence: Synthetic oligonucleotide
  Sense strand starting at position 3018 of SEQ ID NO: 1884923
gguaaugugcuagauauau

SEQ ID NO: 2302395 - RNA, 19 nt, Artificial Sequence
  Description of Artificial Sequence: Synthetic oligonucleotide
  Antisense strand to SEQ ID NO: 2302394
auauaucuagcacauuacc

SEQ ID NO: 2302396 - RNA, 19 nt, Artificial Sequence
  Description of Artificial Sequence: Synthetic oligonucleotide
  Sense strand starting at position 3030 of SEQ ID NO: 1884923
gauauauugcaacauagug

SEQ ID NO: 2302397 - RNA, 19 nt, Artificial Sequence
  Description of Artificial Sequence: Synthetic oligonucleotide
  Antisense strand to SEQ ID NO: 2302396
cacuauguugcaauauauc

SEQ ID NO: 2302398 - RNA, 19 nt, Artificial Sequence
  Description of Artificial Sequence: Synthetic oligonucleotide
  Sense strand starting at position 3176 of SEQ ID NO: 1884923
ugugaaauauuaguaugag

SEQ ID NO: 2302399 - RNA, 19 nt, Artificial Sequence
  Description of Artificial Sequence: Synthetic oligonucleotide
  Antisense strand to SEQ ID NO: 2302398
cucauacuaauauuucaca

SEQ ID NO: 2302400 - RNA, 19 nt, Artificial Sequence
  Description of Artificial Sequence: Synthetic oligonucleotide
  Sense strand starting at position 3179 of SEQ ID NO: 1884923
gaaauauuaguaugagcag

SEQ ID NO: 2302401 - RNA, 19 nt, Artificial Sequence
  Description of Artificial Sequence: Synthetic oligonucleotide
  Antisense strand to SEQ ID NO: 2302400
cugcucauacuaauauuuc

SEQ ID NO: 2302402 - RNA, 19 nt, Artificial Sequence
  Description of Artificial Sequence: Synthetic oligonucleotide
  Sense strand starting at position 3182 of SEQ ID NO: 1884923
auauuaguaugagcaguaa

SEQ ID NO: 2302403 - RNA, 19 nt, Artificial Sequence
  Description of Artificial Sequence: Synthetic oligonucleotide
  Antisense strand to SEQ ID NO: 2302402
uuacugcucauacuaauau

SEQ ID NO: 2302404 - RNA, 19 nt, Artificial Sequence
  Description of Artificial Sequence: Synthetic oligonucleotide
  Sense strand starting at position 3194 of SEQ ID NO: 1884923
gcaguaagugcugaaagaa

SEQ ID NO: 2302405 - RNA, 19 nt, Artificial Sequence
  Description of Artificial Sequence: Synthetic oligonucleotide
  Antisense strand to SEQ ID NO: 2302404
uucuuucagcacuuacugc

SEQ ID NO: 2302406 - RNA, 19 nt, Artificial Sequence
  Description of Artificial Sequence: Synthetic oligonucleotide
  Sense strand starting at position 3306 of SEQ ID NO: 1884923
gaauuaguugccuaaccag

SEQ ID NO: 2302407 - RNA, 19 nt, Artificial Sequence
  Description of Artificial Sequence: Synthetic oligonucleotide
  Antisense strand to SEQ ID NO: 2302406
cugguuaggcaacuaauuc

SEQ ID NO: 2302408 - RNA, 19 nt, Artificial Sequence
  Description of Artificial Sequence: Synthetic oligonucleotide
  Sense strand starting at position 3416 of SEQ ID NO: 1884923
ggagaauccuaauuagucu

SEQ ID NO: 2302409 - RNA, 19 nt, Artificial Sequence
  Description of Artificial Sequence: Synthetic oligonucleotide
  Antisense strand to SEQ ID NO: 2302408
agacuaauuaggauucucc

SEQ ID NO: 2302410 - RNA, 19 nt, Artificial Sequence
  Description of Artificial Sequence: Synthetic oligonucleotide
  Sense strand starting at position 3482 of SEQ ID NO: 1884923
gagaacuaggcuuaugcca

SEQ ID NO: 2302411 - RNA, 19 nt, Artificial Sequence
  Description of Artificial Sequence: Synthetic oligonucleotide
  Antisense strand to SEQ ID NO: 2302410
uggcauaagccuaguucuc

SEQ ID NO: 2302412 - RNA, 19 nt, Artificial Sequence
  Description of Artificial Sequence: Synthetic oligonucleotide
  Sense strand starting at position 3871 of SEQ ID NO: 1884923
gcucuagccagugagagaa

SEQ ID NO: 2302413 - RNA, 19 nt, Artificial Sequence
  Description of Artificial Sequence: Synthetic oligonucleotide
  Antisense strand to SEQ ID NO: 2302412
uucucucacuggcuagagc

SEQ ID NO: 2302414 - RNA, 19 nt, Artificial Sequence
  Description of Artificial Sequence: Synthetic oligonucleotide
  Sense strand starting at position 3927 of SEQ ID NO: 1884923
ucaauaguagaguggacau

SEQ ID NO: 2302415 - RNA, 19 nt, Artificial Sequence
  Description of Artificial Sequence: Synthetic oligonucleotide
  Antisense strand to SEQ ID NO: 2302414
auguccacucuacuauuga

SEQ ID NO: 2302416 - RNA, 19 nt, Artificial Sequence
  Description of Artificial Sequence: Synthetic oligonucleotide
  Sense strand starting at position 196 of SEQ ID NO: 1884924
cgcccaacgaagugaauau

SEQ ID NO: 2302417 - RNA, 19 nt, Artificial Sequence
  Description of Artificial Sequence: Synthetic oligonucleotide
  Antisense strand to SEQ ID NO: 2302416
auauucacuucguugggcg

SEQ ID NO: 2302418 - RNA, 19 nt, Artificial Sequence
  Description of Artificial Sequence: Synthetic oligonucleotide
  Sense strand starting at position 294 of SEQ ID NO: 1884924
uuuacagauuaguacgaaa

SEQ ID NO: 2302419 - RNA, 19 nt, Artificial Sequence
  Description of Artificial Sequence: Synthetic oligonucleotide
  Antisense strand to SEQ ID NO: 2302418
uuucguacuaaucuguaaa

SEQ ID NO: 2302420 - RNA, 19 nt, Artificial Sequence
  Description of Artificial Sequence: Synthetic oligonucleotide
  Sense strand starting at position 297 of SEQ ID NO: 1884924
acagauuaguacgaaagca

SEQ ID NO: 2302421 - RNA, 19 nt, Artificial Sequence
  Description of Artificial Sequence: Synthetic oligonucleotide
  Antisense strand to SEQ ID NO: 2302420
ugcuuucguacuaaucugu

SEQ ID NO: 2302422 - RNA, 19 nt, Artificial Sequence
  Description of Artificial Sequence: Synthetic oligonucleotide
  Sense strand starting at position 393 of SEQ ID NO: 1884924
cagagacucugauggucaa

SEQ ID NO: 2302423 - RNA, 19 nt, Artificial Sequence
  Description of Artificial Sequence: Synthetic oligonucleotide
  Antisense strand to SEQ ID NO: 2302422
uugaccaucagagucucug

SEQ ID NO: 2302424 - RNA, 19 nt, Artificial Sequence
  Description of Artificial Sequence: Synthetic oligonucleotide
  Sense strand starting at position 695 of SEQ ID NO: 1884924
ggugcucaguccucaaaga

SEQ ID NO: 2302425 - RNA, 19 nt, Artificial Sequence
  Description of Artificial Sequence: Synthetic oligonucleotide
  Antisense strand to SEQ ID NO: 2302424
ucuuugaggacugagcacc

SEQ ID NO: 2302426 - RNA, 19 nt, Artificial Sequence
  Description of Artificial Sequence: Synthetic oligonucleotide
  Sense strand starting at position 696 of SEQ ID NO: 1884924
gugcucaguccucaaagaa

SEQ ID NO: 2302427 - RNA, 19 nt, Artificial Sequence
  Description of Artificial Sequence: Synthetic oligonucleotide
  Antisense strand to SEQ ID NO: 2302426
uucuuugaggacugagcac

SEQ ID NO: 2302428 - RNA, 19 nt, Artificial Sequence
  Description of Artificial Sequence: Synthetic oligonucleotide
  Sense strand starting at position 1124 of SEQ ID NO: 1884924
gagcgaaucuaugucuaaa

SEQ ID NO: 2302429 - RNA, 19 nt, Artificial Sequence
  Description of Artificial Sequence: Synthetic oligonucleotide
  Antisense strand to SEQ ID NO: 2302428
uuuagacauagauucgcuc

SEQ ID NO: 2302430 - RNA, 19 nt, Artificial Sequence
  Description of Artificial Sequence: Synthetic oligonucleotide
  Sense strand starting at position 2382 of SEQ ID NO: 1884924
guuacagucgucggcacau

SEQ ID NO: 2302431 - RNA, 19 nt, Artificial Sequence
  Description of Artificial Sequence: Synthetic oligonucleotide
  Antisense strand to SEQ ID NO: 2302430
augugccgacgacuguaac

SEQ ID NO: 2302432 - RNA, 19 nt, Artificial Sequence
  Description of Artificial Sequence: Synthetic oligonucleotide
  Sense strand starting at position 2879 of SEQ ID NO: 1884924
aucuaauagucucauagga

SEQ ID NO: 2302433 - RNA, 19 nt, Artificial Sequence
  Description of Artificial Sequence: Synthetic oligonucleotide
  Antisense strand to SEQ ID NO: 2302432
uccuaugagacuauuagau

SEQ ID NO: 2302434 - RNA, 19 nt, Artificial Sequence
  Description of Artificial Sequence: Synthetic oligonucleotide
  Sense strand starting at position 3657 of SEQ ID NO: 1884924
cugucauugucccaucaca

SEQ ID NO: 2302435 - RNA, 19 nt, Artificial Sequence
  Description of Artificial Sequence: Synthetic oligonucleotide
  Antisense strand to SEQ ID NO: 2302434
ugugaugggacaaugacag

SEQ ID NO: 2302436 - RNA, 19 nt, Artificial Sequence
  Description of Artificial Sequence: Synthetic oligonucleotide
  Sense strand starting at position 3665 of SEQ ID NO: 1884924
gucccaucacaccgacaaa

SEQ ID NO: 2302437 - RNA, 19 nt, Artificial Sequence
  Description of Artificial Sequence: Synthetic oligonucleotide
  Antisense strand to SEQ ID NO: 2302436
uuugucggugugaugggac

SEQ ID NO: 2302438 - RNA, 19 nt, Artificial Sequence
  Description of Artificial Sequence: Synthetic oligonucleotide
  Sense strand starting at position 161 of SEQ ID NO: 1884925
uuuauauauggguaagcua

SEQ ID NO: 2302439 - RNA, 19 nt, Artificial Sequence
  Description of Artificial Sequence: Synthetic oligonucleotide
  Antisense strand to SEQ ID NO: 2302438
uagcuuacccauauauaaa

SEQ ID NO: 2302440 - RNA, 19 nt, Artificial Sequence
  Description of Artificial Sequence: Synthetic oligonucleotide
  Sense strand starting at position 208 of SEQ ID NO: 1884925
cauacuuuguaggcugaga

SEQ ID NO: 2302441 - RNA, 19 nt, Artificial Sequence
  Description of Artificial Sequence: Synthetic oligonucleotide
  Antisense strand to SEQ ID NO: 2302440
ucucagccuacaaaguaug

SEQ ID NO: 2302442 - RNA, 19 nt, Artificial Sequence
  Description of Artificial Sequence: Synthetic oligonucleotide
  Sense strand starting at position 221 of SEQ ID NO: 1884925
cugagauucugagugucua

SEQ ID NO: 2302443 - RNA, 19 nt, Artificial Sequence
  Description of Artificial Sequence: Synthetic oligonucleotide
  Antisense strand to SEQ ID NO: 2302442
uagacacucagaaucucag

SEQ ID NO: 2302444 - RNA, 19 nt, Artificial Sequence
  Description of Artificial Sequence: Synthetic oligonucleotide
  Sense strand starting at position 225 of SEQ ID NO: 1884925
gauucugagugucuaauau

SEQ ID NO: 2302445 - RNA, 19 nt, Artificial Sequence
  Description of Artificial Sequence: Synthetic oligonucleotide
  Antisense strand to SEQ ID NO: 2302444
auauuagacacucagaauc

SEQ ID NO: 2302446 - RNA, 19 nt, Artificial Sequence
  Description of Artificial Sequence: Synthetic oligonucleotide
  Sense strand starting at position 269 of SEQ ID NO: 1884925
cugcaagaacacugaagua

SEQ ID NO: 2302447 - RNA, 19 nt, Artificial Sequence
  Description of Artificial Sequence: Synthetic oligonucleotide
  Antisense strand to SEQ ID NO: 2302446
uacuucaguguucuugcag

SEQ ID NO: 2302448 - RNA, 19 nt, Artificial Sequence
  Description of Artificial Sequence: Synthetic oligonucleotide
  Sense strand starting at position 415 of SEQ ID NO: 1884925
gcaggacucaggcauauau

SEQ ID NO: 2302449 - RNA, 19 nt, Artificial Sequence
  Description of Artificial Sequence: Synthetic oligonucleotide
  Antisense strand to SEQ ID NO: 2302448
auauaugccugaguccugc

SEQ ID NO: 2302450 - RNA, 19 nt, Artificial Sequence
  Description of Artificial Sequence: Synthetic oligonucleotide
  Sense strand starting at position 432 of SEQ ID NO: 1884925
augguuacugcuuacuauu

SEQ ID NO: 2302451 - RNA, 19 nt, Artificial Sequence
  Description of Artificial Sequence: Synthetic oligonucleotide
  Antisense strand to SEQ ID NO: 2302450
aauaguaagcaguaaccau

SEQ ID NO: 2302452 - RNA, 19 nt, Artificial Sequence
  Description of Artificial Sequence: Synthetic oligonucleotide
  Sense strand starting at position 452 of SEQ ID NO: 1884925
ccuauagaucaugaugucu

SEQ ID NO: 2302453 - RNA, 19 nt, Artificial Sequence
  Description of Artificial Sequence: Synthetic oligonucleotide
  Antisense strand to SEQ ID NO: 2302452
agacaucaugaucuauagg

SEQ ID NO: 2302454 - RNA, 19 nt, Artificial Sequence
  Description of Artificial Sequence: Synthetic oligonucleotide
  Sense strand starting at position 457 of SEQ ID NO: 1884925
agaucaugaugucuuaggu

SEQ ID NO: 2302455 - RNA, 19 nt, Artificial Sequence
  Description of Artificial Sequence: Synthetic oligonucleotide
  Antisense strand to SEQ ID NO: 2302454
accuaagacaucaugaucu

SEQ ID NO: 2302456 - RNA, 19 nt, Artificial Sequence
  Description of Artificial Sequence: Synthetic oligonucleotide
  Sense strand starting at position 496 of SEQ ID NO: 1884925
ggacuuguccucuaaacau

SEQ ID NO: 2302457 - RNA, 19 nt, Artificial Sequence
  Description of Artificial Sequence: Synthetic oligonucleotide
  Antisense strand to SEQ ID NO: 2302456
auguuuagaggacaagucc

SEQ ID NO: 2302458 - RNA, 19 nt, Artificial Sequence
  Description of Artificial Sequence: Synthetic oligonucleotide
  Sense strand starting at position 660 of SEQ ID NO: 1884925
cuaugugauaaguguuaca

SEQ ID NO: 2302459 - RNA, 19 nt, Artificial Sequence
  Description of Artificial Sequence: Synthetic oligonucleotide
  Antisense strand to SEQ ID NO: 2302458
uguaacacuuaucacauag

SEQ ID NO: 2302460 - RNA, 19 nt, Artificial Sequence
  Description of Artificial Sequence: Synthetic oligonucleotide
  Sense strand starting at position 712 of SEQ ID NO: 1884925
gcacuuagcccauacugga

SEQ ID NO: 2302461 - RNA, 19 nt, Artificial Sequence
  Description of Artificial Sequence: Synthetic oligonucleotide
  Antisense strand to SEQ ID NO: 2302460
uccaguaugggcuaagugc

SEQ ID NO: 2302462 - RNA, 19 nt, Artificial Sequence
  Description of Artificial Sequence: Synthetic oligonucleotide
  Sense strand starting at position 779 of SEQ ID NO: 1884925
ggaauugaugucuaggcua

SEQ ID NO: 2302463 - RNA, 19 nt, Artificial Sequence
  Description of Artificial Sequence: Synthetic oligonucleotide
  Antisense strand to SEQ ID NO: 2302462
uagccuagacaucaauucc

SEQ ID NO: 2302464 - RNA, 19 nt, Artificial Sequence
  Description of Artificial Sequence: Synthetic oligonucleotide
  Sense strand starting at position 781 of SEQ ID NO: 1884925
aauugaugucuaggcuaaa

SEQ ID NO: 2302465 - RNA, 19 nt, Artificial Sequence
  Description of Artificial Sequence: Synthetic oligonucleotide
  Antisense strand to SEQ ID NO: 2302464
uuuagccuagacaucaauu

SEQ ID NO: 2302466 - RNA, 19 nt, Artificial Sequence
  Description of Artificial Sequence: Synthetic oligonucleotide
  Sense strand starting at position 868 of SEQ ID NO: 1884925
auggaaauacaggguugua

SEQ ID NO: 2302467 - RNA, 19 nt, Artificial Sequence
  Description of Artificial Sequence: Synthetic oligonucleotide
  Antisense strand to SEQ ID NO: 2302466
uacaacccuguauuuccau

SEQ ID NO: 2302468 - RNA, 19 nt, Artificial Sequence
  Description of Artificial Sequence: Synthetic oligonucleotide
  Sense strand starting at position 871 of SEQ ID NO: 1884925
gaaauacaggguuguaugu

SEQ ID NO: 2302469 - RNA, 19 nt, Artificial Sequence
  Description of Artificial Sequence: Synthetic oligonucleotide
  Antisense strand to SEQ ID NO: 2302468
acauacaacccuguauuuc

SEQ ID NO: 2302470 - RNA, 19 nt, Artificial Sequence
  Description of Artificial Sequence: Synthetic oligonucleotide
  Sense strand starting at position 886 of SEQ ID NO: 1884925
augugaguacggcaagacu

SEQ ID NO: 2302471 - RNA, 19 nt, Artificial Sequence
  Description of Artificial Sequence: Synthetic oligonucleotide
  Antisense strand to SEQ ID NO: 2302470
agucuugccguacucacau

SEQ ID NO: 2302472 - RNA, 19 nt, Artificial Sequence
  Description of Artificial Sequence: Synthetic oligonucleotide
  Sense strand starting at position 915 of SEQ ID NO: 1884925
agugguuugcuguauauuu

SEQ ID NO: 2302473 - RNA, 19 nt, Artificial Sequence
  Description of Artificial Sequence: Synthetic oligonucleotide
  Antisense strand to SEQ ID NO: 2302472
aaauauacagcaaaccacu

SEQ ID NO: 2302474 - RNA, 19 nt, Artificial Sequence
  Description of Artificial Sequence: Synthetic oligonucleotide
  Sense strand starting at position 961 of SEQ ID NO: 1884925
ugacauacuugucucccua

SEQ ID NO: 2302475 - RNA, 19 nt, Artificial Sequence
  Description of Artificial Sequence: Synthetic oligonucleotide
  Antisense strand to SEQ ID NO: 2302474
uagggagacaaguauguca

SEQ ID NO: 2302476 - RNA, 19 nt, Artificial Sequence
  Description of Artificial Sequence: Synthetic oligonucleotide
  Sense strand starting at position 968 of SEQ ID NO: 1884925
cuugucucccuauauaugu

SEQ ID NO: 2302477 - RNA, 19 nt, Artificial Sequence
  Description of Artificial Sequence: Synthetic oligonucleotide
  Antisense strand to SEQ ID NO: 2302476
acauauauagggagacaag

SEQ ID NO: 2302478 - RNA, 19 nt, Artificial Sequence
  Description of Artificial Sequence: Synthetic oligonucleotide
  Sense strand starting at position 1091 of SEQ ID NO: 1884925
agcuaugagguguaaggga

SEQ ID NO: 2302479 - RNA, 19 nt, Artificial Sequence
  Description of Artificial Sequence: Synthetic oligonucleotide
  Antisense strand to SEQ ID NO: 2302478
ucccuuacaccucauagcu

SEQ ID NO: 2302480 - RNA, 19 nt, Artificial Sequence
  Description of Artificial Sequence: Synthetic oligonucleotide
  Sense strand starting at position 1135 of SEQ ID NO: 1884925
gucauuucuaguggcaaug

SEQ ID NO: 2302481 - RNA, 19 nt, Artificial Sequence
  Description of Artificial Sequence: Synthetic oligonucleotide
  Antisense strand to SEQ ID NO: 2302480
cauugccacuagaaaugac

SEQ ID NO: 2302482 - RNA, 19 nt, Artificial Sequence
  Description of Artificial Sequence: Synthetic oligonucleotide
  Sense strand starting at position 1262 of SEQ ID NO: 1884925
cuggauuacagaugcauga

SEQ ID NO: 2302483 - RNA, 19 nt, Artificial Sequence
  Description of Artificial Sequence: Synthetic oligonucleotide
  Antisense strand to SEQ ID NO: 2302482
ucaugcaucuguaauccag

SEQ ID NO: 2302484 - RNA, 19 nt, Artificial Sequence
  Description of Artificial Sequence: Synthetic oligonucleotide
  Sense strand starting at position 1266 of SEQ ID NO: 1884925
auuacagaugcaugauaau

SEQ ID NO: 2302485 - RNA, 19 nt, Artificial Sequence
  Description of Artificial Sequence: Synthetic oligonucleotide
  Antisense strand to SEQ ID NO: 2302484
auuaucaugcaucuguaau

SEQ ID NO: 2302486 - RNA, 19 nt, Artificial Sequence
  Description of Artificial Sequence: Synthetic oligonucleotide
  Sense strand starting at position 1343 of SEQ ID NO: 1884925
acgcaaaguguuuacauga

SEQ ID NO: 2302487 - RNA, 19 nt, Artificial Sequence
  Description of Artificial Sequence: Synthetic oligonucleotide
  Antisense strand to SEQ ID NO: 2302486
ucauguaaacacuuugcgu

SEQ ID NO: 2302488 - RNA, 19 nt, Artificial Sequence
  Description of Artificial Sequence: Synthetic oligonucleotide
  Sense strand starting at position 1564 of SEQ ID NO: 1884925
ccagaaugaugguccuauu

SEQ ID NO: 2302489 - RNA, 19 nt, Artificial Sequence
  Description of Artificial Sequence: Synthetic oligonucleotide
  Antisense strand to SEQ ID NO: 2302488
aauaggaccaucauucugg

SEQ ID NO: 2302490 - RNA, 19 nt, Artificial Sequence
  Description of Artificial Sequence: Synthetic oligonucleotide
  Sense strand starting at position 1965 of SEQ ID NO: 1884925
cccaacaugcuugaaguua

SEQ ID NO: 2302491 - RNA, 19 nt, Artificial Sequence
  Description of Artificial Sequence: Synthetic oligonucleotide
  Antisense strand to SEQ ID NO: 2302490
uaacuucaagcauguuggg

SEQ ID NO: 2302492 - RNA, 19 nt, Artificial Sequence
  Description of Artificial Sequence: Synthetic oligonucleotide
  Sense strand starting at position 2772 of SEQ ID NO: 1884925
gcgcguuacacauuaacug

SEQ ID NO: 2302493 - RNA, 19 nt, Artificial Sequence
  Description of Artificial Sequence: Synthetic oligonucleotide
  Antisense strand to SEQ ID NO: 2302492
caguuaauguguaacgcgc

SEQ ID NO: 2302494 - RNA, 19 nt, Artificial Sequence
  Description of Artificial Sequence: Synthetic oligonucleotide
  Sense strand starting at position 3317 of SEQ ID NO: 1884925
acacgagcgcugaguuagu

SEQ ID NO: 2302495 - RNA, 19 nt, Artificial Sequence
  Description of Artificial Sequence: Synthetic oligonucleotide
  Antisense strand to SEQ ID NO: 2302494
acuaacucagcgcucgugu

SEQ ID NO: 2302496 - RNA, 19 nt, Artificial Sequence
  Description of Artificial Sequence: Synthetic oligonucleotide
  Sense strand starting at position 3342 of SEQ ID NO: 1884925
ugauuacugagaggcaauu

SEQ ID NO: 2302497 - RNA, 19 nt, Artificial Sequence
  Description of Artificial Sequence: Synthetic oligonucleotide
  Antisense strand to SEQ ID NO: 2302496
aauugccucucaguaauca

SEQ ID NO: 2302498 - RNA, 19 nt, Artificial Sequence
  Description of Artificial Sequence: Synthetic oligonucleotide
  Sense strand starting at position 3460 of SEQ ID NO: 1884925
aucucuugcaguggaauga

SEQ ID NO: 2302499 - RNA, 19 nt, Artificial Sequence
  Description of Artificial Sequence: Synthetic oligonucleotide
  Antisense strand to SEQ ID NO: 2302498
ucauuccacugcaagagau

SEQ ID NO: 2302500 - RNA, 19 nt, Artificial Sequence
  Description of Artificial Sequence: Synthetic oligonucleotide
  Sense strand starting at position 3461 of SEQ ID NO: 1884925
ucucuugcaguggaaugau

SEQ ID NO: 2302501 - RNA, 19 nt, Artificial Sequence
  Description of Artificial Sequence: Synthetic oligonucleotide
  Antisense strand to SEQ ID NO: 2302500
aucauuccacugcaagaga

SEQ ID NO: 2302502 - RNA, 19 nt, Artificial Sequence
  Description of Artificial Sequence: Synthetic oligonucleotide
  Sense strand starting at position 3502 of SEQ ID NO: 1884925
auaagaggauuacaacaaa

SEQ ID NO: 2302503 - RNA, 19 nt, Artificial Sequence
  Description of Artificial Sequence: Synthetic oligonucleotide
  Antisense strand to SEQ ID NO: 2302502
uuuguuguaauccucuuau

SEQ ID NO: 2302504 - RNA, 19 nt, Artificial Sequence
  Description of Artificial Sequence: Synthetic oligonucleotide
  Sense strand starting at position 3608 of SEQ ID NO: 1884925
uccagugcugaaugacaaa

SEQ ID NO: 2302505 - RNA, 19 nt, Artificial Sequence
  Description of Artificial Sequence: Synthetic oligonucleotide
  Antisense strand to SEQ ID NO: 2302504
uuugucauucagcacugga

SEQ ID NO: 2302506 - RNA, 19 nt, Artificial Sequence
  Description of Artificial Sequence: Synthetic oligonucleotide
  Sense strand starting at position 3642 of SEQ ID NO: 1884925
gcagaauaggguuguagac

SEQ ID NO: 2302507 - RNA, 19 nt, Artificial Sequence
  Description of Artificial Sequence: Synthetic oligonucleotide
  Antisense strand to SEQ ID NO: 2302506
gucuacaacccuauucugc

SEQ ID NO: 2302508 - RNA, 19 nt, Artificial Sequence
  Description of Artificial Sequence: Synthetic oligonucleotide
  Sense strand starting at position 3740 of SEQ ID NO: 1884925
uuacuaguacugugcauuu

SEQ ID NO: 2302509 - RNA, 19 nt, Artificial Sequence
  Description of Artificial Sequence: Synthetic oligonucleotide
  Antisense strand to SEQ ID NO: 2302508
aaaugcacaguacuaguaa

SEQ ID NO: 2302510 - RNA, 19 nt, Artificial Sequence
  Description of Artificial Sequence: Synthetic oligonucleotide
  Sense strand starting at position 3782 of SEQ ID NO: 1884925
cagacaguguauuccagau

SEQ ID NO: 2302511 - RNA, 19 nt, Artificial Sequence
  Description of Artificial Sequence: Synthetic oligonucleotide
  Antisense strand to SEQ ID NO: 2302510
aucuggaauacacugucug

SEQ ID NO: 2302512 - RNA, 19 nt, Artificial Sequence
  Description of Artificial Sequence: Synthetic oligonucleotide
  Sense strand starting at position 3819 of SEQ ID NO: 1884925
uccuaaagcccuuguggaa

SEQ ID NO: 2302513 - RNA, 19 nt, Artificial Sequence
  Description of Artificial Sequence: Synthetic oligonucleotide
  Antisense strand to SEQ ID NO: 2302512
uuccacaagggcuuuagga

SEQ ID NO: 2302514 - RNA, 19 nt, Artificial Sequence
  Description of Artificial Sequence: Synthetic oligonucleotide
  Sense strand starting at position 3910 of SEQ ID NO: 1884925
uuuccauuacaguaauguu

SEQ ID NO: 2302515 - RNA, 19 nt, Artificial Sequence
  Description of Artificial Sequence: Synthetic oligonucleotide
  Antisense strand to SEQ ID NO: 2302514
aacauuacuguaauggaaa

SEQ ID NO: 2302516 - RNA, 19 nt, Artificial Sequence
  Description of Artificial Sequence: Synthetic oligonucleotide
  Sense strand starting at position 3951 of SEQ ID NO: 1884925
gaaccaaaguguuugauac

SEQ ID NO: 2302517 - RNA, 19 nt, Artificial Sequence
  Description of Artificial Sequence: Synthetic oligonucleotide
  Antisense strand to SEQ ID NO: 2302516
guaucaaacacuuugguuc

SEQ ID NO: 2302518 - RNA, 19 nt, Artificial Sequence
  Description of Artificial Sequence: Synthetic oligonucleotide
  Sense strand starting at position 44 of SEQ ID NO: 1884926
aguugucugaacuaaggca

SEQ ID NO: 2302519 - RNA, 19 nt, Artificial Sequence
  Description of Artificial Sequence: Synthetic oligonucleotide
  Antisense strand to SEQ ID NO: 2302518
ugccuuaguucagacaacu

SEQ ID NO: 2302520 - RNA, 19 nt, Artificial Sequence
  Description of Artificial Sequence: Synthetic oligonucleotide
  Sense strand starting at position 213 of SEQ ID NO: 1884926
aggagcgaucucgggagaa

SEQ ID NO: 2302521 - RNA, 19 nt, Artificial Sequence
  Description of Artificial Sequence: Synthetic oligonucleotide
  Antisense strand to SEQ ID NO: 2302520
uucucccgagaucgcuccu

SEQ ID NO: 2302522 - RNA, 19 nt, Artificial Sequence
  Description of Artificial Sequence: Synthetic oligonucleotide
  Sense strand starting at position 215 of SEQ ID NO: 1884926
gagcgaucucgggagaaag

SEQ ID NO: 2302523 - RNA, 19 nt, Artificial Sequence
  Description of Artificial Sequence: Synthetic oligonucleotide
  Antisense strand to SEQ ID NO: 2302522
cuuucucccgagaucgcuc

SEQ ID NO: 2302524 - RNA, 19 nt, Artificial Sequence
  Description of Artificial Sequence: Synthetic oligonucleotide
  Sense strand starting at position 217 of SEQ ID NO: 1884926
gcgaucucgggagaaagau

SEQ ID NO: 2302525 - RNA, 19 nt, Artificial Sequence
  Description of Artificial Sequence: Synthetic oligonucleotide
  Antisense strand to SEQ ID NO: 2302524
aucuuucucccgagaucgc

SEQ ID NO: 2302526 - RNA, 19 nt, Artificial Sequence
  Description of Artificial Sequence: Synthetic oligonucleotide
  Sense strand starting at position 233 of SEQ ID NO: 1884926
gauuaugagucauugacaa

SEQ ID NO: 2302527 - RNA, 19 nt, Artificial Sequence
  Description of Artificial Sequence: Synthetic oligonucleotide
  Antisense strand to SEQ ID NO: 2302526
uugucaaugacucauaauc

SEQ ID NO: 2302528 - RNA, 19 nt, Artificial Sequence
  Description of Artificial Sequence: Synthetic oligonucleotide
  Sense strand starting at position 302 of SEQ ID NO: 1884926
uuaucuagauccuugguau

SEQ ID NO: 2302529 - RNA, 19 nt, Artificial Sequence
  Description of Artificial Sequence: Synthetic oligonucleotide
  Antisense strand to SEQ ID NO: 2302528
auaccaaggaucuagauaa

SEQ ID NO: 2302530 - RNA, 19 nt, Artificial Sequence
  Description of Artificial Sequence: Synthetic oligonucleotide
  Sense strand starting at position 449 of SEQ ID NO: 1884926
augaguuccuucucccaua

SEQ ID NO: 2302531 - RNA, 19 nt, Artificial Sequence
  Description of Artificial Sequence: Synthetic oligonucleotide
  Antisense strand to SEQ ID NO: 2302530
uaugggagaaggaacucau

SEQ ID NO: 2302532 - RNA, 19 nt, Artificial Sequence
  Description of Artificial Sequence: Synthetic oligonucleotide
  Sense strand starting at position 548 of SEQ ID NO: 1884926
guggucucauaagugaaga

SEQ ID NO: 2302533 - RNA, 19 nt, Artificial Sequence
  Description of Artificial Sequence: Synthetic oligonucleotide
  Antisense strand to SEQ ID NO: 2302532
ucuucacuuaugagaccac

SEQ ID NO: 2302534 - RNA, 19 nt, Artificial Sequence
  Description of Artificial Sequence: Synthetic oligonucleotide
  Sense strand starting at position 549 of SEQ ID NO: 1884926
uggucucauaagugaagaa

SEQ ID NO: 2302535 - RNA, 19 nt, Artificial Sequence
  Description of Artificial Sequence: Synthetic oligonucleotide
  Antisense strand to SEQ ID NO: 2302534
uucuucacuuaugagacca

SEQ ID NO: 2302536 - RNA, 19 nt, Artificial Sequence
  Description of Artificial Sequence: Synthetic oligonucleotide
  Sense strand starting at position 620 of SEQ ID NO: 1884926
ugaggugguuuccuaaaga

SEQ ID NO: 2302537 - RNA, 19 nt, Artificial Sequence
  Description of Artificial Sequence: Synthetic oligonucleotide
  Antisense strand to SEQ ID NO: 2302536
ucuuuaggaaaccaccuca

SEQ ID NO: 2302538 - RNA, 19 nt, Artificial Sequence
  Description of Artificial Sequence: Synthetic oligonucleotide
  Sense strand starting at position 633 of SEQ ID NO: 1884926
uaaagaaauugucugggcu

SEQ ID NO: 2302539 - RNA, 19 nt, Artificial Sequence
  Description of Artificial Sequence: Synthetic oligonucleotide
  Antisense strand to SEQ ID NO: 2302538
agcccagacaauuucuuua

SEQ ID NO: 2302540 - RNA, 19 nt, Artificial Sequence
  Description of Artificial Sequence: Synthetic oligonucleotide
  Sense strand starting at position 741 of SEQ ID NO: 1884926
ggcauagaacgugagaagu

SEQ ID NO: 2302541 - RNA, 19 nt, Artificial Sequence
  Description of Artificial Sequence: Synthetic oligonucleotide
  Antisense strand to SEQ ID NO: 2302540
acuucucacguucuaugcc

SEQ ID NO: 2302542 - RNA, 19 nt, Artificial Sequence
  Description of Artificial Sequence: Synthetic oligonucleotide
  Sense strand starting at position 786 of SEQ ID NO: 1884926
gaggguggucagcaaggau

SEQ ID NO: 2302543 - RNA, 19 nt, Artificial Sequence
  Description of Artificial Sequence: Synthetic oligonucleotide
  Antisense strand to SEQ ID NO: 2302542
auccuugcugaccacccuc

SEQ ID NO: 2302544 - RNA, 19 nt, Artificial Sequence
  Description of Artificial Sequence: Synthetic oligonucleotide
  Sense strand starting at position 910 of SEQ ID NO: 1884926
guccuucugaaggagcauu

SEQ ID NO: 2302545 - RNA, 19 nt, Artificial Sequence
  Description of Artificial Sequence: Synthetic oligonucleotide
  Antisense strand to SEQ ID NO: 2302544
aaugcuccuucagaaggac

SEQ ID NO: 2302546 - RNA, 19 nt, Artificial Sequence
  Description of Artificial Sequence: Synthetic oligonucleotide
  Sense strand starting at position 1327 of SEQ ID NO: 1884926
cuuauaaagcugugaauca

SEQ ID NO: 2302547 - RNA, 19 nt, Artificial Sequence
  Description of Artificial Sequence: Synthetic oligonucleotide
  Antisense strand to SEQ ID NO: 2302546
ugauucacagcuuuauaag

SEQ ID NO: 2302548 - RNA, 19 nt, Artificial Sequence
  Description of Artificial Sequence: Synthetic oligonucleotide
  Sense strand starting at position 1339 of SEQ ID NO: 1884926
ugaaucauuaaguguguga

SEQ ID NO: 2302549 - RNA, 19 nt, Artificial Sequence
  Description of Artificial Sequence: Synthetic oligonucleotide
  Antisense strand to SEQ ID NO: 2302548
ucacacacuuaaugauuca

SEQ ID NO: 2302550 - RNA, 19 nt, Artificial Sequence
  Description of Artificial Sequence: Synthetic oligonucleotide
  Sense strand starting at position 1341 of SEQ ID NO: 1884926
aaucauuaagugugugaac

SEQ ID NO: 2302551 - RNA, 19 nt, Artificial Sequence
  Description of Artificial Sequence: Synthetic oligonucleotide
  Antisense strand to SEQ ID NO: 2302550
guucacacacuuaaugauu

SEQ ID NO: 2302552 - RNA, 19 nt, Artificial Sequence
  Description of Artificial Sequence: Synthetic oligonucleotide
  Sense strand starting at position 1342 of SEQ ID NO: 1884926
aucauuaagugugugaaca

SEQ ID NO: 2302553 - RNA, 19 nt, Artificial Sequence
  Description of Artificial Sequence: Synthetic oligonucleotide
  Antisense strand to SEQ ID NO: 2302552
uguucacacacuuaaugau

SEQ ID NO: 2302554 - RNA, 19 nt, Artificial Sequence
  Description of Artificial Sequence: Synthetic oligonucleotide
  Sense strand starting at position 1374 of SEQ ID NO: 1884926
gugugaauaugcauguggu

SEQ ID NO: 2302555 - RNA, 19 nt, Artificial Sequence
  Description of Artificial Sequence: Synthetic oligonucleotide
  Antisense strand to SEQ ID NO: 2302554
accacaugcauauucacac

SEQ ID NO: 2302556 - RNA, 19 nt, Artificial Sequence
  Description of Artificial Sequence: Synthetic oligonucleotide
  Sense strand starting at position 1474 of SEQ ID NO: 1884926
uggucaugugaacaugcau

SEQ ID NO: 2302557 - RNA, 19 nt, Artificial Sequence
  Description of Artificial Sequence: Synthetic oligonucleotide
  Antisense strand to SEQ ID NO: 2302556
augcauguucacaugacca

SEQ ID NO: 2302558 - RNA, 19 nt, Artificial Sequence
  Description of Artificial Sequence: Synthetic oligonucleotide
  Sense strand starting at position 1564 of SEQ ID NO: 1884926
ugugaacaugcauaugguu

SEQ ID NO: 2302559 - RNA, 19 nt, Artificial Sequence
  Description of Artificial Sequence: Synthetic oligonucleotide
  Antisense strand to SEQ ID NO: 2302558
aaccauaugcauguucaca

SEQ ID NO: 2302560 - RNA, 19 nt, Artificial Sequence
  Description of Artificial Sequence: Synthetic oligonucleotide
  Sense strand starting at position 1727 of SEQ ID NO: 1884926
ccugaauccugguccuaag

SEQ ID NO: 2302561 - RNA, 19 nt, Artificial Sequence
  Description of Artificial Sequence: Synthetic oligonucleotide
  Antisense strand to SEQ ID NO: 2302560
cuuaggaccaggauucagg

SEQ ID NO: 2302562 - RNA, 19 nt, Artificial Sequence
  Description of Artificial Sequence: Synthetic oligonucleotide
  Sense strand starting at position 1770 of SEQ ID NO: 1884926
agaagcaacucuguugaua

SEQ ID NO: 2302563 - RNA, 19 nt, Artificial Sequence
  Description of Artificial Sequence: Synthetic oligonucleotide
  Antisense strand to SEQ ID NO: 2302562
uaucaacagaguugcuucu

SEQ ID NO: 2302564 - RNA, 19 nt, Artificial Sequence
  Description of Artificial Sequence: Synthetic oligonucleotide
  Sense strand starting at position 1782 of SEQ ID NO: 1884926
guugauaccgacugagauu

SEQ ID NO: 2302565 - RNA, 19 nt, Artificial Sequence
  Description of Artificial Sequence: Synthetic oligonucleotide
  Antisense strand to SEQ ID NO: 2302564
aaucucagucgguaucaac

SEQ ID NO: 2302566 - RNA, 19 nt, Artificial Sequence
  Description of Artificial Sequence: Synthetic oligonucleotide
  Sense strand starting at position 2011 of SEQ ID NO: 1884926
ucgugugcucuaucagguu

SEQ ID NO: 2302567 - RNA, 19 nt, Artificial Sequence
  Description of Artificial Sequence: Synthetic oligonucleotide
  Antisense strand to SEQ ID NO: 2302566
aaccugauagagcacacga

SEQ ID NO: 2302568 - RNA, 19 nt, Artificial Sequence
  Description of Artificial Sequence: Synthetic oligonucleotide
  Sense strand starting at position 2172 of SEQ ID NO: 1884926
cugaaaugaugcucugaaa

SEQ ID NO: 2302569 - RNA, 19 nt, Artificial Sequence
  Description of Artificial Sequence: Synthetic oligonucleotide
  Antisense strand to SEQ ID NO: 2302568
uuucagagcaucauuucag

SEQ ID NO: 2302570 - RNA, 19 nt, Artificial Sequence
  Description of Artificial Sequence: Synthetic oligonucleotide
  Sense strand starting at position 2272 of SEQ ID NO: 1884926
aguagugaaugaucucaag

SEQ ID NO: 2302571 - RNA, 19 nt, Artificial Sequence
  Description of Artificial Sequence: Synthetic oligonucleotide
  Antisense strand to SEQ ID NO: 2302570
cuugagaucauucacuacu

SEQ ID NO: 2302572 - RNA, 19 nt, Artificial Sequence
  Description of Artificial Sequence: Synthetic oligonucleotide
  Sense strand starting at position 2371 of SEQ ID NO: 1884926
gcacaauaggccugggacu

SEQ ID NO: 2302573 - RNA, 19 nt, Artificial Sequence
  Description of Artificial Sequence: Synthetic oligonucleotide
  Antisense strand to SEQ ID NO: 2302572
agucccaggccuauugugc

SEQ ID NO: 2302574 - RNA, 19 nt, Artificial Sequence
  Description of Artificial Sequence: Synthetic oligonucleotide
  Sense strand starting at position 2467 of SEQ ID NO: 1884926
ggguucuugguguaaauaa

SEQ ID NO: 2302575 - RNA, 19 nt, Artificial Sequence
  Description of Artificial Sequence: Synthetic oligonucleotide
  Antisense strand to SEQ ID NO: 2302574
uuauuuacaccaagaaccc

SEQ ID NO: 2302576 - RNA, 19 nt, Artificial Sequence
  Description of Artificial Sequence: Synthetic oligonucleotide
  Sense strand starting at position 2572 of SEQ ID NO: 1884926
gaugaagcacucuguauac

SEQ ID NO: 2302577 - RNA, 19 nt, Artificial Sequence
  Description of Artificial Sequence: Synthetic oligonucleotide
  Antisense strand to SEQ ID NO: 2302576
guauacagagugcuucauc

SEQ ID NO: 2302578 - RNA, 19 nt, Artificial Sequence
  Description of Artificial Sequence: Synthetic oligonucleotide
  Sense strand starting at position 2574 of SEQ ID NO: 1884926
ugaagcacucuguauacau

SEQ ID NO: 2302579 - RNA, 19 nt, Artificial Sequence
  Description of Artificial Sequence: Synthetic oligonucleotide
  Antisense strand to SEQ ID NO: 2302578
auguauacagagugcuuca

SEQ ID NO: 2302580 - RNA, 19 nt, Artificial Sequence
  Description of Artificial Sequence: Synthetic oligonucleotide
  Sense strand starting at position 2581 of SEQ ID NO: 1884926
cucuguauacaugaccuua

SEQ ID NO: 2302581 - RNA, 19 nt, Artificial Sequence
  Description of Artificial Sequence: Synthetic oligonucleotide
  Antisense strand to SEQ ID NO: 2302580
uaaggucauguauacagag

SEQ ID NO: 2302582 - RNA, 19 nt, Artificial Sequence
  Description of Artificial Sequence: Synthetic oligonucleotide
  Sense strand starting at position 2583 of SEQ ID NO: 1884926
cuguauacaugaccuuauu

SEQ ID NO: 2302583 - RNA, 19 nt, Artificial Sequence
  Description of Artificial Sequence: Synthetic oligonucleotide
  Antisense strand to SEQ ID NO: 2302582
aauaaggucauguauacag

SEQ ID NO: 2302584 - RNA, 19 nt, Artificial Sequence
  Description of Artificial Sequence: Synthetic oligonucleotide
  Sense strand starting at position 2814 of SEQ ID NO: 1884926
aucugugaauaucuuagua

SEQ ID NO: 2302585 - RNA, 19 nt, Artificial Sequence
  Description of Artificial Sequence: Synthetic oligonucleotide
  Antisense strand to SEQ ID NO: 2302584
uacuaagauauucacagau

SEQ ID NO: 2302586 - RNA, 19 nt, Artificial Sequence
  Description of Artificial Sequence: Synthetic oligonucleotide
  Sense strand starting at position 2977 of SEQ ID NO: 1884926
aauaguugggauugcagau

SEQ ID NO: 2302587 - RNA, 19 nt, Artificial Sequence
  Description of Artificial Sequence: Synthetic oligonucleotide
  Antisense strand to SEQ ID NO: 2302586
aucugcaaucccaacuauu

SEQ ID NO: 2302588 - RNA, 19 nt, Artificial Sequence
  Description of Artificial Sequence: Synthetic oligonucleotide
  Sense strand starting at position 2983 of SEQ ID NO: 1884926
ugggauugcagaugcacau

SEQ ID NO: 2302589 - RNA, 19 nt, Artificial Sequence
  Description of Artificial Sequence: Synthetic oligonucleotide
  Antisense strand to SEQ ID NO: 2302588
augugcaucugcaauccca

SEQ ID NO: 2302590 - RNA, 19 nt, Artificial Sequence
  Description of Artificial Sequence: Synthetic oligonucleotide
  Sense strand starting at position 3649 of SEQ ID NO: 1884926
uuguuugauuugccuguua

SEQ ID NO: 2302591 - RNA, 19 nt, Artificial Sequence
  Description of Artificial Sequence: Synthetic oligonucleotide
  Antisense strand to SEQ ID NO: 2302590
uaacaggcaaaucaaacaa

SEQ ID NO: 2302592 - RNA, 19 nt, Artificial Sequence
  Description of Artificial Sequence: Synthetic oligonucleotide
  Sense strand starting at position 3660 of SEQ ID NO: 1884926
gccuguuaguauuucugga

SEQ ID NO: 2302593 - RNA, 19 nt, Artificial Sequence
  Description of Artificial Sequence: Synthetic oligonucleotide
  Antisense strand to SEQ ID NO: 2302592
uccagaaauacuaacaggc

SEQ ID NO: 2302594 - RNA, 19 nt, Artificial Sequence
  Description of Artificial Sequence: Synthetic oligonucleotide
  Sense strand starting at position 3865 of SEQ ID NO: 1884926
cuauaaauuagugguacga

SEQ ID NO: 2302595 - RNA, 19 nt, Artificial Sequence
  Description of Artificial Sequence: Synthetic oligonucleotide
  Antisense strand to SEQ ID NO: 2302594
ucguaccacuaauuuauag

SEQ ID NO: 2302596 - RNA, 19 nt, Artificial Sequence
  Description of Artificial Sequence: Synthetic oligonucleotide
  Sense strand starting at position 3869 of SEQ ID NO: 1884926
aaauuagugguacgaucua

SEQ ID NO: 2302597 - RNA, 19 nt, Artificial Sequence
  Description of Artificial Sequence: Synthetic oligonucleotide
  Antisense strand to SEQ ID NO: 2302596
uagaucguaccacuaauuu

SEQ ID NO: 2302598 - RNA, 19 nt, Artificial Sequence
  Description of Artificial Sequence: Synthetic oligonucleotide
  Sense strand starting at position 4 of SEQ ID NO: 1884927
ccuggucucaguuaaugua

SEQ ID NO: 2302599 - RNA, 19 nt, Artificial Sequence
  Description of Artificial Sequence: Synthetic oligonucleotide
  Antisense strand to SEQ ID NO: 2302598
uacauuaacugagaccagg

SEQ ID NO: 2302600 - RNA, 19 nt, Artificial Sequence
  Description of Artificial Sequence: Synthetic oligonucleotide
  Sense strand starting at position 223 of SEQ ID NO: 1884927
uggagcacuucugagauuu

SEQ ID NO: 2302601 - RNA, 19 nt, Artificial Sequence
  Description of Artificial Sequence: Synthetic oligonucleotide
  Antisense strand to SEQ ID NO: 2302600
aaaucucagaagugcucca

SEQ ID NO: 2302602 - RNA, 19 nt, Artificial Sequence
  Description of Artificial Sequence: Synthetic oligonucleotide
  Sense strand starting at position 352 of SEQ ID NO: 1884927
gucugcuuguccucuuaag

SEQ ID NO: 2302603 - RNA, 19 nt, Artificial Sequence
  Description of Artificial Sequence: Synthetic oligonucleotide
  Antisense strand to SEQ ID NO: 2302602
cuuaagaggacaagcagac

SEQ ID NO: 2302604 - RNA, 19 nt, Artificial Sequence
  Description of Artificial Sequence: Synthetic oligonucleotide
  Sense strand starting at position 379 of SEQ ID NO: 1884927
gcauaacuugggcaugacu

SEQ ID NO: 2302605 - RNA, 19 nt, Artificial Sequence
  Description of Artificial Sequence: Synthetic oligonucleotide
  Antisense strand to SEQ ID NO: 2302604
agucaugcccaaguuaugc

SEQ ID NO: 2302606 - RNA, 19 nt, Artificial Sequence
  Description of Artificial Sequence: Synthetic oligonucleotide
  Sense strand starting at position 461 of SEQ ID NO: 1884927
cuccuucucaggugagagu

SEQ ID NO: 2302607 - RNA, 19 nt, Artificial Sequence
  Description of Artificial Sequence: Synthetic oligonucleotide
  Antisense strand to SEQ ID NO: 2302606
acucucaccugagaaggag

SEQ ID NO: 2302608 - RNA, 19 nt, Artificial Sequence
  Description of Artificial Sequence: Synthetic oligonucleotide
  Sense strand starting at position 515 of SEQ ID NO: 1884927
ggcaauuagccuugguaag

SEQ ID NO: 2302609 - RNA, 19 nt, Artificial Sequence
  Description of Artificial Sequence: Synthetic oligonucleotide
  Antisense strand to SEQ ID NO: 2302608
cuuaccaaggcuaauugcc

SEQ ID NO: 2302610 - RNA, 19 nt, Artificial Sequence
  Description of Artificial Sequence: Synthetic oligonucleotide
  Sense strand starting at position 547 of SEQ ID NO: 1884927
gaauauagguaggaaggau

SEQ ID NO: 2302611 - RNA, 19 nt, Artificial Sequence
  Description of Artificial Sequence: Synthetic oligonucleotide
  Antisense strand to SEQ ID NO: 2302610
auccuuccuaccuauauuc

SEQ ID NO: 2302612 - RNA, 19 nt, Artificial Sequence
  Description of Artificial Sequence: Synthetic oligonucleotide
  Sense strand starting at position 686 of SEQ ID NO: 1884927
gcuagaagccucugugacu

SEQ ID NO: 2302613 - RNA, 19 nt, Artificial Sequence
  Description of Artificial Sequence: Synthetic oligonucleotide
  Antisense strand to SEQ ID NO: 2302612
agucacagaggcuucuagc

SEQ ID NO: 2302614 - RNA, 19 nt, Artificial Sequence
  Description of Artificial Sequence: Synthetic oligonucleotide
  Sense strand starting at position 687 of SEQ ID NO: 1884927
cuagaagccucugugacuu

SEQ ID NO: 2302615 - RNA, 19 nt, Artificial Sequence
  Description of Artificial Sequence: Synthetic oligonucleotide
  Antisense strand to SEQ ID NO: 2302614
aagucacagaggcuucuag

SEQ ID NO: 2302616 - RNA, 19 nt, Artificial Sequence
  Description of Artificial Sequence: Synthetic oligonucleotide
  Sense strand starting at position 876 of SEQ ID NO: 1884927
cggccaauuucucuacagu

SEQ ID NO: 2302617 - RNA, 19 nt, Artificial Sequence
  Description of Artificial Sequence: Synthetic oligonucleotide
  Antisense strand to SEQ ID NO: 2302616
acuguagagaaauuggccg

SEQ ID NO: 2302618 - RNA, 19 nt, Artificial Sequence
  Description of Artificial Sequence: Synthetic oligonucleotide
  Sense strand starting at position 1188 of SEQ ID NO: 1884927
gcugcaaagcucguccuau

SEQ ID NO: 2302619 - RNA, 19 nt, Artificial Sequence
  Description of Artificial Sequence: Synthetic oligonucleotide
  Antisense strand to SEQ ID NO: 2302618
auaggacgagcuuugcagc

SEQ ID NO: 2302620 - RNA, 19 nt, Artificial Sequence
  Description of Artificial Sequence: Synthetic oligonucleotide
  Sense strand starting at position 1201 of SEQ ID NO: 1884927
uccuaucagcuguaugcaa

SEQ ID NO: 2302621 - RNA, 19 nt, Artificial Sequence
  Description of Artificial Sequence: Synthetic oligonucleotide
  Antisense strand to SEQ ID NO: 2302620
uugcauacagcugauagga

SEQ ID NO: 2302622 - RNA, 19 nt, Artificial Sequence
  Description of Artificial Sequence: Synthetic oligonucleotide
  Sense strand starting at position 1208 of SEQ ID NO: 1884927
agcuguaugcaauguccua

SEQ ID NO: 2302623 - RNA, 19 nt, Artificial Sequence
  Description of Artificial Sequence: Synthetic oligonucleotide
  Antisense strand to SEQ ID NO: 2302622
uaggacauugcauacagcu

SEQ ID NO: 2302624 - RNA, 19 nt, Artificial Sequence
  Description of Artificial Sequence: Synthetic oligonucleotide
  Sense strand starting at position 1362 of SEQ ID NO: 1884927
aggauuccucauuggacga

SEQ ID NO: 2302625 - RNA, 19 nt, Artificial Sequence
  Description of Artificial Sequence: Synthetic oligonucleotide
  Antisense strand to SEQ ID NO: 2302624
ucguccaaugaggaauccu

SEQ ID NO: 2302626 - RNA, 19 nt, Artificial Sequence
  Description of Artificial Sequence: Synthetic oligonucleotide
  Sense strand starting at position 1363 of SEQ ID NO: 1884927
ggauuccucauuggacgaa

SEQ ID NO: 2302627 - RNA, 19 nt, Artificial Sequence
  Description of Artificial Sequence: Synthetic oligonucleotide
  Antisense strand to SEQ ID NO: 2302626
uucguccaaugaggaaucc

SEQ ID NO: 2302628 - RNA, 19 nt, Artificial Sequence
  Description of Artificial Sequence: Synthetic oligonucleotide
  Sense strand starting at position 1402 of SEQ ID NO: 1884927
gggugagucuaguuaggcu

SEQ ID NO: 2302629 - RNA, 19 nt, Artificial Sequence
  Description of Artificial Sequence: Synthetic oligonucleotide
  Antisense strand to SEQ ID NO: 2302628
agccuaacuagacucaccc

SEQ ID NO: 2302630 - RNA, 19 nt, Artificial Sequence
  Description of Artificial Sequence: Synthetic oligonucleotide
  Sense strand starting at position 2025 of SEQ ID NO: 1884927
acugguccacuuggauuaa

SEQ ID NO: 2302631 - RNA, 19 nt, Artificial Sequence
  Description of Artificial Sequence: Synthetic oligonucleotide
  Antisense strand to SEQ ID NO: 2302630
uuaauccaaguggaccagu

SEQ ID NO: 2302632 - RNA, 19 nt, Artificial Sequence
  Description of Artificial Sequence: Synthetic oligonucleotide
  Sense strand starting at position 2558 of SEQ ID NO: 1884927
uucuuacuacugggaguuu

SEQ ID NO: 2302633 - RNA, 19 nt, Artificial Sequence
  Description of Artificial Sequence: Synthetic oligonucleotide
  Antisense strand to SEQ ID NO: 2302632
aaacucccaguaguaagaa

SEQ ID NO: 2302634 - RNA, 19 nt, Artificial Sequence
  Description of Artificial Sequence: Synthetic oligonucleotide
  Sense strand starting at position 2568 of SEQ ID NO: 1884927
ugggaguuugugugagguu

SEQ ID NO: 2302635 - RNA, 19 nt, Artificial Sequence
  Description of Artificial Sequence: Synthetic oligonucleotide
  Antisense strand to SEQ ID NO: 2302634
aaccucacacaaacuccca

SEQ ID NO: 2302636 - RNA, 19 nt, Artificial Sequence
  Description of Artificial Sequence: Synthetic oligonucleotide
  Sense strand starting at position 2767 of SEQ ID NO: 1884927
guacguccuaacuaaggaa

SEQ ID NO: 2302637 - RNA, 19 nt, Artificial Sequence
  Description of Artificial Sequence: Synthetic oligonucleotide
  Antisense strand to SEQ ID NO: 2302636
uuccuuaguuaggacguac

SEQ ID NO: 2302638 - RNA, 19 nt, Artificial Sequence
  Description of Artificial Sequence: Synthetic oligonucleotide
  Sense strand starting at position 2774 of SEQ ID NO: 1884927
cuaacuaaggaaugcuuua

SEQ ID NO: 2302639 - RNA, 19 nt, Artificial Sequence
  Description of Artificial Sequence: Synthetic oligonucleotide
  Antisense strand to SEQ ID NO: 2302638
uaaagcauuccuuaguuag

SEQ ID NO: 2302640 - RNA, 19 nt, Artificial Sequence
  Description of Artificial Sequence: Synthetic oligonucleotide
  Sense strand starting at position 2889 of SEQ ID NO: 1884927
caaaguugucgccacagua

SEQ ID NO: 2302641 - RNA, 19 nt, Artificial Sequence
  Description of Artificial Sequence: Synthetic oligonucleotide
  Antisense strand to SEQ ID NO: 2302640
uacuguggcgacaacuuug

SEQ ID NO: 2302642 - RNA, 19 nt, Artificial Sequence
  Description of Artificial Sequence: Synthetic oligonucleotide
  Sense strand starting at position 2983 of SEQ ID NO: 1884927
guuuauuugucucaauuug

SEQ ID NO: 2302643 - RNA, 19 nt, Artificial Sequence
  Description of Artificial Sequence: Synthetic oligonucleotide
  Antisense strand to SEQ ID NO: 2302642
caaauugagacaaauaaac

SEQ ID NO: 2302644 - RNA, 19 nt, Artificial Sequence
  Description of Artificial Sequence: Synthetic oligonucleotide
  Sense strand starting at position 3035 of SEQ ID NO: 1884927
agugcacucccucaugaga

SEQ ID NO: 2302645 - RNA, 19 nt, Artificial Sequence
  Description of Artificial Sequence: Synthetic oligonucleotide
  Antisense strand to SEQ ID NO: 2302644
ucucaugagggagugcacu

SEQ ID NO: 2302646 - RNA, 19 nt, Artificial Sequence
  Description of Artificial Sequence: Synthetic oligonucleotide
  Sense strand starting at position 3101 of SEQ ID NO: 1884927
gccaccaaauuguuugaaa

SEQ ID NO: 2302647 - RNA, 19 nt, Artificial Sequence
  Description of Artificial Sequence: Synthetic oligonucleotide
  Antisense strand to SEQ ID NO: 2302646
uuucaaacaauuugguggc

SEQ ID NO: 2302648 - RNA, 19 nt, Artificial Sequence
  Description of Artificial Sequence: Synthetic oligonucleotide
  Sense strand starting at position 3206 of SEQ ID NO: 1884927
aggguauacucaucagcag

SEQ ID NO: 2302649 - RNA, 19 nt, Artificial Sequence
  Description of Artificial Sequence: Synthetic oligonucleotide
  Antisense strand to SEQ ID NO: 2302648
cugcugaugaguauacccu

SEQ ID NO: 2302650 - RNA, 19 nt, Artificial Sequence
  Description of Artificial Sequence: Synthetic oligonucleotide
  Sense strand starting at position 3207 of SEQ ID NO: 1884927
ggguauacucaucagcagu

SEQ ID NO: 2302651 - RNA, 19 nt, Artificial Sequence
  Description of Artificial Sequence: Synthetic oligonucleotide
  Antisense strand to SEQ ID NO: 2302650
acugcugaugaguauaccc

SEQ ID NO: 2302652 - RNA, 19 nt, Artificial Sequence
  Description of Artificial Sequence: Synthetic oligonucleotide
  Sense strand starting at position 3209 of SEQ ID NO: 1884927
guauacucaucagcaguuu

SEQ ID NO: 2302653 - RNA, 19 nt, Artificial Sequence
  Description of Artificial Sequence: Synthetic oligonucleotide
  Antisense strand to SEQ ID NO: 2302652
aaacugcugaugaguauac

SEQ ID NO: 2302654 - RNA, 19 nt, Artificial Sequence
  Description of Artificial Sequence: Synthetic oligonucleotide
  Sense strand starting at position 3232 of SEQ ID NO: 1884927
acgaguguacaccaaacaa

SEQ ID NO: 2302655 - RNA, 19 nt, Artificial Sequence
  Description of Artificial Sequence: Synthetic oligonucleotide
  Antisense strand to SEQ ID NO: 2302654
uuguuugguguacacucgu

SEQ ID NO: 2302656 - RNA, 19 nt, Artificial Sequence
  Description of Artificial Sequence: Synthetic oligonucleotide
  Sense strand starting at position 3571 of SEQ ID NO: 1884927
auuccuaauuaguuaggga

SEQ ID NO: 2302657 - RNA, 19 nt, Artificial Sequence
  Description of Artificial Sequence: Synthetic oligonucleotide
  Antisense strand to SEQ ID NO: 2302656
ucccuaacuaauuaggaau

SEQ ID NO: 2302658 - RNA, 19 nt, Artificial Sequence
  Description of Artificial Sequence: Synthetic oligonucleotide
  Sense strand starting at position 3655 of SEQ ID NO: 1884927
aaacuuugccaugggcaga

SEQ ID NO: 2302659 - RNA, 19 nt, Artificial Sequence
  Description of Artificial Sequence: Synthetic oligonucleotide
  Antisense strand to SEQ ID NO: 2302658
ucugcccauggcaaaguuu

SEQ ID NO: 2302660 - RNA, 19 nt, Artificial Sequence
  Description of Artificial Sequence: Synthetic oligonucleotide
  Sense strand starting at position 3680 of SEQ ID NO: 1884927
uggacagaauguuucuguu

SEQ ID NO: 2302661 - RNA, 19 nt, Artificial Sequence
  Description of Artificial Sequence: Synthetic oligonucleotide
  Antisense strand to SEQ ID NO: 2302660
aacagaaacauucugucca

SEQ ID NO: 2302662 - RNA, 19 nt, Artificial Sequence
  Description of Artificial Sequence: Synthetic oligonucleotide
  Sense strand starting at position 3688 of SEQ ID NO: 1884927
auguuucuguuucccugaa

SEQ ID NO: 2302663 - RNA, 19 nt, Artificial Sequence
  Description of Artificial Sequence: Synthetic oligonucleotide
  Antisense strand to SEQ ID NO: 2302662
uucagggaaacagaaacau

SEQ ID NO: 2302664 - RNA, 19 nt, Artificial Sequence
  Description of Artificial Sequence: Synthetic oligonucleotide
  Sense strand starting at position 3689 of SEQ ID NO: 1884927
uguuucuguuucccugaaa

SEQ ID NO: 2302665 - RNA, 19 nt, Artificial Sequence
  Description of Artificial Sequence: Synthetic oligonucleotide
  Antisense strand to SEQ ID NO: 2302664
uuucagggaaacagaaaca

SEQ ID NO: 2302666 - RNA, 19 nt, Artificial Sequence
  Description of Artificial Sequence: Synthetic oligonucleotide
  Sense strand starting at position 3727 of SEQ ID NO: 1884927
cucccaaugguauaguauu

SEQ ID NO: 2302667 - RNA, 19 nt, Artificial Sequence
  Description of Artificial Sequence: Synthetic oligonucleotide
  Antisense strand to SEQ ID NO: 2302666
aauacuauaccauugggag

SEQ ID NO: 2302668 - RNA, 19 nt, Artificial Sequence
  Description of Artificial Sequence: Synthetic oligonucleotide
  Sense strand starting at position 3760 of SEQ ID NO: 1884927
ggagguaauuuagguguga

SEQ ID NO: 2302669 - RNA, 19 nt, Artificial Sequence
  Description of Artificial Sequence: Synthetic oligonucleotide
  Antisense strand to SEQ ID NO: 2302668
ucacaccuaaauuaccucc

SEQ ID NO: 2302670 - RNA, 19 nt, Artificial Sequence
  Description of Artificial Sequence: Synthetic oligonucleotide
  Sense strand starting at position 3765 of SEQ ID NO: 1884927
uaauuuaggugugaaaguu

SEQ ID NO: 2302671 - RNA, 19 nt, Artificial Sequence
  Description of Artificial Sequence: Synthetic oligonucleotide
  Antisense strand to SEQ ID NO: 2302670
aacuuucacaccuaaauua

SEQ ID NO: 2302672 - RNA, 19 nt, Artificial Sequence
  Description of Artificial Sequence: Synthetic oligonucleotide
  Sense strand starting at position 3771 of SEQ ID NO: 1884927
aggugugaaaguugauuau

SEQ ID NO: 2302673 - RNA, 19 nt, Artificial Sequence
  Description of Artificial Sequence: Synthetic oligonucleotide
  Antisense strand to SEQ ID NO: 2302672
auaaucaacuuucacaccu

SEQ ID NO: 2302674 - RNA, 19 nt, Artificial Sequence
  Description of Artificial Sequence: Synthetic oligonucleotide
  Sense strand starting at position 3873 of SEQ ID NO: 1884927
ccaagaauguaauuaucug

SEQ ID NO: 2302675 - RNA, 19 nt, Artificial Sequence
  Description of Artificial Sequence: Synthetic oligonucleotide
  Antisense strand to SEQ ID NO: 2302674
cagauaauuacauucuugg

SEQ ID NO: 2302676 - RNA, 19 nt, Artificial Sequence
  Description of Artificial Sequence: Synthetic oligonucleotide
  Sense strand starting at position 3880 of SEQ ID NO: 1884927
uguaauuaucugcaagccu

SEQ ID NO: 2302677 - RNA, 19 nt, Artificial Sequence
  Description of Artificial Sequence: Synthetic oligonucleotide
  Antisense strand to SEQ ID NO: 2302676
aggcuugcagauaauuaca

SEQ ID NO: 2302678 - RNA, 19 nt, Artificial Sequence
  Description of Artificial Sequence: Synthetic oligonucleotide
  Sense strand starting at position 32 of SEQ ID NO: 1884928
aguucucaggagcauauaa

SEQ ID NO: 2302679 - RNA, 19 nt, Artificial Sequence
  Description of Artificial Sequence: Synthetic oligonucleotide
  Antisense strand to SEQ ID NO: 2302678
uuauaugcuccugagaacu

SEQ ID NO: 2302680 - RNA, 19 nt, Artificial Sequence
  Description of Artificial Sequence: Synthetic oligonucleotide
  Sense strand starting at position 356 of SEQ ID NO: 1884928
ccaguuauaaagugugaga

SEQ ID NO: 2302681 - RNA, 19 nt, Artificial Sequence
  Description of Artificial Sequence: Synthetic oligonucleotide
  Antisense strand to SEQ ID NO: 2302680
ucucacacuuuauaacugg

SEQ ID NO: 2302682 - RNA, 19 nt, Artificial Sequence
  Description of Artificial Sequence: Synthetic oligonucleotide
  Sense strand starting at position 358 of SEQ ID NO: 1884928
aguuauaaagugugagaac

SEQ ID NO: 2302683 - RNA, 19 nt, Artificial Sequence
  Description of Artificial Sequence: Synthetic oligonucleotide
  Antisense strand to SEQ ID NO: 2302682
guucucacacuuuauaacu

SEQ ID NO: 2302684 - RNA, 19 nt, Artificial Sequence
  Description of Artificial Sequence: Synthetic oligonucleotide
  Sense strand starting at position 606 of SEQ ID NO: 1884928
uuguguguccuucugcaua

SEQ ID NO: 2302685 - RNA, 19 nt, Artificial Sequence
  Description of Artificial Sequence: Synthetic oligonucleotide
  Antisense strand to SEQ ID NO: 2302684
uaugcagaaggacacacaa

SEQ ID NO: 2302686 - RNA, 19 nt, Artificial Sequence
  Description of Artificial Sequence: Synthetic oligonucleotide
  Sense strand starting at position 611 of SEQ ID NO: 1884928
uguccuucugcauacagaa

SEQ ID NO: 2302687 - RNA, 19 nt, Artificial Sequence
  Description of Artificial Sequence: Synthetic oligonucleotide
  Antisense strand to SEQ ID NO: 2302686
uucuguaugcagaaggaca

SEQ ID NO: 2302688 - RNA, 19 nt, Artificial Sequence
  Description of Artificial Sequence: Synthetic oligonucleotide
  Sense strand starting at position 676 of SEQ ID NO: 1884928
ugucauuucuucucuguga

SEQ ID NO: 2302689 - RNA, 19 nt, Artificial Sequence
  Description of Artificial Sequence: Synthetic oligonucleotide
  Antisense strand to SEQ ID NO: 2302688
ucacagagaagaaaugaca

SEQ ID NO: 2302690 - RNA, 19 nt, Artificial Sequence
  Description of Artificial Sequence: Synthetic oligonucleotide
  Sense strand starting at position 677 of SEQ ID NO: 1884928
gucauuucuucucugugau

SEQ ID NO: 2302691 - RNA, 19 nt, Artificial Sequence
  Description of Artificial Sequence: Synthetic oligonucleotide
  Antisense strand to SEQ ID NO: 2302690
aucacagagaagaaaugac

SEQ ID NO: 2302692 - RNA, 19 nt, Artificial Sequence
  Description of Artificial Sequence: Synthetic oligonucleotide
  Sense strand starting at position 808 of SEQ ID NO: 1884928
gggauuugcuuuguuaggu

SEQ ID NO: 2302693 - RNA, 19 nt, Artificial Sequence
  Description of Artificial Sequence: Synthetic oligonucleotide
  Antisense strand to SEQ ID NO: 2302692
accuaacaaagcaaauccc

SEQ ID NO: 2302694 - RNA, 19 nt, Artificial Sequence
  Description of Artificial Sequence: Synthetic oligonucleotide
  Sense strand starting at position 809 of SEQ ID NO: 1884928
ggauuugcuuuguuaggua

SEQ ID NO: 2302695 - RNA, 19 nt, Artificial Sequence
  Description of Artificial Sequence: Synthetic oligonucleotide
  Antisense strand to SEQ ID NO: 2302694
uaccuaacaaagcaaaucc

SEQ ID NO: 2302696 - RNA, 19 nt, Artificial Sequence
  Description of Artificial Sequence: Synthetic oligonucleotide
  Sense strand starting at position 814 of SEQ ID NO: 1884928
ugcuuuguuagguagaaag

SEQ ID NO: 2302697 - RNA, 19 nt, Artificial Sequence
  Description of Artificial Sequence: Synthetic oligonucleotide
  Antisense strand to SEQ ID NO: 2302696
cuuucuaccuaacaaagca

SEQ ID NO: 2302698 - RNA, 19 nt, Artificial Sequence
  Description of Artificial Sequence: Synthetic oligonucleotide
  Sense strand starting at position 816 of SEQ ID NO: 1884928
cuuuguuagguagaaagcu

SEQ ID NO: 2302699 - RNA, 19 nt, Artificial Sequence
  Description of Artificial Sequence: Synthetic oligonucleotide
  Antisense strand to SEQ ID NO: 2302698
agcuuucuaccuaacaaag

SEQ ID NO: 2302700 - RNA, 19 nt, Artificial Sequence
  Description of Artificial Sequence: Synthetic oligonucleotide
  Sense strand starting at position 984 of SEQ ID NO: 1884928
uaaacauaugagugaggcu

SEQ ID NO: 2302701 - RNA, 19 nt, Artificial Sequence
  Description of Artificial Sequence: Synthetic oligonucleotide
  Antisense strand to SEQ ID NO: 2302700
agccucacucauauguuua

SEQ ID NO: 2302702 - RNA, 19 nt, Artificial Sequence
  Description of Artificial Sequence: Synthetic oligonucleotide
  Sense strand starting at position 1153 of SEQ ID NO: 1884928
agaaucuugugguuuaaac

SEQ ID NO: 2302703 - RNA, 19 nt, Artificial Sequence
  Description of Artificial Sequence: Synthetic oligonucleotide
  Antisense strand to SEQ ID NO: 2302702
guuuaaaccacaagauucu

SEQ ID NO: 2302704 - RNA, 19 nt, Artificial Sequence
  Description of Artificial Sequence: Synthetic oligonucleotide
  Sense strand starting at position 1579 of SEQ ID NO: 1884928
ccaguaaccauguggaaug

SEQ ID NO: 2302705 - RNA, 19 nt, Artificial Sequence
  Description of Artificial Sequence: Synthetic oligonucleotide
  Antisense strand to SEQ ID NO: 2302704
cauuccacaugguuacugg

SEQ ID NO: 2302706 - RNA, 19 nt, Artificial Sequence
  Description of Artificial Sequence: Synthetic oligonucleotide
  Sense strand starting at position 1584 of SEQ ID NO: 1884928
aaccauguggaauguguaa

SEQ ID NO: 2302707 - RNA, 19 nt, Artificial Sequence
  Description of Artificial Sequence: Synthetic oligonucleotide
  Antisense strand to SEQ ID NO: 2302706
uuacacauuccacaugguu

SEQ ID NO: 2302708 - RNA, 19 nt, Artificial Sequence
  Description of Artificial Sequence: Synthetic oligonucleotide
  Sense strand starting at position 1595 of SEQ ID NO: 1884928
auguguaaggaaugguuau

SEQ ID NO: 2302709 - RNA, 19 nt, Artificial Sequence
  Description of Artificial Sequence: Synthetic oligonucleotide
  Antisense strand to SEQ ID NO: 2302708
auaaccauuccuuacacau

SEQ ID NO: 2302710 - RNA, 19 nt, Artificial Sequence
  Description of Artificial Sequence: Synthetic oligonucleotide
  Sense strand starting at position 1596 of SEQ ID NO: 1884928
uguguaaggaaugguuaua

SEQ ID NO: 2302711 - RNA, 19 nt, Artificial Sequence
  Description of Artificial Sequence: Synthetic oligonucleotide
  Antisense strand to SEQ ID NO: 2302710
uauaaccauuccuuacaca

SEQ ID NO: 2302712 - RNA, 19 nt, Artificial Sequence
  Description of Artificial Sequence: Synthetic oligonucleotide
  Sense strand starting at position 2208 of SEQ ID NO: 1884928
auuuaagauuggcagauua

SEQ ID NO: 2302713 - RNA, 19 nt, Artificial Sequence
  Description of Artificial Sequence: Synthetic oligonucleotide
  Antisense strand to SEQ ID NO: 2302712
uaaucugccaaucuuaaau

SEQ ID NO: 2302714 - RNA, 19 nt, Artificial Sequence
  Description of Artificial Sequence: Synthetic oligonucleotide
  Sense strand starting at position 2333 of SEQ ID NO: 1884928
cuggaaauauaucugguau

SEQ ID NO: 2302715 - RNA, 19 nt, Artificial Sequence
  Description of Artificial Sequence: Synthetic oligonucleotide
  Antisense strand to SEQ ID NO: 2302714
auaccagauauauuuccag

SEQ ID NO: 2302716 - RNA, 19 nt, Artificial Sequence
  Description of Artificial Sequence: Synthetic oligonucleotide
  Sense strand starting at position 2358 of SEQ ID NO: 1884928
cuggaaauauuugaaguau

SEQ ID NO: 2302717 - RNA, 19 nt, Artificial Sequence
  Description of Artificial Sequence: Synthetic oligonucleotide
  Antisense strand to SEQ ID NO: 2302716
auacuucaaauauuuccag

SEQ ID NO: 2302718 - RNA, 19 nt, Artificial Sequence
  Description of Artificial Sequence: Synthetic oligonucleotide
  Sense strand starting at position 2540 of SEQ ID NO: 1884928
acugguacaugucugagaa

SEQ ID NO: 2302719 - RNA, 19 nt, Artificial Sequence
  Description of Artificial Sequence: Synthetic oligonucleotide
  Antisense strand to SEQ ID NO: 2302718
uucucagacauguaccagu

SEQ ID NO: 2302720 - RNA, 19 nt, Artificial Sequence
  Description of Artificial Sequence: Synthetic oligonucleotide
  Sense strand starting at position 2541 of SEQ ID NO: 1884928
cugguacaugucugagaau

SEQ ID NO: 2302721 - RNA, 19 nt, Artificial Sequence
  Description of Artificial Sequence: Synthetic oligonucleotide
  Antisense strand to SEQ ID NO: 2302720
auucucagacauguaccag

SEQ ID NO: 2302722 - RNA, 19 nt, Artificial Sequence
  Description of Artificial Sequence: Synthetic oligonucleotide
  Sense strand starting at position 2560 of SEQ ID NO: 1884928
cugaaagaguaguuaucau

SEQ ID NO: 2302723 - RNA, 19 nt, Artificial Sequence
  Description of Artificial Sequence: Synthetic oligonucleotide
  Antisense strand to SEQ ID NO: 2302722
augauaacuacucuuucag

SEQ ID NO: 2302724 - RNA, 19 nt, Artificial Sequence
  Description of Artificial Sequence: Synthetic oligonucleotide
  Sense strand starting at position 2780 of SEQ ID NO: 1884928
ugucaugugagauauauug

SEQ ID NO: 2302725 - RNA, 19 nt, Artificial Sequence
  Description of Artificial Sequence: Synthetic oligonucleotide
  Antisense strand to SEQ ID NO: 2302724
caauauaucucacaugaca

SEQ ID NO: 2302726 - RNA, 19 nt, Artificial Sequence
  Description of Artificial Sequence: Synthetic oligonucleotide
  Sense strand starting at position 2848 of SEQ ID NO: 1884928
cuccacuaggucuaggauu

SEQ ID NO: 2302727 - RNA, 19 nt, Artificial Sequence
  Description of Artificial Sequence: Synthetic oligonucleotide
  Antisense strand to SEQ ID NO: 2302726
aauccuagaccuaguggag

SEQ ID NO: 2302728 - RNA, 19 nt, Artificial Sequence
  Description of Artificial Sequence: Synthetic oligonucleotide
  Sense strand starting at position 2998 of SEQ ID NO: 1884928
guacuugucaggcaaggaa

SEQ ID NO: 2302729 - RNA, 19 nt, Artificial Sequence
  Description of Artificial Sequence: Synthetic oligonucleotide
  Antisense strand to SEQ ID NO: 2302728
uuccuugccugacaaguac

SEQ ID NO: 2302730 - RNA, 19 nt, Artificial Sequence
  Description of Artificial Sequence: Synthetic oligonucleotide
  Sense strand starting at position 3025 of SEQ ID NO: 1884928
accugaugaaagugcugaa

SEQ ID NO: 2302731 - RNA, 19 nt, Artificial Sequence
  Description of Artificial Sequence: Synthetic oligonucleotide
  Antisense strand to SEQ ID NO: 2302730
uucagcacuuucaucaggu

SEQ ID NO: 2302732 - RNA, 19 nt, Artificial Sequence
  Description of Artificial Sequence: Synthetic oligonucleotide
  Sense strand starting at position 3047 of SEQ ID NO: 1884928
agccuauagagauguuaag

SEQ ID NO: 2302733 - RNA, 19 nt, Artificial Sequence
  Description of Artificial Sequence: Synthetic oligonucleotide
  Antisense strand to SEQ ID NO: 2302732
cuuaacaucucuauaggcu

SEQ ID NO: 2302734 - RNA, 19 nt, Artificial Sequence
  Description of Artificial Sequence: Synthetic oligonucleotide
  Sense strand starting at position 3057 of SEQ ID NO: 1884928
gauguuaaggaaggauguu

SEQ ID NO: 2302735 - RNA, 19 nt, Artificial Sequence
  Description of Artificial Sequence: Synthetic oligonucleotide
  Antisense strand to SEQ ID NO: 2302734
aacauccuuccuuaacauc

SEQ ID NO: 2302736 - RNA, 19 nt, Artificial Sequence
  Description of Artificial Sequence: Synthetic oligonucleotide
  Sense strand starting at position 3180 of SEQ ID NO: 1884928
uagaucacuguauggaauu

SEQ ID NO: 2302737 - RNA, 19 nt, Artificial Sequence
  Description of Artificial Sequence: Synthetic oligonucleotide
  Antisense strand to SEQ ID NO: 2302736
aauuccauacagugaucua

SEQ ID NO: 2302738 - RNA, 19 nt, Artificial Sequence
  Description of Artificial Sequence: Synthetic oligonucleotide
  Sense strand starting at position 3227 of SEQ ID NO: 1884928
ccauuugauuguucgguua

SEQ ID NO: 2302739 - RNA, 19 nt, Artificial Sequence
  Description of Artificial Sequence: Synthetic oligonucleotide
  Antisense strand to SEQ ID NO: 2302738
uaaccgaacaaucaaaugg

SEQ ID NO: 2302740 - RNA, 19 nt, Artificial Sequence
  Description of Artificial Sequence: Synthetic oligonucleotide
  Sense strand starting at position 3262 of SEQ ID NO: 1884928
cuuacuuauggucagucau

SEQ ID NO: 2302741 - RNA, 19 nt, Artificial Sequence
  Description of Artificial Sequence: Synthetic oligonucleotide
  Antisense strand to SEQ ID NO: 2302740
augacugaccauaaguaag

SEQ ID NO: 2302742 - RNA, 19 nt, Artificial Sequence
  Description of Artificial Sequence: Synthetic oligonucleotide
  Sense strand starting at position 3394 of SEQ ID NO: 1884928
ggaagugguugauucugga

SEQ ID NO: 2302743 - RNA, 19 nt, Artificial Sequence
  Description of Artificial Sequence: Synthetic oligonucleotide
  Antisense strand to SEQ ID NO: 2302742
uccagaaucaaccacuucc

SEQ ID NO: 2302744 - RNA, 19 nt, Artificial Sequence
  Description of Artificial Sequence: Synthetic oligonucleotide
  Sense strand starting at position 3401 of SEQ ID NO: 1884928
guugauucuggauaucuuu

SEQ ID NO: 2302745 - RNA, 19 nt, Artificial Sequence
  Description of Artificial Sequence: Synthetic oligonucleotide
  Antisense strand to SEQ ID NO: 2302744
aaagauauccagaaucaac

SEQ ID NO: 2302746 - RNA, 19 nt, Artificial Sequence
  Description of Artificial Sequence: Synthetic oligonucleotide
  Sense strand starting at position 3458 of SEQ ID NO: 1884928
guuugugaacuauagucua

SEQ ID NO: 2302747 - RNA, 19 nt, Artificial Sequence
  Description of Artificial Sequence: Synthetic oligonucleotide
  Antisense strand to SEQ ID NO: 2302746
uagacuauaguucacaaac

SEQ ID NO: 2302748 - RNA, 19 nt, Artificial Sequence
  Description of Artificial Sequence: Synthetic oligonucleotide
  Sense strand starting at position 3463 of SEQ ID NO: 1884928
ugaacuauagucuagucaa

SEQ ID NO: 2302749 - RNA, 19 nt, Artificial Sequence
  Description of Artificial Sequence: Synthetic oligonucleotide
  Antisense strand to SEQ ID NO: 2302748
uugacuagacuauaguuca

SEQ ID NO: 2302750 - RNA, 19 nt, Artificial Sequence
  Description of Artificial Sequence: Synthetic oligonucleotide
  Sense strand starting at position 3466 of SEQ ID NO: 1884928
acuauagucuagucaagaa

SEQ ID NO: 2302751 - RNA, 19 nt, Artificial Sequence
  Description of Artificial Sequence: Synthetic oligonucleotide
  Antisense strand to SEQ ID NO: 2302750
uucuugacuagacuauagu

SEQ ID NO: 2302752 - RNA, 19 nt, Artificial Sequence
  Description of Artificial Sequence: Synthetic oligonucleotide
  Sense strand starting at position 3642 of SEQ ID NO: 1884928
guauaauaucuugaguacu

SEQ ID NO: 2302753 - RNA, 19 nt, Artificial Sequence
  Description of Artificial Sequence: Synthetic oligonucleotide
  Antisense strand to SEQ ID NO: 2302752
aguacucaagauauuauac

SEQ ID NO: 2302754 - RNA, 19 nt, Artificial Sequence
  Description of Artificial Sequence: Synthetic oligonucleotide
  Sense strand starting at position 3841 of SEQ ID NO: 1884928
gauagauucccaugagucu

SEQ ID NO: 2302755 - RNA, 19 nt, Artificial Sequence
  Description of Artificial Sequence: Synthetic oligonucleotide
  Antisense strand to SEQ ID NO: 2302754
agacucaugggaaucuauc

SEQ ID NO: 2302756 - RNA, 19 nt, Artificial Sequence
  Description of Artificial Sequence: Synthetic oligonucleotide
  Sense strand starting at position 3842 of SEQ ID NO: 1884928
auagauucccaugagucuu

SEQ ID NO: 2302757 - RNA, 19 nt, Artificial Sequence
  Description of Artificial Sequence: Synthetic oligonucleotide
  Antisense strand to SEQ ID NO: 2302756
aagacucaugggaaucuau

SEQ ID NO: 2302758 - RNA, 19 nt, Artificial Sequence
  Description of Artificial Sequence: Synthetic oligonucleotide
  Sense strand starting at position 156 of SEQ ID NO: 1884929
guaacagaauuguuccaug

SEQ ID NO: 2302759 - RNA, 19 nt, Artificial Sequence
  Description of Artificial Sequence: Synthetic oligonucleotide
  Antisense strand to SEQ ID NO: 2302758
cauggaacaauucuguuac

SEQ ID NO: 2302760 - RNA, 19 nt, Artificial Sequence
  Description of Artificial Sequence: Synthetic oligonucleotide
  Sense strand starting at position 161 of SEQ ID NO: 1884929
agaauuguuccaugaaauu

SEQ ID NO: 2302761 - RNA, 19 nt, Artificial Sequence
  Description of Artificial Sequence: Synthetic oligonucleotide
  Antisense strand to SEQ ID NO: 2302760
aauuucauggaacaauucu

SEQ ID NO: 2302762 - RNA, 19 nt, Artificial Sequence
  Description of Artificial Sequence: Synthetic oligonucleotide
  Sense strand starting at position 264 of SEQ ID NO: 1884929
uuaagauucuagcuguaac

SEQ ID NO: 2302763 - RNA, 19 nt, Artificial Sequence
  Description of Artificial Sequence: Synthetic oligonucleotide
  Antisense strand to SEQ ID NO: 2302762
guuacagcuagaaucuuaa

SEQ ID NO: 2302764 - RNA, 19 nt, Artificial Sequence
  Description of Artificial Sequence: Synthetic oligonucleotide
  Sense strand starting at position 267 of SEQ ID NO: 1884929
agauucuagcuguaacaug

SEQ ID NO: 2302765 - RNA, 19 nt, Artificial Sequence
  Description of Artificial Sequence: Synthetic oligonucleotide
  Antisense strand to SEQ ID NO: 2302764
cauguuacagcuagaaucu

SEQ ID NO: 2302766 - RNA, 19 nt, Artificial Sequence
  Description of Artificial Sequence: Synthetic oligonucleotide
  Sense strand starting at position 380 of SEQ ID NO: 1884929
ggaaguaaagccugaaauu

SEQ ID NO: 2302767 - RNA, 19 nt, Artificial Sequence
  Description of Artificial Sequence: Synthetic oligonucleotide
  Antisense strand to SEQ ID NO: 2302766
aauuucaggcuuuacuucc

SEQ ID NO: 2302768 - RNA, 19 nt, Artificial Sequence
  Description of Artificial Sequence: Synthetic oligonucleotide
  Sense strand starting at position 389 of SEQ ID NO: 1884929
gccugaaauuugguccugu

SEQ ID NO: 2302769 - RNA, 19 nt, Artificial Sequence
  Description of Artificial Sequence: Synthetic oligonucleotide
  Antisense strand to SEQ ID NO: 2302768
acaggaccaaauuucaggc

SEQ ID NO: 2302770 - RNA, 19 nt, Artificial Sequence
  Description of Artificial Sequence: Synthetic oligonucleotide
  Sense strand starting at position 406 of SEQ ID NO: 1884929
guccuaaggguauauguaa

SEQ ID NO: 2302771 - RNA, 19 nt, Artificial Sequence
  Description of Artificial Sequence: Synthetic oligonucleotide
  Antisense strand to SEQ ID NO: 2302770
uuacauauacccuuaggac

SEQ ID NO: 2302772 - RNA, 19 nt, Artificial Sequence
  Description of Artificial Sequence: Synthetic oligonucleotide
  Sense strand starting at position 560 of SEQ ID NO: 1884929
augcaccucggauacaaua

SEQ ID NO: 2302773 - RNA, 19 nt, Artificial Sequence
  Description of Artificial Sequence: Synthetic oligonucleotide
  Antisense strand to SEQ ID NO: 2302772
uauuguauccgaggugcau

SEQ ID NO: 2302774 - RNA, 19 nt, Artificial Sequence
  Description of Artificial Sequence: Synthetic oligonucleotide
  Sense strand starting at position 795 of SEQ ID NO: 1884929
ucaguuugcauguaagaug

SEQ ID NO: 2302775 - RNA, 19 nt, Artificial Sequence
  Description of Artificial Sequence: Synthetic oligonucleotide
  Antisense strand to SEQ ID NO: 2302774
caucuuacaugcaaacuga

SEQ ID NO: 2302776 - RNA, 19 nt, Artificial Sequence
  Description of Artificial Sequence: Synthetic oligonucleotide
  Sense strand starting at position 802 of SEQ ID NO: 1884929
gcauguaagaugcaaagga

SEQ ID NO: 2302777 - RNA, 19 nt, Artificial Sequence
  Description of Artificial Sequence: Synthetic oligonucleotide
  Antisense strand to SEQ ID NO: 2302776
uccuuugcaucuuacaugc

SEQ ID NO: 2302778 - RNA, 19 nt, Artificial Sequence
  Description of Artificial Sequence: Synthetic oligonucleotide
  Sense strand starting at position 1133 of SEQ ID NO: 1884929
ugggaauuggagugcucuu

SEQ ID NO: 2302779 - RNA, 19 nt, Artificial Sequence
  Description of Artificial Sequence: Synthetic oligonucleotide
  Antisense strand to SEQ ID NO: 2302778
aagagcacuccaauuccca

SEQ ID NO: 2302780 - RNA, 19 nt, Artificial Sequence
  Description of Artificial Sequence: Synthetic oligonucleotide
  Sense strand starting at position 1220 of SEQ ID NO: 1884929
gaguuacuauggccugaaa

SEQ ID NO: 2302781 - RNA, 19 nt, Artificial Sequence
  Description of Artificial Sequence: Synthetic oligonucleotide
  Antisense strand to SEQ ID NO: 2302780
uuucaggccauaguaacuc

SEQ ID NO: 2302782 - RNA, 19 nt, Artificial Sequence
  Description of Artificial Sequence: Synthetic oligonucleotide
  Sense strand starting at position 1222 of SEQ ID NO: 1884929
guuacuauggccugaaagg

SEQ ID NO: 2302783 - RNA, 19 nt, Artificial Sequence
  Description of Artificial Sequence: Synthetic oligonucleotide
  Antisense strand to SEQ ID NO: 2302782
ccuuucaggccauaguaac

SEQ ID NO: 2302784 - RNA, 19 nt, Artificial Sequence
  Description of Artificial Sequence: Synthetic oligonucleotide
  Sense strand starting at position 1256 of SEQ ID NO: 1884929
gacuuaaauugggcuuaga

SEQ ID NO: 2302785 - RNA, 19 nt, Artificial Sequence
  Description of Artificial Sequence: Synthetic oligonucleotide
  Antisense strand to SEQ ID NO: 2302784
ucuaagcccaauuuaaguc

SEQ ID NO: 2302786 - RNA, 19 nt, Artificial Sequence
  Description of Artificial Sequence: Synthetic oligonucleotide
  Sense strand starting at position 1308 of SEQ ID NO: 1884929
agggauauuucaggaagua

SEQ ID NO: 2302787 - RNA, 19 nt, Artificial Sequence
  Description of Artificial Sequence: Synthetic oligonucleotide
  Antisense strand to SEQ ID NO: 2302786
uacuuccugaaauaucccu

SEQ ID NO: 2302788 - RNA, 19 nt, Artificial Sequence
  Description of Artificial Sequence: Synthetic oligonucleotide
  Sense strand starting at position 1345 of SEQ ID NO: 1884929
ggacauucucaaggagucu

SEQ ID NO: 2302789 - RNA, 19 nt, Artificial Sequence
  Description of Artificial Sequence: Synthetic oligonucleotide
  Antisense strand to SEQ ID NO: 2302788
agacuccuugagaaugucc

SEQ ID NO: 2302790 - RNA, 19 nt, Artificial Sequence
  Description of Artificial Sequence: Synthetic oligonucleotide
  Sense strand starting at position 1354 of SEQ ID NO: 1884929
caaggagucuccgcaaaua

SEQ ID NO: 2302791 - RNA, 19 nt, Artificial Sequence
  Description of Artificial Sequence: Synthetic oligonucleotide
  Antisense strand to SEQ ID NO: 2302790
uauuugcggagacuccuug

SEQ ID NO: 2302792 - RNA, 19 nt, Artificial Sequence
  Description of Artificial Sequence: Synthetic oligonucleotide
  Sense strand starting at position 1508 of SEQ ID NO: 1884929
aggccaguuggucaauuga

SEQ ID NO: 2302793 - RNA, 19 nt, Artificial Sequence
  Description of Artificial Sequence: Synthetic oligonucleotide
  Antisense strand to SEQ ID NO: 2302792
ucaauugaccaacuggccu

SEQ ID NO: 2302794 - RNA, 19 nt, Artificial Sequence
  Description of Artificial Sequence: Synthetic oligonucleotide
  Sense strand starting at position 1610 of SEQ ID NO: 1884929
gcaagugggaacuauguuu

SEQ ID NO: 2302795 - RNA, 19 nt, Artificial Sequence
  Description of Artificial Sequence: Synthetic oligonucleotide
  Antisense strand to SEQ ID NO: 2302794
aaacauaguucccacuugc

SEQ ID NO: 2302796 - RNA, 19 nt, Artificial Sequence
  Description of Artificial Sequence: Synthetic oligonucleotide
  Sense strand starting at position 1619 of SEQ ID NO: 1884929
aacuauguuugauuggaag

SEQ ID NO: 2302797 - RNA, 19 nt, Artificial Sequence
  Description of Artificial Sequence: Synthetic oligonucleotide
  Antisense strand to SEQ ID NO: 2302796
cuuccaaucaaacauaguu

SEQ ID NO: 2302798 - RNA, 19 nt, Artificial Sequence
  Description of Artificial Sequence: Synthetic oligonucleotide
  Sense strand starting at position 1621 of SEQ ID NO: 1884929
cuauguuugauuggaaguc

SEQ ID NO: 2302799 - RNA, 19 nt, Artificial Sequence
  Description of Artificial Sequence: Synthetic oligonucleotide
  Antisense strand to SEQ ID NO: 2302798
gacuuccaaucaaacauag

SEQ ID NO: 2302800 - RNA, 19 nt, Artificial Sequence
  Description of Artificial Sequence: Synthetic oligonucleotide
  Sense strand starting at position 2121 of SEQ ID NO: 1884929
caaugauucccacgggaga

SEQ ID NO: 2302801 - RNA, 19 nt, Artificial Sequence
  Description of Artificial Sequence: Synthetic oligonucleotide
  Antisense strand to SEQ ID NO: 2302800
ucucccgugggaaucauug

SEQ ID NO: 2302802 - RNA, 19 nt, Artificial Sequence
  Description of Artificial Sequence: Synthetic oligonucleotide
  Sense strand starting at position 2159 of SEQ ID NO: 1884929
uuuggcaauccucacagua

SEQ ID NO: 2302803 - RNA, 19 nt, Artificial Sequence
  Description of Artificial Sequence: Synthetic oligonucleotide
  Antisense strand to SEQ ID NO: 2302802
uacugugaggauugccaaa

SEQ ID NO: 2302804 - RNA, 19 nt, Artificial Sequence
  Description of Artificial Sequence: Synthetic oligonucleotide
  Sense strand starting at position 2351 of SEQ ID NO: 1884929
aagaaagccuguuugacua

SEQ ID NO: 2302805 - RNA, 19 nt, Artificial Sequence
  Description of Artificial Sequence: Synthetic oligonucleotide
  Antisense strand to SEQ ID NO: 2302804
uagucaaacaggcuuucuu

SEQ ID NO: 2302806 - RNA, 19 nt, Artificial Sequence
  Description of Artificial Sequence: Synthetic oligonucleotide
  Sense strand starting at position 2472 of SEQ ID NO: 1884929
ucaucuuuagcacaggaua

SEQ ID NO: 2302807 - RNA, 19 nt, Artificial Sequence
  Description of Artificial Sequence: Synthetic oligonucleotide
  Antisense strand to SEQ ID NO: 2302806
uauccugugcuaaagauga

SEQ ID NO: 2302808 - RNA, 19 nt, Artificial Sequence
  Description of Artificial Sequence: Synthetic oligonucleotide
  Sense strand starting at position 2733 of SEQ ID NO: 1884929
acaagaaguuucuuuaagu

SEQ ID NO: 2302809 - RNA, 19 nt, Artificial Sequence
  Description of Artificial Sequence: Synthetic oligonucleotide
  Antisense strand to SEQ ID NO: 2302808
acuuaaagaaacuucuugu

SEQ ID NO: 2302810 - RNA, 19 nt, Artificial Sequence
  Description of Artificial Sequence: Synthetic oligonucleotide
  Sense strand starting at position 2734 of SEQ ID NO: 1884929
caagaaguuucuuuaagug

SEQ ID NO: 2302811 - RNA, 19 nt, Artificial Sequence
  Description of Artificial Sequence: Synthetic oligonucleotide
  Antisense strand to SEQ ID NO: 2302810
cacuuaaagaaacuucuug

SEQ ID NO: 2302812 - RNA, 19 nt, Artificial Sequence
  Description of Artificial Sequence: Synthetic oligonucleotide
  Sense strand starting at position 2844 of SEQ ID NO: 1884929
ucuugauaucuuuggacua

SEQ ID NO: 2302813 - RNA, 19 nt, Artificial Sequence
  Description of Artificial Sequence: Synthetic oligonucleotide
  Antisense strand to SEQ ID NO: 2302812
uaguccaaagauaucaaga

SEQ ID NO: 2302814 - RNA, 19 nt, Artificial Sequence
  Description of Artificial Sequence: Synthetic oligonucleotide
  Sense strand starting at position 2921 of SEQ ID NO: 1884929
acauccucagcuuaaguga

SEQ ID NO: 2302815 - RNA, 19 nt, Artificial Sequence
  Description of Artificial Sequence: Synthetic oligonucleotide
  Antisense strand to SEQ ID NO: 2302814
ucacuuaagcugaggaugu

SEQ ID NO: 2302816 - RNA, 19 nt, Artificial Sequence
  Description of Artificial Sequence: Synthetic oligonucleotide
  Sense strand starting at position 2929 of SEQ ID NO: 1884929
agcuuaagugacuaucaga

SEQ ID NO: 2302817 - RNA, 19 nt, Artificial Sequence
  Description of Artificial Sequence: Synthetic oligonucleotide
  Antisense strand to SEQ ID NO: 2302816
ucugauagucacuuaagcu

SEQ ID NO: 2302818 - RNA, 19 nt, Artificial Sequence
  Description of Artificial Sequence: Synthetic oligonucleotide
  Sense strand starting at position 2949 of SEQ ID NO: 1884929
acugacuuauaucugugaa

SEQ ID NO: 2302819 - RNA, 19 nt, Artificial Sequence
  Description of Artificial Sequence: Synthetic oligonucleotide
  Antisense strand to SEQ ID NO: 2302818
uucacagauauaagucagu

SEQ ID NO: 2302820 - RNA, 19 nt, Artificial Sequence
  Description of Artificial Sequence: Synthetic oligonucleotide
  Sense strand starting at position 2951 of SEQ ID NO: 1884929
ugacuuauaucugugaauu

SEQ ID NO: 2302821 - RNA, 19 nt, Artificial Sequence
  Description of Artificial Sequence: Synthetic oligonucleotide
  Antisense strand to SEQ ID NO: 2302820
aauucacagauauaaguca

SEQ ID NO: 2302822 - RNA, 19 nt, Artificial Sequence
  Description of Artificial Sequence: Synthetic oligonucleotide
  Sense strand starting at position 2998 of SEQ ID NO: 1884929
ucaauauggccuggcaaca

SEQ ID NO: 2302823 - RNA, 19 nt, Artificial Sequence
  Description of Artificial Sequence: Synthetic oligonucleotide
  Antisense strand to SEQ ID NO: 2302822
uguugccaggccauauuga

SEQ ID NO: 2302824 - RNA, 19 nt, Artificial Sequence
  Description of Artificial Sequence: Synthetic oligonucleotide
  Sense strand starting at position 3043 of SEQ ID NO: 1884929
gggugaugauuaucaaagc

SEQ ID NO: 2302825 - RNA, 19 nt, Artificial Sequence
  Description of Artificial Sequence: Synthetic oligonucleotide
  Antisense strand to SEQ ID NO: 2302824
gcuuugauaaucaucaccc

SEQ ID NO: 2302826 - RNA, 19 nt, Artificial Sequence
  Description of Artificial Sequence: Synthetic oligonucleotide
  Sense strand starting at position 3088 of SEQ ID NO: 1884929
ccaggagacauauguuaug

SEQ ID NO: 2302827 - RNA, 19 nt, Artificial Sequence
  Description of Artificial Sequence: Synthetic oligonucleotide
  Antisense strand to SEQ ID NO: 2302826
cauaacauaugucuccugg

SEQ ID NO: 2302828 - RNA, 19 nt, Artificial Sequence
  Description of Artificial Sequence: Synthetic oligonucleotide
  Sense strand starting at position 3097 of SEQ ID NO: 1884929
auauguuaugacuggcuaa

SEQ ID NO: 2302829 - RNA, 19 nt, Artificial Sequence
  Description of Artificial Sequence: Synthetic oligonucleotide
  Antisense strand to SEQ ID NO: 2302828
uuagccagucauaacauau

SEQ ID NO: 2302830 - RNA, 19 nt, Artificial Sequence
  Description of Artificial Sequence: Synthetic oligonucleotide
  Sense strand starting at position 3100 of SEQ ID NO: 1884929
uguuaugacuggcuaaaug

SEQ ID NO: 2302831 - RNA, 19 nt, Artificial Sequence
  Description of Artificial Sequence: Synthetic oligonucleotide
  Antisense strand to SEQ ID NO: 2302830
cauuuagccagucauaaca

SEQ ID NO: 2302832 - RNA, 19 nt, Artificial Sequence
  Description of Artificial Sequence: Synthetic oligonucleotide
  Sense strand starting at position 3233 of SEQ ID NO: 1884929
accauaauuugggauacag

SEQ ID NO: 2302833 - RNA, 19 nt, Artificial Sequence
  Description of Artificial Sequence: Synthetic oligonucleotide
  Antisense strand to SEQ ID NO: 2302832
cuguaucccaaauuauggu

SEQ ID NO: 2302834 - RNA, 19 nt, Artificial Sequence
  Description of Artificial Sequence: Synthetic oligonucleotide
  Sense strand starting at position 3413 of SEQ ID NO: 1884929
gcagguggaucacugugaa

SEQ ID NO: 2302835 - RNA, 19 nt, Artificial Sequence
  Description of Artificial Sequence: Synthetic oligonucleotide
  Antisense strand to SEQ ID NO: 2302834
uucacagugauccaccugc

SEQ ID NO: 2302836 - RNA, 19 nt, Artificial Sequence
  Description of Artificial Sequence: Synthetic oligonucleotide
  Sense strand starting at position 3856 of SEQ ID NO: 1884929
gcaagacuuuauccaaaga

SEQ ID NO: 2302837 - RNA, 19 nt, Artificial Sequence
  Description of Artificial Sequence: Synthetic oligonucleotide
  Antisense strand to SEQ ID NO: 2302836
ucuuuggauaaagucuugc

SEQ ID NO: 2302838 - RNA, 19 nt, Artificial Sequence
  Description of Artificial Sequence: Synthetic oligonucleotide
  Sense strand starting at position 15 of SEQ ID NO: 1884930
gcucguauugaccagguga

SEQ ID NO: 2302839 - RNA, 19 nt, Artificial Sequence
  Description of Artificial Sequence: Synthetic oligonucleotide
  Antisense strand to SEQ ID NO: 2302838
ucaccuggucaauacgagc

SEQ ID NO: 2302840 - RNA, 19 nt, Artificial Sequence
  Description of Artificial Sequence: Synthetic oligonucleotide
  Sense strand starting at position 17 of SEQ ID NO: 1884930
ucguauugaccaggugaua

SEQ ID NO: 2302841 - RNA, 19 nt, Artificial Sequence
  Description of Artificial Sequence: Synthetic oligonucleotide
  Antisense strand to SEQ ID NO: 2302840
uaucaccuggucaauacga

SEQ ID NO: 2302842 - RNA, 19 nt, Artificial Sequence
  Description of Artificial Sequence: Synthetic oligonucleotide
  Sense strand starting at position 42 of SEQ ID NO: 1884930
gaagaccaugucuggugaa

SEQ ID NO: 2302843 - RNA, 19 nt, Artificial Sequence
  Description of Artificial Sequence: Synthetic oligonucleotide
  Antisense strand to SEQ ID NO: 2302842
uucaccagacauggucuuc

SEQ ID NO: 2302844 - RNA, 19 nt, Artificial Sequence
  Description of Artificial Sequence: Synthetic oligonucleotide
  Sense strand starting at position 43 of SEQ ID NO: 1884930
aagaccaugucuggugaaa

SEQ ID NO: 2302845 - RNA, 19 nt, Artificial Sequence
  Description of Artificial Sequence: Synthetic oligonucleotide
  Antisense strand to SEQ ID NO: 2302844
uuucaccagacauggucuu

SEQ ID NO: 2302846 - RNA, 19 nt, Artificial Sequence
  Description of Artificial Sequence: Synthetic oligonucleotide
  Sense strand starting at position 45 of SEQ ID NO: 1884930
gaccaugucuggugaaacc

SEQ ID NO: 2302847 - RNA, 19 nt, Artificial Sequence
  Description of Artificial Sequence: Synthetic oligonucleotide
  Antisense strand to SEQ ID NO: 2302846
gguuucaccagacaugguc

SEQ ID NO: 2302848 - RNA, 19 nt, Artificial Sequence
  Description of Artificial Sequence: Synthetic oligonucleotide
  Sense strand starting at position 54 of SEQ ID NO: 1884930
uggugaaaccuuugcacug

SEQ ID NO: 2302849 - RNA, 19 nt, Artificial Sequence
  Description of Artificial Sequence: Synthetic oligonucleotide
  Antisense strand to SEQ ID NO: 2302848
cagugcaaagguuucacca

SEQ ID NO: 2302850 - RNA, 19 nt, Artificial Sequence
  Description of Artificial Sequence: Synthetic oligonucleotide
  Sense strand starting at position 80 of SEQ ID NO: 1884930
gccagcuaccugcaucauu

SEQ ID NO: 2302851 - RNA, 19 nt, Artificial Sequence
  Description of Artificial Sequence: Synthetic oligonucleotide
  Antisense strand to SEQ ID NO: 2302850
aaugaugcagguagcuggc

SEQ ID NO: 2302852 - RNA, 19 nt, Artificial Sequence
  Description of Artificial Sequence: Synthetic oligonucleotide
  Sense strand starting at position 94 of SEQ ID NO: 1884930
ucauuauuccagcagcugu

SEQ ID NO: 2302853 - RNA, 19 nt, Artificial Sequence
  Description of Artificial Sequence: Synthetic oligonucleotide
  Antisense strand to SEQ ID NO: 2302852
acagcugcuggaauaauga

SEQ ID NO: 2302854 - RNA, 19 nt, Artificial Sequence
  Description of Artificial Sequence: Synthetic oligonucleotide
  Sense strand starting at position 105 of SEQ ID NO: 1884930
gcagcuguccucguaacgu

SEQ ID NO: 2302855 - RNA, 19 nt, Artificial Sequence
  Description of Artificial Sequence: Synthetic oligonucleotide
  Antisense strand to SEQ ID NO: 2302854
acguuacgaggacagcugc

SEQ ID NO: 2302856 - RNA, 19 nt, Artificial Sequence
  Description of Artificial Sequence: Synthetic oligonucleotide
  Sense strand starting at position 115 of SEQ ID NO: 1884930
ucguaacgucgggaaacau

SEQ ID NO: 2302857 - RNA, 19 nt, Artificial Sequence
  Description of Artificial Sequence: Synthetic oligonucleotide
  Antisense strand to SEQ ID NO: 2302856
auguuucccgacguuacga

SEQ ID NO: 2302858 - RNA, 19 nt, Artificial Sequence
  Description of Artificial Sequence: Synthetic oligonucleotide
  Sense strand starting at position 155 of SEQ ID NO: 1884930
gcagaagaauacggcauuu

SEQ ID NO: 2302859 - RNA, 19 nt, Artificial Sequence
  Description of Artificial Sequence: Synthetic oligonucleotide
  Antisense strand to SEQ ID NO: 2302858
aaaugccguauucuucugc

SEQ ID NO: 2302860 - RNA, 19 nt, Artificial Sequence
  Description of Artificial Sequence: Synthetic oligonucleotide
  Sense strand starting at position 187 of SEQ ID NO: 1884930
gggaauggcuauugaucaa

SEQ ID NO: 2302861 - RNA, 19 nt, Artificial Sequence
  Description of Artificial Sequence: Synthetic oligonucleotide
  Antisense strand to SEQ ID NO: 2302860
uugaucaauagccauuccc

SEQ ID NO: 2302862 - RNA, 19 nt, Artificial Sequence
  Description of Artificial Sequence: Synthetic oligonucleotide
  Sense strand starting at position 239 of SEQ ID NO: 1884930
guaaucaccucccggauga

SEQ ID NO: 2302863 - RNA, 19 nt, Artificial Sequence
  Description of Artificial Sequence: Synthetic oligonucleotide
  Antisense strand to SEQ ID NO: 2302862
ucauccgggaggugauuac

SEQ ID NO: 2302864 - RNA, 19 nt, Artificial Sequence
  Description of Artificial Sequence: Synthetic oligonucleotide
  Sense strand starting at position 243 of SEQ ID NO: 1884930
ucaccucccggaugauuaa

SEQ ID NO: 2302865 - RNA, 19 nt, Artificial Sequence
  Description of Artificial Sequence: Synthetic oligonucleotide
  Antisense strand to SEQ ID NO: 2302864
uuaaucauccgggagguga

SEQ ID NO: 2302866 - RNA, 19 nt, Artificial Sequence
  Description of Artificial Sequence: Synthetic oligonucleotide
  Sense strand starting at position 273 of SEQ ID NO: 1884930
caggcucugucucagaaca

SEQ ID NO: 2302867 - RNA, 19 nt, Artificial Sequence
  Description of Artificial Sequence: Synthetic oligonucleotide
  Antisense strand to SEQ ID NO: 2302866
uguucugagacagagccug

SEQ ID NO: 2302868 - RNA, 19 nt, Artificial Sequence
  Description of Artificial Sequence: Synthetic oligonucleotide
  Sense strand starting at position 382 of SEQ ID NO: 1884930
ggauaaacauccugaggaa

SEQ ID NO: 2302869 - RNA, 19 nt, Artificial Sequence
  Description of Artificial Sequence: Synthetic oligonucleotide
  Antisense strand to SEQ ID NO: 2302868
uuccucaggauguuuaucc

SEQ ID NO: 2302870 - RNA, 19 nt, Artificial Sequence
  Description of Artificial Sequence: Synthetic oligonucleotide
  Sense strand starting at position 999 of SEQ ID NO: 1884930
cagagauaugcacacaugu

SEQ ID NO: 2302871 - RNA, 19 nt, Artificial Sequence
  Description of Artificial Sequence: Synthetic oligonucleotide
  Antisense strand to SEQ ID NO: 2302870
acaugugugcauaucucug

SEQ ID NO: 2302872 - RNA, 19 nt, Artificial Sequence
  Description of Artificial Sequence: Synthetic oligonucleotide
  Sense strand starting at position 1194 of SEQ ID NO: 1884930
caugcaugcgugcugacaa

SEQ ID NO: 2302873 - RNA, 19 nt, Artificial Sequence
  Description of Artificial Sequence: Synthetic oligonucleotide
  Antisense strand to SEQ ID NO: 2302872
uugucagcacgcaugcaug

SEQ ID NO: 2302874 - RNA, 19 nt, Artificial Sequence
  Description of Artificial Sequence: Synthetic oligonucleotide
  Sense strand starting at position 1320 of SEQ ID NO: 1884930
uuacucaucucuguaugga

SEQ ID NO: 2302875 - RNA, 19 nt, Artificial Sequence
  Description of Artificial Sequence: Synthetic oligonucleotide
  Antisense strand to SEQ ID NO: 2302874
uccauacagagaugaguaa

SEQ ID NO: 2302876 - RNA, 19 nt, Artificial Sequence
  Description of Artificial Sequence: Synthetic oligonucleotide
  Sense strand starting at position 1383 of SEQ ID NO: 1884930
ucacucaucccgcaaaugu

SEQ ID NO: 2302877 - RNA, 19 nt, Artificial Sequence
  Description of Artificial Sequence: Synthetic oligonucleotide
  Antisense strand to SEQ ID NO: 2302876
acauuugcgggaugaguga

SEQ ID NO: 2302878 - RNA, 19 nt, Artificial Sequence
  Description of Artificial Sequence: Synthetic oligonucleotide
  Sense strand starting at position 1393 of SEQ ID NO: 1884930
cgcaaauguuuacugaaca

SEQ ID NO: 2302879 - RNA, 19 nt, Artificial Sequence
  Description of Artificial Sequence: Synthetic oligonucleotide
  Antisense strand to SEQ ID NO: 2302878
uguucaguaaacauuugcg

SEQ ID NO: 2302880 - RNA, 19 nt, Artificial Sequence
  Description of Artificial Sequence: Synthetic oligonucleotide
  Sense strand starting at position 1412 of SEQ ID NO: 1884930
ccagcuauguguccaaucu

SEQ ID NO: 2302881 - RNA, 19 nt, Artificial Sequence
  Description of Artificial Sequence: Synthetic oligonucleotide
  Antisense strand to SEQ ID NO: 2302880
agauuggacacauagcugg

SEQ ID NO: 2302882 - RNA, 19 nt, Artificial Sequence
  Description of Artificial Sequence: Synthetic oligonucleotide
  Sense strand starting at position 1421 of SEQ ID NO: 1884930
uguccaaucucugggaaca

SEQ ID NO: 2302883 - RNA, 19 nt, Artificial Sequence
  Description of Artificial Sequence: Synthetic oligonucleotide
  Antisense strand to SEQ ID NO: 2302882
uguucccagagauuggaca

SEQ ID NO: 2302884 - RNA, 19 nt, Artificial Sequence
  Description of Artificial Sequence: Synthetic oligonucleotide
  Sense strand starting at position 1422 of SEQ ID NO: 1884930
guccaaucucugggaacac

SEQ ID NO: 2302885 - RNA, 19 nt, Artificial Sequence
  Description of Artificial Sequence: Synthetic oligonucleotide
  Antisense strand to SEQ ID NO: 2302884
guguucccagagauuggac

SEQ ID NO: 2302886 - RNA, 19 nt, Artificial Sequence
  Description of Artificial Sequence: Synthetic oligonucleotide
  Sense strand starting at position 1423 of SEQ ID NO: 1884930
uccaaucucugggaacaca

SEQ ID NO: 2302887 - RNA, 19 nt, Artificial Sequence
  Description of Artificial Sequence: Synthetic oligonucleotide
  Antisense strand to SEQ ID NO: 2302886
uguguucccagagauugga

SEQ ID NO: 2302888 - RNA, 19 nt, Artificial Sequence
  Description of Artificial Sequence: Synthetic oligonucleotide
  Sense strand starting at position 1451 of SEQ ID NO: 1884930
ccugccuuugggugaaacu

SEQ ID NO: 2302889 - RNA, 19 nt, Artificial Sequence
  Description of Artificial Sequence: Synthetic oligonucleotide
  Antisense strand to SEQ ID NO: 2302888
aguuucacccaaaggcagg

SEQ ID NO: 2302890 - RNA, 19 nt, Artificial Sequence
  Description of Artificial Sequence: Synthetic oligonucleotide
  Sense strand starting at position 1488 of SEQ ID NO: 1884930
gcauucugccaguggaagu

SEQ ID NO: 2302891 - RNA, 19 nt, Artificial Sequence
  Description of Artificial Sequence: Synthetic oligonucleotide
  Antisense strand to SEQ ID NO: 2302890
acuuccacuggcagaaugc

SEQ ID NO: 2302892 - RNA, 19 nt, Artificial Sequence
  Description of Artificial Sequence: Synthetic oligonucleotide
  Sense strand starting at position 2658 of SEQ ID NO: 1884930
ccaggaagauccgaacuuu

SEQ ID NO: 2302893 - RNA, 19 nt, Artificial Sequence
  Description of Artificial Sequence: Synthetic oligonucleotide
  Antisense strand to SEQ ID NO: 2302892
aaaguucggaucuuccugg

SEQ ID NO: 2302894 - RNA, 19 nt, Artificial Sequence
  Description of Artificial Sequence: Synthetic oligonucleotide
  Sense strand starting at position 2670 of SEQ ID NO: 1884930
gaacuuugcugacggugaa

SEQ ID NO: 2302895 - RNA, 19 nt, Artificial Sequence
  Description of Artificial Sequence: Synthetic oligonucleotide
  Antisense strand to SEQ ID NO: 2302894
uucaccgucagcaaaguuc

SEQ ID NO: 2302896 - RNA, 19 nt, Artificial Sequence
  Description of Artificial Sequence: Synthetic oligonucleotide
  Sense strand starting at position 3136 of SEQ ID NO: 1884930
aaacuugcucuccgaggga

SEQ ID NO: 2302897 - RNA, 19 nt, Artificial Sequence
  Description of Artificial Sequence: Synthetic oligonucleotide
  Antisense strand to SEQ ID NO: 2302896
ucccucggagagcaaguuu

SEQ ID NO: 2302898 - RNA, 19 nt, Artificial Sequence
  Description of Artificial Sequence: Synthetic oligonucleotide
  Sense strand starting at position 3373 of SEQ ID NO: 1884930
cccaaaugcuucgaccacu

SEQ ID NO: 2302899 - RNA, 19 nt, Artificial Sequence
  Description of Artificial Sequence: Synthetic oligonucleotide
  Antisense strand to SEQ ID NO: 2302898
aguggucgaagcauuuggg

SEQ ID NO: 2302900 - RNA, 19 nt, Artificial Sequence
  Description of Artificial Sequence: Synthetic oligonucleotide
  Sense strand starting at position 3428 of SEQ ID NO: 1884930
ccgcguuagaaaguuguua

SEQ ID NO: 2302901 - RNA, 19 nt, Artificial Sequence
  Description of Artificial Sequence: Synthetic oligonucleotide
  Antisense strand to SEQ ID NO: 2302900
uaacaacuuucuaacgcgg

SEQ ID NO: 2302902 - RNA, 19 nt, Artificial Sequence
  Description of Artificial Sequence: Synthetic oligonucleotide
  Sense strand starting at position 3429 of SEQ ID NO: 1884930
cgcguuagaaaguuguuau

SEQ ID NO: 2302903 - RNA, 19 nt, Artificial Sequence
  Description of Artificial Sequence: Synthetic oligonucleotide
  Antisense strand to SEQ ID NO: 2302902
auaacaacuuucuaacgcg

SEQ ID NO: 2302904 - RNA, 19 nt, Artificial Sequence
  Description of Artificial Sequence: Synthetic oligonucleotide
  Sense strand starting at position 3430 of SEQ ID NO: 1884930
gcguuagaaaguuguuaug

SEQ ID NO: 2302905 - RNA, 19 nt, Artificial Sequence
  Description of Artificial Sequence: Synthetic oligonucleotide
  Antisense strand to SEQ ID NO: 2302904
cauaacaacuuucuaacgc

SEQ ID NO: 2302906 - RNA, 19 nt, Artificial Sequence
  Description of Artificial Sequence: Synthetic oligonucleotide
  Sense strand starting at position 3433 of SEQ ID NO: 1884930
uuagaaaguuguuauggga

SEQ ID NO: 2302907 - RNA, 19 nt, Artificial Sequence
  Description of Artificial Sequence: Synthetic oligonucleotide
  Antisense strand to SEQ ID NO: 2302906
ucccauaacaacuuucuaa

SEQ ID NO: 2302908 - RNA, 19 nt, Artificial Sequence
  Description of Artificial Sequence: Synthetic oligonucleotide
  Sense strand starting at position 3436 of SEQ ID NO: 1884930
gaaaguuguuaugggagaa

SEQ ID NO: 2302909 - RNA, 19 nt, Artificial Sequence
  Description of Artificial Sequence: Synthetic oligonucleotide
  Antisense strand to SEQ ID NO: 2302908
uucucccauaacaacuuuc

SEQ ID NO: 2302910 - RNA, 19 nt, Artificial Sequence
  Description of Artificial Sequence: Synthetic oligonucleotide
  Sense strand starting at position 3437 of SEQ ID NO: 1884930
aaaguuguuaugggagaag

SEQ ID NO: 2302911 - RNA, 19 nt, Artificial Sequence
  Description of Artificial Sequence: Synthetic oligonucleotide
  Antisense strand to SEQ ID NO: 2302910
cuucucccauaacaacuuu

SEQ ID NO: 2302912 - RNA, 19 nt, Artificial Sequence
  Description of Artificial Sequence: Synthetic oligonucleotide
  Sense strand starting at position 3440 of SEQ ID NO: 1884930
guuguuaugggagaagcuu

SEQ ID NO: 2302913 - RNA, 19 nt, Artificial Sequence
  Description of Artificial Sequence: Synthetic oligonucleotide
  Antisense strand to SEQ ID NO: 2302912
aagcuucucccauaacaac

SEQ ID NO: 2302914 - RNA, 19 nt, Artificial Sequence
  Description of Artificial Sequence: Synthetic oligonucleotide
  Sense strand starting at position 3592 of SEQ ID NO: 1884930
gggucuguuucaucacgag

SEQ ID NO: 2302915 - RNA, 19 nt, Artificial Sequence
  Description of Artificial Sequence: Synthetic oligonucleotide
  Antisense strand to SEQ ID NO: 2302914
cucgugaugaaacagaccc

SEQ ID NO: 2302916 - RNA, 19 nt, Artificial Sequence
  Description of Artificial Sequence: Synthetic oligonucleotide
  Sense strand starting at position 3805 of SEQ ID NO: 1884930
ccguuccgugccgaugauu

SEQ ID NO: 2302917 - RNA, 19 nt, Artificial Sequence
  Description of Artificial Sequence: Synthetic oligonucleotide
  Antisense strand to SEQ ID NO: 2302916
aaucaucggcacggaacgg

SEQ ID NO: 2302918 - RNA, 19 nt, Artificial Sequence
  Description of Artificial Sequence: Synthetic oligonucleotide
  Sense strand starting at position 33 of SEQ ID NO: 1884931
cuggaauauguauggcaau

SEQ ID NO: 2302919 - RNA, 19 nt, Artificial Sequence
  Description of Artificial Sequence: Synthetic oligonucleotide
  Antisense strand to SEQ ID NO: 2302918
auugccauacauauuccag

SEQ ID NO: 2302920 - RNA, 19 nt, Artificial Sequence
  Description of Artificial Sequence: Synthetic oligonucleotide
  Sense strand starting at position 221 of SEQ ID NO: 1884931
agaggcugcaucugaagau

SEQ ID NO: 2302921 - RNA, 19 nt, Artificial Sequence
  Description of Artificial Sequence: Synthetic oligonucleotide
  Antisense strand to SEQ ID NO: 2302920
aucuucagaugcagccucu

SEQ ID NO: 2302922 - RNA, 19 nt, Artificial Sequence
  Description of Artificial Sequence: Synthetic oligonucleotide
  Sense strand starting at position 381 of SEQ ID NO: 1884931
gcauccucaaguuaggaga

SEQ ID NO: 2302923 - RNA, 19 nt, Artificial Sequence
  Description of Artificial Sequence: Synthetic oligonucleotide
  Antisense strand to SEQ ID NO: 2302922
ucuccuaacuugaggaugc

SEQ ID NO: 2302924 - RNA, 19 nt, Artificial Sequence
  Description of Artificial Sequence: Synthetic oligonucleotide
  Sense strand starting at position 489 of SEQ ID NO: 1884931
caugguacucucugagacu

SEQ ID NO: 2302925 - RNA, 19 nt, Artificial Sequence
  Description of Artificial Sequence: Synthetic oligonucleotide
  Antisense strand to SEQ ID NO: 2302924
agucucagagaguaccaug

SEQ ID NO: 2302926 - RNA, 19 nt, Artificial Sequence
  Description of Artificial Sequence: Synthetic oligonucleotide
  Sense strand starting at position 508 of SEQ ID NO: 1884931
gcuggcaugguuuagggaa

SEQ ID NO: 2302927 - RNA, 19 nt, Artificial Sequence
  Description of Artificial Sequence: Synthetic oligonucleotide
  Antisense strand to SEQ ID NO: 2302926
uucccuaaaccaugccagc

SEQ ID NO: 2302928 - RNA, 19 nt, Artificial Sequence
  Description of Artificial Sequence: Synthetic oligonucleotide
  Sense strand starting at position 620 of SEQ ID NO: 1884931
uauagugugugauuuacuu

SEQ ID NO: 2302929 - RNA, 19 nt, Artificial Sequence
  Description of Artificial Sequence: Synthetic oligonucleotide
  Antisense strand to SEQ ID NO: 2302928
aaguaaaucacacacuaua

SEQ ID NO: 2302930 - RNA, 19 nt, Artificial Sequence
  Description of Artificial Sequence: Synthetic oligonucleotide
  Sense strand starting at position 624 of SEQ ID NO: 1884931
gugugugauuuacuucugu

SEQ ID NO: 2302931 - RNA, 19 nt, Artificial Sequence
  Description of Artificial Sequence: Synthetic oligonucleotide
  Antisense strand to SEQ ID NO: 2302930
acagaaguaaaucacacac

SEQ ID NO: 2302932 - RNA, 19 nt, Artificial Sequence
  Description of Artificial Sequence: Synthetic oligonucleotide
  Sense strand starting at position 693 of SEQ ID NO: 1884931
auccauugagcucauuaag

SEQ ID NO: 2302933 - RNA, 19 nt, Artificial Sequence
  Description of Artificial Sequence: Synthetic oligonucleotide
  Antisense strand to SEQ ID NO: 2302932
cuuaaugagcucaauggau

SEQ ID NO: 2302934 - RNA, 19 nt, Artificial Sequence
  Description of Artificial Sequence: Synthetic oligonucleotide
  Sense strand starting at position 880 of SEQ ID NO: 1884931
gaacaaauuuggugauuga

SEQ ID NO: 2302935 - RNA, 19 nt, Artificial Sequence
  Description of Artificial Sequence: Synthetic oligonucleotide
  Antisense strand to SEQ ID NO: 2302934
ucaaucaccaaauuuguuc

SEQ ID NO: 2302936 - RNA, 19 nt, Artificial Sequence
  Description of Artificial Sequence: Synthetic oligonucleotide
  Sense strand starting at position 931 of SEQ ID NO: 1884931
acuuauugcgaauagccau

SEQ ID NO: 2302937 - RNA, 19 nt, Artificial Sequence
  Description of Artificial Sequence: Synthetic oligonucleotide
  Antisense strand to SEQ ID NO: 2302936
auggcuauucgcaauaagu

SEQ ID NO: 2302938 - RNA, 19 nt, Artificial Sequence
  Description of Artificial Sequence: Synthetic oligonucleotide
  Sense strand starting at position 987 of SEQ ID NO: 1884931
ccaggaaaugcuggaagua

SEQ ID NO: 2302939 - RNA, 19 nt, Artificial Sequence
  Description of Artificial Sequence: Synthetic oligonucleotide
  Antisense strand to SEQ ID NO: 2302938
uacuuccagcauuuccugg

SEQ ID NO: 2302940 - RNA, 19 nt, Artificial Sequence
  Description of Artificial Sequence: Synthetic oligonucleotide
  Sense strand starting at position 999 of SEQ ID NO: 1884931
ggaaguauugcauagugua

SEQ ID NO: 2302941 - RNA, 19 nt, Artificial Sequence
  Description of Artificial Sequence: Synthetic oligonucleotide
  Antisense strand to SEQ ID NO: 2302940
uacacuaugcaauacuucc

SEQ ID NO: 2302942 - RNA, 19 nt, Artificial Sequence
  Description of Artificial Sequence: Synthetic oligonucleotide
  Sense strand starting at position 1006 of SEQ ID NO: 1884931
uugcauaguguaugggaaa

SEQ ID NO: 2302943 - RNA, 19 nt, Artificial Sequence
  Description of Artificial Sequence: Synthetic oligonucleotide
  Antisense strand to SEQ ID NO: 2302942
uuucccauacacuaugcaa

SEQ ID NO: 2302944 - RNA, 19 nt, Artificial Sequence
  Description of Artificial Sequence: Synthetic oligonucleotide
  Sense strand starting at position 1093 of SEQ ID NO: 1884931
uagauaagggauuguguac

SEQ ID NO: 2302945 - RNA, 19 nt, Artificial Sequence
  Description of Artificial Sequence: Synthetic oligonucleotide
  Antisense strand to SEQ ID NO: 2302944
guacacaaucccuuaucua

SEQ ID NO: 2302946 - RNA, 19 nt, Artificial Sequence
  Description of Artificial Sequence: Synthetic oligonucleotide
  Sense strand starting at position 1240 of SEQ ID NO: 1884931
cgcacauuuccaugccaau

SEQ ID NO: 2302947 - RNA, 19 nt, Artificial Sequence
  Description of Artificial Sequence: Synthetic oligonucleotide
  Antisense strand to SEQ ID NO: 2302946
auuggcauggaaaugugcg

SEQ ID NO: 2302948 - RNA, 19 nt, Artificial Sequence
  Description of Artificial Sequence: Synthetic oligonucleotide
  Sense strand starting at position 1297 of SEQ ID NO: 1884931
gugguuaauauaugcuaga

SEQ ID NO: 2302949 - RNA, 19 nt, Artificial Sequence
  Description of Artificial Sequence: Synthetic oligonucleotide
  Antisense strand to SEQ ID NO: 2302948
ucuagcauauauuaaccac

SEQ ID NO: 2302950 - RNA, 19 nt, Artificial Sequence
  Description of Artificial Sequence: Synthetic oligonucleotide
  Sense strand starting at position 1459 of SEQ ID NO: 1884931
ggaccucugccuuaguauu

SEQ ID NO: 2302951 - RNA, 19 nt, Artificial Sequence
  Description of Artificial Sequence: Synthetic oligonucleotide
  Antisense strand to SEQ ID NO: 2302950
aauacuaaggcagaggucc

SEQ ID NO: 2302952 - RNA, 19 nt, Artificial Sequence
  Description of Artificial Sequence: Synthetic oligonucleotide
  Sense strand starting at position 1682 of SEQ ID NO: 1884931
uggugucugguguauaaua

SEQ ID NO: 2302953 - RNA, 19 nt, Artificial Sequence
  Description of Artificial Sequence: Synthetic oligonucleotide
  Antisense strand to SEQ ID NO: 2302952
uauuauacaccagacacca

SEQ ID NO: 2302954 - RNA, 19 nt, Artificial Sequence
  Description of Artificial Sequence: Synthetic oligonucleotide
  Sense strand starting at position 1684 of SEQ ID NO: 1884931
gugucugguguauaauaac

SEQ ID NO: 2302955 - RNA, 19 nt, Artificial Sequence
  Description of Artificial Sequence: Synthetic oligonucleotide
  Antisense strand to SEQ ID NO: 2302954
guuauuauacaccagacac

SEQ ID NO: 2302956 - RNA, 19 nt, Artificial Sequence
  Description of Artificial Sequence: Synthetic oligonucleotide
  Sense strand starting at position 1690 of SEQ ID NO: 1884931
gguguauaauaacugguuu

SEQ ID NO: 2302957 - RNA, 19 nt, Artificial Sequence
  Description of Artificial Sequence: Synthetic oligonucleotide
  Antisense strand to SEQ ID NO: 2302956
aaaccaguuauuauacacc

SEQ ID NO: 2302958 - RNA, 19 nt, Artificial Sequence
  Description of Artificial Sequence: Synthetic oligonucleotide
  Sense strand starting at position 1710 of SEQ ID NO: 1884931
aguugauuauugccacaua

SEQ ID NO: 2302959 - RNA, 19 nt, Artificial Sequence
  Description of Artificial Sequence: Synthetic oligonucleotide
  Antisense strand to SEQ ID NO: 2302958
uauguggcaauaaucaacu

SEQ ID NO: 2302960 - RNA, 19 nt, Artificial Sequence
  Description of Artificial Sequence: Synthetic oligonucleotide
  Sense strand starting at position 2068 of SEQ ID NO: 1884931
auauccugucuuuggauga

SEQ ID NO: 2302961 - RNA, 19 nt, Artificial Sequence
  Description of Artificial Sequence: Synthetic oligonucleotide
  Antisense strand to SEQ ID NO: 2302960
ucauccaaagacaggauau

SEQ ID NO: 2302962 - RNA, 19 nt, Artificial Sequence
  Description of Artificial Sequence: Synthetic oligonucleotide
  Sense strand starting at position 2247 of SEQ ID NO: 1884931
auugcaucaggcuggaaau

SEQ ID NO: 2302963 - RNA, 19 nt, Artificial Sequence
  Description of Artificial Sequence: Synthetic oligonucleotide
  Antisense strand to SEQ ID NO: 2302962
auuuccagccugaugcaau

SEQ ID NO: 2302964 - RNA, 19 nt, Artificial Sequence
  Description of Artificial Sequence: Synthetic oligonucleotide
  Sense strand starting at position 2257 of SEQ ID NO: 1884931
gcuggaaauccacaaguuu

SEQ ID NO: 2302965 - RNA, 19 nt, Artificial Sequence
  Description of Artificial Sequence: Synthetic oligonucleotide
  Antisense strand to SEQ ID NO: 2302964
aaacuuguggauuuccagc

SEQ ID NO: 2302966 - RNA, 19 nt, Artificial Sequence
  Description of Artificial Sequence: Synthetic oligonucleotide
  Sense strand starting at position 2283 of SEQ ID NO: 1884931
cccucugguccagauacaa

SEQ ID NO: 2302967 - RNA, 19 nt, Artificial Sequence
  Description of Artificial Sequence: Synthetic oligonucleotide
  Antisense strand to SEQ ID NO: 2302966
uuguaucuggaccagaggg

SEQ ID NO: 2302968 - RNA, 19 nt, Artificial Sequence
  Description of Artificial Sequence: Synthetic oligonucleotide
  Sense strand starting at position 2338 of SEQ ID NO: 1884931
uccagaguucugugaacca

SEQ ID NO: 2302969 - RNA, 19 nt, Artificial Sequence
  Description of Artificial Sequence: Synthetic oligonucleotide
  Antisense strand to SEQ ID NO: 2302968
ugguucacagaacucugga

SEQ ID NO: 2302970 - RNA, 19 nt, Artificial Sequence
  Description of Artificial Sequence: Synthetic oligonucleotide
  Sense strand starting at position 2487 of SEQ ID NO: 1884931
gucugaagcaauugugaaa

SEQ ID NO: 2302971 - RNA, 19 nt, Artificial Sequence
  Description of Artificial Sequence: Synthetic oligonucleotide
  Antisense strand to SEQ ID NO: 2302970
uuucacaauugcuucagac

SEQ ID NO: 2302972 - RNA, 19 nt, Artificial Sequence
  Description of Artificial Sequence: Synthetic oligonucleotide
  Sense strand starting at position 2530 of SEQ ID NO: 1884931
cagggaauguucccugauu

SEQ ID NO: 2302973 - RNA, 19 nt, Artificial Sequence
  Description of Artificial Sequence: Synthetic oligonucleotide
  Antisense strand to SEQ ID NO: 2302972
aaucagggaacauucccug

SEQ ID NO: 2302974 - RNA, 19 nt, Artificial Sequence
  Description of Artificial Sequence: Synthetic oligonucleotide
  Sense strand starting at position 2531 of SEQ ID NO: 1884931
agggaauguucccugauua

SEQ ID NO: 2302975 - RNA, 19 nt, Artificial Sequence
  Description of Artificial Sequence: Synthetic oligonucleotide
  Antisense strand to SEQ ID NO: 2302974
uaaucagggaacauucccu

SEQ ID NO: 2302976 - RNA, 19 nt, Artificial Sequence
  Description of Artificial Sequence: Synthetic oligonucleotide
  Sense strand starting at position 2532 of SEQ ID NO: 1884931
gggaauguucccugauuag

SEQ ID NO: 2302977 - RNA, 19 nt, Artificial Sequence
  Description of Artificial Sequence: Synthetic oligonucleotide
  Antisense strand to SEQ ID NO: 2302976
cuaaucagggaacauuccc

SEQ ID NO: 2302978 - RNA, 19 nt, Artificial Sequence
  Description of Artificial Sequence: Synthetic oligonucleotide
  Sense strand starting at position 2569 of SEQ ID NO: 1884931
uggaguggcucucuaauua

SEQ ID NO: 2302979 - RNA, 19 nt, Artificial Sequence
  Description of Artificial Sequence: Synthetic oligonucleotide
  Antisense strand to SEQ ID NO: 2302978
uaauuagagagccacucca

SEQ ID NO: 2302980 - RNA, 19 nt, Artificial Sequence
  Description of Artificial Sequence: Synthetic oligonucleotide
  Sense strand starting at position 2573 of SEQ ID NO: 1884931
guggcucucuaauuaauuu

SEQ ID NO: 2302981 - RNA, 19 nt, Artificial Sequence
  Description of Artificial Sequence: Synthetic oligonucleotide
  Antisense strand to SEQ ID NO: 2302980
aaauuaauuagagagccac

SEQ ID NO: 2302982 - RNA, 19 nt, Artificial Sequence
  Description of Artificial Sequence: Synthetic oligonucleotide
  Sense strand starting at position 2733 of SEQ ID NO: 1884931
cauggagucuucuugaacu

SEQ ID NO: 2302983 - RNA, 19 nt, Artificial Sequence
  Description of Artificial Sequence: Synthetic oligonucleotide
  Antisense strand to SEQ ID NO: 2302982
aguucaagaagacuccaug

SEQ ID NO: 2302984 - RNA, 19 nt, Artificial Sequence
  Description of Artificial Sequence: Synthetic oligonucleotide
  Sense strand starting at position 2802 of SEQ ID NO: 1884931
ugggauuucuauggaucag

SEQ ID NO: 2302985 - RNA, 19 nt, Artificial Sequence
  Description of Artificial Sequence: Synthetic oligonucleotide
  Antisense strand to SEQ ID NO: 2302984
cugauccauagaaauccca

SEQ ID NO: 2302986 - RNA, 19 nt, Artificial Sequence
  Description of Artificial Sequence: Synthetic oligonucleotide
  Sense strand starting at position 2907 of SEQ ID NO: 1884931
gagugaugggucuggauuc

SEQ ID NO: 2302987 - RNA, 19 nt, Artificial Sequence
  Description of Artificial Sequence: Synthetic oligonucleotide
  Antisense strand to SEQ ID NO: 2302986
gaauccagacccaucacuc

SEQ ID NO: 2302988 - RNA, 19 nt, Artificial Sequence
  Description of Artificial Sequence: Synthetic oligonucleotide
  Sense strand starting at position 2973 of SEQ ID NO: 1884931
gaaaucauucuggguuauu

SEQ ID NO: 2302989 - RNA, 19 nt, Artificial Sequence
  Description of Artificial Sequence: Synthetic oligonucleotide
  Antisense strand to SEQ ID NO: 2302988
aauaacccagaaugauuuc

SEQ ID NO: 2302990 - RNA, 19 nt, Artificial Sequence
  Description of Artificial Sequence: Synthetic oligonucleotide
  Sense strand starting at position 3049 of SEQ ID NO: 1884931
uauugacugucuucuggaa

SEQ ID NO: 2302991 - RNA, 19 nt, Artificial Sequence
  Description of Artificial Sequence: Synthetic oligonucleotide
  Antisense strand to SEQ ID NO: 2302990
uuccagaagacagucaaua

SEQ ID NO: 2302992 - RNA, 19 nt, Artificial Sequence
  Description of Artificial Sequence: Synthetic oligonucleotide
  Sense strand starting at position 3607 of SEQ ID NO: 1884931
gcaugcauccuggaaaucu

SEQ ID NO: 2302993 - RNA, 19 nt, Artificial Sequence
  Description of Artificial Sequence: Synthetic oligonucleotide
  Antisense strand to SEQ ID NO: 2302992
agauuuccaggaugcaugc

SEQ ID NO: 2302994 - RNA, 19 nt, Artificial Sequence
  Description of Artificial Sequence: Synthetic oligonucleotide
  Sense strand starting at position 3631 of SEQ ID NO: 1884931
ccagauccgugaguuuaag

SEQ ID NO: 2302995 - RNA, 19 nt, Artificial Sequence
  Description of Artificial Sequence: Synthetic oligonucleotide
  Antisense strand to SEQ ID NO: 2302994
cuuaaacucacggaucugg

SEQ ID NO: 2302996 - RNA, 19 nt, Artificial Sequence
  Description of Artificial Sequence: Synthetic oligonucleotide
  Sense strand starting at position 3691 of SEQ ID NO: 1884931
ugauucuuuggccacuaua

SEQ ID NO: 2302997 - RNA, 19 nt, Artificial Sequence
  Description of Artificial Sequence: Synthetic oligonucleotide
  Antisense strand to SEQ ID NO: 2302996
uauaguggccaaagaauca

SEQ ID NO: 2302998 - RNA, 19 nt, Artificial Sequence
  Description of Artificial Sequence: Synthetic oligonucleotide
  Sense strand starting at position 86 of SEQ ID NO: 1884932
aacuguuauuggguaagau

SEQ ID NO: 2302999 - RNA, 19 nt, Artificial Sequence
  Description of Artificial Sequence: Synthetic oligonucleotide
  Antisense strand to SEQ ID NO: 2302998
aucuuacccaauaacaguu

SEQ ID NO: 2303000 - RNA, 19 nt, Artificial Sequence
  Description of Artificial Sequence: Synthetic oligonucleotide
  Sense strand starting at position 172 of SEQ ID NO: 1884932
ugacaauacuaaguauguu

SEQ ID NO: 2303001 - RNA, 19 nt, Artificial Sequence
  Description of Artificial Sequence: Synthetic oligonucleotide
  Antisense strand to SEQ ID NO: 2303000
aacauacuuaguauuguca

SEQ ID NO: 2303002 - RNA, 19 nt, Artificial Sequence
  Description of Artificial Sequence: Synthetic oligonucleotide
  Sense strand starting at position 210 of SEQ ID NO: 1884932
aagaaaugucuagguauug

SEQ ID NO: 2303003 - RNA, 19 nt, Artificial Sequence
  Description of Artificial Sequence: Synthetic oligonucleotide
  Antisense strand to SEQ ID NO: 2303002
caauaccuagacauuucuu

SEQ ID NO: 2303004 - RNA, 19 nt, Artificial Sequence
  Description of Artificial Sequence: Synthetic oligonucleotide
  Sense strand starting at position 239 of SEQ ID NO: 1884932
gguuaucugaauuagucag

SEQ ID NO: 2303005 - RNA, 19 nt, Artificial Sequence
  Description of Artificial Sequence: Synthetic oligonucleotide
  Antisense strand to SEQ ID NO: 2303004
cugacuaauucagauaacc

SEQ ID NO: 2303006 - RNA, 19 nt, Artificial Sequence
  Description of Artificial Sequence: Synthetic oligonucleotide
  Sense strand starting at position 241 of SEQ ID NO: 1884932
uuaucugaauuagucagaa

SEQ ID NO: 2303007 - RNA, 19 nt, Artificial Sequence
  Description of Artificial Sequence: Synthetic oligonucleotide
  Antisense strand to SEQ ID NO: 2303006
uucugacuaauucagauaa

SEQ ID NO: 2303008 - RNA, 19 nt, Artificial Sequence
  Description of Artificial Sequence: Synthetic oligonucleotide
  Sense strand starting at position 256 of SEQ ID NO: 1884932
agaaaugguccagggcuau

SEQ ID NO: 2303009 - RNA, 19 nt, Artificial Sequence
  Description of Artificial Sequence: Synthetic oligonucleotide
  Antisense strand to SEQ ID NO: 2303008
auagcccuggaccauuucu

SEQ ID NO: 2303010 - RNA, 19 nt, Artificial Sequence
  Description of Artificial Sequence: Synthetic oligonucleotide
  Sense strand starting at position 262 of SEQ ID NO: 1884932
gguccagggcuaugaaacu

SEQ ID NO: 2303011 - RNA, 19 nt, Artificial Sequence
  Description of Artificial Sequence: Synthetic oligonucleotide
  Antisense strand to SEQ ID NO: 2303010
aguuucauagcccuggacc

SEQ ID NO: 2303012 - RNA, 19 nt, Artificial Sequence
  Description of Artificial Sequence: Synthetic oligonucleotide
  Sense strand starting at position 656 of SEQ ID NO: 1884932
gagagacuguggcuaaauu

SEQ ID NO: 2303013 - RNA, 19 nt, Artificial Sequence
  Description of Artificial Sequence: Synthetic oligonucleotide
  Antisense strand to SEQ ID NO: 2303012
aauuuagccacagucucuc

SEQ ID NO: 2303014 - RNA, 19 nt, Artificial Sequence
  Description of Artificial Sequence: Synthetic oligonucleotide
  Sense strand starting at position 1119 of SEQ ID NO: 1884932
gugggauauuccuuaugag

SEQ ID NO: 2303015 - RNA, 19 nt, Artificial Sequence
  Description of Artificial Sequence: Synthetic oligonucleotide
  Antisense strand to SEQ ID NO: 2303014
cucauaaggaauaucccac

SEQ ID NO: 2303016 - RNA, 19 nt, Artificial Sequence
  Description of Artificial Sequence: Synthetic oligonucleotide
  Sense strand starting at position 1131 of SEQ ID NO: 1884932
uuaugaguuagaggaucac

SEQ ID NO: 2303017 - RNA, 19 nt, Artificial Sequence
  Description of Artificial Sequence: Synthetic oligonucleotide
  Antisense strand to SEQ ID NO: 2303016
gugauccucuaacucauaa

SEQ ID NO: 2303018 - RNA, 19 nt, Artificial Sequence
  Description of Artificial Sequence: Synthetic oligonucleotide
  Sense strand starting at position 1160 of SEQ ID NO: 1884932
gggagaagucauugguauu

SEQ ID NO: 2303019 - RNA, 19 nt, Artificial Sequence
  Description of Artificial Sequence: Synthetic oligonucleotide
  Antisense strand to SEQ ID NO: 2303018
aauaccaaugacuucuccc

SEQ ID NO: 2303020 - RNA, 19 nt, Artificial Sequence
  Description of Artificial Sequence: Synthetic oligonucleotide
  Sense strand starting at position 1227 of SEQ ID NO: 1884932
gcuaacaucuuaccugaga

SEQ ID NO: 2303021 - RNA, 19 nt, Artificial Sequence
  Description of Artificial Sequence: Synthetic oligonucleotide
  Antisense strand to SEQ ID NO: 2303020
ucucagguaagauguuagc

SEQ ID NO: 2303022 - RNA, 19 nt, Artificial Sequence
  Description of Artificial Sequence: Synthetic oligonucleotide
  Sense strand starting at position 1504 of SEQ ID NO: 1884932
uuugaugauuuggaagaac

SEQ ID NO: 2303023 - RNA, 19 nt, Artificial Sequence
  Description of Artificial Sequence: Synthetic oligonucleotide
  Antisense strand to SEQ ID NO: 2303022
guucuuccaaaucaucaaa

SEQ ID NO: 2303024 - RNA, 19 nt, Artificial Sequence
  Description of Artificial Sequence: Synthetic oligonucleotide
  Sense strand starting at position 1515 of SEQ ID NO: 1884932
ggaagaacacacugcauau

SEQ ID NO: 2303025 - RNA, 19 nt, Artificial Sequence
  Description of Artificial Sequence: Synthetic oligonucleotide
  Antisense strand to SEQ ID NO: 2303024
auaugcaguguguucuucc

SEQ ID NO: 2303026 - RNA, 19 nt, Artificial Sequence
  Description of Artificial Sequence: Synthetic oligonucleotide
  Sense strand starting at position 1525 of SEQ ID NO: 1884932
acugcauauguauagauca

SEQ ID NO: 2303027 - RNA, 19 nt, Artificial Sequence
  Description of Artificial Sequence: Synthetic oligonucleotide
  Antisense strand to SEQ ID NO: 2303026
ugaucuauacauaugcagu

SEQ ID NO: 2303028 - RNA, 19 nt, Artificial Sequence
  Description of Artificial Sequence: Synthetic oligonucleotide
  Sense strand starting at position 2021 of SEQ ID NO: 1884932
gcaguugaacaauaccuua

SEQ ID NO: 2303029 - RNA, 19 nt, Artificial Sequence
  Description of Artificial Sequence: Synthetic oligonucleotide
  Antisense strand to SEQ ID NO: 2303028
uaagguauuguucaacugc

SEQ ID NO: 2303030 - RNA, 19 nt, Artificial Sequence
  Description of Artificial Sequence: Synthetic oligonucleotide
  Sense strand starting at position 2219 of SEQ ID NO: 1884932
ugaggaugcuucccagaaa

SEQ ID NO: 2303031 - RNA, 19 nt, Artificial Sequence
  Description of Artificial Sequence: Synthetic oligonucleotide
  Antisense strand to SEQ ID NO: 2303030
uuucugggaagcauccuca

SEQ ID NO: 2303032 - RNA, 19 nt, Artificial Sequence
  Description of Artificial Sequence: Synthetic oligonucleotide
  Sense strand starting at position 2222 of SEQ ID NO: 1884932
ggaugcuucccagaaaggu

SEQ ID NO: 2303033 - RNA, 19 nt, Artificial Sequence
  Description of Artificial Sequence: Synthetic oligonucleotide
  Antisense strand to SEQ ID NO: 2303032
accuuucugggaagcaucc

SEQ ID NO: 2303034 - RNA, 19 nt, Artificial Sequence
  Description of Artificial Sequence: Synthetic oligonucleotide
  Sense strand starting at position 2472 of SEQ ID NO: 1884932
ucucaaacugcagguuaaa

SEQ ID NO: 2303035 - RNA, 19 nt, Artificial Sequence
  Description of Artificial Sequence: Synthetic oligonucleotide
  Antisense strand to SEQ ID NO: 2303034
uuuaaccugcaguuugaga

SEQ ID NO: 2303036 - RNA, 19 nt, Artificial Sequence
  Description of Artificial Sequence: Synthetic oligonucleotide
  Sense strand starting at position 2519 of SEQ ID NO: 1884932
uguuacuauuaguuaagga

SEQ ID NO: 2303037 - RNA, 19 nt, Artificial Sequence
  Description of Artificial Sequence: Synthetic oligonucleotide
  Antisense strand to SEQ ID NO: 2303036
uccuuaacuaauaguaaca

SEQ ID NO: 2303038 - RNA, 19 nt, Artificial Sequence
  Description of Artificial Sequence: Synthetic oligonucleotide
  Sense strand starting at position 2663 of SEQ ID NO: 1884932
guguuuaaacccuauuauu

SEQ ID NO: 2303039 - RNA, 19 nt, Artificial Sequence
  Description of Artificial Sequence: Synthetic oligonucleotide
  Antisense strand to SEQ ID NO: 2303038
aauaauaggguuuaaacac

SEQ ID NO: 2303040 - RNA, 19 nt, Artificial Sequence
  Description of Artificial Sequence: Synthetic oligonucleotide
  Sense strand starting at position 2882 of SEQ ID NO: 1884932
uuugaaauuuccuagggag

SEQ ID NO: 2303041 - RNA, 19 nt, Artificial Sequence
  Description of Artificial Sequence: Synthetic oligonucleotide
  Antisense strand to SEQ ID NO: 2303040
cucccuaggaaauuucaaa

SEQ ID NO: 2303042 - RNA, 19 nt, Artificial Sequence
  Description of Artificial Sequence: Synthetic oligonucleotide
  Sense strand starting at position 2885 of SEQ ID NO: 1884932
gaaauuuccuagggagaug

SEQ ID NO: 2303043 - RNA, 19 nt, Artificial Sequence
  Description of Artificial Sequence: Synthetic oligonucleotide
  Antisense strand to SEQ ID NO: 2303042
caucucccuaggaaauuuc

SEQ ID NO: 2303044 - RNA, 19 nt, Artificial Sequence
  Description of Artificial Sequence: Synthetic oligonucleotide
  Sense strand starting at position 2896 of SEQ ID NO: 1884932
gggagaugaaagcguccau

SEQ ID NO: 2303045 - RNA, 19 nt, Artificial Sequence
  Description of Artificial Sequence: Synthetic oligonucleotide
  Antisense strand to SEQ ID NO: 2303044
auggacgcuuucaucuccc

SEQ ID NO: 2303046 - RNA, 19 nt, Artificial Sequence
  Description of Artificial Sequence: Synthetic oligonucleotide
  Sense strand starting at position 3139 of SEQ ID NO: 1884932
uguauuauuccaugaaugg

SEQ ID NO: 2303047 - RNA, 19 nt, Artificial Sequence
  Description of Artificial Sequence: Synthetic oligonucleotide
  Antisense strand to SEQ ID NO: 2303046
ccauucauggaauaauaca

SEQ ID NO: 2303048 - RNA, 19 nt, Artificial Sequence
  Description of Artificial Sequence: Synthetic oligonucleotide
  Sense strand starting at position 3140 of SEQ ID NO: 1884932
guauuauuccaugaauggc

SEQ ID NO: 2303049 - RNA, 19 nt, Artificial Sequence
  Description of Artificial Sequence: Synthetic oligonucleotide
  Antisense strand to SEQ ID NO: 2303048
gccauucauggaauaauac

SEQ ID NO: 2303050 - RNA, 19 nt, Artificial Sequence
  Description of Artificial Sequence: Synthetic oligonucleotide
  Sense strand starting at position 3146 of SEQ ID NO: 1884932
uuccaugaauggcuccaaa

SEQ ID NO: 2303051 - RNA, 19 nt, Artificial Sequence
  Description of Artificial Sequence: Synthetic oligonucleotide
  Antisense strand to SEQ ID NO: 2303050
uuuggagccauucauggaa

SEQ ID NO: 2303052 - RNA, 19 nt, Artificial Sequence
  Description of Artificial Sequence: Synthetic oligonucleotide
  Sense strand starting at position 3170 of SEQ ID NO: 1884932
gaauucuuggcucaugguu

SEQ ID NO: 2303053 - RNA, 19 nt, Artificial Sequence
  Description of Artificial Sequence: Synthetic oligonucleotide
  Antisense strand to SEQ ID NO: 2303052
aaccaugagccaagaauuc

SEQ ID NO: 2303054 - RNA, 19 nt, Artificial Sequence
  Description of Artificial Sequence: Synthetic oligonucleotide
  Sense strand starting at position 3370 of SEQ ID NO: 1884932
gaggaauuaaggugucaug

SEQ ID NO: 2303055 - RNA, 19 nt, Artificial Sequence
  Description of Artificial Sequence: Synthetic oligonucleotide
  Antisense strand to SEQ ID NO: 2303054
caugacaccuuaauuccuc

SEQ ID NO: 2303056 - RNA, 19 nt, Artificial Sequence
  Description of Artificial Sequence: Synthetic oligonucleotide
  Sense strand starting at position 3422 of SEQ ID NO: 1884932
cagagaauaugugauuuaa

SEQ ID NO: 2303057 - RNA, 19 nt, Artificial Sequence
  Description of Artificial Sequence: Synthetic oligonucleotide
  Antisense strand to SEQ ID NO: 2303056
uuaaaucacauauucucug

SEQ ID NO: 2303058 - RNA, 19 nt, Artificial Sequence
  Description of Artificial Sequence: Synthetic oligonucleotide
  Sense strand starting at position 3494 of SEQ ID NO: 1884932
uuaggaaaucuuuaugcau

SEQ ID NO: 2303059 - RNA, 19 nt, Artificial Sequence
  Description of Artificial Sequence: Synthetic oligonucleotide
  Antisense strand to SEQ ID NO: 2303058
augcauaaagauuuccuaa

SEQ ID NO: 2303060 - RNA, 19 nt, Artificial Sequence
  Description of Artificial Sequence: Synthetic oligonucleotide
  Sense strand starting at position 3497 of SEQ ID NO: 1884932
ggaaaucuuuaugcaugag

SEQ ID NO: 2303061 - RNA, 19 nt, Artificial Sequence
  Description of Artificial Sequence: Synthetic oligonucleotide
  Antisense strand to SEQ ID NO: 2303060
cucaugcauaaagauuucc

SEQ ID NO: 2303062 - RNA, 19 nt, Artificial Sequence
  Description of Artificial Sequence: Synthetic oligonucleotide
  Sense strand starting at position 3620 of SEQ ID NO: 1884932
gguagaaugucauucccau

SEQ ID NO: 2303063 - RNA, 19 nt, Artificial Sequence
  Description of Artificial Sequence: Synthetic oligonucleotide
  Antisense strand to SEQ ID NO: 2303062
augggaaugacauucuacc

SEQ ID NO: 2303064 - RNA, 19 nt, Artificial Sequence
  Description of Artificial Sequence: Synthetic oligonucleotide
  Sense strand starting at position 3641 of SEQ ID NO: 1884932
uguccuauugaucaaagua

SEQ ID NO: 2303065 - RNA, 19 nt, Artificial Sequence
  Description of Artificial Sequence: Synthetic oligonucleotide
  Antisense strand to SEQ ID NO: 2303064
uacuuugaucaauaggaca

SEQ ID NO: 2303066 - RNA, 19 nt, Artificial Sequence
  Description of Artificial Sequence: Synthetic oligonucleotide
  Sense strand starting at position 3704 of SEQ ID NO: 1884932
augggagauugugcaaagu

SEQ ID NO: 2303067 - RNA, 19 nt, Artificial Sequence
  Description of Artificial Sequence: Synthetic oligonucleotide
  Antisense strand to SEQ ID NO: 2303066
acuuugcacaaucucccau

SEQ ID NO: 2303068 - RNA, 19 nt, Artificial Sequence
  Description of Artificial Sequence: Synthetic oligonucleotide
  Sense strand starting at position 3847 of SEQ ID NO: 1884932
uccacucaguaggugaaau

SEQ ID NO: 2303069 - RNA, 19 nt, Artificial Sequence
  Description of Artificial Sequence: Synthetic oligonucleotide
  Antisense strand to SEQ ID NO: 2303068
auuucaccuacugagugga

SEQ ID NO: 2303070 - RNA, 19 nt, Artificial Sequence
  Description of Artificial Sequence: Synthetic oligonucleotide
  Sense strand starting at position 3858 of SEQ ID NO: 1884932
ggugaaaucucuuuaucag

SEQ ID NO: 2303071 - RNA, 19 nt, Artificial Sequence
  Description of Artificial Sequence: Synthetic oligonucleotide
  Antisense strand to SEQ ID NO: 2303070
cugauaaagagauuucacc

SEQ ID NO: 2303072 - RNA, 19 nt, Artificial Sequence
  Description of Artificial Sequence: Synthetic oligonucleotide
  Sense strand starting at position 3859 of SEQ ID NO: 1884932
gugaaaucucuuuaucagc

SEQ ID NO: 2303073 - RNA, 19 nt, Artificial Sequence
  Description of Artificial Sequence: Synthetic oligonucleotide
  Antisense strand to SEQ ID NO: 2303072
gcugauaaagagauuucac

SEQ ID NO: 2303074 - RNA, 19 nt, Artificial Sequence
  Description of Artificial Sequence: Synthetic oligonucleotide
  Sense strand starting at position 3868 of SEQ ID NO: 1884932
cuuuaucagcuacauaguu

SEQ ID NO: 2303075 - RNA, 19 nt, Artificial Sequence
  Description of Artificial Sequence: Synthetic oligonucleotide
  Antisense strand to SEQ ID NO: 2303074
aacuauguagcugauaaag

SEQ ID NO: 2303076 - RNA, 19 nt, Artificial Sequence
  Description of Artificial Sequence: Synthetic oligonucleotide
  Sense strand starting at position 3893 of SEQ ID NO: 1884932
agaauaucauaucuggguu

SEQ ID NO: 2303077 - RNA, 19 nt, Artificial Sequence
  Description of Artificial Sequence: Synthetic oligonucleotide
  Antisense strand to SEQ ID NO: 2303076
aacccagauaugauauucu

SEQ ID NO: 2303078 - RNA, 19 nt, Artificial Sequence
  Description of Artificial Sequence: Synthetic oligonucleotide
  Sense strand starting at position 154 of SEQ ID NO: 1884933
gguagaauuuguguucgau

SEQ ID NO: 2303079 - RNA, 19 nt, Artificial Sequence
  Description of Artificial Sequence: Synthetic oligonucleotide
  Antisense strand to SEQ ID NO: 2303078
aucgaacacaaauucuacc

SEQ ID NO: 2303080 - RNA, 19 nt, Artificial Sequence
  Description of Artificial Sequence: Synthetic oligonucleotide
  Sense strand starting at position 270 of SEQ ID NO: 1884933
ggcggcagucugagaauuc

SEQ ID NO: 2303081 - RNA, 19 nt, Artificial Sequence
  Description of Artificial Sequence: Synthetic oligonucleotide
  Antisense strand to SEQ ID NO: 2303080
gaauucucagacugccgcc

SEQ ID NO: 2303082 - RNA, 19 nt, Artificial Sequence
  Description of Artificial Sequence: Synthetic oligonucleotide
  Sense strand starting at position 316 of SEQ ID NO: 1884933
gggagaaugcuguguaaag

SEQ ID NO: 2303083 - RNA, 19 nt, Artificial Sequence
  Description of Artificial Sequence: Synthetic oligonucleotide
  Antisense strand to SEQ ID NO: 2303082
cuuuacacagcauucuccc

SEQ ID NO: 2303084 - RNA, 19 nt, Artificial Sequence
  Description of Artificial Sequence: Synthetic oligonucleotide
  Sense strand starting at position 317 of SEQ ID NO: 1884933
ggagaaugcuguguaaaga

SEQ ID NO: 2303085 - RNA, 19 nt, Artificial Sequence
  Description of Artificial Sequence: Synthetic oligonucleotide
  Antisense strand to SEQ ID NO: 2303084
ucuuuacacagcauucucc

SEQ ID NO: 2303086 - RNA, 19 nt, Artificial Sequence
  Description of Artificial Sequence: Synthetic oligonucleotide
  Sense strand starting at position 318 of SEQ ID NO: 1884933
gagaaugcuguguaaagag

SEQ ID NO: 2303087 - RNA, 19 nt, Artificial Sequence
  Description of Artificial Sequence: Synthetic oligonucleotide
  Antisense strand to SEQ ID NO: 2303086
cucuuuacacagcauucuc

SEQ ID NO: 2303088 - RNA, 19 nt, Artificial Sequence
  Description of Artificial Sequence: Synthetic oligonucleotide
  Sense strand starting at position 519 of SEQ ID NO: 1884933
aucaguucccuguaucaaa

SEQ ID NO: 2303089 - RNA, 19 nt, Artificial Sequence
  Description of Artificial Sequence: Synthetic oligonucleotide
  Antisense strand to SEQ ID NO: 2303088
uuugauacagggaacugau

SEQ ID NO: 2303090 - RNA, 19 nt, Artificial Sequence
  Description of Artificial Sequence: Synthetic oligonucleotide
  Sense strand starting at position 628 of SEQ ID NO: 1884933
ugauaauguuggcugauga

SEQ ID NO: 2303091 - RNA, 19 nt, Artificial Sequence
  Description of Artificial Sequence: Synthetic oligonucleotide
  Antisense strand to SEQ ID NO: 2303090
ucaucagccaacauuauca

SEQ ID NO: 2303092 - RNA, 19 nt, Artificial Sequence
  Description of Artificial Sequence: Synthetic oligonucleotide
  Sense strand starting at position 629 of SEQ ID NO: 1884933
gauaauguuggcugaugaa

SEQ ID NO: 2303093 - RNA, 19 nt, Artificial Sequence
  Description of Artificial Sequence: Synthetic oligonucleotide
  Antisense strand to SEQ ID NO: 2303092
uucaucagccaacauuauc

SEQ ID NO: 2303094 - RNA, 19 nt, Artificial Sequence
  Description of Artificial Sequence: Synthetic oligonucleotide
  Sense strand starting at position 842 of SEQ ID NO: 1884933
ggaauaaugugauuggcuu

SEQ ID NO: 2303095 - RNA, 19 nt, Artificial Sequence
  Description of Artificial Sequence: Synthetic oligonucleotide
  Antisense strand to SEQ ID NO: 2303094
aagccaaucacauuauucc

SEQ ID NO: 2303096 - RNA, 19 nt, Artificial Sequence
  Description of Artificial Sequence: Synthetic oligonucleotide
  Sense strand starting at position 976 of SEQ ID NO: 1884933
gagacuuagcucuaaguaa

SEQ ID NO: 2303097 - RNA, 19 nt, Artificial Sequence
  Description of Artificial Sequence: Synthetic oligonucleotide
  Antisense strand to SEQ ID NO: 2303096
uuacuuagagcuaagucuc

SEQ ID NO: 2303098 - RNA, 19 nt, Artificial Sequence
  Description of Artificial Sequence: Synthetic oligonucleotide
  Sense strand starting at position 1035 of SEQ ID NO: 1884933
cguccacuaauugagugaa

SEQ ID NO: 2303099 - RNA, 19 nt, Artificial Sequence
  Description of Artificial Sequence: Synthetic oligonucleotide
  Antisense strand to SEQ ID NO: 2303098
uucacucaauuaguggacg

SEQ ID NO: 2303100 - RNA, 19 nt, Artificial Sequence
  Description of Artificial Sequence: Synthetic oligonucleotide
  Sense strand starting at position 1070 of SEQ ID NO: 1884933
agccuugucccucauuaga

SEQ ID NO: 2303101 - RNA, 19 nt, Artificial Sequence
  Description of Artificial Sequence: Synthetic oligonucleotide
  Antisense strand to SEQ ID NO: 2303100
ucuaaugagggacaaggcu

SEQ ID NO: 2303102 - RNA, 19 nt, Artificial Sequence
  Description of Artificial Sequence: Synthetic oligonucleotide
  Sense strand starting at position 1080 of SEQ ID NO: 1884933
cucauuagaugaucuugca

SEQ ID NO: 2303103 - RNA, 19 nt, Artificial Sequence
  Description of Artificial Sequence: Synthetic oligonucleotide
  Antisense strand to SEQ ID NO: 2303102
ugcaagaucaucuaaugag

SEQ ID NO: 2303104 - RNA, 19 nt, Artificial Sequence
  Description of Artificial Sequence: Synthetic oligonucleotide
  Sense strand starting at position 1123 of SEQ ID NO: 1884933
ccgggcucaaucuaauagu

SEQ ID NO: 2303105 - RNA, 19 nt, Artificial Sequence
  Description of Artificial Sequence: Synthetic oligonucleotide
  Antisense strand to SEQ ID NO: 2303104
acuauuagauugagcccgg

SEQ ID NO: 2303106 - RNA, 19 nt, Artificial Sequence
  Description of Artificial Sequence: Synthetic oligonucleotide
  Sense strand starting at position 1159 of SEQ ID NO: 1884933
augguaauucguuaugaca

SEQ ID NO: 2303107 - RNA, 19 nt, Artificial Sequence
  Description of Artificial Sequence: Synthetic oligonucleotide
  Antisense strand to SEQ ID NO: 2303106
ugucauaacgaauuaccau

SEQ ID NO: 2303108 - RNA, 19 nt, Artificial Sequence
  Description of Artificial Sequence: Synthetic oligonucleotide
  Sense strand starting at position 1307 of SEQ ID NO: 1884933
uagcuaacuggugauugga

SEQ ID NO: 2303109 - RNA, 19 nt, Artificial Sequence
  Description of Artificial Sequence: Synthetic oligonucleotide
  Antisense strand to SEQ ID NO: 2303108
uccaaucaccaguuagcua

SEQ ID NO: 2303110 - RNA, 19 nt, Artificial Sequence
  Description of Artificial Sequence: Synthetic oligonucleotide
  Sense strand starting at position 1309 of SEQ ID NO: 1884933
gcuaacuggugauuggaga

SEQ ID NO: 2303111 - RNA, 19 nt, Artificial Sequence
  Description of Artificial Sequence: Synthetic oligonucleotide
  Antisense strand to SEQ ID NO: 2303110
ucuccaaucaccaguuagc

SEQ ID NO: 2303112 - RNA, 19 nt, Artificial Sequence
  Description of Artificial Sequence: Synthetic oligonucleotide
  Sense strand starting at position 1310 of SEQ ID NO: 1884933
cuaacuggugauuggagau

SEQ ID NO: 2303113 - RNA, 19 nt, Artificial Sequence
  Description of Artificial Sequence: Synthetic oligonucleotide
  Antisense strand to SEQ ID NO: 2303112
aucuccaaucaccaguuag

SEQ ID NO: 2303114 - RNA, 19 nt, Artificial Sequence
  Description of Artificial Sequence: Synthetic oligonucleotide
  Sense strand starting at position 1328 of SEQ ID NO: 1884933
ugccaccugccugaagaau

SEQ ID NO: 2303115 - RNA, 19 nt, Artificial Sequence
  Description of Artificial Sequence: Synthetic oligonucleotide
  Antisense strand to SEQ ID NO: 2303114
auucuucaggcagguggca

SEQ ID NO: 2303116 - RNA, 19 nt, Artificial Sequence
  Description of Artificial Sequence: Synthetic oligonucleotide
  Sense strand starting at position 1389 of SEQ ID NO: 1884933
cuaacaauaggucgaguca

SEQ ID NO: 2303117 - RNA, 19 nt, Artificial Sequence
  Description of Artificial Sequence: Synthetic oligonucleotide
  Antisense strand to SEQ ID NO: 2303116
ugacucgaccuauuguuag

SEQ ID NO: 2303118 - RNA, 19 nt, Artificial Sequence
  Description of Artificial Sequence: Synthetic oligonucleotide
  Sense strand starting at position 1817 of SEQ ID NO: 1884933
auguaaauaccucacuugu

SEQ ID NO: 2303119 - RNA, 19 nt, Artificial Sequence
  Description of Artificial Sequence: Synthetic oligonucleotide
  Antisense strand to SEQ ID NO: 2303118
acaagugagguauuuacau

SEQ ID NO: 2303120 - RNA, 19 nt, Artificial Sequence
  Description of Artificial Sequence: Synthetic oligonucleotide
  Sense strand starting at position 1819 of SEQ ID NO: 1884933
guaaauaccucacuuguau

SEQ ID NO: 2303121 - RNA, 19 nt, Artificial Sequence
  Description of Artificial Sequence: Synthetic oligonucleotide
  Antisense strand to SEQ ID NO: 2303120
auacaagugagguauuuac

SEQ ID NO: 2303122 - RNA, 19 nt, Artificial Sequence
  Description of Artificial Sequence: Synthetic oligonucleotide
  Sense strand starting at position 2010 of SEQ ID NO: 1884933
uucuuaagugcagauagaa

SEQ ID NO: 2303123 - RNA, 19 nt, Artificial Sequence
  Description of Artificial Sequence: Synthetic oligonucleotide
  Antisense strand to SEQ ID NO: 2303122
uucuaucugcacuuaagaa

SEQ ID NO: 2303124 - RNA, 19 nt, Artificial Sequence
  Description of Artificial Sequence: Synthetic oligonucleotide
  Sense strand starting at position 2214 of SEQ ID NO: 1884933
ucgaauuacccaugaauag

SEQ ID NO: 2303125 - RNA, 19 nt, Artificial Sequence
  Description of Artificial Sequence: Synthetic oligonucleotide
  Antisense strand to SEQ ID NO: 2303124
cuauucauggguaauucga

SEQ ID NO: 2303126 - RNA, 19 nt, Artificial Sequence
  Description of Artificial Sequence: Synthetic oligonucleotide
  Sense strand starting at position 2240 of SEQ ID NO: 1884933
gucacauguauugaccagu

SEQ ID NO: 2303127 - RNA, 19 nt, Artificial Sequence
  Description of Artificial Sequence: Synthetic oligonucleotide
  Antisense strand to SEQ ID NO: 2303126
acuggucaauacaugugac

SEQ ID NO: 2303128 - RNA, 19 nt, Artificial Sequence
  Description of Artificial Sequence: Synthetic oligonucleotide
  Sense strand starting at position 2243 of SEQ ID NO: 1884933
acauguauugaccaguuga

SEQ ID NO: 2303129 - RNA, 19 nt, Artificial Sequence
  Description of Artificial Sequence: Synthetic oligonucleotide
  Antisense strand to SEQ ID NO: 2303128
ucaacuggucaauacaugu

SEQ ID NO: 2303130 - RNA, 19 nt, Artificial Sequence
  Description of Artificial Sequence: Synthetic oligonucleotide
  Sense strand starting at position 2462 of SEQ ID NO: 1884933
aguccuuugggcuauauau

SEQ ID NO: 2303131 - RNA, 19 nt, Artificial Sequence
  Description of Artificial Sequence: Synthetic oligonucleotide
  Antisense strand to SEQ ID NO: 2303130
auauauagcccaaaggacu

SEQ ID NO: 2303132 - RNA, 19 nt, Artificial Sequence
  Description of Artificial Sequence: Synthetic oligonucleotide
  Sense strand starting at position 2500 of SEQ ID NO: 1884933
auaaucuaauugcuuggaa

SEQ ID NO: 2303133 - RNA, 19 nt, Artificial Sequence
  Description of Artificial Sequence: Synthetic oligonucleotide
  Antisense strand to SEQ ID NO: 2303132
uuccaagcaauuagauuau

SEQ ID NO: 2303134 - RNA, 19 nt, Artificial Sequence
  Description of Artificial Sequence: Synthetic oligonucleotide
  Sense strand starting at position 2503 of SEQ ID NO: 1884933
aucuaauugcuuggaagag

SEQ ID NO: 2303135 - RNA, 19 nt, Artificial Sequence
  Description of Artificial Sequence: Synthetic oligonucleotide
  Antisense strand to SEQ ID NO: 2303134
cucuuccaagcaauuagau

SEQ ID NO: 2303136 - RNA, 19 nt, Artificial Sequence
  Description of Artificial Sequence: Synthetic oligonucleotide
  Sense strand starting at position 2535 of SEQ ID NO: 1884933
acuaguuaucaguaaucau

SEQ ID NO: 2303137 - RNA, 19 nt, Artificial Sequence
  Description of Artificial Sequence: Synthetic oligonucleotide
  Antisense strand to SEQ ID NO: 2303136
augauuacugauaacuagu

SEQ ID NO: 2303138 - RNA, 19 nt, Artificial Sequence
  Description of Artificial Sequence: Synthetic oligonucleotide
  Sense strand starting at position 2694 of SEQ ID NO: 1884933
guuuguaacgugccuugau

SEQ ID NO: 2303139 - RNA, 19 nt, Artificial Sequence
  Description of Artificial Sequence: Synthetic oligonucleotide
  Antisense strand to SEQ ID NO: 2303138
aucaaggcacguuacaaac

SEQ ID NO: 2303140 - RNA, 19 nt, Artificial Sequence
  Description of Artificial Sequence: Synthetic oligonucleotide
  Sense strand starting at position 2988 of SEQ ID NO: 1884933
uuaacauagcccuggaaau

SEQ ID NO: 2303141 - RNA, 19 nt, Artificial Sequence
  Description of Artificial Sequence: Synthetic oligonucleotide
  Antisense strand to SEQ ID NO: 2303140
auuuccagggcuauguuaa

SEQ ID NO: 2303142 - RNA, 19 nt, Artificial Sequence
  Description of Artificial Sequence: Synthetic oligonucleotide
  Sense strand starting at position 3040 of SEQ ID NO: 1884933
ggcaguucuacuggcauuu

SEQ ID NO: 2303143 - RNA, 19 nt, Artificial Sequence
  Description of Artificial Sequence: Synthetic oligonucleotide
  Antisense strand to SEQ ID NO: 2303142
aaaugccaguagaacugcc

SEQ ID NO: 2303144 - RNA, 19 nt, Artificial Sequence
  Description of Artificial Sequence: Synthetic oligonucleotide
  Sense strand starting at position 3383 of SEQ ID NO: 1884933
ugcuauuuacucuguauga

SEQ ID NO: 2303145 - RNA, 19 nt, Artificial Sequence
  Description of Artificial Sequence: Synthetic oligonucleotide
  Antisense strand to SEQ ID NO: 2303144
ucauacagaguaaauagca

SEQ ID NO: 2303146 - RNA, 19 nt, Artificial Sequence
  Description of Artificial Sequence: Synthetic oligonucleotide
  Sense strand starting at position 3583 of SEQ ID NO: 1884933
gacuguaagcugcaugaga

SEQ ID NO: 2303147 - RNA, 19 nt, Artificial Sequence
  Description of Artificial Sequence: Synthetic oligonucleotide
  Antisense strand to SEQ ID NO: 2303146
ucucaugcagcuuacaguc

SEQ ID NO: 2303148 - RNA, 19 nt, Artificial Sequence
  Description of Artificial Sequence: Synthetic oligonucleotide
  Sense strand starting at position 3628 of SEQ ID NO: 1884933
gugaucacauugcuuagaa

SEQ ID NO: 2303149 - RNA, 19 nt, Artificial Sequence
  Description of Artificial Sequence: Synthetic oligonucleotide
  Antisense strand to SEQ ID NO: 2303148
uucuaagcaaugugaucac

SEQ ID NO: 2303150 - RNA, 19 nt, Artificial Sequence
  Description of Artificial Sequence: Synthetic oligonucleotide
  Sense strand starting at position 3629 of SEQ ID NO: 1884933
ugaucacauugcuuagaau

SEQ ID NO: 2303151 - RNA, 19 nt, Artificial Sequence
  Description of Artificial Sequence: Synthetic oligonucleotide
  Antisense strand to SEQ ID NO: 2303150
auucuaagcaaugugauca

SEQ ID NO: 2303152 - RNA, 19 nt, Artificial Sequence
  Description of Artificial Sequence: Synthetic oligonucleotide
  Sense strand starting at position 3720 of SEQ ID NO: 1884933
guaguauugcauuaagaaa

SEQ ID NO: 2303153 - RNA, 19 nt, Artificial Sequence
  Description of Artificial Sequence: Synthetic oligonucleotide
  Antisense strand to SEQ ID NO: 2303152
uuucuuaaugcaauacuac

SEQ ID NO: 2303154 - RNA, 19 nt, Artificial Sequence
  Description of Artificial Sequence: Synthetic oligonucleotide
  Sense strand starting at position 3948 of SEQ ID NO: 1884933
uggcaagugcuauauagga

SEQ ID NO: 2303155 - RNA, 19 nt, Artificial Sequence
  Description of Artificial Sequence: Synthetic oligonucleotide
  Antisense strand to SEQ ID NO: 2303154
uccuauauagcacuugcca

SEQ ID NO: 2303156 - RNA, 19 nt, Artificial Sequence
  Description of Artificial Sequence: Synthetic oligonucleotide
  Sense strand starting at position 3950 of SEQ ID NO: 1884933
gcaagugcuauauaggaaa

SEQ ID NO: 2303157 - RNA, 19 nt, Artificial Sequence
  Description of Artificial Sequence: Synthetic oligonucleotide
  Antisense strand to SEQ ID NO: 2303156
uuuccuauauagcacuugc

SEQ ID NO: 2303158 - RNA, 19 nt, Artificial Sequence
  Description of Artificial Sequence: Synthetic oligonucleotide
  Sense strand starting at position 78 of SEQ ID NO: 1884934
gucacaaggugcucaauga

SEQ ID NO: 2303159 - RNA, 19 nt, Artificial Sequence
  Description of Artificial Sequence: Synthetic oligonucleotide
  Antisense strand to SEQ ID NO: 2303158
ucauugagcaccuugugac

SEQ ID NO: 2303160 - RNA, 19 nt, Artificial Sequence
  Description of Artificial Sequence: Synthetic oligonucleotide
  Sense strand starting at position 191 of SEQ ID NO: 1884934
aguggaaugucaucagcua

SEQ ID NO: 2303161 - RNA, 19 nt, Artificial Sequence
  Description of Artificial Sequence: Synthetic oligonucleotide
  Antisense strand to SEQ ID NO: 2303160
uagcugaugacauuccacu

SEQ ID NO: 2303162 - RNA, 19 nt, Artificial Sequence
  Description of Artificial Sequence: Synthetic oligonucleotide
  Sense strand starting at position 316 of SEQ ID NO: 1884934
gguucagaggccugacaug

SEQ ID NO: 2303163 - RNA, 19 nt, Artificial Sequence
  Description of Artificial Sequence: Synthetic oligonucleotide
  Antisense strand to SEQ ID NO: 2303162
caugucaggccucugaacc

SEQ ID NO: 2303164 - RNA, 19 nt, Artificial Sequence
  Description of Artificial Sequence: Synthetic oligonucleotide
  Sense strand starting at position 413 of SEQ ID NO: 1884934
ggagaaaguucauagaugg

SEQ ID NO: 2303165 - RNA, 19 nt, Artificial Sequence
  Description of Artificial Sequence: Synthetic oligonucleotide
  Antisense strand to SEQ ID NO: 2303164
ccaucuaugaacuuucucc

SEQ ID NO: 2303166 - RNA, 19 nt, Artificial Sequence
  Description of Artificial Sequence: Synthetic oligonucleotide
  Sense strand starting at position 501 of SEQ ID NO: 1884934
aaggauugucuggguuaag

SEQ ID NO: 2303167 - RNA, 19 nt, Artificial Sequence
  Description of Artificial Sequence: Synthetic oligonucleotide
  Antisense strand to SEQ ID NO: 2303166
cuuaacccagacaauccuu

SEQ ID NO: 2303168 - RNA, 19 nt, Artificial Sequence
  Description of Artificial Sequence: Synthetic oligonucleotide
  Sense strand starting at position 504 of SEQ ID NO: 1884934
gauugucuggguuaagcua

SEQ ID NO: 2303169 - RNA, 19 nt, Artificial Sequence
  Description of Artificial Sequence: Synthetic oligonucleotide
  Antisense strand to SEQ ID NO: 2303168
uagcuuaacccagacaauc

SEQ ID NO: 2303170 - RNA, 19 nt, Artificial Sequence
  Description of Artificial Sequence: Synthetic oligonucleotide
  Sense strand starting at position 1063 of SEQ ID NO: 1884934
cuauuugucaugugaugua

SEQ ID NO: 2303171 - RNA, 19 nt, Artificial Sequence
  Description of Artificial Sequence: Synthetic oligonucleotide
  Antisense strand to SEQ ID NO: 2303170
uacaucacaugacaaauag

SEQ ID NO: 2303172 - RNA, 19 nt, Artificial Sequence
  Description of Artificial Sequence: Synthetic oligonucleotide
  Sense strand starting at position 1227 of SEQ ID NO: 1884934
agauuaacuuuggcguuga

SEQ ID NO: 2303173 - RNA, 19 nt, Artificial Sequence
  Description of Artificial Sequence: Synthetic oligonucleotide
  Antisense strand to SEQ ID NO: 2303172
ucaacgccaaaguuaaucu

SEQ ID NO: 2303174 - RNA, 19 nt, Artificial Sequence
  Description of Artificial Sequence: Synthetic oligonucleotide
  Sense strand starting at position 1231 of SEQ ID NO: 1884934
uaacuuuggcguugagaga

SEQ ID NO: 2303175 - RNA, 19 nt, Artificial Sequence
  Description of Artificial Sequence: Synthetic oligonucleotide
  Antisense strand to SEQ ID NO: 2303174
ucucucaacgccaaaguua

SEQ ID NO: 2303176 - RNA, 19 nt, Artificial Sequence
  Description of Artificial Sequence: Synthetic oligonucleotide
  Sense strand starting at position 1732 of SEQ ID NO: 1884934
aaaguuacgcgcguucaga

SEQ ID NO: 2303177 - RNA, 19 nt, Artificial Sequence
  Description of Artificial Sequence: Synthetic oligonucleotide
  Antisense strand to SEQ ID NO: 2303176
ucugaacgcgcguaacuuu

SEQ ID NO: 2303178 - RNA, 19 nt, Artificial Sequence
  Description of Artificial Sequence: Synthetic oligonucleotide
  Sense strand starting at position 1733 of SEQ ID NO: 1884934
aaguuacgcgcguucagaa

SEQ ID NO: 2303179 - RNA, 19 nt, Artificial Sequence
  Description of Artificial Sequence: Synthetic oligonucleotide
  Antisense strand to SEQ ID NO: 2303178
uucugaacgcgcguaacuu

SEQ ID NO: 2303180 - RNA, 19 nt, Artificial Sequence
  Description of Artificial Sequence: Synthetic oligonucleotide
  Sense strand starting at position 1847 of SEQ ID NO: 1884934
agacuucggaucuguguga

SEQ ID NO: 2303181 - RNA, 19 nt, Artificial Sequence
  Description of Artificial Sequence: Synthetic oligonucleotide
  Antisense strand to SEQ ID NO: 2303180
ucacacagauccgaagucu

SEQ ID NO: 2303182 - RNA, 19 nt, Artificial Sequence
  Description of Artificial Sequence: Synthetic oligonucleotide
  Sense strand starting at position 1848 of SEQ ID NO: 1884934
gacuucggaucugugugau

SEQ ID NO: 2303183 - RNA, 19 nt, Artificial Sequence
  Description of Artificial Sequence: Synthetic oligonucleotide
  Antisense strand to SEQ ID NO: 2303182
aucacacagauccgaaguc

SEQ ID NO: 2303184 - RNA, 19 nt, Artificial Sequence
  Description of Artificial Sequence: Synthetic oligonucleotide
  Sense strand starting at position 1854 of SEQ ID NO: 1884934
ggaucugugugauccacug

SEQ ID NO: 2303185 - RNA, 19 nt, Artificial Sequence
  Description of Artificial Sequence: Synthetic oligonucleotide
  Antisense strand to SEQ ID NO: 2303184
caguggaucacacagaucc

SEQ ID NO: 2303186 - RNA, 19 nt, Artificial Sequence
  Description of Artificial Sequence: Synthetic oligonucleotide
  Sense strand starting at position 1904 of SEQ ID NO: 1884934
gcacuaccucgugacaacu

SEQ ID NO: 2303187 - RNA, 19 nt, Artificial Sequence
  Description of Artificial Sequence: Synthetic oligonucleotide
  Antisense strand to SEQ ID NO: 2303186
aguugucacgagguagugc

SEQ ID NO: 2303188 - RNA, 19 nt, Artificial Sequence
  Description of Artificial Sequence: Synthetic oligonucleotide
  Sense strand starting at position 2076 of SEQ ID NO: 1884934
ucgccuggucaggaucaaa

SEQ ID NO: 2303189 - RNA, 19 nt, Artificial Sequence
  Description of Artificial Sequence: Synthetic oligonucleotide
  Antisense strand to SEQ ID NO: 2303188
uuugauccugaccaggcga

SEQ ID NO: 2303190 - RNA, 19 nt, Artificial Sequence
  Description of Artificial Sequence: Synthetic oligonucleotide
  Sense strand starting at position 2725 of SEQ ID NO: 1884934
ugcagugugcgcuccagau

SEQ ID NO: 2303191 - RNA, 19 nt, Artificial Sequence
  Description of Artificial Sequence: Synthetic oligonucleotide
  Antisense strand to SEQ ID NO: 2303190
aucuggagcgcacacugca

SEQ ID NO: 2303192 - RNA, 19 nt, Artificial Sequence
  Description of Artificial Sequence: Synthetic oligonucleotide
  Sense strand starting at position 2727 of SEQ ID NO: 1884934
cagugugcgcuccagauuu

SEQ ID NO: 2303193 - RNA, 19 nt, Artificial Sequence
  Description of Artificial Sequence: Synthetic oligonucleotide
  Antisense strand to SEQ ID NO: 2303192
aaaucuggagcgcacacug

SEQ ID NO: 2303194 - RNA, 19 nt, Artificial Sequence
  Description of Artificial Sequence: Synthetic oligonucleotide
  Sense strand starting at position 2749 of SEQ ID NO: 1884934
cguggagugaaaugucaug

SEQ ID NO: 2303195 - RNA, 19 nt, Artificial Sequence
  Description of Artificial Sequence: Synthetic oligonucleotide
  Antisense strand to SEQ ID NO: 2303194
caugacauuucacuccacg

SEQ ID NO: 2303196 - RNA, 19 nt, Artificial Sequence
  Description of Artificial Sequence: Synthetic oligonucleotide
  Sense strand starting at position 2774 of SEQ ID NO: 1884934
cugguauuuauucgguguu

SEQ ID NO: 2303197 - RNA, 19 nt, Artificial Sequence
  Description of Artificial Sequence: Synthetic oligonucleotide
  Antisense strand to SEQ ID NO: 2303196
aacaccgaauaaauaccag

SEQ ID NO: 2303198 - RNA, 19 nt, Artificial Sequence
  Description of Artificial Sequence: Synthetic oligonucleotide
  Sense strand starting at position 2776 of SEQ ID NO: 1884934
gguauuuauucgguguucu

SEQ ID NO: 2303199 - RNA, 19 nt, Artificial Sequence
  Description of Artificial Sequence: Synthetic oligonucleotide
  Antisense strand to SEQ ID NO: 2303198
agaacaccgaauaaauacc

SEQ ID NO: 2303200 - RNA, 19 nt, Artificial Sequence
  Description of Artificial Sequence: Synthetic oligonucleotide
  Sense strand starting at position 2777 of SEQ ID NO: 1884934
guauuuauucgguguucug

SEQ ID NO: 2303201 - RNA, 19 nt, Artificial Sequence
  Description of Artificial Sequence: Synthetic oligonucleotide
  Antisense strand to SEQ ID NO: 2303200
cagaacaccgaauaaauac

SEQ ID NO: 2303202 - RNA, 19 nt, Artificial Sequence
  Description of Artificial Sequence: Synthetic oligonucleotide
  Sense strand starting at position 2827 of SEQ ID NO: 1884934
ucauuuagccuucguuaca

SEQ ID NO: 2303203 - RNA, 19 nt, Artificial Sequence
  Description of Artificial Sequence: Synthetic oligonucleotide
  Antisense strand to SEQ ID NO: 2303202
uguaacgaaggcuaaauga

SEQ ID NO: 2303204 - RNA, 19 nt, Artificial Sequence
  Description of Artificial Sequence: Synthetic oligonucleotide
  Sense strand starting at position 2838 of SEQ ID NO: 1884934
ucguuacaacuguauaagu

SEQ ID NO: 2303205 - RNA, 19 nt, Artificial Sequence
  Description of Artificial Sequence: Synthetic oligonucleotide
  Antisense strand to SEQ ID NO: 2303204
acuuauacaguuguaacga

SEQ ID NO: 2303206 - RNA, 19 nt, Artificial Sequence
  Description of Artificial Sequence: Synthetic oligonucleotide
  Sense strand starting at position 2840 of SEQ ID NO: 1884934
guuacaacuguauaaguua

SEQ ID NO: 2303207 - RNA, 19 nt, Artificial Sequence
  Description of Artificial Sequence: Synthetic oligonucleotide
  Antisense strand to SEQ ID NO: 2303206
uaacuuauacaguuguaac

SEQ ID NO: 2303208 - RNA, 19 nt, Artificial Sequence
  Description of Artificial Sequence: Synthetic oligonucleotide
  Sense strand starting at position 2885 of SEQ ID NO: 1884934
caauauugucacguucguu

SEQ ID NO: 2303209 - RNA, 19 nt, Artificial Sequence
  Description of Artificial Sequence: Synthetic oligonucleotide
  Antisense strand to SEQ ID NO: 2303208
aacgaacgugacaauauug

SEQ ID NO: 2303210 - RNA, 19 nt, Artificial Sequence
  Description of Artificial Sequence: Synthetic oligonucleotide
  Sense strand starting at position 2926 of SEQ ID NO: 1884934
acuguaauggaacgaaauu

SEQ ID NO: 2303211 - RNA, 19 nt, Artificial Sequence
  Description of Artificial Sequence: Synthetic oligonucleotide
  Antisense strand to SEQ ID NO: 2303210
aauuucguuccauuacagu

SEQ ID NO: 2303212 - RNA, 19 nt, Artificial Sequence
  Description of Artificial Sequence: Synthetic oligonucleotide
  Sense strand starting at position 3225 of SEQ ID NO: 1884934
agucauacaacgggugaga

SEQ ID NO: 2303213 - RNA, 19 nt, Artificial Sequence
  Description of Artificial Sequence: Synthetic oligonucleotide
  Antisense strand to SEQ ID NO: 2303212
ucucacccguuguaugacu

SEQ ID NO: 2303214 - RNA, 19 nt, Artificial Sequence
  Description of Artificial Sequence: Synthetic oligonucleotide
  Sense strand starting at position 3289 of SEQ ID NO: 1884934
ugaccaucugguuguuuga

SEQ ID NO: 2303215 - RNA, 19 nt, Artificial Sequence
  Description of Artificial Sequence: Synthetic oligonucleotide
  Antisense strand to SEQ ID NO: 2303214
ucaaacaaccagaugguca

SEQ ID NO: 2303216 - RNA, 19 nt, Artificial Sequence
  Description of Artificial Sequence: Synthetic oligonucleotide
  Sense strand starting at position 3291 of SEQ ID NO: 1884934
accaucugguuguuugauu

SEQ ID NO: 2303217 - RNA, 19 nt, Artificial Sequence
  Description of Artificial Sequence: Synthetic oligonucleotide
  Antisense strand to SEQ ID NO: 2303216
aaucaaacaaccagauggu

SEQ ID NO: 2303218 - RNA, 19 nt, Artificial Sequence
  Description of Artificial Sequence: Synthetic oligonucleotide
  Sense strand starting at position 3292 of SEQ ID NO: 1884934
ccaucugguuguuugauuu

SEQ ID NO: 2303219 - RNA, 19 nt, Artificial Sequence
  Description of Artificial Sequence: Synthetic oligonucleotide
  Antisense strand to SEQ ID NO: 2303218
aaaucaaacaaccagaugg

SEQ ID NO: 2303220 - RNA, 19 nt, Artificial Sequence
  Description of Artificial Sequence: Synthetic oligonucleotide
  Sense strand starting at position 3299 of SEQ ID NO: 1884934
guuguuugauuuccucuga

SEQ ID NO: 2303221 - RNA, 19 nt, Artificial Sequence
  Description of Artificial Sequence: Synthetic oligonucleotide
  Antisense strand to SEQ ID NO: 2303220
ucagaggaaaucaaacaac

SEQ ID NO: 2303222 - RNA, 19 nt, Artificial Sequence
  Description of Artificial Sequence: Synthetic oligonucleotide
  Sense strand starting at position 3360 of SEQ ID NO: 1884934
aaauguuuaguuugucuga

SEQ ID NO: 2303223 - RNA, 19 nt, Artificial Sequence
  Description of Artificial Sequence: Synthetic oligonucleotide
  Antisense strand to SEQ ID NO: 2303222
ucagacaaacuaaacauuu

SEQ ID NO: 2303224 - RNA, 19 nt, Artificial Sequence
  Description of Artificial Sequence: Synthetic oligonucleotide
  Sense strand starting at position 3361 of SEQ ID NO: 1884934
aauguuuaguuugucugaa

SEQ ID NO: 2303225 - RNA, 19 nt, Artificial Sequence
  Description of Artificial Sequence: Synthetic oligonucleotide
  Antisense strand to SEQ ID NO: 2303224
uucagacaaacuaaacauu

SEQ ID NO: 2303226 - RNA, 19 nt, Artificial Sequence
  Description of Artificial Sequence: Synthetic oligonucleotide
  Sense strand starting at position 3362 of SEQ ID NO: 1884934
auguuuaguuugucugaaa

SEQ ID NO: 2303227 - RNA, 19 nt, Artificial Sequence
  Description of Artificial Sequence: Synthetic oligonucleotide
  Antisense strand to SEQ ID NO: 2303226
uuucagacaaacuaaacau

SEQ ID NO: 2303228 - RNA, 19 nt, Artificial Sequence
  Description of Artificial Sequence: Synthetic oligonucleotide
  Sense strand starting at position 3385 of SEQ ID NO: 1884934
augaauuagcuccgacauu

SEQ ID NO: 2303229 - RNA, 19 nt, Artificial Sequence
  Description of Artificial Sequence: Synthetic oligonucleotide
  Antisense strand to SEQ ID NO: 2303228
aaugucggagcuaauucau

SEQ ID NO: 2303230 - RNA, 19 nt, Artificial Sequence
  Description of Artificial Sequence: Synthetic oligonucleotide
  Sense strand starting at position 3936 of SEQ ID NO: 1884934
gaggaaguauuugaagauu

SEQ ID NO: 2303231 - RNA, 19 nt, Artificial Sequence
  Description of Artificial Sequence: Synthetic oligonucleotide
  Antisense strand to SEQ ID NO: 2303230
aaucuucaaauacuuccuc

SEQ ID NO: 2303232 - RNA, 19 nt, Artificial Sequence
  Description of Artificial Sequence: Synthetic oligonucleotide
  Sense strand starting at position 3957 of SEQ ID NO: 1884934
ucccuuugucuuuacuuga

SEQ ID NO: 2303233 - RNA, 19 nt, Artificial Sequence
  Description of Artificial Sequence: Synthetic oligonucleotide
  Antisense strand to SEQ ID NO: 2303232
ucaaguaaagacaaaggga

SEQ ID NO: 2303234 - RNA, 19 nt, Artificial Sequence
  Description of Artificial Sequence: Synthetic oligonucleotide
  Sense strand starting at position 3962 of SEQ ID NO: 1884934
uugucuuuacuugauagac

SEQ ID NO: 2303235 - RNA, 19 nt, Artificial Sequence
  Description of Artificial Sequence: Synthetic oligonucleotide
  Antisense strand to SEQ ID NO: 2303234
gucuaucaaguaaagacaa

SEQ ID NO: 2303236 - RNA, 19 nt, Artificial Sequence
  Description of Artificial Sequence: Synthetic oligonucleotide
  Sense strand starting at position 3980 of SEQ ID NO: 1884934
cuaggagguuuggugaaga

SEQ ID NO: 2303237 - RNA, 19 nt, Artificial Sequence
  Description of Artificial Sequence: Synthetic oligonucleotide
  Antisense strand to SEQ ID NO: 2303236
ucuucaccaaaccuccuag

SEQ ID NO: 2303238 - RNA, 19 nt, Artificial Sequence
  Description of Artificial Sequence: Synthetic oligonucleotide
  Sense strand starting at position 82 of SEQ ID NO: 1884935
ggcagaguuuggaagaguc

SEQ ID NO: 2303239 - RNA, 19 nt, Artificial Sequence
  Description of Artificial Sequence: Synthetic oligonucleotide
  Antisense strand to SEQ ID NO: 2303238
gacucuuccaaacucugcc

SEQ ID NO: 2303240 - RNA, 19 nt, Artificial Sequence
  Description of Artificial Sequence: Synthetic oligonucleotide
  Sense strand starting at position 982 of SEQ ID NO: 1884935
cguagcaguauuuggauau

SEQ ID NO: 2303241 - RNA, 19 nt, Artificial Sequence
  Description of Artificial Sequence: Synthetic oligonucleotide
  Antisense strand to SEQ ID NO: 2303240
auauccaaauacugcuacg

SEQ ID NO: 2303242 - RNA, 19 nt, Artificial Sequence
  Description of Artificial Sequence: Synthetic oligonucleotide
  Sense strand starting at position 1004 of SEQ ID NO: 1884935
guuuccucacgcuauuuau

SEQ ID NO: 2303243 - RNA, 19 nt, Artificial Sequence
  Description of Artificial Sequence: Synthetic oligonucleotide
  Antisense strand to SEQ ID NO: 2303242
auaaauagcgugaggaaac

SEQ ID NO: 2303244 - RNA, 19 nt, Artificial Sequence
  Description of Artificial Sequence: Synthetic oligonucleotide
  Sense strand starting at position 1045 of SEQ ID NO: 1884935
ucguguauucuugacacaa

SEQ ID NO: 2303245 - RNA, 19 nt, Artificial Sequence
  Description of Artificial Sequence: Synthetic oligonucleotide
  Antisense strand to SEQ ID NO: 2303244
uugugucaagaauacacga

SEQ ID NO: 2303246 - RNA, 19 nt, Artificial Sequence
  Description of Artificial Sequence: Synthetic oligonucleotide
  Sense strand starting at position 1057 of SEQ ID NO: 1884935
gacacaagauuaguugacu

SEQ ID NO: 2303247 - RNA, 19 nt, Artificial Sequence
  Description of Artificial Sequence: Synthetic oligonucleotide
  Antisense strand to SEQ ID NO: 2303246
agucaacuaaucuuguguc

SEQ ID NO: 2303248 - RNA, 19 nt, Artificial Sequence
  Description of Artificial Sequence: Synthetic oligonucleotide
  Sense strand starting at position 1058 of SEQ ID NO: 1884935
acacaagauuaguugacuu

SEQ ID NO: 2303249 - RNA, 19 nt, Artificial Sequence
  Description of Artificial Sequence: Synthetic oligonucleotide
  Antisense strand to SEQ ID NO: 2303248
aagucaacuaaucuugugu

SEQ ID NO: 2303250 - RNA, 19 nt, Artificial Sequence
  Description of Artificial Sequence: Synthetic oligonucleotide
  Sense strand starting at position 1066 of SEQ ID NO: 1884935
uuaguugacuugccuaaga

SEQ ID NO: 2303251 - RNA, 19 nt, Artificial Sequence
  Description of Artificial Sequence: Synthetic oligonucleotide
  Antisense strand to SEQ ID NO: 2303250
ucuuaggcaagucaacuaa

SEQ ID NO: 2303252 - RNA, 19 nt, Artificial Sequence
  Description of Artificial Sequence: Synthetic oligonucleotide
  Sense strand starting at position 1068 of SEQ ID NO: 1884935
aguugacuugccuaagauu

SEQ ID NO: 2303253 - RNA, 19 nt, Artificial Sequence
  Description of Artificial Sequence: Synthetic oligonucleotide
  Antisense strand to SEQ ID NO: 2303252
aaucuuaggcaagucaacu

SEQ ID NO: 2303254 - RNA, 19 nt, Artificial Sequence
  Description of Artificial Sequence: Synthetic oligonucleotide
  Sense strand starting at position 1076 of SEQ ID NO: 1884935
ugccuaagauuaguugacu

SEQ ID NO: 2303255 - RNA, 19 nt, Artificial Sequence
  Description of Artificial Sequence: Synthetic oligonucleotide
  Antisense strand to SEQ ID NO: 2303254
agucaacuaaucuuaggca

SEQ ID NO: 2303256 - RNA, 19 nt, Artificial Sequence
  Description of Artificial Sequence: Synthetic oligonucleotide
  Sense strand starting at position 1079 of SEQ ID NO: 1884935
cuaagauuaguugacugua

SEQ ID NO: 2303257 - RNA, 19 nt, Artificial Sequence
  Description of Artificial Sequence: Synthetic oligonucleotide
  Antisense strand to SEQ ID NO: 2303256
uacagucaacuaaucuuag

SEQ ID NO: 2303258 - RNA, 19 nt, Artificial Sequence
  Description of Artificial Sequence: Synthetic oligonucleotide
  Sense strand starting at position 1179 of SEQ ID NO: 1884935
gaguucuaccucugggaau

SEQ ID NO: 2303259 - RNA, 19 nt, Artificial Sequence
  Description of Artificial Sequence: Synthetic oligonucleotide
  Antisense strand to SEQ ID NO: 2303258
auucccagagguagaacuc

SEQ ID NO: 2303260 - RNA, 19 nt, Artificial Sequence
  Description of Artificial Sequence: Synthetic oligonucleotide
  Sense strand starting at position 1181 of SEQ ID NO: 1884935
guucuaccucugggaauaa

SEQ ID NO: 2303261 - RNA, 19 nt, Artificial Sequence
  Description of Artificial Sequence: Synthetic oligonucleotide
  Antisense strand to SEQ ID NO: 2303260
uuauucccagagguagaac

SEQ ID NO: 2303262 - RNA, 19 nt, Artificial Sequence
  Description of Artificial Sequence: Synthetic oligonucleotide
  Sense strand starting at position 1211 of SEQ ID NO: 1884935
cucuaaucacuggauguuu

SEQ ID NO: 2303263 - RNA, 19 nt, Artificial Sequence
  Description of Artificial Sequence: Synthetic oligonucleotide
  Antisense strand to SEQ ID NO: 2303262
aaacauccagugauuagag

SEQ ID NO: 2303264 - RNA, 19 nt, Artificial Sequence
  Description of Artificial Sequence: Synthetic oligonucleotide
  Sense strand starting at position 1213 of SEQ ID NO: 1884935
cuaaucacuggauguuuga

SEQ ID NO: 2303265 - RNA, 19 nt, Artificial Sequence
  Description of Artificial Sequence: Synthetic oligonucleotide
  Antisense strand to SEQ ID NO: 2303264
ucaaacauccagugauuag

SEQ ID NO: 2303266 - RNA, 19 nt, Artificial Sequence
  Description of Artificial Sequence: Synthetic oligonucleotide
  Sense strand starting at position 1267 of SEQ ID NO: 1884935
ggcaaaggaucucugaauu

SEQ ID NO: 2303267 - RNA, 19 nt, Artificial Sequence
  Description of Artificial Sequence: Synthetic oligonucleotide
  Antisense strand to SEQ ID NO: 2303266
aauucagagauccuuugcc

SEQ ID NO: 2303268 - RNA, 19 nt, Artificial Sequence
  Description of Artificial Sequence: Synthetic oligonucleotide
  Sense strand starting at position 1324 of SEQ ID NO: 1884935
ccauguuguccuggagaau

SEQ ID NO: 2303269 - RNA, 19 nt, Artificial Sequence
  Description of Artificial Sequence: Synthetic oligonucleotide
  Antisense strand to SEQ ID NO: 2303268
auucuccaggacaacaugg

SEQ ID NO: 2303270 - RNA, 19 nt, Artificial Sequence
  Description of Artificial Sequence: Synthetic oligonucleotide
  Sense strand starting at position 1325 of SEQ ID NO: 1884935
cauguuguccuggagaauc

SEQ ID NO: 2303271 - RNA, 19 nt, Artificial Sequence
  Description of Artificial Sequence: Synthetic oligonucleotide
  Antisense strand to SEQ ID NO: 2303270
gauucuccaggacaacaug

SEQ ID NO: 2303272 - RNA, 19 nt, Artificial Sequence
  Description of Artificial Sequence: Synthetic oligonucleotide
  Sense strand starting at position 1327 of SEQ ID NO: 1884935
uguuguccuggagaaucau

SEQ ID NO: 2303273 - RNA, 19 nt, Artificial Sequence
  Description of Artificial Sequence: Synthetic oligonucleotide
  Antisense strand to SEQ ID NO: 2303272
augauucuccaggacaaca

SEQ ID NO: 2303274 - RNA, 19 nt, Artificial Sequence
  Description of Artificial Sequence: Synthetic oligonucleotide
  Sense strand starting at position 1495 of SEQ ID NO: 1884935
ucccuacgacuccaguuau

SEQ ID NO: 2303275 - RNA, 19 nt, Artificial Sequence
  Description of Artificial Sequence: Synthetic oligonucleotide
  Antisense strand to SEQ ID NO: 2303274
auaacuggagucguaggga

SEQ ID NO: 2303276 - RNA, 19 nt, Artificial Sequence
  Description of Artificial Sequence: Synthetic oligonucleotide
  Sense strand starting at position 1506 of SEQ ID NO: 1884935
ccaguuauggaucaacuuu

SEQ ID NO: 2303277 - RNA, 19 nt, Artificial Sequence
  Description of Artificial Sequence: Synthetic oligonucleotide
  Antisense strand to SEQ ID NO: 2303276
aaaguugauccauaacugg

SEQ ID NO: 2303278 - RNA, 19 nt, Artificial Sequence
  Description of Artificial Sequence: Synthetic oligonucleotide
  Sense strand starting at position 1959 of SEQ ID NO: 1884935
gugugagcccguuuggagu

SEQ ID NO: 2303279 - RNA, 19 nt, Artificial Sequence
  Description of Artificial Sequence: Synthetic oligonucleotide
  Antisense strand to SEQ ID NO: 2303278
acuccaaacgggcucacac

SEQ ID NO: 2303280 - RNA, 19 nt, Artificial Sequence
  Description of Artificial Sequence: Synthetic oligonucleotide
  Sense strand starting at position 2903 of SEQ ID NO: 1884935
uucuuaggguuuccauuau

SEQ ID NO: 2303281 - RNA, 19 nt, Artificial Sequence
  Description of Artificial Sequence: Synthetic oligonucleotide
  Antisense strand to SEQ ID NO: 2303280
auaauggaaacccuaagaa

SEQ ID NO: 2303282 - RNA, 19 nt, Artificial Sequence
  Description of Artificial Sequence: Synthetic oligonucleotide
  Sense strand starting at position 2936 of SEQ ID NO: 1884935
cacugaaaguaguuguaug

SEQ ID NO: 2303283 - RNA, 19 nt, Artificial Sequence
  Description of Artificial Sequence: Synthetic oligonucleotide
  Antisense strand to SEQ ID NO: 2303282
cauacaacuacuuucagug

SEQ ID NO: 2303284 - RNA, 19 nt, Artificial Sequence
  Description of Artificial Sequence: Synthetic oligonucleotide
  Sense strand starting at position 2937 of SEQ ID NO: 1884935
acugaaaguaguuguauga

SEQ ID NO: 2303285 - RNA, 19 nt, Artificial Sequence
  Description of Artificial Sequence: Synthetic oligonucleotide
  Antisense strand to SEQ ID NO: 2303284
ucauacaacuacuuucagu

SEQ ID NO: 2303286 - RNA, 19 nt, Artificial Sequence
  Description of Artificial Sequence: Synthetic oligonucleotide
  Sense strand starting at position 2950 of SEQ ID NO: 1884935
guaugaaauagcuacguuu

SEQ ID NO: 2303287 - RNA, 19 nt, Artificial Sequence
  Description of Artificial Sequence: Synthetic oligonucleotide
  Antisense strand to SEQ ID NO: 2303286
aaacguagcuauuucauac

SEQ ID NO: 2303288 - RNA, 19 nt, Artificial Sequence
  Description of Artificial Sequence: Synthetic oligonucleotide
  Sense strand starting at position 3321 of SEQ ID NO: 1884935
acaguaagacccugucaaa

SEQ ID NO: 2303289 - RNA, 19 nt, Artificial Sequence
  Description of Artificial Sequence: Synthetic oligonucleotide
  Antisense strand to SEQ ID NO: 2303288
uuugacagggucuuacugu

SEQ ID NO: 2303290 - RNA, 19 nt, Artificial Sequence
  Description of Artificial Sequence: Synthetic oligonucleotide
  Sense strand starting at position 3357 of SEQ ID NO: 1884935
cgaauuguucuugaaccuu

SEQ ID NO: 2303291 - RNA, 19 nt, Artificial Sequence
  Description of Artificial Sequence: Synthetic oligonucleotide
  Antisense strand to SEQ ID NO: 2303290
aagguucaagaacaauucg

SEQ ID NO: 2303292 - RNA, 19 nt, Artificial Sequence
  Description of Artificial Sequence: Synthetic oligonucleotide
  Sense strand starting at position 3402 of SEQ ID NO: 1884935
uugagauucugauuggagu

SEQ ID NO: 2303293 - RNA, 19 nt, Artificial Sequence
  Description of Artificial Sequence: Synthetic oligonucleotide
  Antisense strand to SEQ ID NO: 2303292
acuccaaucagaaucucaa

SEQ ID NO: 2303294 - RNA, 19 nt, Artificial Sequence
  Description of Artificial Sequence: Synthetic oligonucleotide
  Sense strand starting at position 3403 of SEQ ID NO: 1884935
ugagauucugauuggaguc

SEQ ID NO: 2303295 - RNA, 19 nt, Artificial Sequence
  Description of Artificial Sequence: Synthetic oligonucleotide
  Antisense strand to SEQ ID NO: 2303294
gacuccaaucagaaucuca

SEQ ID NO: 2303296 - RNA, 19 nt, Artificial Sequence
  Description of Artificial Sequence: Synthetic oligonucleotide
  Sense strand starting at position 3410 of SEQ ID NO: 1884935
cugauuggagucgaugagu

SEQ ID NO: 2303297 - RNA, 19 nt, Artificial Sequence
  Description of Artificial Sequence: Synthetic oligonucleotide
  Antisense strand to SEQ ID NO: 2303296
acucaucgacuccaaucag

SEQ ID NO: 2303298 - RNA, 19 nt, Artificial Sequence
  Description of Artificial Sequence: Synthetic oligonucleotide
  Sense strand starting at position 3413 of SEQ ID NO: 1884935
auuggagucgaugaguuau

SEQ ID NO: 2303299 - RNA, 19 nt, Artificial Sequence
  Description of Artificial Sequence: Synthetic oligonucleotide
  Antisense strand to SEQ ID NO: 2303298
auaacucaucgacuccaau

SEQ ID NO: 2303300 - RNA, 19 nt, Artificial Sequence
  Description of Artificial Sequence: Synthetic oligonucleotide
  Sense strand starting at position 3415 of SEQ ID NO: 1884935
uggagucgaugaguuauau

SEQ ID NO: 2303301 - RNA, 19 nt, Artificial Sequence
  Description of Artificial Sequence: Synthetic oligonucleotide
  Antisense strand to SEQ ID NO: 2303300
auauaacucaucgacucca

SEQ ID NO: 2303302 - RNA, 19 nt, Artificial Sequence
  Description of Artificial Sequence: Synthetic oligonucleotide
  Sense strand starting at position 3558 of SEQ ID NO: 1884935
gggucuugauauuccuaca

SEQ ID NO: 2303303 - RNA, 19 nt, Artificial Sequence
  Description of Artificial Sequence: Synthetic oligonucleotide
  Antisense strand to SEQ ID NO: 2303302
uguaggaauaucaagaccc

SEQ ID NO: 2303304 - RNA, 19 nt, Artificial Sequence
  Description of Artificial Sequence: Synthetic oligonucleotide
  Sense strand starting at position 3591 of SEQ ID NO: 1884935
ugucaauuaugagucggau

SEQ ID NO: 2303305 - RNA, 19 nt, Artificial Sequence
  Description of Artificial Sequence: Synthetic oligonucleotide
  Antisense strand to SEQ ID NO: 2303304
auccgacucauaauugaca

SEQ ID NO: 2303306 - RNA, 19 nt, Artificial Sequence
  Description of Artificial Sequence: Synthetic oligonucleotide
  Sense strand starting at position 3629 of SEQ ID NO: 1884935
augugaguuguuuauaucu

SEQ ID NO: 2303307 - RNA, 19 nt, Artificial Sequence
  Description of Artificial Sequence: Synthetic oligonucleotide
  Antisense strand to SEQ ID NO: 2303306
agauauaaacaacucacau

SEQ ID NO: 2303308 - RNA, 19 nt, Artificial Sequence
  Description of Artificial Sequence: Synthetic oligonucleotide
  Sense strand starting at position 3652 of SEQ ID NO: 1884935
gaaauaagguuauugaccu

SEQ ID NO: 2303309 - RNA, 19 nt, Artificial Sequence
  Description of Artificial Sequence: Synthetic oligonucleotide
  Antisense strand to SEQ ID NO: 2303308
aggucaauaaccuuauuuc

SEQ ID NO: 2303310 - RNA, 19 nt, Artificial Sequence
  Description of Artificial Sequence: Synthetic oligonucleotide
  Sense strand starting at position 3656 of SEQ ID NO: 1884935
uaagguuauugaccuggaa

SEQ ID NO: 2303311 - RNA, 19 nt, Artificial Sequence
  Description of Artificial Sequence: Synthetic oligonucleotide
  Antisense strand to SEQ ID NO: 2303310
uuccaggucaauaaccuua

SEQ ID NO: 2303312 - RNA, 19 nt, Artificial Sequence
  Description of Artificial Sequence: Synthetic oligonucleotide
  Sense strand starting at position 3811 of SEQ ID NO: 1884935
ucuuauuuagcuuguguau

SEQ ID NO: 2303313 - RNA, 19 nt, Artificial Sequence
  Description of Artificial Sequence: Synthetic oligonucleotide
  Antisense strand to SEQ ID NO: 2303312
auacacaagcuaaauaaga

SEQ ID NO: 2303314 - RNA, 19 nt, Artificial Sequence
  Description of Artificial Sequence: Synthetic oligonucleotide
  Sense strand starting at position 3814 of SEQ ID NO: 1884935
uauuuagcuuguguauguu

SEQ ID NO: 2303315 - RNA, 19 nt, Artificial Sequence
  Description of Artificial Sequence: Synthetic oligonucleotide
  Antisense strand to SEQ ID NO: 2303314
aacauacacaagcuaaaua

SEQ ID NO: 2303316 - RNA, 19 nt, Artificial Sequence
  Description of Artificial Sequence: Synthetic oligonucleotide
  Sense strand starting at position 3963 of SEQ ID NO: 1884935
ucuuguauaacugggagaa

SEQ ID NO: 2303317 - RNA, 19 nt, Artificial Sequence
  Description of Artificial Sequence: Synthetic oligonucleotide
  Antisense strand to SEQ ID NO: 2303316
uucucccaguuauacaaga

SEQ ID NO: 2303318 - RNA, 19 nt, Artificial Sequence
  Description of Artificial Sequence: Synthetic oligonucleotide
  Sense strand starting at position 54 of SEQ ID NO: 1884936
auacauauagaugguguau

SEQ ID NO: 2303319 - RNA, 19 nt, Artificial Sequence
  Description of Artificial Sequence: Synthetic oligonucleotide
  Antisense strand to SEQ ID NO: 2303318
auacaccaucuauauguau

SEQ ID NO: 2303320 - RNA, 19 nt, Artificial Sequence
  Description of Artificial Sequence: Synthetic oligonucleotide
  Sense strand starting at position 138 of SEQ ID NO: 1884936
gugggaugaucccuugaac

SEQ ID NO: 2303321 - RNA, 19 nt, Artificial Sequence
  Description of Artificial Sequence: Synthetic oligonucleotide
  Antisense strand to SEQ ID NO: 2303320
guucaagggaucaucccac

SEQ ID NO: 2303322 - RNA, 19 nt, Artificial Sequence
  Description of Artificial Sequence: Synthetic oligonucleotide
  Sense strand starting at position 402 of SEQ ID NO: 1884936
gagcuagauuuguauuuau

SEQ ID NO: 2303323 - RNA, 19 nt, Artificial Sequence
  Description of Artificial Sequence: Synthetic oligonucleotide
  Antisense strand to SEQ ID NO: 2303322
auaaauacaaaucuagcuc

SEQ ID NO: 2303324 - RNA, 19 nt, Artificial Sequence
  Description of Artificial Sequence: Synthetic oligonucleotide
  Sense strand starting at position 479 of SEQ ID NO: 1884936
agggaauaauguuccuauu

SEQ ID NO: 2303325 - RNA, 19 nt, Artificial Sequence
  Description of Artificial Sequence: Synthetic oligonucleotide
  Antisense strand to SEQ ID NO: 2303324
aauaggaacauuauucccu

SEQ ID NO: 2303326 - RNA, 19 nt, Artificial Sequence
  Description of Artificial Sequence: Synthetic oligonucleotide
  Sense strand starting at position 481 of SEQ ID NO: 1884936
ggaauaauguuccuauuau

SEQ ID NO: 2303327 - RNA, 19 nt, Artificial Sequence
  Description of Artificial Sequence: Synthetic oligonucleotide
  Antisense strand to SEQ ID NO: 2303326
auaauaggaacauuauucc

SEQ ID NO: 2303328 - RNA, 19 nt, Artificial Sequence
  Description of Artificial Sequence: Synthetic oligonucleotide
  Sense strand starting at position 511 of SEQ ID NO: 1884936
gucagccuauuacuagaaa

SEQ ID NO: 2303329 - RNA, 19 nt, Artificial Sequence
  Description of Artificial Sequence: Synthetic oligonucleotide
  Antisense strand to SEQ ID NO: 2303328
uuucuaguaauaggcugac

SEQ ID NO: 2303330 - RNA, 19 nt, Artificial Sequence
  Description of Artificial Sequence: Synthetic oligonucleotide
  Sense strand starting at position 721 of SEQ ID NO: 1884936
aguaguuauaaugggugga

SEQ ID NO: 2303331 - RNA, 19 nt, Artificial Sequence
  Description of Artificial Sequence: Synthetic oligonucleotide
  Antisense strand to SEQ ID NO: 2303330
uccacccauuauaacuacu

SEQ ID NO: 2303332 - RNA, 19 nt, Artificial Sequence
  Description of Artificial Sequence: Synthetic oligonucleotide
  Sense strand starting at position 723 of SEQ ID NO: 1884936
uaguuauaauggguggaua

SEQ ID NO: 2303333 - RNA, 19 nt, Artificial Sequence
  Description of Artificial Sequence: Synthetic oligonucleotide
  Antisense strand to SEQ ID NO: 2303332
uauccacccauuauaacua

SEQ ID NO: 2303334 - RNA, 19 nt, Artificial Sequence
  Description of Artificial Sequence: Synthetic oligonucleotide
  Sense strand starting at position 724 of SEQ ID NO: 1884936
aguuauaauggguggauau

SEQ ID NO: 2303335 - RNA, 19 nt, Artificial Sequence
  Description of Artificial Sequence: Synthetic oligonucleotide
  Antisense strand to SEQ ID NO: 2303334
auauccacccauuauaacu

SEQ ID NO: 2303336 - RNA, 19 nt, Artificial Sequence
  Description of Artificial Sequence: Synthetic oligonucleotide
  Sense strand starting at position 725 of SEQ ID NO: 1884936
guuauaauggguggauaua

SEQ ID NO: 2303337 - RNA, 19 nt, Artificial Sequence
  Description of Artificial Sequence: Synthetic oligonucleotide
  Antisense strand to SEQ ID NO: 2303336
uauauccacccauuauaac

SEQ ID NO: 2303338 - RNA, 19 nt, Artificial Sequence
  Description of Artificial Sequence: Synthetic oligonucleotide
  Sense strand starting at position 864 of SEQ ID NO: 1884936
uuaugauauagaggccaga

SEQ ID NO: 2303339 - RNA, 19 nt, Artificial Sequence
  Description of Artificial Sequence: Synthetic oligonucleotide
  Antisense strand to SEQ ID NO: 2303338
ucuggccucuauaucauaa

SEQ ID NO: 2303340 - RNA, 19 nt, Artificial Sequence
  Description of Artificial Sequence: Synthetic oligonucleotide
  Sense strand starting at position 924 of SEQ ID NO: 1884936
agagcaaaugauugcagau

SEQ ID NO: 2303341 - RNA, 19 nt, Artificial Sequence
  Description of Artificial Sequence: Synthetic oligonucleotide
  Antisense strand to SEQ ID NO: 2303340
aucugcaaucauuugcucu

SEQ ID NO: 2303342 - RNA, 19 nt, Artificial Sequence
  Description of Artificial Sequence: Synthetic oligonucleotide
  Sense strand starting at position 1123 of SEQ ID NO: 1884936
ggaacuuugaguugagcaa

SEQ ID NO: 2303343 - RNA, 19 nt, Artificial Sequence
  Description of Artificial Sequence: Synthetic oligonucleotide
  Antisense strand to SEQ ID NO: 2303342
uugcucaacucaaaguucc

SEQ ID NO: 2303344 - RNA, 19 nt, Artificial Sequence
  Description of Artificial Sequence: Synthetic oligonucleotide
  Sense strand starting at position 1127 of SEQ ID NO: 1884936
cuuugaguugagcaaacau

SEQ ID NO: 2303345 - RNA, 19 nt, Artificial Sequence
  Description of Artificial Sequence: Synthetic oligonucleotide
  Antisense strand to SEQ ID NO: 2303344
auguuugcucaacucaaag

SEQ ID NO: 2303346 - RNA, 19 nt, Artificial Sequence
  Description of Artificial Sequence: Synthetic oligonucleotide
  Sense strand starting at position 1238 of SEQ ID NO: 1884936
gaugacuacuggucuggga

SEQ ID NO: 2303347 - RNA, 19 nt, Artificial Sequence
  Description of Artificial Sequence: Synthetic oligonucleotide
  Antisense strand to SEQ ID NO: 2303346
ucccagaccaguagucauc

SEQ ID NO: 2303348 - RNA, 19 nt, Artificial Sequence
  Description of Artificial Sequence: Synthetic oligonucleotide
  Sense strand starting at position 1240 of SEQ ID NO: 1884936
ugacuacuggucugggaua

SEQ ID NO: 2303349 - RNA, 19 nt, Artificial Sequence
  Description of Artificial Sequence: Synthetic oligonucleotide
  Antisense strand to SEQ ID NO: 2303348
uaucccagaccaguaguca

SEQ ID NO: 2303350 - RNA, 19 nt, Artificial Sequence
  Description of Artificial Sequence: Synthetic oligonucleotide
  Sense strand starting at position 1245 of SEQ ID NO: 1884936
acuggucugggauaguuga

SEQ ID NO: 2303351 - RNA, 19 nt, Artificial Sequence
  Description of Artificial Sequence: Synthetic oligonucleotide
  Antisense strand to SEQ ID NO: 2303350
ucaacuaucccagaccagu

SEQ ID NO: 2303352 - RNA, 19 nt, Artificial Sequence
  Description of Artificial Sequence: Synthetic oligonucleotide
  Sense strand starting at position 1318 of SEQ ID NO: 1884936
caagguugcagagggaaua

SEQ ID NO: 2303353 - RNA, 19 nt, Artificial Sequence
  Description of Artificial Sequence: Synthetic oligonucleotide
  Antisense strand to SEQ ID NO: 2303352
uauucccucugcaaccuug

SEQ ID NO: 2303354 - RNA, 19 nt, Artificial Sequence
  Description of Artificial Sequence: Synthetic oligonucleotide
  Sense strand starting at position 1377 of SEQ ID NO: 1884936
ugcagagauguccaaguac

SEQ ID NO: 2303355 - RNA, 19 nt, Artificial Sequence
  Description of Artificial Sequence: Synthetic oligonucleotide
  Antisense strand to SEQ ID NO: 2303354
guacuuggacaucucugca

SEQ ID NO: 2303356 - RNA, 19 nt, Artificial Sequence
  Description of Artificial Sequence: Synthetic oligonucleotide
  Sense strand starting at position 1384 of SEQ ID NO: 1884936
auguccaaguacuuagaua

SEQ ID NO: 2303357 - RNA, 19 nt, Artificial Sequence
  Description of Artificial Sequence: Synthetic oligonucleotide
  Antisense strand to SEQ ID NO: 2303356
uaucuaaguacuuggacau

SEQ ID NO: 2303358 - RNA, 19 nt, Artificial Sequence
  Description of Artificial Sequence: Synthetic oligonucleotide
  Sense strand starting at position 1536 of SEQ ID NO: 1884936
uugcuaaaggcagagucau

SEQ ID NO: 2303359 - RNA, 19 nt, Artificial Sequence
  Description of Artificial Sequence: Synthetic oligonucleotide
  Antisense strand to SEQ ID NO: 2303358
augacucugccuuuagcaa

SEQ ID NO: 2303360 - RNA, 19 nt, Artificial Sequence
  Description of Artificial Sequence: Synthetic oligonucleotide
  Sense strand starting at position 1544 of SEQ ID NO: 1884936
ggcagagucauauacugua

SEQ ID NO: 2303361 - RNA, 19 nt, Artificial Sequence
  Description of Artificial Sequence: Synthetic oligonucleotide
  Antisense strand to SEQ ID NO: 2303360
uacaguauaugacucugcc

SEQ ID NO: 2303362 - RNA, 19 nt, Artificial Sequence
  Description of Artificial Sequence: Synthetic oligonucleotide
  Sense strand starting at position 1920 of SEQ ID NO: 1884936
guuguacaccuuuaaauug

SEQ ID NO: 2303363 - RNA, 19 nt, Artificial Sequence
  Description of Artificial Sequence: Synthetic oligonucleotide
  Antisense strand to SEQ ID NO: 2303362
caauuuaaagguguacaac

SEQ ID NO: 2303364 - RNA, 19 nt, Artificial Sequence
  Description of Artificial Sequence: Synthetic oligonucleotide
  Sense strand starting at position 2053 of SEQ ID NO: 1884936
ggcaauguuguuuagggaa

SEQ ID NO: 2303365 - RNA, 19 nt, Artificial Sequence
  Description of Artificial Sequence: Synthetic oligonucleotide
  Antisense strand to SEQ ID NO: 2303364
uucccuaaacaacauugcc

SEQ ID NO: 2303366 - RNA, 19 nt, Artificial Sequence
  Description of Artificial Sequence: Synthetic oligonucleotide
  Sense strand starting at position 2263 of SEQ ID NO: 1884936
ugaauugagcuaggaggau

SEQ ID NO: 2303367 - RNA, 19 nt, Artificial Sequence
  Description of Artificial Sequence: Synthetic oligonucleotide
  Antisense strand to SEQ ID NO: 2303366
auccuccuagcucaauuca

SEQ ID NO: 2303368 - RNA, 19 nt, Artificial Sequence
  Description of Artificial Sequence: Synthetic oligonucleotide
  Sense strand starting at position 2587 of SEQ ID NO: 1884936
ucaucaggcuuccuagaga

SEQ ID NO: 2303369 - RNA, 19 nt, Artificial Sequence
  Description of Artificial Sequence: Synthetic oligonucleotide
  Antisense strand to SEQ ID NO: 2303368
ucucuaggaagccugauga

SEQ ID NO: 2303370 - RNA, 19 nt, Artificial Sequence
  Description of Artificial Sequence: Synthetic oligonucleotide
  Sense strand starting at position 2590 of SEQ ID NO: 1884936
ucaggcuuccuagagaauu

SEQ ID NO: 2303371 - RNA, 19 nt, Artificial Sequence
  Description of Artificial Sequence: Synthetic oligonucleotide
  Antisense strand to SEQ ID NO: 2303370
aauucucuaggaagccuga

SEQ ID NO: 2303372 - RNA, 19 nt, Artificial Sequence
  Description of Artificial Sequence: Synthetic oligonucleotide
  Sense strand starting at position 2626 of SEQ ID NO: 1884936
uaugaagucuacccagaag

SEQ ID NO: 2303373 - RNA, 19 nt, Artificial Sequence
  Description of Artificial Sequence: Synthetic oligonucleotide
  Antisense strand to SEQ ID NO: 2303372
cuucuggguagacuucaua

SEQ ID NO: 2303374 - RNA, 19 nt, Artificial Sequence
  Description of Artificial Sequence: Synthetic oligonucleotide
  Sense strand starting at position 3170 of SEQ ID NO: 1884936
gugacuuugaaaggaugca

SEQ ID NO: 2303375 - RNA, 19 nt, Artificial Sequence
  Description of Artificial Sequence: Synthetic oligonucleotide
  Antisense strand to SEQ ID NO: 2303374
ugcauccuuucaaagucac

SEQ ID NO: 2303376 - RNA, 19 nt, Artificial Sequence
  Description of Artificial Sequence: Synthetic oligonucleotide
  Sense strand starting at position 3257 of SEQ ID NO: 1884936
acagguaucugacuaugua

SEQ ID NO: 2303377 - RNA, 19 nt, Artificial Sequence
  Description of Artificial Sequence: Synthetic oligonucleotide
  Antisense strand to SEQ ID NO: 2303376
uacauagucagauaccugu

SEQ ID NO: 2303378 - RNA, 19 nt, Artificial Sequence
  Description of Artificial Sequence: Synthetic oligonucleotide
  Sense strand starting at position 3258 of SEQ ID NO: 1884936
cagguaucugacuauguag

SEQ ID NO: 2303379 - RNA, 19 nt, Artificial Sequence
  Description of Artificial Sequence: Synthetic oligonucleotide
  Antisense strand to SEQ ID NO: 2303378
cuacauagucagauaccug

SEQ ID NO: 2303380 - RNA, 19 nt, Artificial Sequence
  Description of Artificial Sequence: Synthetic oligonucleotide
  Sense strand starting at position 3261 of SEQ ID NO: 1884936
guaucugacuauguagaga

SEQ ID NO: 2303381 - RNA, 19 nt, Artificial Sequence
  Description of Artificial Sequence: Synthetic oligonucleotide
  Antisense strand to SEQ ID NO: 2303380
ucucuacauagucagauac

SEQ ID NO: 2303382 - RNA, 19 nt, Artificial Sequence
  Description of Artificial Sequence: Synthetic oligonucleotide
  Sense strand starting at position 3409 of SEQ ID NO: 1884936
aggagacuuugaguaguag

SEQ ID NO: 2303383 - RNA, 19 nt, Artificial Sequence
  Description of Artificial Sequence: Synthetic oligonucleotide
  Antisense strand to SEQ ID NO: 2303382
cuacuacucaaagucuccu

SEQ ID NO: 2303384 - RNA, 19 nt, Artificial Sequence
  Description of Artificial Sequence: Synthetic oligonucleotide
  Sense strand starting at position 3410 of SEQ ID NO: 1884936
ggagacuuugaguaguagu

SEQ ID NO: 2303385 - RNA, 19 nt, Artificial Sequence
  Description of Artificial Sequence: Synthetic oligonucleotide
  Antisense strand to SEQ ID NO: 2303384
acuacuacucaaagucucc

SEQ ID NO: 2303386 - RNA, 19 nt, Artificial Sequence
  Description of Artificial Sequence: Synthetic oligonucleotide
  Sense strand starting at position 3482 of SEQ ID NO: 1884936
ugagguugguacccacuaa

SEQ ID NO: 2303387 - RNA, 19 nt, Artificial Sequence
  Description of Artificial Sequence: Synthetic oligonucleotide
  Antisense strand to SEQ ID NO: 2303386
uuaguggguaccaaccuca

SEQ ID NO: 2303388 - RNA, 19 nt, Artificial Sequence
  Description of Artificial Sequence: Synthetic oligonucleotide
  Sense strand starting at position 3486 of SEQ ID NO: 1884936
guugguacccacuaaucuu

SEQ ID NO: 2303389 - RNA, 19 nt, Artificial Sequence
  Description of Artificial Sequence: Synthetic oligonucleotide
  Antisense strand to SEQ ID NO: 2303388
aagauuaguggguaccaac

SEQ ID NO: 2303390 - RNA, 19 nt, Artificial Sequence
  Description of Artificial Sequence: Synthetic oligonucleotide
  Sense strand starting at position 3621 of SEQ ID NO: 1884936
cuaaacuccugagauuuag

SEQ ID NO: 2303391 - RNA, 19 nt, Artificial Sequence
  Description of Artificial Sequence: Synthetic oligonucleotide
  Antisense strand to SEQ ID NO: 2303390
cuaaaucucaggaguuuag

SEQ ID NO: 2303392 - RNA, 19 nt, Artificial Sequence
  Description of Artificial Sequence: Synthetic oligonucleotide
  Sense strand starting at position 3775 of SEQ ID NO: 1884936
gguucucagagcuaugaca

SEQ ID NO: 2303393 - RNA, 19 nt, Artificial Sequence
  Description of Artificial Sequence: Synthetic oligonucleotide
  Antisense strand to SEQ ID NO: 2303392
ugucauagcucugagaacc

SEQ ID NO: 2303394 - RNA, 19 nt, Artificial Sequence
  Description of Artificial Sequence: Synthetic oligonucleotide
  Sense strand starting at position 3777 of SEQ ID NO: 1884936
uucucagagcuaugacaau

SEQ ID NO: 2303395 - RNA, 19 nt, Artificial Sequence
  Description of Artificial Sequence: Synthetic oligonucleotide
  Antisense strand to SEQ ID NO: 2303394
auugucauagcucugagaa

SEQ ID NO: 2303396 - RNA, 19 nt, Artificial Sequence
  Description of Artificial Sequence: Synthetic oligonucleotide
  Sense strand starting at position 3788 of SEQ ID NO: 1884936
augacaaugucacuggauu

SEQ ID NO: 2303397 - RNA, 19 nt, Artificial Sequence
  Description of Artificial Sequence: Synthetic oligonucleotide
  Antisense strand to SEQ ID NO: 2303396
aauccagugacauugucau

SEQ ID NO: 2303398 - RNA, 19 nt, Artificial Sequence
  Description of Artificial Sequence: Synthetic oligonucleotide
  Sense strand starting at position 57 of SEQ ID NO: 1884937
agcugagaacuuuagcuua

SEQ ID NO: 2303399 - RNA, 19 nt, Artificial Sequence
  Description of Artificial Sequence: Synthetic oligonucleotide
  Antisense strand to SEQ ID NO: 2303398
uaagcuaaaguucucagcu

SEQ ID NO: 2303400 - RNA, 19 nt, Artificial Sequence
  Description of Artificial Sequence: Synthetic oligonucleotide
  Sense strand starting at position 59 of SEQ ID NO: 1884937
cugagaacuuuagcuuauc

SEQ ID NO: 2303401 - RNA, 19 nt, Artificial Sequence
  Description of Artificial Sequence: Synthetic oligonucleotide
  Antisense strand to SEQ ID NO: 2303400
gauaagcuaaaguucucag

SEQ ID NO: 2303402 - RNA, 19 nt, Artificial Sequence
  Description of Artificial Sequence: Synthetic oligonucleotide
  Sense strand starting at position 162 of SEQ ID NO: 1884937
guccauggagucugaacau

SEQ ID NO: 2303403 - RNA, 19 nt, Artificial Sequence
  Description of Artificial Sequence: Synthetic oligonucleotide
  Antisense strand to SEQ ID NO: 2303402
auguucagacuccauggac

SEQ ID NO: 2303404 - RNA, 19 nt, Artificial Sequence
  Description of Artificial Sequence: Synthetic oligonucleotide
  Sense strand starting at position 302 of SEQ ID NO: 1884937
ugcauuuggcuuggagacu

SEQ ID NO: 2303405 - RNA, 19 nt, Artificial Sequence
  Description of Artificial Sequence: Synthetic oligonucleotide
  Antisense strand to SEQ ID NO: 2303404
agucuccaagccaaaugca

SEQ ID NO: 2303406 - RNA, 19 nt, Artificial Sequence
  Description of Artificial Sequence: Synthetic oligonucleotide
  Sense strand starting at position 484 of SEQ ID NO: 1884937
cagaguauauuugaagaug

SEQ ID NO: 2303407 - RNA, 19 nt, Artificial Sequence
  Description of Artificial Sequence: Synthetic oligonucleotide
  Antisense strand to SEQ ID NO: 2303406
caucuucaaauauacucug

SEQ ID NO: 2303408 - RNA, 19 nt, Artificial Sequence
  Description of Artificial Sequence: Synthetic oligonucleotide
  Sense strand starting at position 714 of SEQ ID NO: 1884937
gcuguuauuucugccugga

SEQ ID NO: 2303409 - RNA, 19 nt, Artificial Sequence
  Description of Artificial Sequence: Synthetic oligonucleotide
  Antisense strand to SEQ ID NO: 2303408
uccaggcagaaauaacagc

SEQ ID NO: 2303410 - RNA, 19 nt, Artificial Sequence
  Description of Artificial Sequence: Synthetic oligonucleotide
  Sense strand starting at position 812 of SEQ ID NO: 1884937
gagagacuuuccucaccag

SEQ ID NO: 2303411 - RNA, 19 nt, Artificial Sequence
  Description of Artificial Sequence: Synthetic oligonucleotide
  Antisense strand to SEQ ID NO: 2303410
cuggugaggaaagucucuc

SEQ ID NO: 2303412 - RNA, 19 nt, Artificial Sequence
  Description of Artificial Sequence: Synthetic oligonucleotide
  Sense strand starting at position 813 of SEQ ID NO: 1884937
agagacuuuccucaccagu

SEQ ID NO: 2303413 - RNA, 19 nt, Artificial Sequence
  Description of Artificial Sequence: Synthetic oligonucleotide
  Antisense strand to SEQ ID NO: 2303412
acuggugaggaaagucucu

SEQ ID NO: 2303414 - RNA, 19 nt, Artificial Sequence
  Description of Artificial Sequence: Synthetic oligonucleotide
  Sense strand starting at position 843 of SEQ ID NO: 1884937
agaucuccguuguuauuua

SEQ ID NO: 2303415 - RNA, 19 nt, Artificial Sequence
  Description of Artificial Sequence: Synthetic oligonucleotide
  Antisense strand to SEQ ID NO: 2303414
uaaauaacaacggagaucu

SEQ ID NO: 2303416 - RNA, 19 nt, Artificial Sequence
  Description of Artificial Sequence: Synthetic oligonucleotide
  Sense strand starting at position 889 of SEQ ID NO: 1884937
auugauucccuuuauguca

SEQ ID NO: 2303417 - RNA, 19 nt, Artificial Sequence
  Description of Artificial Sequence: Synthetic oligonucleotide
  Antisense strand to SEQ ID NO: 2303416
ugacauaaagggaaucaau

SEQ ID NO: 2303418 - RNA, 19 nt, Artificial Sequence
  Description of Artificial Sequence: Synthetic oligonucleotide
  Sense strand starting at position 1036 of SEQ ID NO: 1884937
agacaaagugcuuaauagu

SEQ ID NO: 2303419 - RNA, 19 nt, Artificial Sequence
  Description of Artificial Sequence: Synthetic oligonucleotide
  Antisense strand to SEQ ID NO: 2303418
acuauuaagcacuuugucu

SEQ ID NO: 2303420 - RNA, 19 nt, Artificial Sequence
  Description of Artificial Sequence: Synthetic oligonucleotide
  Sense strand starting at position 1155 of SEQ ID NO: 1884937
guaaauucuaaagguagag

SEQ ID NO: 2303421 - RNA, 19 nt, Artificial Sequence
  Description of Artificial Sequence: Synthetic oligonucleotide
  Antisense strand to SEQ ID NO: 2303420
cucuaccuuuagaauuuac

SEQ ID NO: 2303422 - RNA, 19 nt, Artificial Sequence
  Description of Artificial Sequence: Synthetic oligonucleotide
  Sense strand starting at position 1328 of SEQ ID NO: 1884937
gccagcucauuuccagauu

SEQ ID NO: 2303423 - RNA, 19 nt, Artificial Sequence
  Description of Artificial Sequence: Synthetic oligonucleotide
  Antisense strand to SEQ ID NO: 2303422
aaucuggaaaugagcuggc

SEQ ID NO: 2303424 - RNA, 19 nt, Artificial Sequence
  Description of Artificial Sequence: Synthetic oligonucleotide
  Sense strand starting at position 1360 of SEQ ID NO: 1884937
gucuaaggcagccagauua

SEQ ID NO: 2303425 - RNA, 19 nt, Artificial Sequence
  Description of Artificial Sequence: Synthetic oligonucleotide
  Antisense strand to SEQ ID NO: 2303424
uaaucuggcugccuuagac

SEQ ID NO: 2303426 - RNA, 19 nt, Artificial Sequence
  Description of Artificial Sequence: Synthetic oligonucleotide
  Sense strand starting at position 1368 of SEQ ID NO: 1884937
cagccagauuaagugaaua

SEQ ID NO: 2303427 - RNA, 19 nt, Artificial Sequence
  Description of Artificial Sequence: Synthetic oligonucleotide
  Antisense strand to SEQ ID NO: 2303426
uauucacuuaaucuggcug

SEQ ID NO: 2303428 - RNA, 19 nt, Artificial Sequence
  Description of Artificial Sequence: Synthetic oligonucleotide
  Sense strand starting at position 1528 of SEQ ID NO: 1884937
uuguuuggcuauuucugaa

SEQ ID NO: 2303429 - RNA, 19 nt, Artificial Sequence
  Description of Artificial Sequence: Synthetic oligonucleotide
  Antisense strand to SEQ ID NO: 2303428
uucagaaauagccaaacaa

SEQ ID NO: 2303430 - RNA, 19 nt, Artificial Sequence
  Description of Artificial Sequence: Synthetic oligonucleotide
  Sense strand starting at position 1535 of SEQ ID NO: 1884937
gcuauuucugaauguaguu

SEQ ID NO: 2303431 - RNA, 19 nt, Artificial Sequence
  Description of Artificial Sequence: Synthetic oligonucleotide
  Antisense strand to SEQ ID NO: 2303430
aacuacauucagaaauagc

SEQ ID NO: 2303432 - RNA, 19 nt, Artificial Sequence
  Description of Artificial Sequence: Synthetic oligonucleotide
  Sense strand starting at position 1668 of SEQ ID NO: 1884937
gggcuaaauuauccaccuu

SEQ ID NO: 2303433 - RNA, 19 nt, Artificial Sequence
  Description of Artificial Sequence: Synthetic oligonucleotide
  Antisense strand to SEQ ID NO: 2303432
aagguggauaauuuagccc

SEQ ID NO: 2303434 - RNA, 19 nt, Artificial Sequence
  Description of Artificial Sequence: Synthetic oligonucleotide
  Sense strand starting at position 2049 of SEQ ID NO: 1884937
caccuugggucacuuugau

SEQ ID NO: 2303435 - RNA, 19 nt, Artificial Sequence
  Description of Artificial Sequence: Synthetic oligonucleotide
  Antisense strand to SEQ ID NO: 2303434
aucaaagugacccaaggug

SEQ ID NO: 2303436 - RNA, 19 nt, Artificial Sequence
  Description of Artificial Sequence: Synthetic oligonucleotide
  Sense strand starting at position 2055 of SEQ ID NO: 1884937
gggucacuuugauuaacau

SEQ ID NO: 2303437 - RNA, 19 nt, Artificial Sequence
  Description of Artificial Sequence: Synthetic oligonucleotide
  Antisense strand to SEQ ID NO: 2303436
auguuaaucaaagugaccc

SEQ ID NO: 2303438 - RNA, 19 nt, Artificial Sequence
  Description of Artificial Sequence: Synthetic oligonucleotide
  Sense strand starting at position 2089 of SEQ ID NO: 1884937
acacuaagguaguuuagaa

SEQ ID NO: 2303439 - RNA, 19 nt, Artificial Sequence
  Description of Artificial Sequence: Synthetic oligonucleotide
  Antisense strand to SEQ ID NO: 2303438
uucuaaacuaccuuagugu

SEQ ID NO: 2303440 - RNA, 19 nt, Artificial Sequence
  Description of Artificial Sequence: Synthetic oligonucleotide
  Sense strand starting at position 2096 of SEQ ID NO: 1884937
gguaguuuagaaggagaac

SEQ ID NO: 2303441 - RNA, 19 nt, Artificial Sequence
  Description of Artificial Sequence: Synthetic oligonucleotide
  Antisense strand to SEQ ID NO: 2303440
guucuccuucuaaacuacc

SEQ ID NO: 2303442 - RNA, 19 nt, Artificial Sequence
  Description of Artificial Sequence: Synthetic oligonucleotide
  Sense strand starting at position 2188 of SEQ ID NO: 1884937
cccuauggucuguaaauau

SEQ ID NO: 2303443 - RNA, 19 nt, Artificial Sequence
  Description of Artificial Sequence: Synthetic oligonucleotide
  Antisense strand to SEQ ID NO: 2303442
auauuuacagaccauaggg

SEQ ID NO: 2303444 - RNA, 19 nt, Artificial Sequence
  Description of Artificial Sequence: Synthetic oligonucleotide
  Sense strand starting at position 2241 of SEQ ID NO: 1884937
gggaguaacuucuugguaa

SEQ ID NO: 2303445 - RNA, 19 nt, Artificial Sequence
  Description of Artificial Sequence: Synthetic oligonucleotide
  Antisense strand to SEQ ID NO: 2303444
uuaccaagaaguuacuccc

SEQ ID NO: 2303446 - RNA, 19 nt, Artificial Sequence
  Description of Artificial Sequence: Synthetic oligonucleotide
  Sense strand starting at position 2258 of SEQ ID NO: 1884937
aacguuacauaucuaugga

SEQ ID NO: 2303447 - RNA, 19 nt, Artificial Sequence
  Description of Artificial Sequence: Synthetic oligonucleotide
  Antisense strand to SEQ ID NO: 2303446
uccauagauauguaacguu

SEQ ID NO: 2303448 - RNA, 19 nt, Artificial Sequence
  Description of Artificial Sequence: Synthetic oligonucleotide
  Sense strand starting at position 2401 of SEQ ID NO: 1884937
uugugaacuugacuccaua

SEQ ID NO: 2303449 - RNA, 19 nt, Artificial Sequence
  Description of Artificial Sequence: Synthetic oligonucleotide
  Antisense strand to SEQ ID NO: 2303448
uauggagucaaguucacaa

SEQ ID NO: 2303450 - RNA, 19 nt, Artificial Sequence
  Description of Artificial Sequence: Synthetic oligonucleotide
  Sense strand starting at position 2481 of SEQ ID NO: 1884937
acaagagugcuguaagguu

SEQ ID NO: 2303451 - RNA, 19 nt, Artificial Sequence
  Description of Artificial Sequence: Synthetic oligonucleotide
  Antisense strand to SEQ ID NO: 2303450
aaccuuacagcacucuugu

SEQ ID NO: 2303452 - RNA, 19 nt, Artificial Sequence
  Description of Artificial Sequence: Synthetic oligonucleotide
  Sense strand starting at position 2488 of SEQ ID NO: 1884937
ugcuguaagguuuauaaau

SEQ ID NO: 2303453 - RNA, 19 nt, Artificial Sequence
  Description of Artificial Sequence: Synthetic oligonucleotide
  Antisense strand to SEQ ID NO: 2303452
auuuauaaaccuuacagca

SEQ ID NO: 2303454 - RNA, 19 nt, Artificial Sequence
  Description of Artificial Sequence: Synthetic oligonucleotide
  Sense strand starting at position 2503 of SEQ ID NO: 1884937
aaauaaggugggugaagua

SEQ ID NO: 2303455 - RNA, 19 nt, Artificial Sequence
  Description of Artificial Sequence: Synthetic oligonucleotide
  Antisense strand to SEQ ID NO: 2303454
uacuucacccaccuuauuu

SEQ ID NO: 2303456 - RNA, 19 nt, Artificial Sequence
  Description of Artificial Sequence: Synthetic oligonucleotide
  Sense strand starting at position 2687 of SEQ ID NO: 1884937
uuugcaagagcuugaugaa

SEQ ID NO: 2303457 - RNA, 19 nt, Artificial Sequence
  Description of Artificial Sequence: Synthetic oligonucleotide
  Antisense strand to SEQ ID NO: 2303456
uucaucaagcucuugcaaa

SEQ ID NO: 2303458 - RNA, 19 nt, Artificial Sequence
  Description of Artificial Sequence: Synthetic oligonucleotide
  Sense strand starting at position 2688 of SEQ ID NO: 1884937
uugcaagagcuugaugaac

SEQ ID NO: 2303459 - RNA, 19 nt, Artificial Sequence
  Description of Artificial Sequence: Synthetic oligonucleotide
  Antisense strand to SEQ ID NO: 2303458
guucaucaagcucuugcaa

SEQ ID NO: 2303460 - RNA, 19 nt, Artificial Sequence
  Description of Artificial Sequence: Synthetic oligonucleotide
  Sense strand starting at position 2791 of SEQ ID NO: 1884937
cugggaaacguucagcaua

SEQ ID NO: 2303461 - RNA, 19 nt, Artificial Sequence
  Description of Artificial Sequence: Synthetic oligonucleotide
  Antisense strand to SEQ ID NO: 2303460
uaugcugaacguuucccag

SEQ ID NO: 2303462 - RNA, 19 nt, Artificial Sequence
  Description of Artificial Sequence: Synthetic oligonucleotide
  Sense strand starting at position 2992 of SEQ ID NO: 1884937
acacuuggucuguaccaca

SEQ ID NO: 2303463 - RNA, 19 nt, Artificial Sequence
  Description of Artificial Sequence: Synthetic oligonucleotide
  Antisense strand to SEQ ID NO: 2303462
ugugguacagaccaagugu

SEQ ID NO: 2303464 - RNA, 19 nt, Artificial Sequence
  Description of Artificial Sequence: Synthetic oligonucleotide
  Sense strand starting at position 3421 of SEQ ID NO: 1884937
auauaaaugguguggaucu

SEQ ID NO: 2303465 - RNA, 19 nt, Artificial Sequence
  Description of Artificial Sequence: Synthetic oligonucleotide
  Antisense strand to SEQ ID NO: 2303464
agauccacaccauuuauau

SEQ ID NO: 2303466 - RNA, 19 nt, Artificial Sequence
  Description of Artificial Sequence: Synthetic oligonucleotide
  Sense strand starting at position 3481 of SEQ ID NO: 1884937
uccugcuagagguaguaua

SEQ ID NO: 2303467 - RNA, 19 nt, Artificial Sequence
  Description of Artificial Sequence: Synthetic oligonucleotide
  Antisense strand to SEQ ID NO: 2303466
uauacuaccucuagcagga

SEQ ID NO: 2303468 - RNA, 19 nt, Artificial Sequence
  Description of Artificial Sequence: Synthetic oligonucleotide
  Sense strand starting at position 3491 of SEQ ID NO: 1884937
gguaguauaggguaagucu

SEQ ID NO: 2303469 - RNA, 19 nt, Artificial Sequence
  Description of Artificial Sequence: Synthetic oligonucleotide
  Antisense strand to SEQ ID NO: 2303468
agacuuacccuauacuacc

SEQ ID NO: 2303470 - RNA, 19 nt, Artificial Sequence
  Description of Artificial Sequence: Synthetic oligonucleotide
  Sense strand starting at position 3509 of SEQ ID NO: 1884937
uugagaaagucuccuauca

SEQ ID NO: 2303471 - RNA, 19 nt, Artificial Sequence
  Description of Artificial Sequence: Synthetic oligonucleotide
  Antisense strand to SEQ ID NO: 2303470
ugauaggagacuuucucaa

SEQ ID NO: 2303472 - RNA, 19 nt, Artificial Sequence
  Description of Artificial Sequence: Synthetic oligonucleotide
  Sense strand starting at position 3615 of SEQ ID NO: 1884937
cacaguaagugugcuauuu

SEQ ID NO: 2303473 - RNA, 19 nt, Artificial Sequence
  Description of Artificial Sequence: Synthetic oligonucleotide
  Antisense strand to SEQ ID NO: 2303472
aaauagcacacuuacugug

SEQ ID NO: 2303474 - RNA, 19 nt, Artificial Sequence
  Description of Artificial Sequence: Synthetic oligonucleotide
  Sense strand starting at position 3623 of SEQ ID NO: 1884937
gugugcuauuuacuuuaca

SEQ ID NO: 2303475 - RNA, 19 nt, Artificial Sequence
  Description of Artificial Sequence: Synthetic oligonucleotide
  Antisense strand to SEQ ID NO: 2303474
uguaaaguaaauagcacac

SEQ ID NO: 2303476 - RNA, 19 nt, Artificial Sequence
  Description of Artificial Sequence: Synthetic oligonucleotide
  Sense strand starting at position 3665 of SEQ ID NO: 1884937
gugugaaaguugaaggaag

SEQ ID NO: 2303477 - RNA, 19 nt, Artificial Sequence
  Description of Artificial Sequence: Synthetic oligonucleotide
  Antisense strand to SEQ ID NO: 2303476
cuuccuucaacuuucacac

SEQ ID NO: 2303478 - RNA, 19 nt, Artificial Sequence
  Description of Artificial Sequence: Synthetic oligonucleotide
  Sense strand starting at position 2 of SEQ ID NO: 1884938
uggugaguauauguaugaa

SEQ ID NO: 2303479 - RNA, 19 nt, Artificial Sequence
  Description of Artificial Sequence: Synthetic oligonucleotide
  Antisense strand to SEQ ID NO: 2303478
uucauacauauacucacca

SEQ ID NO: 2303480 - RNA, 19 nt, Artificial Sequence
  Description of Artificial Sequence: Synthetic oligonucleotide
  Sense strand starting at position 58 of SEQ ID NO: 1884938
gugagaggauaugcagaua

SEQ ID NO: 2303481 - RNA, 19 nt, Artificial Sequence
  Description of Artificial Sequence: Synthetic oligonucleotide
  Antisense strand to SEQ ID NO: 2303480
uaucugcauauccucucac

SEQ ID NO: 2303482 - RNA, 19 nt, Artificial Sequence
  Description of Artificial Sequence: Synthetic oligonucleotide
  Sense strand starting at position 235 of SEQ ID NO: 1884938
cuuggauaucccugauuau

SEQ ID NO: 2303483 - RNA, 19 nt, Artificial Sequence
  Description of Artificial Sequence: Synthetic oligonucleotide
  Antisense strand to SEQ ID NO: 2303482
auaaucagggauauccaag

SEQ ID NO: 2303484 - RNA, 19 nt, Artificial Sequence
  Description of Artificial Sequence: Synthetic oligonucleotide
  Sense strand starting at position 282 of SEQ ID NO: 1884938
uuguuagccauggaagauc

SEQ ID NO: 2303485 - RNA, 19 nt, Artificial Sequence
  Description of Artificial Sequence: Synthetic oligonucleotide
  Antisense strand to SEQ ID NO: 2303484
gaucuuccauggcuaacaa

SEQ ID NO: 2303486 - RNA, 19 nt, Artificial Sequence
  Description of Artificial Sequence: Synthetic oligonucleotide
  Sense strand starting at position 378 of SEQ ID NO: 1884938
gguucuuuauaaguuuaga

SEQ ID NO: 2303487 - RNA, 19 nt, Artificial Sequence
  Description of Artificial Sequence: Synthetic oligonucleotide
  Antisense strand to SEQ ID NO: 2303486
ucuaaacuuauaaagaacc

SEQ ID NO: 2303488 - RNA, 19 nt, Artificial Sequence
  Description of Artificial Sequence: Synthetic oligonucleotide
  Sense strand starting at position 821 of SEQ ID NO: 1884938
uuugcauucccauaugagu

SEQ ID NO: 2303489 - RNA, 19 nt, Artificial Sequence
  Description of Artificial Sequence: Synthetic oligonucleotide
  Antisense strand to SEQ ID NO: 2303488
acucauaugggaaugcaaa

SEQ ID NO: 2303490 - RNA, 19 nt, Artificial Sequence
  Description of Artificial Sequence: Synthetic oligonucleotide
  Sense strand starting at position 1255 of SEQ ID NO: 1884938
cuaguauucuagguacaga

SEQ ID NO: 2303491 - RNA, 19 nt, Artificial Sequence
  Description of Artificial Sequence: Synthetic oligonucleotide
  Antisense strand to SEQ ID NO: 2303490
ucuguaccuagaauacuag

SEQ ID NO: 2303492 - RNA, 19 nt, Artificial Sequence
  Description of Artificial Sequence: Synthetic oligonucleotide
  Sense strand starting at position 1271 of SEQ ID NO: 1884938
agaaucauguagucuguaa

SEQ ID NO: 2303493 - RNA, 19 nt, Artificial Sequence
  Description of Artificial Sequence: Synthetic oligonucleotide
  Antisense strand to SEQ ID NO: 2303492
uuacagacuacaugauucu

SEQ ID NO: 2303494 - RNA, 19 nt, Artificial Sequence
  Description of Artificial Sequence: Synthetic oligonucleotide
  Sense strand starting at position 1275 of SEQ ID NO: 1884938
ucauguagucuguaaacaa

SEQ ID NO: 2303495 - RNA, 19 nt, Artificial Sequence
  Description of Artificial Sequence: Synthetic oligonucleotide
  Antisense strand to SEQ ID NO: 2303494
uuguuuacagacuacauga

SEQ ID NO: 2303496 - RNA, 19 nt, Artificial Sequence
  Description of Artificial Sequence: Synthetic oligonucleotide
  Sense strand starting at position 1382 of SEQ ID NO: 1884938
uaccguaaugaguggaaau

SEQ ID NO: 2303497 - RNA, 19 nt, Artificial Sequence
  Description of Artificial Sequence: Synthetic oligonucleotide
  Antisense strand to SEQ ID NO: 2303496
auuuccacucauuacggua

SEQ ID NO: 2303498 - RNA, 19 nt, Artificial Sequence
  Description of Artificial Sequence: Synthetic oligonucleotide
  Sense strand starting at position 1383 of SEQ ID NO: 1884938
accguaaugaguggaaaua

SEQ ID NO: 2303499 - RNA, 19 nt, Artificial Sequence
  Description of Artificial Sequence: Synthetic oligonucleotide
  Antisense strand to SEQ ID NO: 2303498
uauuuccacucauuacggu

SEQ ID NO: 2303500 - RNA, 19 nt, Artificial Sequence
  Description of Artificial Sequence: Synthetic oligonucleotide
  Sense strand starting at position 1384 of SEQ ID NO: 1884938
ccguaaugaguggaaauag

SEQ ID NO: 2303501 - RNA, 19 nt, Artificial Sequence
  Description of Artificial Sequence: Synthetic oligonucleotide
  Antisense strand to SEQ ID NO: 2303500
cuauuuccacucauuacgg

SEQ ID NO: 2303502 - RNA, 19 nt, Artificial Sequence
  Description of Artificial Sequence: Synthetic oligonucleotide
  Sense strand starting at position 1422 of SEQ ID NO: 1884938
ucaggaaggucugcaauau

SEQ ID NO: 2303503 - RNA, 19 nt, Artificial Sequence
  Description of Artificial Sequence: Synthetic oligonucleotide
  Antisense strand to SEQ ID NO: 2303502
auauugcagaccuuccuga

SEQ ID NO: 2303504 - RNA, 19 nt, Artificial Sequence
  Description of Artificial Sequence: Synthetic oligonucleotide
  Sense strand starting at position 1423 of SEQ ID NO: 1884938
caggaaggucugcaauauu

SEQ ID NO: 2303505 - RNA, 19 nt, Artificial Sequence
  Description of Artificial Sequence: Synthetic oligonucleotide
  Antisense strand to SEQ ID NO: 2303504
aauauugcagaccuuccug

SEQ ID NO: 2303506 - RNA, 19 nt, Artificial Sequence
  Description of Artificial Sequence: Synthetic oligonucleotide
  Sense strand starting at position 1451 of SEQ ID NO: 1884938
guaugauguucucuauaga

SEQ ID NO: 2303507 - RNA, 19 nt, Artificial Sequence
  Description of Artificial Sequence: Synthetic oligonucleotide
  Antisense strand to SEQ ID NO: 2303506
ucuauagagaacaucauac

SEQ ID NO: 2303508 - RNA, 19 nt, Artificial Sequence
  Description of Artificial Sequence: Synthetic oligonucleotide
  Sense strand starting at position 1893 of SEQ ID NO: 1884938
uuuaaugacucaucugguu

SEQ ID NO: 2303509 - RNA, 19 nt, Artificial Sequence
  Description of Artificial Sequence: Synthetic oligonucleotide
  Antisense strand to SEQ ID NO: 2303508
aaccagaugagucauuaaa

SEQ ID NO: 2303510 - RNA, 19 nt, Artificial Sequence
  Description of Artificial Sequence: Synthetic oligonucleotide
  Sense strand starting at position 1899 of SEQ ID NO: 1884938
gacucaucugguuaaguca

SEQ ID NO: 2303511 - RNA, 19 nt, Artificial Sequence
  Description of Artificial Sequence: Synthetic oligonucleotide
  Antisense strand to SEQ ID NO: 2303510
ugacuuaaccagaugaguc

SEQ ID NO: 2303512 - RNA, 19 nt, Artificial Sequence
  Description of Artificial Sequence: Synthetic oligonucleotide
  Sense strand starting at position 1959 of SEQ ID NO: 1884938
agugauuaguaacuuaauc

SEQ ID NO: 2303513 - RNA, 19 nt, Artificial Sequence
  Description of Artificial Sequence: Synthetic oligonucleotide
  Antisense strand to SEQ ID NO: 2303512
gauuaaguuacuaaucacu

SEQ ID NO: 2303514 - RNA, 19 nt, Artificial Sequence
  Description of Artificial Sequence: Synthetic oligonucleotide
  Sense strand starting at position 2036 of SEQ ID NO: 1884938
cauacaauugugugggaau

SEQ ID NO: 2303515 - RNA, 19 nt, Artificial Sequence
  Description of Artificial Sequence: Synthetic oligonucleotide
  Antisense strand to SEQ ID NO: 2303514
auucccacacaauuguaug

SEQ ID NO: 2303516 - RNA, 19 nt, Artificial Sequence
  Description of Artificial Sequence: Synthetic oligonucleotide
  Sense strand starting at position 2115 of SEQ ID NO: 1884938
uagguuacccaagaguugu

SEQ ID NO: 2303517 - RNA, 19 nt, Artificial Sequence
  Description of Artificial Sequence: Synthetic oligonucleotide
  Antisense strand to SEQ ID NO: 2303516
acaacucuuggguaaccua

SEQ ID NO: 2303518 - RNA, 19 nt, Artificial Sequence
  Description of Artificial Sequence: Synthetic oligonucleotide
  Sense strand starting at position 2121 of SEQ ID NO: 1884938
acccaagaguuguuaccau

SEQ ID NO: 2303519 - RNA, 19 nt, Artificial Sequence
  Description of Artificial Sequence: Synthetic oligonucleotide
  Antisense strand to SEQ ID NO: 2303518
augguaacaacucuugggu

SEQ ID NO: 2303520 - RNA, 19 nt, Artificial Sequence
  Description of Artificial Sequence: Synthetic oligonucleotide
  Sense strand starting at position 2147 of SEQ ID NO: 1884938
uguuaaaucugaucagaua

SEQ ID NO: 2303521 - RNA, 19 nt, Artificial Sequence
  Description of Artificial Sequence: Synthetic oligonucleotide
  Antisense strand to SEQ ID NO: 2303520
uaucugaucagauuuaaca

SEQ ID NO: 2303522 - RNA, 19 nt, Artificial Sequence
  Description of Artificial Sequence: Synthetic oligonucleotide
  Sense strand starting at position 2238 of SEQ ID NO: 1884938
cucauuagguucuuaaaga

SEQ ID NO: 2303523 - RNA, 19 nt, Artificial Sequence
  Description of Artificial Sequence: Synthetic oligonucleotide
  Antisense strand to SEQ ID NO: 2303522
ucuuuaagaaccuaaugag

SEQ ID NO: 2303524 - RNA, 19 nt, Artificial Sequence
  Description of Artificial Sequence: Synthetic oligonucleotide
  Sense strand starting at position 2469 of SEQ ID NO: 1884938
uggaaaguauucuuucuau

SEQ ID NO: 2303525 - RNA, 19 nt, Artificial Sequence
  Description of Artificial Sequence: Synthetic oligonucleotide
  Antisense strand to SEQ ID NO: 2303524
auagaaagaauacuuucca

SEQ ID NO: 2303526 - RNA, 19 nt, Artificial Sequence
  Description of Artificial Sequence: Synthetic oligonucleotide
  Sense strand starting at position 2508 of SEQ ID NO: 1884938
agaguuugugcagaauuga

SEQ ID NO: 2303527 - RNA, 19 nt, Artificial Sequence
  Description of Artificial Sequence: Synthetic oligonucleotide
  Antisense strand to SEQ ID NO: 2303526
ucaauucugcacaaacucu

SEQ ID NO: 2303528 - RNA, 19 nt, Artificial Sequence
  Description of Artificial Sequence: Synthetic oligonucleotide
  Sense strand starting at position 2589 of SEQ ID NO: 1884938
uguuaaucacuuugaaaga

SEQ ID NO: 2303529 - RNA, 19 nt, Artificial Sequence
  Description of Artificial Sequence: Synthetic oligonucleotide
  Antisense strand to SEQ ID NO: 2303528
ucuuucaaagugauuaaca

SEQ ID NO: 2303530 - RNA, 19 nt, Artificial Sequence
  Description of Artificial Sequence: Synthetic oligonucleotide
  Sense strand starting at position 2946 of SEQ ID NO: 1884938
agguuaaggcuguaaucua

SEQ ID NO: 2303531 - RNA, 19 nt, Artificial Sequence
  Description of Artificial Sequence: Synthetic oligonucleotide
  Antisense strand to SEQ ID NO: 2303530
uagauuacagccuuaaccu

SEQ ID NO: 2303532 - RNA, 19 nt, Artificial Sequence
  Description of Artificial Sequence: Synthetic oligonucleotide
  Sense strand starting at position 2953 of SEQ ID NO: 1884938
ggcuguaaucuaugagaau

SEQ ID NO: 2303533 - RNA, 19 nt, Artificial Sequence
  Description of Artificial Sequence: Synthetic oligonucleotide
  Antisense strand to SEQ ID NO: 2303532
auucucauagauuacagcc

SEQ ID NO: 2303534 - RNA, 19 nt, Artificial Sequence
  Description of Artificial Sequence: Synthetic oligonucleotide
  Sense strand starting at position 3005 of SEQ ID NO: 1884938
auguauaugagucagucca

SEQ ID NO: 2303535 - RNA, 19 nt, Artificial Sequence
  Description of Artificial Sequence: Synthetic oligonucleotide
  Antisense strand to SEQ ID NO: 2303534
uggacugacucauauacau

SEQ ID NO: 2303536 - RNA, 19 nt, Artificial Sequence
  Description of Artificial Sequence: Synthetic oligonucleotide
  Sense strand starting at position 3007 of SEQ ID NO: 1884938
guauaugagucaguccaaa

SEQ ID NO: 2303537 - RNA, 19 nt, Artificial Sequence
  Description of Artificial Sequence: Synthetic oligonucleotide
  Antisense strand to SEQ ID NO: 2303536
uuuggacugacucauauac

SEQ ID NO: 2303538 - RNA, 19 nt, Artificial Sequence
  Description of Artificial Sequence: Synthetic oligonucleotide
  Sense strand starting at position 3035 of SEQ ID NO: 1884938
cucagauauagucgggaau

SEQ ID NO: 2303539 - RNA, 19 nt, Artificial Sequence
  Description of Artificial Sequence: Synthetic oligonucleotide
  Antisense strand to SEQ ID NO: 2303538
auucccgacuauaucugag

SEQ ID NO: 2303540 - RNA, 19 nt, Artificial Sequence
  Description of Artificial Sequence: Synthetic oligonucleotide
  Sense strand starting at position 3036 of SEQ ID NO: 1884938
ucagauauagucgggaauu

SEQ ID NO: 2303541 - RNA, 19 nt, Artificial Sequence
  Description of Artificial Sequence: Synthetic oligonucleotide
  Antisense strand to SEQ ID NO: 2303540
aauucccgacuauaucuga

SEQ ID NO: 2303542 - RNA, 19 nt, Artificial Sequence
  Description of Artificial Sequence: Synthetic oligonucleotide
  Sense strand starting at position 3047 of SEQ ID NO: 1884938
cgggaauugcuccaacaau

SEQ ID NO: 2303543 - RNA, 19 nt, Artificial Sequence
  Description of Artificial Sequence: Synthetic oligonucleotide
  Antisense strand to SEQ ID NO: 2303542
auuguuggagcaauucccg

SEQ ID NO: 2303544 - RNA, 19 nt, Artificial Sequence
  Description of Artificial Sequence: Synthetic oligonucleotide
  Sense strand starting at position 3064 of SEQ ID NO: 1884938
auauucugaucauuccagu

SEQ ID NO: 2303545 - RNA, 19 nt, Artificial Sequence
  Description of Artificial Sequence: Synthetic oligonucleotide
  Antisense strand to SEQ ID NO: 2303544
acuggaaugaucagaauau

SEQ ID NO: 2303546 - RNA, 19 nt, Artificial Sequence
  Description of Artificial Sequence: Synthetic oligonucleotide
  Sense strand starting at position 3105 of SEQ ID NO: 1884938
ggcucugauccauaaguga

SEQ ID NO: 2303547 - RNA, 19 nt, Artificial Sequence
  Description of Artificial Sequence: Synthetic oligonucleotide
  Antisense strand to SEQ ID NO: 2303546
ucacuuauggaucagagcc

SEQ ID NO: 2303548 - RNA, 19 nt, Artificial Sequence
  Description of Artificial Sequence: Synthetic oligonucleotide
  Sense strand starting at position 3108 of SEQ ID NO: 1884938
ucugauccauaagugaauu

SEQ ID NO: 2303549 - RNA, 19 nt, Artificial Sequence
  Description of Artificial Sequence: Synthetic oligonucleotide
  Antisense strand to SEQ ID NO: 2303548
aauucacuuauggaucaga

SEQ ID NO: 2303550 - RNA, 19 nt, Artificial Sequence
  Description of Artificial Sequence: Synthetic oligonucleotide
  Sense strand starting at position 3504 of SEQ ID NO: 1884938
guugacacuuucuuacaca

SEQ ID NO: 2303551 - RNA, 19 nt, Artificial Sequence
  Description of Artificial Sequence: Synthetic oligonucleotide
  Antisense strand to SEQ ID NO: 2303550
uguguaagaaagugucaac

SEQ ID NO: 2303552 - RNA, 19 nt, Artificial Sequence
  Description of Artificial Sequence: Synthetic oligonucleotide
  Sense strand starting at position 3667 of SEQ ID NO: 1884938
aaauaucagcagugacaga

SEQ ID NO: 2303553 - RNA, 19 nt, Artificial Sequence
  Description of Artificial Sequence: Synthetic oligonucleotide
  Antisense strand to SEQ ID NO: 2303552
ucugucacugcugauauuu

SEQ ID NO: 2303554 - RNA, 19 nt, Artificial Sequence
  Description of Artificial Sequence: Synthetic oligonucleotide
  Sense strand starting at position 3882 of SEQ ID NO: 1884938
auugauacaucugugaguu

SEQ ID NO: 2303555 - RNA, 19 nt, Artificial Sequence
  Description of Artificial Sequence: Synthetic oligonucleotide
  Antisense strand to SEQ ID NO: 2303554
aacucacagauguaucaau

SEQ ID NO: 2303556 - RNA, 19 nt, Artificial Sequence
  Description of Artificial Sequence: Synthetic oligonucleotide
  Sense strand starting at position 3886 of SEQ ID NO: 1884938
auacaucugugaguuauaa

SEQ ID NO: 2303557 - RNA, 19 nt, Artificial Sequence
  Description of Artificial Sequence: Synthetic oligonucleotide
  Antisense strand to SEQ ID NO: 2303556
uuauaacucacagauguau

SEQ ID NO: 2303558 - RNA, 19 nt, Artificial Sequence
  Description of Artificial Sequence: Synthetic oligonucleotide
  Sense strand starting at position 7 of SEQ ID NO: 1884939
uguauagaugucuggaaga

SEQ ID NO: 2303559 - RNA, 19 nt, Artificial Sequence
  Description of Artificial Sequence: Synthetic oligonucleotide
  Antisense strand to SEQ ID NO: 2303558
ucuuccagacaucuauaca

SEQ ID NO: 2303560 - RNA, 19 nt, Artificial Sequence
  Description of Artificial Sequence: Synthetic oligonucleotide
  Sense strand starting at position 17 of SEQ ID NO: 1884939
ucuggaagauugguauauc

SEQ ID NO: 2303561 - RNA, 19 nt, Artificial Sequence
  Description of Artificial Sequence: Synthetic oligonucleotide
  Antisense strand to SEQ ID NO: 2303560
gauauaccaaucuuccaga

SEQ ID NO: 2303562 - RNA, 19 nt, Artificial Sequence
  Description of Artificial Sequence: Synthetic oligonucleotide
  Sense strand starting at position 39 of SEQ ID NO: 1884939
ugaucuauuggguaguaau

SEQ ID NO: 2303563 - RNA, 19 nt, Artificial Sequence
  Description of Artificial Sequence: Synthetic oligonucleotide
  Antisense strand to SEQ ID NO: 2303562
auuacuacccaauagauca

SEQ ID NO: 2303564 - RNA, 19 nt, Artificial Sequence
  Description of Artificial Sequence: Synthetic oligonucleotide
  Sense strand starting at position 366 of SEQ ID NO: 1884939
ugaacaaacucuguggguu

SEQ ID NO: 2303565 - RNA, 19 nt, Artificial Sequence
  Description of Artificial Sequence: Synthetic oligonucleotide
  Antisense strand to SEQ ID NO: 2303564
aacccacagaguuuguuca

SEQ ID NO: 2303566 - RNA, 19 nt, Artificial Sequence
  Description of Artificial Sequence: Synthetic oligonucleotide
  Sense strand starting at position 410 of SEQ ID NO: 1884939
gaucauguacuguagugau

SEQ ID NO: 2303567 - RNA, 19 nt, Artificial Sequence
  Description of Artificial Sequence: Synthetic oligonucleotide
  Antisense strand to SEQ ID NO: 2303566
aucacuacaguacaugauc

SEQ ID NO: 2303568 - RNA, 19 nt, Artificial Sequence
  Description of Artificial Sequence: Synthetic oligonucleotide
  Sense strand starting at position 414 of SEQ ID NO: 1884939
auguacuguagugauguaa

SEQ ID NO: 2303569 - RNA, 19 nt, Artificial Sequence
  Description of Artificial Sequence: Synthetic oligonucleotide
  Antisense strand to SEQ ID NO: 2303568
uuacaucacuacaguacau

SEQ ID NO: 2303570 - RNA, 19 nt, Artificial Sequence
  Description of Artificial Sequence: Synthetic oligonucleotide
  Sense strand starting at position 418 of SEQ ID NO: 1884939
acuguagugauguaagaug

SEQ ID NO: 2303571 - RNA, 19 nt, Artificial Sequence
  Description of Artificial Sequence: Synthetic oligonucleotide
  Antisense strand to SEQ ID NO: 2303570
caucuuacaucacuacagu

SEQ ID NO: 2303572 - RNA, 19 nt, Artificial Sequence
  Description of Artificial Sequence: Synthetic oligonucleotide
  Sense strand starting at position 447 of SEQ ID NO: 1884939
ggaagucugagacacgcau

SEQ ID NO: 2303573 - RNA, 19 nt, Artificial Sequence
  Description of Artificial Sequence: Synthetic oligonucleotide
  Antisense strand to SEQ ID NO: 2303572
augcgugucucagacuucc

SEQ ID NO: 2303574 - RNA, 19 nt, Artificial Sequence
  Description of Artificial Sequence: Synthetic oligonucleotide
  Sense strand starting at position 584 of SEQ ID NO: 1884939
auguauacacaaugugaua

SEQ ID NO: 2303575 - RNA, 19 nt, Artificial Sequence
  Description of Artificial Sequence: Synthetic oligonucleotide
  Antisense strand to SEQ ID NO: 2303574
uaucacauuguguauacau

SEQ ID NO: 2303576 - RNA, 19 nt, Artificial Sequence
  Description of Artificial Sequence: Synthetic oligonucleotide
  Sense strand starting at position 617 of SEQ ID NO: 1884939
aggacuaacucugugagac

SEQ ID NO: 2303577 - RNA, 19 nt, Artificial Sequence
  Description of Artificial Sequence: Synthetic oligonucleotide
  Antisense strand to SEQ ID NO: 2303576
gucucacagaguuaguccu

SEQ ID NO: 2303578 - RNA, 19 nt, Artificial Sequence
  Description of Artificial Sequence: Synthetic oligonucleotide
  Sense strand starting at position 618 of SEQ ID NO: 1884939
ggacuaacucugugagacc

SEQ ID NO: 2303579 - RNA, 19 nt, Artificial Sequence
  Description of Artificial Sequence: Synthetic oligonucleotide
  Antisense strand to SEQ ID NO: 2303578
ggucucacagaguuagucc

SEQ ID NO: 2303580 - RNA, 19 nt, Artificial Sequence
  Description of Artificial Sequence: Synthetic oligonucleotide
  Sense strand starting at position 772 of SEQ ID NO: 1884939
caaguuuauggaugaauug

SEQ ID NO: 2303581 - RNA, 19 nt, Artificial Sequence
  Description of Artificial Sequence: Synthetic oligonucleotide
  Antisense strand to SEQ ID NO: 2303580
caauucauccauaaacuug

SEQ ID NO: 2303582 - RNA, 19 nt, Artificial Sequence
  Description of Artificial Sequence: Synthetic oligonucleotide
  Sense strand starting at position 795 of SEQ ID NO: 1884939
guccauagaggugagguua

SEQ ID NO: 2303583 - RNA, 19 nt, Artificial Sequence
  Description of Artificial Sequence: Synthetic oligonucleotide
  Antisense strand to SEQ ID NO: 2303582
uaaccucaccucuauggac

SEQ ID NO: 2303584 - RNA, 19 nt, Artificial Sequence
  Description of Artificial Sequence: Synthetic oligonucleotide
  Sense strand starting at position 803 of SEQ ID NO: 1884939
aggugagguuaccugaagu

SEQ ID NO: 2303585 - RNA, 19 nt, Artificial Sequence
  Description of Artificial Sequence: Synthetic oligonucleotide
  Antisense strand to SEQ ID NO: 2303584
acuucagguaaccucaccu

SEQ ID NO: 2303586 - RNA, 19 nt, Artificial Sequence
  Description of Artificial Sequence: Synthetic oligonucleotide
  Sense strand starting at position 1305 of SEQ ID NO: 1884939
agcucuauuuaugucgagu

SEQ ID NO: 2303587 - RNA, 19 nt, Artificial Sequence
  Description of Artificial Sequence: Synthetic oligonucleotide
  Antisense strand to SEQ ID NO: 2303586
acucgacauaaauagagcu

SEQ ID NO: 2303588 - RNA, 19 nt, Artificial Sequence
  Description of Artificial Sequence: Synthetic oligonucleotide
  Sense strand starting at position 1360 of SEQ ID NO: 1884939
cugauuaguacuuggagga

SEQ ID NO: 2303589 - RNA, 19 nt, Artificial Sequence
  Description of Artificial Sequence: Synthetic oligonucleotide
  Antisense strand to SEQ ID NO: 2303588
uccuccaaguacuaaucag

SEQ ID NO: 2303590 - RNA, 19 nt, Artificial Sequence
  Description of Artificial Sequence: Synthetic oligonucleotide
  Sense strand starting at position 1361 of SEQ ID NO: 1884939
ugauuaguacuuggaggag

SEQ ID NO: 2303591 - RNA, 19 nt, Artificial Sequence
  Description of Artificial Sequence: Synthetic oligonucleotide
  Antisense strand to SEQ ID NO: 2303590
cuccuccaaguacuaauca

SEQ ID NO: 2303592 - RNA, 19 nt, Artificial Sequence
  Description of Artificial Sequence: Synthetic oligonucleotide
  Sense strand starting at position 1480 of SEQ ID NO: 1884939
gccuuaucugcguuaucuu

SEQ ID NO: 2303593 - RNA, 19 nt, Artificial Sequence
  Description of Artificial Sequence: Synthetic oligonucleotide
  Antisense strand to SEQ ID NO: 2303592
aagauaacgcagauaaggc

SEQ ID NO: 2303594 - RNA, 19 nt, Artificial Sequence
  Description of Artificial Sequence: Synthetic oligonucleotide
  Sense strand starting at position 1579 of SEQ ID NO: 1884939
guagcaaagggcuaucuaa

SEQ ID NO: 2303595 - RNA, 19 nt, Artificial Sequence
  Description of Artificial Sequence: Synthetic oligonucleotide
  Antisense strand to SEQ ID NO: 2303594
uuagauagcccuuugcuac

SEQ ID NO: 2303596 - RNA, 19 nt, Artificial Sequence
  Description of Artificial Sequence: Synthetic oligonucleotide
  Sense strand starting at position 1803 of SEQ ID NO: 1884939
uggauuaucuuacugucua

SEQ ID NO: 2303597 - RNA, 19 nt, Artificial Sequence
  Description of Artificial Sequence: Synthetic oligonucleotide
  Antisense strand to SEQ ID NO: 2303596
uagacaguaagauaaucca

SEQ ID NO: 2303598 - RNA, 19 nt, Artificial Sequence
  Description of Artificial Sequence: Synthetic oligonucleotide
  Sense strand starting at position 2076 of SEQ ID NO: 1884939
gagaguuuggaauguggua

SEQ ID NO: 2303599 - RNA, 19 nt, Artificial Sequence
  Description of Artificial Sequence: Synthetic oligonucleotide
  Antisense strand to SEQ ID NO: 2303598
uaccacauuccaaacucuc

SEQ ID NO: 2303600 - RNA, 19 nt, Artificial Sequence
  Description of Artificial Sequence: Synthetic oligonucleotide
  Sense strand starting at position 2119 of SEQ ID NO: 1884939
gaacuucgugcuuaaggaa

SEQ ID NO: 2303601 - RNA, 19 nt, Artificial Sequence
  Description of Artificial Sequence: Synthetic oligonucleotide
  Antisense strand to SEQ ID NO: 2303600
uuccuuaagcacgaaguuc

SEQ ID NO: 2303602 - RNA, 19 nt, Artificial Sequence
  Description of Artificial Sequence: Synthetic oligonucleotide
  Sense strand starting at position 2271 of SEQ ID NO: 1884939
cacacagaagguuguuuaa

SEQ ID NO: 2303603 - RNA, 19 nt, Artificial Sequence
  Description of Artificial Sequence: Synthetic oligonucleotide
  Antisense strand to SEQ ID NO: 2303602
uuaaacaaccuucugugug

SEQ ID NO: 2303604 - RNA, 19 nt, Artificial Sequence
  Description of Artificial Sequence: Synthetic oligonucleotide
  Sense strand starting at position 2273 of SEQ ID NO: 1884939
cacagaagguuguuuaaua

SEQ ID NO: 2303605 - RNA, 19 nt, Artificial Sequence
  Description of Artificial Sequence: Synthetic oligonucleotide
  Antisense strand to SEQ ID NO: 2303604
uauuaaacaaccuucugug

SEQ ID NO: 2303606 - RNA, 19 nt, Artificial Sequence
  Description of Artificial Sequence: Synthetic oligonucleotide
  Sense strand starting at position 2274 of SEQ ID NO: 1884939
acagaagguuguuuaauaa

SEQ ID NO: 2303607 - RNA, 19 nt, Artificial Sequence
  Description of Artificial Sequence: Synthetic oligonucleotide
  Antisense strand to SEQ ID NO: 2303606
uuauuaaacaaccuucugu

SEQ ID NO: 2303608 - RNA, 19 nt, Artificial Sequence
  Description of Artificial Sequence: Synthetic oligonucleotide
  Sense strand starting at position 2293 of SEQ ID NO: 1884939
aauguuuacugaguuggau

SEQ ID NO: 2303609 - RNA, 19 nt, Artificial Sequence
  Description of Artificial Sequence: Synthetic oligonucleotide
  Antisense strand to SEQ ID NO: 2303608
auccaacucaguaaacauu

SEQ ID NO: 2303610 - RNA, 19 nt, Artificial Sequence
  Description of Artificial Sequence: Synthetic oligonucleotide
  Sense strand starting at position 2299 of SEQ ID NO: 1884939
uacugaguuggauggaauu

SEQ ID NO: 2303611 - RNA, 19 nt, Artificial Sequence
  Description of Artificial Sequence: Synthetic oligonucleotide
  Antisense strand to SEQ ID NO: 2303610
aauuccauccaacucagua

SEQ ID NO: 2303612 - RNA, 19 nt, Artificial Sequence
  Description of Artificial Sequence: Synthetic oligonucleotide
  Sense strand starting at position 2346 of SEQ ID NO: 1884939
ucacgaccugauugaagau

SEQ ID NO: 2303613 - RNA, 19 nt, Artificial Sequence
  Description of Artificial Sequence: Synthetic oligonucleotide
  Antisense strand to SEQ ID NO: 2303612
aucuucaaucaggucguga

SEQ ID NO: 2303614 - RNA, 19 nt, Artificial Sequence
  Description of Artificial Sequence: Synthetic oligonucleotide
  Sense strand starting at position 2527 of SEQ ID NO: 1884939
gcuagcgagacugagaaau

SEQ ID NO: 2303615 - RNA, 19 nt, Artificial Sequence
  Description of Artificial Sequence: Synthetic oligonucleotide
  Antisense strand to SEQ ID NO: 2303614
auuucucagucucgcuagc

SEQ ID NO: 2303616 - RNA, 19 nt, Artificial Sequence
  Description of Artificial Sequence: Synthetic oligonucleotide
  Sense strand starting at position 2568 of SEQ ID NO: 1884939
guaaauagccauuauguag

SEQ ID NO: 2303617 - RNA, 19 nt, Artificial Sequence
  Description of Artificial Sequence: Synthetic oligonucleotide
  Antisense strand to SEQ ID NO: 2303616
cuacauaauggcuauuuac

SEQ ID NO: 2303618 - RNA, 19 nt, Artificial Sequence
  Description of Artificial Sequence: Synthetic oligonucleotide
  Sense strand starting at position 2590 of SEQ ID NO: 1884939
gugacuaccucauuagaca

SEQ ID NO: 2303619 - RNA, 19 nt, Artificial Sequence
  Description of Artificial Sequence: Synthetic oligonucleotide
  Antisense strand to SEQ ID NO: 2303618
ugucuaaugagguagucac

SEQ ID NO: 2303620 - RNA, 19 nt, Artificial Sequence
  Description of Artificial Sequence: Synthetic oligonucleotide
  Sense strand starting at position 2760 of SEQ ID NO: 1884939
caaagaagugguuaagucu

SEQ ID NO: 2303621 - RNA, 19 nt, Artificial Sequence
  Description of Artificial Sequence: Synthetic oligonucleotide
  Antisense strand to SEQ ID NO: 2303620
agacuuaaccacuucuuug

SEQ ID NO: 2303622 - RNA, 19 nt, Artificial Sequence
  Description of Artificial Sequence: Synthetic oligonucleotide
  Sense strand starting at position 2820 of SEQ ID NO: 1884939
ggaagaaugugguuggaua

SEQ ID NO: 2303623 - RNA, 19 nt, Artificial Sequence
  Description of Artificial Sequence: Synthetic oligonucleotide
  Antisense strand to SEQ ID NO: 2303622
uauccaaccacauucuucc

SEQ ID NO: 2303624 - RNA, 19 nt, Artificial Sequence
  Description of Artificial Sequence: Synthetic oligonucleotide
  Sense strand starting at position 2821 of SEQ ID NO: 1884939
gaagaaugugguuggauaa

SEQ ID NO: 2303625 - RNA, 19 nt, Artificial Sequence
  Description of Artificial Sequence: Synthetic oligonucleotide
  Antisense strand to SEQ ID NO: 2303624
uuauccaaccacauucuuc

SEQ ID NO: 2303626 - RNA, 19 nt, Artificial Sequence
  Description of Artificial Sequence: Synthetic oligonucleotide
  Sense strand starting at position 2842 of SEQ ID NO: 1884939
guacaagcuaaggguaaua

SEQ ID NO: 2303627 - RNA, 19 nt, Artificial Sequence
  Description of Artificial Sequence: Synthetic oligonucleotide
  Antisense strand to SEQ ID NO: 2303626
uauuacccuuagcuuguac

SEQ ID NO: 2303628 - RNA, 19 nt, Artificial Sequence
  Description of Artificial Sequence: Synthetic oligonucleotide
  Sense strand starting at position 3467 of SEQ ID NO: 1884939
acucgagcucaaugagaca

SEQ ID NO: 2303629 - RNA, 19 nt, Artificial Sequence
  Description of Artificial Sequence: Synthetic oligonucleotide
  Antisense strand to SEQ ID NO: 2303628
ugucucauugagcucgagu

SEQ ID NO: 2303630 - RNA, 19 nt, Artificial Sequence
  Description of Artificial Sequence: Synthetic oligonucleotide
  Sense strand starting at position 3567 of SEQ ID NO: 1884939
aguauugaaucauuacaug

SEQ ID NO: 2303631 - RNA, 19 nt, Artificial Sequence
  Description of Artificial Sequence: Synthetic oligonucleotide
  Antisense strand to SEQ ID NO: 2303630
cauguaaugauucaauacu

SEQ ID NO: 2303632 - RNA, 19 nt, Artificial Sequence
  Description of Artificial Sequence: Synthetic oligonucleotide
  Sense strand starting at position 3736 of SEQ ID NO: 1884939
cucucaggguuaucaugaa

SEQ ID NO: 2303633 - RNA, 19 nt, Artificial Sequence
  Description of Artificial Sequence: Synthetic oligonucleotide
  Antisense strand to SEQ ID NO: 2303632
uucaugauaacccugagag

SEQ ID NO: 2303634 - RNA, 19 nt, Artificial Sequence
  Description of Artificial Sequence: Synthetic oligonucleotide
  Sense strand starting at position 3863 of SEQ ID NO: 1884939
gagucugagccauagugaa

SEQ ID NO: 2303635 - RNA, 19 nt, Artificial Sequence
  Description of Artificial Sequence: Synthetic oligonucleotide
  Antisense strand to SEQ ID NO: 2303634
uucacuauggcucagacuc

SEQ ID NO: 2303636 - RNA, 19 nt, Artificial Sequence
  Description of Artificial Sequence: Synthetic oligonucleotide
  Sense strand starting at position 3888 of SEQ ID NO: 1884939
uaaauugagcuuugggauu

SEQ ID NO: 2303637 - RNA, 19 nt, Artificial Sequence
  Description of Artificial Sequence: Synthetic oligonucleotide
  Antisense strand to SEQ ID NO: 2303636
aaucccaaagcucaauuua

SEQ ID NO: 2303638 - RNA, 19 nt, Artificial Sequence
  Description of Artificial Sequence: Synthetic oligonucleotide
  Sense strand starting at position 525 of SEQ ID NO: 1884940
aaauacguuucuguugaga

SEQ ID NO: 2303639 - RNA, 19 nt, Artificial Sequence
  Description of Artificial Sequence: Synthetic oligonucleotide
  Antisense strand to SEQ ID NO: 2303638
ucucaacagaaacguauuu

SEQ ID NO: 2303640 - RNA, 19 nt, Artificial Sequence
  Description of Artificial Sequence: Synthetic oligonucleotide
  Sense strand starting at position 528 of SEQ ID NO: 1884940
uacguuucuguugagagaa

SEQ ID NO: 2303641 - RNA, 19 nt, Artificial Sequence
  Description of Artificial Sequence: Synthetic oligonucleotide
  Antisense strand to SEQ ID NO: 2303640
uucucucaacagaaacgua

SEQ ID NO: 2303642 - RNA, 19 nt, Artificial Sequence
  Description of Artificial Sequence: Synthetic oligonucleotide
  Sense strand starting at position 673 of SEQ ID NO: 1884940
guguuagggccucaacaug

SEQ ID NO: 2303643 - RNA, 19 nt, Artificial Sequence
  Description of Artificial Sequence: Synthetic oligonucleotide
  Antisense strand to SEQ ID NO: 2303642
cauguugaggcccuaacac

SEQ ID NO: 2303644 - RNA, 19 nt, Artificial Sequence
  Description of Artificial Sequence: Synthetic oligonucleotide
  Sense strand starting at position 724 of SEQ ID NO: 1884940
ccagaagacugcccauuau

SEQ ID NO: 2303645 - RNA, 19 nt, Artificial Sequence
  Description of Artificial Sequence: Synthetic oligonucleotide
  Antisense strand to SEQ ID NO: 2303644
auaaugggcagucuucugg

SEQ ID NO: 2303646 - RNA, 19 nt, Artificial Sequence
  Description of Artificial Sequence: Synthetic oligonucleotide
  Sense strand starting at position 736 of SEQ ID NO: 1884940
ccauuauaauugccuggaa

SEQ ID NO: 2303647 - RNA, 19 nt, Artificial Sequence
  Description of Artificial Sequence: Synthetic oligonucleotide
  Antisense strand to SEQ ID NO: 2303646
uuccaggcaauuauaaugg

SEQ ID NO: 2303648 - RNA, 19 nt, Artificial Sequence
  Description of Artificial Sequence: Synthetic oligonucleotide
  Sense strand starting at position 938 of SEQ ID NO: 1884940
guggauauauuguuucuua

SEQ ID NO: 2303649 - RNA, 19 nt, Artificial Sequence
  Description of Artificial Sequence: Synthetic oligonucleotide
  Antisense strand to SEQ ID NO: 2303648
uaagaaacaauauauccac

SEQ ID NO: 2303650 - RNA, 19 nt, Artificial Sequence
  Description of Artificial Sequence: Synthetic oligonucleotide
  Sense strand starting at position 993 of SEQ ID NO: 1884940
uugaaucaagucgauauca

SEQ ID NO: 2303651 - RNA, 19 nt, Artificial Sequence
  Description of Artificial Sequence: Synthetic oligonucleotide
  Antisense strand to SEQ ID NO: 2303650
ugauaucgacuugauucaa

SEQ ID NO: 2303652 - RNA, 19 nt, Artificial Sequence
  Description of Artificial Sequence: Synthetic oligonucleotide
  Sense strand starting at position 1148 of SEQ ID NO: 1884940
ugguauaagucauucuuau

SEQ ID NO: 2303653 - RNA, 19 nt, Artificial Sequence
  Description of Artificial Sequence: Synthetic oligonucleotide
  Antisense strand to SEQ ID NO: 2303652
auaagaaugacuuauacca

SEQ ID NO: 2303654 - RNA, 19 nt, Artificial Sequence
  Description of Artificial Sequence: Synthetic oligonucleotide
  Sense strand starting at position 1206 of SEQ ID NO: 1884940
uuaggcuuccuauggagau

SEQ ID NO: 2303655 - RNA, 19 nt, Artificial Sequence
  Description of Artificial Sequence: Synthetic oligonucleotide
  Antisense strand to SEQ ID NO: 2303654
aucuccauaggaagccuaa

SEQ ID NO: 2303656 - RNA, 19 nt, Artificial Sequence
  Description of Artificial Sequence: Synthetic oligonucleotide
  Sense strand starting at position 1216 of SEQ ID NO: 1884940
uauggagaucguugguaaa

SEQ ID NO: 2303657 - RNA, 19 nt, Artificial Sequence
  Description of Artificial Sequence: Synthetic oligonucleotide
  Antisense strand to SEQ ID NO: 2303656
uuuaccaacgaucuccaua

SEQ ID NO: 2303658 - RNA, 19 nt, Artificial Sequence
  Description of Artificial Sequence: Synthetic oligonucleotide
  Sense strand starting at position 1408 of SEQ ID NO: 1884940
uugcccuuccuguaagaaa

SEQ ID NO: 2303659 - RNA, 19 nt, Artificial Sequence
  Description of Artificial Sequence: Synthetic oligonucleotide
  Antisense strand to SEQ ID NO: 2303658
uuucuuacaggaagggcaa

SEQ ID NO: 2303660 - RNA, 19 nt, Artificial Sequence
  Description of Artificial Sequence: Synthetic oligonucleotide
  Sense strand starting at position 1437 of SEQ ID NO: 1884940
gcagaagaacagugauguu

SEQ ID NO: 2303661 - RNA, 19 nt, Artificial Sequence
  Description of Artificial Sequence: Synthetic oligonucleotide
  Antisense strand to SEQ ID NO: 2303660
aacaucacuguucuucugc

SEQ ID NO: 2303662 - RNA, 19 nt, Artificial Sequence
  Description of Artificial Sequence: Synthetic oligonucleotide
  Sense strand starting at position 1474 of SEQ ID NO: 1884940
gucucauggcuuuagauac

SEQ ID NO: 2303663 - RNA, 19 nt, Artificial Sequence
  Description of Artificial Sequence: Synthetic oligonucleotide
  Antisense strand to SEQ ID NO: 2303662
guaucuaaagccaugagac

SEQ ID NO: 2303664 - RNA, 19 nt, Artificial Sequence
  Description of Artificial Sequence: Synthetic oligonucleotide
  Sense strand starting at position 1484 of SEQ ID NO: 1884940
uuuagauaccgucauauga

SEQ ID NO: 2303665 - RNA, 19 nt, Artificial Sequence
  Description of Artificial Sequence: Synthetic oligonucleotide
  Antisense strand to SEQ ID NO: 2303664
ucauaugacgguaucuaaa

SEQ ID NO: 2303666 - RNA, 19 nt, Artificial Sequence
  Description of Artificial Sequence: Synthetic oligonucleotide
  Sense strand starting at position 1491 of SEQ ID NO: 1884940
accgucauaugauuuaugu

SEQ ID NO: 2303667 - RNA, 19 nt, Artificial Sequence
  Description of Artificial Sequence: Synthetic oligonucleotide
  Antisense strand to SEQ ID NO: 2303666
acauaaaucauaugacggu

SEQ ID NO: 2303668 - RNA, 19 nt, Artificial Sequence
  Description of Artificial Sequence: Synthetic oligonucleotide
  Sense strand starting at position 2081 of SEQ ID NO: 1884940
uugcuacuccuugagcaua

SEQ ID NO: 2303669 - RNA, 19 nt, Artificial Sequence
  Description of Artificial Sequence: Synthetic oligonucleotide
  Antisense strand to SEQ ID NO: 2303668
uaugcucaaggaguagcaa

SEQ ID NO: 2303670 - RNA, 19 nt, Artificial Sequence
  Description of Artificial Sequence: Synthetic oligonucleotide
  Sense strand starting at position 2119 of SEQ ID NO: 1884940
gggccucugccuuagaaac

SEQ ID NO: 2303671 - RNA, 19 nt, Artificial Sequence
  Description of Artificial Sequence: Synthetic oligonucleotide
  Antisense strand to SEQ ID NO: 2303670
guuucuaaggcagaggccc

SEQ ID NO: 2303672 - RNA, 19 nt, Artificial Sequence
  Description of Artificial Sequence: Synthetic oligonucleotide
  Sense strand starting at position 2191 of SEQ ID NO: 1884940
aauguuaucuccucaggag

SEQ ID NO: 2303673 - RNA, 19 nt, Artificial Sequence
  Description of Artificial Sequence: Synthetic oligonucleotide
  Antisense strand to SEQ ID NO: 2303672
cuccugaggagauaacauu

SEQ ID NO: 2303674 - RNA, 19 nt, Artificial Sequence
  Description of Artificial Sequence: Synthetic oligonucleotide
  Sense strand starting at position 2207 of SEQ ID NO: 1884940
gagggccuuccuugacuau

SEQ ID NO: 2303675 - RNA, 19 nt, Artificial Sequence
  Description of Artificial Sequence: Synthetic oligonucleotide
  Antisense strand to SEQ ID NO: 2303674
auagucaaggaaggcccuc

SEQ ID NO: 2303676 - RNA, 19 nt, Artificial Sequence
  Description of Artificial Sequence: Synthetic oligonucleotide
  Sense strand starting at position 2292 of SEQ ID NO: 1884940
augauaccacguuacacau

SEQ ID NO: 2303677 - RNA, 19 nt, Artificial Sequence
  Description of Artificial Sequence: Synthetic oligonucleotide
  Antisense strand to SEQ ID NO: 2303676
auguguaacgugguaucau

SEQ ID NO: 2303678 - RNA, 19 nt, Artificial Sequence
  Description of Artificial Sequence: Synthetic oligonucleotide
  Sense strand starting at position 2349 of SEQ ID NO: 1884940
ucaugaaagcagggacuua

SEQ ID NO: 2303679 - RNA, 19 nt, Artificial Sequence
  Description of Artificial Sequence: Synthetic oligonucleotide
  Antisense strand to SEQ ID NO: 2303678
uaagucccugcuuucauga

SEQ ID NO: 2303680 - RNA, 19 nt, Artificial Sequence
  Description of Artificial Sequence: Synthetic oligonucleotide
  Sense strand starting at position 2361 of SEQ ID NO: 1884940
ggacuuaguuuacccacau

SEQ ID NO: 2303681 - RNA, 19 nt, Artificial Sequence
  Description of Artificial Sequence: Synthetic oligonucleotide
  Antisense strand to SEQ ID NO: 2303680
auguggguaaacuaagucc

SEQ ID NO: 2303682 - RNA, 19 nt, Artificial Sequence
  Description of Artificial Sequence: Synthetic oligonucleotide
  Sense strand starting at position 2546 of SEQ ID NO: 1884940
guuucccaucugcagaauu

SEQ ID NO: 2303683 - RNA, 19 nt, Artificial Sequence
  Description of Artificial Sequence: Synthetic oligonucleotide
  Antisense strand to SEQ ID NO: 2303682
aauucugcagaugggaaac

SEQ ID NO: 2303684 - RNA, 19 nt, Artificial Sequence
  Description of Artificial Sequence: Synthetic oligonucleotide
  Sense strand starting at position 2557 of SEQ ID NO: 1884940
gcagaauuaagagguugga

SEQ ID NO: 2303685 - RNA, 19 nt, Artificial Sequence
  Description of Artificial Sequence: Synthetic oligonucleotide
  Antisense strand to SEQ ID NO: 2303684
uccaaccucuuaauucugc

SEQ ID NO: 2303686 - RNA, 19 nt, Artificial Sequence
  Description of Artificial Sequence: Synthetic oligonucleotide
  Sense strand starting at position 2572 of SEQ ID NO: 1884940
uggauuagauuggugguuu

SEQ ID NO: 2303687 - RNA, 19 nt, Artificial Sequence
  Description of Artificial Sequence: Synthetic oligonucleotide
  Antisense strand to SEQ ID NO: 2303686
aaaccaccaaucuaaucca

SEQ ID NO: 2303688 - RNA, 19 nt, Artificial Sequence
  Description of Artificial Sequence: Synthetic oligonucleotide
  Sense strand starting at position 2604 of SEQ ID NO: 1884940
gggaauucuaaggguucuu

SEQ ID NO: 2303689 - RNA, 19 nt, Artificial Sequence
  Description of Artificial Sequence: Synthetic oligonucleotide
  Antisense strand to SEQ ID NO: 2303688
aagaacccuuagaauuccc

SEQ ID NO: 2303690 - RNA, 19 nt, Artificial Sequence
  Description of Artificial Sequence: Synthetic oligonucleotide
  Sense strand starting at position 2813 of SEQ ID NO: 1884940
cugugugaucucuaagguu

SEQ ID NO: 2303691 - RNA, 19 nt, Artificial Sequence
  Description of Artificial Sequence: Synthetic oligonucleotide
  Antisense strand to SEQ ID NO: 2303690
aaccuuagagaucacacag

SEQ ID NO: 2303692 - RNA, 19 nt, Artificial Sequence
  Description of Artificial Sequence: Synthetic oligonucleotide
  Sense strand starting at position 2840 of SEQ ID NO: 1884940
cucugaaaugucuaggcca

SEQ ID NO: 2303693 - RNA, 19 nt, Artificial Sequence
  Description of Artificial Sequence: Synthetic oligonucleotide
  Antisense strand to SEQ ID NO: 2303692
uggccuagacauuucagag

SEQ ID NO: 2303694 - RNA, 19 nt, Artificial Sequence
  Description of Artificial Sequence: Synthetic oligonucleotide
  Sense strand starting at position 3125 of SEQ ID NO: 1884940
uacaaauaacgguguaaug

SEQ ID NO: 2303695 - RNA, 19 nt, Artificial Sequence
  Description of Artificial Sequence: Synthetic oligonucleotide
  Antisense strand to SEQ ID NO: 2303694
cauuacaccguuauuugua

SEQ ID NO: 2303696 - RNA, 19 nt, Artificial Sequence
  Description of Artificial Sequence: Synthetic oligonucleotide
  Sense strand starting at position 3189 of SEQ ID NO: 1884940
agucuuccaguugagaaua

SEQ ID NO: 2303697 - RNA, 19 nt, Artificial Sequence
  Description of Artificial Sequence: Synthetic oligonucleotide
  Antisense strand to SEQ ID NO: 2303696
uauucucaacuggaagacu

SEQ ID NO: 2303698 - RNA, 19 nt, Artificial Sequence
  Description of Artificial Sequence: Synthetic oligonucleotide
  Sense strand starting at position 3224 of SEQ ID NO: 1884940
gucaaugauggauguguau

SEQ ID NO: 2303699 - RNA, 19 nt, Artificial Sequence
  Description of Artificial Sequence: Synthetic oligonucleotide
  Antisense strand to SEQ ID NO: 2303698
auacacauccaucauugac

SEQ ID NO: 2303700 - RNA, 19 nt, Artificial Sequence
  Description of Artificial Sequence: Synthetic oligonucleotide
  Sense strand starting at position 3227 of SEQ ID NO: 1884940
aaugauggauguguauauu

SEQ ID NO: 2303701 - RNA, 19 nt, Artificial Sequence
  Description of Artificial Sequence: Synthetic oligonucleotide
  Antisense strand to SEQ ID NO: 2303700
aauauacacauccaucauu

SEQ ID NO: 2303702 - RNA, 19 nt, Artificial Sequence
  Description of Artificial Sequence: Synthetic oligonucleotide
  Sense strand starting at position 3290 of SEQ ID NO: 1884940
ugaagaugugcauauccuu

SEQ ID NO: 2303703 - RNA, 19 nt, Artificial Sequence
  Description of Artificial Sequence: Synthetic oligonucleotide
  Antisense strand to SEQ ID NO: 2303702
aaggauaugcacaucuuca

SEQ ID NO: 2303704 - RNA, 19 nt, Artificial Sequence
  Description of Artificial Sequence: Synthetic oligonucleotide
  Sense strand starting at position 3297 of SEQ ID NO: 1884940
gugcauauccuuugauuua

SEQ ID NO: 2303705 - RNA, 19 nt, Artificial Sequence
  Description of Artificial Sequence: Synthetic oligonucleotide
  Antisense strand to SEQ ID NO: 2303704
uaaaucaaaggauaugcac

SEQ ID NO: 2303706 - RNA, 19 nt, Artificial Sequence
  Description of Artificial Sequence: Synthetic oligonucleotide
  Sense strand starting at position 3318 of SEQ ID NO: 1884940
uauauaguucuuggguaug

SEQ ID NO: 2303707 - RNA, 19 nt, Artificial Sequence
  Description of Artificial Sequence: Synthetic oligonucleotide
  Antisense strand to SEQ ID NO: 2303706
cauacccaagaacuauaua

SEQ ID NO: 2303708 - RNA, 19 nt, Artificial Sequence
  Description of Artificial Sequence: Synthetic oligonucleotide
  Sense strand starting at position 3330 of SEQ ID NO: 1884940
ggguaugugcccuagagaa

SEQ ID NO: 2303709 - RNA, 19 nt, Artificial Sequence
  Description of Artificial Sequence: Synthetic oligonucleotide
  Antisense strand to SEQ ID NO: 2303708
uucucuagggcacauaccc

SEQ ID NO: 2303710 - RNA, 19 nt, Artificial Sequence
  Description of Artificial Sequence: Synthetic oligonucleotide
  Sense strand starting at position 3332 of SEQ ID NO: 1884940
guaugugcccuagagaaac

SEQ ID NO: 2303711 - RNA, 19 nt, Artificial Sequence
  Description of Artificial Sequence: Synthetic oligonucleotide
  Antisense strand to SEQ ID NO: 2303710
guuucucuagggcacauac

SEQ ID NO: 2303712 - RNA, 19 nt, Artificial Sequence
  Description of Artificial Sequence: Synthetic oligonucleotide
  Sense strand starting at position 3675 of SEQ ID NO: 1884940
ugugguguauuuguauauu

SEQ ID NO: 2303713 - RNA, 19 nt, Artificial Sequence
  Description of Artificial Sequence: Synthetic oligonucleotide
  Antisense strand to SEQ ID NO: 2303712
aauauacaaauacaccaca

SEQ ID NO: 2303714 - RNA, 19 nt, Artificial Sequence
  Description of Artificial Sequence: Synthetic oligonucleotide
  Sense strand starting at position 3887 of SEQ ID NO: 1884940
augagucuucuguauauca

SEQ ID NO: 2303715 - RNA, 19 nt, Artificial Sequence
  Description of Artificial Sequence: Synthetic oligonucleotide
  Antisense strand to SEQ ID NO: 2303714
ugauauacagaagacucau

SEQ ID NO: 2303716 - RNA, 19 nt, Artificial Sequence
  Description of Artificial Sequence: Synthetic oligonucleotide
  Sense strand starting at position 3958 of SEQ ID NO: 1884940
ggcuaugaagaauaagugu

SEQ ID NO: 2303717 - RNA, 19 nt, Artificial Sequence
  Description of Artificial Sequence: Synthetic oligonucleotide
  Antisense strand to SEQ ID NO: 2303716
acacuuauucuucauagcc

SEQ ID NO: 2303718 - RNA, 19 nt, Artificial Sequence
  Description of Artificial Sequence: Synthetic oligonucleotide
  Sense strand starting at position 9 of SEQ ID NO: 1884941
ugaaguaucagagguauau

SEQ ID NO: 2303719 - RNA, 19 nt, Artificial Sequence
  Description of Artificial Sequence: Synthetic oligonucleotide
  Antisense strand to SEQ ID NO: 2303718
auauaccucugauacuuca

SEQ ID NO: 2303720 - RNA, 19 nt, Artificial Sequence
  Description of Artificial Sequence: Synthetic oligonucleotide
  Sense strand starting at position 13 of SEQ ID NO: 1884941
guaucagagguauauagug

SEQ ID NO: 2303721 - RNA, 19 nt, Artificial Sequence
  Description of Artificial Sequence: Synthetic oligonucleotide
  Antisense strand to SEQ ID NO: 2303720
cacuauauaccucugauac

SEQ ID NO: 2303722 - RNA, 19 nt, Artificial Sequence
  Description of Artificial Sequence: Synthetic oligonucleotide
  Sense strand starting at position 15 of SEQ ID NO: 1884941
aucagagguauauagugua

SEQ ID NO: 2303723 - RNA, 19 nt, Artificial Sequence
  Description of Artificial Sequence: Synthetic oligonucleotide
  Antisense strand to SEQ ID NO: 2303722
uacacuauauaccucugau

SEQ ID NO: 2303724 - RNA, 19 nt, Artificial Sequence
  Description of Artificial Sequence: Synthetic oligonucleotide
  Sense strand starting at position 214 of SEQ ID NO: 1884941
guacaagagugccugacau

SEQ ID NO: 2303725 - RNA, 19 nt, Artificial Sequence
  Description of Artificial Sequence: Synthetic oligonucleotide
  Antisense strand to SEQ ID NO: 2303724
augucaggcacucuuguac

SEQ ID NO: 2303726 - RNA, 19 nt, Artificial Sequence
  Description of Artificial Sequence: Synthetic oligonucleotide
  Sense strand starting at position 220 of SEQ ID NO: 1884941
gagugccugacaugaagua

SEQ ID NO: 2303727 - RNA, 19 nt, Artificial Sequence
  Description of Artificial Sequence: Synthetic oligonucleotide
  Antisense strand to SEQ ID NO: 2303726
uacuucaugucaggcacuc

SEQ ID NO: 2303728 - RNA, 19 nt, Artificial Sequence
  Description of Artificial Sequence: Synthetic oligonucleotide
  Sense strand starting at position 267 of SEQ ID NO: 1884941
ugguguaacacgcaauaau

SEQ ID NO: 2303729 - RNA, 19 nt, Artificial Sequence
  Description of Artificial Sequence: Synthetic oligonucleotide
  Antisense strand to SEQ ID NO: 2303728
auuauugcguguuacacca

SEQ ID NO: 2303730 - RNA, 19 nt, Artificial Sequence
  Description of Artificial Sequence: Synthetic oligonucleotide
  Sense strand starting at position 313 of SEQ ID NO: 1884941
ucgagcuuuaugccuuagu

SEQ ID NO: 2303731 - RNA, 19 nt, Artificial Sequence
  Description of Artificial Sequence: Synthetic oligonucleotide
  Antisense strand to SEQ ID NO: 2303730
acuaaggcauaaagcucga

SEQ ID NO: 2303732 - RNA, 19 nt, Artificial Sequence
  Description of Artificial Sequence: Synthetic oligonucleotide
  Sense strand starting at position 316 of SEQ ID NO: 1884941
agcuuuaugccuuagugac

SEQ ID NO: 2303733 - RNA, 19 nt, Artificial Sequence
  Description of Artificial Sequence: Synthetic oligonucleotide
  Antisense strand to SEQ ID NO: 2303732
gucacuaaggcauaaagcu

SEQ ID NO: 2303734 - RNA, 19 nt, Artificial Sequence
  Description of Artificial Sequence: Synthetic oligonucleotide
  Sense strand starting at position 356 of SEQ ID NO: 1884941
ggguguggucuucagauuc

SEQ ID NO: 2303735 - RNA, 19 nt, Artificial Sequence
  Description of Artificial Sequence: Synthetic oligonucleotide
  Antisense strand to SEQ ID NO: 2303734
gaaucugaagaccacaccc

SEQ ID NO: 2303736 - RNA, 19 nt, Artificial Sequence
  Description of Artificial Sequence: Synthetic oligonucleotide
  Sense strand starting at position 371 of SEQ ID NO: 1884941
auuccauuccuguguaacc

SEQ ID NO: 2303737 - RNA, 19 nt, Artificial Sequence
  Description of Artificial Sequence: Synthetic oligonucleotide
  Antisense strand to SEQ ID NO: 2303736
gguuacacaggaauggaau

SEQ ID NO: 2303738 - RNA, 19 nt, Artificial Sequence
  Description of Artificial Sequence: Synthetic oligonucleotide
  Sense strand starting at position 1072 of SEQ ID NO: 1884941
ccucuuccaggguauguau

SEQ ID NO: 2303739 - RNA, 19 nt, Artificial Sequence
  Description of Artificial Sequence: Synthetic oligonucleotide
  Antisense strand to SEQ ID NO: 2303738
auacauacccuggaagagg

SEQ ID NO: 2303740 - RNA, 19 nt, Artificial Sequence
  Description of Artificial Sequence: Synthetic oligonucleotide
  Sense strand starting at position 1386 of SEQ ID NO: 1884941
ugaagcuuggcuuaccuau

SEQ ID NO: 2303741 - RNA, 19 nt, Artificial Sequence
  Description of Artificial Sequence: Synthetic oligonucleotide
  Antisense strand to SEQ ID NO: 2303740
auagguaagccaagcuuca

SEQ ID NO: 2303742 - RNA, 19 nt, Artificial Sequence
  Description of Artificial Sequence: Synthetic oligonucleotide
  Sense strand starting at position 1643 of SEQ ID NO: 1884941
gagagaggucguggcucuu

SEQ ID NO: 2303743 - RNA, 19 nt, Artificial Sequence
  Description of Artificial Sequence: Synthetic oligonucleotide
  Antisense strand to SEQ ID NO: 2303742
aagagccacgaccucucuc

SEQ ID NO: 2303744 - RNA, 19 nt, Artificial Sequence
  Description of Artificial Sequence: Synthetic oligonucleotide
  Sense strand starting at position 2264 of SEQ ID NO: 1884941
cagccaggcuguucugaaa

SEQ ID NO: 2303745 - RNA, 19 nt, Artificial Sequence
  Description of Artificial Sequence: Synthetic oligonucleotide
  Antisense strand to SEQ ID NO: 2303744
uuucagaacagccuggcug

SEQ ID NO: 2303746 - RNA, 19 nt, Artificial Sequence
  Description of Artificial Sequence: Synthetic oligonucleotide
  Sense strand starting at position 2285 of SEQ ID NO: 1884941
uccacaguccuucguuaag

SEQ ID NO: 2303747 - RNA, 19 nt, Artificial Sequence
  Description of Artificial Sequence: Synthetic oligonucleotide
  Antisense strand to SEQ ID NO: 2303746
cuuaacgaaggacugugga

SEQ ID NO: 2303748 - RNA, 19 nt, Artificial Sequence
  Description of Artificial Sequence: Synthetic oligonucleotide
  Sense strand starting at position 2287 of SEQ ID NO: 1884941
cacaguccuucguuaagua

SEQ ID NO: 2303749 - RNA, 19 nt, Artificial Sequence
  Description of Artificial Sequence: Synthetic oligonucleotide
  Antisense strand to SEQ ID NO: 2303748
uacuuaacgaaggacugug

SEQ ID NO: 2303750 - RNA, 19 nt, Artificial Sequence
  Description of Artificial Sequence: Synthetic oligonucleotide
  Sense strand starting at position 2624 of SEQ ID NO: 1884941
uucucaugccacuggauaa

SEQ ID NO: 2303751 - RNA, 19 nt, Artificial Sequence
  Description of Artificial Sequence: Synthetic oligonucleotide
  Antisense strand to SEQ ID NO: 2303750
uuauccaguggcaugagaa

SEQ ID NO: 2303752 - RNA, 19 nt, Artificial Sequence
  Description of Artificial Sequence: Synthetic oligonucleotide
  Sense strand starting at position 2693 of SEQ ID NO: 1884941
ggcagcuucuaugugacuu

SEQ ID NO: 2303753 - RNA, 19 nt, Artificial Sequence
  Description of Artificial Sequence: Synthetic oligonucleotide
  Antisense strand to SEQ ID NO: 2303752
aagucacauagaagcugcc

SEQ ID NO: 2303754 - RNA, 19 nt, Artificial Sequence
  Description of Artificial Sequence: Synthetic oligonucleotide
  Sense strand starting at position 2779 of SEQ ID NO: 1884941
aucuguggucaucgaguca

SEQ ID NO: 2303755 - RNA, 19 nt, Artificial Sequence
  Description of Artificial Sequence: Synthetic oligonucleotide
  Antisense strand to SEQ ID NO: 2303754
ugacucgaugaccacagau

SEQ ID NO: 2303756 - RNA, 19 nt, Artificial Sequence
  Description of Artificial Sequence: Synthetic oligonucleotide
  Sense strand starting at position 2786 of SEQ ID NO: 1884941
gucaucgagucauauuuga

SEQ ID NO: 2303757 - RNA, 19 nt, Artificial Sequence
  Description of Artificial Sequence: Synthetic oligonucleotide
  Antisense strand to SEQ ID NO: 2303756
ucaaauaugacucgaugac

SEQ ID NO: 2303758 - RNA, 19 nt, Artificial Sequence
  Description of Artificial Sequence: Synthetic oligonucleotide
  Sense strand starting at position 2985 of SEQ ID NO: 1884941
ggaguauaaguguagcaga

SEQ ID NO: 2303759 - RNA, 19 nt, Artificial Sequence
  Description of Artificial Sequence: Synthetic oligonucleotide
  Antisense strand to SEQ ID NO: 2303758
ucugcuacacuuauacucc

SEQ ID NO: 2303760 - RNA, 19 nt, Artificial Sequence
  Description of Artificial Sequence: Synthetic oligonucleotide
  Sense strand starting at position 3089 of SEQ ID NO: 1884941
agucagugugguugggaga

SEQ ID NO: 2303761 - RNA, 19 nt, Artificial Sequence
  Description of Artificial Sequence: Synthetic oligonucleotide
  Antisense strand to SEQ ID NO: 2303760
ucucccaaccacacugacu

SEQ ID NO: 2303762 - RNA, 19 nt, Artificial Sequence
  Description of Artificial Sequence: Synthetic oligonucleotide
  Sense strand starting at position 3090 of SEQ ID NO: 1884941
gucagugugguugggagaa

SEQ ID NO: 2303763 - RNA, 19 nt, Artificial Sequence
  Description of Artificial Sequence: Synthetic oligonucleotide
  Antisense strand to SEQ ID NO: 2303762
uucucccaaccacacugac

SEQ ID NO: 2303764 - RNA, 19 nt, Artificial Sequence
  Description of Artificial Sequence: Synthetic oligonucleotide
  Sense strand starting at position 3113 of SEQ ID NO: 1884941
gagggacuguauuaaauga

SEQ ID NO: 2303765 - RNA, 19 nt, Artificial Sequence
  Description of Artificial Sequence: Synthetic oligonucleotide
  Antisense strand to SEQ ID NO: 2303764
ucauuuaauacagucccuc

SEQ ID NO: 2303766 - RNA, 19 nt, Artificial Sequence
  Description of Artificial Sequence: Synthetic oligonucleotide
  Sense strand starting at position 3126 of SEQ ID NO: 1884941
aaaugacugcaaggguuau

SEQ ID NO: 2303767 - RNA, 19 nt, Artificial Sequence
  Description of Artificial Sequence: Synthetic oligonucleotide
  Antisense strand to SEQ ID NO: 2303766
auaacccuugcagucauuu

SEQ ID NO: 2303768 - RNA, 19 nt, Artificial Sequence
  Description of Artificial Sequence: Synthetic oligonucleotide
  Sense strand starting at position 3151 of SEQ ID NO: 1884941
uuacucauuugugcgcuua

SEQ ID NO: 2303769 - RNA, 19 nt, Artificial Sequence
  Description of Artificial Sequence: Synthetic oligonucleotide
  Antisense strand to SEQ ID NO: 2303768
uaagcgcacaaaugaguaa

SEQ ID NO: 2303770 - RNA, 19 nt, Artificial Sequence
  Description of Artificial Sequence: Synthetic oligonucleotide
  Sense strand starting at position 3152 of SEQ ID NO: 1884941
uacucauuugugcgcuuaa

SEQ ID NO: 2303771 - RNA, 19 nt, Artificial Sequence
  Description of Artificial Sequence: Synthetic oligonucleotide
  Antisense strand to SEQ ID NO: 2303770
uuaagcgcacaaaugagua

SEQ ID NO: 2303772 - RNA, 19 nt, Artificial Sequence
  Description of Artificial Sequence: Synthetic oligonucleotide
  Sense strand starting at position 3153 of SEQ ID NO: 1884941
acucauuugugcgcuuaac

SEQ ID NO: 2303773 - RNA, 19 nt, Artificial Sequence
  Description of Artificial Sequence: Synthetic oligonucleotide
  Antisense strand to SEQ ID NO: 2303772
guuaagcgcacaaaugagu

SEQ ID NO: 2303774 - RNA, 19 nt, Artificial Sequence
  Description of Artificial Sequence: Synthetic oligonucleotide
  Sense strand starting at position 3183 of SEQ ID NO: 1884941
ggacaccuacuguguguua

SEQ ID NO: 2303775 - RNA, 19 nt, Artificial Sequence
  Description of Artificial Sequence: Synthetic oligonucleotide
  Antisense strand to SEQ ID NO: 2303774
uaacacacaguaggugucc

SEQ ID NO: 2303776 - RNA, 19 nt, Artificial Sequence
  Description of Artificial Sequence: Synthetic oligonucleotide
  Sense strand starting at position 3184 of SEQ ID NO: 1884941
gacaccuacuguguguuaa

SEQ ID NO: 2303777 - RNA, 19 nt, Artificial Sequence
  Description of Artificial Sequence: Synthetic oligonucleotide
  Antisense strand to SEQ ID NO: 2303776
uuaacacacaguagguguc

SEQ ID NO: 2303778 - RNA, 19 nt, Artificial Sequence
  Description of Artificial Sequence: Synthetic oligonucleotide
  Sense strand starting at position 3185 of SEQ ID NO: 1884941
acaccuacuguguguuaaa

SEQ ID NO: 2303779 - RNA, 19 nt, Artificial Sequence
  Description of Artificial Sequence: Synthetic oligonucleotide
  Antisense strand to SEQ ID NO: 2303778
uuuaacacacaguaggugu

SEQ ID NO: 2303780 - RNA, 19 nt, Artificial Sequence
  Description of Artificial Sequence: Synthetic oligonucleotide
  Sense strand starting at position 3318 of SEQ ID NO: 1884941
aauugugauaggugaacga

SEQ ID NO: 2303781 - RNA, 19 nt, Artificial Sequence
  Description of Artificial Sequence: Synthetic oligonucleotide
  Antisense strand to SEQ ID NO: 2303780
ucguucaccuaucacaauu

SEQ ID NO: 2303782 - RNA, 19 nt, Artificial Sequence
  Description of Artificial Sequence: Synthetic oligonucleotide
  Sense strand starting at position 3322 of SEQ ID NO: 1884941
gugauaggugaacgaaacu

SEQ ID NO: 2303783 - RNA, 19 nt, Artificial Sequence
  Description of Artificial Sequence: Synthetic oligonucleotide
  Antisense strand to SEQ ID NO: 2303782
aguuucguucaccuaucac

SEQ ID NO: 2303784 - RNA, 19 nt, Artificial Sequence
  Description of Artificial Sequence: Synthetic oligonucleotide
  Sense strand starting at position 3557 of SEQ ID NO: 1884941
cuggauacugucugagguu

SEQ ID NO: 2303785 - RNA, 19 nt, Artificial Sequence
  Description of Artificial Sequence: Synthetic oligonucleotide
  Antisense strand to SEQ ID NO: 2303784
aaccucagacaguauccag

SEQ ID NO: 2303786 - RNA, 19 nt, Artificial Sequence
  Description of Artificial Sequence: Synthetic oligonucleotide
  Sense strand starting at position 3650 of SEQ ID NO: 1884941
uccugaugcccuggagagu

SEQ ID NO: 2303787 - RNA, 19 nt, Artificial Sequence
  Description of Artificial Sequence: Synthetic oligonucleotide
  Antisense strand to SEQ ID NO: 2303786
acucuccagggcaucagga

SEQ ID NO: 2303788 - RNA, 19 nt, Artificial Sequence
  Description of Artificial Sequence: Synthetic oligonucleotide
  Sense strand starting at position 3795 of SEQ ID NO: 1884941
agagcauugcacggacuuu

SEQ ID NO: 2303789 - RNA, 19 nt, Artificial Sequence
  Description of Artificial Sequence: Synthetic oligonucleotide
  Antisense strand to SEQ ID NO: 2303788
aaaguccgugcaaugcucu

SEQ ID NO: 2303790 - RNA, 19 nt, Artificial Sequence
  Description of Artificial Sequence: Synthetic oligonucleotide
  Sense strand starting at position 3870 of SEQ ID NO: 1884941
cauggaauucugggaguag

SEQ ID NO: 2303791 - RNA, 19 nt, Artificial Sequence
  Description of Artificial Sequence: Synthetic oligonucleotide
  Antisense strand to SEQ ID NO: 2303790
cuacucccagaauuccaug

SEQ ID NO: 2303792 - RNA, 19 nt, Artificial Sequence
  Description of Artificial Sequence: Synthetic oligonucleotide
  Sense strand starting at position 3894 of SEQ ID NO: 1884941
gggcccauuugccacauau

SEQ ID NO: 2303793 - RNA, 19 nt, Artificial Sequence
  Description of Artificial Sequence: Synthetic oligonucleotide
  Antisense strand to SEQ ID NO: 2303792
auauguggcaaaugggccc

SEQ ID NO: 2303794 - RNA, 19 nt, Artificial Sequence
  Description of Artificial Sequence: Synthetic oligonucleotide
  Sense strand starting at position 3915 of SEQ ID NO: 1884941
agaggaaauuuggaugucu

SEQ ID NO: 2303795 - RNA, 19 nt, Artificial Sequence
  Description of Artificial Sequence: Synthetic oligonucleotide
  Antisense strand to SEQ ID NO: 2303794
agacauccaaauuuccucu

SEQ ID NO: 2303796 - RNA, 19 nt, Artificial Sequence
  Description of Artificial Sequence: Synthetic oligonucleotide
  Sense strand starting at position 3926 of SEQ ID NO: 1884941
ggaugucugagcugugcaa

SEQ ID NO: 2303797 - RNA, 19 nt, Artificial Sequence
  Description of Artificial Sequence: Synthetic oligonucleotide
  Antisense strand to SEQ ID NO: 2303796
uugcacagcucagacaucc

SEQ ID NO: 2303798 - RNA, 19 nt, Artificial Sequence
  Description of Artificial Sequence: Synthetic oligonucleotide
  Sense strand starting at position 101 of SEQ ID NO: 1884942
gggugagguuggaagucua

SEQ ID NO: 2303799 - RNA, 19 nt, Artificial Sequence
  Description of Artificial Sequence: Synthetic oligonucleotide
  Antisense strand to SEQ ID NO: 2303798
uagacuuccaaccucaccc

SEQ ID NO: 2303800 - RNA, 19 nt, Artificial Sequence
  Description of Artificial Sequence: Synthetic oligonucleotide
  Sense strand starting at position 195 of SEQ ID NO: 1884942
gcaguuguugucuaaacau

SEQ ID NO: 2303801 - RNA, 19 nt, Artificial Sequence
  Description of Artificial Sequence: Synthetic oligonucleotide
  Antisense strand to SEQ ID NO: 2303800
auguuuagacaacaacugc

SEQ ID NO: 2303802 - RNA, 19 nt, Artificial Sequence
  Description of Artificial Sequence: Synthetic oligonucleotide
  Sense strand starting at position 204 of SEQ ID NO: 1884942
gucuaaacaucuucugucu

SEQ ID NO: 2303803 - RNA, 19 nt, Artificial Sequence
  Description of Artificial Sequence: Synthetic oligonucleotide
  Antisense strand to SEQ ID NO: 2303802
agacagaagauguuuagac

SEQ ID NO: 2303804 - RNA, 19 nt, Artificial Sequence
  Description of Artificial Sequence: Synthetic oligonucleotide
  Sense strand starting at position 241 of SEQ ID NO: 1884942
cuguuucuuugguuagaga

SEQ ID NO: 2303805 - RNA, 19 nt, Artificial Sequence
  Description of Artificial Sequence: Synthetic oligonucleotide
  Antisense strand to SEQ ID NO: 2303804
ucucuaaccaaagaaacag

SEQ ID NO: 2303806 - RNA, 19 nt, Artificial Sequence
  Description of Artificial Sequence: Synthetic oligonucleotide
  Sense strand starting at position 242 of SEQ ID NO: 1884942
uguuucuuugguuagagaa

SEQ ID NO: 2303807 - RNA, 19 nt, Artificial Sequence
  Description of Artificial Sequence: Synthetic oligonucleotide
  Antisense strand to SEQ ID NO: 2303806
uucucuaaccaaagaaaca

SEQ ID NO: 2303808 - RNA, 19 nt, Artificial Sequence
  Description of Artificial Sequence: Synthetic oligonucleotide
  Sense strand starting at position 352 of SEQ ID NO: 1884942
cuacaauagcuaggauauc

SEQ ID NO: 2303809 - RNA, 19 nt, Artificial Sequence
  Description of Artificial Sequence: Synthetic oligonucleotide
  Antisense strand to SEQ ID NO: 2303808
gauauccuagcuauuguag

SEQ ID NO: 2303810 - RNA, 19 nt, Artificial Sequence
  Description of Artificial Sequence: Synthetic oligonucleotide
  Sense strand starting at position 372 of SEQ ID NO: 1884942
ggagaucucuagucagccu

SEQ ID NO: 2303811 - RNA, 19 nt, Artificial Sequence
  Description of Artificial Sequence: Synthetic oligonucleotide
  Antisense strand to SEQ ID NO: 2303810
aggcugacuagagaucucc

SEQ ID NO: 2303812 - RNA, 19 nt, Artificial Sequence
  Description of Artificial Sequence: Synthetic oligonucleotide
  Sense strand starting at position 912 of SEQ ID NO: 1884942
uuucuaucccugcgaaaca

SEQ ID NO: 2303813 - RNA, 19 nt, Artificial Sequence
  Description of Artificial Sequence: Synthetic oligonucleotide
  Antisense strand to SEQ ID NO: 2303812
uguuucgcagggauagaaa

SEQ ID NO: 2303814 - RNA, 19 nt, Artificial Sequence
  Description of Artificial Sequence: Synthetic oligonucleotide
  Sense strand starting at position 1038 of SEQ ID NO: 1884942
guguuugggacguaguaaa

SEQ ID NO: 2303815 - RNA, 19 nt, Artificial Sequence
  Description of Artificial Sequence: Synthetic oligonucleotide
  Antisense strand to SEQ ID NO: 2303814
uuuacuacgucccaaacac

SEQ ID NO: 2303816 - RNA, 19 nt, Artificial Sequence
  Description of Artificial Sequence: Synthetic oligonucleotide
  Sense strand starting at position 1154 of SEQ ID NO: 1884942
guguuuauucuacaaugau

SEQ ID NO: 2303817 - RNA, 19 nt, Artificial Sequence
  Description of Artificial Sequence: Synthetic oligonucleotide
  Antisense strand to SEQ ID NO: 2303816
aucauuguagaauaaacac

SEQ ID NO: 2303818 - RNA, 19 nt, Artificial Sequence
  Description of Artificial Sequence: Synthetic oligonucleotide
  Sense strand starting at position 1166 of SEQ ID NO: 1884942
caaugaugaucacugguga

SEQ ID NO: 2303819 - RNA, 19 nt, Artificial Sequence
  Description of Artificial Sequence: Synthetic oligonucleotide
  Antisense strand to SEQ ID NO: 2303818
ucaccagugaucaucauug

SEQ ID NO: 2303820 - RNA, 19 nt, Artificial Sequence
  Description of Artificial Sequence: Synthetic oligonucleotide
  Sense strand starting at position 1167 of SEQ ID NO: 1884942
aaugaugaucacuggugau

SEQ ID NO: 2303821 - RNA, 19 nt, Artificial Sequence
  Description of Artificial Sequence: Synthetic oligonucleotide
  Antisense strand to SEQ ID NO: 2303820
aucaccagugaucaucauu

SEQ ID NO: 2303822 - RNA, 19 nt, Artificial Sequence
  Description of Artificial Sequence: Synthetic oligonucleotide
  Sense strand starting at position 1170 of SEQ ID NO: 1884942
gaugaucacuggugauuug

SEQ ID NO: 2303823 - RNA, 19 nt, Artificial Sequence
  Description of Artificial Sequence: Synthetic oligonucleotide
  Antisense strand to SEQ ID NO: 2303822
caaaucaccagugaucauc

SEQ ID NO: 2303824 - RNA, 19 nt, Artificial Sequence
  Description of Artificial Sequence: Synthetic oligonucleotide
  Sense strand starting at position 1197 of SEQ ID NO: 1884942
auauuauaagugugaggug

SEQ ID NO: 2303825 - RNA, 19 nt, Artificial Sequence
  Description of Artificial Sequence: Synthetic oligonucleotide
  Antisense strand to SEQ ID NO: 2303824
caccucacacuuauaauau

SEQ ID NO: 2303826 - RNA, 19 nt, Artificial Sequence
  Description of Artificial Sequence: Synthetic oligonucleotide
  Sense strand starting at position 1266 of SEQ ID NO: 1884942
ugaaguugugcagaggaca

SEQ ID NO: 2303827 - RNA, 19 nt, Artificial Sequence
  Description of Artificial Sequence: Synthetic oligonucleotide
  Antisense strand to SEQ ID NO: 2303826
uguccucugcacaacuuca

SEQ ID NO: 2303828 - RNA, 19 nt, Artificial Sequence
  Description of Artificial Sequence: Synthetic oligonucleotide
  Sense strand starting at position 1374 of SEQ ID NO: 1884942
agugaaguccuaggaacua

SEQ ID NO: 2303829 - RNA, 19 nt, Artificial Sequence
  Description of Artificial Sequence: Synthetic oligonucleotide
  Antisense strand to SEQ ID NO: 2303828
uaguuccuaggacuucacu

SEQ ID NO: 2303830 - RNA, 19 nt, Artificial Sequence
  Description of Artificial Sequence: Synthetic oligonucleotide
  Sense strand starting at position 1393 of SEQ ID NO: 1884942
gcaagaaagucuguccuua

SEQ ID NO: 2303831 - RNA, 19 nt, Artificial Sequence
  Description of Artificial Sequence: Synthetic oligonucleotide
  Antisense strand to SEQ ID NO: 2303830
uaaggacagacuuucuugc

SEQ ID NO: 2303832 - RNA, 19 nt, Artificial Sequence
  Description of Artificial Sequence: Synthetic oligonucleotide
  Sense strand starting at position 1395 of SEQ ID NO: 1884942
aagaaagucuguccuuaag

SEQ ID NO: 2303833 - RNA, 19 nt, Artificial Sequence
  Description of Artificial Sequence: Synthetic oligonucleotide
  Antisense strand to SEQ ID NO: 2303832
cuuaaggacagacuuucuu

SEQ ID NO: 2303834 - RNA, 19 nt, Artificial Sequence
  Description of Artificial Sequence: Synthetic oligonucleotide
  Sense strand starting at position 1397 of SEQ ID NO: 1884942
gaaagucuguccuuaaguu

SEQ ID NO: 2303835 - RNA, 19 nt, Artificial Sequence
  Description of Artificial Sequence: Synthetic oligonucleotide
  Antisense strand to SEQ ID NO: 2303834
aacuuaaggacagacuuuc

SEQ ID NO: 2303836 - RNA, 19 nt, Artificial Sequence
  Description of Artificial Sequence: Synthetic oligonucleotide
  Sense strand starting at position 1404 of SEQ ID NO: 1884942
uguccuuaaguuuguggga

SEQ ID NO: 2303837 - RNA, 19 nt, Artificial Sequence
  Description of Artificial Sequence: Synthetic oligonucleotide
  Antisense strand to SEQ ID NO: 2303836
ucccacaaacuuaaggaca

SEQ ID NO: 2303838 - RNA, 19 nt, Artificial Sequence
  Description of Artificial Sequence: Synthetic oligonucleotide
  Sense strand starting at position 1411 of SEQ ID NO: 1884942
aaguuugugggacaagcau

SEQ ID NO: 2303839 - RNA, 19 nt, Artificial Sequence
  Description of Artificial Sequence: Synthetic oligonucleotide
  Antisense strand to SEQ ID NO: 2303838
augcuugucccacaaacuu

SEQ ID NO: 2303840 - RNA, 19 nt, Artificial Sequence
  Description of Artificial Sequence: Synthetic oligonucleotide
  Sense strand starting at position 1528 of SEQ ID NO: 1884942
acuucuugcuucgugauuu

SEQ ID NO: 2303841 - RNA, 19 nt, Artificial Sequence
  Description of Artificial Sequence: Synthetic oligonucleotide
  Antisense strand to SEQ ID NO: 2303840
aaaucacgaagcaagaagu

SEQ ID NO: 2303842 - RNA, 19 nt, Artificial Sequence
  Description of Artificial Sequence: Synthetic oligonucleotide
  Sense strand starting at position 1714 of SEQ ID NO: 1884942
gcauucuucugacuucuga

SEQ ID NO: 2303843 - RNA, 19 nt, Artificial Sequence
  Description of Artificial Sequence: Synthetic oligonucleotide
  Antisense strand to SEQ ID NO: 2303842
ucagaagucagaagaaugc

SEQ ID NO: 2303844 - RNA, 19 nt, Artificial Sequence
  Description of Artificial Sequence: Synthetic oligonucleotide
  Sense strand starting at position 1837 of SEQ ID NO: 1884942
uguucuuggccggagaaca

SEQ ID NO: 2303845 - RNA, 19 nt, Artificial Sequence
  Description of Artificial Sequence: Synthetic oligonucleotide
  Antisense strand to SEQ ID NO: 2303844
uguucuccggccaagaaca

SEQ ID NO: 2303846 - RNA, 19 nt, Artificial Sequence
  Description of Artificial Sequence: Synthetic oligonucleotide
  Sense strand starting at position 1872 of SEQ ID NO: 1884942
gggugucaucuaugaagcu

SEQ ID NO: 2303847 - RNA, 19 nt, Artificial Sequence
  Description of Artificial Sequence: Synthetic oligonucleotide
  Antisense strand to SEQ ID NO: 2303846
agcuucauagaugacaccc

SEQ ID NO: 2303848 - RNA, 19 nt, Artificial Sequence
  Description of Artificial Sequence: Synthetic oligonucleotide
  Sense strand starting at position 2124 of SEQ ID NO: 1884942
aaggauuaaucagugaguc

SEQ ID NO: 2303849 - RNA, 19 nt, Artificial Sequence
  Description of Artificial Sequence: Synthetic oligonucleotide
  Antisense strand to SEQ ID NO: 2303848
gacucacugauuaauccuu

SEQ ID NO: 2303850 - RNA, 19 nt, Artificial Sequence
  Description of Artificial Sequence: Synthetic oligonucleotide
  Sense strand starting at position 2125 of SEQ ID NO: 1884942
aggauuaaucagugaguca

SEQ ID NO: 2303851 - RNA, 19 nt, Artificial Sequence
  Description of Artificial Sequence: Synthetic oligonucleotide
  Antisense strand to SEQ ID NO: 2303850
ugacucacugauuaauccu

SEQ ID NO: 2303852 - RNA, 19 nt, Artificial Sequence
  Description of Artificial Sequence: Synthetic oligonucleotide
  Sense strand starting at position 2132 of SEQ ID NO: 1884942
aucagugagucauucgaua

SEQ ID NO: 2303853 - RNA, 19 nt, Artificial Sequence
  Description of Artificial Sequence: Synthetic oligonucleotide
  Antisense strand to SEQ ID NO: 2303852
uaucgaaugacucacugau

SEQ ID NO: 2303854 - RNA, 19 nt, Artificial Sequence
  Description of Artificial Sequence: Synthetic oligonucleotide
  Sense strand starting at position 2134 of SEQ ID NO: 1884942
cagugagucauucgauaag

SEQ ID NO: 2303855 - RNA, 19 nt, Artificial Sequence
  Description of Artificial Sequence: Synthetic oligonucleotide
  Antisense strand to SEQ ID NO: 2303854
cuuaucgaaugacucacug

SEQ ID NO: 2303856 - RNA, 19 nt, Artificial Sequence
  Description of Artificial Sequence: Synthetic oligonucleotide
  Sense strand starting at position 2144 of SEQ ID NO: 1884942
uucgauaagauguguaaca

SEQ ID NO: 2303857 - RNA, 19 nt, Artificial Sequence
  Description of Artificial Sequence: Synthetic oligonucleotide
  Antisense strand to SEQ ID NO: 2303856
uguuacacaucuuaucgaa

SEQ ID NO: 2303858 - RNA, 19 nt, Artificial Sequence
  Description of Artificial Sequence: Synthetic oligonucleotide
  Sense strand starting at position 2146 of SEQ ID NO: 1884942
cgauaagauguguaacagu

SEQ ID NO: 2303859 - RNA, 19 nt, Artificial Sequence
  Description of Artificial Sequence: Synthetic oligonucleotide
  Antisense strand to SEQ ID NO: 2303858
acuguuacacaucuuaucg

SEQ ID NO: 2303860 - RNA, 19 nt, Artificial Sequence
  Description of Artificial Sequence: Synthetic oligonucleotide
  Sense strand starting at position 2776 of SEQ ID NO: 1884942
gcaggaucugaguaaguuu

SEQ ID NO: 2303861 - RNA, 19 nt, Artificial Sequence
  Description of Artificial Sequence: Synthetic oligonucleotide
  Antisense strand to SEQ ID NO: 2303860
aaacuuacucagauccugc

SEQ ID NO: 2303862 - RNA, 19 nt, Artificial Sequence
  Description of Artificial Sequence: Synthetic oligonucleotide
  Sense strand starting at position 2779 of SEQ ID NO: 1884942
ggaucugaguaaguuuaca

SEQ ID NO: 2303863 - RNA, 19 nt, Artificial Sequence
  Description of Artificial Sequence: Synthetic oligonucleotide
  Antisense strand to SEQ ID NO: 2303862
uguaaacuuacucagaucc

SEQ ID NO: 2303864 - RNA, 19 nt, Artificial Sequence
  Description of Artificial Sequence: Synthetic oligonucleotide
  Sense strand starting at position 2787 of SEQ ID NO: 1884942
guaaguuuacaaugcuaac

SEQ ID NO: 2303865 - RNA, 19 nt, Artificial Sequence
  Description of Artificial Sequence: Synthetic oligonucleotide
  Antisense strand to SEQ ID NO: 2303864
guuagcauuguaaacuuac

SEQ ID NO: 2303866 - RNA, 19 nt, Artificial Sequence
  Description of Artificial Sequence: Synthetic oligonucleotide
  Sense strand starting at position 2893 of SEQ ID NO: 1884942
aucucagucgcucauugaa

SEQ ID NO: 2303867 - RNA, 19 nt, Artificial Sequence
  Description of Artificial Sequence: Synthetic oligonucleotide
  Antisense strand to SEQ ID NO: 2303866
uucaaugagcgacugagau

SEQ ID NO: 2303868 - RNA, 19 nt, Artificial Sequence
  Description of Artificial Sequence: Synthetic oligonucleotide
  Sense strand starting at position 2950 of SEQ ID NO: 1884942
ggguauugagaaugaagug

SEQ ID NO: 2303869 - RNA, 19 nt, Artificial Sequence
  Description of Artificial Sequence: Synthetic oligonucleotide
  Antisense strand to SEQ ID NO: 2303868
cacuucauucucaauaccc

SEQ ID NO: 2303870 - RNA, 19 nt, Artificial Sequence
  Description of Artificial Sequence: Synthetic oligonucleotide
  Sense strand starting at position 2966 of SEQ ID NO: 1884942
gugaguagaaguggaaauu

SEQ ID NO: 2303871 - RNA, 19 nt, Artificial Sequence
  Description of Artificial Sequence: Synthetic oligonucleotide
  Antisense strand to SEQ ID NO: 2303870
aauuuccacuucuacucac

SEQ ID NO: 2303872 - RNA, 19 nt, Artificial Sequence
  Description of Artificial Sequence: Synthetic oligonucleotide
  Sense strand starting at position 3040 of SEQ ID NO: 1884942
gugcacaugcauuaucauu

SEQ ID NO: 2303873 - RNA, 19 nt, Artificial Sequence
  Description of Artificial Sequence: Synthetic oligonucleotide
  Antisense strand to SEQ ID NO: 2303872
aaugauaaugcaugugcac

SEQ ID NO: 2303874 - RNA, 19 nt, Artificial Sequence
  Description of Artificial Sequence: Synthetic oligonucleotide
  Sense strand starting at position 3102 of SEQ ID NO: 1884942
gggccauagaccuguccuu

SEQ ID NO: 2303875 - RNA, 19 nt, Artificial Sequence
  Description of Artificial Sequence: Synthetic oligonucleotide
  Antisense strand to SEQ ID NO: 2303874
aaggacaggucuauggccc

SEQ ID NO: 2303876 - RNA, 19 nt, Artificial Sequence
  Description of Artificial Sequence: Synthetic oligonucleotide
  Sense strand starting at position 3114 of SEQ ID NO: 1884942
uguccuuaggccuauugaa

SEQ ID NO: 2303877 - RNA, 19 nt, Artificial Sequence
  Description of Artificial Sequence: Synthetic oligonucleotide
  Antisense strand to SEQ ID NO: 2303876
uucaauaggccuaaggaca

SEQ ID NO: 2303878 - RNA, 19 nt, Artificial Sequence
  Description of Artificial Sequence: Synthetic oligonucleotide
  Sense strand starting at position 52 of SEQ ID NO: 1884943
cugcaauguccuggaagag

SEQ ID NO: 2303879 - RNA, 19 nt, Artificial Sequence
  Description of Artificial Sequence: Synthetic oligonucleotide
  Antisense strand to SEQ ID NO: 2303878
cucuuccaggacauugcag

SEQ ID NO: 2303880 - RNA, 19 nt, Artificial Sequence
  Description of Artificial Sequence: Synthetic oligonucleotide
  Sense strand starting at position 176 of SEQ ID NO: 1884943
uggguuaaaugacuccuga

SEQ ID NO: 2303881 - RNA, 19 nt, Artificial Sequence
  Description of Artificial Sequence: Synthetic oligonucleotide
  Antisense strand to SEQ ID NO: 2303880
ucaggagucauuuaaccca

SEQ ID NO: 2303882 - RNA, 19 nt, Artificial Sequence
  Description of Artificial Sequence: Synthetic oligonucleotide
  Sense strand starting at position 233 of SEQ ID NO: 1884943
gcugucuuguuucuaauuu

SEQ ID NO: 2303883 - RNA, 19 nt, Artificial Sequence
  Description of Artificial Sequence: Synthetic oligonucleotide
  Antisense strand to SEQ ID NO: 2303882
aaauuagaaacaagacagc

SEQ ID NO: 2303884 - RNA, 19 nt, Artificial Sequence
  Description of Artificial Sequence: Synthetic oligonucleotide
  Sense strand starting at position 254 of SEQ ID NO: 1884943
ugccuuaaugaccaguuga

SEQ ID NO: 2303885 - RNA, 19 nt, Artificial Sequence
  Description of Artificial Sequence: Synthetic oligonucleotide
  Antisense strand to SEQ ID NO: 2303884
ucaacuggucauuaaggca

SEQ ID NO: 2303886 - RNA, 19 nt, Artificial Sequence
  Description of Artificial Sequence: Synthetic oligonucleotide
  Sense strand starting at position 341 of SEQ ID NO: 1884943
uggcuacuuacgcaggaua

SEQ ID NO: 2303887 - RNA, 19 nt, Artificial Sequence
  Description of Artificial Sequence: Synthetic oligonucleotide
  Antisense strand to SEQ ID NO: 2303886
uauccugcguaaguagcca

SEQ ID NO: 2303888 - RNA, 19 nt, Artificial Sequence
  Description of Artificial Sequence: Synthetic oligonucleotide
  Sense strand starting at position 463 of SEQ ID NO: 1884943
uagagcuugacguagagau

SEQ ID NO: 2303889 - RNA, 19 nt, Artificial Sequence
  Description of Artificial Sequence: Synthetic oligonucleotide
  Antisense strand to SEQ ID NO: 2303888
aucucuacgucaagcucua

SEQ ID NO: 2303890 - RNA, 19 nt, Artificial Sequence
  Description of Artificial Sequence: Synthetic oligonucleotide
  Sense strand starting at position 465 of SEQ ID NO: 1884943
gagcuugacguagagauag

SEQ ID NO: 2303891 - RNA, 19 nt, Artificial Sequence
  Description of Artificial Sequence: Synthetic oligonucleotide
  Antisense strand to SEQ ID NO: 2303890
cuaucucuacgucaagcuc

SEQ ID NO: 2303892 - RNA, 19 nt, Artificial Sequence
  Description of Artificial Sequence: Synthetic oligonucleotide
  Sense strand starting at position 467 of SEQ ID NO: 1884943
gcuugacguagagauagaa

SEQ ID NO: 2303893 - RNA, 19 nt, Artificial Sequence
  Description of Artificial Sequence: Synthetic oligonucleotide
  Antisense strand to SEQ ID NO: 2303892
uucuaucucuacgucaagc

SEQ ID NO: 2303894 - RNA, 19 nt, Artificial Sequence
  Description of Artificial Sequence: Synthetic oligonucleotide
  Sense strand starting at position 896 of SEQ ID NO: 1884943
guccaagauaauggguaua

SEQ ID NO: 2303895 - RNA, 19 nt, Artificial Sequence
  Description of Artificial Sequence: Synthetic oligonucleotide
  Antisense strand to SEQ ID NO: 2303894
uauacccauuaucuuggac

SEQ ID NO: 2303896 - RNA, 19 nt, Artificial Sequence
  Description of Artificial Sequence: Synthetic oligonucleotide
  Sense strand starting at position 960 of SEQ ID NO: 1884943
auugcaagaugauuccaca

SEQ ID NO: 2303897 - RNA, 19 nt, Artificial Sequence
  Description of Artificial Sequence: Synthetic oligonucleotide
  Antisense strand to SEQ ID NO: 2303896
uguggaaucaucuugcaau

SEQ ID NO: 2303898 - RNA, 19 nt, Artificial Sequence
  Description of Artificial Sequence: Synthetic oligonucleotide
  Sense strand starting at position 1143 of SEQ ID NO: 1884943
gcuccaagacgguaacaua

SEQ ID NO: 2303899 - RNA, 19 nt, Artificial Sequence
  Description of Artificial Sequence: Synthetic oligonucleotide
  Antisense strand to SEQ ID NO: 2303898
uauguuaccgucuuggagc

SEQ ID NO: 2303900 - RNA, 19 nt, Artificial Sequence
  Description of Artificial Sequence: Synthetic oligonucleotide
  Sense strand starting at position 1173 of SEQ ID NO: 1884943
aucuaucuccagugacuua

SEQ ID NO: 2303901 - RNA, 19 nt, Artificial Sequence
  Description of Artificial Sequence: Synthetic oligonucleotide
  Antisense strand to SEQ ID NO: 2303900
uaagucacuggagauagau

SEQ ID NO: 2303902 - RNA, 19 nt, Artificial Sequence
  Description of Artificial Sequence: Synthetic oligonucleotide
  Sense strand starting at position 1220 of SEQ ID NO: 1884943
ggucaaggauucucugaaa

SEQ ID NO: 2303903 - RNA, 19 nt, Artificial Sequence
  Description of Artificial Sequence: Synthetic oligonucleotide
  Antisense strand to SEQ ID NO: 2303902
uuucagagaauccuugacc

SEQ ID NO: 2303904 - RNA, 19 nt, Artificial Sequence
  Description of Artificial Sequence: Synthetic oligonucleotide
  Sense strand starting at position 1308 of SEQ ID NO: 1884943
ugaauaucuccaugccuag

SEQ ID NO: 2303905 - RNA, 19 nt, Artificial Sequence
  Description of Artificial Sequence: Synthetic oligonucleotide
  Antisense strand to SEQ ID NO: 2303904
cuaggcauggagauauuca

SEQ ID NO: 2303906 - RNA, 19 nt, Artificial Sequence
  Description of Artificial Sequence: Synthetic oligonucleotide
  Sense strand starting at position 1320 of SEQ ID NO: 1884943
ugccuagugccugugcuau

SEQ ID NO: 2303907 - RNA, 19 nt, Artificial Sequence
  Description of Artificial Sequence: Synthetic oligonucleotide
  Antisense strand to SEQ ID NO: 2303906
auagcacaggcacuaggca

SEQ ID NO: 2303908 - RNA, 19 nt, Artificial Sequence
  Description of Artificial Sequence: Synthetic oligonucleotide
  Sense strand starting at position 1335 of SEQ ID NO: 1884943
cuaucagagguuuauacga

SEQ ID NO: 2303909 - RNA, 19 nt, Artificial Sequence
  Description of Artificial Sequence: Synthetic oligonucleotide
  Antisense strand to SEQ ID NO: 2303908
ucguauaaaccucugauag

SEQ ID NO: 2303910 - RNA, 19 nt, Artificial Sequence
  Description of Artificial Sequence: Synthetic oligonucleotide
  Sense strand starting at position 1340 of SEQ ID NO: 1884943
agagguuuauacgauuuag

SEQ ID NO: 2303911 - RNA, 19 nt, Artificial Sequence
  Description of Artificial Sequence: Synthetic oligonucleotide
  Antisense strand to SEQ ID NO: 2303910
cuaaaucguauaaaccucu

SEQ ID NO: 2303912 - RNA, 19 nt, Artificial Sequence
  Description of Artificial Sequence: Synthetic oligonucleotide
  Sense strand starting at position 1398 of SEQ ID NO: 1884943
acaucaguggcuuaauguu

SEQ ID NO: 2303913 - RNA, 19 nt, Artificial Sequence
  Description of Artificial Sequence: Synthetic oligonucleotide
  Antisense strand to SEQ ID NO: 2303912
aacauuaagccacugaugu

SEQ ID NO: 2303914 - RNA, 19 nt, Artificial Sequence
  Description of Artificial Sequence: Synthetic oligonucleotide
  Sense strand starting at position 1426 of SEQ ID NO: 1884943
auuuguuucuugcugacau

SEQ ID NO: 2303915 - RNA, 19 nt, Artificial Sequence
  Description of Artificial Sequence: Synthetic oligonucleotide
  Antisense strand to SEQ ID NO: 2303914
augucagcaagaaacaaau

SEQ ID NO: 2303916 - RNA, 19 nt, Artificial Sequence
  Description of Artificial Sequence: Synthetic oligonucleotide
  Sense strand starting at position 1479 of SEQ ID NO: 1884943
gucucagagcucuaccauc

SEQ ID NO: 2303917 - RNA, 19 nt, Artificial Sequence
  Description of Artificial Sequence: Synthetic oligonucleotide
  Antisense strand to SEQ ID NO: 2303916
gaugguagagcucugagac

SEQ ID NO: 2303918 - RNA, 19 nt, Artificial Sequence
  Description of Artificial Sequence: Synthetic oligonucleotide
  Sense strand starting at position 1600 of SEQ ID NO: 1884943
ugcuuauuucguuagccag

SEQ ID NO: 2303919 - RNA, 19 nt, Artificial Sequence
  Description of Artificial Sequence: Synthetic oligonucleotide
  Antisense strand to SEQ ID NO: 2303918
cuggcuaacgaaauaagca

SEQ ID NO: 2303920 - RNA, 19 nt, Artificial Sequence
  Description of Artificial Sequence: Synthetic oligonucleotide
  Sense strand starting at position 1602 of SEQ ID NO: 1884943
cuuauuucguuagccagaa

SEQ ID NO: 2303921 - RNA, 19 nt, Artificial Sequence
  Description of Artificial Sequence: Synthetic oligonucleotide
  Antisense strand to SEQ ID NO: 2303920
uucuggcuaacgaaauaag

SEQ ID NO: 2303922 - RNA, 19 nt, Artificial Sequence
  Description of Artificial Sequence: Synthetic oligonucleotide
  Sense strand starting at position 1603 of SEQ ID NO: 1884943
uuauuucguuagccagaag

SEQ ID NO: 2303923 - RNA, 19 nt, Artificial Sequence
  Description of Artificial Sequence: Synthetic oligonucleotide
  Antisense strand to SEQ ID NO: 2303922
cuucuggcuaacgaaauaa

SEQ ID NO: 2303924 - RNA, 19 nt, Artificial Sequence
  Description of Artificial Sequence: Synthetic oligonucleotide
  Sense strand starting at position 1831 of SEQ ID NO: 1884943
ggagaaagacugcgaaugu

SEQ ID NO: 2303925 - RNA, 19 nt, Artificial Sequence
  Description of Artificial Sequence: Synthetic oligonucleotide
  Antisense strand to SEQ ID NO: 2303924
acauucgcagucuuucucc

SEQ ID NO: 2303926 - RNA, 19 nt, Artificial Sequence
  Description of Artificial Sequence: Synthetic oligonucleotide
  Sense strand starting at position 1886 of SEQ ID NO: 1884943
cuggcugugggaugaagau

SEQ ID NO: 2303927 - RNA, 19 nt, Artificial Sequence
  Description of Artificial Sequence: Synthetic oligonucleotide
  Antisense strand to SEQ ID NO: 2303926
aucuucaucccacagccag

SEQ ID NO: 2303928 - RNA, 19 nt, Artificial Sequence
  Description of Artificial Sequence: Synthetic oligonucleotide
  Sense strand starting at position 2016 of SEQ ID NO: 1884943
gaaacauugccucauugug

SEQ ID NO: 2303929 - RNA, 19 nt, Artificial Sequence
  Description of Artificial Sequence: Synthetic oligonucleotide
  Antisense strand to SEQ ID NO: 2303928
cacaaugaggcaauguuuc

SEQ ID NO: 2303930 - RNA, 19 nt, Artificial Sequence
  Description of Artificial Sequence: Synthetic oligonucleotide
  Sense strand starting at position 2090 of SEQ ID NO: 1884943
ggauuccagucucuauauu

SEQ ID NO: 2303931 - RNA, 19 nt, Artificial Sequence
  Description of Artificial Sequence: Synthetic oligonucleotide
  Antisense strand to SEQ ID NO: 2303930
aauauagagacuggaaucc

SEQ ID NO: 2303932 - RNA, 19 nt, Artificial Sequence
  Description of Artificial Sequence: Synthetic oligonucleotide
  Sense strand starting at position 2156 of SEQ ID NO: 1884943
uagggugagaauuauuguu

SEQ ID NO: 2303933 - RNA, 19 nt, Artificial Sequence
  Description of Artificial Sequence: Synthetic oligonucleotide
  Antisense strand to SEQ ID NO: 2303932
aacaauaauucucacccua

SEQ ID NO: 2303934 - RNA, 19 nt, Artificial Sequence
  Description of Artificial Sequence: Synthetic oligonucleotide
  Sense strand starting at position 2247 of SEQ ID NO: 1884943
uaauuaguucugggagcug

SEQ ID NO: 2303935 - RNA, 19 nt, Artificial Sequence
  Description of Artificial Sequence: Synthetic oligonucleotide
  Antisense strand to SEQ ID NO: 2303934
cagcucccagaacuaauua

SEQ ID NO: 2303936 - RNA, 19 nt, Artificial Sequence
  Description of Artificial Sequence: Synthetic oligonucleotide
  Sense strand starting at position 2399 of SEQ ID NO: 1884943
gucagcagauucccaaauu

SEQ ID NO: 2303937 - RNA, 19 nt, Artificial Sequence
  Description of Artificial Sequence: Synthetic oligonucleotide
  Antisense strand to SEQ ID NO: 2303936
aauuugggaaucugcugac

SEQ ID NO: 2303938 - RNA, 19 nt, Artificial Sequence
  Description of Artificial Sequence: Synthetic oligonucleotide
  Sense strand starting at position 2619 of SEQ ID NO: 1884943
acacacuaguucuuaaagu

SEQ ID NO: 2303939 - RNA, 19 nt, Artificial Sequence
  Description of Artificial Sequence: Synthetic oligonucleotide
  Antisense strand to SEQ ID NO: 2303938
acuuuaagaacuagugugu

SEQ ID NO: 2303940 - RNA, 19 nt, Artificial Sequence
  Description of Artificial Sequence: Synthetic oligonucleotide
  Sense strand starting at position 2630 of SEQ ID NO: 1884943
cuuaaagugcucuagacuu

SEQ ID NO: 2303941 - RNA, 19 nt, Artificial Sequence
  Description of Artificial Sequence: Synthetic oligonucleotide
  Antisense strand to SEQ ID NO: 2303940
aagucuagagcacuuuaag

SEQ ID NO: 2303942 - RNA, 19 nt, Artificial Sequence
  Description of Artificial Sequence: Synthetic oligonucleotide
  Sense strand starting at position 2875 of SEQ ID NO: 1884943
ucuggaaauuaccuggauu

SEQ ID NO: 2303943 - RNA, 19 nt, Artificial Sequence
  Description of Artificial Sequence: Synthetic oligonucleotide
  Antisense strand to SEQ ID NO: 2303942
aauccagguaauuuccaga

SEQ ID NO: 2303944 - RNA, 19 nt, Artificial Sequence
  Description of Artificial Sequence: Synthetic oligonucleotide
  Sense strand starting at position 2915 of SEQ ID NO: 1884943
ggucaauauuucccugcuu

SEQ ID NO: 2303945 - RNA, 19 nt, Artificial Sequence
  Description of Artificial Sequence: Synthetic oligonucleotide
  Antisense strand to SEQ ID NO: 2303944
aagcagggaaauauugacc

SEQ ID NO: 2303946 - RNA, 19 nt, Artificial Sequence
  Description of Artificial Sequence: Synthetic oligonucleotide
  Sense strand starting at position 3023 of SEQ ID NO: 1884943
uuugaagucuccuugacuu

SEQ ID NO: 2303947 - RNA, 19 nt, Artificial Sequence
  Description of Artificial Sequence: Synthetic oligonucleotide
  Antisense strand to SEQ ID NO: 2303946
aagucaaggagacuucaaa

SEQ ID NO: 2303948 - RNA, 19 nt, Artificial Sequence
  Description of Artificial Sequence: Synthetic oligonucleotide
  Sense strand starting at position 3127 of SEQ ID NO: 1884943
gugauauaacaguguauga

SEQ ID NO: 2303949 - RNA, 19 nt, Artificial Sequence
  Description of Artificial Sequence: Synthetic oligonucleotide
  Antisense strand to SEQ ID NO: 2303948
ucauacacuguuauaucac

SEQ ID NO: 2303950 - RNA, 19 nt, Artificial Sequence
  Description of Artificial Sequence: Synthetic oligonucleotide
  Sense strand starting at position 3177 of SEQ ID NO: 1884943
gggaaugcacucuaucauc

SEQ ID NO: 2303951 - RNA, 19 nt, Artificial Sequence
  Description of Artificial Sequence: Synthetic oligonucleotide
  Antisense strand to SEQ ID NO: 2303950
gaugauagagugcauuccc

SEQ ID NO: 2303952 - RNA, 19 nt, Artificial Sequence
  Description of Artificial Sequence: Synthetic oligonucleotide
  Sense strand starting at position 3260 of SEQ ID NO: 1884943
gugagugaauaaguauaaa

SEQ ID NO: 2303953 - RNA, 19 nt, Artificial Sequence
  Description of Artificial Sequence: Synthetic oligonucleotide
  Antisense strand to SEQ ID NO: 2303952
uuuauacuuauucacucac

SEQ ID NO: 2303954 - RNA, 19 nt, Artificial Sequence
  Description of Artificial Sequence: Synthetic oligonucleotide
  Sense strand starting at position 3334 of SEQ ID NO: 1884943
aauguagaaugcuugggau

SEQ ID NO: 2303955 - RNA, 19 nt, Artificial Sequence
  Description of Artificial Sequence: Synthetic oligonucleotide
  Antisense strand to SEQ ID NO: 2303954
aucccaagcauucuacauu

SEQ ID NO: 2303956 - RNA, 19 nt, Artificial Sequence
  Description of Artificial Sequence: Synthetic oligonucleotide
  Sense strand starting at position 3720 of SEQ ID NO: 1884943
gagacaaagugcuccacaa

SEQ ID NO: 2303957 - RNA, 19 nt, Artificial Sequence
  Description of Artificial Sequence: Synthetic oligonucleotide
  Antisense strand to SEQ ID NO: 2303956
uuguggagcacuuugucuc

SEQ ID NO: 2303958 - RNA, 19 nt, Artificial Sequence
  Description of Artificial Sequence: Synthetic oligonucleotide
  Sense strand starting at position 1993 of SEQ ID NO: 1884944
gggccaacugcucauguga

SEQ ID NO: 2303959 - RNA, 19 nt, Artificial Sequence
  Description of Artificial Sequence: Synthetic oligonucleotide
  Antisense strand to SEQ ID NO: 2303958
ucacaugagcaguuggccc

SEQ ID NO: 2303960 - RNA, 19 nt, Artificial Sequence
  Description of Artificial Sequence: Synthetic oligonucleotide
  Sense strand starting at position 2155 of SEQ ID NO: 1884944
gagugagacucccuccuau

SEQ ID NO: 2303961 - RNA, 19 nt, Artificial Sequence
  Description of Artificial Sequence: Synthetic oligonucleotide
  Antisense strand to SEQ ID NO: 2303960
auaggagggagucucacuc

SEQ ID NO: 2303962 - RNA, 19 nt, Artificial Sequence
  Description of Artificial Sequence: Synthetic oligonucleotide
  Sense strand starting at position 2193 of SEQ ID NO: 1884944
ucaggagaaguccaagcuu

SEQ ID NO: 2303963 - RNA, 19 nt, Artificial Sequence
  Description of Artificial Sequence: Synthetic oligonucleotide
  Antisense strand to SEQ ID NO: 2303962
aagcuuggacuucuccuga

SEQ ID NO: 2303964 - RNA, 19 nt, Artificial Sequence
  Description of Artificial Sequence: Synthetic oligonucleotide
  Sense strand starting at position 2450 of SEQ ID NO: 1884944
aggaacucucuuuggauua

SEQ ID NO: 2303965 - RNA, 19 nt, Artificial Sequence
  Description of Artificial Sequence: Synthetic oligonucleotide
  Antisense strand to SEQ ID NO: 2303964
uaauccaaagagaguuccu

SEQ ID NO: 2303966 - RNA, 19 nt, Artificial Sequence
  Description of Artificial Sequence: Synthetic oligonucleotide
  Sense strand starting at position 2481 of SEQ ID NO: 1884944
ugaugagcaauugguuauu

SEQ ID NO: 2303967 - RNA, 19 nt, Artificial Sequence
  Description of Artificial Sequence: Synthetic oligonucleotide
  Antisense strand to SEQ ID NO: 2303966
aauaaccaauugcucauca

SEQ ID NO: 2303968 - RNA, 19 nt, Artificial Sequence
  Description of Artificial Sequence: Synthetic oligonucleotide
  Sense strand starting at position 2484 of SEQ ID NO: 1884944
ugagcaauugguuauuguu

SEQ ID NO: 2303969 - RNA, 19 nt, Artificial Sequence
  Description of Artificial Sequence: Synthetic oligonucleotide
  Antisense strand to SEQ ID NO: 2303968
aacaauaaccaauugcuca

SEQ ID NO: 2303970 - RNA, 19 nt, Artificial Sequence
  Description of Artificial Sequence: Synthetic oligonucleotide
  Sense strand starting at position 2486 of SEQ ID NO: 1884944
agcaauugguuauuguuaa

SEQ ID NO: 2303971 - RNA, 19 nt, Artificial Sequence
  Description of Artificial Sequence: Synthetic oligonucleotide
  Antisense strand to SEQ ID NO: 2303970
uuaacaauaaccaauugcu

SEQ ID NO: 2303972 - RNA, 19 nt, Artificial Sequence
  Description of Artificial Sequence: Synthetic oligonucleotide
  Sense strand starting at position 2493 of SEQ ID NO: 1884944
gguuauuguuaaguuauag

SEQ ID NO: 2303973 - RNA, 19 nt, Artificial Sequence
  Description of Artificial Sequence: Synthetic oligonucleotide
  Antisense strand to SEQ ID NO: 2303972
cuauaacuuaacaauaacc

SEQ ID NO: 2303974 - RNA, 19 nt, Artificial Sequence
  Description of Artificial Sequence: Synthetic oligonucleotide
  Sense strand starting at position 2502 of SEQ ID NO: 1884944
uaaguuauaggaugugguu

SEQ ID NO: 2303975 - RNA, 19 nt, Artificial Sequence
  Description of Artificial Sequence: Synthetic oligonucleotide
  Antisense strand to SEQ ID NO: 2303974
aaccacauccuauaacuua

SEQ ID NO: 2303976 - RNA, 19 nt, Artificial Sequence
  Description of Artificial Sequence: Synthetic oligonucleotide
  Sense strand starting at position 2504 of SEQ ID NO: 1884944
aguuauaggaugugguuua

SEQ ID NO: 2303977 - RNA, 19 nt, Artificial Sequence
  Description of Artificial Sequence: Synthetic oligonucleotide
  Antisense strand to SEQ ID NO: 2303976
uaaaccacauccuauaacu

SEQ ID NO: 2303978 - RNA, 19 nt, Artificial Sequence
  Description of Artificial Sequence: Synthetic oligonucleotide
  Sense strand starting at position 2700 of SEQ ID NO: 1884944
augaaagcucuuuagguuu

SEQ ID NO: 2303979 - RNA, 19 nt, Artificial Sequence
  Description of Artificial Sequence: Synthetic oligonucleotide
  Antisense strand to SEQ ID NO: 2303978
aaaccuaaagagcuuucau

SEQ ID NO: 2303980 - RNA, 19 nt, Artificial Sequence
  Description of Artificial Sequence: Synthetic oligonucleotide
  Sense strand starting at position 2904 of SEQ ID NO: 1884944
agaaaccaguuuguuaaau

SEQ ID NO: 2303981 - RNA, 19 nt, Artificial Sequence
  Description of Artificial Sequence: Synthetic oligonucleotide
  Antisense strand to SEQ ID NO: 2303980
auuuaacaaacugguuucu

SEQ ID NO: 2303982 - RNA, 19 nt, Artificial Sequence
  Description of Artificial Sequence: Synthetic oligonucleotide
  Sense strand starting at position 2916 of SEQ ID NO: 1884944
guuaaaucacacgaaugua

SEQ ID NO: 2303983 - RNA, 19 nt, Artificial Sequence
  Description of Artificial Sequence: Synthetic oligonucleotide
  Antisense strand to SEQ ID NO: 2303982
uacauucgugugauuuaac

SEQ ID NO: 2303984 - RNA, 19 nt, Artificial Sequence
  Description of Artificial Sequence: Synthetic oligonucleotide
  Sense strand starting at position 2956 of SEQ ID NO: 1884944
guccuuugccaagagaucu

SEQ ID NO: 2303985 - RNA, 19 nt, Artificial Sequence
  Description of Artificial Sequence: Synthetic oligonucleotide
  Antisense strand to SEQ ID NO: 2303984
agaucucuuggcaaaggac

SEQ ID NO: 2303986 - RNA, 19 nt, Artificial Sequence
  Description of Artificial Sequence: Synthetic oligonucleotide
  Sense strand starting at position 2978 of SEQ ID NO: 1884944
agcauaacugcaggcaaau

SEQ ID NO: 2303987 - RNA, 19 nt, Artificial Sequence
  Description of Artificial Sequence: Synthetic oligonucleotide
  Antisense strand to SEQ ID NO: 2303986
auuugccugcaguuaugcu

SEQ ID NO: 2303988 - RNA, 19 nt, Artificial Sequence
  Description of Artificial Sequence: Synthetic oligonucleotide
  Sense strand starting at position 3012 of SEQ ID NO: 1884944
aucguuaaucacugcacaa

SEQ ID NO: 2303989 - RNA, 19 nt, Artificial Sequence
  Description of Artificial Sequence: Synthetic oligonucleotide
  Antisense strand to SEQ ID NO: 2303988
uugugcagugauuaacgau

SEQ ID NO: 2303990 - RNA, 19 nt, Artificial Sequence
  Description of Artificial Sequence: Synthetic oligonucleotide
  Sense strand starting at position 3188 of SEQ ID NO: 1884944
uauaauuggcccugggagu

SEQ ID NO: 2303991 - RNA, 19 nt, Artificial Sequence
  Description of Artificial Sequence: Synthetic oligonucleotide
  Antisense strand to SEQ ID NO: 2303990
acucccagggccaauuaua

SEQ ID NO: 2303992 - RNA, 19 nt, Artificial Sequence
  Description of Artificial Sequence: Synthetic oligonucleotide
  Sense strand starting at position 3222 of SEQ ID NO: 1884944
uuguguuaccuugagaauu

SEQ ID NO: 2303993 - RNA, 19 nt, Artificial Sequence
  Description of Artificial Sequence: Synthetic oligonucleotide
  Antisense strand to SEQ ID NO: 2303992
aauucucaagguaacacaa

SEQ ID NO: 2303994 - RNA, 19 nt, Artificial Sequence
  Description of Artificial Sequence: Synthetic oligonucleotide
  Sense strand starting at position 3266 of SEQ ID NO: 1884944
uaagguuaugguugaugga

SEQ ID NO: 2303995 - RNA, 19 nt, Artificial Sequence
  Description of Artificial Sequence: Synthetic oligonucleotide
  Antisense strand to SEQ ID NO: 2303994
uccaucaaccauaaccuua

SEQ ID NO: 2303996 - RNA, 19 nt, Artificial Sequence
  Description of Artificial Sequence: Synthetic oligonucleotide
  Sense strand starting at position 3314 of SEQ ID NO: 1884944
agaccuucucugggcugaa

SEQ ID NO: 2303997 - RNA, 19 nt, Artificial Sequence
  Description of Artificial Sequence: Synthetic oligonucleotide
  Antisense strand to SEQ ID NO: 2303996
uucagcccagagaaggucu

SEQ ID NO: 2303998 - RNA, 19 nt, Artificial Sequence
  Description of Artificial Sequence: Synthetic oligonucleotide
  Sense strand starting at position 3329 of SEQ ID NO: 1884944
ugaaguugauagcuagguu

SEQ ID NO: 2303999 - RNA, 19 nt, Artificial Sequence
  Description of Artificial Sequence: Synthetic oligonucleotide
  Antisense strand to SEQ ID NO: 2303998
aaccuagcuaucaacuuca

SEQ ID NO: 2304000 - RNA, 19 nt, Artificial Sequence
  Description of Artificial Sequence: Synthetic oligonucleotide
  Sense strand starting at position 3330 of SEQ ID NO: 1884944
gaaguugauagcuagguua

SEQ ID NO: 2304001 - RNA, 19 nt, Artificial Sequence
  Description of Artificial Sequence: Synthetic oligonucleotide
  Antisense strand to SEQ ID NO: 2304000
uaaccuagcuaucaacuuc

SEQ ID NO: 2304002 - RNA, 19 nt, Artificial Sequence
  Description of Artificial Sequence: Synthetic oligonucleotide
  Sense strand starting at position 3332 of SEQ ID NO: 1884944
aguugauagcuagguuaaa

SEQ ID NO: 2304003 - RNA, 19 nt, Artificial Sequence
  Description of Artificial Sequence: Synthetic oligonucleotide
  Antisense strand to SEQ ID NO: 2304002
uuuaaccuagcuaucaacu

SEQ ID NO: 2304004 - RNA, 19 nt, Artificial Sequence
  Description of Artificial Sequence: Synthetic oligonucleotide
  Sense strand starting at position 3352 of SEQ ID NO: 1884944
uaucaaggacuucgguaaa

SEQ ID NO: 2304005 - RNA, 19 nt, Artificial Sequence
  Description of Artificial Sequence: Synthetic oligonucleotide
  Antisense strand to SEQ ID NO: 2304004
uuuaccgaaguccuugaua

SEQ ID NO: 2304006 - RNA, 19 nt, Artificial Sequence
  Description of Artificial Sequence: Synthetic oligonucleotide
  Sense strand starting at position 3355 of SEQ ID NO: 1884944
caaggacuucgguaaaucu

SEQ ID NO: 2304007 - RNA, 19 nt, Artificial Sequence
  Description of Artificial Sequence: Synthetic oligonucleotide
  Antisense strand to SEQ ID NO: 2304006
agauuuaccgaaguccuug

SEQ ID NO: 2304008 - RNA, 19 nt, Artificial Sequence
  Description of Artificial Sequence: Synthetic oligonucleotide
  Sense strand starting at position 3363 of SEQ ID NO: 1884944
ucgguaaaucucuagcaga

SEQ ID NO: 2304009 - RNA, 19 nt, Artificial Sequence
  Description of Artificial Sequence: Synthetic oligonucleotide
  Antisense strand to SEQ ID NO: 2304008
ucugcuagagauuuaccga

SEQ ID NO: 2304010 - RNA, 19 nt, Artificial Sequence
  Description of Artificial Sequence: Synthetic oligonucleotide
  Sense strand starting at position 3444 of SEQ ID NO: 1884944
cugugugcucuaggacaag

SEQ ID NO: 2304011 - RNA, 19 nt, Artificial Sequence
  Description of Artificial Sequence: Synthetic oligonucleotide
  Antisense strand to SEQ ID NO: 2304010
cuuguccuagagcacacag

SEQ ID NO: 2304012 - RNA, 19 nt, Artificial Sequence
  Description of Artificial Sequence: Synthetic oligonucleotide
  Sense strand starting at position 3478 of SEQ ID NO: 1884944
agcugcguccuagaaggau

SEQ ID NO: 2304013 - RNA, 19 nt, Artificial Sequence
  Description of Artificial Sequence: Synthetic oligonucleotide
  Antisense strand to SEQ ID NO: 2304012
auccuucuaggacgcagcu

SEQ ID NO: 2304014 - RNA, 19 nt, Artificial Sequence
  Description of Artificial Sequence: Synthetic oligonucleotide
  Sense strand starting at position 3507 of SEQ ID NO: 1884944
cucccaagacuuuggcaau

SEQ ID NO: 2304015 - RNA, 19 nt, Artificial Sequence
  Description of Artificial Sequence: Synthetic oligonucleotide
  Antisense strand to SEQ ID NO: 2304014
auugccaaagucuugggag

SEQ ID NO: 2304016 - RNA, 19 nt, Artificial Sequence
  Description of Artificial Sequence: Synthetic oligonucleotide
  Sense strand starting at position 3513 of SEQ ID NO: 1884944
agacuuuggcaaugauuag

SEQ ID NO: 2304017 - RNA, 19 nt, Artificial Sequence
  Description of Artificial Sequence: Synthetic oligonucleotide
  Antisense strand to SEQ ID NO: 2304016
cuaaucauugccaaagucu

SEQ ID NO: 2304018 - RNA, 19 nt, Artificial Sequence
  Description of Artificial Sequence: Synthetic oligonucleotide
  Sense strand starting at position 3565 of SEQ ID NO: 1884944
ugugaagagcugugaccuu

SEQ ID NO: 2304019 - RNA, 19 nt, Artificial Sequence
  Description of Artificial Sequence: Synthetic oligonucleotide
  Antisense strand to SEQ ID NO: 2304018
aaggucacagcucuucaca

SEQ ID NO: 2304020 - RNA, 19 nt, Artificial Sequence
  Description of Artificial Sequence: Synthetic oligonucleotide
  Sense strand starting at position 3600 of SEQ ID NO: 1884944
cggugaugaucuuuauacu

SEQ ID NO: 2304021 - RNA, 19 nt, Artificial Sequence
  Description of Artificial Sequence: Synthetic oligonucleotide
  Antisense strand to SEQ ID NO: 2304020
aguauaaagaucaucaccg

SEQ ID NO: 2304022 - RNA, 19 nt, Artificial Sequence
  Description of Artificial Sequence: Synthetic oligonucleotide
  Sense strand starting at position 3601 of SEQ ID NO: 1884944
ggugaugaucuuuauacuc

SEQ ID NO: 2304023 - RNA, 19 nt, Artificial Sequence
  Description of Artificial Sequence: Synthetic oligonucleotide
  Antisense strand to SEQ ID NO: 2304022
gaguauaaagaucaucacc

SEQ ID NO: 2304024 - RNA, 19 nt, Artificial Sequence
  Description of Artificial Sequence: Synthetic oligonucleotide
  Sense strand starting at position 3816 of SEQ ID NO: 1884944
gguuauaaaugaguggaau

SEQ ID NO: 2304025 - RNA, 19 nt, Artificial Sequence
  Description of Artificial Sequence: Synthetic oligonucleotide
  Antisense strand to SEQ ID NO: 2304024
auuccacucauuuauaacc

SEQ ID NO: 2304026 - RNA, 19 nt, Artificial Sequence
  Description of Artificial Sequence: Synthetic oligonucleotide
  Sense strand starting at position 3817 of SEQ ID NO: 1884944
guuauaaaugaguggaaug

SEQ ID NO: 2304027 - RNA, 19 nt, Artificial Sequence
  Description of Artificial Sequence: Synthetic oligonucleotide
  Antisense strand to SEQ ID NO: 2304026
cauuccacucauuuauaac

SEQ ID NO: 2304028 - RNA, 19 nt, Artificial Sequence
  Description of Artificial Sequence: Synthetic oligonucleotide
  Sense strand starting at position 3818 of SEQ ID NO: 1884944
uuauaaaugaguggaaugu

SEQ ID NO: 2304029 - RNA, 19 nt, Artificial Sequence
  Description of Artificial Sequence: Synthetic oligonucleotide
  Antisense strand to SEQ ID NO: 2304028
acauuccacucauuuauaa

SEQ ID NO: 2304030 - RNA, 19 nt, Artificial Sequence
  Description of Artificial Sequence: Synthetic oligonucleotide
  Sense strand starting at position 3822 of SEQ ID NO: 1884944
aaaugaguggaauguguaa

SEQ ID NO: 2304031 - RNA, 19 nt, Artificial Sequence
  Description of Artificial Sequence: Synthetic oligonucleotide
  Antisense strand to SEQ ID NO: 2304030
uuacacauuccacucauuu

SEQ ID NO: 2304032 - RNA, 19 nt, Artificial Sequence
  Description of Artificial Sequence: Synthetic oligonucleotide
  Sense strand starting at position 3847 of SEQ ID NO: 1884944
aagagaucuuuagcgaucu

SEQ ID NO: 2304033 - RNA, 19 nt, Artificial Sequence
  Description of Artificial Sequence: Synthetic oligonucleotide
  Antisense strand to SEQ ID NO: 2304032
agaucgcuaaagaucucuu

SEQ ID NO: 2304034 - RNA, 19 nt, Artificial Sequence
  Description of Artificial Sequence: Synthetic oligonucleotide
  Sense strand starting at position 3869 of SEQ ID NO: 1884944
agagcaauauuagcaguga

SEQ ID NO: 2304035 - RNA, 19 nt, Artificial Sequence
  Description of Artificial Sequence: Synthetic oligonucleotide
  Antisense strand to SEQ ID NO: 2304034
ucacugcuaauauugcucu

SEQ ID NO: 2304036 - RNA, 19 nt, Artificial Sequence
  Description of Artificial Sequence: Synthetic oligonucleotide
  Sense strand starting at position 3873 of SEQ ID NO: 1884944
caauauuagcagugaaaug

SEQ ID NO: 2304037 - RNA, 19 nt, Artificial Sequence
  Description of Artificial Sequence: Synthetic oligonucleotide
  Antisense strand to SEQ ID NO: 2304036
cauuucacugcuaauauug

SEQ ID NO: 2304038 - RNA, 19 nt, Artificial Sequence
  Description of Artificial Sequence: Synthetic oligonucleotide
  Sense strand starting at position 404 of SEQ ID NO: 1884945
gcggaaauaaugugagauu

SEQ ID NO: 2304039 - RNA, 19 nt, Artificial Sequence
  Description of Artificial Sequence: Synthetic oligonucleotide
  Antisense strand to SEQ ID NO: 2304038
aaucucacauuauuuccgc

SEQ ID NO: 2304040 - RNA, 19 nt, Artificial Sequence
  Description of Artificial Sequence: Synthetic oligonucleotide
  Sense strand starting at position 405 of SEQ ID NO: 1884945
cggaaauaaugugagauua

SEQ ID NO: 2304041 - RNA, 19 nt, Artificial Sequence
  Description of Artificial Sequence: Synthetic oligonucleotide
  Antisense strand to SEQ ID NO: 2304040
uaaucucacauuauuuccg

SEQ ID NO: 2304042 - RNA, 19 nt, Artificial Sequence
  Description of Artificial Sequence: Synthetic oligonucleotide
  Sense strand starting at position 407 of SEQ ID NO: 1884945
gaaauaaugugagauuacu

SEQ ID NO: 2304043 - RNA, 19 nt, Artificial Sequence
  Description of Artificial Sequence: Synthetic oligonucleotide
  Antisense strand to SEQ ID NO: 2304042
aguaaucucacauuauuuc

SEQ ID NO: 2304044 - RNA, 19 nt, Artificial Sequence
  Description of Artificial Sequence: Synthetic oligonucleotide
  Sense strand starting at position 449 of SEQ ID NO: 1884945
ucugaaugucacuagagca

SEQ ID NO: 2304045 - RNA, 19 nt, Artificial Sequence
  Description of Artificial Sequence: Synthetic oligonucleotide
  Antisense strand to SEQ ID NO: 2304044
ugcucuagugacauucaga

SEQ ID NO: 2304046 - RNA, 19 nt, Artificial Sequence
  Description of Artificial Sequence: Synthetic oligonucleotide
  Sense strand starting at position 468 of SEQ ID NO: 1884945
aaagcugaagucugagagu

SEQ ID NO: 2304047 - RNA, 19 nt, Artificial Sequence
  Description of Artificial Sequence: Synthetic oligonucleotide
  Antisense strand to SEQ ID NO: 2304046
acucucagacuucagcuuu

SEQ ID NO: 2304048 - RNA, 19 nt, Artificial Sequence
  Description of Artificial Sequence: Synthetic oligonucleotide
  Sense strand starting at position 576 of SEQ ID NO: 1884945
aggcuugaguccuccucaa

SEQ ID NO: 2304049 - RNA, 19 nt, Artificial Sequence
  Description of Artificial Sequence: Synthetic oligonucleotide
  Antisense strand to SEQ ID NO: 2304048
uugaggaggacucaagccu

SEQ ID NO: 2304050 - RNA, 19 nt, Artificial Sequence
  Description of Artificial Sequence: Synthetic oligonucleotide
  Sense strand starting at position 631 of SEQ ID NO: 1884945
guuuccucugccuagagga

SEQ ID NO: 2304051 - RNA, 19 nt, Artificial Sequence
  Description of Artificial Sequence: Synthetic oligonucleotide
  Antisense strand to SEQ ID NO: 2304050
uccucuaggcagaggaaac

SEQ ID NO: 2304052 - RNA, 19 nt, Artificial Sequence
  Description of Artificial Sequence: Synthetic oligonucleotide
  Sense strand starting at position 633 of SEQ ID NO: 1884945
uuccucugccuagaggaaa

SEQ ID NO: 2304053 - RNA, 19 nt, Artificial Sequence
  Description of Artificial Sequence: Synthetic oligonucleotide
  Antisense strand to SEQ ID NO: 2304052
uuuccucuaggcagaggaa

SEQ ID NO: 2304054 - RNA, 19 nt, Artificial Sequence
  Description of Artificial Sequence: Synthetic oligonucleotide
  Sense strand starting at position 853 of SEQ ID NO: 1884945
cccauuuauuguguagugu

SEQ ID NO: 2304055 - RNA, 19 nt, Artificial Sequence
  Description of Artificial Sequence: Synthetic oligonucleotide
  Antisense strand to SEQ ID NO: 2304054
acacuacacaauaaauggg

SEQ ID NO: 2304056 - RNA, 19 nt, Artificial Sequence
  Description of Artificial Sequence: Synthetic oligonucleotide
  Sense strand starting at position 884 of SEQ ID NO: 1884945
ucuagaauguaugcccuau

SEQ ID NO: 2304057 - RNA, 19 nt, Artificial Sequence
  Description of Artificial Sequence: Synthetic oligonucleotide
  Antisense strand to SEQ ID NO: 2304056
auagggcauacauucuaga

SEQ ID NO: 2304058 - RNA, 19 nt, Artificial Sequence
  Description of Artificial Sequence: Synthetic oligonucleotide
  Sense strand starting at position 886 of SEQ ID NO: 1884945
uagaauguaugcccuauga

SEQ ID NO: 2304059 - RNA, 19 nt, Artificial Sequence
  Description of Artificial Sequence: Synthetic oligonucleotide
  Antisense strand to SEQ ID NO: 2304058
ucauagggcauacauucua

SEQ ID NO: 2304060 - RNA, 19 nt, Artificial Sequence
  Description of Artificial Sequence: Synthetic oligonucleotide
  Sense strand starting at position 888 of SEQ ID NO: 1884945
gaauguaugcccuaugagg

SEQ ID NO: 2304061 - RNA, 19 nt, Artificial Sequence
  Description of Artificial Sequence: Synthetic oligonucleotide
  Antisense strand to SEQ ID NO: 2304060
ccucauagggcauacauuc

SEQ ID NO: 2304062 - RNA, 19 nt, Artificial Sequence
  Description of Artificial Sequence: Synthetic oligonucleotide
  Sense strand starting at position 972 of SEQ ID NO: 1884945
cuacgugcucaguaaguau

SEQ ID NO: 2304063 - RNA, 19 nt, Artificial Sequence
  Description of Artificial Sequence: Synthetic oligonucleotide
  Antisense strand to SEQ ID NO: 2304062
auacuuacugagcacguag

SEQ ID NO: 2304064 - RNA, 19 nt, Artificial Sequence
  Description of Artificial Sequence: Synthetic oligonucleotide
  Sense strand starting at position 1331 of SEQ ID NO: 1884945
acauguugacgcuggaaga

SEQ ID NO: 2304065 - RNA, 19 nt, Artificial Sequence
  Description of Artificial Sequence: Synthetic oligonucleotide
  Antisense strand to SEQ ID NO: 2304064
ucuuccagcgucaacaugu

SEQ ID NO: 2304066 - RNA, 19 nt, Artificial Sequence
  Description of Artificial Sequence: Synthetic oligonucleotide
  Sense strand starting at position 1332 of SEQ ID NO: 1884945
cauguugacgcuggaagaa

SEQ ID NO: 2304067 - RNA, 19 nt, Artificial Sequence
  Description of Artificial Sequence: Synthetic oligonucleotide
  Antisense strand to SEQ ID NO: 2304066
uucuuccagcgucaacaug

SEQ ID NO: 2304068 - RNA, 19 nt, Artificial Sequence
  Description of Artificial Sequence: Synthetic oligonucleotide
  Sense strand starting at position 1447 of SEQ ID NO: 1884945
cgaauccaauuccuugauu

SEQ ID NO: 2304069 - RNA, 19 nt, Artificial Sequence
  Description of Artificial Sequence: Synthetic oligonucleotide
  Antisense strand to SEQ ID NO: 2304068
aaucaaggaauuggauucg

SEQ ID NO: 2304070 - RNA, 19 nt, Artificial Sequence
  Description of Artificial Sequence: Synthetic oligonucleotide
  Sense strand starting at position 1496 of SEQ ID NO: 1884945
gcuacuuggagcugugaau

SEQ ID NO: 2304071 - RNA, 19 nt, Artificial Sequence
  Description of Artificial Sequence: Synthetic oligonucleotide
  Antisense strand to SEQ ID NO: 2304070
auucacagcuccaaguagc

SEQ ID NO: 2304072 - RNA, 19 nt, Artificial Sequence
  Description of Artificial Sequence: Synthetic oligonucleotide
  Sense strand starting at position 1574 of SEQ ID NO: 1884945
ggaguaucccagcguccuu

SEQ ID NO: 2304073 - RNA, 19 nt, Artificial Sequence
  Description of Artificial Sequence: Synthetic oligonucleotide
  Antisense strand to SEQ ID NO: 2304072
aaggacgcugggauacucc

SEQ ID NO: 2304074 - RNA, 19 nt, Artificial Sequence
  Description of Artificial Sequence: Synthetic oligonucleotide
  Sense strand starting at position 1636 of SEQ ID NO: 1884945
ugagaauggugaguucaaa

SEQ ID NO: 2304075 - RNA, 19 nt, Artificial Sequence
  Description of Artificial Sequence: Synthetic oligonucleotide
  Antisense strand to SEQ ID NO: 2304074
uuugaacucaccauucuca

SEQ ID NO: 2304076 - RNA, 19 nt, Artificial Sequence
  Description of Artificial Sequence: Synthetic oligonucleotide
  Sense strand starting at position 1762 of SEQ ID NO: 1884945
gcagucucuucuuuggcaa

SEQ ID NO: 2304077 - RNA, 19 nt, Artificial Sequence
  Description of Artificial Sequence: Synthetic oligonucleotide
  Antisense strand to SEQ ID NO: 2304076
uugccaaagaagagacugc

SEQ ID NO: 2304078 - RNA, 19 nt, Artificial Sequence
  Description of Artificial Sequence: Synthetic oligonucleotide
  Sense strand starting at position 1812 of SEQ ID NO: 1884945
gggcccauucucuguagga

SEQ ID NO: 2304079 - RNA, 19 nt, Artificial Sequence
  Description of Artificial Sequence: Synthetic oligonucleotide
  Antisense strand to SEQ ID NO: 2304078
uccuacagagaaugggccc

SEQ ID NO: 2304080 - RNA, 19 nt, Artificial Sequence
  Description of Artificial Sequence: Synthetic oligonucleotide
  Sense strand starting at position 1814 of SEQ ID NO: 1884945
gcccauucucuguaggagu

SEQ ID NO: 2304081 - RNA, 19 nt, Artificial Sequence
  Description of Artificial Sequence: Synthetic oligonucleotide
  Antisense strand to SEQ ID NO: 2304080
acuccuacagagaaugggc

SEQ ID NO: 2304082 - RNA, 19 nt, Artificial Sequence
  Description of Artificial Sequence: Synthetic oligonucleotide
  Sense strand starting at position 1855 of SEQ ID NO: 1884945
ggaguuaacugaugacaga

SEQ ID NO: 2304083 - RNA, 19 nt, Artificial Sequence
  Description of Artificial Sequence: Synthetic oligonucleotide
  Antisense strand to SEQ ID NO: 2304082
ucugucaucaguuaacucc

SEQ ID NO: 2304084 - RNA, 19 nt, Artificial Sequence
  Description of Artificial Sequence: Synthetic oligonucleotide
  Sense strand starting at position 2091 of SEQ ID NO: 1884945
gcugucauccaucagcgaa

SEQ ID NO: 2304085 - RNA, 19 nt, Artificial Sequence
  Description of Artificial Sequence: Synthetic oligonucleotide
  Antisense strand to SEQ ID NO: 2304084
uucgcugauggaugacagc

SEQ ID NO: 2304086 - RNA, 19 nt, Artificial Sequence
  Description of Artificial Sequence: Synthetic oligonucleotide
  Sense strand starting at position 2127 of SEQ ID NO: 1884945
caggcccugugcuugauaa

SEQ ID NO: 2304087 - RNA, 19 nt, Artificial Sequence
  Description of Artificial Sequence: Synthetic oligonucleotide
  Antisense strand to SEQ ID NO: 2304086
uuaucaagcacagggccug

SEQ ID NO: 2304088 - RNA, 19 nt, Artificial Sequence
  Description of Artificial Sequence: Synthetic oligonucleotide
  Sense strand starting at position 2135 of SEQ ID NO: 1884945
gugcuugauaagggaagaa

SEQ ID NO: 2304089 - RNA, 19 nt, Artificial Sequence
  Description of Artificial Sequence: Synthetic oligonucleotide
  Antisense strand to SEQ ID NO: 2304088
uucuucccuuaucaagcac

SEQ ID NO: 2304090 - RNA, 19 nt, Artificial Sequence
  Description of Artificial Sequence: Synthetic oligonucleotide
  Sense strand starting at position 2517 of SEQ ID NO: 1884945
gcauuagaccuggaaggca

SEQ ID NO: 2304091 - RNA, 19 nt, Artificial Sequence
  Description of Artificial Sequence: Synthetic oligonucleotide
  Antisense strand to SEQ ID NO: 2304090
ugccuuccaggucuaaugc

SEQ ID NO: 2304092 - RNA, 19 nt, Artificial Sequence
  Description of Artificial Sequence: Synthetic oligonucleotide
  Sense strand starting at position 2552 of SEQ ID NO: 1884945
cgugccauuccugcuaauu

SEQ ID NO: 2304093 - RNA, 19 nt, Artificial Sequence
  Description of Artificial Sequence: Synthetic oligonucleotide
  Antisense strand to SEQ ID NO: 2304092
aauuagcaggaauggcacg

SEQ ID NO: 2304094 - RNA, 19 nt, Artificial Sequence
  Description of Artificial Sequence: Synthetic oligonucleotide
  Sense strand starting at position 2679 of SEQ ID NO: 1884945
gucccaaugccagauuagu

SEQ ID NO: 2304095 - RNA, 19 nt, Artificial Sequence
  Description of Artificial Sequence: Synthetic oligonucleotide
  Antisense strand to SEQ ID NO: 2304094
acuaaucuggcauugggac

SEQ ID NO: 2304096 - RNA, 19 nt, Artificial Sequence
  Description of Artificial Sequence: Synthetic oligonucleotide
  Sense strand starting at position 2758 of SEQ ID NO: 1884945
gguacucaggccuaaauuc

SEQ ID NO: 2304097 - RNA, 19 nt, Artificial Sequence
  Description of Artificial Sequence: Synthetic oligonucleotide
  Antisense strand to SEQ ID NO: 2304096
gaauuuaggccugaguacc

SEQ ID NO: 2304098 - RNA, 19 nt, Artificial Sequence
  Description of Artificial Sequence: Synthetic oligonucleotide
  Sense strand starting at position 2792 of SEQ ID NO: 1884945
gagcguucggcacuaggua

SEQ ID NO: 2304099 - RNA, 19 nt, Artificial Sequence
  Description of Artificial Sequence: Synthetic oligonucleotide
  Antisense strand to SEQ ID NO: 2304098
uaccuagugccgaacgcuc

SEQ ID NO: 2304100 - RNA, 19 nt, Artificial Sequence
  Description of Artificial Sequence: Synthetic oligonucleotide
  Sense strand starting at position 2888 of SEQ ID NO: 1884945
agaaauuccuaggaggaag

SEQ ID NO: 2304101 - RNA, 19 nt, Artificial Sequence
  Description of Artificial Sequence: Synthetic oligonucleotide
  Antisense strand to SEQ ID NO: 2304100
cuuccuccuaggaauuucu

SEQ ID NO: 2304102 - RNA, 19 nt, Artificial Sequence
  Description of Artificial Sequence: Synthetic oligonucleotide
  Sense strand starting at position 3103 of SEQ ID NO: 1884945
augcguucggcagcucuua

SEQ ID NO: 2304103 - RNA, 19 nt, Artificial Sequence
  Description of Artificial Sequence: Synthetic oligonucleotide
  Antisense strand to SEQ ID NO: 2304102
uaagagcugccgaacgcau

SEQ ID NO: 2304104 - RNA, 19 nt, Artificial Sequence
  Description of Artificial Sequence: Synthetic oligonucleotide
  Sense strand starting at position 3308 of SEQ ID NO: 1884945
aggagauauuccuaaccca

SEQ ID NO: 2304105 - RNA, 19 nt, Artificial Sequence
  Description of Artificial Sequence: Synthetic oligonucleotide
  Antisense strand to SEQ ID NO: 2304104
uggguuaggaauaucuccu

SEQ ID NO: 2304106 - RNA, 19 nt, Artificial Sequence
  Description of Artificial Sequence: Synthetic oligonucleotide
  Sense strand starting at position 3341 of SEQ ID NO: 1884945
cccuccaguaguugggaaa

SEQ ID NO: 2304107 - RNA, 19 nt, Artificial Sequence
  Description of Artificial Sequence: Synthetic oligonucleotide
  Antisense strand to SEQ ID NO: 2304106
uuucccaacuacuggaggg

SEQ ID NO: 2304108 - RNA, 19 nt, Artificial Sequence
  Description of Artificial Sequence: Synthetic oligonucleotide
  Sense strand starting at position 3342 of SEQ ID NO: 1884945
ccuccaguaguugggaaau

SEQ ID NO: 2304109 - RNA, 19 nt, Artificial Sequence
  Description of Artificial Sequence: Synthetic oligonucleotide
  Antisense strand to SEQ ID NO: 2304108
auuucccaacuacuggagg

SEQ ID NO: 2304110 - RNA, 19 nt, Artificial Sequence
  Description of Artificial Sequence: Synthetic oligonucleotide
  Sense strand starting at position 3405 of SEQ ID NO: 1884945
guggguuagugguugcaaa

SEQ ID NO: 2304111 - RNA, 19 nt, Artificial Sequence
  Description of Artificial Sequence: Synthetic oligonucleotide
  Antisense strand to SEQ ID NO: 2304110
uuugcaaccacuaacccac

SEQ ID NO: 2304112 - RNA, 19 nt, Artificial Sequence
  Description of Artificial Sequence: Synthetic oligonucleotide
  Sense strand starting at position 3543 of SEQ ID NO: 1884945
acauuugugcugcgaaauu

SEQ ID NO: 2304113 - RNA, 19 nt, Artificial Sequence
  Description of Artificial Sequence: Synthetic oligonucleotide
  Antisense strand to SEQ ID NO: 2304112
aauuucgcagcacaaaugu

SEQ ID NO: 2304114 - RNA, 19 nt, Artificial Sequence
  Description of Artificial Sequence: Synthetic oligonucleotide
  Sense strand starting at position 3591 of SEQ ID NO: 1884945
cuggguaauggauggcuua

SEQ ID NO: 2304115 - RNA, 19 nt, Artificial Sequence
  Description of Artificial Sequence: Synthetic oligonucleotide
  Antisense strand to SEQ ID NO: 2304114
uaagccauccauuacccag

SEQ ID NO: 2304116 - RNA, 19 nt, Artificial Sequence
  Description of Artificial Sequence: Synthetic oligonucleotide
  Sense strand starting at position 3861 of SEQ ID NO: 1884945
acaguuugguuaucaacau

SEQ ID NO: 2304117 - RNA, 19 nt, Artificial Sequence
  Description of Artificial Sequence: Synthetic oligonucleotide
  Antisense strand to SEQ ID NO: 2304116
auguugauaaccaaacugu

SEQ ID NO: 2304118 - RNA, 19 nt, Artificial Sequence
  Description of Artificial Sequence: Synthetic oligonucleotide
  Sense strand starting at position 42 of SEQ ID NO: 1884946
ggcugugugaucuaaauca

SEQ ID NO: 2304119 - RNA, 19 nt, Artificial Sequence
  Description of Artificial Sequence: Synthetic oligonucleotide
  Antisense strand to SEQ ID NO: 2304118
ugauuuagaucacacagcc

SEQ ID NO: 2304120 - RNA, 19 nt, Artificial Sequence
  Description of Artificial Sequence: Synthetic oligonucleotide
  Sense strand starting at position 132 of SEQ ID NO: 1884946
guuguuugcacacaaagga

SEQ ID NO: 2304121 - RNA, 19 nt, Artificial Sequence
  Description of Artificial Sequence: Synthetic oligonucleotide
  Antisense strand to SEQ ID NO: 2304120
uccuuugugugcaaacaac

SEQ ID NO: 2304122 - RNA, 19 nt, Artificial Sequence
  Description of Artificial Sequence: Synthetic oligonucleotide
  Sense strand starting at position 168 of SEQ ID NO: 1884946
uuuauagacucgccugaga

SEQ ID NO: 2304123 - RNA, 19 nt, Artificial Sequence
  Description of Artificial Sequence: Synthetic oligonucleotide
  Antisense strand to SEQ ID NO: 2304122
ucucaggcgagucuauaaa

SEQ ID NO: 2304124 - RNA, 19 nt, Artificial Sequence
  Description of Artificial Sequence: Synthetic oligonucleotide
  Sense strand starting at position 304 of SEQ ID NO: 1884946
ucucuauauugaguaaggu

SEQ ID NO: 2304125 - RNA, 19 nt, Artificial Sequence
  Description of Artificial Sequence: Synthetic oligonucleotide
  Antisense strand to SEQ ID NO: 2304124
accuuacucaauauagaga

SEQ ID NO: 2304126 - RNA, 19 nt, Artificial Sequence
  Description of Artificial Sequence: Synthetic oligonucleotide
  Sense strand starting at position 305 of SEQ ID NO: 1884946
cucuauauugaguaaggua

SEQ ID NO: 2304127 - RNA, 19 nt, Artificial Sequence
  Description of Artificial Sequence: Synthetic oligonucleotide
  Antisense strand to SEQ ID NO: 2304126
uaccuuacucaauauagag

SEQ ID NO: 2304128 - RNA, 19 nt, Artificial Sequence
  Description of Artificial Sequence: Synthetic oligonucleotide
  Sense strand starting at position 371 of SEQ ID NO: 1884946
uguuauggauuccugaauu

SEQ ID NO: 2304129 - RNA, 19 nt, Artificial Sequence
  Description of Artificial Sequence: Synthetic oligonucleotide
  Antisense strand to SEQ ID NO: 2304128
aauucaggaauccauaaca

SEQ ID NO: 2304130 - RNA, 19 nt, Artificial Sequence
  Description of Artificial Sequence: Synthetic oligonucleotide
  Sense strand starting at position 457 of SEQ ID NO: 1884946
aagccagacguauauauua

SEQ ID NO: 2304131 - RNA, 19 nt, Artificial Sequence
  Description of Artificial Sequence: Synthetic oligonucleotide
  Antisense strand to SEQ ID NO: 2304130
uaauauauacgucuggcuu

SEQ ID NO: 2304132 - RNA, 19 nt, Artificial Sequence
  Description of Artificial Sequence: Synthetic oligonucleotide
  Sense strand starting at position 870 of SEQ ID NO: 1884946
guauauacauuaguaggua

SEQ ID NO: 2304133 - RNA, 19 nt, Artificial Sequence
  Description of Artificial Sequence: Synthetic oligonucleotide
  Antisense strand to SEQ ID NO: 2304132
uaccuacuaauguauauac

SEQ ID NO: 2304134 - RNA, 19 nt, Artificial Sequence
  Description of Artificial Sequence: Synthetic oligonucleotide
  Sense strand starting at position 874 of SEQ ID NO: 1884946
auacauuaguagguaucaa

SEQ ID NO: 2304135 - RNA, 19 nt, Artificial Sequence
  Description of Artificial Sequence: Synthetic oligonucleotide
  Antisense strand to SEQ ID NO: 2304134
uugauaccuacuaauguau

SEQ ID NO: 2304136 - RNA, 19 nt, Artificial Sequence
  Description of Artificial Sequence: Synthetic oligonucleotide
  Sense strand starting at position 893 of SEQ ID NO: 1884946
ucaggaaggucucccucaa

SEQ ID NO: 2304137 - RNA, 19 nt, Artificial Sequence
  Description of Artificial Sequence: Synthetic oligonucleotide
  Antisense strand to SEQ ID NO: 2304136
uugagggagaccuuccuga

SEQ ID NO: 2304138 - RNA, 19 nt, Artificial Sequence
  Description of Artificial Sequence: Synthetic oligonucleotide
  Sense strand starting at position 1061 of SEQ ID NO: 1884946
ccugaaucauuggucacaa

SEQ ID NO: 2304139 - RNA, 19 nt, Artificial Sequence
  Description of Artificial Sequence: Synthetic oligonucleotide
  Antisense strand to SEQ ID NO: 2304138
uugugaccaaugauucagg

SEQ ID NO: 2304140 - RNA, 19 nt, Artificial Sequence
  Description of Artificial Sequence: Synthetic oligonucleotide
  Sense strand starting at position 1062 of SEQ ID NO: 1884946
cugaaucauuggucacaac

SEQ ID NO: 2304141 - RNA, 19 nt, Artificial Sequence
  Description of Artificial Sequence: Synthetic oligonucleotide
  Antisense strand to SEQ ID NO: 2304140
guugugaccaaugauucag

SEQ ID NO: 2304142 - RNA, 19 nt, Artificial Sequence
  Description of Artificial Sequence: Synthetic oligonucleotide
  Sense strand starting at position 1072 of SEQ ID NO: 1884946
ggucacaacugaucucuuu

SEQ ID NO: 2304143 - RNA, 19 nt, Artificial Sequence
  Description of Artificial Sequence: Synthetic oligonucleotide
  Antisense strand to SEQ ID NO: 2304142
aaagagaucaguugugacc

SEQ ID NO: 2304144 - RNA, 19 nt, Artificial Sequence
  Description of Artificial Sequence: Synthetic oligonucleotide
  Sense strand starting at position 1113 of SEQ ID NO: 1884946
ucgaaugucauauagcuag

SEQ ID NO: 2304145 - RNA, 19 nt, Artificial Sequence
  Description of Artificial Sequence: Synthetic oligonucleotide
  Antisense strand to SEQ ID NO: 2304144
cuagcuauaugacauucga

SEQ ID NO: 2304146 - RNA, 19 nt, Artificial Sequence
  Description of Artificial Sequence: Synthetic oligonucleotide
  Sense strand starting at position 1116 of SEQ ID NO: 1884946
aaugucauauagcuaggau

SEQ ID NO: 2304147 - RNA, 19 nt, Artificial Sequence
  Description of Artificial Sequence: Synthetic oligonucleotide
  Antisense strand to SEQ ID NO: 2304146
auccuagcuauaugacauu

SEQ ID NO: 2304148 - RNA, 19 nt, Artificial Sequence
  Description of Artificial Sequence: Synthetic oligonucleotide
  Sense strand starting at position 1119 of SEQ ID NO: 1884946
gucauauagcuaggauaau

SEQ ID NO: 2304149 - RNA, 19 nt, Artificial Sequence
  Description of Artificial Sequence: Synthetic oligonucleotide
  Antisense strand to SEQ ID NO: 2304148
auuauccuagcuauaugac

SEQ ID NO: 2304150 - RNA, 19 nt, Artificial Sequence
  Description of Artificial Sequence: Synthetic oligonucleotide
  Sense strand starting at position 1230 of SEQ ID NO: 1884946
gucgaaugauacuccauug

SEQ ID NO: 2304151 - RNA, 19 nt, Artificial Sequence
  Description of Artificial Sequence: Synthetic oligonucleotide
  Antisense strand to SEQ ID NO: 2304150
caauggaguaucauucgac

SEQ ID NO: 2304152 - RNA, 19 nt, Artificial Sequence
  Description of Artificial Sequence: Synthetic oligonucleotide
  Sense strand starting at position 1235 of SEQ ID NO: 1884946
augauacuccauugcauga

SEQ ID NO: 2304153 - RNA, 19 nt, Artificial Sequence
  Description of Artificial Sequence: Synthetic oligonucleotide
  Antisense strand to SEQ ID NO: 2304152
ucaugcaauggaguaucau

SEQ ID NO: 2304154 - RNA, 19 nt, Artificial Sequence
  Description of Artificial Sequence: Synthetic oligonucleotide
  Sense strand starting at position 1303 of SEQ ID NO: 1884946
acuucuaaugucuggcaau

SEQ ID NO: 2304155 - RNA, 19 nt, Artificial Sequence
  Description of Artificial Sequence: Synthetic oligonucleotide
  Antisense strand to SEQ ID NO: 2304154
auugccagacauuagaagu

SEQ ID NO: 2304156 - RNA, 19 nt, Artificial Sequence
  Description of Artificial Sequence: Synthetic oligonucleotide
  Sense strand starting at position 1897 of SEQ ID NO: 1884946
uuucuaugguuccuagauu

SEQ ID NO: 2304157 - RNA, 19 nt, Artificial Sequence
  Description of Artificial Sequence: Synthetic oligonucleotide
  Antisense strand to SEQ ID NO: 2304156
aaucuaggaaccauagaaa

SEQ ID NO: 2304158 - RNA, 19 nt, Artificial Sequence
  Description of Artificial Sequence: Synthetic oligonucleotide
  Sense strand starting at position 1906 of SEQ ID NO: 1884946
uuccuagauugucuguuaa

SEQ ID NO: 2304159 - RNA, 19 nt, Artificial Sequence
  Description of Artificial Sequence: Synthetic oligonucleotide
  Antisense strand to SEQ ID NO: 2304158
uuaacagacaaucuaggaa

SEQ ID NO: 2304160 - RNA, 19 nt, Artificial Sequence
  Description of Artificial Sequence: Synthetic oligonucleotide
  Sense strand starting at position 1908 of SEQ ID NO: 1884946
ccuagauugucuguuaaua

SEQ ID NO: 2304161 - RNA, 19 nt, Artificial Sequence
  Description of Artificial Sequence: Synthetic oligonucleotide
  Antisense strand to SEQ ID NO: 2304160
uauuaacagacaaucuagg

SEQ ID NO: 2304162 - RNA, 19 nt, Artificial Sequence
  Description of Artificial Sequence: Synthetic oligonucleotide
  Sense strand starting at position 2061 of SEQ ID NO: 1884946
gcgggacuuccguuuguac

SEQ ID NO: 2304163 - RNA, 19 nt, Artificial Sequence
  Description of Artificial Sequence: Synthetic oligonucleotide
  Antisense strand to SEQ ID NO: 2304162
guacaaacggaagucccgc

SEQ ID NO: 2304164 - RNA, 19 nt, Artificial Sequence
  Description of Artificial Sequence: Synthetic oligonucleotide
  Sense strand starting at position 2387 of SEQ ID NO: 1884946
gguggaagguaugucauua

SEQ ID NO: 2304165 - RNA, 19 nt, Artificial Sequence
  Description of Artificial Sequence: Synthetic oligonucleotide
  Antisense strand to SEQ ID NO: 2304164
uaaugacauaccuuccacc

SEQ ID NO: 2304166 - RNA, 19 nt, Artificial Sequence
  Description of Artificial Sequence: Synthetic oligonucleotide
  Sense strand starting at position 2391 of SEQ ID NO: 1884946
gaagguaugucauuacaga

SEQ ID NO: 2304167 - RNA, 19 nt, Artificial Sequence
  Description of Artificial Sequence: Synthetic oligonucleotide
  Antisense strand to SEQ ID NO: 2304166
ucuguaaugacauaccuuc

SEQ ID NO: 2304168 - RNA, 19 nt, Artificial Sequence
  Description of Artificial Sequence: Synthetic oligonucleotide
  Sense strand starting at position 2478 of SEQ ID NO: 1884946
agggcauucuagguuagga

SEQ ID NO: 2304169 - RNA, 19 nt, Artificial Sequence
  Description of Artificial Sequence: Synthetic oligonucleotide
  Antisense strand to SEQ ID NO: 2304168
uccuaaccuagaaugcccu

SEQ ID NO: 2304170 - RNA, 19 nt, Artificial Sequence
  Description of Artificial Sequence: Synthetic oligonucleotide
  Sense strand starting at position 2525 of SEQ ID NO: 1884946
gaaggugugagcugauaua

SEQ ID NO: 2304171 - RNA, 19 nt, Artificial Sequence
  Description of Artificial Sequence: Synthetic oligonucleotide
  Antisense strand to SEQ ID NO: 2304170
uauaucagcucacaccuuc

SEQ ID NO: 2304172 - RNA, 19 nt, Artificial Sequence
  Description of Artificial Sequence: Synthetic oligonucleotide
  Sense strand starting at position 2555 of SEQ ID NO: 1884946
augaaugauaugugggagu

SEQ ID NO: 2304173 - RNA, 19 nt, Artificial Sequence
  Description of Artificial Sequence: Synthetic oligonucleotide
  Antisense strand to SEQ ID NO: 2304172
acucccacauaucauucau

SEQ ID NO: 2304174 - RNA, 19 nt, Artificial Sequence
  Description of Artificial Sequence: Synthetic oligonucleotide
  Sense strand starting at position 2557 of SEQ ID NO: 1884946
gaaugauaugugggaguau

SEQ ID NO: 2304175 - RNA, 19 nt, Artificial Sequence
  Description of Artificial Sequence: Synthetic oligonucleotide
  Antisense strand to SEQ ID NO: 2304174
auacucccacauaucauuc

SEQ ID NO: 2304176 - RNA, 19 nt, Artificial Sequence
  Description of Artificial Sequence: Synthetic oligonucleotide
  Sense strand starting at position 2573 of SEQ ID NO: 1884946
uauguaucaucugcagaga

SEQ ID NO: 2304177 - RNA, 19 nt, Artificial Sequence
  Description of Artificial Sequence: Synthetic oligonucleotide
  Antisense strand to SEQ ID NO: 2304176
ucucugcagaugauacaua

SEQ ID NO: 2304178 - RNA, 19 nt, Artificial Sequence
  Description of Artificial Sequence: Synthetic oligonucleotide
  Sense strand starting at position 2574 of SEQ ID NO: 1884946
auguaucaucugcagagau

SEQ ID NO: 2304179 - RNA, 19 nt, Artificial Sequence
  Description of Artificial Sequence: Synthetic oligonucleotide
  Antisense strand to SEQ ID NO: 2304178
aucucugcagaugauacau

SEQ ID NO: 2304180 - RNA, 19 nt, Artificial Sequence
  Description of Artificial Sequence: Synthetic oligonucleotide
  Sense strand starting at position 2636 of SEQ ID NO: 1884946
guggaaagacguuaagugu

SEQ ID NO: 2304181 - RNA, 19 nt, Artificial Sequence
  Description of Artificial Sequence: Synthetic oligonucleotide
  Antisense strand to SEQ ID NO: 2304180
acacuuaacgucuuuccac

SEQ ID NO: 2304182 - RNA, 19 nt, Artificial Sequence
  Description of Artificial Sequence: Synthetic oligonucleotide
  Sense strand starting at position 2639 of SEQ ID NO: 1884946
gaaagacguuaaguguauu

SEQ ID NO: 2304183 - RNA, 19 nt, Artificial Sequence
  Description of Artificial Sequence: Synthetic oligonucleotide
  Antisense strand to SEQ ID NO: 2304182
aauacacuuaacgucuuuc

SEQ ID NO: 2304184 - RNA, 19 nt, Artificial Sequence
  Description of Artificial Sequence: Synthetic oligonucleotide
  Sense strand starting at position 2753 of SEQ ID NO: 1884946
ugcacuuucucuuuagaga

SEQ ID NO: 2304185 - RNA, 19 nt, Artificial Sequence
  Description of Artificial Sequence: Synthetic oligonucleotide
  Antisense strand to SEQ ID NO: 2304184
ucucuaaagagaaagugca

SEQ ID NO: 2304186 - RNA, 19 nt, Artificial Sequence
  Description of Artificial Sequence: Synthetic oligonucleotide
  Sense strand starting at position 2754 of SEQ ID NO: 1884946
gcacuuucucuuuagagau

SEQ ID NO: 2304187 - RNA, 19 nt, Artificial Sequence
  Description of Artificial Sequence: Synthetic oligonucleotide
  Antisense strand to SEQ ID NO: 2304186
aucucuaaagagaaagugc

SEQ ID NO: 2304188 - RNA, 19 nt, Artificial Sequence
  Description of Artificial Sequence: Synthetic oligonucleotide
  Sense strand starting at position 2807 of SEQ ID NO: 1884946
ggaggccaucccugguuau

SEQ ID NO: 2304189 - RNA, 19 nt, Artificial Sequence
  Description of Artificial Sequence: Synthetic oligonucleotide
  Antisense strand to SEQ ID NO: 2304188
auaaccagggauggccucc

SEQ ID NO: 2304190 - RNA, 19 nt, Artificial Sequence
  Description of Artificial Sequence: Synthetic oligonucleotide
  Sense strand starting at position 2972 of SEQ ID NO: 1884946
ugggaagaaauuggcuuua

SEQ ID NO: 2304191 - RNA, 19 nt, Artificial Sequence
  Description of Artificial Sequence: Synthetic oligonucleotide
  Antisense strand to SEQ ID NO: 2304190
uaaagccaauuucuuccca

SEQ ID NO: 2304192 - RNA, 19 nt, Artificial Sequence
  Description of Artificial Sequence: Synthetic oligonucleotide
  Sense strand starting at position 3130 of SEQ ID NO: 1884946
caaccaaugucgguagaag

SEQ ID NO: 2304193 - RNA, 19 nt, Artificial Sequence
  Description of Artificial Sequence: Synthetic oligonucleotide
  Antisense strand to SEQ ID NO: 2304192
cuucuaccgacauugguug

SEQ ID NO: 2304194 - RNA, 19 nt, Artificial Sequence
  Description of Artificial Sequence: Synthetic oligonucleotide
  Sense strand starting at position 3242 of SEQ ID NO: 1884946
cagugaaggcucugaggau

SEQ ID NO: 2304195 - RNA, 19 nt, Artificial Sequence
  Description of Artificial Sequence: Synthetic oligonucleotide
  Antisense strand to SEQ ID NO: 2304194
auccucagagccuucacug

SEQ ID NO: 2304196 - RNA, 19 nt, Artificial Sequence
  Description of Artificial Sequence: Synthetic oligonucleotide
  Sense strand starting at position 3265 of SEQ ID NO: 1884946
aaggauuggcaggguuaca

SEQ ID NO: 2304197 - RNA, 19 nt, Artificial Sequence
  Description of Artificial Sequence: Synthetic oligonucleotide
  Antisense strand to SEQ ID NO: 2304196
uguaacccugccaauccuu

SEQ ID NO: 2304198 - RNA, 19 nt, Artificial Sequence
  Description of Artificial Sequence: Synthetic oligonucleotide
  Sense strand starting at position 114 of SEQ ID NO: 1884947
ucuacagauccuggacauu

SEQ ID NO: 2304199 - RNA, 19 nt, Artificial Sequence
  Description of Artificial Sequence: Synthetic oligonucleotide
  Antisense strand to SEQ ID NO: 2304198
aauguccaggaucuguaga

SEQ ID NO: 2304200 - RNA, 19 nt, Artificial Sequence
  Description of Artificial Sequence: Synthetic oligonucleotide
  Sense strand starting at position 162 of SEQ ID NO: 1884947
ccaggauugccgaguugug

SEQ ID NO: 2304201 - RNA, 19 nt, Artificial Sequence
  Description of Artificial Sequence: Synthetic oligonucleotide
  Antisense strand to SEQ ID NO: 2304200
cacaacucggcaauccugg

SEQ ID NO: 2304202 - RNA, 19 nt, Artificial Sequence
  Description of Artificial Sequence: Synthetic oligonucleotide
  Sense strand starting at position 169 of SEQ ID NO: 1884947
ugccgaguuguggaaauac

SEQ ID NO: 2304203 - RNA, 19 nt, Artificial Sequence
  Description of Artificial Sequence: Synthetic oligonucleotide
  Antisense strand to SEQ ID NO: 2304202
guauuuccacaacucggca

SEQ ID NO: 2304204 - RNA, 19 nt, Artificial Sequence
  Description of Artificial Sequence: Synthetic oligonucleotide
  Sense strand starting at position 376 of SEQ ID NO: 1884947
ggacuuauggcaugaggga

SEQ ID NO: 2304205 - RNA, 19 nt, Artificial Sequence
  Description of Artificial Sequence: Synthetic oligonucleotide
  Antisense strand to SEQ ID NO: 2304204
ucccucaugccauaagucc

SEQ ID NO: 2304206 - RNA, 19 nt, Artificial Sequence
  Description of Artificial Sequence: Synthetic oligonucleotide
  Sense strand starting at position 734 of SEQ ID NO: 1884947
agaggauaccuuugggagu

SEQ ID NO: 2304207 - RNA, 19 nt, Artificial Sequence
  Description of Artificial Sequence: Synthetic oligonucleotide
  Antisense strand to SEQ ID NO: 2304206
acucccaaagguauccucu

SEQ ID NO: 2304208 - RNA, 19 nt, Artificial Sequence
  Description of Artificial Sequence: Synthetic oligonucleotide
  Sense strand starting at position 791 of SEQ ID NO: 1884947
cugaaugagucccugcuuu

SEQ ID NO: 2304209 - RNA, 19 nt, Artificial Sequence
  Description of Artificial Sequence: Synthetic oligonucleotide
  Antisense strand to SEQ ID NO: 2304208
aaagcagggacucauucag

SEQ ID NO: 2304210 - RNA, 19 nt, Artificial Sequence
  Description of Artificial Sequence: Synthetic oligonucleotide
  Sense strand starting at position 811 of SEQ ID NO: 1884947
gugggaggucugggaauca

SEQ ID NO: 2304211 - RNA, 19 nt, Artificial Sequence
  Description of Artificial Sequence: Synthetic oligonucleotide
  Antisense strand to SEQ ID NO: 2304210
ugauucccagaccucccac

SEQ ID NO: 2304212 - RNA, 19 nt, Artificial Sequence
  Description of Artificial Sequence: Synthetic oligonucleotide
  Sense strand starting at position 822 of SEQ ID NO: 1884947
gggaaucauacuggguuau

SEQ ID NO: 2304213 - RNA, 19 nt, Artificial Sequence
  Description of Artificial Sequence: Synthetic oligonucleotide
  Antisense strand to SEQ ID NO: 2304212
auaacccaguaugauuccc

SEQ ID NO: 2304214 - RNA, 19 nt, Artificial Sequence
  Description of Artificial Sequence: Synthetic oligonucleotide
  Sense strand starting at position 823 of SEQ ID NO: 1884947
ggaaucauacuggguuaug

SEQ ID NO: 2304215 - RNA, 19 nt, Artificial Sequence
  Description of Artificial Sequence: Synthetic oligonucleotide
  Antisense strand to SEQ ID NO: 2304214
cauaacccaguaugauucc

SEQ ID NO: 2304216 - RNA, 19 nt, Artificial Sequence
  Description of Artificial Sequence: Synthetic oligonucleotide
  Sense strand starting at position 824 of SEQ ID NO: 1884947
gaaucauacuggguuauga

SEQ ID NO: 2304217 - RNA, 19 nt, Artificial Sequence
  Description of Artificial Sequence: Synthetic oligonucleotide
  Antisense strand to SEQ ID NO: 2304216
ucauaacccaguaugauuc

SEQ ID NO: 2304218 - RNA, 19 nt, Artificial Sequence
  Description of Artificial Sequence: Synthetic oligonucleotide
  Sense strand starting at position 1684 of SEQ ID NO: 1884947
ggcaucucuuaagucauau

SEQ ID NO: 2304219 - RNA, 19 nt, Artificial Sequence
  Description of Artificial Sequence: Synthetic oligonucleotide
  Antisense strand to SEQ ID NO: 2304218
auaugacuuaagagaugcc

SEQ ID NO: 2304220 - RNA, 19 nt, Artificial Sequence
  Description of Artificial Sequence: Synthetic oligonucleotide
  Sense strand starting at position 1694 of SEQ ID NO: 1884947
aagucauauugagauacag

SEQ ID NO: 2304221 - RNA, 19 nt, Artificial Sequence
  Description of Artificial Sequence: Synthetic oligonucleotide
  Antisense strand to SEQ ID NO: 2304220
cuguaucucaauaugacuu

SEQ ID NO: 2304222 - RNA, 19 nt, Artificial Sequence
  Description of Artificial Sequence: Synthetic oligonucleotide
  Sense strand starting at position 1739 of SEQ ID NO: 1884947
gccagaaagaugugauguc

SEQ ID NO: 2304223 - RNA, 19 nt, Artificial Sequence
  Description of Artificial Sequence: Synthetic oligonucleotide
  Antisense strand to SEQ ID NO: 2304222
gacaucacaucuuucuggc

SEQ ID NO: 2304224 - RNA, 19 nt, Artificial Sequence
  Description of Artificial Sequence: Synthetic oligonucleotide
  Sense strand starting at position 1749 of SEQ ID NO: 1884947
ugugauguccaccaggcau

SEQ ID NO: 2304225 - RNA, 19 nt, Artificial Sequence
  Description of Artificial Sequence: Synthetic oligonucleotide
  Antisense strand to SEQ ID NO: 2304224
augccugguggacaucaca

SEQ ID NO: 2304226 - RNA, 19 nt, Artificial Sequence
  Description of Artificial Sequence: Synthetic oligonucleotide
  Sense strand starting at position 2022 of SEQ ID NO: 1884947
gaguuuacauagccuagca

SEQ ID NO: 2304227 - RNA, 19 nt, Artificial Sequence
  Description of Artificial Sequence: Synthetic oligonucleotide
  Antisense strand to SEQ ID NO: 2304226
ugcuaggcuauguaaacuc

SEQ ID NO: 2304228 - RNA, 19 nt, Artificial Sequence
  Description of Artificial Sequence: Synthetic oligonucleotide
  Sense strand starting at position 2032 of SEQ ID NO: 1884947
agccuagcacucuggagua

SEQ ID NO: 2304229 - RNA, 19 nt, Artificial Sequence
  Description of Artificial Sequence: Synthetic oligonucleotide
  Antisense strand to SEQ ID NO: 2304228
uacuccagagugcuaggcu

SEQ ID NO: 2304230 - RNA, 19 nt, Artificial Sequence
  Description of Artificial Sequence: Synthetic oligonucleotide
  Sense strand starting at position 2075 of SEQ ID NO: 1884947
aagguagcugcagaacauu

SEQ ID NO: 2304231 - RNA, 19 nt, Artificial Sequence
  Description of Artificial Sequence: Synthetic oligonucleotide
  Antisense strand to SEQ ID NO: 2304230
aauguucugcagcuaccuu

SEQ ID NO: 2304232 - RNA, 19 nt, Artificial Sequence
  Description of Artificial Sequence: Synthetic oligonucleotide
  Sense strand starting at position 2363 of SEQ ID NO: 1884947
ccagcauucccugggaaag

SEQ ID NO: 2304233 - RNA, 19 nt, Artificial Sequence
  Description of Artificial Sequence: Synthetic oligonucleotide
  Antisense strand to SEQ ID NO: 2304232
cuuucccagggaaugcugg

SEQ ID NO: 2304234 - RNA, 19 nt, Artificial Sequence
  Description of Artificial Sequence: Synthetic oligonucleotide
  Sense strand starting at position 2364 of SEQ ID NO: 1884947
cagcauucccugggaaaga

SEQ ID NO: 2304235 - RNA, 19 nt, Artificial Sequence
  Description of Artificial Sequence: Synthetic oligonucleotide
  Antisense strand to SEQ ID NO: 2304234
ucuuucccagggaaugcug

SEQ ID NO: 2304236 - RNA, 19 nt, Artificial Sequence
  Description of Artificial Sequence: Synthetic oligonucleotide
  Sense strand starting at position 2488 of SEQ ID NO: 1884947
ggauguguuuacucauagc

SEQ ID NO: 2304237 - RNA, 19 nt, Artificial Sequence
  Description of Artificial Sequence: Synthetic oligonucleotide
  Antisense strand to SEQ ID NO: 2304236
gcuaugaguaaacacaucc

SEQ ID NO: 2304238 - RNA, 19 nt, Artificial Sequence
  Description of Artificial Sequence: Synthetic oligonucleotide
  Sense strand starting at position 2720 of SEQ ID NO: 1884947
gcuguguggugaguaggaa

SEQ ID NO: 2304239 - RNA, 19 nt, Artificial Sequence
  Description of Artificial Sequence: Synthetic oligonucleotide
  Antisense strand to SEQ ID NO: 2304238
uuccuacucaccacacagc

SEQ ID NO: 2304240 - RNA, 19 nt, Artificial Sequence
  Description of Artificial Sequence: Synthetic oligonucleotide
  Sense strand starting at position 2733 of SEQ ID NO: 1884947
uaggaagauuaggauguua

SEQ ID NO: 2304241 - RNA, 19 nt, Artificial Sequence
  Description of Artificial Sequence: Synthetic oligonucleotide
  Antisense strand to SEQ ID NO: 2304240
uaacauccuaaucuuccua

SEQ ID NO: 2304242 - RNA, 19 nt, Artificial Sequence
  Description of Artificial Sequence: Synthetic oligonucleotide
  Sense strand starting at position 2744 of SEQ ID NO: 1884947
ggauguuaaggcugaguau

SEQ ID NO: 2304243 - RNA, 19 nt, Artificial Sequence
  Description of Artificial Sequence: Synthetic oligonucleotide
  Antisense strand to SEQ ID NO: 2304242
auacucagccuuaacaucc

SEQ ID NO: 2304244 - RNA, 19 nt, Artificial Sequence
  Description of Artificial Sequence: Synthetic oligonucleotide
  Sense strand starting at position 2745 of SEQ ID NO: 1884947
gauguuaaggcugaguauu

SEQ ID NO: 2304245 - RNA, 19 nt, Artificial Sequence
  Description of Artificial Sequence: Synthetic oligonucleotide
  Antisense strand to SEQ ID NO: 2304244
aauacucagccuuaacauc

SEQ ID NO: 2304246 - RNA, 19 nt, Artificial Sequence
  Description of Artificial Sequence: Synthetic oligonucleotide
  Sense strand starting at position 2796 of SEQ ID NO: 1884947
agaaguaccuagucuuuau

SEQ ID NO: 2304247 - RNA, 19 nt, Artificial Sequence
  Description of Artificial Sequence: Synthetic oligonucleotide
  Antisense strand to SEQ ID NO: 2304246
auaaagacuagguacuucu

SEQ ID NO: 2304248 - RNA, 19 nt, Artificial Sequence
  Description of Artificial Sequence: Synthetic oligonucleotide
  Sense strand starting at position 2800 of SEQ ID NO: 1884947
guaccuagucuuuauccaa

SEQ ID NO: 2304249 - RNA, 19 nt, Artificial Sequence
  Description of Artificial Sequence: Synthetic oligonucleotide
  Antisense strand to SEQ ID NO: 2304248
uuggauaaagacuagguac

SEQ ID NO: 2304250 - RNA, 19 nt, Artificial Sequence
  Description of Artificial Sequence: Synthetic oligonucleotide
  Sense strand starting at position 2860 of SEQ ID NO: 1884947
gugguacacccagguauuu

SEQ ID NO: 2304251 - RNA, 19 nt, Artificial Sequence
  Description of Artificial Sequence: Synthetic oligonucleotide
  Antisense strand to SEQ ID NO: 2304250
aaauaccuggguguaccac

SEQ ID NO: 2304252 - RNA, 19 nt, Artificial Sequence
  Description of Artificial Sequence: Synthetic oligonucleotide
  Sense strand starting at position 2896 of SEQ ID NO: 1884947
aggaguaucccaugcacag

SEQ ID NO: 2304253 - RNA, 19 nt, Artificial Sequence
  Description of Artificial Sequence: Synthetic oligonucleotide
  Antisense strand to SEQ ID NO: 2304252
cugugcaugggauacuccu

SEQ ID NO: 2304254 - RNA, 19 nt, Artificial Sequence
  Description of Artificial Sequence: Synthetic oligonucleotide
  Sense strand starting at position 2919 of SEQ ID NO: 1884947
cccauaguuguugagcuua

SEQ ID NO: 2304255 - RNA, 19 nt, Artificial Sequence
  Description of Artificial Sequence: Synthetic oligonucleotide
  Antisense strand to SEQ ID NO: 2304254
uaagcucaacaacuauggg

SEQ ID NO: 2304256 - RNA, 19 nt, Artificial Sequence
  Description of Artificial Sequence: Synthetic oligonucleotide
  Sense strand starting at position 2921 of SEQ ID NO: 1884947
cauaguuguugagcuuaau

SEQ ID NO: 2304257 - RNA, 19 nt, Artificial Sequence
  Description of Artificial Sequence: Synthetic oligonucleotide
  Antisense strand to SEQ ID NO: 2304256
auuaagcucaacaacuaug

SEQ ID NO: 2304258 - RNA, 19 nt, Artificial Sequence
  Description of Artificial Sequence: Synthetic oligonucleotide
  Sense strand starting at position 2924 of SEQ ID NO: 1884947
aguuguugagcuuaauugu

SEQ ID NO: 2304259 - RNA, 19 nt, Artificial Sequence
  Description of Artificial Sequence: Synthetic oligonucleotide
  Antisense strand to SEQ ID NO: 2304258
acaauuaagcucaacaacu

SEQ ID NO: 2304260 - RNA, 19 nt, Artificial Sequence
  Description of Artificial Sequence: Synthetic oligonucleotide
  Sense strand starting at position 2930 of SEQ ID NO: 1884947
ugagcuuaauugucagguu

SEQ ID NO: 2304261 - RNA, 19 nt, Artificial Sequence
  Description of Artificial Sequence: Synthetic oligonucleotide
  Antisense strand to SEQ ID NO: 2304260
aaccugacaauuaagcuca

SEQ ID NO: 2304262 - RNA, 19 nt, Artificial Sequence
  Description of Artificial Sequence: Synthetic oligonucleotide
  Sense strand starting at position 2981 of SEQ ID NO: 1884947
uggguuucauguucugaug

SEQ ID NO: 2304263 - RNA, 19 nt, Artificial Sequence
  Description of Artificial Sequence: Synthetic oligonucleotide
  Antisense strand to SEQ ID NO: 2304262
caucagaacaugaaaccca

SEQ ID NO: 2304264 - RNA, 19 nt, Artificial Sequence
  Description of Artificial Sequence: Synthetic oligonucleotide
  Sense strand starting at position 2990 of SEQ ID NO: 1884947
uguucugaugcuggagaga

SEQ ID NO: 2304265 - RNA, 19 nt, Artificial Sequence
  Description of Artificial Sequence: Synthetic oligonucleotide
  Antisense strand to SEQ ID NO: 2304264
ucucuccagcaucagaaca

SEQ ID NO: 2304266 - RNA, 19 nt, Artificial Sequence
  Description of Artificial Sequence: Synthetic oligonucleotide
  Sense strand starting at position 3075 of SEQ ID NO: 1884947
uugcuuaauccuggaauug

SEQ ID NO: 2304267 - RNA, 19 nt, Artificial Sequence
  Description of Artificial Sequence: Synthetic oligonucleotide
  Antisense strand to SEQ ID NO: 2304266
caauuccaggauuaagcaa

SEQ ID NO: 2304268 - RNA, 19 nt, Artificial Sequence
  Description of Artificial Sequence: Synthetic oligonucleotide
  Sense strand starting at position 3084 of SEQ ID NO: 1884947
ccuggaauugcagguccau

SEQ ID NO: 2304269 - RNA, 19 nt, Artificial Sequence
  Description of Artificial Sequence: Synthetic oligonucleotide
  Antisense strand to SEQ ID NO: 2304268
auggaccugcaauuccagg

SEQ ID NO: 2304270 - RNA, 19 nt, Artificial Sequence
  Description of Artificial Sequence: Synthetic oligonucleotide
  Sense strand starting at position 3458 of SEQ ID NO: 1884947
gccguuucagagcaggagu

SEQ ID NO: 2304271 - RNA, 19 nt, Artificial Sequence
  Description of Artificial Sequence: Synthetic oligonucleotide
  Antisense strand to SEQ ID NO: 2304270
acuccugcucugaaacggc

SEQ ID NO: 2304272 - RNA, 19 nt, Artificial Sequence
  Description of Artificial Sequence: Synthetic oligonucleotide
  Sense strand starting at position 3527 of SEQ ID NO: 1884947
cgcgucucuggguuacuaa

SEQ ID NO: 2304273 - RNA, 19 nt, Artificial Sequence
  Description of Artificial Sequence: Synthetic oligonucleotide
  Antisense strand to SEQ ID NO: 2304272
uuaguaacccagagacgcg

SEQ ID NO: 2304274 - RNA, 19 nt, Artificial Sequence
  Description of Artificial Sequence: Synthetic oligonucleotide
  Sense strand starting at position 3528 of SEQ ID NO: 1884947
gcgucucuggguuacuaau

SEQ ID NO: 2304275 - RNA, 19 nt, Artificial Sequence
  Description of Artificial Sequence: Synthetic oligonucleotide
  Antisense strand to SEQ ID NO: 2304274
auuaguaacccagagacgc

SEQ ID NO: 2304276 - RNA, 19 nt, Artificial Sequence
  Description of Artificial Sequence: Synthetic oligonucleotide
  Sense strand starting at position 3593 of SEQ ID NO: 1884947
aacucaguucccugggacu

SEQ ID NO: 2304277 - RNA, 19 nt, Artificial Sequence
  Description of Artificial Sequence: Synthetic oligonucleotide
  Antisense strand to SEQ ID NO: 2304276
agucccagggaacugaguu

SEQ ID NO: 2304278 - RNA, 19 nt, Artificial Sequence
  Description of Artificial Sequence: Synthetic oligonucleotide
  Sense strand starting at position 40 of SEQ ID NO: 1884948
gccauaugacccuggacaa

SEQ ID NO: 2304279 - RNA, 19 nt, Artificial Sequence
  Description of Artificial Sequence: Synthetic oligonucleotide
  Antisense strand to SEQ ID NO: 2304278
uuguccagggucauauggc

SEQ ID NO: 2304280 - RNA, 19 nt, Artificial Sequence
  Description of Artificial Sequence: Synthetic oligonucleotide
  Sense strand starting at position 95 of SEQ ID NO: 1884948
aggagaagauuggacugau

SEQ ID NO: 2304281 - RNA, 19 nt, Artificial Sequence
  Description of Artificial Sequence: Synthetic oligonucleotide
  Antisense strand to SEQ ID NO: 2304280
aucaguccaaucuucuccu

SEQ ID NO: 2304282 - RNA, 19 nt, Artificial Sequence
  Description of Artificial Sequence: Synthetic oligonucleotide
  Sense strand starting at position 159 of SEQ ID NO: 1884948
ccuggaggucugugcugaa

SEQ ID NO: 2304283 - RNA, 19 nt, Artificial Sequence
  Description of Artificial Sequence: Synthetic oligonucleotide
  Antisense strand to SEQ ID NO: 2304282
uucagcacagaccuccagg

SEQ ID NO: 2304284 - RNA, 19 nt, Artificial Sequence
  Description of Artificial Sequence: Synthetic oligonucleotide
  Sense strand starting at position 250 of SEQ ID NO: 1884948
caggcauggugagaggaaa

SEQ ID NO: 2304285 - RNA, 19 nt, Artificial Sequence
  Description of Artificial Sequence: Synthetic oligonucleotide
  Antisense strand to SEQ ID NO: 2304284
uuuccucucaccaugccug

SEQ ID NO: 2304286 - RNA, 19 nt, Artificial Sequence
  Description of Artificial Sequence: Synthetic oligonucleotide
  Sense strand starting at position 417 of SEQ ID NO: 1884948
gccuguuugaguuggccaa

SEQ ID NO: 2304287 - RNA, 19 nt, Artificial Sequence
  Description of Artificial Sequence: Synthetic oligonucleotide
  Antisense strand to SEQ ID NO: 2304286
uuggccaacucaaacaggc

SEQ ID NO: 2304288 - RNA, 19 nt, Artificial Sequence
  Description of Artificial Sequence: Synthetic oligonucleotide
  Sense strand starting at position 582 of SEQ ID NO: 1884948
ucuaaagaguuugccuaga

SEQ ID NO: 2304289 - RNA, 19 nt, Artificial Sequence
  Description of Artificial Sequence: Synthetic oligonucleotide
  Antisense strand to SEQ ID NO: 2304288
ucuaggcaaacucuuuaga

SEQ ID NO: 2304290 - RNA, 19 nt, Artificial Sequence
  Description of Artificial Sequence: Synthetic oligonucleotide
  Sense strand starting at position 584 of SEQ ID NO: 1884948
uaaagaguuugccuagacu

SEQ ID NO: 2304291 - RNA, 19 nt, Artificial Sequence
  Description of Artificial Sequence: Synthetic oligonucleotide
  Antisense strand to SEQ ID NO: 2304290
agucuaggcaaacucuuua

SEQ ID NO: 2304292 - RNA, 19 nt, Artificial Sequence
  Description of Artificial Sequence: Synthetic oligonucleotide
  Sense strand starting at position 590 of SEQ ID NO: 1884948
guuugccuagacugagaaa

SEQ ID NO: 2304293 - RNA, 19 nt, Artificial Sequence
  Description of Artificial Sequence: Synthetic oligonucleotide
  Antisense strand to SEQ ID NO: 2304292
uuucucagucuaggcaaac

SEQ ID NO: 2304294 - RNA, 19 nt, Artificial Sequence
  Description of Artificial Sequence: Synthetic oligonucleotide
  Sense strand starting at position 733 of SEQ ID NO: 1884948
uggcaaugcugggcuuaaa

SEQ ID NO: 2304295 - RNA, 19 nt, Artificial Sequence
  Description of Artificial Sequence: Synthetic oligonucleotide
  Antisense strand to SEQ ID NO: 2304294
uuuaagcccagcauugcca

SEQ ID NO: 2304296 - RNA, 19 nt, Artificial Sequence
  Description of Artificial Sequence: Synthetic oligonucleotide
  Sense strand starting at position 736 of SEQ ID NO: 1884948
caaugcugggcuuaaagau

SEQ ID NO: 2304297 - RNA, 19 nt, Artificial Sequence
  Description of Artificial Sequence: Synthetic oligonucleotide
  Antisense strand to SEQ ID NO: 2304296
aucuuuaagcccagcauug

SEQ ID NO: 2304298 - RNA, 19 nt, Artificial Sequence
  Description of Artificial Sequence: Synthetic oligonucleotide
  Sense strand starting at position 760 of SEQ ID NO: 1884948
cccagagauucccuggguu

SEQ ID NO: 2304299 - RNA, 19 nt, Artificial Sequence
  Description of Artificial Sequence: Synthetic oligonucleotide
  Antisense strand to SEQ ID NO: 2304298
aacccagggaaucucuggg

SEQ ID NO: 2304300 - RNA, 19 nt, Artificial Sequence
  Description of Artificial Sequence: Synthetic oligonucleotide
  Sense strand starting at position 772 of SEQ ID NO: 1884948
cuggguuccucaccuaaga

SEQ ID NO: 2304301 - RNA, 19 nt, Artificial Sequence
  Description of Artificial Sequence: Synthetic oligonucleotide
  Antisense strand to SEQ ID NO: 2304300
ucuuaggugaggaacccag

SEQ ID NO: 2304302 - RNA, 19 nt, Artificial Sequence
  Description of Artificial Sequence: Synthetic oligonucleotide
  Sense strand starting at position 796 of SEQ ID NO: 1884948
ucaggacuugcagauguga

SEQ ID NO: 2304303 - RNA, 19 nt, Artificial Sequence
  Description of Artificial Sequence: Synthetic oligonucleotide
  Antisense strand to SEQ ID NO: 2304302
ucacaucugcaaguccuga

SEQ ID NO: 2304304 - RNA, 19 nt, Artificial Sequence
  Description of Artificial Sequence: Synthetic oligonucleotide
  Sense strand starting at position 798 of SEQ ID NO: 1884948
aggacuugcagaugugaga

SEQ ID NO: 2304305 - RNA, 19 nt, Artificial Sequence
  Description of Artificial Sequence: Synthetic oligonucleotide
  Antisense strand to SEQ ID NO: 2304304
ucucacaucugcaaguccu

SEQ ID NO: 2304306 - RNA, 19 nt, Artificial Sequence
  Description of Artificial Sequence: Synthetic oligonucleotide
  Sense strand starting at position 1057 of SEQ ID NO: 1884948
ggauauuauugacagggua

SEQ ID NO: 2304307 - RNA, 19 nt, Artificial Sequence
  Description of Artificial Sequence: Synthetic oligonucleotide
  Antisense strand to SEQ ID NO: 2304306
uacccugucaauaauaucc

SEQ ID NO: 2304308 - RNA, 19 nt, Artificial Sequence
  Description of Artificial Sequence: Synthetic oligonucleotide
  Sense strand starting at position 1060 of SEQ ID NO: 1884948
uauuauugacaggguauua

SEQ ID NO: 2304309 - RNA, 19 nt, Artificial Sequence
  Description of Artificial Sequence: Synthetic oligonucleotide
  Antisense strand to SEQ ID NO: 2304308
uaauacccugucaauaaua

SEQ ID NO: 2304310 - RNA, 19 nt, Artificial Sequence
  Description of Artificial Sequence: Synthetic oligonucleotide
  Sense strand starting at position 1070 of SEQ ID NO: 1884948
aggguauuauucuggaaag

SEQ ID NO: 2304311 - RNA, 19 nt, Artificial Sequence
  Description of Artificial Sequence: Synthetic oligonucleotide
  Antisense strand to SEQ ID NO: 2304310
cuuuccagaauaauacccu

SEQ ID NO: 2304312 - RNA, 19 nt, Artificial Sequence
  Description of Artificial Sequence: Synthetic oligonucleotide
  Sense strand starting at position 1072 of SEQ ID NO: 1884948
gguauuauucuggaaagug

SEQ ID NO: 2304313 - RNA, 19 nt, Artificial Sequence
  Description of Artificial Sequence: Synthetic oligonucleotide
  Antisense strand to SEQ ID NO: 2304312
cacuuuccagaauaauacc

SEQ ID NO: 2304314 - RNA, 19 nt, Artificial Sequence
  Description of Artificial Sequence: Synthetic oligonucleotide
  Sense strand starting at position 1088 of SEQ ID NO: 1884948
gugaggaguccuggaggaa

SEQ ID NO: 2304315 - RNA, 19 nt, Artificial Sequence
  Description of Artificial Sequence: Synthetic oligonucleotide
  Antisense strand to SEQ ID NO: 2304314
uuccuccaggacuccucac

SEQ ID NO: 2304316 - RNA, 19 nt, Artificial Sequence
  Description of Artificial Sequence: Synthetic oligonucleotide
  Sense strand starting at position 1111 of SEQ ID NO: 1884948
acugaaaggacuuguaguc

SEQ ID NO: 2304317 - RNA, 19 nt, Artificial Sequence
  Description of Artificial Sequence: Synthetic oligonucleotide
  Antisense strand to SEQ ID NO: 2304316
gacuacaaguccuuucagu

SEQ ID NO: 2304318 - RNA, 19 nt, Artificial Sequence
  Description of Artificial Sequence: Synthetic oligonucleotide
  Sense strand starting at position 1650 of SEQ ID NO: 1884948
ccauuaggagcugaagguu

SEQ ID NO: 2304319 - RNA, 19 nt, Artificial Sequence
  Description of Artificial Sequence: Synthetic oligonucleotide
  Antisense strand to SEQ ID NO: 2304318
aaccuucagcuccuaaugg

SEQ ID NO: 2304320 - RNA, 19 nt, Artificial Sequence
  Description of Artificial Sequence: Synthetic oligonucleotide
  Sense strand starting at position 1735 of SEQ ID NO: 1884948
cggccaguuuaaucaagca

SEQ ID NO: 2304321 - RNA, 19 nt, Artificial Sequence
  Description of Artificial Sequence: Synthetic oligonucleotide
  Antisense strand to SEQ ID NO: 2304320
ugcuugauuaaacuggccg

SEQ ID NO: 2304322 - RNA, 19 nt, Artificial Sequence
  Description of Artificial Sequence: Synthetic oligonucleotide
  Sense strand starting at position 2086 of SEQ ID NO: 1884948
ggagucuccugucucuuua

SEQ ID NO: 2304323 - RNA, 19 nt, Artificial Sequence
  Description of Artificial Sequence: Synthetic oligonucleotide
  Antisense strand to SEQ ID NO: 2304322
uaaagagacaggagacucc

SEQ ID NO: 2304324 - RNA, 19 nt, Artificial Sequence
  Description of Artificial Sequence: Synthetic oligonucleotide
  Sense strand starting at position 2178 of SEQ ID NO: 1884948
ggugauuccuuuccucauu

SEQ ID NO: 2304325 - RNA, 19 nt, Artificial Sequence
  Description of Artificial Sequence: Synthetic oligonucleotide
  Antisense strand to SEQ ID NO: 2304324
aaugaggaaaggaaucacc

SEQ ID NO: 2304326 - RNA, 19 nt, Artificial Sequence
  Description of Artificial Sequence: Synthetic oligonucleotide
  Sense strand starting at position 2179 of SEQ ID NO: 1884948
gugauuccuuuccucauua

SEQ ID NO: 2304327 - RNA, 19 nt, Artificial Sequence
  Description of Artificial Sequence: Synthetic oligonucleotide
  Antisense strand to SEQ ID NO: 2304326
uaaugaggaaaggaaucac

SEQ ID NO: 2304328 - RNA, 19 nt, Artificial Sequence
  Description of Artificial Sequence: Synthetic oligonucleotide
  Sense strand starting at position 2197 of SEQ ID NO: 1884948
aggaaauucuccgcucccu

SEQ ID NO: 2304329 - RNA, 19 nt, Artificial Sequence
  Description of Artificial Sequence: Synthetic oligonucleotide
  Antisense strand to SEQ ID NO: 2304328
agggagcggagaauuuccu

SEQ ID NO: 2304330 - RNA, 19 nt, Artificial Sequence
  Description of Artificial Sequence: Synthetic oligonucleotide
  Sense strand starting at position 2765 of SEQ ID NO: 1884948
uucggauucucaguggagu

SEQ ID NO: 2304331 - RNA, 19 nt, Artificial Sequence
  Description of Artificial Sequence: Synthetic oligonucleotide
  Antisense strand to SEQ ID NO: 2304330
acuccacugagaauccgaa

SEQ ID NO: 2304332 - RNA, 19 nt, Artificial Sequence
  Description of Artificial Sequence: Synthetic oligonucleotide
  Sense strand starting at position 2766 of SEQ ID NO: 1884948
ucggauucucaguggaguu

SEQ ID NO: 2304333 - RNA, 19 nt, Artificial Sequence
  Description of Artificial Sequence: Synthetic oligonucleotide
  Antisense strand to SEQ ID NO: 2304332
aacuccacugagaauccga

SEQ ID NO: 2304334 - RNA, 19 nt, Artificial Sequence
  Description of Artificial Sequence: Synthetic oligonucleotide
  Sense strand starting at position 2767 of SEQ ID NO: 1884948
cggauucucaguggaguuu

SEQ ID NO: 2304335 - RNA, 19 nt, Artificial Sequence
  Description of Artificial Sequence: Synthetic oligonucleotide
  Antisense strand to SEQ ID NO: 2304334
aaacuccacugagaauccg

SEQ ID NO: 2304336 - RNA, 19 nt, Artificial Sequence
  Description of Artificial Sequence: Synthetic oligonucleotide
  Sense strand starting at position 2894 of SEQ ID NO: 1884948
uaaguuugaggguggaguu

SEQ ID NO: 2304337 - RNA, 19 nt, Artificial Sequence
  Description of Artificial Sequence: Synthetic oligonucleotide
  Antisense strand to SEQ ID NO: 2304336
aacuccacccucaaacuua

SEQ ID NO: 2304338 - RNA, 19 nt, Artificial Sequence
  Description of Artificial Sequence: Synthetic oligonucleotide
  Sense strand starting at position 2904 of SEQ ID NO: 1884948
gguggaguuuguaaggaau

SEQ ID NO: 2304339 - RNA, 19 nt, Artificial Sequence
  Description of Artificial Sequence: Synthetic oligonucleotide
  Antisense strand to SEQ ID NO: 2304338
auuccuuacaaacuccacc

SEQ ID NO: 2304340 - RNA, 19 nt, Artificial Sequence
  Description of Artificial Sequence: Synthetic oligonucleotide
  Sense strand starting at position 2910 of SEQ ID NO: 1884948
guuuguaaggaauagagcu

SEQ ID NO: 2304341 - RNA, 19 nt, Artificial Sequence
  Description of Artificial Sequence: Synthetic oligonucleotide
  Antisense strand to SEQ ID NO: 2304340
agcucuauuccuuacaaac

SEQ ID NO: 2304342 - RNA, 19 nt, Artificial Sequence
  Description of Artificial Sequence: Synthetic oligonucleotide
  Sense strand starting at position 3270 of SEQ ID NO: 1884948
gaaugagcuacguguagua

SEQ ID NO: 2304343 - RNA, 19 nt, Artificial Sequence
  Description of Artificial Sequence: Synthetic oligonucleotide
  Antisense strand to SEQ ID NO: 2304342
uacuacacguagcucauuc

SEQ ID NO: 2304344 - RNA, 19 nt, Artificial Sequence
  Description of Artificial Sequence: Synthetic oligonucleotide
  Sense strand starting at position 3720 of SEQ ID NO: 1884948
ccaagaacgucagaaugaa

SEQ ID NO: 2304345 - RNA, 19 nt, Artificial Sequence
  Description of Artificial Sequence: Synthetic oligonucleotide
  Antisense strand to SEQ ID NO: 2304344
uucauucugacguucuugg

SEQ ID NO: 2304346 - RNA, 19 nt, Artificial Sequence
  Description of Artificial Sequence: Synthetic oligonucleotide
  Sense strand starting at position 3765 of SEQ ID NO: 1884948
ggaggauccuuauucccaa

SEQ ID NO: 2304347 - RNA, 19 nt, Artificial Sequence
  Description of Artificial Sequence: Synthetic oligonucleotide
  Antisense strand to SEQ ID NO: 2304346
uugggaauaaggauccucc

SEQ ID NO: 2304348 - RNA, 19 nt, Artificial Sequence
  Description of Artificial Sequence: Synthetic oligonucleotide
  Sense strand starting at position 3834 of SEQ ID NO: 1884948
uacugacaggcuugggaaa

SEQ ID NO: 2304349 - RNA, 19 nt, Artificial Sequence
  Description of Artificial Sequence: Synthetic oligonucleotide
  Antisense strand to SEQ ID NO: 2304348
uuucccaagccugucagua

SEQ ID NO: 2304350 - RNA, 19 nt, Artificial Sequence
  Description of Artificial Sequence: Synthetic oligonucleotide
  Sense strand starting at position 3880 of SEQ ID NO: 1884948
aaccaagggugucuguuua

SEQ ID NO: 2304351 - RNA, 19 nt, Artificial Sequence
  Description of Artificial Sequence: Synthetic oligonucleotide
  Antisense strand to SEQ ID NO: 2304350
uaaacagacacccuugguu

SEQ ID NO: 2304352 - RNA, 19 nt, Artificial Sequence
  Description of Artificial Sequence: Synthetic oligonucleotide
  Sense strand starting at position 3884 of SEQ ID NO: 1884948
aagggugucuguuuaaaug

SEQ ID NO: 2304353 - RNA, 19 nt, Artificial Sequence
  Description of Artificial Sequence: Synthetic oligonucleotide
  Antisense strand to SEQ ID NO: 2304352
cauuuaaacagacacccuu

SEQ ID NO: 2304354 - RNA, 19 nt, Artificial Sequence
  Description of Artificial Sequence: Synthetic oligonucleotide
  Sense strand starting at position 3886 of SEQ ID NO: 1884948
gggugucuguuuaaaugug

SEQ ID NO: 2304355 - RNA, 19 nt, Artificial Sequence
  Description of Artificial Sequence: Synthetic oligonucleotide
  Antisense strand to SEQ ID NO: 2304354
cacauuuaaacagacaccc

SEQ ID NO: 2304356 - RNA, 19 nt, Artificial Sequence
  Description of Artificial Sequence: Synthetic oligonucleotide
  Sense strand starting at position 3968 of SEQ ID NO: 1884948
ccagauuccugguccucca

SEQ ID NO: 2304357 - RNA, 19 nt, Artificial Sequence
  Description of Artificial Sequence: Synthetic oligonucleotide
  Antisense strand to SEQ ID NO: 2304356
uggaggaccaggaaucugg

SEQ ID NO: 2304358 - RNA, 19 nt, Artificial Sequence
  Description of Artificial Sequence: Synthetic oligonucleotide
  Sense strand starting at position 358 of SEQ ID NO: 1884949
auuaguuaucucggcauuu

SEQ ID NO: 2304359 - RNA, 19 nt, Artificial Sequence
  Description of Artificial Sequence: Synthetic oligonucleotide
  Antisense strand to SEQ ID NO: 2304358
aaaugccgagauaacuaau

SEQ ID NO: 2304360 - RNA, 19 nt, Artificial Sequence
  Description of Artificial Sequence: Synthetic oligonucleotide
  Sense strand starting at position 527 of SEQ ID NO: 1884949
cugaauucuggucaauguc

SEQ ID NO: 2304361 - RNA, 19 nt, Artificial Sequence
  Description of Artificial Sequence: Synthetic oligonucleotide
  Antisense strand to SEQ ID NO: 2304360
gacauugaccagaauucag

SEQ ID NO: 2304362 - RNA, 19 nt, Artificial Sequence
  Description of Artificial Sequence: Synthetic oligonucleotide
  Sense strand starting at position 553 of SEQ ID NO: 1884949
ugaaaugaguuguuccuag

SEQ ID NO: 2304363 - RNA, 19 nt, Artificial Sequence
  Description of Artificial Sequence: Synthetic oligonucleotide
  Antisense strand to SEQ ID NO: 2304362
cuaggaacaacucauuuca

SEQ ID NO: 2304364 - RNA, 19 nt, Artificial Sequence
  Description of Artificial Sequence: Synthetic oligonucleotide
  Sense strand starting at position 659 of SEQ ID NO: 1884949
gucaacuugcaggaaauua

SEQ ID NO: 2304365 - RNA, 19 nt, Artificial Sequence
  Description of Artificial Sequence: Synthetic oligonucleotide
  Antisense strand to SEQ ID NO: 2304364
uaauuuccugcaaguugac

SEQ ID NO: 2304366 - RNA, 19 nt, Artificial Sequence
  Description of Artificial Sequence: Synthetic oligonucleotide
  Sense strand starting at position 753 of SEQ ID NO: 1884949
aguggacucgggcaaagaa

SEQ ID NO: 2304367 - RNA, 19 nt, Artificial Sequence
  Description of Artificial Sequence: Synthetic oligonucleotide
  Antisense strand to SEQ ID NO: 2304366
uucuuugcccgaguccacu

SEQ ID NO: 2304368 - RNA, 19 nt, Artificial Sequence
  Description of Artificial Sequence: Synthetic oligonucleotide
  Sense strand starting at position 864 of SEQ ID NO: 1884949
acuggauccuagucacuca

SEQ ID NO: 2304369 - RNA, 19 nt, Artificial Sequence
  Description of Artificial Sequence: Synthetic oligonucleotide
  Antisense strand to SEQ ID NO: 2304368
ugagugacuaggauccagu

SEQ ID NO: 2304370 - RNA, 19 nt, Artificial Sequence
  Description of Artificial Sequence: Synthetic oligonucleotide
  Sense strand starting at position 867 of SEQ ID NO: 1884949
ggauccuagucacucaaau

SEQ ID NO: 2304371 - RNA, 19 nt, Artificial Sequence
  Description of Artificial Sequence: Synthetic oligonucleotide
  Antisense strand to SEQ ID NO: 2304370
auuugagugacuaggaucc

SEQ ID NO: 2304372 - RNA, 19 nt, Artificial Sequence
  Description of Artificial Sequence: Synthetic oligonucleotide
  Sense strand starting at position 894 of SEQ ID NO: 1884949
agccauugagcccauauaa

SEQ ID NO: 2304373 - RNA, 19 nt, Artificial Sequence
  Description of Artificial Sequence: Synthetic oligonucleotide
  Antisense strand to SEQ ID NO: 2304372
uuauaugggcucaauggcu

SEQ ID NO: 2304374 - RNA, 19 nt, Artificial Sequence
  Description of Artificial Sequence: Synthetic oligonucleotide
  Sense strand starting at position 1038 of SEQ ID NO: 1884949
cacucaggauuguugugaa

SEQ ID NO: 2304375 - RNA, 19 nt, Artificial Sequence
  Description of Artificial Sequence: Synthetic oligonucleotide
  Antisense strand to SEQ ID NO: 2304374
uucacaacaauccugagug

SEQ ID NO: 2304376 - RNA, 19 nt, Artificial Sequence
  Description of Artificial Sequence: Synthetic oligonucleotide
  Sense strand starting at position 1056 of SEQ ID NO: 1884949
agaaucagugagugaauau

SEQ ID NO: 2304377 - RNA, 19 nt, Artificial Sequence
  Description of Artificial Sequence: Synthetic oligonucleotide
  Antisense strand to SEQ ID NO: 2304376
auauucacucacugauucu

SEQ ID NO: 2304378 - RNA, 19 nt, Artificial Sequence
  Description of Artificial Sequence: Synthetic oligonucleotide
  Sense strand starting at position 1066 of SEQ ID NO: 1884949
agugaauauguguacacuu

SEQ ID NO: 2304379 - RNA, 19 nt, Artificial Sequence
  Description of Artificial Sequence: Synthetic oligonucleotide
  Antisense strand to SEQ ID NO: 2304378
aaguguacacauauucacu

SEQ ID NO: 2304380 - RNA, 19 nt, Artificial Sequence
  Description of Artificial Sequence: Synthetic oligonucleotide
  Sense strand starting at position 1077 of SEQ ID NO: 1884949
guacacuuggcacauagua

SEQ ID NO: 2304381 - RNA, 19 nt, Artificial Sequence
  Description of Artificial Sequence: Synthetic oligonucleotide
  Antisense strand to SEQ ID NO: 2304380
uacuaugugccaaguguac

SEQ ID NO: 2304382 - RNA, 19 nt, Artificial Sequence
  Description of Artificial Sequence: Synthetic oligonucleotide
  Sense strand starting at position 1206 of SEQ ID NO: 1884949
gguguugcuaguuuguuua

SEQ ID NO: 2304383 - RNA, 19 nt, Artificial Sequence
  Description of Artificial Sequence: Synthetic oligonucleotide
  Antisense strand to SEQ ID NO: 2304382
uaaacaaacuagcaacacc

SEQ ID NO: 2304384 - RNA, 19 nt, Artificial Sequence
  Description of Artificial Sequence: Synthetic oligonucleotide
  Sense strand starting at position 1244 of SEQ ID NO: 1884949
uugguagcucaccagagau

SEQ ID NO: 2304385 - RNA, 19 nt, Artificial Sequence
  Description of Artificial Sequence: Synthetic oligonucleotide
  Antisense strand to SEQ ID NO: 2304384
aucucuggugagcuaccaa

SEQ ID NO: 2304386 - RNA, 19 nt, Artificial Sequence
  Description of Artificial Sequence: Synthetic oligonucleotide
  Sense strand starting at position 1246 of SEQ ID NO: 1884949
gguagcucaccagagaucu

SEQ ID NO: 2304387 - RNA, 19 nt, Artificial Sequence
  Description of Artificial Sequence: Synthetic oligonucleotide
  Antisense strand to SEQ ID NO: 2304386
agaucucuggugagcuacc

SEQ ID NO: 2304388 - RNA, 19 nt, Artificial Sequence
  Description of Artificial Sequence: Synthetic oligonucleotide
  Sense strand starting at position 1343 of SEQ ID NO: 1884949
guuauuucuucuuuguaug

SEQ ID NO: 2304389 - RNA, 19 nt, Artificial Sequence
  Description of Artificial Sequence: Synthetic oligonucleotide
  Antisense strand to SEQ ID NO: 2304388
cauacaaagaagaaauaac

SEQ ID NO: 2304390 - RNA, 19 nt, Artificial Sequence
  Description of Artificial Sequence: Synthetic oligonucleotide
  Sense strand starting at position 1461 of SEQ ID NO: 1884949
gcaauugagaaaugcugga

SEQ ID NO: 2304391 - RNA, 19 nt, Artificial Sequence
  Description of Artificial Sequence: Synthetic oligonucleotide
  Antisense strand to SEQ ID NO: 2304390
uccagcauuucucaauugc

SEQ ID NO: 2304392 - RNA, 19 nt, Artificial Sequence
  Description of Artificial Sequence: Synthetic oligonucleotide
  Sense strand starting at position 1497 of SEQ ID NO: 1884949
agaguuauauuccuuacuu

SEQ ID NO: 2304393 - RNA, 19 nt, Artificial Sequence
  Description of Artificial Sequence: Synthetic oligonucleotide
  Antisense strand to SEQ ID NO: 2304392
aaguaaggaauauaacucu

SEQ ID NO: 2304394 - RNA, 19 nt, Artificial Sequence
  Description of Artificial Sequence: Synthetic oligonucleotide
  Sense strand starting at position 1680 of SEQ ID NO: 1884949
agcuuucugccugugcaga

SEQ ID NO: 2304395 - RNA, 19 nt, Artificial Sequence
  Description of Artificial Sequence: Synthetic oligonucleotide
  Antisense strand to SEQ ID NO: 2304394
ucugcacaggcagaaagcu

SEQ ID NO: 2304396 - RNA, 19 nt, Artificial Sequence
  Description of Artificial Sequence: Synthetic oligonucleotide
  Sense strand starting at position 1761 of SEQ ID NO: 1884949
ggauucugcuacuugagaa

SEQ ID NO: 2304397 - RNA, 19 nt, Artificial Sequence
  Description of Artificial Sequence: Synthetic oligonucleotide
  Antisense strand to SEQ ID NO: 2304396
uucucaaguagcagaaucc

SEQ ID NO: 2304398 - RNA, 19 nt, Artificial Sequence
  Description of Artificial Sequence: Synthetic oligonucleotide
  Sense strand starting at position 1875 of SEQ ID NO: 1884949
ugaguuucugcaugaaaga

SEQ ID NO: 2304399 - RNA, 19 nt, Artificial Sequence
  Description of Artificial Sequence: Synthetic oligonucleotide
  Antisense strand to SEQ ID NO: 2304398
ucuuucaugcagaaacuca

SEQ ID NO: 2304400 - RNA, 19 nt, Artificial Sequence
  Description of Artificial Sequence: Synthetic oligonucleotide
  Sense strand starting at position 2238 of SEQ ID NO: 1884949
agugacuacuuagucaaca

SEQ ID NO: 2304401 - RNA, 19 nt, Artificial Sequence
  Description of Artificial Sequence: Synthetic oligonucleotide
  Antisense strand to SEQ ID NO: 2304400
uguugacuaaguagucacu

SEQ ID NO: 2304402 - RNA, 19 nt, Artificial Sequence
  Description of Artificial Sequence: Synthetic oligonucleotide
  Sense strand starting at position 2239 of SEQ ID NO: 1884949
gugacuacuuagucaacaa

SEQ ID NO: 2304403 - RNA, 19 nt, Artificial Sequence
  Description of Artificial Sequence: Synthetic oligonucleotide
  Antisense strand to SEQ ID NO: 2304402
uuguugacuaaguagucac

SEQ ID NO: 2304404 - RNA, 19 nt, Artificial Sequence
  Description of Artificial Sequence: Synthetic oligonucleotide
  Sense strand starting at position 2368 of SEQ ID NO: 1884949
ugaagaugcccucauguac

SEQ ID NO: 2304405 - RNA, 19 nt, Artificial Sequence
  Description of Artificial Sequence: Synthetic oligonucleotide
  Antisense strand to SEQ ID NO: 2304404
guacaugagggcaucuuca

SEQ ID NO: 2304406 - RNA, 19 nt, Artificial Sequence
  Description of Artificial Sequence: Synthetic oligonucleotide
  Sense strand starting at position 2592 of SEQ ID NO: 1884949
ccaugucacaggugaagau

SEQ ID NO: 2304407 - RNA, 19 nt, Artificial Sequence
  Description of Artificial Sequence: Synthetic oligonucleotide
  Antisense strand to SEQ ID NO: 2304406
aucuucaccugugacaugg

SEQ ID NO: 2304408 - RNA, 19 nt, Artificial Sequence
  Description of Artificial Sequence: Synthetic oligonucleotide
  Sense strand starting at position 2630 of SEQ ID NO: 1884949
uguugauuggaacguauuu

SEQ ID NO: 2304409 - RNA, 19 nt, Artificial Sequence
  Description of Artificial Sequence: Synthetic oligonucleotide
  Antisense strand to SEQ ID NO: 2304408
aaauacguuccaaucaaca

SEQ ID NO: 2304410 - RNA, 19 nt, Artificial Sequence
  Description of Artificial Sequence: Synthetic oligonucleotide
  Sense strand starting at position 2645 of SEQ ID NO: 1884949
auuuguaccuguuugcaaa

SEQ ID NO: 2304411 - RNA, 19 nt, Artificial Sequence
  Description of Artificial Sequence: Synthetic oligonucleotide
  Antisense strand to SEQ ID NO: 2304410
uuugcaaacagguacaaau

SEQ ID NO: 2304412 - RNA, 19 nt, Artificial Sequence
  Description of Artificial Sequence: Synthetic oligonucleotide
  Sense strand starting at position 2656 of SEQ ID NO: 1884949
uuugcaaagcauuaggaaa

SEQ ID NO: 2304413 - RNA, 19 nt, Artificial Sequence
  Description of Artificial Sequence: Synthetic oligonucleotide
  Antisense strand to SEQ ID NO: 2304412
uuuccuaaugcuuugcaaa

SEQ ID NO: 2304414 - RNA, 19 nt, Artificial Sequence
  Description of Artificial Sequence: Synthetic oligonucleotide
  Sense strand starting at position 2892 of SEQ ID NO: 1884949
ggauaucguagugauuauc

SEQ ID NO: 2304415 - RNA, 19 nt, Artificial Sequence
  Description of Artificial Sequence: Synthetic oligonucleotide
  Antisense strand to SEQ ID NO: 2304414
gauaaucacuacgauaucc

SEQ ID NO: 2304416 - RNA, 19 nt, Artificial Sequence
  Description of Artificial Sequence: Synthetic oligonucleotide
  Sense strand starting at position 2921 of SEQ ID NO: 1884949
aauccuugugguggaaacu

SEQ ID NO: 2304417 - RNA, 19 nt, Artificial Sequence
  Description of Artificial Sequence: Synthetic oligonucleotide
  Antisense strand to SEQ ID NO: 2304416
aguuuccaccacaaggauu

SEQ ID NO: 2304418 - RNA, 19 nt, Artificial Sequence
  Description of Artificial Sequence: Synthetic oligonucleotide
  Sense strand starting at position 3066 of SEQ ID NO: 1884949
augugaauacgguacaacu

SEQ ID NO: 2304419 - RNA, 19 nt, Artificial Sequence
  Description of Artificial Sequence: Synthetic oligonucleotide
  Antisense strand to SEQ ID NO: 2304418
aguuguaccguauucacau

SEQ ID NO: 2304420 - RNA, 19 nt, Artificial Sequence
  Description of Artificial Sequence: Synthetic oligonucleotide
  Sense strand starting at position 3077 of SEQ ID NO: 1884949
guacaacuccuggauccuu

SEQ ID NO: 2304421 - RNA, 19 nt, Artificial Sequence
  Description of Artificial Sequence: Synthetic oligonucleotide
  Antisense strand to SEQ ID NO: 2304420
aaggauccaggaguuguac

SEQ ID NO: 2304422 - RNA, 19 nt, Artificial Sequence
  Description of Artificial Sequence: Synthetic oligonucleotide
  Sense strand starting at position 3105 of SEQ ID NO: 1884949
ugaaacugaugcucugaau

SEQ ID NO: 2304423 - RNA, 19 nt, Artificial Sequence
  Description of Artificial Sequence: Synthetic oligonucleotide
  Antisense strand to SEQ ID NO: 2304422
auucagagcaucaguuuca

SEQ ID NO: 2304424 - RNA, 19 nt, Artificial Sequence
  Description of Artificial Sequence: Synthetic oligonucleotide
  Sense strand starting at position 3229 of SEQ ID NO: 1884949
agaguacuugaauguccau

SEQ ID NO: 2304425 - RNA, 19 nt, Artificial Sequence
  Description of Artificial Sequence: Synthetic oligonucleotide
  Antisense strand to SEQ ID NO: 2304424
auggacauucaaguacucu

SEQ ID NO: 2304426 - RNA, 19 nt, Artificial Sequence
  Description of Artificial Sequence: Synthetic oligonucleotide
  Sense strand starting at position 3280 of SEQ ID NO: 1884949
ucacuuaaggacuguaauu

SEQ ID NO: 2304427 - RNA, 19 nt, Artificial Sequence
  Description of Artificial Sequence: Synthetic oligonucleotide
  Antisense strand to SEQ ID NO: 2304426
aauuacaguccuuaaguga

SEQ ID NO: 2304428 - RNA, 19 nt, Artificial Sequence
  Description of Artificial Sequence: Synthetic oligonucleotide
  Sense strand starting at position 3377 of SEQ ID NO: 1884949
ugacuuuacccugaugcaa

SEQ ID NO: 2304429 - RNA, 19 nt, Artificial Sequence
  Description of Artificial Sequence: Synthetic oligonucleotide
  Antisense strand to SEQ ID NO: 2304428
uugcaucaggguaaaguca

SEQ ID NO: 2304430 - RNA, 19 nt, Artificial Sequence
  Description of Artificial Sequence: Synthetic oligonucleotide
  Sense strand starting at position 3412 of SEQ ID NO: 1884949
auagucaugcacugaagaa

SEQ ID NO: 2304431 - RNA, 19 nt, Artificial Sequence
  Description of Artificial Sequence: Synthetic oligonucleotide
  Antisense strand to SEQ ID NO: 2304430
uucuucagugcaugacuau

SEQ ID NO: 2304432 - RNA, 19 nt, Artificial Sequence
  Description of Artificial Sequence: Synthetic oligonucleotide
  Sense strand starting at position 3439 of SEQ ID NO: 1884949
cgcucagugauggaucaca

SEQ ID NO: 2304433 - RNA, 19 nt, Artificial Sequence
  Description of Artificial Sequence: Synthetic oligonucleotide
  Antisense strand to SEQ ID NO: 2304432
ugugauccaucacugagcg

SEQ ID NO: 2304434 - RNA, 19 nt, Artificial Sequence
  Description of Artificial Sequence: Synthetic oligonucleotide
  Sense strand starting at position 3464 of SEQ ID NO: 1884949
augauaguccuguaagauu

SEQ ID NO: 2304435 - RNA, 19 nt, Artificial Sequence
  Description of Artificial Sequence: Synthetic oligonucleotide
  Antisense strand to SEQ ID NO: 2304434
aaucuuacaggacuaucau

SEQ ID NO: 2304436 - RNA, 19 nt, Artificial Sequence
  Description of Artificial Sequence: Synthetic oligonucleotide
  Sense strand starting at position 3978 of SEQ ID NO: 1884949
auguuacuggcuuacauau

SEQ ID NO: 2304437 - RNA, 19 nt, Artificial Sequence
  Description of Artificial Sequence: Synthetic oligonucleotide
  Antisense strand to SEQ ID NO: 2304436
auauguaagccaguaacau

SEQ ID NO: 2304438 - RNA, 19 nt, Artificial Sequence
  Description of Artificial Sequence: Synthetic oligonucleotide
  Sense strand starting at position 59 of SEQ ID NO: 1884950
guauacaucuacuuggaaa

SEQ ID NO: 2304439 - RNA, 19 nt, Artificial Sequence
  Description of Artificial Sequence: Synthetic oligonucleotide
  Antisense strand to SEQ ID NO: 2304438
uuuccaaguagauguauac

SEQ ID NO: 2304440 - RNA, 19 nt, Artificial Sequence
  Description of Artificial Sequence: Synthetic oligonucleotide
  Sense strand starting at position 112 of SEQ ID NO: 1884950
aauuuagagcuaugugcau

SEQ ID NO: 2304441 - RNA, 19 nt, Artificial Sequence
  Description of Artificial Sequence: Synthetic oligonucleotide
  Antisense strand to SEQ ID NO: 2304440
augcacauagcucuaaauu

SEQ ID NO: 2304442 - RNA, 19 nt, Artificial Sequence
  Description of Artificial Sequence: Synthetic oligonucleotide
  Sense strand starting at position 358 of SEQ ID NO: 1884950
agaaauuguucuucuaaga

SEQ ID NO: 2304443 - RNA, 19 nt, Artificial Sequence
  Description of Artificial Sequence: Synthetic oligonucleotide
  Antisense strand to SEQ ID NO: 2304442
ucuuagaagaacaauuucu

SEQ ID NO: 2304444 - RNA, 19 nt, Artificial Sequence
  Description of Artificial Sequence: Synthetic oligonucleotide
  Sense strand starting at position 410 of SEQ ID NO: 1884950
uuaugaguuugcuuauuug

SEQ ID NO: 2304445 - RNA, 19 nt, Artificial Sequence
  Description of Artificial Sequence: Synthetic oligonucleotide
  Antisense strand to SEQ ID NO: 2304444
caaauaagcaaacucauaa

SEQ ID NO: 2304446 - RNA, 19 nt, Artificial Sequence
  Description of Artificial Sequence: Synthetic oligonucleotide
  Sense strand starting at position 413 of SEQ ID NO: 1884950
ugaguuugcuuauuuguau

SEQ ID NO: 2304447 - RNA, 19 nt, Artificial Sequence
  Description of Artificial Sequence: Synthetic oligonucleotide
  Antisense strand to SEQ ID NO: 2304446
auacaaauaagcaaacuca

SEQ ID NO: 2304448 - RNA, 19 nt, Artificial Sequence
  Description of Artificial Sequence: Synthetic oligonucleotide
  Sense strand starting at position 414 of SEQ ID NO: 1884950
gaguuugcuuauuuguaua

SEQ ID NO: 2304449 - RNA, 19 nt, Artificial Sequence
  Description of Artificial Sequence: Synthetic oligonucleotide
  Antisense strand to SEQ ID NO: 2304448
uauacaaauaagcaaacuc

SEQ ID NO: 2304450 - RNA, 19 nt, Artificial Sequence
  Description of Artificial Sequence: Synthetic oligonucleotide
  Sense strand starting at position 460 of SEQ ID NO: 1884950
guuagauaacugugaggau

SEQ ID NO: 2304451 - RNA, 19 nt, Artificial Sequence
  Description of Artificial Sequence: Synthetic oligonucleotide
  Antisense strand to SEQ ID NO: 2304450
auccucacaguuaucuaac

SEQ ID NO: 2304452 - RNA, 19 nt, Artificial Sequence
  Description of Artificial Sequence: Synthetic oligonucleotide
  Sense strand starting at position 472 of SEQ ID NO: 1884950
ugaggaugcaguugaacaa

SEQ ID NO: 2304453 - RNA, 19 nt, Artificial Sequence
  Description of Artificial Sequence: Synthetic oligonucleotide
  Antisense strand to SEQ ID NO: 2304452
uuguucaacugcauccuca

SEQ ID NO: 2304454 - RNA, 19 nt, Artificial Sequence
  Description of Artificial Sequence: Synthetic oligonucleotide
  Sense strand starting at position 587 of SEQ ID NO: 1884950
agcaaugucagcuggauuu

SEQ ID NO: 2304455 - RNA, 19 nt, Artificial Sequence
  Description of Artificial Sequence: Synthetic oligonucleotide
  Antisense strand to SEQ ID NO: 2304454
aaauccagcugacauugcu

SEQ ID NO: 2304456 - RNA, 19 nt, Artificial Sequence
  Description of Artificial Sequence: Synthetic oligonucleotide
  Sense strand starting at position 723 of SEQ ID NO: 1884950
uggagugaagaugguauaa

SEQ ID NO: 2304457 - RNA, 19 nt, Artificial Sequence
  Description of Artificial Sequence: Synthetic oligonucleotide
  Antisense strand to SEQ ID NO: 2304456
uuauaccaucuucacucca

SEQ ID NO: 2304458 - RNA, 19 nt, Artificial Sequence
  Description of Artificial Sequence: Synthetic oligonucleotide
  Sense strand starting at position 839 of SEQ ID NO: 1884950
guugacacuguugaauuaa

SEQ ID NO: 2304459 - RNA, 19 nt, Artificial Sequence
  Description of Artificial Sequence: Synthetic oligonucleotide
  Antisense strand to SEQ ID NO: 2304458
uuaauucaacagugucaac

SEQ ID NO: 2304460 - RNA, 19 nt, Artificial Sequence
  Description of Artificial Sequence: Synthetic oligonucleotide
  Sense strand starting at position 898 of SEQ ID NO: 1884950
cauuaaagugcuggaugga

SEQ ID NO: 2304461 - RNA, 19 nt, Artificial Sequence
  Description of Artificial Sequence: Synthetic oligonucleotide
  Antisense strand to SEQ ID NO: 2304460
uccauccagcacuuuaaug

SEQ ID NO: 2304462 - RNA, 19 nt, Artificial Sequence
  Description of Artificial Sequence: Synthetic oligonucleotide
  Sense strand starting at position 901 of SEQ ID NO: 1884950
uaaagugcuggauggagaa

SEQ ID NO: 2304463 - RNA, 19 nt, Artificial Sequence
  Description of Artificial Sequence: Synthetic oligonucleotide
  Antisense strand to SEQ ID NO: 2304462
uucuccauccagcacuuua

SEQ ID NO: 2304464 - RNA, 19 nt, Artificial Sequence
  Description of Artificial Sequence: Synthetic oligonucleotide
  Sense strand starting at position 988 of SEQ ID NO: 1884950
ugguuaauggcuugacaag

SEQ ID NO: 2304465 - RNA, 19 nt, Artificial Sequence
  Description of Artificial Sequence: Synthetic oligonucleotide
  Antisense strand to SEQ ID NO: 2304464
cuugucaagccauuaacca

SEQ ID NO: 2304466 - RNA, 19 nt, Artificial Sequence
  Description of Artificial Sequence: Synthetic oligonucleotide
  Sense strand starting at position 1021 of SEQ ID NO: 1884950
uguuuauuggcugagacaa

SEQ ID NO: 2304467 - RNA, 19 nt, Artificial Sequence
  Description of Artificial Sequence: Synthetic oligonucleotide
  Antisense strand to SEQ ID NO: 2304466
uugucucagccaauaaaca

SEQ ID NO: 2304468 - RNA, 19 nt, Artificial Sequence
  Description of Artificial Sequence: Synthetic oligonucleotide
  Sense strand starting at position 1047 of SEQ ID NO: 1884950
gcuaccauacagugacaua

SEQ ID NO: 2304469 - RNA, 19 nt, Artificial Sequence
  Description of Artificial Sequence: Synthetic oligonucleotide
  Antisense strand to SEQ ID NO: 2304468
uaugucacuguaugguagc

SEQ ID NO: 2304470 - RNA, 19 nt, Artificial Sequence
  Description of Artificial Sequence: Synthetic oligonucleotide
  Sense strand starting at position 1092 of SEQ ID NO: 1884950
gguaucaaauuguuauaag

SEQ ID NO: 2304471 - RNA, 19 nt, Artificial Sequence
  Description of Artificial Sequence: Synthetic oligonucleotide
  Antisense strand to SEQ ID NO: 2304470
cuuauaacaauuugauacc

SEQ ID NO: 2304472 - RNA, 19 nt, Artificial Sequence
  Description of Artificial Sequence: Synthetic oligonucleotide
  Sense strand starting at position 1100 of SEQ ID NO: 1884950
auuguuauaaggugguaga

SEQ ID NO: 2304473 - RNA, 19 nt, Artificial Sequence
  Description of Artificial Sequence: Synthetic oligonucleotide
  Antisense strand to SEQ ID NO: 2304472
ucuaccaccuuauaacaau

SEQ ID NO: 2304474 - RNA, 19 nt, Artificial Sequence
  Description of Artificial Sequence: Synthetic oligonucleotide
  Sense strand starting at position 1101 of SEQ ID NO: 1884950
uuguuauaaggugguagaa

SEQ ID NO: 2304475 - RNA, 19 nt, Artificial Sequence
  Description of Artificial Sequence: Synthetic oligonucleotide
  Antisense strand to SEQ ID NO: 2304474
uucuaccaccuuauaacaa

SEQ ID NO: 2304476 - RNA, 19 nt, Artificial Sequence
  Description of Artificial Sequence: Synthetic oligonucleotide
  Sense strand starting at position 1124 of SEQ ID NO: 1884950
agugguaaaguugaaguaa

SEQ ID NO: 2304477 - RNA, 19 nt, Artificial Sequence
  Description of Artificial Sequence: Synthetic oligonucleotide
  Antisense strand to SEQ ID NO: 2304476
uuacuucaacuuuaccacu

SEQ ID NO: 2304478 - RNA, 19 nt, Artificial Sequence
  Description of Artificial Sequence: Synthetic oligonucleotide
  Sense strand starting at position 1204 of SEQ ID NO: 1884950
gaucauuauuaugugauag

SEQ ID NO: 2304479 - RNA, 19 nt, Artificial Sequence
  Description of Artificial Sequence: Synthetic oligonucleotide
  Antisense strand to SEQ ID NO: 2304478
cuaucacauaauaaugauc

SEQ ID NO: 2304480 - RNA, 19 nt, Artificial Sequence
  Description of Artificial Sequence: Synthetic oligonucleotide
  Sense strand starting at position 1287 of SEQ ID NO: 1884950
agugacuucuaguuaauag

SEQ ID NO: 2304481 - RNA, 19 nt, Artificial Sequence
  Description of Artificial Sequence: Synthetic oligonucleotide
  Antisense strand to SEQ ID NO: 2304480
cuauuaacuagaagucacu

SEQ ID NO: 2304482 - RNA, 19 nt, Artificial Sequence
  Description of Artificial Sequence: Synthetic oligonucleotide
  Sense strand starting at position 1546 of SEQ ID NO: 1884950
cugggaaaugcccaagcuu

SEQ ID NO: 2304483 - RNA, 19 nt, Artificial Sequence
  Description of Artificial Sequence: Synthetic oligonucleotide
  Antisense strand to SEQ ID NO: 2304482
aagcuugggcauuucccag

SEQ ID NO: 2304484 - RNA, 19 nt, Artificial Sequence
  Description of Artificial Sequence: Synthetic oligonucleotide
  Sense strand starting at position 1598 of SEQ ID NO: 1884950
caaguaguaccugacugua

SEQ ID NO: 2304485 - RNA, 19 nt, Artificial Sequence
  Description of Artificial Sequence: Synthetic oligonucleotide
  Antisense strand to SEQ ID NO: 2304484
uacagucagguacuacuug

SEQ ID NO: 2304486 - RNA, 19 nt, Artificial Sequence
  Description of Artificial Sequence: Synthetic oligonucleotide
  Sense strand starting at position 1772 of SEQ ID NO: 1884950
ugugauagugauuauauca

SEQ ID NO: 2304487 - RNA, 19 nt, Artificial Sequence
  Description of Artificial Sequence: Synthetic oligonucleotide
  Antisense strand to SEQ ID NO: 2304486
ugauauaaucacuaucaca

SEQ ID NO: 2304488 - RNA, 19 nt, Artificial Sequence
  Description of Artificial Sequence: Synthetic oligonucleotide
  Sense strand starting at position 1843 of SEQ ID NO: 1884950
accacagaugggugucaua

SEQ ID NO: 2304489 - RNA, 19 nt, Artificial Sequence
  Description of Artificial Sequence: Synthetic oligonucleotide
  Antisense strand to SEQ ID NO: 2304488
uaugacacccaucuguggu

SEQ ID NO: 2304490 - RNA, 19 nt, Artificial Sequence
  Description of Artificial Sequence: Synthetic oligonucleotide
  Sense strand starting at position 2021 of SEQ ID NO: 1884950
ucaccaaguguccaaaucu

SEQ ID NO: 2304491 - RNA, 19 nt, Artificial Sequence
  Description of Artificial Sequence: Synthetic oligonucleotide
  Antisense strand to SEQ ID NO: 2304490
agauuuggacacuugguga

SEQ ID NO: 2304492 - RNA, 19 nt, Artificial Sequence
  Description of Artificial Sequence: Synthetic oligonucleotide
  Sense strand starting at position 2162 of SEQ ID NO: 1884950
gcgcuuccacacguaaauu

SEQ ID NO: 2304493 - RNA, 19 nt, Artificial Sequence
  Description of Artificial Sequence: Synthetic oligonucleotide
  Antisense strand to SEQ ID NO: 2304492
aauuuacguguggaagcgc

SEQ ID NO: 2304494 - RNA, 19 nt, Artificial Sequence
  Description of Artificial Sequence: Synthetic oligonucleotide
  Sense strand starting at position 2286 of SEQ ID NO: 1884950
ggcuuagaaaugcaucuag

SEQ ID NO: 2304495 - RNA, 19 nt, Artificial Sequence
  Description of Artificial Sequence: Synthetic oligonucleotide
  Antisense strand to SEQ ID NO: 2304494
cuagaugcauuucuaagcc

SEQ ID NO: 2304496 - RNA, 19 nt, Artificial Sequence
  Description of Artificial Sequence: Synthetic oligonucleotide
  Sense strand starting at position 2361 of SEQ ID NO: 1884950
uguaaaguaucacugauaa

SEQ ID NO: 2304497 - RNA, 19 nt, Artificial Sequence
  Description of Artificial Sequence: Synthetic oligonucleotide
  Antisense strand to SEQ ID NO: 2304496
uuaucagugauacuuuaca

SEQ ID NO: 2304498 - RNA, 19 nt, Artificial Sequence
  Description of Artificial Sequence: Synthetic oligonucleotide
  Sense strand starting at position 2484 of SEQ ID NO: 1884950
augccugguuuaucgauuu

SEQ ID NO: 2304499 - RNA, 19 nt, Artificial Sequence
  Description of Artificial Sequence: Synthetic oligonucleotide
  Antisense strand to SEQ ID NO: 2304498
aaaucgauaaaccaggcau

SEQ ID NO: 2304500 - RNA, 19 nt, Artificial Sequence
  Description of Artificial Sequence: Synthetic oligonucleotide
  Sense strand starting at position 3316 of SEQ ID NO: 1884950
uuuaguauuuggucuucua

SEQ ID NO: 2304501 - RNA, 19 nt, Artificial Sequence
  Description of Artificial Sequence: Synthetic oligonucleotide
  Antisense strand to SEQ ID NO: 2304500
uagaagaccaaauacuaaa

SEQ ID NO: 2304502 - RNA, 19 nt, Artificial Sequence
  Description of Artificial Sequence: Synthetic oligonucleotide
  Sense strand starting at position 3366 of SEQ ID NO: 1884950
uucucaucagcuuaagaag

SEQ ID NO: 2304503 - RNA, 19 nt, Artificial Sequence
  Description of Artificial Sequence: Synthetic oligonucleotide
  Antisense strand to SEQ ID NO: 2304502
cuucuuaagcugaugagaa

SEQ ID NO: 2304504 - RNA, 19 nt, Artificial Sequence
  Description of Artificial Sequence: Synthetic oligonucleotide
  Sense strand starting at position 3790 of SEQ ID NO: 1884950
auggaauuaugugcuuaaa

SEQ ID NO: 2304505 - RNA, 19 nt, Artificial Sequence
  Description of Artificial Sequence: Synthetic oligonucleotide
  Antisense strand to SEQ ID NO: 2304504
uuuaagcacauaauuccau

SEQ ID NO: 2304506 - RNA, 19 nt, Artificial Sequence
  Description of Artificial Sequence: Synthetic oligonucleotide
  Sense strand starting at position 3792 of SEQ ID NO: 1884950
ggaauuaugugcuuaaaga

SEQ ID NO: 2304507 - RNA, 19 nt, Artificial Sequence
  Description of Artificial Sequence: Synthetic oligonucleotide
  Antisense strand to SEQ ID NO: 2304506
ucuuuaagcacauaauucc

SEQ ID NO: 2304508 - RNA, 19 nt, Artificial Sequence
  Description of Artificial Sequence: Synthetic oligonucleotide
  Sense strand starting at position 3802 of SEQ ID NO: 1884950
gcuuaaagagguugaauua

SEQ ID NO: 2304509 - RNA, 19 nt, Artificial Sequence
  Description of Artificial Sequence: Synthetic oligonucleotide
  Antisense strand to SEQ ID NO: 2304508
uaauucaaccucuuuaagc

SEQ ID NO: 2304510 - RNA, 19 nt, Artificial Sequence
  Description of Artificial Sequence: Synthetic oligonucleotide
  Sense strand starting at position 3894 of SEQ ID NO: 1884950
augaaaugccuuuauucug

SEQ ID NO: 2304511 - RNA, 19 nt, Artificial Sequence
  Description of Artificial Sequence: Synthetic oligonucleotide
  Antisense strand to SEQ ID NO: 2304510
cagaauaaaggcauuucau

SEQ ID NO: 2304512 - RNA, 19 nt, Artificial Sequence
  Description of Artificial Sequence: Synthetic oligonucleotide
  Sense strand starting at position 3957 of SEQ ID NO: 1884950
uuacaauggucaguaagua

SEQ ID NO: 2304513 - RNA, 19 nt, Artificial Sequence
  Description of Artificial Sequence: Synthetic oligonucleotide
  Antisense strand to SEQ ID NO: 2304512
uacuuacugaccauuguaa

SEQ ID NO: 2304514 - RNA, 19 nt, Artificial Sequence
  Description of Artificial Sequence: Synthetic oligonucleotide
  Sense strand starting at position 3967 of SEQ ID NO: 1884950
caguaaguagcauaaguau

SEQ ID NO: 2304515 - RNA, 19 nt, Artificial Sequence
  Description of Artificial Sequence: Synthetic oligonucleotide
  Antisense strand to SEQ ID NO: 2304514
auacuuaugcuacuuacug

SEQ ID NO: 2304516 - RNA, 19 nt, Artificial Sequence
  Description of Artificial Sequence: Synthetic oligonucleotide
  Sense strand starting at position 3974 of SEQ ID NO: 1884950
uagcauaaguauuuggcua

SEQ ID NO: 2304517 - RNA, 19 nt, Artificial Sequence
  Description of Artificial Sequence: Synthetic oligonucleotide
  Antisense strand to SEQ ID NO: 2304516
uagccaaauacuuaugcua

SEQ ID NO: 2304518 - RNA, 19 nt, Artificial Sequence
  Description of Artificial Sequence: Synthetic oligonucleotide
  Sense strand starting at position 141 of SEQ ID NO: 1884951
auuaacucuuguguuugaa

SEQ ID NO: 2304519 - RNA, 19 nt, Artificial Sequence
  Description of Artificial Sequence: Synthetic oligonucleotide
  Antisense strand to SEQ ID NO: 2304518
uucaaacacaagaguuaau

SEQ ID NO: 2304520 - RNA, 19 nt, Artificial Sequence
  Description of Artificial Sequence: Synthetic oligonucleotide
  Sense strand starting at position 196 of SEQ ID NO: 1884951
acaagaguggauugccauu

SEQ ID NO: 2304521 - RNA, 19 nt, Artificial Sequence
  Description of Artificial Sequence: Synthetic oligonucleotide
  Antisense strand to SEQ ID NO: 2304520
aauggcaauccacucuugu

SEQ ID NO: 2304522 - RNA, 19 nt, Artificial Sequence
  Description of Artificial Sequence: Synthetic oligonucleotide
  Sense strand starting at position 308 of SEQ ID NO: 1884951
gucacauaccgauacauga

SEQ ID NO: 2304523 - RNA, 19 nt, Artificial Sequence
  Description of Artificial Sequence: Synthetic oligonucleotide
  Antisense strand to SEQ ID NO: 2304522
ucauguaucgguaugugac

SEQ ID NO: 2304524 - RNA, 19 nt, Artificial Sequence
  Description of Artificial Sequence: Synthetic oligonucleotide
  Sense strand starting at position 326 of SEQ ID NO: 1884951
agaaguuguuaccuugaua

SEQ ID NO: 2304525 - RNA, 19 nt, Artificial Sequence
  Description of Artificial Sequence: Synthetic oligonucleotide
  Antisense strand to SEQ ID NO: 2304524
uaucaagguaacaacuucu

SEQ ID NO: 2304526 - RNA, 19 nt, Artificial Sequence
  Description of Artificial Sequence: Synthetic oligonucleotide
  Sense strand starting at position 329 of SEQ ID NO: 1884951
aguuguuaccuugauaaca

SEQ ID NO: 2304527 - RNA, 19 nt, Artificial Sequence
  Description of Artificial Sequence: Synthetic oligonucleotide
  Antisense strand to SEQ ID NO: 2304526
uguuaucaagguaacaacu

SEQ ID NO: 2304528 - RNA, 19 nt, Artificial Sequence
  Description of Artificial Sequence: Synthetic oligonucleotide
  Sense strand starting at position 555 of SEQ ID NO: 1884951
agaaauuacugugucauuc

SEQ ID NO: 2304529 - RNA, 19 nt, Artificial Sequence
  Description of Artificial Sequence: Synthetic oligonucleotide
  Antisense strand to SEQ ID NO: 2304528
gaaugacacaguaauuucu

SEQ ID NO: 2304530 - RNA, 19 nt, Artificial Sequence
  Description of Artificial Sequence: Synthetic oligonucleotide
  Sense strand starting at position 559 of SEQ ID NO: 1884951
auuacugugucauuccaaa

SEQ ID NO: 2304531 - RNA, 19 nt, Artificial Sequence
  Description of Artificial Sequence: Synthetic oligonucleotide
  Antisense strand to SEQ ID NO: 2304530
uuuggaaugacacaguaau

SEQ ID NO: 2304532 - RNA, 19 nt, Artificial Sequence
  Description of Artificial Sequence: Synthetic oligonucleotide
  Sense strand starting at position 597 of SEQ ID NO: 1884951
caaagugcugcagagaguu

SEQ ID NO: 2304533 - RNA, 19 nt, Artificial Sequence
  Description of Artificial Sequence: Synthetic oligonucleotide
  Antisense strand to SEQ ID NO: 2304532
aacucucugcagcacuuug

SEQ ID NO: 2304534 - RNA, 19 nt, Artificial Sequence
  Description of Artificial Sequence: Synthetic oligonucleotide
  Sense strand starting at position 769 of SEQ ID NO: 1884951
uugcuugugcuagacagaa

SEQ ID NO: 2304535 - RNA, 19 nt, Artificial Sequence
  Description of Artificial Sequence: Synthetic oligonucleotide
  Antisense strand to SEQ ID NO: 2304534
uucugucuagcacaagcaa

SEQ ID NO: 2304536 - RNA, 19 nt, Artificial Sequence
  Description of Artificial Sequence: Synthetic oligonucleotide
  Sense strand starting at position 771 of SEQ ID NO: 1884951
gcuugugcuagacagaaua

SEQ ID NO: 2304537 - RNA, 19 nt, Artificial Sequence
  Description of Artificial Sequence: Synthetic oligonucleotide
  Antisense strand to SEQ ID NO: 2304536
uauucugucuagcacaagc

SEQ ID NO: 2304538 - RNA, 19 nt, Artificial Sequence
  Description of Artificial Sequence: Synthetic oligonucleotide
  Sense strand starting at position 802 of SEQ ID NO: 1884951
acaacauuucugcguugaa

SEQ ID NO: 2304539 - RNA, 19 nt, Artificial Sequence
  Description of Artificial Sequence: Synthetic oligonucleotide
  Antisense strand to SEQ ID NO: 2304538
uucaacgcagaaauguugu

SEQ ID NO: 2304540 - RNA, 19 nt, Artificial Sequence
  Description of Artificial Sequence: Synthetic oligonucleotide
  Sense strand starting at position 803 of SEQ ID NO: 1884951
caacauuucugcguugaau

SEQ ID NO: 2304541 - RNA, 19 nt, Artificial Sequence
  Description of Artificial Sequence: Synthetic oligonucleotide
  Antisense strand to SEQ ID NO: 2304540
auucaacgcagaaauguug

SEQ ID NO: 2304542 - RNA, 19 nt, Artificial Sequence
  Description of Artificial Sequence: Synthetic oligonucleotide
  Sense strand starting at position 805 of SEQ ID NO: 1884951
acauuucugcguugaauua

SEQ ID NO: 2304543 - RNA, 19 nt, Artificial Sequence
  Description of Artificial Sequence: Synthetic oligonucleotide
  Antisense strand to SEQ ID NO: 2304542
uaauucaacgcagaaaugu

SEQ ID NO: 2304544 - RNA, 19 nt, Artificial Sequence
  Description of Artificial Sequence: Synthetic oligonucleotide
  Sense strand starting at position 815 of SEQ ID NO: 1884951
guugaauuagaguaauccu

SEQ ID NO: 2304545 - RNA, 19 nt, Artificial Sequence
  Description of Artificial Sequence: Synthetic oligonucleotide
  Antisense strand to SEQ ID NO: 2304544
aggauuacucuaauucaac

SEQ ID NO: 2304546 - RNA, 19 nt, Artificial Sequence
  Description of Artificial Sequence: Synthetic oligonucleotide
  Sense strand starting at position 1992 of SEQ ID NO: 1884951
ugugguucccuagaugucu

SEQ ID NO: 2304547 - RNA, 19 nt, Artificial Sequence
  Description of Artificial Sequence: Synthetic oligonucleotide
  Antisense strand to SEQ ID NO: 2304546
agacaucuagggaaccaca

SEQ ID NO: 2304548 - RNA, 19 nt, Artificial Sequence
  Description of Artificial Sequence: Synthetic oligonucleotide
  Sense strand starting at position 1997 of SEQ ID NO: 1884951
uucccuagaugucucagaa

SEQ ID NO: 2304549 - RNA, 19 nt, Artificial Sequence
  Description of Artificial Sequence: Synthetic oligonucleotide
  Antisense strand to SEQ ID NO: 2304548
uucugagacaucuagggaa

SEQ ID NO: 2304550 - RNA, 19 nt, Artificial Sequence
  Description of Artificial Sequence: Synthetic oligonucleotide
  Sense strand starting at position 2010 of SEQ ID NO: 1884951
ucagaaucaguguguuuga

SEQ ID NO: 2304551 - RNA, 19 nt, Artificial Sequence
  Description of Artificial Sequence: Synthetic oligonucleotide
  Antisense strand to SEQ ID NO: 2304550
ucaaacacacugauucuga

SEQ ID NO: 2304552 - RNA, 19 nt, Artificial Sequence
  Description of Artificial Sequence: Synthetic oligonucleotide
  Sense strand starting at position 2011 of SEQ ID NO: 1884951
cagaaucaguguguuugaa

SEQ ID NO: 2304553 - RNA, 19 nt, Artificial Sequence
  Description of Artificial Sequence: Synthetic oligonucleotide
  Antisense strand to SEQ ID NO: 2304552
uucaaacacacugauucug

SEQ ID NO: 2304554 - RNA, 19 nt, Artificial Sequence
  Description of Artificial Sequence: Synthetic oligonucleotide
  Sense strand starting at position 2023 of SEQ ID NO: 1884951
guuugaaccuagcucauga

SEQ ID NO: 2304555 - RNA, 19 nt, Artificial Sequence
  Description of Artificial Sequence: Synthetic oligonucleotide
  Antisense strand to SEQ ID NO: 2304554
ucaugagcuagguucaaac

SEQ ID NO: 2304556 - RNA, 19 nt, Artificial Sequence
  Description of Artificial Sequence: Synthetic oligonucleotide
  Sense strand starting at position 2072 of SEQ ID NO: 1884951
cugagaucuugucuaugua

SEQ ID NO: 2304557 - RNA, 19 nt, Artificial Sequence
  Description of Artificial Sequence: Synthetic oligonucleotide
  Antisense strand to SEQ ID NO: 2304556
uacauagacaagaucucag

SEQ ID NO: 2304558 - RNA, 19 nt, Artificial Sequence
  Description of Artificial Sequence: Synthetic oligonucleotide
  Sense strand starting at position 2073 of SEQ ID NO: 1884951
ugagaucuugucuauguaa

SEQ ID NO: 2304559 - RNA, 19 nt, Artificial Sequence
  Description of Artificial Sequence: Synthetic oligonucleotide
  Antisense strand to SEQ ID NO: 2304558
uuacauagacaagaucuca

SEQ ID NO: 2304560 - RNA, 19 nt, Artificial Sequence
  Description of Artificial Sequence: Synthetic oligonucleotide
  Sense strand starting at position 2075 of SEQ ID NO: 1884951
agaucuugucuauguaaua

SEQ ID NO: 2304561 - RNA, 19 nt, Artificial Sequence
  Description of Artificial Sequence: Synthetic oligonucleotide
  Antisense strand to SEQ ID NO: 2304560
uauuacauagacaagaucu

SEQ ID NO: 2304562 - RNA, 19 nt, Artificial Sequence
  Description of Artificial Sequence: Synthetic oligonucleotide
  Sense strand starting at position 2076 of SEQ ID NO: 1884951
gaucuugucuauguaauag

SEQ ID NO: 2304563 - RNA, 19 nt, Artificial Sequence
  Description of Artificial Sequence: Synthetic oligonucleotide
  Antisense strand to SEQ ID NO: 2304562
cuauuacauagacaagauc

SEQ ID NO: 2304564 - RNA, 19 nt, Artificial Sequence
  Description of Artificial Sequence: Synthetic oligonucleotide
  Sense strand starting at position 2086 of SEQ ID NO: 1884951
auguaauaguggccaagau

SEQ ID NO: 2304565 - RNA, 19 nt, Artificial Sequence
  Description of Artificial Sequence: Synthetic oligonucleotide
  Antisense strand to SEQ ID NO: 2304564
aucuuggccacuauuacau

SEQ ID NO: 2304566 - RNA, 19 nt, Artificial Sequence
  Description of Artificial Sequence: Synthetic oligonucleotide
  Sense strand starting at position 2087 of SEQ ID NO: 1884951
uguaauaguggccaagauu

SEQ ID NO: 2304567 - RNA, 19 nt, Artificial Sequence
  Description of Artificial Sequence: Synthetic oligonucleotide
  Antisense strand to SEQ ID NO: 2304566
aaucuuggccacuauuaca

SEQ ID NO: 2304568 - RNA, 19 nt, Artificial Sequence
  Description of Artificial Sequence: Synthetic oligonucleotide
  Sense strand starting at position 2099 of SEQ ID NO: 1884951
caagauuuacugugcuugu

SEQ ID NO: 2304569 - RNA, 19 nt, Artificial Sequence
  Description of Artificial Sequence: Synthetic oligonucleotide
  Antisense strand to SEQ ID NO: 2304568
acaagcacaguaaaucuug

SEQ ID NO: 2304570 - RNA, 19 nt, Artificial Sequence
  Description of Artificial Sequence: Synthetic oligonucleotide
  Sense strand starting at position 2102 of SEQ ID NO: 1884951
gauuuacugugcuugugau

SEQ ID NO: 2304571 - RNA, 19 nt, Artificial Sequence
  Description of Artificial Sequence: Synthetic oligonucleotide
  Antisense strand to SEQ ID NO: 2304570
aucacaagcacaguaaauc

SEQ ID NO: 2304572 - RNA, 19 nt, Artificial Sequence
  Description of Artificial Sequence: Synthetic oligonucleotide
  Sense strand starting at position 2103 of SEQ ID NO: 1884951
auuuacugugcuugugaua

SEQ ID NO: 2304573 - RNA, 19 nt, Artificial Sequence
  Description of Artificial Sequence: Synthetic oligonucleotide
  Antisense strand to SEQ ID NO: 2304572
uaucacaagcacaguaaau

SEQ ID NO: 2304574 - RNA, 19 nt, Artificial Sequence
  Description of Artificial Sequence: Synthetic oligonucleotide
  Sense strand starting at position 2208 of SEQ ID NO: 1884951
ucucuuauacucugaggca

SEQ ID NO: 2304575 - RNA, 19 nt, Artificial Sequence
  Description of Artificial Sequence: Synthetic oligonucleotide
  Antisense strand to SEQ ID NO: 2304574
ugccucagaguauaagaga

SEQ ID NO: 2304576 - RNA, 19 nt, Artificial Sequence
  Description of Artificial Sequence: Synthetic oligonucleotide
  Sense strand starting at position 2335 of SEQ ID NO: 1884951
ggcugcuugcuguuguaca

SEQ ID NO: 2304577 - RNA, 19 nt, Artificial Sequence
  Description of Artificial Sequence: Synthetic oligonucleotide
  Antisense strand to SEQ ID NO: 2304576
uguacaacagcaagcagcc

SEQ ID NO: 2304578 - RNA, 19 nt, Artificial Sequence
  Description of Artificial Sequence: Synthetic oligonucleotide
  Sense strand starting at position 2904 of SEQ ID NO: 1884951
uuuggauacuugucuccuu

SEQ ID NO: 2304579 - RNA, 19 nt, Artificial Sequence
  Description of Artificial Sequence: Synthetic oligonucleotide
  Antisense strand to SEQ ID NO: 2304578
aaggagacaaguauccaaa

SEQ ID NO: 2304580 - RNA, 19 nt, Artificial Sequence
  Description of Artificial Sequence: Synthetic oligonucleotide
  Sense strand starting at position 3037 of SEQ ID NO: 1884951
gugaguucuuacucuuagg

SEQ ID NO: 2304581 - RNA, 19 nt, Artificial Sequence
  Description of Artificial Sequence: Synthetic oligonucleotide
  Antisense strand to SEQ ID NO: 2304580
ccuaagaguaagaacucac

SEQ ID NO: 2304582 - RNA, 19 nt, Artificial Sequence
  Description of Artificial Sequence: Synthetic oligonucleotide
  Sense strand starting at position 3285 of SEQ ID NO: 1884951
caggucuuucuugauagca

SEQ ID NO: 2304583 - RNA, 19 nt, Artificial Sequence
  Description of Artificial Sequence: Synthetic oligonucleotide
  Antisense strand to SEQ ID NO: 2304582
ugcuaucaagaaagaccug

SEQ ID NO: 2304584 - RNA, 19 nt, Artificial Sequence
  Description of Artificial Sequence: Synthetic oligonucleotide
  Sense strand starting at position 3472 of SEQ ID NO: 1884951
ucccaagcacguuaaauau

SEQ ID NO: 2304585 - RNA, 19 nt, Artificial Sequence
  Description of Artificial Sequence: Synthetic oligonucleotide
  Antisense strand to SEQ ID NO: 2304584
auauuuaacgugcuuggga

SEQ ID NO: 2304586 - RNA, 19 nt, Artificial Sequence
  Description of Artificial Sequence: Synthetic oligonucleotide
  Sense strand starting at position 3618 of SEQ ID NO: 1884951
gggcucugacuauaagucu

SEQ ID NO: 2304587 - RNA, 19 nt, Artificial Sequence
  Description of Artificial Sequence: Synthetic oligonucleotide
  Antisense strand to SEQ ID NO: 2304586
agacuuauagucagagccc

SEQ ID NO: 2304588 - RNA, 19 nt, Artificial Sequence
  Description of Artificial Sequence: Synthetic oligonucleotide
  Sense strand starting at position 3625 of SEQ ID NO: 1884951
gacuauaagucuguugcaa

SEQ ID NO: 2304589 - RNA, 19 nt, Artificial Sequence
  Description of Artificial Sequence: Synthetic oligonucleotide
  Antisense strand to SEQ ID NO: 2304588
uugcaacagacuuauaguc

SEQ ID NO: 2304590 - RNA, 19 nt, Artificial Sequence
  Description of Artificial Sequence: Synthetic oligonucleotide
  Sense strand starting at position 3834 of SEQ ID NO: 1884951
gggcuuaaguacccugaca

SEQ ID NO: 2304591 - RNA, 19 nt, Artificial Sequence
  Description of Artificial Sequence: Synthetic oligonucleotide
  Antisense strand to SEQ ID NO: 2304590
ugucaggguacuuaagccc

SEQ ID NO: 2304592 - RNA, 19 nt, Artificial Sequence
  Description of Artificial Sequence: Synthetic oligonucleotide
  Sense strand starting at position 3836 of SEQ ID NO: 1884951
gcuuaaguacccugacauu

SEQ ID NO: 2304593 - RNA, 19 nt, Artificial Sequence
  Description of Artificial Sequence: Synthetic oligonucleotide
  Antisense strand to SEQ ID NO: 2304592
aaugucaggguacuuaagc

SEQ ID NO: 2304594 - RNA, 19 nt, Artificial Sequence
  Description of Artificial Sequence: Synthetic oligonucleotide
  Sense strand starting at position 3933 of SEQ ID NO: 1884951
aaauguagucugcagaggu

SEQ ID NO: 2304595 - RNA, 19 nt, Artificial Sequence
  Description of Artificial Sequence: Synthetic oligonucleotide
  Antisense strand to SEQ ID NO: 2304594
accucugcagacuacauuu

SEQ ID NO: 2304596 - RNA, 19 nt, Artificial Sequence
  Description of Artificial Sequence: Synthetic oligonucleotide
  Sense strand starting at position 3966 of SEQ ID NO: 1884951
ggaacaaacugagagaaau

SEQ ID NO: 2304597 - RNA, 19 nt, Artificial Sequence
  Description of Artificial Sequence: Synthetic oligonucleotide
  Antisense strand to SEQ ID NO: 2304596
auuucucucaguuuguucc

SEQ ID NO: 2304598 - RNA, 19 nt, Artificial Sequence
  Description of Artificial Sequence: Synthetic oligonucleotide
  Sense strand starting at position 202 of SEQ ID NO: 1884952
ggccaaagagguugaguga

SEQ ID NO: 2304599 - RNA, 19 nt, Artificial Sequence
  Description of Artificial Sequence: Synthetic oligonucleotide
  Antisense strand to SEQ ID NO: 2304598
ucacucaaccucuuuggcc

SEQ ID NO: 2304600 - RNA, 19 nt, Artificial Sequence
  Description of Artificial Sequence: Synthetic oligonucleotide
  Sense strand starting at position 205 of SEQ ID NO: 1884952
caaagagguugagugacua

SEQ ID NO: 2304601 - RNA, 19 nt, Artificial Sequence
  Description of Artificial Sequence: Synthetic oligonucleotide
  Antisense strand to SEQ ID NO: 2304600
uagucacucaaccucuuug

SEQ ID NO: 2304602 - RNA, 19 nt, Artificial Sequence
  Description of Artificial Sequence: Synthetic oligonucleotide
  Sense strand starting at position 215 of SEQ ID NO: 1884952
gagugacuaacacgagguu

SEQ ID NO: 2304603 - RNA, 19 nt, Artificial Sequence
  Description of Artificial Sequence: Synthetic oligonucleotide
  Antisense strand to SEQ ID NO: 2304602
aaccucguguuagucacuc

SEQ ID NO: 2304604 - RNA, 19 nt, Artificial Sequence
  Description of Artificial Sequence: Synthetic oligonucleotide
  Sense strand starting at position 218 of SEQ ID NO: 1884952
ugacuaacacgagguuaca

SEQ ID NO: 2304605 - RNA, 19 nt, Artificial Sequence
  Description of Artificial Sequence: Synthetic oligonucleotide
  Antisense strand to SEQ ID NO: 2304604
uguaaccucguguuaguca

SEQ ID NO: 2304606 - RNA, 19 nt, Artificial Sequence
  Description of Artificial Sequence: Synthetic oligonucleotide
  Sense strand starting at position 305 of SEQ ID NO: 1884952
ggguuucagcgacaacacu

SEQ ID NO: 2304607 - RNA, 19 nt, Artificial Sequence
  Description of Artificial Sequence: Synthetic oligonucleotide
  Antisense strand to SEQ ID NO: 2304606
aguguugucgcugaaaccc

SEQ ID NO: 2304608 - RNA, 19 nt, Artificial Sequence
  Description of Artificial Sequence: Synthetic oligonucleotide
  Sense strand starting at position 562 of SEQ ID NO: 1884952
guaagaagguucucagguu

SEQ ID NO: 2304609 - RNA, 19 nt, Artificial Sequence
  Description of Artificial Sequence: Synthetic oligonucleotide
  Antisense strand to SEQ ID NO: 2304608
aaccugagaaccuucuuac

SEQ ID NO: 2304610 - RNA, 19 nt, Artificial Sequence
  Description of Artificial Sequence: Synthetic oligonucleotide
  Sense strand starting at position 1188 of SEQ ID NO: 1884952
cccucugcacguuagaaua

SEQ ID NO: 2304611 - RNA, 19 nt, Artificial Sequence
  Description of Artificial Sequence: Synthetic oligonucleotide
  Antisense strand to SEQ ID NO: 2304610
uauucuaacgugcagaggg

SEQ ID NO: 2304612 - RNA, 19 nt, Artificial Sequence
  Description of Artificial Sequence: Synthetic oligonucleotide
  Sense strand starting at position 1333 of SEQ ID NO: 1884952
ccgcuaugugcauacauuu

SEQ ID NO: 2304613 - RNA, 19 nt, Artificial Sequence
  Description of Artificial Sequence: Synthetic oligonucleotide
  Antisense strand to SEQ ID NO: 2304612
aaauguaugcacauagcgg

SEQ ID NO: 2304614 - RNA, 19 nt, Artificial Sequence
  Description of Artificial Sequence: Synthetic oligonucleotide
  Sense strand starting at position 1366 of SEQ ID NO: 1884952
gauggaaagugccuuaaag

SEQ ID NO: 2304615 - RNA, 19 nt, Artificial Sequence
  Description of Artificial Sequence: Synthetic oligonucleotide
  Antisense strand to SEQ ID NO: 2304614
cuuuaaggcacuuuccauc

SEQ ID NO: 2304616 - RNA, 19 nt, Artificial Sequence
  Description of Artificial Sequence: Synthetic oligonucleotide
  Sense strand starting at position 1374 of SEQ ID NO: 1884952
gugccuuaaagauaugggu

SEQ ID NO: 2304617 - RNA, 19 nt, Artificial Sequence
  Description of Artificial Sequence: Synthetic oligonucleotide
  Antisense strand to SEQ ID NO: 2304616
acccauaucuuuaaggcac

SEQ ID NO: 2304618 - RNA, 19 nt, Artificial Sequence
  Description of Artificial Sequence: Synthetic oligonucleotide
  Sense strand starting at position 1381 of SEQ ID NO: 1884952
aaagauauggguuguguau

SEQ ID NO: 2304619 - RNA, 19 nt, Artificial Sequence
  Description of Artificial Sequence: Synthetic oligonucleotide
  Antisense strand to SEQ ID NO: 2304618
auacacaacccauaucuuu

SEQ ID NO: 2304620 - RNA, 19 nt, Artificial Sequence
  Description of Artificial Sequence: Synthetic oligonucleotide
  Sense strand starting at position 1468 of SEQ ID NO: 1884952
agaucaaucugggugccaa

SEQ ID NO: 2304621 - RNA, 19 nt, Artificial Sequence
  Description of Artificial Sequence: Synthetic oligonucleotide
  Antisense strand to SEQ ID NO: 2304620
uuggcacccagauugaucu

SEQ ID NO: 2304622 - RNA, 19 nt, Artificial Sequence
  Description of Artificial Sequence: Synthetic oligonucleotide
  Sense strand starting at position 1469 of SEQ ID NO: 1884952
gaucaaucugggugccaau

SEQ ID NO: 2304623 - RNA, 19 nt, Artificial Sequence
  Description of Artificial Sequence: Synthetic oligonucleotide
  Antisense strand to SEQ ID NO: 2304622
auuggcacccagauugauc

SEQ ID NO: 2304624 - RNA, 19 nt, Artificial Sequence
  Description of Artificial Sequence: Synthetic oligonucleotide
  Sense strand starting at position 1502 of SEQ ID NO: 1884952
uuacuagaugauugaccuu

SEQ ID NO: 2304625 - RNA, 19 nt, Artificial Sequence
  Description of Artificial Sequence: Synthetic oligonucleotide
  Antisense strand to SEQ ID NO: 2304624
aaggucaaucaucuaguaa

SEQ ID NO: 2304626 - RNA, 19 nt, Artificial Sequence
  Description of Artificial Sequence: Synthetic oligonucleotide
  Sense strand starting at position 1511 of SEQ ID NO: 1884952
gauugaccuuagguaaauc

SEQ ID NO: 2304627 - RNA, 19 nt, Artificial Sequence
  Description of Artificial Sequence: Synthetic oligonucleotide
  Antisense strand to SEQ ID NO: 2304626
gauuuaccuaaggucaauc

SEQ ID NO: 2304628 - RNA, 19 nt, Artificial Sequence
  Description of Artificial Sequence: Synthetic oligonucleotide
  Sense strand starting at position 1545 of SEQ ID NO: 1884952
ucaucuuuacaauggguau

SEQ ID NO: 2304629 - RNA, 19 nt, Artificial Sequence
  Description of Artificial Sequence: Synthetic oligonucleotide
  Antisense strand to SEQ ID NO: 2304628
auacccauuguaaagauga

SEQ ID NO: 2304630 - RNA, 19 nt, Artificial Sequence
  Description of Artificial Sequence: Synthetic oligonucleotide
  Sense strand starting at position 1552 of SEQ ID NO: 1884952
uacaauggguauccaugaa

SEQ ID NO: 2304631 - RNA, 19 nt, Artificial Sequence
  Description of Artificial Sequence: Synthetic oligonucleotide
  Antisense strand to SEQ ID NO: 2304630
uucauggauacccauugua

SEQ ID NO: 2304632 - RNA, 19 nt, Artificial Sequence
  Description of Artificial Sequence: Synthetic oligonucleotide
  Sense strand starting at position 1601 of SEQ ID NO: 1884952
gggccaacuccaugucaaa

SEQ ID NO: 2304633 - RNA, 19 nt, Artificial Sequence
  Description of Artificial Sequence: Synthetic oligonucleotide
  Antisense strand to SEQ ID NO: 2304632
uuugacauggaguuggccc

SEQ ID NO: 2304634 - RNA, 19 nt, Artificial Sequence
  Description of Artificial Sequence: Synthetic oligonucleotide
  Sense strand starting at position 1618 of SEQ ID NO: 1884952
aacacugauguguguacaa

SEQ ID NO: 2304635 - RNA, 19 nt, Artificial Sequence
  Description of Artificial Sequence: Synthetic oligonucleotide
  Antisense strand to SEQ ID NO: 2304634
uuguacacacaucaguguu

SEQ ID NO: 2304636 - RNA, 19 nt, Artificial Sequence
  Description of Artificial Sequence: Synthetic oligonucleotide
  Sense strand starting at position 1620 of SEQ ID NO: 1884952
cacugauguguguacaaca

SEQ ID NO: 2304637 - RNA, 19 nt, Artificial Sequence
  Description of Artificial Sequence: Synthetic oligonucleotide
  Antisense strand to SEQ ID NO: 2304636
uguuguacacacaucagug

SEQ ID NO: 2304638 - RNA, 19 nt, Artificial Sequence
  Description of Artificial Sequence: Synthetic oligonucleotide
  Sense strand starting at position 1673 of SEQ ID NO: 1884952
gguuacuucuuaguggaga

SEQ ID NO: 2304639 - RNA, 19 nt, Artificial Sequence
  Description of Artificial Sequence: Synthetic oligonucleotide
  Antisense strand to SEQ ID NO: 2304638
ucuccacuaagaaguaacc

SEQ ID NO: 2304640 - RNA, 19 nt, Artificial Sequence
  Description of Artificial Sequence: Synthetic oligonucleotide
  Sense strand starting at position 1678 of SEQ ID NO: 1884952
cuucuuaguggagacuauu

SEQ ID NO: 2304641 - RNA, 19 nt, Artificial Sequence
  Description of Artificial Sequence: Synthetic oligonucleotide
  Antisense strand to SEQ ID NO: 2304640
aauagucuccacuaagaag

SEQ ID NO: 2304642 - RNA, 19 nt, Artificial Sequence
  Description of Artificial Sequence: Synthetic oligonucleotide
  Sense strand starting at position 1706 of SEQ ID NO: 1884952
cccagagagugauugugaa

SEQ ID NO: 2304643 - RNA, 19 nt, Artificial Sequence
  Description of Artificial Sequence: Synthetic oligonucleotide
  Antisense strand to SEQ ID NO: 2304642
uucacaaucacucucuggg

SEQ ID NO: 2304644 - RNA, 19 nt, Artificial Sequence
  Description of Artificial Sequence: Synthetic oligonucleotide
  Sense strand starting at position 1927 of SEQ ID NO: 1884952
gaacuuauagucgaaugca

SEQ ID NO: 2304645 - RNA, 19 nt, Artificial Sequence
  Description of Artificial Sequence: Synthetic oligonucleotide
  Antisense strand to SEQ ID NO: 2304644
ugcauucgacuauaaguuc

SEQ ID NO: 2304646 - RNA, 19 nt, Artificial Sequence
  Description of Artificial Sequence: Synthetic oligonucleotide
  Sense strand starting at position 1943 of SEQ ID NO: 1884952
gcaccuaccgaaugucaaa

SEQ ID NO: 2304647 - RNA, 19 nt, Artificial Sequence
  Description of Artificial Sequence: Synthetic oligonucleotide
  Antisense strand to SEQ ID NO: 2304646
uuugacauucgguaggugc

SEQ ID NO: 2304648 - RNA, 19 nt, Artificial Sequence
  Description of Artificial Sequence: Synthetic oligonucleotide
  Sense strand starting at position 2281 of SEQ ID NO: 1884952
accagaauggugugcaaau

SEQ ID NO: 2304649 - RNA, 19 nt, Artificial Sequence
  Description of Artificial Sequence: Synthetic oligonucleotide
  Antisense strand to SEQ ID NO: 2304648
auuugcacaccauucuggu

SEQ ID NO: 2304650 - RNA, 19 nt, Artificial Sequence
  Description of Artificial Sequence: Synthetic oligonucleotide
  Sense strand starting at position 2282 of SEQ ID NO: 1884952
ccagaauggugugcaaaug

SEQ ID NO: 2304651 - RNA, 19 nt, Artificial Sequence
  Description of Artificial Sequence: Synthetic oligonucleotide
  Antisense strand to SEQ ID NO: 2304650
cauuugcacaccauucugg

SEQ ID NO: 2304652 - RNA, 19 nt, Artificial Sequence
  Description of Artificial Sequence: Synthetic oligonucleotide
  Sense strand starting at position 2283 of SEQ ID NO: 1884952
cagaauggugugcaaauga

SEQ ID NO: 2304653 - RNA, 19 nt, Artificial Sequence
  Description of Artificial Sequence: Synthetic oligonucleotide
  Antisense strand to SEQ ID NO: 2304652
ucauuugcacaccauucug

SEQ ID NO: 2304654 - RNA, 19 nt, Artificial Sequence
  Description of Artificial Sequence: Synthetic oligonucleotide
  Sense strand starting at position 2419 of SEQ ID NO: 1884952
acaggaggcaacugucuaa

SEQ ID NO: 2304655 - RNA, 19 nt, Artificial Sequence
  Description of Artificial Sequence: Synthetic oligonucleotide
  Antisense strand to SEQ ID NO: 2304654
uuagacaguugccuccugu

SEQ ID NO: 2304656 - RNA, 19 nt, Artificial Sequence
  Description of Artificial Sequence: Synthetic oligonucleotide
  Sense strand starting at position 2474 of SEQ ID NO: 1884952
acccuuggccgagacuaua

SEQ ID NO: 2304657 - RNA, 19 nt, Artificial Sequence
  Description of Artificial Sequence: Synthetic oligonucleotide
  Antisense strand to SEQ ID NO: 2304656
uauagucucggccaagggu

SEQ ID NO: 2304658 - RNA, 19 nt, Artificial Sequence
  Description of Artificial Sequence: Synthetic oligonucleotide
  Sense strand starting at position 2533 of SEQ ID NO: 1884952
guaagccuccaguaggaga

SEQ ID NO: 2304659 - RNA, 19 nt, Artificial Sequence
  Description of Artificial Sequence: Synthetic oligonucleotide
  Antisense strand to SEQ ID NO: 2304658
ucuccuacuggaggcuuac

SEQ ID NO: 2304660 - RNA, 19 nt, Artificial Sequence
  Description of Artificial Sequence: Synthetic oligonucleotide
  Sense strand starting at position 2985 of SEQ ID NO: 1884952
gagucaugucgugagcuag

SEQ ID NO: 2304661 - RNA, 19 nt, Artificial Sequence
  Description of Artificial Sequence: Synthetic oligonucleotide
  Antisense strand to SEQ ID NO: 2304660
cuagcucacgacaugacuc

SEQ ID NO: 2304662 - RNA, 19 nt, Artificial Sequence
  Description of Artificial Sequence: Synthetic oligonucleotide
  Sense strand starting at position 3068 of SEQ ID NO: 1884952
gcaggucuuaaguaaauag

SEQ ID NO: 2304663 - RNA, 19 nt, Artificial Sequence
  Description of Artificial Sequence: Synthetic oligonucleotide
  Antisense strand to SEQ ID NO: 2304662
cuauuuacuuaagaccugc

SEQ ID NO: 2304664 - RNA, 19 nt, Artificial Sequence
  Description of Artificial Sequence: Synthetic oligonucleotide
  Sense strand starting at position 3141 of SEQ ID NO: 1884952
agcugccuuguggaagaau

SEQ ID NO: 2304665 - RNA, 19 nt, Artificial Sequence
  Description of Artificial Sequence: Synthetic oligonucleotide
  Antisense strand to SEQ ID NO: 2304664
auucuuccacaaggcagcu

SEQ ID NO: 2304666 - RNA, 19 nt, Artificial Sequence
  Description of Artificial Sequence: Synthetic oligonucleotide
  Sense strand starting at position 3144 of SEQ ID NO: 1884952
ugccuuguggaagaauaac

SEQ ID NO: 2304667 - RNA, 19 nt, Artificial Sequence
  Description of Artificial Sequence: Synthetic oligonucleotide
  Antisense strand to SEQ ID NO: 2304666
guuauucuuccacaaggca

SEQ ID NO: 2304668 - RNA, 19 nt, Artificial Sequence
  Description of Artificial Sequence: Synthetic oligonucleotide
  Sense strand starting at position 3275 of SEQ ID NO: 1884952
gugcaaaggcuguaagaug

SEQ ID NO: 2304669 - RNA, 19 nt, Artificial Sequence
  Description of Artificial Sequence: Synthetic oligonucleotide
  Antisense strand to SEQ ID NO: 2304668
caucuuacagccuuugcac

SEQ ID NO: 2304670 - RNA, 19 nt, Artificial Sequence
  Description of Artificial Sequence: Synthetic oligonucleotide
  Sense strand starting at position 3825 of SEQ ID NO: 1884952
gcuuguguugggcauugaa

SEQ ID NO: 2304671 - RNA, 19 nt, Artificial Sequence
  Description of Artificial Sequence: Synthetic oligonucleotide
  Antisense strand to SEQ ID NO: 2304670
uucaaugcccaacacaagc

SEQ ID NO: 2304672 - RNA, 19 nt, Artificial Sequence
  Description of Artificial Sequence: Synthetic oligonucleotide
  Sense strand starting at position 3834 of SEQ ID NO: 1884952
gggcauugaagguggauaa

SEQ ID NO: 2304673 - RNA, 19 nt, Artificial Sequence
  Description of Artificial Sequence: Synthetic oligonucleotide
  Antisense strand to SEQ ID NO: 2304672
uuauccaccuucaaugccc

SEQ ID NO: 2304674 - RNA, 19 nt, Artificial Sequence
  Description of Artificial Sequence: Synthetic oligonucleotide
  Sense strand starting at position 3835 of SEQ ID NO: 1884952
ggcauugaagguggauaaa

SEQ ID NO: 2304675 - RNA, 19 nt, Artificial Sequence
  Description of Artificial Sequence: Synthetic oligonucleotide
  Antisense strand to SEQ ID NO: 2304674
uuuauccaccuucaaugcc

SEQ ID NO: 2304676 - RNA, 19 nt, Artificial Sequence
  Description of Artificial Sequence: Synthetic oligonucleotide
  Sense strand starting at position 3974 of SEQ ID NO: 1884952
ggcccauuccuggaggguu

SEQ ID NO: 2304677 - RNA, 19 nt, Artificial Sequence
  Description of Artificial Sequence: Synthetic oligonucleotide
  Antisense strand to SEQ ID NO: 2304676
aacccuccaggaaugggcc

SEQ ID NO: 2304678 - RNA, 19 nt, Artificial Sequence
  Description of Artificial Sequence: Synthetic oligonucleotide
  Sense strand starting at position 58 of SEQ ID NO: 1884953
gguaucugauucuaccuga

SEQ ID NO: 2304679 - RNA, 19 nt, Artificial Sequence
  Description of Artificial Sequence: Synthetic oligonucleotide
  Antisense strand to SEQ ID NO: 2304678
ucagguagaaucagauacc

SEQ ID NO: 2304680 - RNA, 19 nt, Artificial Sequence
  Description of Artificial Sequence: Synthetic oligonucleotide
  Sense strand starting at position 268 of SEQ ID NO: 1884953
gcaagacagcguuugucuu

SEQ ID NO: 2304681 - RNA, 19 nt, Artificial Sequence
  Description of Artificial Sequence: Synthetic oligonucleotide
  Antisense strand to SEQ ID NO: 2304680
aagacaaacgcugucuugc

SEQ ID NO: 2304682 - RNA, 19 nt, Artificial Sequence
  Description of Artificial Sequence: Synthetic oligonucleotide
  Sense strand starting at position 484 of SEQ ID NO: 1884953
ugggccuuuccagguauaa

SEQ ID NO: 2304683 - RNA, 19 nt, Artificial Sequence
  Description of Artificial Sequence: Synthetic oligonucleotide
  Antisense strand to SEQ ID NO: 2304682
uuauaccuggaaaggccca

SEQ ID NO: 2304684 - RNA, 19 nt, Artificial Sequence
  Description of Artificial Sequence: Synthetic oligonucleotide
  Sense strand starting at position 486 of SEQ ID NO: 1884953
ggccuuuccagguauaagc

SEQ ID NO: 2304685 - RNA, 19 nt, Artificial Sequence
  Description of Artificial Sequence: Synthetic oligonucleotide
  Antisense strand to SEQ ID NO: 2304684
gcuuauaccuggaaaggcc

SEQ ID NO: 2304686 - RNA, 19 nt, Artificial Sequence
  Description of Artificial Sequence: Synthetic oligonucleotide
  Sense strand starting at position 493 of SEQ ID NO: 1884953
ccagguauaagcuguggau

SEQ ID NO: 2304687 - RNA, 19 nt, Artificial Sequence
  Description of Artificial Sequence: Synthetic oligonucleotide
  Antisense strand to SEQ ID NO: 2304686
auccacagcuuauaccugg

SEQ ID NO: 2304688 - RNA, 19 nt, Artificial Sequence
  Description of Artificial Sequence: Synthetic oligonucleotide
  Sense strand starting at position 495 of SEQ ID NO: 1884953
agguauaagcuguggauag

SEQ ID NO: 2304689 - RNA, 19 nt, Artificial Sequence
  Description of Artificial Sequence: Synthetic oligonucleotide
  Antisense strand to SEQ ID NO: 2304688
cuauccacagcuuauaccu

SEQ ID NO: 2304690 - RNA, 19 nt, Artificial Sequence
  Description of Artificial Sequence: Synthetic oligonucleotide
  Sense strand starting at position 646 of SEQ ID NO: 1884953
gggucucccggugaaagaa

SEQ ID NO: 2304691 - RNA, 19 nt, Artificial Sequence
  Description of Artificial Sequence: Synthetic oligonucleotide
  Antisense strand to SEQ ID NO: 2304690
uucuuucaccgggagaccc

SEQ ID NO: 2304692 - RNA, 19 nt, Artificial Sequence
  Description of Artificial Sequence: Synthetic oligonucleotide
  Sense strand starting at position 658 of SEQ ID NO: 1884953
gaaagaagccaguguccau

SEQ ID NO: 2304693 - RNA, 19 nt, Artificial Sequence
  Description of Artificial Sequence: Synthetic oligonucleotide
  Antisense strand to SEQ ID NO: 2304692
auggacacuggcuucuuuc

SEQ ID NO: 2304694 - RNA, 19 nt, Artificial Sequence
  Description of Artificial Sequence: Synthetic oligonucleotide
  Sense strand starting at position 693 of SEQ ID NO: 1884953
ccugcuuggcucuauauau

SEQ ID NO: 2304695 - RNA, 19 nt, Artificial Sequence
  Description of Artificial Sequence: Synthetic oligonucleotide
  Antisense strand to SEQ ID NO: 2304694
auauauagagccaagcagg

SEQ ID NO: 2304696 - RNA, 19 nt, Artificial Sequence
  Description of Artificial Sequence: Synthetic oligonucleotide
  Sense strand starting at position 719 of SEQ ID NO: 1884953
gcccuacagcuggaugaau

SEQ ID NO: 2304697 - RNA, 19 nt, Artificial Sequence
  Description of Artificial Sequence: Synthetic oligonucleotide
  Antisense strand to SEQ ID NO: 2304696
auucauccagcuguagggc

SEQ ID NO: 2304698 - RNA, 19 nt, Artificial Sequence
  Description of Artificial Sequence: Synthetic oligonucleotide
  Sense strand starting at position 1110 of SEQ ID NO: 1884953
aacggagugcuguggguau

SEQ ID NO: 2304699 - RNA, 19 nt, Artificial Sequence
  Description of Artificial Sequence: Synthetic oligonucleotide
  Antisense strand to SEQ ID NO: 2304698
auacccacagcacuccguu

SEQ ID NO: 2304700 - RNA, 19 nt, Artificial Sequence
  Description of Artificial Sequence: Synthetic oligonucleotide
  Sense strand starting at position 1121 of SEQ ID NO: 1884953
guggguauugcucauccua

SEQ ID NO: 2304701 - RNA, 19 nt, Artificial Sequence
  Description of Artificial Sequence: Synthetic oligonucleotide
  Antisense strand to SEQ ID NO: 2304700
uaggaugagcaauacccac

SEQ ID NO: 2304702 - RNA, 19 nt, Artificial Sequence
  Description of Artificial Sequence: Synthetic oligonucleotide
  Sense strand starting at position 1123 of SEQ ID NO: 1884953
ggguauugcucauccuaug

SEQ ID NO: 2304703 - RNA, 19 nt, Artificial Sequence
  Description of Artificial Sequence: Synthetic oligonucleotide
  Antisense strand to SEQ ID NO: 2304702
cauaggaugagcaauaccc

SEQ ID NO: 2304704 - RNA, 19 nt, Artificial Sequence
  Description of Artificial Sequence: Synthetic oligonucleotide
  Sense strand starting at position 1128 of SEQ ID NO: 1884953
uugcucauccuaugaggaa

SEQ ID NO: 2304705 - RNA, 19 nt, Artificial Sequence
  Description of Artificial Sequence: Synthetic oligonucleotide
  Antisense strand to SEQ ID NO: 2304704
uuccucauaggaugagcaa

SEQ ID NO: 2304706 - RNA, 19 nt, Artificial Sequence
  Description of Artificial Sequence: Synthetic oligonucleotide
  Sense strand starting at position 1129 of SEQ ID NO: 1884953
ugcucauccuaugaggaaa

SEQ ID NO: 2304707 - RNA, 19 nt, Artificial Sequence
  Description of Artificial Sequence: Synthetic oligonucleotide
  Antisense strand to SEQ ID NO: 2304706
uuuccucauaggaugagca

SEQ ID NO: 2304708 - RNA, 19 nt, Artificial Sequence
  Description of Artificial Sequence: Synthetic oligonucleotide
  Sense strand starting at position 1157 of SEQ ID NO: 1884953
gucugaguccucugcugau

SEQ ID NO: 2304709 - RNA, 19 nt, Artificial Sequence
  Description of Artificial Sequence: Synthetic oligonucleotide
  Antisense strand to SEQ ID NO: 2304708
aucagcagaggacucagac

SEQ ID NO: 2304710 - RNA, 19 nt, Artificial Sequence
  Description of Artificial Sequence: Synthetic oligonucleotide
  Sense strand starting at position 1409 of SEQ ID NO: 1884953
uagcuuugggaguaaggau

SEQ ID NO: 2304711 - RNA, 19 nt, Artificial Sequence
  Description of Artificial Sequence: Synthetic oligonucleotide
  Antisense strand to SEQ ID NO: 2304710
auccuuacucccaaagcua

SEQ ID NO: 2304712 - RNA, 19 nt, Artificial Sequence
  Description of Artificial Sequence: Synthetic oligonucleotide
  Sense strand starting at position 1501 of SEQ ID NO: 1884953
ucuagacacugucuguuaa

SEQ ID NO: 2304713 - RNA, 19 nt, Artificial Sequence
  Description of Artificial Sequence: Synthetic oligonucleotide
  Antisense strand to SEQ ID NO: 2304712
uuaacagacagugucuaga

SEQ ID NO: 2304714 - RNA, 19 nt, Artificial Sequence
  Description of Artificial Sequence: Synthetic oligonucleotide
  Sense strand starting at position 1564 of SEQ ID NO: 1884953
gcacucugcccagguaagu

SEQ ID NO: 2304715 - RNA, 19 nt, Artificial Sequence
  Description of Artificial Sequence: Synthetic oligonucleotide
  Antisense strand to SEQ ID NO: 2304714
acuuaccugggcagagugc

SEQ ID NO: 2304716 - RNA, 19 nt, Artificial Sequence
  Description of Artificial Sequence: Synthetic oligonucleotide
  Sense strand starting at position 1690 of SEQ ID NO: 1884953
gcgguauucucccuccaga

SEQ ID NO: 2304717 - RNA, 19 nt, Artificial Sequence
  Description of Artificial Sequence: Synthetic oligonucleotide
  Antisense strand to SEQ ID NO: 2304716
ucuggagggagaauaccgc

SEQ ID NO: 2304718 - RNA, 19 nt, Artificial Sequence
  Description of Artificial Sequence: Synthetic oligonucleotide
  Sense strand starting at position 2029 of SEQ ID NO: 1884953
cgccaaugagagggaugua

SEQ ID NO: 2304719 - RNA, 19 nt, Artificial Sequence
  Description of Artificial Sequence: Synthetic oligonucleotide
  Antisense strand to SEQ ID NO: 2304718
uacaucccucucauuggcg

SEQ ID NO: 2304720 - RNA, 19 nt, Artificial Sequence
  Description of Artificial Sequence: Synthetic oligonucleotide
  Sense strand starting at position 2063 of SEQ ID NO: 1884953
aggcuaaucacugacguca

SEQ ID NO: 2304721 - RNA, 19 nt, Artificial Sequence
  Description of Artificial Sequence: Synthetic oligonucleotide
  Antisense strand to SEQ ID NO: 2304720
ugacgucagugauuagccu

SEQ ID NO: 2304722 - RNA, 19 nt, Artificial Sequence
  Description of Artificial Sequence: Synthetic oligonucleotide
  Sense strand starting at position 2162 of SEQ ID NO: 1884953
cggagaauccuggaacgcu

SEQ ID NO: 2304723 - RNA, 19 nt, Artificial Sequence
  Description of Artificial Sequence: Synthetic oligonucleotide
  Antisense strand to SEQ ID NO: 2304722
agcguuccaggauucuccg

SEQ ID NO: 2304724 - RNA, 19 nt, Artificial Sequence
  Description of Artificial Sequence: Synthetic oligonucleotide
  Sense strand starting at position 2504 of SEQ ID NO: 1884953
cccggcaaauuguuguaau

SEQ ID NO: 2304725 - RNA, 19 nt, Artificial Sequence
  Description of Artificial Sequence: Synthetic oligonucleotide
  Antisense strand to SEQ ID NO: 2304724
auuacaacaauuugccggg

SEQ ID NO: 2304726 - RNA, 19 nt, Artificial Sequence
  Description of Artificial Sequence: Synthetic oligonucleotide
  Sense strand starting at position 2660 of SEQ ID NO: 1884953
gaggaagauucuuacuuag

SEQ ID NO: 2304727 - RNA, 19 nt, Artificial Sequence
  Description of Artificial Sequence: Synthetic oligonucleotide
  Antisense strand to SEQ ID NO: 2304726
cuaaguaagaaucuuccuc

SEQ ID NO: 2304728 - RNA, 19 nt, Artificial Sequence
  Description of Artificial Sequence: Synthetic oligonucleotide
  Sense strand starting at position 2697 of SEQ ID NO: 1884953
gccucauugccggagauca

SEQ ID NO: 2304729 - RNA, 19 nt, Artificial Sequence
  Description of Artificial Sequence: Synthetic oligonucleotide
  Antisense strand to SEQ ID NO: 2304728
ugaucuccggcaaugaggc

SEQ ID NO: 2304730 - RNA, 19 nt, Artificial Sequence
  Description of Artificial Sequence: Synthetic oligonucleotide
  Sense strand starting at position 2699 of SEQ ID NO: 1884953
cucauugccggagaucauu

SEQ ID NO: 2304731 - RNA, 19 nt, Artificial Sequence
  Description of Artificial Sequence: Synthetic oligonucleotide
  Antisense strand to SEQ ID NO: 2304730
aaugaucuccggcaaugag

SEQ ID NO: 2304732 - RNA, 19 nt, Artificial Sequence
  Description of Artificial Sequence: Synthetic oligonucleotide
  Sense strand starting at position 2708 of SEQ ID NO: 1884953
ggagaucauuucugucuaa

SEQ ID NO: 2304733 - RNA, 19 nt, Artificial Sequence
  Description of Artificial Sequence: Synthetic oligonucleotide
  Antisense strand to SEQ ID NO: 2304732
uuagacagaaaugaucucc

SEQ ID NO: 2304734 - RNA, 19 nt, Artificial Sequence
  Description of Artificial Sequence: Synthetic oligonucleotide
  Sense strand starting at position 2857 of SEQ ID NO: 1884953
ccagcuuccucguuauuaa

SEQ ID NO: 2304735 - RNA, 19 nt, Artificial Sequence
  Description of Artificial Sequence: Synthetic oligonucleotide
  Antisense strand to SEQ ID NO: 2304734
uuaauaacgaggaagcugg

SEQ ID NO: 2304736 - RNA, 19 nt, Artificial Sequence
  Description of Artificial Sequence: Synthetic oligonucleotide
  Sense strand starting at position 2860 of SEQ ID NO: 1884953
gcuuccucguuauuaauag

SEQ ID NO: 2304737 - RNA, 19 nt, Artificial Sequence
  Description of Artificial Sequence: Synthetic oligonucleotide
  Antisense strand to SEQ ID NO: 2304736
cuauuaauaacgaggaagc

SEQ ID NO: 2304738 - RNA, 19 nt, Artificial Sequence
  Description of Artificial Sequence: Synthetic oligonucleotide
  Sense strand starting at position 2925 of SEQ ID NO: 1884953
augauauauuacuggagac

SEQ ID NO: 2304739 - RNA, 19 nt, Artificial Sequence
  Description of Artificial Sequence: Synthetic oligonucleotide
  Antisense strand to SEQ ID NO: 2304738
gucuccaguaauauaucau

SEQ ID NO: 2304740 - RNA, 19 nt, Artificial Sequence
  Description of Artificial Sequence: Synthetic oligonucleotide
  Sense strand starting at position 2963 of SEQ ID NO: 1884953
cagguaucagcccauugua

SEQ ID NO: 2304741 - RNA, 19 nt, Artificial Sequence
  Description of Artificial Sequence: Synthetic oligonucleotide
  Antisense strand to SEQ ID NO: 2304740
uacaaugggcugauaccug

SEQ ID NO: 2304742 - RNA, 19 nt, Artificial Sequence
  Description of Artificial Sequence: Synthetic oligonucleotide
  Sense strand starting at position 2970 of SEQ ID NO: 1884953
cagcccauuguauggauaa

SEQ ID NO: 2304743 - RNA, 19 nt, Artificial Sequence
  Description of Artificial Sequence: Synthetic oligonucleotide
  Antisense strand to SEQ ID NO: 2304742
uuauccauacaaugggcug

SEQ ID NO: 2304744 - RNA, 19 nt, Artificial Sequence
  Description of Artificial Sequence: Synthetic oligonucleotide
  Sense strand starting at position 3331 of SEQ ID NO: 1884953
ucugucugucagggaaaca

SEQ ID NO: 2304745 - RNA, 19 nt, Artificial Sequence
  Description of Artificial Sequence: Synthetic oligonucleotide
  Antisense strand to SEQ ID NO: 2304744
uguuucccugacagacaga

SEQ ID NO: 2304746 - RNA, 19 nt, Artificial Sequence
  Description of Artificial Sequence: Synthetic oligonucleotide
  Sense strand starting at position 3491 of SEQ ID NO: 1884953
ccaccucuucguugagagu

SEQ ID NO: 2304747 - RNA, 19 nt, Artificial Sequence
  Description of Artificial Sequence: Synthetic oligonucleotide
  Antisense strand to SEQ ID NO: 2304746
acucucaacgaagaggugg

SEQ ID NO: 2304748 - RNA, 19 nt, Artificial Sequence
  Description of Artificial Sequence: Synthetic oligonucleotide
  Sense strand starting at position 3500 of SEQ ID NO: 1884953
cguugagaguccuuugcug

SEQ ID NO: 2304749 - RNA, 19 nt, Artificial Sequence
  Description of Artificial Sequence: Synthetic oligonucleotide
  Antisense strand to SEQ ID NO: 2304748
cagcaaaggacucucaacg

SEQ ID NO: 2304750 - RNA, 19 nt, Artificial Sequence
  Description of Artificial Sequence: Synthetic oligonucleotide
  Sense strand starting at position 3559 of SEQ ID NO: 1884953
caacauagucugcagcaga

SEQ ID NO: 2304751 - RNA, 19 nt, Artificial Sequence
  Description of Artificial Sequence: Synthetic oligonucleotide
  Antisense strand to SEQ ID NO: 2304750
ucugcugcagacuauguug

SEQ ID NO: 2304752 - RNA, 19 nt, Artificial Sequence
  Description of Artificial Sequence: Synthetic oligonucleotide
  Sense strand starting at position 3572 of SEQ ID NO: 1884953
agcagauggucuguagagu

SEQ ID NO: 2304753 - RNA, 19 nt, Artificial Sequence
  Description of Artificial Sequence: Synthetic oligonucleotide
  Antisense strand to SEQ ID NO: 2304752
acucuacagaccaucugcu

SEQ ID NO: 2304754 - RNA, 19 nt, Artificial Sequence
  Description of Artificial Sequence: Synthetic oligonucleotide
  Sense strand starting at position 3573 of SEQ ID NO: 1884953
gcagauggucuguagaguu

SEQ ID NO: 2304755 - RNA, 19 nt, Artificial Sequence
  Description of Artificial Sequence: Synthetic oligonucleotide
  Antisense strand to SEQ ID NO: 2304754
aacucuacagaccaucugc

SEQ ID NO: 2304756 - RNA, 19 nt, Artificial Sequence
  Description of Artificial Sequence: Synthetic oligonucleotide
  Sense strand starting at position 3955 of SEQ ID NO: 1884953
guggaaauguacucucuca

SEQ ID NO: 2304757 - RNA, 19 nt, Artificial Sequence
  Description of Artificial Sequence: Synthetic oligonucleotide
  Antisense strand to SEQ ID NO: 2304756
ugagagaguacauuuccac

SEQ ID NO: 2304758 - RNA, 19 nt, Artificial Sequence
  Description of Artificial Sequence: Synthetic oligonucleotide
  Sense strand starting at position 79 of SEQ ID NO: 1884954
guaagaagcgcuuauuucu

SEQ ID NO: 2304759 - RNA, 19 nt, Artificial Sequence
  Description of Artificial Sequence: Synthetic oligonucleotide
  Antisense strand to SEQ ID NO: 2304758
agaaauaagcgcuucuuac

SEQ ID NO: 2304760 - RNA, 19 nt, Artificial Sequence
  Description of Artificial Sequence: Synthetic oligonucleotide
  Sense strand starting at position 88 of SEQ ID NO: 1884954
gcuuauuucuaccuguucu

SEQ ID NO: 2304761 - RNA, 19 nt, Artificial Sequence
  Description of Artificial Sequence: Synthetic oligonucleotide
  Antisense strand to SEQ ID NO: 2304760
agaacagguagaaauaagc

SEQ ID NO: 2304762 - RNA, 19 nt, Artificial Sequence
  Description of Artificial Sequence: Synthetic oligonucleotide
  Sense strand starting at position 95 of SEQ ID NO: 1884954
ucuaccuguucuuuaugga

SEQ ID NO: 2304763 - RNA, 19 nt, Artificial Sequence
  Description of Artificial Sequence: Synthetic oligonucleotide
  Antisense strand to SEQ ID NO: 2304762
uccauaaagaacagguaga

SEQ ID NO: 2304764 - RNA, 19 nt, Artificial Sequence
  Description of Artificial Sequence: Synthetic oligonucleotide
  Sense strand starting at position 108 of SEQ ID NO: 1884954
uauggagugccaggauaau

SEQ ID NO: 2304765 - RNA, 19 nt, Artificial Sequence
  Description of Artificial Sequence: Synthetic oligonucleotide
  Antisense strand to SEQ ID NO: 2304764
auuauccuggcacuccaua

SEQ ID NO: 2304766 - RNA, 19 nt, Artificial Sequence
  Description of Artificial Sequence: Synthetic oligonucleotide
  Sense strand starting at position 313 of SEQ ID NO: 1884954
gacaguuguucucucacag

SEQ ID NO: 2304767 - RNA, 19 nt, Artificial Sequence
  Description of Artificial Sequence: Synthetic oligonucleotide
  Antisense strand to SEQ ID NO: 2304766
cugugagagaacaacuguc

SEQ ID NO: 2304768 - RNA, 19 nt, Artificial Sequence
  Description of Artificial Sequence: Synthetic oligonucleotide
  Sense strand starting at position 490 of SEQ ID NO: 1884954
uuuguugcuucccuauuua

SEQ ID NO: 2304769 - RNA, 19 nt, Artificial Sequence
  Description of Artificial Sequence: Synthetic oligonucleotide
  Antisense strand to SEQ ID NO: 2304768
uaaauagggaagcaacaaa

SEQ ID NO: 2304770 - RNA, 19 nt, Artificial Sequence
  Description of Artificial Sequence: Synthetic oligonucleotide
  Sense strand starting at position 505 of SEQ ID NO: 1884954
uuuaucuuuccggagguuu

SEQ ID NO: 2304771 - RNA, 19 nt, Artificial Sequence
  Description of Artificial Sequence: Synthetic oligonucleotide
  Antisense strand to SEQ ID NO: 2304770
aaaccuccggaaagauaaa

SEQ ID NO: 2304772 - RNA, 19 nt, Artificial Sequence
  Description of Artificial Sequence: Synthetic oligonucleotide
  Sense strand starting at position 808 of SEQ ID NO: 1884954
cuggcaaucucuccauaug

SEQ ID NO: 2304773 - RNA, 19 nt, Artificial Sequence
  Description of Artificial Sequence: Synthetic oligonucleotide
  Antisense strand to SEQ ID NO: 2304772
cauauggagagauugccag

SEQ ID NO: 2304774 - RNA, 19 nt, Artificial Sequence
  Description of Artificial Sequence: Synthetic oligonucleotide
  Sense strand starting at position 811 of SEQ ID NO: 1884954
gcaaucucuccauaugggu

SEQ ID NO: 2304775 - RNA, 19 nt, Artificial Sequence
  Description of Artificial Sequence: Synthetic oligonucleotide
  Antisense strand to SEQ ID NO: 2304774
acccauauggagagauugc

SEQ ID NO: 2304776 - RNA, 19 nt, Artificial Sequence
  Description of Artificial Sequence: Synthetic oligonucleotide
  Sense strand starting at position 1259 of SEQ ID NO: 1884954
ugacucacucaagguuaau

SEQ ID NO: 2304777 - RNA, 19 nt, Artificial Sequence
  Description of Artificial Sequence: Synthetic oligonucleotide
  Antisense strand to SEQ ID NO: 2304776
auuaaccuugagugaguca

SEQ ID NO: 2304778 - RNA, 19 nt, Artificial Sequence
  Description of Artificial Sequence: Synthetic oligonucleotide
  Sense strand starting at position 1289 of SEQ ID NO: 1884954
ggcuucaugguccaaagga

SEQ ID NO: 2304779 - RNA, 19 nt, Artificial Sequence
  Description of Artificial Sequence: Synthetic oligonucleotide
  Antisense strand to SEQ ID NO: 2304778
uccuuuggaccaugaagcc

SEQ ID NO: 2304780 - RNA, 19 nt, Artificial Sequence
  Description of Artificial Sequence: Synthetic oligonucleotide
  Sense strand starting at position 1454 of SEQ ID NO: 1884954
cagaguuaagugcaccaga

SEQ ID NO: 2304781 - RNA, 19 nt, Artificial Sequence
  Description of Artificial Sequence: Synthetic oligonucleotide
  Antisense strand to SEQ ID NO: 2304780
ucuggugcacuuaacucug

SEQ ID NO: 2304782 - RNA, 19 nt, Artificial Sequence
  Description of Artificial Sequence: Synthetic oligonucleotide
  Sense strand starting at position 1457 of SEQ ID NO: 1884954
aguuaagugcaccagagau

SEQ ID NO: 2304783 - RNA, 19 nt, Artificial Sequence
  Description of Artificial Sequence: Synthetic oligonucleotide
  Antisense strand to SEQ ID NO: 2304782
aucucuggugcacuuaacu

SEQ ID NO: 2304784 - RNA, 19 nt, Artificial Sequence
  Description of Artificial Sequence: Synthetic oligonucleotide
  Sense strand starting at position 1459 of SEQ ID NO: 1884954
uuaagugcaccagagauua

SEQ ID NO: 2304785 - RNA, 19 nt, Artificial Sequence
  Description of Artificial Sequence: Synthetic oligonucleotide
  Antisense strand to SEQ ID NO: 2304784
uaaucucuggugcacuuaa

SEQ ID NO: 2304786 - RNA, 19 nt, Artificial Sequence
  Description of Artificial Sequence: Synthetic oligonucleotide
  Sense strand starting at position 1475 of SEQ ID NO: 1884954
uuaauugaggacugcaguu

SEQ ID NO: 2304787 - RNA, 19 nt, Artificial Sequence
  Description of Artificial Sequence: Synthetic oligonucleotide
  Antisense strand to SEQ ID NO: 2304786
aacugcaguccucaauuaa

SEQ ID NO: 2304788 - RNA, 19 nt, Artificial Sequence
  Description of Artificial Sequence: Synthetic oligonucleotide
  Sense strand starting at position 1481 of SEQ ID NO: 1884954
gaggacugcaguugugaag

SEQ ID NO: 2304789 - RNA, 19 nt, Artificial Sequence
  Description of Artificial Sequence: Synthetic oligonucleotide
  Antisense strand to SEQ ID NO: 2304788
cuucacaacugcaguccuc

SEQ ID NO: 2304790 - RNA, 19 nt, Artificial Sequence
  Description of Artificial Sequence: Synthetic oligonucleotide
  Sense strand starting at position 1487 of SEQ ID NO: 1884954
ugcaguugugaaggauaaa

SEQ ID NO: 2304791 - RNA, 19 nt, Artificial Sequence
  Description of Artificial Sequence: Synthetic oligonucleotide
  Antisense strand to SEQ ID NO: 2304790
uuuauccuucacaacugca

SEQ ID NO: 2304792 - RNA, 19 nt, Artificial Sequence
  Description of Artificial Sequence: Synthetic oligonucleotide
  Sense strand starting at position 1488 of SEQ ID NO: 1884954
gcaguugugaaggauaaag

SEQ ID NO: 2304793 - RNA, 19 nt, Artificial Sequence
  Description of Artificial Sequence: Synthetic oligonucleotide
  Antisense strand to SEQ ID NO: 2304792
cuuuauccuucacaacugc

SEQ ID NO: 2304794 - RNA, 19 nt, Artificial Sequence
  Description of Artificial Sequence: Synthetic oligonucleotide
  Sense strand starting at position 1553 of SEQ ID NO: 1884954
aggucuggucccugggaaa

SEQ ID NO: 2304795 - RNA, 19 nt, Artificial Sequence
  Description of Artificial Sequence: Synthetic oligonucleotide
  Antisense strand to SEQ ID NO: 2304794
uuucccagggaccagaccu

SEQ ID NO: 2304796 - RNA, 19 nt, Artificial Sequence
  Description of Artificial Sequence: Synthetic oligonucleotide
  Sense strand starting at position 1815 of SEQ ID NO: 1884954
ccgcauagaccucaucaga

SEQ ID NO: 2304797 - RNA, 19 nt, Artificial Sequence
  Description of Artificial Sequence: Synthetic oligonucleotide
  Antisense strand to SEQ ID NO: 2304796
ucugaugaggucuaugcgg

SEQ ID NO: 2304798 - RNA, 19 nt, Artificial Sequence
  Description of Artificial Sequence: Synthetic oligonucleotide
  Sense strand starting at position 1846 of SEQ ID NO: 1884954
guagggagaggguguauua

SEQ ID NO: 2304799 - RNA, 19 nt, Artificial Sequence
  Description of Artificial Sequence: Synthetic oligonucleotide
  Antisense strand to SEQ ID NO: 2304798
uaauacacccucucccuac

SEQ ID NO: 2304800 - RNA, 19 nt, Artificial Sequence
  Description of Artificial Sequence: Synthetic oligonucleotide
  Sense strand starting at position 2256 of SEQ ID NO: 1884954
gucuaaggaguuuaucuau

SEQ ID NO: 2304801 - RNA, 19 nt, Artificial Sequence
  Description of Artificial Sequence: Synthetic oligonucleotide
  Antisense strand to SEQ ID NO: 2304800
auagauaaacuccuuagac

SEQ ID NO: 2304802 - RNA, 19 nt, Artificial Sequence
  Description of Artificial Sequence: Synthetic oligonucleotide
  Sense strand starting at position 2631 of SEQ ID NO: 1884954
cugguaauaguacaaaguu

SEQ ID NO: 2304803 - RNA, 19 nt, Artificial Sequence
  Description of Artificial Sequence: Synthetic oligonucleotide
  Antisense strand to SEQ ID NO: 2304802
aacuuuguacuauuaccag

SEQ ID NO: 2304804 - RNA, 19 nt, Artificial Sequence
  Description of Artificial Sequence: Synthetic oligonucleotide
  Sense strand starting at position 2680 of SEQ ID NO: 1884954
auugaagucuaguuaauag

SEQ ID NO: 2304805 - RNA, 19 nt, Artificial Sequence
  Description of Artificial Sequence: Synthetic oligonucleotide
  Antisense strand to SEQ ID NO: 2304804
cuauuaacuagacuucaau

SEQ ID NO: 2304806 - RNA, 19 nt, Artificial Sequence
  Description of Artificial Sequence: Synthetic oligonucleotide
  Sense strand starting at position 2733 of SEQ ID NO: 1884954
uuugcaacuuccuuggaaa

SEQ ID NO: 2304807 - RNA, 19 nt, Artificial Sequence
  Description of Artificial Sequence: Synthetic oligonucleotide
  Antisense strand to SEQ ID NO: 2304806
uuuccaaggaaguugcaaa

SEQ ID NO: 2304808 - RNA, 19 nt, Artificial Sequence
  Description of Artificial Sequence: Synthetic oligonucleotide
  Sense strand starting at position 2734 of SEQ ID NO: 1884954
uugcaacuuccuuggaaau

SEQ ID NO: 2304809 - RNA, 19 nt, Artificial Sequence
  Description of Artificial Sequence: Synthetic oligonucleotide
  Antisense strand to SEQ ID NO: 2304808
auuuccaaggaaguugcaa

SEQ ID NO: 2304810 - RNA, 19 nt, Artificial Sequence
  Description of Artificial Sequence: Synthetic oligonucleotide
  Sense strand starting at position 2735 of SEQ ID NO: 1884954
ugcaacuuccuuggaaaug

SEQ ID NO: 2304811 - RNA, 19 nt, Artificial Sequence
  Description of Artificial Sequence: Synthetic oligonucleotide
  Antisense strand to SEQ ID NO: 2304810
cauuuccaaggaaguugca

SEQ ID NO: 2304812 - RNA, 19 nt, Artificial Sequence
  Description of Artificial Sequence: Synthetic oligonucleotide
  Sense strand starting at position 2786 of SEQ ID NO: 1884954
aguggacagauaugcgaua

SEQ ID NO: 2304813 - RNA, 19 nt, Artificial Sequence
  Description of Artificial Sequence: Synthetic oligonucleotide
  Antisense strand to SEQ ID NO: 2304812
uaucgcauaucuguccacu

SEQ ID NO: 2304814 - RNA, 19 nt, Artificial Sequence
  Description of Artificial Sequence: Synthetic oligonucleotide
  Sense strand starting at position 2788 of SEQ ID NO: 1884954
uggacagauaugcgauaga

SEQ ID NO: 2304815 - RNA, 19 nt, Artificial Sequence
  Description of Artificial Sequence: Synthetic oligonucleotide
  Antisense strand to SEQ ID NO: 2304814
ucuaucgcauaucugucca

SEQ ID NO: 2304816 - RNA, 19 nt, Artificial Sequence
  Description of Artificial Sequence: Synthetic oligonucleotide
  Sense strand starting at position 2791 of SEQ ID NO: 1884954
acagauaugcgauagagca

SEQ ID NO: 2304817 - RNA, 19 nt, Artificial Sequence
  Description of Artificial Sequence: Synthetic oligonucleotide
  Antisense strand to SEQ ID NO: 2304816
ugcucuaucgcauaucugu

SEQ ID NO: 2304818 - RNA, 19 nt, Artificial Sequence
  Description of Artificial Sequence: Synthetic oligonucleotide
  Sense strand starting at position 2793 of SEQ ID NO: 1884954
agauaugcgauagagcaaa

SEQ ID NO: 2304819 - RNA, 19 nt, Artificial Sequence
  Description of Artificial Sequence: Synthetic oligonucleotide
  Antisense strand to SEQ ID NO: 2304818
uuugcucuaucgcauaucu

SEQ ID NO: 2304820 - RNA, 19 nt, Artificial Sequence
  Description of Artificial Sequence: Synthetic oligonucleotide
  Sense strand starting at position 2837 of SEQ ID NO: 1884954
cgaggcauuggguauauga

SEQ ID NO: 2304821 - RNA, 19 nt, Artificial Sequence
  Description of Artificial Sequence: Synthetic oligonucleotide
  Antisense strand to SEQ ID NO: 2304820
ucauauacccaaugccucg

SEQ ID NO: 2304822 - RNA, 19 nt, Artificial Sequence
  Description of Artificial Sequence: Synthetic oligonucleotide
  Sense strand starting at position 2839 of SEQ ID NO: 1884954
aggcauuggguauaugagu

SEQ ID NO: 2304823 - RNA, 19 nt, Artificial Sequence
  Description of Artificial Sequence: Synthetic oligonucleotide
  Antisense strand to SEQ ID NO: 2304822
acucauauacccaaugccu

SEQ ID NO: 2304824 - RNA, 19 nt, Artificial Sequence
  Description of Artificial Sequence: Synthetic oligonucleotide
  Sense strand starting at position 2852 of SEQ ID NO: 1884954
augaguaggcacuguacaa

SEQ ID NO: 2304825 - RNA, 19 nt, Artificial Sequence
  Description of Artificial Sequence: Synthetic oligonucleotide
  Antisense strand to SEQ ID NO: 2304824
uuguacagugccuacucau

SEQ ID NO: 2304826 - RNA, 19 nt, Artificial Sequence
  Description of Artificial Sequence: Synthetic oligonucleotide
  Sense strand starting at position 2953 of SEQ ID NO: 1884954
uggguauggcaguaauucu

SEQ ID NO: 2304827 - RNA, 19 nt, Artificial Sequence
  Description of Artificial Sequence: Synthetic oligonucleotide
  Antisense strand to SEQ ID NO: 2304826
agaauuacugccauaccca

SEQ ID NO: 2304828 - RNA, 19 nt, Artificial Sequence
  Description of Artificial Sequence: Synthetic oligonucleotide
  Sense strand starting at position 2977 of SEQ ID NO: 1884954
uagauugagcacugcugaa

SEQ ID NO: 2304829 - RNA, 19 nt, Artificial Sequence
  Description of Artificial Sequence: Synthetic oligonucleotide
  Antisense strand to SEQ ID NO: 2304828
uucagcagugcucaaucua

SEQ ID NO: 2304830 - RNA, 19 nt, Artificial Sequence
  Description of Artificial Sequence: Synthetic oligonucleotide
  Sense strand starting at position 2987 of SEQ ID NO: 1884954
acugcugaaguuugggaaa

SEQ ID NO: 2304831 - RNA, 19 nt, Artificial Sequence
  Description of Artificial Sequence: Synthetic oligonucleotide
  Antisense strand to SEQ ID NO: 2304830
uuucccaaacuucagcagu

SEQ ID NO: 2304832 - RNA, 19 nt, Artificial Sequence
  Description of Artificial Sequence: Synthetic oligonucleotide
  Sense strand starting at position 2999 of SEQ ID NO: 1884954
ugggaaauaccgcaugcau

SEQ ID NO: 2304833 - RNA, 19 nt, Artificial Sequence
  Description of Artificial Sequence: Synthetic oligonucleotide
  Antisense strand to SEQ ID NO: 2304832
augcaugcgguauuuccca

SEQ ID NO: 2304834 - RNA, 19 nt, Artificial Sequence
  Description of Artificial Sequence: Synthetic oligonucleotide
  Sense strand starting at position 3091 of SEQ ID NO: 1884954
ccaaguggcucauuacauu

SEQ ID NO: 2304835 - RNA, 19 nt, Artificial Sequence
  Description of Artificial Sequence: Synthetic oligonucleotide
  Antisense strand to SEQ ID NO: 2304834
aauguaaugagccacuugg

SEQ ID NO: 2304836 - RNA, 19 nt, Artificial Sequence
  Description of Artificial Sequence: Synthetic oligonucleotide
  Sense strand starting at position 3223 of SEQ ID NO: 1884954
ucugcaaguaugucgucua

SEQ ID NO: 2304837 - RNA, 19 nt, Artificial Sequence
  Description of Artificial Sequence: Synthetic oligonucleotide
  Antisense strand to SEQ ID NO: 2304836
uagacgacauacuugcaga

SEQ ID NO: 2304838 - RNA, 19 nt, Artificial Sequence
  Description of Artificial Sequence: Synthetic oligonucleotide
  Sense strand starting at position 290 of SEQ ID NO: 1884955
cagccaugaguuuguaauu

SEQ ID NO: 2304839 - RNA, 19 nt, Artificial Sequence
  Description of Artificial Sequence: Synthetic oligonucleotide
  Antisense strand to SEQ ID NO: 2304838
aauuacaaacucauggcug

SEQ ID NO: 2304840 - RNA, 19 nt, Artificial Sequence
  Description of Artificial Sequence: Synthetic oligonucleotide
  Sense strand starting at position 299 of SEQ ID NO: 1884955
guuuguaauuaacaagagu

SEQ ID NO: 2304841 - RNA, 19 nt, Artificial Sequence
  Description of Artificial Sequence: Synthetic oligonucleotide
  Antisense strand to SEQ ID NO: 2304840
acucuuguuaauuacaaac

SEQ ID NO: 2304842 - RNA, 19 nt, Artificial Sequence
  Description of Artificial Sequence: Synthetic oligonucleotide
  Sense strand starting at position 330 of SEQ ID NO: 1884955
ggaugccaguguugugaaa

SEQ ID NO: 2304843 - RNA, 19 nt, Artificial Sequence
  Description of Artificial Sequence: Synthetic oligonucleotide
  Antisense strand to SEQ ID NO: 2304842
uuucacaacacuggcaucc

SEQ ID NO: 2304844 - RNA, 19 nt, Artificial Sequence
  Description of Artificial Sequence: Synthetic oligonucleotide
  Sense strand starting at position 353 of SEQ ID NO: 1884955
gacuaaaggugacaaggaa

SEQ ID NO: 2304845 - RNA, 19 nt, Artificial Sequence
  Description of Artificial Sequence: Synthetic oligonucleotide
  Antisense strand to SEQ ID NO: 2304844
uuccuugucaccuuuaguc

SEQ ID NO: 2304846 - RNA, 19 nt, Artificial Sequence
  Description of Artificial Sequence: Synthetic oligonucleotide
  Sense strand starting at position 740 of SEQ ID NO: 1884955
guggcuugguuggcauaga

SEQ ID NO: 2304847 - RNA, 19 nt, Artificial Sequence
  Description of Artificial Sequence: Synthetic oligonucleotide
  Antisense strand to SEQ ID NO: 2304846
ucuaugccaaccaagccac

SEQ ID NO: 2304848 - RNA, 19 nt, Artificial Sequence
  Description of Artificial Sequence: Synthetic oligonucleotide
  Sense strand starting at position 741 of SEQ ID NO: 1884955
uggcuugguuggcauagaa

SEQ ID NO: 2304849 - RNA, 19 nt, Artificial Sequence
  Description of Artificial Sequence: Synthetic oligonucleotide
  Antisense strand to SEQ ID NO: 2304848
uucuaugccaaccaagcca

SEQ ID NO: 2304850 - RNA, 19 nt, Artificial Sequence
  Description of Artificial Sequence: Synthetic oligonucleotide
  Sense strand starting at position 754 of SEQ ID NO: 1884955
auagaagguuuaugaguac

SEQ ID NO: 2304851 - RNA, 19 nt, Artificial Sequence
  Description of Artificial Sequence: Synthetic oligonucleotide
  Antisense strand to SEQ ID NO: 2304850
guacucauaaaccuucuau

SEQ ID NO: 2304852 - RNA, 19 nt, Artificial Sequence
  Description of Artificial Sequence: Synthetic oligonucleotide
  Sense strand starting at position 1016 of SEQ ID NO: 1884955
aucacuauaggcuggauaa

SEQ ID NO: 2304853 - RNA, 19 nt, Artificial Sequence
  Description of Artificial Sequence: Synthetic oligonucleotide
  Antisense strand to SEQ ID NO: 2304852
uuauccagccuauagugau

SEQ ID NO: 2304854 - RNA, 19 nt, Artificial Sequence
  Description of Artificial Sequence: Synthetic oligonucleotide
  Sense strand starting at position 1017 of SEQ ID NO: 1884955
ucacuauaggcuggauaaa

SEQ ID NO: 2304855 - RNA, 19 nt, Artificial Sequence
  Description of Artificial Sequence: Synthetic oligonucleotide
  Antisense strand to SEQ ID NO: 2304854
uuuauccagccuauaguga

SEQ ID NO: 2304856 - RNA, 19 nt, Artificial Sequence
  Description of Artificial Sequence: Synthetic oligonucleotide
  Sense strand starting at position 1437 of SEQ ID NO: 1884955
cuaggaaggacgugcuuaa

SEQ ID NO: 2304857 - RNA, 19 nt, Artificial Sequence
  Description of Artificial Sequence: Synthetic oligonucleotide
  Antisense strand to SEQ ID NO: 2304856
uuaagcacguccuuccuag

SEQ ID NO: 2304858 - RNA, 19 nt, Artificial Sequence
  Description of Artificial Sequence: Synthetic oligonucleotide
  Sense strand starting at position 1533 of SEQ ID NO: 1884955
uguuaaaggucaggagaca

SEQ ID NO: 2304859 - RNA, 19 nt, Artificial Sequence
  Description of Artificial Sequence: Synthetic oligonucleotide
  Antisense strand to SEQ ID NO: 2304858
ugucuccugaccuuuaaca

SEQ ID NO: 2304860 - RNA, 19 nt, Artificial Sequence
  Description of Artificial Sequence: Synthetic oligonucleotide
  Sense strand starting at position 1820 of SEQ ID NO: 1884955
aaggguccauagcuagaaa

SEQ ID NO: 2304861 - RNA, 19 nt, Artificial Sequence
  Description of Artificial Sequence: Synthetic oligonucleotide
  Antisense strand to SEQ ID NO: 2304860
uuucuagcuauggacccuu

SEQ ID NO: 2304862 - RNA, 19 nt, Artificial Sequence
  Description of Artificial Sequence: Synthetic oligonucleotide
  Sense strand starting at position 1957 of SEQ ID NO: 1884955
aacucaggucuccagaguu

SEQ ID NO: 2304863 - RNA, 19 nt, Artificial Sequence
  Description of Artificial Sequence: Synthetic oligonucleotide
  Antisense strand to SEQ ID NO: 2304862
aacucuggagaccugaguu

SEQ ID NO: 2304864 - RNA, 19 nt, Artificial Sequence
  Description of Artificial Sequence: Synthetic oligonucleotide
  Sense strand starting at position 2003 of SEQ ID NO: 1884955
ugagucacgucucagaaga

SEQ ID NO: 2304865 - RNA, 19 nt, Artificial Sequence
  Description of Artificial Sequence: Synthetic oligonucleotide
  Antisense strand to SEQ ID NO: 2304864
ucuucugagacgugacuca

SEQ ID NO: 2304866 - RNA, 19 nt, Artificial Sequence
  Description of Artificial Sequence: Synthetic oligonucleotide
  Sense strand starting at position 2196 of SEQ ID NO: 1884955
uuuguagaaucuuggcaca

SEQ ID NO: 2304867 - RNA, 19 nt, Artificial Sequence
  Description of Artificial Sequence: Synthetic oligonucleotide
  Antisense strand to SEQ ID NO: 2304866
ugugccaagauucuacaaa

SEQ ID NO: 2304868 - RNA, 19 nt, Artificial Sequence
  Description of Artificial Sequence: Synthetic oligonucleotide
  Sense strand starting at position 2198 of SEQ ID NO: 1884955
uguagaaucuuggcacaca

SEQ ID NO: 2304869 - RNA, 19 nt, Artificial Sequence
  Description of Artificial Sequence: Synthetic oligonucleotide
  Antisense strand to SEQ ID NO: 2304868
ugugugccaagauucuaca

SEQ ID NO: 2304870 - RNA, 19 nt, Artificial Sequence
  Description of Artificial Sequence: Synthetic oligonucleotide
  Sense strand starting at position 2199 of SEQ ID NO: 1884955
guagaaucuuggcacacau

SEQ ID NO: 2304871 - RNA, 19 nt, Artificial Sequence
  Description of Artificial Sequence: Synthetic oligonucleotide
  Antisense strand to SEQ ID NO: 2304870
augugugccaagauucuac

SEQ ID NO: 2304872 - RNA, 19 nt, Artificial Sequence
  Description of Artificial Sequence: Synthetic oligonucleotide
  Sense strand starting at position 2210 of SEQ ID NO: 1884955
gcacacaucugcuggguau

SEQ ID NO: 2304873 - RNA, 19 nt, Artificial Sequence
  Description of Artificial Sequence: Synthetic oligonucleotide
  Antisense strand to SEQ ID NO: 2304872
auacccagcagaugugugc

SEQ ID NO: 2304874 - RNA, 19 nt, Artificial Sequence
  Description of Artificial Sequence: Synthetic oligonucleotide
  Sense strand starting at position 2283 of SEQ ID NO: 1884955
cugaaucucccagguauug

SEQ ID NO: 2304875 - RNA, 19 nt, Artificial Sequence
  Description of Artificial Sequence: Synthetic oligonucleotide
  Antisense strand to SEQ ID NO: 2304874
caauaccugggagauucag

SEQ ID NO: 2304876 - RNA, 19 nt, Artificial Sequence
  Description of Artificial Sequence: Synthetic oligonucleotide
  Sense strand starting at position 2521 of SEQ ID NO: 1884955
ggcagagucauguagcugu

SEQ ID NO: 2304877 - RNA, 19 nt, Artificial Sequence
  Description of Artificial Sequence: Synthetic oligonucleotide
  Antisense strand to SEQ ID NO: 2304876
acagcuacaugacucugcc

SEQ ID NO: 2304878 - RNA, 19 nt, Artificial Sequence
  Description of Artificial Sequence: Synthetic oligonucleotide
  Sense strand starting at position 2732 of SEQ ID NO: 1884955
gggugcuguggcugugaca

SEQ ID NO: 2304879 - RNA, 19 nt, Artificial Sequence
  Description of Artificial Sequence: Synthetic oligonucleotide
  Antisense strand to SEQ ID NO: 2304878
ugucacagccacagcaccc

SEQ ID NO: 2304880 - RNA, 19 nt, Artificial Sequence
  Description of Artificial Sequence: Synthetic oligonucleotide
  Sense strand starting at position 2780 of SEQ ID NO: 1884955
uguccucugcucugaaguu

SEQ ID NO: 2304881 - RNA, 19 nt, Artificial Sequence
  Description of Artificial Sequence: Synthetic oligonucleotide
  Antisense strand to SEQ ID NO: 2304880
aacuucagagcagaggaca

SEQ ID NO: 2304882 - RNA, 19 nt, Artificial Sequence
  Description of Artificial Sequence: Synthetic oligonucleotide
  Sense strand starting at position 2864 of SEQ ID NO: 1884955
gcccgcagauacugaaauu

SEQ ID NO: 2304883 - RNA, 19 nt, Artificial Sequence
  Description of Artificial Sequence: Synthetic oligonucleotide
  Antisense strand to SEQ ID NO: 2304882
aauuucaguaucugcgggc

SEQ ID NO: 2304884 - RNA, 19 nt, Artificial Sequence
  Description of Artificial Sequence: Synthetic oligonucleotide
  Sense strand starting at position 2873 of SEQ ID NO: 1884955
uacugaaauuggcaggagu

SEQ ID NO: 2304885 - RNA, 19 nt, Artificial Sequence
  Description of Artificial Sequence: Synthetic oligonucleotide
  Antisense strand to SEQ ID NO: 2304884
acuccugccaauuucagua

SEQ ID NO: 2304886 - RNA, 19 nt, Artificial Sequence
  Description of Artificial Sequence: Synthetic oligonucleotide
  Sense strand starting at position 2875 of SEQ ID NO: 1884955
cugaaauuggcaggagugu

SEQ ID NO: 2304887 - RNA, 19 nt, Artificial Sequence
  Description of Artificial Sequence: Synthetic oligonucleotide
  Antisense strand to SEQ ID NO: 2304886
acacuccugccaauuucag

SEQ ID NO: 2304888 - RNA, 19 nt, Artificial Sequence
  Description of Artificial Sequence: Synthetic oligonucleotide
  Sense strand starting at position 2876 of SEQ ID NO: 1884955
ugaaauuggcaggaguguu

SEQ ID NO: 2304889 - RNA, 19 nt, Artificial Sequence
  Description of Artificial Sequence: Synthetic oligonucleotide
  Antisense strand to SEQ ID NO: 2304888
aacacuccugccaauuuca

SEQ ID NO: 2304890 - RNA, 19 nt, Artificial Sequence
  Description of Artificial Sequence: Synthetic oligonucleotide
  Sense strand starting at position 2915 of SEQ ID NO: 1884955
aaggaaaggucucguguuu

SEQ ID NO: 2304891 - RNA, 19 nt, Artificial Sequence
  Description of Artificial Sequence: Synthetic oligonucleotide
  Antisense strand to SEQ ID NO: 2304890
aaacacgagaccuuuccuu

SEQ ID NO: 2304892 - RNA, 19 nt, Artificial Sequence
  Description of Artificial Sequence: Synthetic oligonucleotide
  Sense strand starting at position 3005 of SEQ ID NO: 1884955
cugugacccuucuggaaau

SEQ ID NO: 2304893 - RNA, 19 nt, Artificial Sequence
  Description of Artificial Sequence: Synthetic oligonucleotide
  Antisense strand to SEQ ID NO: 2304892
auuuccagaagggucacag

SEQ ID NO: 2304894 - RNA, 19 nt, Artificial Sequence
  Description of Artificial Sequence: Synthetic oligonucleotide
  Sense strand starting at position 3006 of SEQ ID NO: 1884955
ugugacccuucuggaaauu

SEQ ID NO: 2304895 - RNA, 19 nt, Artificial Sequence
  Description of Artificial Sequence: Synthetic oligonucleotide
  Antisense strand to SEQ ID NO: 2304894
aauuuccagaagggucaca

SEQ ID NO: 2304896 - RNA, 19 nt, Artificial Sequence
  Description of Artificial Sequence: Synthetic oligonucleotide
  Sense strand starting at position 3042 of SEQ ID NO: 1884955
gcugaugcauuguucucua

SEQ ID NO: 2304897 - RNA, 19 nt, Artificial Sequence
  Description of Artificial Sequence: Synthetic oligonucleotide
  Antisense strand to SEQ ID NO: 2304896
uagagaacaaugcaucagc

SEQ ID NO: 2304898 - RNA, 19 nt, Artificial Sequence
  Description of Artificial Sequence: Synthetic oligonucleotide
  Sense strand starting at position 3046 of SEQ ID NO: 1884955
augcauuguucucuauuua

SEQ ID NO: 2304899 - RNA, 19 nt, Artificial Sequence
  Description of Artificial Sequence: Synthetic oligonucleotide
  Antisense strand to SEQ ID NO: 2304898
uaaauagagaacaaugcau

SEQ ID NO: 2304900 - RNA, 19 nt, Artificial Sequence
  Description of Artificial Sequence: Synthetic oligonucleotide
  Sense strand starting at position 3247 of SEQ ID NO: 1884955
gggccugagucagugucau

SEQ ID NO: 2304901 - RNA, 19 nt, Artificial Sequence
  Description of Artificial Sequence: Synthetic oligonucleotide
  Antisense strand to SEQ ID NO: 2304900
augacacugacucaggccc

SEQ ID NO: 2304902 - RNA, 19 nt, Artificial Sequence
  Description of Artificial Sequence: Synthetic oligonucleotide
  Sense strand starting at position 3401 of SEQ ID NO: 1884955
ccugaauuggcuuggugag

SEQ ID NO: 2304903 - RNA, 19 nt, Artificial Sequence
  Description of Artificial Sequence: Synthetic oligonucleotide
  Antisense strand to SEQ ID NO: 2304902
cucaccaagccaauucagg

SEQ ID NO: 2304904 - RNA, 19 nt, Artificial Sequence
  Description of Artificial Sequence: Synthetic oligonucleotide
  Sense strand starting at position 3468 of SEQ ID NO: 1884955
acaccagggucucaagaaa

SEQ ID NO: 2304905 - RNA, 19 nt, Artificial Sequence
  Description of Artificial Sequence: Synthetic oligonucleotide
  Antisense strand to SEQ ID NO: 2304904
uuucuugagacccuggugu

SEQ ID NO: 2304906 - RNA, 19 nt, Artificial Sequence
  Description of Artificial Sequence: Synthetic oligonucleotide
  Sense strand starting at position 3530 of SEQ ID NO: 1884955
ggucucagaucuuucugua

SEQ ID NO: 2304907 - RNA, 19 nt, Artificial Sequence
  Description of Artificial Sequence: Synthetic oligonucleotide
  Antisense strand to SEQ ID NO: 2304906
uacagaaagaucugagacc

SEQ ID NO: 2304908 - RNA, 19 nt, Artificial Sequence
  Description of Artificial Sequence: Synthetic oligonucleotide
  Sense strand starting at position 3533 of SEQ ID NO: 1884955
cucagaucuuucuguauca

SEQ ID NO: 2304909 - RNA, 19 nt, Artificial Sequence
  Description of Artificial Sequence: Synthetic oligonucleotide
  Antisense strand to SEQ ID NO: 2304908
ugauacagaaagaucugag

SEQ ID NO: 2304910 - RNA, 19 nt, Artificial Sequence
  Description of Artificial Sequence: Synthetic oligonucleotide
  Sense strand starting at position 3791 of SEQ ID NO: 1884955
gccaguacuuuccacagga

SEQ ID NO: 2304911 - RNA, 19 nt, Artificial Sequence
  Description of Artificial Sequence: Synthetic oligonucleotide
  Antisense strand to SEQ ID NO: 2304910
uccuguggaaaguacuggc

SEQ ID NO: 2304912 - RNA, 19 nt, Artificial Sequence
  Description of Artificial Sequence: Synthetic oligonucleotide
  Sense strand starting at position 3938 of SEQ ID NO: 1884955
gccuccuuguccugaucca

SEQ ID NO: 2304913 - RNA, 19 nt, Artificial Sequence
  Description of Artificial Sequence: Synthetic oligonucleotide
  Antisense strand to SEQ ID NO: 2304912
uggaucaggacaaggaggc

SEQ ID NO: 2304914 - RNA, 19 nt, Artificial Sequence
  Description of Artificial Sequence: Synthetic oligonucleotide
  Sense strand starting at position 3939 of SEQ ID NO: 1884955
ccuccuuguccugauccau

SEQ ID NO: 2304915 - RNA, 19 nt, Artificial Sequence
  Description of Artificial Sequence: Synthetic oligonucleotide
  Antisense strand to SEQ ID NO: 2304914
auggaucaggacaaggagg

SEQ ID NO: 2304916 - RNA, 19 nt, Artificial Sequence
  Description of Artificial Sequence: Synthetic oligonucleotide
  Sense strand starting at position 164 of SEQ ID NO: 1884956
ggaaguuaucgguaauugu

SEQ ID NO: 2304917 - RNA, 19 nt, Artificial Sequence
  Description of Artificial Sequence: Synthetic oligonucleotide
  Antisense strand to SEQ ID NO: 2304916
acaauuaccgauaacuucc

SEQ ID NO: 2304918 - RNA, 19 nt, Artificial Sequence
  Description of Artificial Sequence: Synthetic oligonucleotide
  Sense strand starting at position 168 of SEQ ID NO: 1884956
guuaucgguaauugugaca

SEQ ID NO: 2304919 - RNA, 19 nt, Artificial Sequence
  Description of Artificial Sequence: Synthetic oligonucleotide
  Antisense strand to SEQ ID NO: 2304918
ugucacaauuaccgauaac

SEQ ID NO: 2304920 - RNA, 19 nt, Artificial Sequence
  Description of Artificial Sequence: Synthetic oligonucleotide
  Sense strand starting at position 181 of SEQ ID NO: 1884956
gugacaucuggcugauggu

SEQ ID NO: 2304921 - RNA, 19 nt, Artificial Sequence
  Description of Artificial Sequence: Synthetic oligonucleotide
  Antisense strand to SEQ ID NO: 2304920
accaucagccagaugucac

SEQ ID NO: 2304922 - RNA, 19 nt, Artificial Sequence
  Description of Artificial Sequence: Synthetic oligonucleotide
  Sense strand starting at position 182 of SEQ ID NO: 1884956
ugacaucuggcugauggua

SEQ ID NO: 2304923 - RNA, 19 nt, Artificial Sequence
  Description of Artificial Sequence: Synthetic oligonucleotide
  Antisense strand to SEQ ID NO: 2304922
uaccaucagccagauguca

SEQ ID NO: 2304924 - RNA, 19 nt, Artificial Sequence
  Description of Artificial Sequence: Synthetic oligonucleotide
  Sense strand starting at position 198 of SEQ ID NO: 1884956
guaaauggguguucuccau

SEQ ID NO: 2304925 - RNA, 19 nt, Artificial Sequence
  Description of Artificial Sequence: Synthetic oligonucleotide
  Antisense strand to SEQ ID NO: 2304924
auggagaacacccauuuac

SEQ ID NO: 2304926 - RNA, 19 nt, Artificial Sequence
  Description of Artificial Sequence: Synthetic oligonucleotide
  Sense strand starting at position 204 of SEQ ID NO: 1884956
ggguguucuccauacccuu

SEQ ID NO: 2304927 - RNA, 19 nt, Artificial Sequence
  Description of Artificial Sequence: Synthetic oligonucleotide
  Antisense strand to SEQ ID NO: 2304926
aaggguauggagaacaccc

SEQ ID NO: 2304928 - RNA, 19 nt, Artificial Sequence
  Description of Artificial Sequence: Synthetic oligonucleotide
  Sense strand starting at position 299 of SEQ ID NO: 1884956
acaacaauauaguggagau

SEQ ID NO: 2304929 - RNA, 19 nt, Artificial Sequence
  Description of Artificial Sequence: Synthetic oligonucleotide
  Antisense strand to SEQ ID NO: 2304928
aucuccacuauauuguugu

SEQ ID NO: 2304930 - RNA, 19 nt, Artificial Sequence
  Description of Artificial Sequence: Synthetic oligonucleotide
  Sense strand starting at position 318 of SEQ ID NO: 1884956
gagguauuauugcaugaau

SEQ ID NO: 2304931 - RNA, 19 nt, Artificial Sequence
  Description of Artificial Sequence: Synthetic oligonucleotide
  Antisense strand to SEQ ID NO: 2304930
auucaugcaauaauaccuc

SEQ ID NO: 2304932 - RNA, 19 nt, Artificial Sequence
  Description of Artificial Sequence: Synthetic oligonucleotide
  Sense strand starting at position 320 of SEQ ID NO: 1884956
gguauuauugcaugaauac

SEQ ID NO: 2304933 - RNA, 19 nt, Artificial Sequence
  Description of Artificial Sequence: Synthetic oligonucleotide
  Antisense strand to SEQ ID NO: 2304932
guauucaugcaauaauacc

SEQ ID NO: 2304934 - RNA, 19 nt, Artificial Sequence
  Description of Artificial Sequence: Synthetic oligonucleotide
  Sense strand starting at position 321 of SEQ ID NO: 1884956
guauuauugcaugaauaca

SEQ ID NO: 2304935 - RNA, 19 nt, Artificial Sequence
  Description of Artificial Sequence: Synthetic oligonucleotide
  Antisense strand to SEQ ID NO: 2304934
uguauucaugcaauaauac

SEQ ID NO: 2304936 - RNA, 19 nt, Artificial Sequence
  Description of Artificial Sequence: Synthetic oligonucleotide
  Sense strand starting at position 393 of SEQ ID NO: 1884956
guaaauagagcaggcauaa

SEQ ID NO: 2304937 - RNA, 19 nt, Artificial Sequence
  Description of Artificial Sequence: Synthetic oligonucleotide
  Antisense strand to SEQ ID NO: 2304936
uuaugccugcucuauuuac

SEQ ID NO: 2304938 - RNA, 19 nt, Artificial Sequence
  Description of Artificial Sequence: Synthetic oligonucleotide
  Sense strand starting at position 507 of SEQ ID NO: 1884956
gugaaugucuaaucugaug

SEQ ID NO: 2304939 - RNA, 19 nt, Artificial Sequence
  Description of Artificial Sequence: Synthetic oligonucleotide
  Antisense strand to SEQ ID NO: 2304938
caucagauuagacauucac

SEQ ID NO: 2304940 - RNA, 19 nt, Artificial Sequence
  Description of Artificial Sequence: Synthetic oligonucleotide
  Sense strand starting at position 541 of SEQ ID NO: 1884956
aaugucagccucugguaga

SEQ ID NO: 2304941 - RNA, 19 nt, Artificial Sequence
  Description of Artificial Sequence: Synthetic oligonucleotide
  Antisense strand to SEQ ID NO: 2304940
ucuaccagaggcugacauu

SEQ ID NO: 2304942 - RNA, 19 nt, Artificial Sequence
  Description of Artificial Sequence: Synthetic oligonucleotide
  Sense strand starting at position 561 of SEQ ID NO: 1884956
aagugcuacucccagagaa

SEQ ID NO: 2304943 - RNA, 19 nt, Artificial Sequence
  Description of Artificial Sequence: Synthetic oligonucleotide
  Antisense strand to SEQ ID NO: 2304942
uucucugggaguagcacuu

SEQ ID NO: 2304944 - RNA, 19 nt, Artificial Sequence
  Description of Artificial Sequence: Synthetic oligonucleotide
  Sense strand starting at position 763 of SEQ ID NO: 1884956
aggaaauucuaaggcauuu

SEQ ID NO: 2304945 - RNA, 19 nt, Artificial Sequence
  Description of Artificial Sequence: Synthetic oligonucleotide
  Antisense strand to SEQ ID NO: 2304944
aaaugccuuagaauuuccu

SEQ ID NO: 2304946 - RNA, 19 nt, Artificial Sequence
  Description of Artificial Sequence: Synthetic oligonucleotide
  Sense strand starting at position 853 of SEQ ID NO: 1884956
gcaagcaaggaaugaguuu

SEQ ID NO: 2304947 - RNA, 19 nt, Artificial Sequence
  Description of Artificial Sequence: Synthetic oligonucleotide
  Antisense strand to SEQ ID NO: 2304946
aaacucauuccuugcuugc

SEQ ID NO: 2304948 - RNA, 19 nt, Artificial Sequence
  Description of Artificial Sequence: Synthetic oligonucleotide
  Sense strand starting at position 904 of SEQ ID NO: 1884956
gggagucggcagugucaga

SEQ ID NO: 2304949 - RNA, 19 nt, Artificial Sequence
  Description of Artificial Sequence: Synthetic oligonucleotide
  Antisense strand to SEQ ID NO: 2304948
ucugacacugccgacuccc

SEQ ID NO: 2304950 - RNA, 19 nt, Artificial Sequence
  Description of Artificial Sequence: Synthetic oligonucleotide
  Sense strand starting at position 1260 of SEQ ID NO: 1884956
acaagacacgugugcauau

SEQ ID NO: 2304951 - RNA, 19 nt, Artificial Sequence
  Description of Artificial Sequence: Synthetic oligonucleotide
  Antisense strand to SEQ ID NO: 2304950
auaugcacacgugucuugu

SEQ ID NO: 2304952 - RNA, 19 nt, Artificial Sequence
  Description of Artificial Sequence: Synthetic oligonucleotide
  Sense strand starting at position 1437 of SEQ ID NO: 1884956
ugcguauauacguaugcau

SEQ ID NO: 2304953 - RNA, 19 nt, Artificial Sequence
  Description of Artificial Sequence: Synthetic oligonucleotide
  Antisense strand to SEQ ID NO: 2304952
augcauacguauauacgca

SEQ ID NO: 2304954 - RNA, 19 nt, Artificial Sequence
  Description of Artificial Sequence: Synthetic oligonucleotide
  Sense strand starting at position 1439 of SEQ ID NO: 1884956
cguauauacguaugcaugu

SEQ ID NO: 2304955 - RNA, 19 nt, Artificial Sequence
  Description of Artificial Sequence: Synthetic oligonucleotide
  Antisense strand to SEQ ID NO: 2304954
acaugcauacguauauacg

SEQ ID NO: 2304956 - RNA, 19 nt, Artificial Sequence
  Description of Artificial Sequence: Synthetic oligonucleotide
  Sense strand starting at position 1440 of SEQ ID NO: 1884956
guauauacguaugcaugua

SEQ ID NO: 2304957 - RNA, 19 nt, Artificial Sequence
  Description of Artificial Sequence: Synthetic oligonucleotide
  Antisense strand to SEQ ID NO: 2304956
uacaugcauacguauauac

SEQ ID NO: 2304958 - RNA, 19 nt, Artificial Sequence
  Description of Artificial Sequence: Synthetic oligonucleotide
  Sense strand starting at position 1800 of SEQ ID NO: 1884956
gucugcuuaccuguguuua

SEQ ID NO: 2304959 - RNA, 19 nt, Artificial Sequence
  Description of Artificial Sequence: Synthetic oligonucleotide
  Antisense strand to SEQ ID NO: 2304958
uaaacacagguaagcagac

SEQ ID NO: 2304960 - RNA, 19 nt, Artificial Sequence
  Description of Artificial Sequence: Synthetic oligonucleotide
  Sense strand starting at position 1994 of SEQ ID NO: 1884956
gcagauugcuaagucauau

SEQ ID NO: 2304961 - RNA, 19 nt, Artificial Sequence
  Description of Artificial Sequence: Synthetic oligonucleotide
  Antisense strand to SEQ ID NO: 2304960
auaugacuuagcaaucugc

SEQ ID NO: 2304962 - RNA, 19 nt, Artificial Sequence
  Description of Artificial Sequence: Synthetic oligonucleotide
  Sense strand starting at position 2047 of SEQ ID NO: 1884956
ucgaauaacugucgaauuu

SEQ ID NO: 2304963 - RNA, 19 nt, Artificial Sequence
  Description of Artificial Sequence: Synthetic oligonucleotide
  Antisense strand to SEQ ID NO: 2304962
aaauucgacaguuauucga

SEQ ID NO: 2304964 - RNA, 19 nt, Artificial Sequence
  Description of Artificial Sequence: Synthetic oligonucleotide
  Sense strand starting at position 2056 of SEQ ID NO: 1884956
ugucgaauuucccacaauu

SEQ ID NO: 2304965 - RNA, 19 nt, Artificial Sequence
  Description of Artificial Sequence: Synthetic oligonucleotide
  Antisense strand to SEQ ID NO: 2304964
aauugugggaaauucgaca

SEQ ID NO: 2304966 - RNA, 19 nt, Artificial Sequence
  Description of Artificial Sequence: Synthetic oligonucleotide
  Sense strand starting at position 2194 of SEQ ID NO: 1884956
ggcacaauagaauguccua

SEQ ID NO: 2304967 - RNA, 19 nt, Artificial Sequence
  Description of Artificial Sequence: Synthetic oligonucleotide
  Antisense strand to SEQ ID NO: 2304966
uaggacauucuauugugcc

SEQ ID NO: 2304968 - RNA, 19 nt, Artificial Sequence
  Description of Artificial Sequence: Synthetic oligonucleotide
  Sense strand starting at position 2232 of SEQ ID NO: 1884956
gcgaauuguacugcugucu

SEQ ID NO: 2304969 - RNA, 19 nt, Artificial Sequence
  Description of Artificial Sequence: Synthetic oligonucleotide
  Antisense strand to SEQ ID NO: 2304968
agacagcaguacaauucgc

SEQ ID NO: 2304970 - RNA, 19 nt, Artificial Sequence
  Description of Artificial Sequence: Synthetic oligonucleotide
  Sense strand starting at position 2237 of SEQ ID NO: 1884956
uuguacugcugucuagauu

SEQ ID NO: 2304971 - RNA, 19 nt, Artificial Sequence
  Description of Artificial Sequence: Synthetic oligonucleotide
  Antisense strand to SEQ ID NO: 2304970
aaucuagacagcaguacaa

SEQ ID NO: 2304972 - RNA, 19 nt, Artificial Sequence
  Description of Artificial Sequence: Synthetic oligonucleotide
  Sense strand starting at position 2319 of SEQ ID NO: 1884956
ggaaccaguugauugguua

SEQ ID NO: 2304973 - RNA, 19 nt, Artificial Sequence
  Description of Artificial Sequence: Synthetic oligonucleotide
  Antisense strand to SEQ ID NO: 2304972
uaaccaaucaacugguucc

SEQ ID NO: 2304974 - RNA, 19 nt, Artificial Sequence
  Description of Artificial Sequence: Synthetic oligonucleotide
  Sense strand starting at position 2344 of SEQ ID NO: 1884956
ccagguauuggcugccgau

SEQ ID NO: 2304975 - RNA, 19 nt, Artificial Sequence
  Description of Artificial Sequence: Synthetic oligonucleotide
  Antisense strand to SEQ ID NO: 2304974
aucggcagccaauaccugg

SEQ ID NO: 2304976 - RNA, 19 nt, Artificial Sequence
  Description of Artificial Sequence: Synthetic oligonucleotide
  Sense strand starting at position 2366 of SEQ ID NO: 1884956
agcgugugaggaugguaaa

SEQ ID NO: 2304977 - RNA, 19 nt, Artificial Sequence
  Description of Artificial Sequence: Synthetic oligonucleotide
  Antisense strand to SEQ ID NO: 2304976
uuuaccauccucacacgcu

SEQ ID NO: 2304978 - RNA, 19 nt, Artificial Sequence
  Description of Artificial Sequence: Synthetic oligonucleotide
  Sense strand starting at position 2543 of SEQ ID NO: 1884956
cagguucugucuuugcaau

SEQ ID NO: 2304979 - RNA, 19 nt, Artificial Sequence
  Description of Artificial Sequence: Synthetic oligonucleotide
  Antisense strand to SEQ ID NO: 2304978
auugcaaagacagaaccug

SEQ ID NO: 2304980 - RNA, 19 nt, Artificial Sequence
  Description of Artificial Sequence: Synthetic oligonucleotide
  Sense strand starting at position 2545 of SEQ ID NO: 1884956
gguucugucuuugcaauga

SEQ ID NO: 2304981 - RNA, 19 nt, Artificial Sequence
  Description of Artificial Sequence: Synthetic oligonucleotide
  Antisense strand to SEQ ID NO: 2304980
ucauugcaaagacagaacc

SEQ ID NO: 2304982 - RNA, 19 nt, Artificial Sequence
  Description of Artificial Sequence: Synthetic oligonucleotide
  Sense strand starting at position 2549 of SEQ ID NO: 1884956
cugucuuugcaaugaugaa

SEQ ID NO: 2304983 - RNA, 19 nt, Artificial Sequence
  Description of Artificial Sequence: Synthetic oligonucleotide
  Antisense strand to SEQ ID NO: 2304982
uucaucauugcaaagacag

SEQ ID NO: 2304984 - RNA, 19 nt, Artificial Sequence
  Description of Artificial Sequence: Synthetic oligonucleotide
  Sense strand starting at position 2813 of SEQ ID NO: 1884956
cuugacaucugggaagaga

SEQ ID NO: 2304985 - RNA, 19 nt, Artificial Sequence
  Description of Artificial Sequence: Synthetic oligonucleotide
  Antisense strand to SEQ ID NO: 2304984
ucucuucccagaugucaag

SEQ ID NO: 2304986 - RNA, 19 nt, Artificial Sequence
  Description of Artificial Sequence: Synthetic oligonucleotide
  Sense strand starting at position 3321 of SEQ ID NO: 1884956
gaauguggcugagaccuua

SEQ ID NO: 2304987 - RNA, 19 nt, Artificial Sequence
  Description of Artificial Sequence: Synthetic oligonucleotide
  Antisense strand to SEQ ID NO: 2304986
uaaggucucagccacauuc

SEQ ID NO: 2304988 - RNA, 19 nt, Artificial Sequence
  Description of Artificial Sequence: Synthetic oligonucleotide
  Sense strand starting at position 3393 of SEQ ID NO: 1884956
cccauugaugugcagaaga

SEQ ID NO: 2304989 - RNA, 19 nt, Artificial Sequence
  Description of Artificial Sequence: Synthetic oligonucleotide
  Antisense strand to SEQ ID NO: 2304988
ucuucugcacaucaauggg

SEQ ID NO: 2304990 - RNA, 19 nt, Artificial Sequence
  Description of Artificial Sequence: Synthetic oligonucleotide
  Sense strand starting at position 3395 of SEQ ID NO: 1884956
cauugaugugcagaagagu

SEQ ID NO: 2304991 - RNA, 19 nt, Artificial Sequence
  Description of Artificial Sequence: Synthetic oligonucleotide
  Antisense strand to SEQ ID NO: 2304990
acucuucugcacaucaaug

SEQ ID NO: 2304992 - RNA, 19 nt, Artificial Sequence
  Description of Artificial Sequence: Synthetic oligonucleotide
  Sense strand starting at position 3900 of SEQ ID NO: 1884956
gugaaaugggagugaaagu

SEQ ID NO: 2304993 - RNA, 19 nt, Artificial Sequence
  Description of Artificial Sequence: Synthetic oligonucleotide
  Antisense strand to SEQ ID NO: 2304992
acuuucacucccauuucac

SEQ ID NO: 2304994 - RNA, 19 nt, Artificial Sequence
  Description of Artificial Sequence: Synthetic oligonucleotide
  Sense strand starting at position 3940 of SEQ ID NO: 1884956
ggcugcugugaggaugaau

SEQ ID NO: 2304995 - RNA, 19 nt, Artificial Sequence
  Description of Artificial Sequence: Synthetic oligonucleotide
  Antisense strand to SEQ ID NO: 2304994
auucauccucacagcagcc

SEQ ID NO: 2304996 - RNA, 19 nt, Artificial Sequence
  Description of Artificial Sequence: Synthetic oligonucleotide
  Sense strand starting at position 31 of SEQ ID NO: 1884961
ggaugaucuuaagcaguaa

SEQ ID NO: 2304997 - RNA, 19 nt, Artificial Sequence
  Description of Artificial Sequence: Synthetic oligonucleotide
  Antisense strand to SEQ ID NO: 2304996
uuacugcuuaagaucaucc

SEQ ID NO: 2304998 - RNA, 19 nt, Artificial Sequence
  Description of Artificial Sequence: Synthetic oligonucleotide
  Sense strand starting at position 44 of SEQ ID NO: 1884961
caguaaauaucguuuggau

SEQ ID NO: 2304999 - RNA, 19 nt, Artificial Sequence
  Description of Artificial Sequence: Synthetic oligonucleotide
  Antisense strand to SEQ ID NO: 2304998
auccaaacgauauuuacug

SEQ ID NO: 2305000 - RNA, 19 nt, Artificial Sequence
  Description of Artificial Sequence: Synthetic oligonucleotide
  Sense strand starting at position 141 of SEQ ID NO: 1884961
cuaagacuuccguaauucu

SEQ ID NO: 2305001 - RNA, 19 nt, Artificial Sequence
  Description of Artificial Sequence: Synthetic oligonucleotide
  Antisense strand to SEQ ID NO: 2305000
agaauuacggaagucuuag

SEQ ID NO: 2305002 - RNA, 19 nt, Artificial Sequence
  Description of Artificial Sequence: Synthetic oligonucleotide
  Sense strand starting at position 173 of SEQ ID NO: 1884961
uaggguaauguguaacucu

SEQ ID NO: 2305003 - RNA, 19 nt, Artificial Sequence
  Description of Artificial Sequence: Synthetic oligonucleotide
  Antisense strand to SEQ ID NO: 2305002
agaguuacacauuacccua

SEQ ID NO: 2305004 - RNA, 19 nt, Artificial Sequence
  Description of Artificial Sequence: Synthetic oligonucleotide
  Sense strand starting at position 379 of SEQ ID NO: 1884961
agguuugcagcagagagaa

SEQ ID NO: 2305005 - RNA, 19 nt, Artificial Sequence
  Description of Artificial Sequence: Synthetic oligonucleotide
  Antisense strand to SEQ ID NO: 2305004
uucucucugcugcaaaccu

SEQ ID NO: 2305006 - RNA, 19 nt, Artificial Sequence
  Description of Artificial Sequence: Synthetic oligonucleotide
  Sense strand starting at position 473 of SEQ ID NO: 1884961
ggacucuggcccugcaaga

SEQ ID NO: 2305007 - RNA, 19 nt, Artificial Sequence
  Description of Artificial Sequence: Synthetic oligonucleotide
  Antisense strand to SEQ ID NO: 2305006
ucuugcagggccagagucc

SEQ ID NO: 2305008 - RNA, 19 nt, Artificial Sequence
  Description of Artificial Sequence: Synthetic oligonucleotide
  Sense strand starting at position 568 of SEQ ID NO: 1884961
ccugaauuuccguggccgu

SEQ ID NO: 2305009 - RNA, 19 nt, Artificial Sequence
  Description of Artificial Sequence: Synthetic oligonucleotide
  Antisense strand to SEQ ID NO: 2305008
acggccacggaaauucagg

SEQ ID NO: 2305010 - RNA, 19 nt, Artificial Sequence
  Description of Artificial Sequence: Synthetic oligonucleotide
  Sense strand starting at position 630 of SEQ ID NO: 1884961
gcagcaauauucccacaug

SEQ ID NO: 2305011 - RNA, 19 nt, Artificial Sequence
  Description of Artificial Sequence: Synthetic oligonucleotide
  Antisense strand to SEQ ID NO: 2305010
caugugggaauauugcugc

SEQ ID NO: 2305012 - RNA, 19 nt, Artificial Sequence
  Description of Artificial Sequence: Synthetic oligonucleotide
  Sense strand starting at position 764 of SEQ ID NO: 1884961
ucagacuucuaguuggaaa

SEQ ID NO: 2305013 - RNA, 19 nt, Artificial Sequence
  Description of Artificial Sequence: Synthetic oligonucleotide
  Antisense strand to SEQ ID NO: 2305012
uuuccaacuagaagucuga

SEQ ID NO: 2305014 - RNA, 19 nt, Artificial Sequence
  Description of Artificial Sequence: Synthetic oligonucleotide
  Sense strand starting at position 793 of SEQ ID NO: 1884961
ggaauuaucucucagaaga

SEQ ID NO: 2305015 - RNA, 19 nt, Artificial Sequence
  Description of Artificial Sequence: Synthetic oligonucleotide
  Antisense strand to SEQ ID NO: 2305014
ucuucugagagauaauucc

SEQ ID NO: 2305016 - RNA, 19 nt, Artificial Sequence
  Description of Artificial Sequence: Synthetic oligonucleotide
  Sense strand starting at position 907 of SEQ ID NO: 1884961
acaacuguaccagguaaca

SEQ ID NO: 2305017 - RNA, 19 nt, Artificial Sequence
  Description of Artificial Sequence: Synthetic oligonucleotide
  Antisense strand to SEQ ID NO: 2305016
uguuaccugguacaguugu

SEQ ID NO: 2305018 - RNA, 19 nt, Artificial Sequence
  Description of Artificial Sequence: Synthetic oligonucleotide
  Sense strand starting at position 933 of SEQ ID NO: 1884961
aguuucgguucuguaaaca

SEQ ID NO: 2305019 - RNA, 19 nt, Artificial Sequence
  Description of Artificial Sequence: Synthetic oligonucleotide
  Antisense strand to SEQ ID NO: 2305018
uguuuacagaaccgaaacu

SEQ ID NO: 2305020 - RNA, 19 nt, Artificial Sequence
  Description of Artificial Sequence: Synthetic oligonucleotide
  Sense strand starting at position 966 of SEQ ID NO: 1884961
acauuuggcuuaguuagua

SEQ ID NO: 2305021 - RNA, 19 nt, Artificial Sequence
  Description of Artificial Sequence: Synthetic oligonucleotide
  Antisense strand to SEQ ID NO: 2305020
uacuaacuaagccaaaugu

SEQ ID NO: 2305022 - RNA, 19 nt, Artificial Sequence
  Description of Artificial Sequence: Synthetic oligonucleotide
  Sense strand starting at position 970 of SEQ ID NO: 1884961
uuggcuuaguuaguaagaa

SEQ ID NO: 2305023 - RNA, 19 nt, Artificial Sequence
  Description of Artificial Sequence: Synthetic oligonucleotide
  Antisense strand to SEQ ID NO: 2305022
uucuuacuaacuaagccaa

SEQ ID NO: 2305024 - RNA, 19 nt, Artificial Sequence
  Description of Artificial Sequence: Synthetic oligonucleotide
  Sense strand starting at position 2342 of SEQ ID NO: 1884961
cuauucuauguguaauggu

SEQ ID NO: 2305025 - RNA, 19 nt, Artificial Sequence
  Description of Artificial Sequence: Synthetic oligonucleotide
  Antisense strand to SEQ ID NO: 2305024
accauuacacauagaauag

SEQ ID NO: 2305026 - RNA, 19 nt, Artificial Sequence
  Description of Artificial Sequence: Synthetic oligonucleotide
  Sense strand starting at position 2349 of SEQ ID NO: 1884961
auguguaaugguggauaug

SEQ ID NO: 2305027 - RNA, 19 nt, Artificial Sequence
  Description of Artificial Sequence: Synthetic oligonucleotide
  Antisense strand to SEQ ID NO: 2305026
cauauccaccauuacacau

SEQ ID NO: 2305028 - RNA, 19 nt, Artificial Sequence
  Description of Artificial Sequence: Synthetic oligonucleotide
  Sense strand starting at position 2350 of SEQ ID NO: 1884961
uguguaaugguggauaugu

SEQ ID NO: 2305029 - RNA, 19 nt, Artificial Sequence
  Description of Artificial Sequence: Synthetic oligonucleotide
  Antisense strand to SEQ ID NO: 2305028
acauauccaccauuacaca

SEQ ID NO: 2305030 - RNA, 19 nt, Artificial Sequence
  Description of Artificial Sequence: Synthetic oligonucleotide
  Sense strand starting at position 2352 of SEQ ID NO: 1884961
uguaaugguggauauguua

SEQ ID NO: 2305031 - RNA, 19 nt, Artificial Sequence
  Description of Artificial Sequence: Synthetic oligonucleotide
  Antisense strand to SEQ ID NO: 2305030
uaacauauccaccauuaca

SEQ ID NO: 2305032 - RNA, 19 nt, Artificial Sequence
  Description of Artificial Sequence: Synthetic oligonucleotide
  Sense strand starting at position 2361 of SEQ ID NO: 1884961
ggauauguuauaggaggca

SEQ ID NO: 2305033 - RNA, 19 nt, Artificial Sequence
  Description of Artificial Sequence: Synthetic oligonucleotide
  Antisense strand to SEQ ID NO: 2305032
ugccuccuauaacauaucc

SEQ ID NO: 2305034 - RNA, 19 nt, Artificial Sequence
  Description of Artificial Sequence: Synthetic oligonucleotide
  Sense strand starting at position 2382 of SEQ ID NO: 1884961
aacgaauuauuuggguaga

SEQ ID NO: 2305035 - RNA, 19 nt, Artificial Sequence
  Description of Artificial Sequence: Synthetic oligonucleotide
  Antisense strand to SEQ ID NO: 2305034
ucuacccaaauaauucguu

SEQ ID NO: 2305036 - RNA, 19 nt, Artificial Sequence
  Description of Artificial Sequence: Synthetic oligonucleotide
  Sense strand starting at position 2383 of SEQ ID NO: 1884961
acgaauuauuuggguagac

SEQ ID NO: 2305037 - RNA, 19 nt, Artificial Sequence
  Description of Artificial Sequence: Synthetic oligonucleotide
  Antisense strand to SEQ ID NO: 2305036
gucuacccaaauaauucgu

SEQ ID NO: 2305038 - RNA, 19 nt, Artificial Sequence
  Description of Artificial Sequence: Synthetic oligonucleotide
  Sense strand starting at position 2580 of SEQ ID NO: 1884961
gagagucucccggguaauc

SEQ ID NO: 2305039 - RNA, 19 nt, Artificial Sequence
  Description of Artificial Sequence: Synthetic oligonucleotide
  Antisense strand to SEQ ID NO: 2305038
gauuacccgggagacucuc

SEQ ID NO: 2305040 - RNA, 19 nt, Artificial Sequence
  Description of Artificial Sequence: Synthetic oligonucleotide
  Sense strand starting at position 2589 of SEQ ID NO: 1884961
ccggguaaucaccaagcuu

SEQ ID NO: 2305041 - RNA, 19 nt, Artificial Sequence
  Description of Artificial Sequence: Synthetic oligonucleotide
  Antisense strand to SEQ ID NO: 2305040
aagcuuggugauuacccgg

SEQ ID NO: 2305042 - RNA, 19 nt, Artificial Sequence
  Description of Artificial Sequence: Synthetic oligonucleotide
  Sense strand starting at position 2957 of SEQ ID NO: 1884961
uuggcaaucuucucaggau

SEQ ID NO: 2305043 - RNA, 19 nt, Artificial Sequence
  Description of Artificial Sequence: Synthetic oligonucleotide
  Antisense strand to SEQ ID NO: 2305042
auccugagaagauugccaa

SEQ ID NO: 2305044 - RNA, 19 nt, Artificial Sequence
  Description of Artificial Sequence: Synthetic oligonucleotide
  Sense strand starting at position 3074 of SEQ ID NO: 1884961
ccaugagacuaagaaucuu

SEQ ID NO: 2305045 - RNA, 19 nt, Artificial Sequence
  Description of Artificial Sequence: Synthetic oligonucleotide
  Antisense strand to SEQ ID NO: 2305044
aagauucuuagucucaugg

SEQ ID NO: 2305046 - RNA, 19 nt, Artificial Sequence
  Description of Artificial Sequence: Synthetic oligonucleotide
  Sense strand starting at position 3112 of SEQ ID NO: 1884961
gaggcugcugcagauauau

SEQ ID NO: 2305047 - RNA, 19 nt, Artificial Sequence
  Description of Artificial Sequence: Synthetic oligonucleotide
  Antisense strand to SEQ ID NO: 2305046
auauaucugcagcagccuc

SEQ ID NO: 2305048 - RNA, 19 nt, Artificial Sequence
  Description of Artificial Sequence: Synthetic oligonucleotide
  Sense strand starting at position 3114 of SEQ ID NO: 1884961
ggcugcugcagauauaucu

SEQ ID NO: 2305049 - RNA, 19 nt, Artificial Sequence
  Description of Artificial Sequence: Synthetic oligonucleotide
  Antisense strand to SEQ ID NO: 2305048
agauauaucugcagcagcc

SEQ ID NO: 2305050 - RNA, 19 nt, Artificial Sequence
  Description of Artificial Sequence: Synthetic oligonucleotide
  Sense strand starting at position 3129 of SEQ ID NO: 1884961
aucucacauguuugucaaa

SEQ ID NO: 2305051 - RNA, 19 nt, Artificial Sequence
  Description of Artificial Sequence: Synthetic oligonucleotide
  Antisense strand to SEQ ID NO: 2305050
uuugacaaacaugugagau

SEQ ID NO: 2305052 - RNA, 19 nt, Artificial Sequence
  Description of Artificial Sequence: Synthetic oligonucleotide
  Sense strand starting at position 3176 of SEQ ID NO: 1884961
acccuaaacgauggacuua

SEQ ID NO: 2305053 - RNA, 19 nt, Artificial Sequence
  Description of Artificial Sequence: Synthetic oligonucleotide
  Antisense strand to SEQ ID NO: 2305052
uaaguccaucguuuagggu

SEQ ID NO: 2305054 - RNA, 19 nt, Artificial Sequence
  Description of Artificial Sequence: Synthetic oligonucleotide
  Sense strand starting at position 3239 of SEQ ID NO: 1884961
acuaaugggcaauguuaau

SEQ ID NO: 2305055 - RNA, 19 nt, Artificial Sequence
  Description of Artificial Sequence: Synthetic oligonucleotide
  Antisense strand to SEQ ID NO: 2305054
auuaacauugcccauuagu

SEQ ID NO: 2305056 - RNA, 19 nt, Artificial Sequence
  Description of Artificial Sequence: Synthetic oligonucleotide
  Sense strand starting at position 3537 of SEQ ID NO: 1884961
aggauacaguaagauuaua

SEQ ID NO: 2305057 - RNA, 19 nt, Artificial Sequence
  Description of Artificial Sequence: Synthetic oligonucleotide
  Antisense strand to SEQ ID NO: 2305056
uauaaucuuacuguauccu

SEQ ID NO: 2305058 - RNA, 19 nt, Artificial Sequence
  Description of Artificial Sequence: Synthetic oligonucleotide
  Sense strand starting at position 3597 of SEQ ID NO: 1884961
gaaguagugccuuaauagu

SEQ ID NO: 2305059 - RNA, 19 nt, Artificial Sequence
  Description of Artificial Sequence: Synthetic oligonucleotide
  Antisense strand to SEQ ID NO: 2305058
acuauuaaggcacuacuuc

SEQ ID NO: 2305060 - RNA, 19 nt, Artificial Sequence
  Description of Artificial Sequence: Synthetic oligonucleotide
  Sense strand starting at position 3679 of SEQ ID NO: 1884961
uuuauugcuuguguaacaa

SEQ ID NO: 2305061 - RNA, 19 nt, Artificial Sequence
  Description of Artificial Sequence: Synthetic oligonucleotide
  Antisense strand to SEQ ID NO: 2305060
uuguuacacaagcaauaaa

SEQ ID NO: 2305062 - RNA, 19 nt, Artificial Sequence
  Description of Artificial Sequence: Synthetic oligonucleotide
  Sense strand starting at position 3903 of SEQ ID NO: 1884961
uugacuagguuucuuaaau

SEQ ID NO: 2305063 - RNA, 19 nt, Artificial Sequence
  Description of Artificial Sequence: Synthetic oligonucleotide
  Antisense strand to SEQ ID NO: 2305062
auuuaagaaaccuagucaa

SEQ ID NO: 2305064 - RNA, 19 nt, Artificial Sequence
  Description of Artificial Sequence: Synthetic oligonucleotide
  Sense strand starting at position 3904 of SEQ ID NO: 1884961
ugacuagguuucuuaaaug

SEQ ID NO: 2305065 - RNA, 19 nt, Artificial Sequence
  Description of Artificial Sequence: Synthetic oligonucleotide
  Antisense strand to SEQ ID NO: 2305064
cauuuaagaaaccuaguca

SEQ ID NO: 2305066 - RNA, 19 nt, Artificial Sequence
  Description of Artificial Sequence: Synthetic oligonucleotide
  Sense strand starting at position 3909 of SEQ ID NO: 1884961
agguuucuuaaauguguca

SEQ ID NO: 2305067 - RNA, 19 nt, Artificial Sequence
  Description of Artificial Sequence: Synthetic oligonucleotide
  Antisense strand to SEQ ID NO: 2305066
ugacacauuuaagaaaccu

SEQ ID NO: 2305068 - RNA, 19 nt, Artificial Sequence
  Description of Artificial Sequence: Synthetic oligonucleotide
  Sense strand starting at position 3912 of SEQ ID NO: 1884961
uuucuuaaaugugucauca

SEQ ID NO: 2305069 - RNA, 19 nt, Artificial Sequence
  Description of Artificial Sequence: Synthetic oligonucleotide
  Antisense strand to SEQ ID NO: 2305068
ugaugacacauuuaagaaa

SEQ ID NO: 2305070 - RNA, 19 nt, Artificial Sequence
  Description of Artificial Sequence: Synthetic oligonucleotide
  Sense strand starting at position 3916 of SEQ ID NO: 1884961
uuaaaugugucaucacagu

SEQ ID NO: 2305071 - RNA, 19 nt, Artificial Sequence
  Description of Artificial Sequence: Synthetic oligonucleotide
  Antisense strand to SEQ ID NO: 2305070
acugugaugacacauuuaa

SEQ ID NO: 2305072 - RNA, 19 nt, Artificial Sequence
  Description of Artificial Sequence: Synthetic oligonucleotide
  Sense strand starting at position 3922 of SEQ ID NO: 1884961
gugucaucacaguaaauga

SEQ ID NO: 2305073 - RNA, 19 nt, Artificial Sequence
  Description of Artificial Sequence: Synthetic oligonucleotide
  Antisense strand to SEQ ID NO: 2305072
ucauuuacugugaugacac

SEQ ID NO: 2305074 - RNA, 19 nt, Artificial Sequence
  Description of Artificial Sequence: Synthetic oligonucleotide
  Sense strand starting at position 3944 of SEQ ID NO: 1884961
guaagcccaugucuauuau

SEQ ID NO: 2305075 - RNA, 19 nt, Artificial Sequence
  Description of Artificial Sequence: Synthetic oligonucleotide
  Antisense strand to SEQ ID NO: 2305074
auaauagacaugggcuuac

SEQ ID NO: 2305076 - RNA, 19 nt, Artificial Sequence
  Description of Artificial Sequence: Synthetic oligonucleotide
  Sense strand starting at position 33 of SEQ ID NO: 1884958
ugucaagccuguuccaaua

SEQ ID NO: 2305077 - RNA, 19 nt, Artificial Sequence
  Description of Artificial Sequence: Synthetic oligonucleotide
  Antisense strand to SEQ ID NO: 2305076
uauuggaacaggcuugaca

SEQ ID NO: 2305078 - RNA, 19 nt, Artificial Sequence
  Description of Artificial Sequence: Synthetic oligonucleotide
  Sense strand starting at position 97 of SEQ ID NO: 1884958
gauuguaaaggcuggagua

SEQ ID NO: 2305079 - RNA, 19 nt, Artificial Sequence
  Description of Artificial Sequence: Synthetic oligonucleotide
  Antisense strand to SEQ ID NO: 2305078
uacuccagccuuuacaauc

SEQ ID NO: 2305080 - RNA, 19 nt, Artificial Sequence
  Description of Artificial Sequence: Synthetic oligonucleotide
  Sense strand starting at position 98 of SEQ ID NO: 1884958
auuguaaaggcuggaguau

SEQ ID NO: 2305081 - RNA, 19 nt, Artificial Sequence
  Description of Artificial Sequence: Synthetic oligonucleotide
  Antisense strand to SEQ ID NO: 2305080
auacuccagccuuuacaau

SEQ ID NO: 2305082 - RNA, 19 nt, Artificial Sequence
  Description of Artificial Sequence: Synthetic oligonucleotide
  Sense strand starting at position 107 of SEQ ID NO: 1884958
gcuggaguaugcuagugaa

SEQ ID NO: 2305083 - RNA, 19 nt, Artificial Sequence
  Description of Artificial Sequence: Synthetic oligonucleotide
  Antisense strand to SEQ ID NO: 2305082
uucacuagcauacuccagc

SEQ ID NO: 2305084 - RNA, 19 nt, Artificial Sequence
  Description of Artificial Sequence: Synthetic oligonucleotide
  Sense strand starting at position 162 of SEQ ID NO: 1884958
acaugauuaggccaucugu

SEQ ID NO: 2305085 - RNA, 19 nt, Artificial Sequence
  Description of Artificial Sequence: Synthetic oligonucleotide
  Antisense strand to SEQ ID NO: 2305084
acagauggccuaaucaugu

SEQ ID NO: 2305086 - RNA, 19 nt, Artificial Sequence
  Description of Artificial Sequence: Synthetic oligonucleotide
  Sense strand starting at position 285 of SEQ ID NO: 1884958
ccaggucuuugagaaagau

SEQ ID NO: 2305087 - RNA, 19 nt, Artificial Sequence
  Description of Artificial Sequence: Synthetic oligonucleotide
  Antisense strand to SEQ ID NO: 2305086
aucuuucucaaagaccugg

SEQ ID NO: 2305088 - RNA, 19 nt, Artificial Sequence
  Description of Artificial Sequence: Synthetic oligonucleotide
  Sense strand starting at position 368 of SEQ ID NO: 1884958
aagaauuuauagugggaag

SEQ ID NO: 2305089 - RNA, 19 nt, Artificial Sequence
  Description of Artificial Sequence: Synthetic oligonucleotide
  Antisense strand to SEQ ID NO: 2305088
cuucccacuauaaauucuu

SEQ ID NO: 2305090 - RNA, 19 nt, Artificial Sequence
  Description of Artificial Sequence: Synthetic oligonucleotide
  Sense strand starting at position 371 of SEQ ID NO: 1884958
aauuuauagugggaaguuu

SEQ ID NO: 2305091 - RNA, 19 nt, Artificial Sequence
  Description of Artificial Sequence: Synthetic oligonucleotide
  Antisense strand to SEQ ID NO: 2305090
aaacuucccacuauaaauu

SEQ ID NO: 2305092 - RNA, 19 nt, Artificial Sequence
  Description of Artificial Sequence: Synthetic oligonucleotide
  Sense strand starting at position 426 of SEQ ID NO: 1884958
agugauacgucagggagaa

SEQ ID NO: 2305093 - RNA, 19 nt, Artificial Sequence
  Description of Artificial Sequence: Synthetic oligonucleotide
  Antisense strand to SEQ ID NO: 2305092
uucucccugacguaucacu

SEQ ID NO: 2305094 - RNA, 19 nt, Artificial Sequence
  Description of Artificial Sequence: Synthetic oligonucleotide
  Sense strand starting at position 427 of SEQ ID NO: 1884958
gugauacgucagggagaaa

SEQ ID NO: 2305095 - RNA, 19 nt, Artificial Sequence
  Description of Artificial Sequence: Synthetic oligonucleotide
  Antisense strand to SEQ ID NO: 2305094
uuucucccugacguaucac

SEQ ID NO: 2305096 - RNA, 19 nt, Artificial Sequence
  Description of Artificial Sequence: Synthetic oligonucleotide
  Sense strand starting at position 439 of SEQ ID NO: 1884958
ggagaaaucugucuaaagu

SEQ ID NO: 2305097 - RNA, 19 nt, Artificial Sequence
  Description of Artificial Sequence: Synthetic oligonucleotide
  Antisense strand to SEQ ID NO: 2305096
acuuuagacagauuucucc

SEQ ID NO: 2305098 - RNA, 19 nt, Artificial Sequence
  Description of Artificial Sequence: Synthetic oligonucleotide
  Sense strand starting at position 524 of SEQ ID NO: 1884958
gagguaccuugacauuaac

SEQ ID NO: 2305099 - RNA, 19 nt, Artificial Sequence
  Description of Artificial Sequence: Synthetic oligonucleotide
  Antisense strand to SEQ ID NO: 2305098
guuaaugucaagguaccuc

SEQ ID NO: 2305100 - RNA, 19 nt, Artificial Sequence
  Description of Artificial Sequence: Synthetic oligonucleotide
  Sense strand starting at position 581 of SEQ ID NO: 1884958
uuuauuuacguuugcaaag

SEQ ID NO: 2305101 - RNA, 19 nt, Artificial Sequence
  Description of Artificial Sequence: Synthetic oligonucleotide
  Antisense strand to SEQ ID NO: 2305100
cuuugcaaacguaaauaaa

SEQ ID NO: 2305102 - RNA, 19 nt, Artificial Sequence
  Description of Artificial Sequence: Synthetic oligonucleotide
  Sense strand starting at position 590 of SEQ ID NO: 1884958
guuugcaaagucuaagcaa

SEQ ID NO: 2305103 - RNA, 19 nt, Artificial Sequence
  Description of Artificial Sequence: Synthetic oligonucleotide
  Antisense strand to SEQ ID NO: 2305102
uugcuuagacuuugcaaac

SEQ ID NO: 2305104 - RNA, 19 nt, Artificial Sequence
  Description of Artificial Sequence: Synthetic oligonucleotide
  Sense strand starting at position 593 of SEQ ID NO: 1884958
ugcaaagucuaagcaauau

SEQ ID NO: 2305105 - RNA, 19 nt, Artificial Sequence
  Description of Artificial Sequence: Synthetic oligonucleotide
  Antisense strand to SEQ ID NO: 2305104
auauugcuuagacuuugca

SEQ ID NO: 2305106 - RNA, 19 nt, Artificial Sequence
  Description of Artificial Sequence: Synthetic oligonucleotide
  Sense strand starting at position 671 of SEQ ID NO: 1884958
cugguuuaaucugcuugaa

SEQ ID NO: 2305107 - RNA, 19 nt, Artificial Sequence
  Description of Artificial Sequence: Synthetic oligonucleotide
  Antisense strand to SEQ ID NO: 2305106
uucaagcagauuaaaccag

SEQ ID NO: 2305108 - RNA, 19 nt, Artificial Sequence
  Description of Artificial Sequence: Synthetic oligonucleotide
  Sense strand starting at position 673 of SEQ ID NO: 1884958
gguuuaaucugcuugaauu

SEQ ID NO: 2305109 - RNA, 19 nt, Artificial Sequence
  Description of Artificial Sequence: Synthetic oligonucleotide
  Antisense strand to SEQ ID NO: 2305108
aauucaagcagauuaaacc

SEQ ID NO: 2305110 - RNA, 19 nt, Artificial Sequence
  Description of Artificial Sequence: Synthetic oligonucleotide
  Sense strand starting at position 674 of SEQ ID NO: 1884958
guuuaaucugcuugaauuu

SEQ ID NO: 2305111 - RNA, 19 nt, Artificial Sequence
  Description of Artificial Sequence: Synthetic oligonucleotide
  Antisense strand to SEQ ID NO: 2305110
aaauucaagcagauuaaac

SEQ ID NO: 2305112 - RNA, 19 nt, Artificial Sequence
  Description of Artificial Sequence: Synthetic oligonucleotide
  Sense strand starting at position 757 of SEQ ID NO: 1884958
cugugaaguagacacgauu

SEQ ID NO: 2305113 - RNA, 19 nt, Artificial Sequence
  Description of Artificial Sequence: Synthetic oligonucleotide
  Antisense strand to SEQ ID NO: 2305112
aaucgugucuacuucacag

SEQ ID NO: 2305114 - RNA, 19 nt, Artificial Sequence
  Description of Artificial Sequence: Synthetic oligonucleotide
  Sense strand starting at position 793 of SEQ ID NO: 1884958
cuccauguguccugguaua

SEQ ID NO: 2305115 - RNA, 19 nt, Artificial Sequence
  Description of Artificial Sequence: Synthetic oligonucleotide
  Antisense strand to SEQ ID NO: 2305114
uauaccaggacacauggag

SEQ ID NO: 2305116 - RNA, 19 nt, Artificial Sequence
  Description of Artificial Sequence: Synthetic oligonucleotide
  Sense strand starting at position 846 of SEQ ID NO: 1884958
gccugaauuugggaguuga

SEQ ID NO: 2305117 - RNA, 19 nt, Artificial Sequence
  Description of Artificial Sequence: Synthetic oligonucleotide
  Antisense strand to SEQ ID NO: 2305116
ucaacucccaaauucaggc

SEQ ID NO: 2305118 - RNA, 19 nt, Artificial Sequence
  Description of Artificial Sequence: Synthetic oligonucleotide
  Sense strand starting at position 938 of SEQ ID NO: 1884958
ugguaccuccaaugaaaua

SEQ ID NO: 2305119 - RNA, 19 nt, Artificial Sequence
  Description of Artificial Sequence: Synthetic oligonucleotide
  Antisense strand to SEQ ID NO: 2305118
uauuucauuggagguacca

SEQ ID NO: 2305120 - RNA, 19 nt, Artificial Sequence
  Description of Artificial Sequence: Synthetic oligonucleotide
  Sense strand starting at position 1045 of SEQ ID NO: 1884958
cugggaacuguugguaaac

SEQ ID NO: 2305121 - RNA, 19 nt, Artificial Sequence
  Description of Artificial Sequence: Synthetic oligonucleotide
  Antisense strand to SEQ ID NO: 2305120
guuuaccaacaguucccag

SEQ ID NO: 2305122 - RNA, 19 nt, Artificial Sequence
  Description of Artificial Sequence: Synthetic oligonucleotide
  Sense strand starting at position 1046 of SEQ ID NO: 1884958
ugggaacuguugguaaacu

SEQ ID NO: 2305123 - RNA, 19 nt, Artificial Sequence
  Description of Artificial Sequence: Synthetic oligonucleotide
  Antisense strand to SEQ ID NO: 2305122
aguuuaccaacaguuccca

SEQ ID NO: 2305124 - RNA, 19 nt, Artificial Sequence
  Description of Artificial Sequence: Synthetic oligonucleotide
  Sense strand starting at position 1047 of SEQ ID NO: 1884958
gggaacuguugguaaacua

SEQ ID NO: 2305125 - RNA, 19 nt, Artificial Sequence
  Description of Artificial Sequence: Synthetic oligonucleotide
  Antisense strand to SEQ ID NO: 2305124
uaguuuaccaacaguuccc

SEQ ID NO: 2305126 - RNA, 19 nt, Artificial Sequence
  Description of Artificial Sequence: Synthetic oligonucleotide
  Sense strand starting at position 1116 of SEQ ID NO: 1884958
aggaauaacugcuccacuu

SEQ ID NO: 2305127 - RNA, 19 nt, Artificial Sequence
  Description of Artificial Sequence: Synthetic oligonucleotide
  Antisense strand to SEQ ID NO: 2305126
aaguggagcaguuauuccu

SEQ ID NO: 2305128 - RNA, 19 nt, Artificial Sequence
  Description of Artificial Sequence: Synthetic oligonucleotide
  Sense strand starting at position 1152 of SEQ ID NO: 1884958
cauugaagugugcaaacaa

SEQ ID NO: 2305129 - RNA, 19 nt, Artificial Sequence
  Description of Artificial Sequence: Synthetic oligonucleotide
  Antisense strand to SEQ ID NO: 2305128
uuguuugcacacuucaaug

SEQ ID NO: 2305130 - RNA, 19 nt, Artificial Sequence
  Description of Artificial Sequence: Synthetic oligonucleotide
  Sense strand starting at position 1293 of SEQ ID NO: 1884958
gaagccaugucacuuauag

SEQ ID NO: 2305131 - RNA, 19 nt, Artificial Sequence
  Description of Artificial Sequence: Synthetic oligonucleotide
  Antisense strand to SEQ ID NO: 2305130
cuauaagugacauggcuuc

SEQ ID NO: 2305132 - RNA, 19 nt, Artificial Sequence
  Description of Artificial Sequence: Synthetic oligonucleotide
  Sense strand starting at position 1338 of SEQ ID NO: 1884958
uauguauuaccuggagauc

SEQ ID NO: 2305133 - RNA, 19 nt, Artificial Sequence
  Description of Artificial Sequence: Synthetic oligonucleotide
  Antisense strand to SEQ ID NO: 2305132
gaucuccagguaauacaua

SEQ ID NO: 2305134 - RNA, 19 nt, Artificial Sequence
  Description of Artificial Sequence: Synthetic oligonucleotide
  Sense strand starting at position 1385 of SEQ ID NO: 1884958
gguccaggauucuacauuu

SEQ ID NO: 2305135 - RNA, 19 nt, Artificial Sequence
  Description of Artificial Sequence: Synthetic oligonucleotide
  Antisense strand to SEQ ID NO: 2305134
aaauguagaauccuggacc

SEQ ID NO: 2305136 - RNA, 19 nt, Artificial Sequence
  Description of Artificial Sequence: Synthetic oligonucleotide
  Sense strand starting at position 1406 of SEQ ID NO: 1884958
aacaaucucccaggugaga

SEQ ID NO: 2305137 - RNA, 19 nt, Artificial Sequence
  Description of Artificial Sequence: Synthetic oligonucleotide
  Antisense strand to SEQ ID NO: 2305136
ucucaccugggagauuguu

SEQ ID NO: 2305138 - RNA, 19 nt, Artificial Sequence
  Description of Artificial Sequence: Synthetic oligonucleotide
  Sense strand starting at position 1466 of SEQ ID NO: 1884958
uuauaacagugagaaugua

SEQ ID NO: 2305139 - RNA, 19 nt, Artificial Sequence
  Description of Artificial Sequence: Synthetic oligonucleotide
  Antisense strand to SEQ ID NO: 2305138
uacauucucacuguuauaa

SEQ ID NO: 2305140 - RNA, 19 nt, Artificial Sequence
  Description of Artificial Sequence: Synthetic oligonucleotide
  Sense strand starting at position 1613 of SEQ ID NO: 1884958
ucaaaucagucucuuagag

SEQ ID NO: 2305141 - RNA, 19 nt, Artificial Sequence
  Description of Artificial Sequence: Synthetic oligonucleotide
  Antisense strand to SEQ ID NO: 2305140
cucuaagagacugauuuga

SEQ ID NO: 2305142 - RNA, 19 nt, Artificial Sequence
  Description of Artificial Sequence: Synthetic oligonucleotide
  Sense strand starting at position 1617 of SEQ ID NO: 1884958
aucagucucuuagagcauu

SEQ ID NO: 2305143 - RNA, 19 nt, Artificial Sequence
  Description of Artificial Sequence: Synthetic oligonucleotide
  Antisense strand to SEQ ID NO: 2305142
aaugcucuaagagacugau

SEQ ID NO: 2305144 - RNA, 19 nt, Artificial Sequence
  Description of Artificial Sequence: Synthetic oligonucleotide
  Sense strand starting at position 1806 of SEQ ID NO: 1884958
gagaaaucgagcugcagac

SEQ ID NO: 2305145 - RNA, 19 nt, Artificial Sequence
  Description of Artificial Sequence: Synthetic oligonucleotide
  Antisense strand to SEQ ID NO: 2305144
gucugcagcucgauuucuc

SEQ ID NO: 2305146 - RNA, 19 nt, Artificial Sequence
  Description of Artificial Sequence: Synthetic oligonucleotide
  Sense strand starting at position 2606 of SEQ ID NO: 1884958
aaagcugucugacagauuu

SEQ ID NO: 2305147 - RNA, 19 nt, Artificial Sequence
  Description of Artificial Sequence: Synthetic oligonucleotide
  Antisense strand to SEQ ID NO: 2305146
aaaucugucagacagcuuu

SEQ ID NO: 2305148 - RNA, 19 nt, Artificial Sequence
  Description of Artificial Sequence: Synthetic oligonucleotide
  Sense strand starting at position 3099 of SEQ ID NO: 1884958
gcuccucuccagcaauaga

SEQ ID NO: 2305149 - RNA, 19 nt, Artificial Sequence
  Description of Artificial Sequence: Synthetic oligonucleotide
  Antisense strand to SEQ ID NO: 2305148
ucuauugcuggagaggagc

SEQ ID NO: 2305150 - RNA, 19 nt, Artificial Sequence
  Description of Artificial Sequence: Synthetic oligonucleotide
  Sense strand starting at position 3510 of SEQ ID NO: 1884958
guccgauugguauaccuga

SEQ ID NO: 2305151 - RNA, 19 nt, Artificial Sequence
  Description of Artificial Sequence: Synthetic oligonucleotide
  Antisense strand to SEQ ID NO: 2305150
ucagguauaccaaucggac

SEQ ID NO: 2305152 - RNA, 19 nt, Artificial Sequence
  Description of Artificial Sequence: Synthetic oligonucleotide
  Sense strand starting at position 24 of SEQ ID NO: 1884959
gauaacuuguuggaaauag

SEQ ID NO: 2305153 - RNA, 19 nt, Artificial Sequence
  Description of Artificial Sequence: Synthetic oligonucleotide
  Antisense strand to SEQ ID NO: 2305152
cuauuuccaacaaguuauc

SEQ ID NO: 2305154 - RNA, 19 nt, Artificial Sequence
  Description of Artificial Sequence: Synthetic oligonucleotide
  Sense strand starting at position 78 of SEQ ID NO: 1884959
acggcaucauuugcauuau

SEQ ID NO: 2305155 - RNA, 19 nt, Artificial Sequence
  Description of Artificial Sequence: Synthetic oligonucleotide
  Antisense strand to SEQ ID NO: 2305154
auaaugcaaaugaugccgu

SEQ ID NO: 2305156 - RNA, 19 nt, Artificial Sequence
  Description of Artificial Sequence: Synthetic oligonucleotide
  Sense strand starting at position 160 of SEQ ID NO: 1884959
uguucucuugaauauagau

SEQ ID NO: 2305157 - RNA, 19 nt, Artificial Sequence
  Description of Artificial Sequence: Synthetic oligonucleotide
  Antisense strand to SEQ ID NO: 2305156
aucuauauucaagagaaca

SEQ ID NO: 2305158 - RNA, 19 nt, Artificial Sequence
  Description of Artificial Sequence: Synthetic oligonucleotide
  Sense strand starting at position 268 of SEQ ID NO: 1884959
cucguaagcucauuucuca

SEQ ID NO: 2305159 - RNA, 19 nt, Artificial Sequence
  Description of Artificial Sequence: Synthetic oligonucleotide
  Antisense strand to SEQ ID NO: 2305158
ugagaaaugagcuuacgag

SEQ ID NO: 2305160 - RNA, 19 nt, Artificial Sequence
  Description of Artificial Sequence: Synthetic oligonucleotide
  Sense strand starting at position 337 of SEQ ID NO: 1884959
guaggcauuuaauauagga

SEQ ID NO: 2305161 - RNA, 19 nt, Artificial Sequence
  Description of Artificial Sequence: Synthetic oligonucleotide
  Antisense strand to SEQ ID NO: 2305160
uccuauauuaaaugccuac

SEQ ID NO: 2305162 - RNA, 19 nt, Artificial Sequence
  Description of Artificial Sequence: Synthetic oligonucleotide
  Sense strand starting at position 446 of SEQ ID NO: 1884959
ucauaaaguauguagugau

SEQ ID NO: 2305163 - RNA, 19 nt, Artificial Sequence
  Description of Artificial Sequence: Synthetic oligonucleotide
  Antisense strand to SEQ ID NO: 2305162
aucacuacauacuuuauga

SEQ ID NO: 2305164 - RNA, 19 nt, Artificial Sequence
  Description of Artificial Sequence: Synthetic oligonucleotide
  Sense strand starting at position 608 of SEQ ID NO: 1884959
guaguaauccuacagugcu

SEQ ID NO: 2305165 - RNA, 19 nt, Artificial Sequence
  Description of Artificial Sequence: Synthetic oligonucleotide
  Antisense strand to SEQ ID NO: 2305164
agcacuguaggauuacuac

SEQ ID NO: 2305166 - RNA, 19 nt, Artificial Sequence
  Description of Artificial Sequence: Synthetic oligonucleotide
  Sense strand starting at position 626 of SEQ ID NO: 1884959
uauggaaugcuaggaggua

SEQ ID NO: 2305167 - RNA, 19 nt, Artificial Sequence
  Description of Artificial Sequence: Synthetic oligonucleotide
  Antisense strand to SEQ ID NO: 2305166
uaccuccuagcauuccaua

SEQ ID NO: 2305168 - RNA, 19 nt, Artificial Sequence
  Description of Artificial Sequence: Synthetic oligonucleotide
  Sense strand starting at position 697 of SEQ ID NO: 1884959
acaucaucaggcugaacau

SEQ ID NO: 2305169 - RNA, 19 nt, Artificial Sequence
  Description of Artificial Sequence: Synthetic oligonucleotide
  Antisense strand to SEQ ID NO: 2305168
auguucagccugaugaugu

SEQ ID NO: 2305170 - RNA, 19 nt, Artificial Sequence
  Description of Artificial Sequence: Synthetic oligonucleotide
  Sense strand starting at position 855 of SEQ ID NO: 1884959
aaaucuguaggcugcaaua

SEQ ID NO: 2305171 - RNA, 19 nt, Artificial Sequence
  Description of Artificial Sequence: Synthetic oligonucleotide
  Antisense strand to SEQ ID NO: 2305170
uauugcagccuacagauuu

SEQ ID NO: 2305172 - RNA, 19 nt, Artificial Sequence
  Description of Artificial Sequence: Synthetic oligonucleotide
  Sense strand starting at position 880 of SEQ ID NO: 1884959
caugguuuccaggagguga

SEQ ID NO: 2305173 - RNA, 19 nt, Artificial Sequence
  Description of Artificial Sequence: Synthetic oligonucleotide
  Antisense strand to SEQ ID NO: 2305172
ucaccuccuggaaaccaug

SEQ ID NO: 2305174 - RNA, 19 nt, Artificial Sequence
  Description of Artificial Sequence: Synthetic oligonucleotide
  Sense strand starting at position 1108 of SEQ ID NO: 1884959
ccauuauucuuugcugaga

SEQ ID NO: 2305175 - RNA, 19 nt, Artificial Sequence
  Description of Artificial Sequence: Synthetic oligonucleotide
  Antisense strand to SEQ ID NO: 2305174
ucucagcaaagaauaaugg

SEQ ID NO: 2305176 - RNA, 19 nt, Artificial Sequence
  Description of Artificial Sequence: Synthetic oligonucleotide
  Sense strand starting at position 1192 of SEQ ID NO: 1884959
uugauagucaggcaguaga

SEQ ID NO: 2305177 - RNA, 19 nt, Artificial Sequence
  Description of Artificial Sequence: Synthetic oligonucleotide
  Antisense strand to SEQ ID NO: 2305176
ucuacugccugacuaucaa

SEQ ID NO: 2305178 - RNA, 19 nt, Artificial Sequence
  Description of Artificial Sequence: Synthetic oligonucleotide
  Sense strand starting at position 1200 of SEQ ID NO: 1884959
caggcaguagaaugagaua

SEQ ID NO: 2305179 - RNA, 19 nt, Artificial Sequence
  Description of Artificial Sequence: Synthetic oligonucleotide
  Antisense strand to SEQ ID NO: 2305178
uaucucauucuacugccug

SEQ ID NO: 2305180 - RNA, 19 nt, Artificial Sequence
  Description of Artificial Sequence: Synthetic oligonucleotide
  Sense strand starting at position 1394 of SEQ ID NO: 1884959
ugauaaggcugcuccauga

SEQ ID NO: 2305181 - RNA, 19 nt, Artificial Sequence
  Description of Artificial Sequence: Synthetic oligonucleotide
  Antisense strand to SEQ ID NO: 2305180
ucauggagcagccuuauca

SEQ ID NO: 2305182 - RNA, 19 nt, Artificial Sequence
  Description of Artificial Sequence: Synthetic oligonucleotide
  Sense strand starting at position 1492 of SEQ ID NO: 1884959
ugaggaaccugacacuaua

SEQ ID NO: 2305183 - RNA, 19 nt, Artificial Sequence
  Description of Artificial Sequence: Synthetic oligonucleotide
  Antisense strand to SEQ ID NO: 2305182
uauagugucagguuccuca

SEQ ID NO: 2305184 - RNA, 19 nt, Artificial Sequence
  Description of Artificial Sequence: Synthetic oligonucleotide
  Sense strand starting at position 2094 of SEQ ID NO: 1884959
uaaugauguggucggccau

SEQ ID NO: 2305185 - RNA, 19 nt, Artificial Sequence
  Description of Artificial Sequence: Synthetic oligonucleotide
  Antisense strand to SEQ ID NO: 2305184
auggccgaccacaucauua

SEQ ID NO: 2305186 - RNA, 19 nt, Artificial Sequence
  Description of Artificial Sequence: Synthetic oligonucleotide
  Sense strand starting at position 2151 of SEQ ID NO: 1884959
ggguguucagaaugguaga

SEQ ID NO: 2305187 - RNA, 19 nt, Artificial Sequence
  Description of Artificial Sequence: Synthetic oligonucleotide
  Antisense strand to SEQ ID NO: 2305186
ucuaccauucugaacaccc

SEQ ID NO: 2305188 - RNA, 19 nt, Artificial Sequence
  Description of Artificial Sequence: Synthetic oligonucleotide
  Sense strand starting at position 2199 of SEQ ID NO: 1884959
uggcauacguggaauggau

SEQ ID NO: 2305189 - RNA, 19 nt, Artificial Sequence
  Description of Artificial Sequence: Synthetic oligonucleotide
  Antisense strand to SEQ ID NO: 2305188
auccauuccacguaugcca

SEQ ID NO: 2305190 - RNA, 19 nt, Artificial Sequence
  Description of Artificial Sequence: Synthetic oligonucleotide
  Sense strand starting at position 2256 of SEQ ID NO: 1884959
cgcaucuuugcauacuaca

SEQ ID NO: 2305191 - RNA, 19 nt, Artificial Sequence
  Description of Artificial Sequence: Synthetic oligonucleotide
  Antisense strand to SEQ ID NO: 2305190
uguaguaugcaaagaugcg

SEQ ID NO: 2305192 - RNA, 19 nt, Artificial Sequence
  Description of Artificial Sequence: Synthetic oligonucleotide
  Sense strand starting at position 2415 of SEQ ID NO: 1884959
ggcuaugucaaagaaggca

SEQ ID NO: 2305193 - RNA, 19 nt, Artificial Sequence
  Description of Artificial Sequence: Synthetic oligonucleotide
  Antisense strand to SEQ ID NO: 2305192
ugccuucuuugacauagcc

SEQ ID NO: 2305194 - RNA, 19 nt, Artificial Sequence
  Description of Artificial Sequence: Synthetic oligonucleotide
  Sense strand starting at position 2464 of SEQ ID NO: 1884959
guauccuuccacuguucca

SEQ ID NO: 2305195 - RNA, 19 nt, Artificial Sequence
  Description of Artificial Sequence: Synthetic oligonucleotide
  Antisense strand to SEQ ID NO: 2305194
uggaacaguggaaggauac

SEQ ID NO: 2305196 - RNA, 19 nt, Artificial Sequence
  Description of Artificial Sequence: Synthetic oligonucleotide
  Sense strand starting at position 2602 of SEQ ID NO: 1884959
ucauaaagccgauaaccuu

SEQ ID NO: 2305197 - RNA, 19 nt, Artificial Sequence
  Description of Artificial Sequence: Synthetic oligonucleotide
  Antisense strand to SEQ ID NO: 2305196
aagguuaucggcuuuauga

SEQ ID NO: 2305198 - RNA, 19 nt, Artificial Sequence
  Description of Artificial Sequence: Synthetic oligonucleotide
  Sense strand starting at position 2631 of SEQ ID NO: 1884959
gccagugucccugaagaug

SEQ ID NO: 2305199 - RNA, 19 nt, Artificial Sequence
  Description of Artificial Sequence: Synthetic oligonucleotide
  Antisense strand to SEQ ID NO: 2305198
caucuucagggacacuggc

SEQ ID NO: 2305200 - RNA, 19 nt, Artificial Sequence
  Description of Artificial Sequence: Synthetic oligonucleotide
  Sense strand starting at position 2642 of SEQ ID NO: 1884959
ugaagaugggcgugugauu

SEQ ID NO: 2305201 - RNA, 19 nt, Artificial Sequence
  Description of Artificial Sequence: Synthetic oligonucleotide
  Antisense strand to SEQ ID NO: 2305200
aaucacacgcccaucuuca

SEQ ID NO: 2305202 - RNA, 19 nt, Artificial Sequence
  Description of Artificial Sequence: Synthetic oligonucleotide
  Sense strand starting at position 2714 of SEQ ID NO: 1884959
gcagaaagcuggcuccaau

SEQ ID NO: 2305203 - RNA, 19 nt, Artificial Sequence
  Description of Artificial Sequence: Synthetic oligonucleotide
  Antisense strand to SEQ ID NO: 2305202
auuggagccagcuuucugc

SEQ ID NO: 2305204 - RNA, 19 nt, Artificial Sequence
  Description of Artificial Sequence: Synthetic oligonucleotide
  Sense strand starting at position 2924 of SEQ ID NO: 1884959
cguccaaggcuuuccguua

SEQ ID NO: 2305205 - RNA, 19 nt, Artificial Sequence
  Description of Artificial Sequence: Synthetic oligonucleotide
  Antisense strand to SEQ ID NO: 2305204
uaacggaaagccuuggacg

SEQ ID NO: 2305206 - RNA, 19 nt, Artificial Sequence
  Description of Artificial Sequence: Synthetic oligonucleotide
  Sense strand starting at position 3007 of SEQ ID NO: 1884959
caaugacugccaggaugau

SEQ ID NO: 2305207 - RNA, 19 nt, Artificial Sequence
  Description of Artificial Sequence: Synthetic oligonucleotide
  Antisense strand to SEQ ID NO: 2305206
aucauccuggcagucauug

SEQ ID NO: 2305208 - RNA, 19 nt, Artificial Sequence
  Description of Artificial Sequence: Synthetic oligonucleotide
  Sense strand starting at position 3017 of SEQ ID NO: 1884959
caggaugauaucuggaggu

SEQ ID NO: 2305209 - RNA, 19 nt, Artificial Sequence
  Description of Artificial Sequence: Synthetic oligonucleotide
  Antisense strand to SEQ ID NO: 2305208
accuccagauaucauccug

SEQ ID NO: 2305210 - RNA, 19 nt, Artificial Sequence
  Description of Artificial Sequence: Synthetic oligonucleotide
  Sense strand starting at position 3194 of SEQ ID NO: 1884959
gagggcucucuguaguguu

SEQ ID NO: 2305211 - RNA, 19 nt, Artificial Sequence
  Description of Artificial Sequence: Synthetic oligonucleotide
  Antisense strand to SEQ ID NO: 2305210
aacacuacagagagcccuc

SEQ ID NO: 2305212 - RNA, 19 nt, Artificial Sequence
  Description of Artificial Sequence: Synthetic oligonucleotide
  Sense strand starting at position 3213 of SEQ ID NO: 1884959
uuaauugcgagagacgauu

SEQ ID NO: 2305213 - RNA, 19 nt, Artificial Sequence
  Description of Artificial Sequence: Synthetic oligonucleotide
  Antisense strand to SEQ ID NO: 2305212
aaucgucucucgcaauuaa

SEQ ID NO: 2305214 - RNA, 19 nt, Artificial Sequence
  Description of Artificial Sequence: Synthetic oligonucleotide
  Sense strand starting at position 3231 of SEQ ID NO: 1884959
uugugaggcugaucugaag

SEQ ID NO: 2305215 - RNA, 19 nt, Artificial Sequence
  Description of Artificial Sequence: Synthetic oligonucleotide
  Antisense strand to SEQ ID NO: 2305214
cuucagaucagccucacaa

SEQ ID NO: 2305216 - RNA, 19 nt, Artificial Sequence
  Description of Artificial Sequence: Synthetic oligonucleotide
  Sense strand starting at position 3322 of SEQ ID NO: 1884959
uguuuaacauccuugggag

SEQ ID NO: 2305217 - RNA, 19 nt, Artificial Sequence
  Description of Artificial Sequence: Synthetic oligonucleotide
  Antisense strand to SEQ ID NO: 2305216
cucccaaggauguuaaaca

SEQ ID NO: 2305218 - RNA, 19 nt, Artificial Sequence
  Description of Artificial Sequence: Synthetic oligonucleotide
  Sense strand starting at position 3410 of SEQ ID NO: 1884959
gaaugagucuuaccugguu

SEQ ID NO: 2305219 - RNA, 19 nt, Artificial Sequence
  Description of Artificial Sequence: Synthetic oligonucleotide
  Antisense strand to SEQ ID NO: 2305218
aaccagguaagacucauuc

SEQ ID NO: 2305220 - RNA, 19 nt, Artificial Sequence
  Description of Artificial Sequence: Synthetic oligonucleotide
  Sense strand starting at position 3413 of SEQ ID NO: 1884959
ugagucuuaccugguuuga

SEQ ID NO: 2305221 - RNA, 19 nt, Artificial Sequence
  Description of Artificial Sequence: Synthetic oligonucleotide
  Antisense strand to SEQ ID NO: 2305220
ucaaaccagguaagacuca

SEQ ID NO: 2305222 - RNA, 19 nt, Artificial Sequence
  Description of Artificial Sequence: Synthetic oligonucleotide
  Sense strand starting at position 3415 of SEQ ID NO: 1884959
agucuuaccugguuugaua

SEQ ID NO: 2305223 - RNA, 19 nt, Artificial Sequence
  Description of Artificial Sequence: Synthetic oligonucleotide
  Antisense strand to SEQ ID NO: 2305222
uaucaaaccagguaagacu

SEQ ID NO: 2305224 - RNA, 19 nt, Artificial Sequence
  Description of Artificial Sequence: Synthetic oligonucleotide
  Sense strand starting at position 3449 of SEQ ID NO: 1884959
gcuauuuguugauuccauu

SEQ ID NO: 2305225 - RNA, 19 nt, Artificial Sequence
  Description of Artificial Sequence: Synthetic oligonucleotide
  Antisense strand to SEQ ID NO: 2305224
aauggaaucaacaaauagc

SEQ ID NO: 2305226 - RNA, 19 nt, Artificial Sequence
  Description of Artificial Sequence: Synthetic oligonucleotide
  Sense strand starting at position 3863 of SEQ ID NO: 1884959
uucuaccugucuguguaau

SEQ ID NO: 2305227 - RNA, 19 nt, Artificial Sequence
  Description of Artificial Sequence: Synthetic oligonucleotide
  Antisense strand to SEQ ID NO: 2305226
auuacacagacagguagaa

SEQ ID NO: 2305228 - RNA, 19 nt, Artificial Sequence
  Description of Artificial Sequence: Synthetic oligonucleotide
  Sense strand starting at position 3869 of SEQ ID NO: 1884959
cugucuguguaauucuaua

SEQ ID NO: 2305229 - RNA, 19 nt, Artificial Sequence
  Description of Artificial Sequence: Synthetic oligonucleotide
  Antisense strand to SEQ ID NO: 2305228
uauagaauuacacagacag

SEQ ID NO: 2305230 - RNA, 19 nt, Artificial Sequence
  Description of Artificial Sequence: Synthetic oligonucleotide
  Sense strand starting at position 3874 of SEQ ID NO: 1884959
uguguaauucuauaugugu

SEQ ID NO: 2305231 - RNA, 19 nt, Artificial Sequence
  Description of Artificial Sequence: Synthetic oligonucleotide
  Antisense strand to SEQ ID NO: 2305230
acacauauagaauuacaca

SEQ ID NO: 2305232 - RNA, 19 nt, Artificial Sequence
  Description of Artificial Sequence: Synthetic oligonucleotide
  Sense strand starting at position 328 of SEQ ID NO: 1884957
uguugaaacuaucugcauu

SEQ ID NO: 2305233 - RNA, 19 nt, Artificial Sequence
  Description of Artificial Sequence: Synthetic oligonucleotide
  Antisense strand to SEQ ID NO: 2305232
aaugcagauaguuucaaca

SEQ ID NO: 2305234 - RNA, 19 nt, Artificial Sequence
  Description of Artificial Sequence: Synthetic oligonucleotide
  Sense strand starting at position 378 of SEQ ID NO: 1884957
aaguguuugagucaugagg

SEQ ID NO: 2305235 - RNA, 19 nt, Artificial Sequence
  Description of Artificial Sequence: Synthetic oligonucleotide
  Antisense strand to SEQ ID NO: 2305234
ccucaugacucaaacacuu

SEQ ID NO: 2305236 - RNA, 19 nt, Artificial Sequence
  Description of Artificial Sequence: Synthetic oligonucleotide
  Sense strand starting at position 395 of SEQ ID NO: 1884957
ggguuccagccucauaaau

SEQ ID NO: 2305237 - RNA, 19 nt, Artificial Sequence
  Description of Artificial Sequence: Synthetic oligonucleotide
  Antisense strand to SEQ ID NO: 2305236
auuuaugaggcuggaaccc

SEQ ID NO: 2305238 - RNA, 19 nt, Artificial Sequence
  Description of Artificial Sequence: Synthetic oligonucleotide
  Sense strand starting at position 547 of SEQ ID NO: 1884957
caggaauguccuugccaga

SEQ ID NO: 2305239 - RNA, 19 nt, Artificial Sequence
  Description of Artificial Sequence: Synthetic oligonucleotide
  Antisense strand to SEQ ID NO: 2305238
ucuggcaaggacauuccug

SEQ ID NO: 2305240 - RNA, 19 nt, Artificial Sequence
  Description of Artificial Sequence: Synthetic oligonucleotide
  Sense strand starting at position 579 of SEQ ID NO: 1884957
cacauugaucguggacuuu

SEQ ID NO: 2305241 - RNA, 19 nt, Artificial Sequence
  Description of Artificial Sequence: Synthetic oligonucleotide
  Antisense strand to SEQ ID NO: 2305240
aaaguccacgaucaaugug

SEQ ID NO: 2305242 - RNA, 19 nt, Artificial Sequence
  Description of Artificial Sequence: Synthetic oligonucleotide
  Sense strand starting at position 778 of SEQ ID NO: 1884957
gagggacuaagauguggua

SEQ ID NO: 2305243 - RNA, 19 nt, Artificial Sequence
  Description of Artificial Sequence: Synthetic oligonucleotide
  Antisense strand to SEQ ID NO: 2305242
uaccacaucuuagucccuc

SEQ ID NO: 2305244 - RNA, 19 nt, Artificial Sequence
  Description of Artificial Sequence: Synthetic oligonucleotide
  Sense strand starting at position 780 of SEQ ID NO: 1884957
gggacuaagaugugguaua

SEQ ID NO: 2305245 - RNA, 19 nt, Artificial Sequence
  Description of Artificial Sequence: Synthetic oligonucleotide
  Antisense strand to SEQ ID NO: 2305244
uauaccacaucuuaguccc

SEQ ID NO: 2305246 - RNA, 19 nt, Artificial Sequence
  Description of Artificial Sequence: Synthetic oligonucleotide
  Sense strand starting at position 1292 of SEQ ID NO: 1884957
cggugauuuccaggagcug

SEQ ID NO: 2305247 - RNA, 19 nt, Artificial Sequence
  Description of Artificial Sequence: Synthetic oligonucleotide
  Antisense strand to SEQ ID NO: 2305246
cagcuccuggaaaucaccg

SEQ ID NO: 2305248 - RNA, 19 nt, Artificial Sequence
  Description of Artificial Sequence: Synthetic oligonucleotide
  Sense strand starting at position 1567 of SEQ ID NO: 1884957
ugagaagacugagaaugua

SEQ ID NO: 2305249 - RNA, 19 nt, Artificial Sequence
  Description of Artificial Sequence: Synthetic oligonucleotide
  Antisense strand to SEQ ID NO: 2305248
uacauucucagucuucuca

SEQ ID NO: 2305250 - RNA, 19 nt, Artificial Sequence
  Description of Artificial Sequence: Synthetic oligonucleotide
  Sense strand starting at position 1643 of SEQ ID NO: 1884957
gucaaucauaucggaagag

SEQ ID NO: 2305251 - RNA, 19 nt, Artificial Sequence
  Description of Artificial Sequence: Synthetic oligonucleotide
  Antisense strand to SEQ ID NO: 2305250
cucuuccgauaugauugac

SEQ ID NO: 2305252 - RNA, 19 nt, Artificial Sequence
  Description of Artificial Sequence: Synthetic oligonucleotide
  Sense strand starting at position 1663 of SEQ ID NO: 1884957
gcaguaagacaaugaagau

SEQ ID NO: 2305253 - RNA, 19 nt, Artificial Sequence
  Description of Artificial Sequence: Synthetic oligonucleotide
  Antisense strand to SEQ ID NO: 2305252
aucuucauugucuuacugc

SEQ ID NO: 2305254 - RNA, 19 nt, Artificial Sequence
  Description of Artificial Sequence: Synthetic oligonucleotide
  Sense strand starting at position 1847 of SEQ ID NO: 1884957
cuuauugccgccuaagaaa

SEQ ID NO: 2305255 - RNA, 19 nt, Artificial Sequence
  Description of Artificial Sequence: Synthetic oligonucleotide
  Antisense strand to SEQ ID NO: 2305254
uuucuuaggcggcaauaag

SEQ ID NO: 2305256 - RNA, 19 nt, Artificial Sequence
  Description of Artificial Sequence: Synthetic oligonucleotide
  Sense strand starting at position 1871 of SEQ ID NO: 1884957
uaacaagauuaggcgugau

SEQ ID NO: 2305257 - RNA, 19 nt, Artificial Sequence
  Description of Artificial Sequence: Synthetic oligonucleotide
  Antisense strand to SEQ ID NO: 2305256
aucacgccuaaucuuguua

SEQ ID NO: 2305258 - RNA, 19 nt, Artificial Sequence
  Description of Artificial Sequence: Synthetic oligonucleotide
  Sense strand starting at position 1893 of SEQ ID NO: 1884957
ugaguuaagacagaugugu

SEQ ID NO: 2305259 - RNA, 19 nt, Artificial Sequence
  Description of Artificial Sequence: Synthetic oligonucleotide
  Antisense strand to SEQ ID NO: 2305258
acacaucugucuuaacuca

SEQ ID NO: 2305260 - RNA, 19 nt, Artificial Sequence
  Description of Artificial Sequence: Synthetic oligonucleotide
  Sense strand starting at position 1895 of SEQ ID NO: 1884957
aguuaagacagauguguuc

SEQ ID NO: 2305261 - RNA, 19 nt, Artificial Sequence
  Description of Artificial Sequence: Synthetic oligonucleotide
  Antisense strand to SEQ ID NO: 2305260
gaacacaucugucuuaacu

SEQ ID NO: 2305262 - RNA, 19 nt, Artificial Sequence
  Description of Artificial Sequence: Synthetic oligonucleotide
  Sense strand starting at position 1898 of SEQ ID NO: 1884957
uaagacagauguguucuaa

SEQ ID NO: 2305263 - RNA, 19 nt, Artificial Sequence
  Description of Artificial Sequence: Synthetic oligonucleotide
  Antisense strand to SEQ ID NO: 2305262
uuagaacacaucugucuua

SEQ ID NO: 2305264 - RNA, 19 nt, Artificial Sequence
  Description of Artificial Sequence: Synthetic oligonucleotide
  Sense strand starting at position 2072 of SEQ ID NO: 1884957
auguauuugcaauguggua

SEQ ID NO: 2305265 - RNA, 19 nt, Artificial Sequence
  Description of Artificial Sequence: Synthetic oligonucleotide
  Antisense strand to SEQ ID NO: 2305264
uaccacauugcaaauacau

SEQ ID NO: 2305266 - RNA, 19 nt, Artificial Sequence
  Description of Artificial Sequence: Synthetic oligonucleotide
  Sense strand starting at position 2074 of SEQ ID NO: 1884957
guauuugcaaugugguaau

SEQ ID NO: 2305267 - RNA, 19 nt, Artificial Sequence
  Description of Artificial Sequence: Synthetic oligonucleotide
  Antisense strand to SEQ ID NO: 2305266
auuaccacauugcaaauac

SEQ ID NO: 2305268 - RNA, 19 nt, Artificial Sequence
  Description of Artificial Sequence: Synthetic oligonucleotide
  Sense strand starting at position 2131 of SEQ ID NO: 1884957
ucccuugaacugugacuuu

SEQ ID NO: 2305269 - RNA, 19 nt, Artificial Sequence
  Description of Artificial Sequence: Synthetic oligonucleotide
  Antisense strand to SEQ ID NO: 2305268
aaagucacaguucaaggga

SEQ ID NO: 2305270 - RNA, 19 nt, Artificial Sequence
  Description of Artificial Sequence: Synthetic oligonucleotide
  Sense strand starting at position 2149 of SEQ ID NO: 1884957
uuuguaaugccggagaaca

SEQ ID NO: 2305271 - RNA, 19 nt, Artificial Sequence
  Description of Artificial Sequence: Synthetic oligonucleotide
  Antisense strand to SEQ ID NO: 2305270
uguucuccggcauuacaaa

SEQ ID NO: 2305272 - RNA, 19 nt, Artificial Sequence
  Description of Artificial Sequence: Synthetic oligonucleotide
  Sense strand starting at position 2234 of SEQ ID NO: 1884957
ccuauuugugcuggagugu

SEQ ID NO: 2305273 - RNA, 19 nt, Artificial Sequence
  Description of Artificial Sequence: Synthetic oligonucleotide
  Antisense strand to SEQ ID NO: 2305272
acacuccagcacaaauagg

SEQ ID NO: 2305274 - RNA, 19 nt, Artificial Sequence
  Description of Artificial Sequence: Synthetic oligonucleotide
  Sense strand starting at position 2235 of SEQ ID NO: 1884957
cuauuugugcuggagugua

SEQ ID NO: 2305275 - RNA, 19 nt, Artificial Sequence
  Description of Artificial Sequence: Synthetic oligonucleotide
  Antisense strand to SEQ ID NO: 2305274
uacacuccagcacaaauag

SEQ ID NO: 2305276 - RNA, 19 nt, Artificial Sequence
  Description of Artificial Sequence: Synthetic oligonucleotide
  Sense strand starting at position 2771 of SEQ ID NO: 1884957
gucuuaccucuguauguau

SEQ ID NO: 2305277 - RNA, 19 nt, Artificial Sequence
  Description of Artificial Sequence: Synthetic oligonucleotide
  Antisense strand to SEQ ID NO: 2305276
auacauacagagguaagac

SEQ ID NO: 2305278 - RNA, 19 nt, Artificial Sequence
  Description of Artificial Sequence: Synthetic oligonucleotide
  Sense strand starting at position 2782 of SEQ ID NO: 1884957
guauguaucuaugucuuaa

SEQ ID NO: 2305279 - RNA, 19 nt, Artificial Sequence
  Description of Artificial Sequence: Synthetic oligonucleotide
  Antisense strand to SEQ ID NO: 2305278
uuaagacauagauacauac

SEQ ID NO: 2305280 - RNA, 19 nt, Artificial Sequence
  Description of Artificial Sequence: Synthetic oligonucleotide
  Sense strand starting at position 2835 of SEQ ID NO: 1884957
agggcucaccuuuaacuua

SEQ ID NO: 2305281 - RNA, 19 nt, Artificial Sequence
  Description of Artificial Sequence: Synthetic oligonucleotide
  Antisense strand to SEQ ID NO: 2305280
uaaguuaaaggugagcccu

SEQ ID NO: 2305282 - RNA, 19 nt, Artificial Sequence
  Description of Artificial Sequence: Synthetic oligonucleotide
  Sense strand starting at position 2976 of SEQ ID NO: 1884957
ggagauugguaauauuugu

SEQ ID NO: 2305283 - RNA, 19 nt, Artificial Sequence
  Description of Artificial Sequence: Synthetic oligonucleotide
  Antisense strand to SEQ ID NO: 2305282
acaaauauuaccaaucucc

SEQ ID NO: 2305284 - RNA, 19 nt, Artificial Sequence
  Description of Artificial Sequence: Synthetic oligonucleotide
  Sense strand starting at position 3020 of SEQ ID NO: 1884957
gugguugggcauuauaacu

SEQ ID NO: 2305285 - RNA, 19 nt, Artificial Sequence
  Description of Artificial Sequence: Synthetic oligonucleotide
  Antisense strand to SEQ ID NO: 2305284
aguuauaaugcccaaccac

SEQ ID NO: 2305286 - RNA, 19 nt, Artificial Sequence
  Description of Artificial Sequence: Synthetic oligonucleotide
  Sense strand starting at position 3025 of SEQ ID NO: 1884957
ugggcauuauaacugaauu

SEQ ID NO: 2305287 - RNA, 19 nt, Artificial Sequence
  Description of Artificial Sequence: Synthetic oligonucleotide
  Antisense strand to SEQ ID NO: 2305286
aauucaguuauaaugccca

SEQ ID NO: 2305288 - RNA, 19 nt, Artificial Sequence
  Description of Artificial Sequence: Synthetic oligonucleotide
  Sense strand starting at position 3281 of SEQ ID NO: 1884957
aggucaguugcacaggaaa

SEQ ID NO: 2305289 - RNA, 19 nt, Artificial Sequence
  Description of Artificial Sequence: Synthetic oligonucleotide
  Antisense strand to SEQ ID NO: 2305288
uuuccugugcaacugaccu

SEQ ID NO: 2305290 - RNA, 19 nt, Artificial Sequence
  Description of Artificial Sequence: Synthetic oligonucleotide
  Sense strand starting at position 3283 of SEQ ID NO: 1884957
gucaguugcacaggaaaua

SEQ ID NO: 2305291 - RNA, 19 nt, Artificial Sequence
  Description of Artificial Sequence: Synthetic oligonucleotide
  Antisense strand to SEQ ID NO: 2305290
uauuuccugugcaacugac

SEQ ID NO: 2305292 - RNA, 19 nt, Artificial Sequence
  Description of Artificial Sequence: Synthetic oligonucleotide
  Sense strand starting at position 3284 of SEQ ID NO: 1884957
ucaguugcacaggaaauau

SEQ ID NO: 2305293 - RNA, 19 nt, Artificial Sequence
  Description of Artificial Sequence: Synthetic oligonucleotide
  Antisense strand to SEQ ID NO: 2305292
auauuuccugugcaacuga

SEQ ID NO: 2305294 - RNA, 19 nt, Artificial Sequence
  Description of Artificial Sequence: Synthetic oligonucleotide
  Sense strand starting at position 3360 of SEQ ID NO: 1884957
cagcuaucaguggagcuau

SEQ ID NO: 2305295 - RNA, 19 nt, Artificial Sequence
  Description of Artificial Sequence: Synthetic oligonucleotide
  Antisense strand to SEQ ID NO: 2305294
auagcuccacugauagcug

SEQ ID NO: 2305296 - RNA, 19 nt, Artificial Sequence
  Description of Artificial Sequence: Synthetic oligonucleotide
  Sense strand starting at position 3546 of SEQ ID NO: 1884957
gaagucaaauucucagagu

SEQ ID NO: 2305297 - RNA, 19 nt, Artificial Sequence
  Description of Artificial Sequence: Synthetic oligonucleotide
  Antisense strand to SEQ ID NO: 2305296
acucugagaauuugacuuc

SEQ ID NO: 2305298 - RNA, 19 nt, Artificial Sequence
  Description of Artificial Sequence: Synthetic oligonucleotide
  Sense strand starting at position 3589 of SEQ ID NO: 1884957
augagagucaugugagacu

SEQ ID NO: 2305299 - RNA, 19 nt, Artificial Sequence
  Description of Artificial Sequence: Synthetic oligonucleotide
  Antisense strand to SEQ ID NO: 2305298
agucucacaugacucucau

SEQ ID NO: 2305300 - RNA, 19 nt, Artificial Sequence
  Description of Artificial Sequence: Synthetic oligonucleotide
  Sense strand starting at position 3649 of SEQ ID NO: 1884957
uguuacgcuccacauuauu

SEQ ID NO: 2305301 - RNA, 19 nt, Artificial Sequence
  Description of Artificial Sequence: Synthetic oligonucleotide
  Antisense strand to SEQ ID NO: 2305300
aauaauguggagcguaaca

SEQ ID NO: 2305302 - RNA, 19 nt, Artificial Sequence
  Description of Artificial Sequence: Synthetic oligonucleotide
  Sense strand starting at position 3662 of SEQ ID NO: 1884957
auuauuuguugggaggguu

SEQ ID NO: 2305303 - RNA, 19 nt, Artificial Sequence
  Description of Artificial Sequence: Synthetic oligonucleotide
  Antisense strand to SEQ ID NO: 2305302
aacccucccaacaaauaau

SEQ ID NO: 2305304 - RNA, 19 nt, Artificial Sequence
  Description of Artificial Sequence: Synthetic oligonucleotide
  Sense strand starting at position 3773 of SEQ ID NO: 1884957
agugguaaauucuugcuga

SEQ ID NO: 2305305 - RNA, 19 nt, Artificial Sequence
  Description of Artificial Sequence: Synthetic oligonucleotide
  Antisense strand to SEQ ID NO: 2305304
ucagcaagaauuuaccacu

SEQ ID NO: 2305306 - RNA, 19 nt, Artificial Sequence
  Description of Artificial Sequence: Synthetic oligonucleotide
  Sense strand starting at position 3832 of SEQ ID NO: 1884957
guaagagaguuucucugaa

SEQ ID NO: 2305307 - RNA, 19 nt, Artificial Sequence
  Description of Artificial Sequence: Synthetic oligonucleotide
  Antisense strand to SEQ ID NO: 2305306
uucagagaaacucucuuac

SEQ ID NO: 2305308 - RNA, 19 nt, Artificial Sequence
  Description of Artificial Sequence: Synthetic oligonucleotide
  Sense strand starting at position 3834 of SEQ ID NO: 1884957
aagagaguuucucugaagc

SEQ ID NO: 2305309 - RNA, 19 nt, Artificial Sequence
  Description of Artificial Sequence: Synthetic oligonucleotide
  Antisense strand to SEQ ID NO: 2305308
gcuucagagaaacucucuu

SEQ ID NO: 2305310 - RNA, 19 nt, Artificial Sequence
  Description of Artificial Sequence: Synthetic oligonucleotide
  Sense strand starting at position 3965 of SEQ ID NO: 1884957
acagaacaugccugcaaau

SEQ ID NO: 2305311 - RNA, 19 nt, Artificial Sequence
  Description of Artificial Sequence: Synthetic oligonucleotide
  Antisense strand to SEQ ID NO: 2305310
auuugcaggcauguucugu

SEQ ID NO: 2305312 - RNA, 19 nt, Artificial Sequence
  Description of Artificial Sequence: Synthetic oligonucleotide
  Sense strand starting at position 13 of SEQ ID NO: 1884960
cuaagacuuccguaauucu

SEQ ID NO: 2305313 - RNA, 19 nt, Artificial Sequence
  Description of Artificial Sequence: Synthetic oligonucleotide
  Antisense strand to SEQ ID NO: 2305312
agaauuacggaagucuuag

SEQ ID NO: 2305314 - RNA, 19 nt, Artificial Sequence
  Description of Artificial Sequence: Synthetic oligonucleotide
  Sense strand starting at position 45 of SEQ ID NO: 1884960
uaggguaauguguaacucu

SEQ ID NO: 2305315 - RNA, 19 nt, Artificial Sequence
  Description of Artificial Sequence: Synthetic oligonucleotide
  Antisense strand to SEQ ID NO: 2305314
agaguuacacauuacccua

SEQ ID NO: 2305316 - RNA, 19 nt, Artificial Sequence
  Description of Artificial Sequence: Synthetic oligonucleotide
  Sense strand starting at position 251 of SEQ ID NO: 1884960
agguuugcagcagagagaa

SEQ ID NO: 2305317 - RNA, 19 nt, Artificial Sequence
  Description of Artificial Sequence: Synthetic oligonucleotide
  Antisense strand to SEQ ID NO: 2305316
uucucucugcugcaaaccu

SEQ ID NO: 2305318 - RNA, 19 nt, Artificial Sequence
  Description of Artificial Sequence: Synthetic oligonucleotide
  Sense strand starting at position 345 of SEQ ID NO: 1884960
ggacucuggcccugcaaga

SEQ ID NO: 2305319 - RNA, 19 nt, Artificial Sequence
  Description of Artificial Sequence: Synthetic oligonucleotide
  Antisense strand to SEQ ID NO: 2305318
ucuugcagggccagagucc

SEQ ID NO: 2305320 - RNA, 19 nt, Artificial Sequence
  Description of Artificial Sequence: Synthetic oligonucleotide
  Sense strand starting at position 440 of SEQ ID NO: 1884960
ccugaauuuccguggccgu

SEQ ID NO: 2305321 - RNA, 19 nt, Artificial Sequence
  Description of Artificial Sequence: Synthetic oligonucleotide
  Antisense strand to SEQ ID NO: 2305320
acggccacggaaauucagg

SEQ ID NO: 2305322 - RNA, 19 nt, Artificial Sequence
  Description of Artificial Sequence: Synthetic oligonucleotide
  Sense strand starting at position 502 of SEQ ID NO: 1884960
gcagcaauauucccacaug

SEQ ID NO: 2305323 - RNA, 19 nt, Artificial Sequence
  Description of Artificial Sequence: Synthetic oligonucleotide
  Antisense strand to SEQ ID NO: 2305322
caugugggaauauugcugc

SEQ ID NO: 2305324 - RNA, 19 nt, Artificial Sequence
  Description of Artificial Sequence: Synthetic oligonucleotide
  Sense strand starting at position 636 of SEQ ID NO: 1884960
ucagacuucuaguuggaaa

SEQ ID NO: 2305325 - RNA, 19 nt, Artificial Sequence
  Description of Artificial Sequence: Synthetic oligonucleotide
  Antisense strand to SEQ ID NO: 2305324
uuuccaacuagaagucuga

SEQ ID NO: 2305326 - RNA, 19 nt, Artificial Sequence
  Description of Artificial Sequence: Synthetic oligonucleotide
  Sense strand starting at position 665 of SEQ ID NO: 1884960
ggaauuaucucucagaaga

SEQ ID NO: 2305327 - RNA, 19 nt, Artificial Sequence
  Description of Artificial Sequence: Synthetic oligonucleotide
  Antisense strand to SEQ ID NO: 2305326
ucuucugagagauaauucc

SEQ ID NO: 2305328 - RNA, 19 nt, Artificial Sequence
  Description of Artificial Sequence: Synthetic oligonucleotide
  Sense strand starting at position 779 of SEQ ID NO: 1884960
acaacuguaccagguaaca

SEQ ID NO: 2305329 - RNA, 19 nt, Artificial Sequence
  Description of Artificial Sequence: Synthetic oligonucleotide
  Antisense strand to SEQ ID NO: 2305328
uguuaccugguacaguugu

SEQ ID NO: 2305330 - RNA, 19 nt, Artificial Sequence
  Description of Artificial Sequence: Synthetic oligonucleotide
  Sense strand starting at position 838 of SEQ ID NO: 1884960
acauuuggcuuaguuagua

SEQ ID NO: 2305331 - RNA, 19 nt, Artificial Sequence
  Description of Artificial Sequence: Synthetic oligonucleotide
  Antisense strand to SEQ ID NO: 2305330
uacuaacuaagccaaaugu

SEQ ID NO: 2305332 - RNA, 19 nt, Artificial Sequence
  Description of Artificial Sequence: Synthetic oligonucleotide
  Sense strand starting at position 842 of SEQ ID NO: 1884960
uuggcuuaguuaguaagaa

SEQ ID NO: 2305333 - RNA, 19 nt, Artificial Sequence
  Description of Artificial Sequence: Synthetic oligonucleotide
  Antisense strand to SEQ ID NO: 2305332
uucuuacuaacuaagccaa

SEQ ID NO: 2305334 - RNA, 19 nt, Artificial Sequence
  Description of Artificial Sequence: Synthetic oligonucleotide
  Sense strand starting at position 2214 of SEQ ID NO: 1884960
cuauucuauguguaauggu

SEQ ID NO: 2305335 - RNA, 19 nt, Artificial Sequence
  Description of Artificial Sequence: Synthetic oligonucleotide
  Antisense strand to SEQ ID NO: 2305334
accauuacacauagaauag

SEQ ID NO: 2305336 - RNA, 19 nt, Artificial Sequence
  Description of Artificial Sequence: Synthetic oligonucleotide
  Sense strand starting at position 2221 of SEQ ID NO: 1884960
auguguaaugguggauaug

SEQ ID NO: 2305337 - RNA, 19 nt, Artificial Sequence
  Description of Artificial Sequence: Synthetic oligonucleotide
  Antisense strand to SEQ ID NO: 2305336
cauauccaccauuacacau

SEQ ID NO: 2305338 - RNA, 19 nt, Artificial Sequence
  Description of Artificial Sequence: Synthetic oligonucleotide
  Sense strand starting at position 2222 of SEQ ID NO: 1884960
uguguaaugguggauaugu

SEQ ID NO: 2305339 - RNA, 19 nt, Artificial Sequence
  Description of Artificial Sequence: Synthetic oligonucleotide
  Antisense strand to SEQ ID NO: 2305338
acauauccaccauuacaca

SEQ ID NO: 2305340 - RNA, 19 nt, Artificial Sequence
  Description of Artificial Sequence: Synthetic oligonucleotide
  Sense strand starting at position 2224 of SEQ ID NO: 1884960
uguaaugguggauauguua

SEQ ID NO: 2305341 - RNA, 19 nt, Artificial Sequence
  Description of Artificial Sequence: Synthetic oligonucleotide
  Antisense strand to SEQ ID NO: 2305340
uaacauauccaccauuaca

SEQ ID NO: 2305342 - RNA, 19 nt, Artificial Sequence
  Description of Artificial Sequence: Synthetic oligonucleotide
  Sense strand starting at position 2233 of SEQ ID NO: 1884960
ggauauguuauaggaggca

SEQ ID NO: 2305343 - RNA, 19 nt, Artificial Sequence
  Description of Artificial Sequence: Synthetic oligonucleotide
  Antisense strand to SEQ ID NO: 2305342
ugccuccuauaacauaucc

SEQ ID NO: 2305344 - RNA, 19 nt, Artificial Sequence
  Description of Artificial Sequence: Synthetic oligonucleotide
  Sense strand starting at position 2254 of SEQ ID NO: 1884960
aacgaauuauuuggguaga

SEQ ID NO: 2305345 - RNA, 19 nt, Artificial Sequence
  Description of Artificial Sequence: Synthetic oligonucleotide
  Antisense strand to SEQ ID NO: 2305344
ucuacccaaauaauucguu

SEQ ID NO: 2305346 - RNA, 19 nt, Artificial Sequence
  Description of Artificial Sequence: Synthetic oligonucleotide
  Sense strand starting at position 2255 of SEQ ID NO: 1884960
acgaauuauuuggguagac

SEQ ID NO: 2305347 - RNA, 19 nt, Artificial Sequence
  Description of Artificial Sequence: Synthetic oligonucleotide
  Antisense strand to SEQ ID NO: 2305346
gucuacccaaauaauucgu

SEQ ID NO: 2305348 - RNA, 19 nt, Artificial Sequence
  Description of Artificial Sequence: Synthetic oligonucleotide
  Sense strand starting at position 2452 of SEQ ID NO: 1884960
gagagucucccggguaauc

SEQ ID NO: 2305349 - RNA, 19 nt, Artificial Sequence
  Description of Artificial Sequence: Synthetic oligonucleotide
  Antisense strand to SEQ ID NO: 2305348
gauuacccgggagacucuc

SEQ ID NO: 2305350 - RNA, 19 nt, Artificial Sequence
  Description of Artificial Sequence: Synthetic oligonucleotide
  Sense strand starting at position 2461 of SEQ ID NO: 1884960
ccggguaaucaccaagcuu

SEQ ID NO: 2305351 - RNA, 19 nt, Artificial Sequence
  Description of Artificial Sequence: Synthetic oligonucleotide
  Antisense strand to SEQ ID NO: 2305350
aagcuuggugauuacccgg

SEQ ID NO: 2305352 - RNA, 19 nt, Artificial Sequence
  Description of Artificial Sequence: Synthetic oligonucleotide
  Sense strand starting at position 2829 of SEQ ID NO: 1884960
uuggcaaucuucucaggau

SEQ ID NO: 2305353 - RNA, 19 nt, Artificial Sequence
  Description of Artificial Sequence: Synthetic oligonucleotide
  Antisense strand to SEQ ID NO: 2305352
auccugagaagauugccaa

SEQ ID NO: 2305354 - RNA, 19 nt, Artificial Sequence
  Description of Artificial Sequence: Synthetic oligonucleotide
  Sense strand starting at position 2946 of SEQ ID NO: 1884960
ccaugagacuaagaaucuu

SEQ ID NO: 2305355 - RNA, 19 nt, Artificial Sequence
  Description of Artificial Sequence: Synthetic oligonucleotide
  Antisense strand to SEQ ID NO: 2305354
aagauucuuagucucaugg

SEQ ID NO: 2305356 - RNA, 19 nt, Artificial Sequence
  Description of Artificial Sequence: Synthetic oligonucleotide
  Sense strand starting at position 2984 of SEQ ID NO: 1884960
gaggcugcugcagauauau

SEQ ID NO: 2305357 - RNA, 19 nt, Artificial Sequence
  Description of Artificial Sequence: Synthetic oligonucleotide
  Antisense strand to SEQ ID NO: 2305356
auauaucugcagcagccuc

SEQ ID NO: 2305358 - RNA, 19 nt, Artificial Sequence
  Description of Artificial Sequence: Synthetic oligonucleotide
  Sense strand starting at position 2986 of SEQ ID NO: 1884960
ggcugcugcagauauaucu

SEQ ID NO: 2305359 - RNA, 19 nt, Artificial Sequence
  Description of Artificial Sequence: Synthetic oligonucleotide
  Antisense strand to SEQ ID NO: 2305358
agauauaucugcagcagcc

SEQ ID NO: 2305360 - RNA, 19 nt, Artificial Sequence
  Description of Artificial Sequence: Synthetic oligonucleotide
  Sense strand starting at position 3001 of SEQ ID NO: 1884960
aucucacauguuugucaaa

SEQ ID NO: 2305361 - RNA, 19 nt, Artificial Sequence
  Description of Artificial Sequence: Synthetic oligonucleotide
  Antisense strand to SEQ ID NO: 2305360
uuugacaaacaugugagau

SEQ ID NO: 2305362 - RNA, 19 nt, Artificial Sequence
  Description of Artificial Sequence: Synthetic oligonucleotide
  Sense strand starting at position 3048 of SEQ ID NO: 1884960
acccuaaacgauggacuua

SEQ ID NO: 2305363 - RNA, 19 nt, Artificial Sequence
  Description of Artificial Sequence: Synthetic oligonucleotide
  Antisense strand to SEQ ID NO: 2305362
uaaguccaucguuuagggu

SEQ ID NO: 2305364 - RNA, 19 nt, Artificial Sequence
  Description of Artificial Sequence: Synthetic oligonucleotide
  Sense strand starting at position 3111 of SEQ ID NO: 1884960
acuaaugggcaauguuaau

SEQ ID NO: 2305365 - RNA, 19 nt, Artificial Sequence
  Description of Artificial Sequence: Synthetic oligonucleotide
  Antisense strand to SEQ ID NO: 2305364
auuaacauugcccauuagu

SEQ ID NO: 2305366 - RNA, 19 nt, Artificial Sequence
  Description of Artificial Sequence: Synthetic oligonucleotide
  Sense strand starting at position 3409 of SEQ ID NO: 1884960
aggauacaguaagauuaua

SEQ ID NO: 2305367 - RNA, 19 nt, Artificial Sequence
  Description of Artificial Sequence: Synthetic oligonucleotide
  Antisense strand to SEQ ID NO: 2305366
uauaaucuuacuguauccu

SEQ ID NO: 2305368 - RNA, 19 nt, Artificial Sequence
  Description of Artificial Sequence: Synthetic oligonucleotide
  Sense strand starting at position 3469 of SEQ ID NO: 1884960
gaaguagugccuuaauagu

SEQ ID NO: 2305369 - RNA, 19 nt, Artificial Sequence
  Description of Artificial Sequence: Synthetic oligonucleotide
  Antisense strand to SEQ ID NO: 2305368
acuauuaaggcacuacuuc

SEQ ID NO: 2305370 - RNA, 19 nt, Artificial Sequence
  Description of Artificial Sequence: Synthetic oligonucleotide
  Sense strand starting at position 3551 of SEQ ID NO: 1884960
uuuauugcuuguguaacaa

SEQ ID NO: 2305371 - RNA, 19 nt, Artificial Sequence
  Description of Artificial Sequence: Synthetic oligonucleotide
  Antisense strand to SEQ ID NO: 2305370
uuguuacacaagcaauaaa

SEQ ID NO: 2305372 - RNA, 19 nt, Artificial Sequence
  Description of Artificial Sequence: Synthetic oligonucleotide
  Sense strand starting at position 3775 of SEQ ID NO: 1884960
uugacuagguuucuuaaau

SEQ ID NO: 2305373 - RNA, 19 nt, Artificial Sequence
  Description of Artificial Sequence: Synthetic oligonucleotide
  Antisense strand to SEQ ID NO: 2305372
auuuaagaaaccuagucaa

SEQ ID NO: 2305374 - RNA, 19 nt, Artificial Sequence
  Description of Artificial Sequence: Synthetic oligonucleotide
  Sense strand starting at position 3776 of SEQ ID NO: 1884960
ugacuagguuucuuaaaug

SEQ ID NO: 2305375 - RNA, 19 nt, Artificial Sequence
  Description of Artificial Sequence: Synthetic oligonucleotide
  Antisense strand to SEQ ID NO: 2305374
cauuuaagaaaccuaguca

SEQ ID NO: 2305376 - RNA, 19 nt, Artificial Sequence
  Description of Artificial Sequence: Synthetic oligonucleotide
  Sense strand starting at position 3781 of SEQ ID NO: 1884960
agguuucuuaaauguguca

SEQ ID NO: 2305377 - RNA, 19 nt, Artificial Sequence
  Description of Artificial Sequence: Synthetic oligonucleotide
  Antisense strand to SEQ ID NO: 2305376
ugacacauuuaagaaaccu

SEQ ID NO: 2305378 - RNA, 19 nt, Artificial Sequence
  Description of Artificial Sequence: Synthetic oligonucleotide
  Sense strand starting at position 3784 of SEQ ID NO: 1884960
uuucuuaaaugugucauca

SEQ ID NO: 2305379 - RNA, 19 nt, Artificial Sequence
  Description of Artificial Sequence: Synthetic oligonucleotide
  Antisense strand to SEQ ID NO: 2305378
ugaugacacauuuaagaaa

SEQ ID NO: 2305380 - RNA, 19 nt, Artificial Sequence
  Description of Artificial Sequence: Synthetic oligonucleotide
  Sense strand starting at position 3788 of SEQ ID NO: 1884960
uuaaaugugucaucacagu

SEQ ID NO: 2305381 - RNA, 19 nt, Artificial Sequence
  Description of Artificial Sequence: Synthetic oligonucleotide
  Antisense strand to SEQ ID NO: 2305380
acugugaugacacauuuaa

SEQ ID NO: 2305382 - RNA, 19 nt, Artificial Sequence
  Description of Artificial Sequence: Synthetic oligonucleotide
  Sense strand starting at position 3794 of SEQ ID NO: 1884960
gugucaucacaguaaauga

SEQ ID NO: 2305383 - RNA, 19 nt, Artificial Sequence
  Description of Artificial Sequence: Synthetic oligonucleotide
  Antisense strand to SEQ ID NO: 2305382
ucauuuacugugaugacac

SEQ ID NO: 2305384 - RNA, 19 nt, Artificial Sequence
  Description of Artificial Sequence: Synthetic oligonucleotide
  Sense strand starting at position 3816 of SEQ ID NO: 1884960
guaagcccaugucuauuau

SEQ ID NO: 2305385 - RNA, 19 nt, Artificial Sequence
  Description of Artificial Sequence: Synthetic oligonucleotide
  Antisense strand to SEQ ID NO: 2305384
auaauagacaugggcuuac

SEQ ID NO: 2305386 - RNA, 19 nt, Artificial Sequence
  Description of Artificial Sequence: Synthetic oligonucleotide
  Sense strand starting at position 3859 of SEQ ID NO: 1884960
gcacaagacuguuaauuuc

SEQ ID NO: 2305387 - RNA, 19 nt, Artificial Sequence
  Description of Artificial Sequence: Synthetic oligonucleotide
  Antisense strand to SEQ ID NO: 2305386
gaaauuaacagucuugugc

SEQ ID NO: 2305388 - RNA, 19 nt, Artificial Sequence
  Description of Artificial Sequence: Synthetic oligonucleotide
  Sense strand starting at position 3895 of SEQ ID NO: 1884960
uucuccuguccucagaaga

SEQ ID NO: 2305389 - RNA, 19 nt, Artificial Sequence
  Description of Artificial Sequence: Synthetic oligonucleotide
  Antisense strand to SEQ ID NO: 2305388
ucuucugaggacaggagaa

SEQ ID NO: 2305390 - RNA, 19 nt, Artificial Sequence
  Description of Artificial Sequence: Synthetic oligonucleotide
  Sense strand starting at position 3915 of SEQ ID NO: 1884960
aggaaauguucugccucau

SEQ ID NO: 2305391 - RNA, 19 nt, Artificial Sequence
  Description of Artificial Sequence: Synthetic oligonucleotide
  Antisense strand to SEQ ID NO: 2305390
augaggcagaacauuuccu

SEQ ID NO: 2305392 - RNA, 19 nt, Artificial Sequence
  Description of Artificial Sequence: Synthetic oligonucleotide
  Sense strand starting at position 118 of SEQ ID NO: 1884962
gcagauuuguggcuucuga

SEQ ID NO: 2305393 - RNA, 19 nt, Artificial Sequence
  Description of Artificial Sequence: Synthetic oligonucleotide
  Antisense strand to SEQ ID NO: 2305392
ucagaagccacaaaucugc

SEQ ID NO: 2305394 - RNA, 19 nt, Artificial Sequence
  Description of Artificial Sequence: Synthetic oligonucleotide
  Sense strand starting at position 160 of SEQ ID NO: 1884962
gcaggugucuacccaggaa

SEQ ID NO: 2305395 - RNA, 19 nt, Artificial Sequence
  Description of Artificial Sequence: Synthetic oligonucleotide
  Antisense strand to SEQ ID NO: 2305394
uuccuggguagacaccugc

SEQ ID NO: 2305396 - RNA, 19 nt, Artificial Sequence
  Description of Artificial Sequence: Synthetic oligonucleotide
  Sense strand starting at position 190 of SEQ ID NO: 1884962
ccacauguuccacguagga

SEQ ID NO: 2305397 - RNA, 19 nt, Artificial Sequence
  Description of Artificial Sequence: Synthetic oligonucleotide
  Antisense strand to SEQ ID NO: 2305396
uccuacguggaacaugugg

SEQ ID NO: 2305398 - RNA, 19 nt, Artificial Sequence
  Description of Artificial Sequence: Synthetic oligonucleotide
  Sense strand starting at position 192 of SEQ ID NO: 1884962
acauguuccacguaggaau

SEQ ID NO: 2305399 - RNA, 19 nt, Artificial Sequence
  Description of Artificial Sequence: Synthetic oligonucleotide
  Antisense strand to SEQ ID NO: 2305398
auuccuacguggaacaugu

SEQ ID NO: 2305400 - RNA, 19 nt, Artificial Sequence
  Description of Artificial Sequence: Synthetic oligonucleotide
  Sense strand starting at position 259 of SEQ ID NO: 1884962
gaagguguccucugccacu

SEQ ID NO: 2305401 - RNA, 19 nt, Artificial Sequence
  Description of Artificial Sequence: Synthetic oligonucleotide
  Antisense strand to SEQ ID NO: 2305400
aguggcagaggacaccuuc

SEQ ID NO: 2305402 - RNA, 19 nt, Artificial Sequence
  Description of Artificial Sequence: Synthetic oligonucleotide
  Sense strand starting at position 539 of SEQ ID NO: 1884962
uugacugcccuuugaagaa

SEQ ID NO: 2305403 - RNA, 19 nt, Artificial Sequence
  Description of Artificial Sequence: Synthetic oligonucleotide
  Antisense strand to SEQ ID NO: 2305402
uucuucaaagggcagucaa

SEQ ID NO: 2305404 - RNA, 19 nt, Artificial Sequence
  Description of Artificial Sequence: Synthetic oligonucleotide
  Sense strand starting at position 706 of SEQ ID NO: 1884962
gcuccaucucaaggaaaug

SEQ ID NO: 2305405 - RNA, 19 nt, Artificial Sequence
  Description of Artificial Sequence: Synthetic oligonucleotide
  Antisense strand to SEQ ID NO: 2305404
cauuuccuugagauggagc

SEQ ID NO: 2305406 - RNA, 19 nt, Artificial Sequence
  Description of Artificial Sequence: Synthetic oligonucleotide
  Sense strand starting at position 722 of SEQ ID NO: 1884962
augggucucugacucaaau

SEQ ID NO: 2305407 - RNA, 19 nt, Artificial Sequence
  Description of Artificial Sequence: Synthetic oligonucleotide
  Antisense strand to SEQ ID NO: 2305406
auuugagucagagacccau

SEQ ID NO: 2305408 - RNA, 19 nt, Artificial Sequence
  Description of Artificial Sequence: Synthetic oligonucleotide
  Sense strand starting at position 771 of SEQ ID NO: 1884962
gggaguuauucccucucuc

SEQ ID NO: 2305409 - RNA, 19 nt, Artificial Sequence
  Description of Artificial Sequence: Synthetic oligonucleotide
  Antisense strand to SEQ ID NO: 2305408
gagagagggaauaacuccc

SEQ ID NO: 2305410 - RNA, 19 nt, Artificial Sequence
  Description of Artificial Sequence: Synthetic oligonucleotide
  Sense strand starting at position 775 of SEQ ID NO: 1884962
guuauucccucucucagau

SEQ ID NO: 2305411 - RNA, 19 nt, Artificial Sequence
  Description of Artificial Sequence: Synthetic oligonucleotide
  Antisense strand to SEQ ID NO: 2305410
aucugagagagggaauaac

SEQ ID NO: 2305412 - RNA, 19 nt, Artificial Sequence
  Description of Artificial Sequence: Synthetic oligonucleotide
  Sense strand starting at position 1139 of SEQ ID NO: 1884962
ccaaguugcguuugaggaa

SEQ ID NO: 2305413 - RNA, 19 nt, Artificial Sequence
  Description of Artificial Sequence: Synthetic oligonucleotide
  Antisense strand to SEQ ID NO: 2305412
uuccucaaacgcaacuugg

SEQ ID NO: 2305414 - RNA, 19 nt, Artificial Sequence
  Description of Artificial Sequence: Synthetic oligonucleotide
  Sense strand starting at position 1140 of SEQ ID NO: 1884962
caaguugcguuugaggaaa

SEQ ID NO: 2305415 - RNA, 19 nt, Artificial Sequence
  Description of Artificial Sequence: Synthetic oligonucleotide
  Antisense strand to SEQ ID NO: 2305414
uuuccucaaacgcaacuug

SEQ ID NO: 2305416 - RNA, 19 nt, Artificial Sequence
  Description of Artificial Sequence: Synthetic oligonucleotide
  Sense strand starting at position 1142 of SEQ ID NO: 1884962
aguugcguuugaggaaaga

SEQ ID NO: 2305417 - RNA, 19 nt, Artificial Sequence
  Description of Artificial Sequence: Synthetic oligonucleotide
  Antisense strand to SEQ ID NO: 2305416
ucuuuccucaaacgcaacu

SEQ ID NO: 2305418 - RNA, 19 nt, Artificial Sequence
  Description of Artificial Sequence: Synthetic oligonucleotide
  Sense strand starting at position 1211 of SEQ ID NO: 1884962
uccucaguuucggaagcaa

SEQ ID NO: 2305419 - RNA, 19 nt, Artificial Sequence
  Description of Artificial Sequence: Synthetic oligonucleotide
  Antisense strand to SEQ ID NO: 2305418
uugcuuccgaaacugagga

SEQ ID NO: 2305420 - RNA, 19 nt, Artificial Sequence
  Description of Artificial Sequence: Synthetic oligonucleotide
  Sense strand starting at position 1343 of SEQ ID NO: 1884962
aaggcagauuaauauguca

SEQ ID NO: 2305421 - RNA, 19 nt, Artificial Sequence
  Description of Artificial Sequence: Synthetic oligonucleotide
  Antisense strand to SEQ ID NO: 2305420
ugacauauuaaucugccuu

SEQ ID NO: 2305422 - RNA, 19 nt, Artificial Sequence
  Description of Artificial Sequence: Synthetic oligonucleotide
  Sense strand starting at position 1412 of SEQ ID NO: 1884962
gacagauuguucucgggcu

SEQ ID NO: 2305423 - RNA, 19 nt, Artificial Sequence
  Description of Artificial Sequence: Synthetic oligonucleotide
  Antisense strand to SEQ ID NO: 2305422
agcccgagaacaaucuguc

SEQ ID NO: 2305424 - RNA, 19 nt, Artificial Sequence
  Description of Artificial Sequence: Synthetic oligonucleotide
  Sense strand starting at position 1414 of SEQ ID NO: 1884962
cagauuguucucgggcuga

SEQ ID NO: 2305425 - RNA, 19 nt, Artificial Sequence
  Description of Artificial Sequence: Synthetic oligonucleotide
  Antisense strand to SEQ ID NO: 2305424
ucagcccgagaacaaucug

SEQ ID NO: 2305426 - RNA, 19 nt, Artificial Sequence
  Description of Artificial Sequence: Synthetic oligonucleotide
  Sense strand starting at position 2018 of SEQ ID NO: 1884962
gcgacuagaauucgaucga

SEQ ID NO: 2305427 - RNA, 19 nt, Artificial Sequence
  Description of Artificial Sequence: Synthetic oligonucleotide
  Antisense strand to SEQ ID NO: 2305426
ucgaucgaauucuagucgc

SEQ ID NO: 2305428 - RNA, 19 nt, Artificial Sequence
  Description of Artificial Sequence: Synthetic oligonucleotide
  Sense strand starting at position 2019 of SEQ ID NO: 1884962
cgacuagaauucgaucgau

SEQ ID NO: 2305429 - RNA, 19 nt, Artificial Sequence
  Description of Artificial Sequence: Synthetic oligonucleotide
  Antisense strand to SEQ ID NO: 2305428
aucgaucgaauucuagucg

SEQ ID NO: 2305430 - RNA, 19 nt, Artificial Sequence
  Description of Artificial Sequence: Synthetic oligonucleotide
  Sense strand starting at position 2023 of SEQ ID NO: 1884962
uagaauucgaucgauuggu

SEQ ID NO: 2305431 - RNA, 19 nt, Artificial Sequence
  Description of Artificial Sequence: Synthetic oligonucleotide
  Antisense strand to SEQ ID NO: 2305430
accaaucgaucgaauucua

SEQ ID NO: 2305432 - RNA, 19 nt, Artificial Sequence
  Description of Artificial Sequence: Synthetic oligonucleotide
  Sense strand starting at position 2391 of SEQ ID NO: 1884962
ccugucccauucgugaauu

SEQ ID NO: 2305433 - RNA, 19 nt, Artificial Sequence
  Description of Artificial Sequence: Synthetic oligonucleotide
  Antisense strand to SEQ ID NO: 2305432
aauucacgaaugggacagg

SEQ ID NO: 2305434 - RNA, 19 nt, Artificial Sequence
  Description of Artificial Sequence: Synthetic oligonucleotide
  Sense strand starting at position 2392 of SEQ ID NO: 1884962
cugucccauucgugaauuu

SEQ ID NO: 2305435 - RNA, 19 nt, Artificial Sequence
  Description of Artificial Sequence: Synthetic oligonucleotide
  Antisense strand to SEQ ID NO: 2305434
aaauucacgaaugggacag

SEQ ID NO: 2305436 - RNA, 19 nt, Artificial Sequence
  Description of Artificial Sequence: Synthetic oligonucleotide
  Sense strand starting at position 2468 of SEQ ID NO: 1884962
uguguaaccuaucuuggau

SEQ ID NO: 2305437 - RNA, 19 nt, Artificial Sequence
  Description of Artificial Sequence: Synthetic oligonucleotide
  Antisense strand to SEQ ID NO: 2305436
auccaagauagguuacaca

SEQ ID NO: 2305438 - RNA, 19 nt, Artificial Sequence
  Description of Artificial Sequence: Synthetic oligonucleotide
  Sense strand starting at position 2470 of SEQ ID NO: 1884962
uguaaccuaucuuggauuu

SEQ ID NO: 2305439 - RNA, 19 nt, Artificial Sequence
  Description of Artificial Sequence: Synthetic oligonucleotide
  Antisense strand to SEQ ID NO: 2305438
aaauccaagauagguuaca

SEQ ID NO: 2305440 - RNA, 19 nt, Artificial Sequence
  Description of Artificial Sequence: Synthetic oligonucleotide
  Sense strand starting at position 2477 of SEQ ID NO: 1884962
uaucuuggauuuggagaaa

SEQ ID NO: 2305441 - RNA, 19 nt, Artificial Sequence
  Description of Artificial Sequence: Synthetic oligonucleotide
  Antisense strand to SEQ ID NO: 2305440
uuucuccaaauccaagaua

SEQ ID NO: 2305442 - RNA, 19 nt, Artificial Sequence
  Description of Artificial Sequence: Synthetic oligonucleotide
  Sense strand starting at position 2562 of SEQ ID NO: 1884962
uuuguauacuugcuacuuu

SEQ ID NO: 2305443 - RNA, 19 nt, Artificial Sequence
  Description of Artificial Sequence: Synthetic oligonucleotide
  Antisense strand to SEQ ID NO: 2305442
aaaguagcaaguauacaaa

SEQ ID NO: 2305444 - RNA, 19 nt, Artificial Sequence
  Description of Artificial Sequence: Synthetic oligonucleotide
  Sense strand starting at position 2563 of SEQ ID NO: 1884962
uuguauacuugcuacuuua

SEQ ID NO: 2305445 - RNA, 19 nt, Artificial Sequence
  Description of Artificial Sequence: Synthetic oligonucleotide
  Antisense strand to SEQ ID NO: 2305444
uaaaguagcaaguauacaa

SEQ ID NO: 2305446 - RNA, 19 nt, Artificial Sequence
  Description of Artificial Sequence: Synthetic oligonucleotide
  Sense strand starting at position 3339 of SEQ ID NO: 1884962
gggacuaaguucuuuacac

SEQ ID NO: 2305447 - RNA, 19 nt, Artificial Sequence
  Description of Artificial Sequence: Synthetic oligonucleotide
  Antisense strand to SEQ ID NO: 2305446
guguaaagaacuuaguccc

SEQ ID NO: 2305448 - RNA, 19 nt, Artificial Sequence
  Description of Artificial Sequence: Synthetic oligonucleotide
  Sense strand starting at position 3340 of SEQ ID NO: 1884962
ggacuaaguucuuuacacu

SEQ ID NO: 2305449 - RNA, 19 nt, Artificial Sequence
  Description of Artificial Sequence: Synthetic oligonucleotide
  Antisense strand to SEQ ID NO: 2305448
aguguaaagaacuuagucc

SEQ ID NO: 2305450 - RNA, 19 nt, Artificial Sequence
  Description of Artificial Sequence: Synthetic oligonucleotide
  Sense strand starting at position 3815 of SEQ ID NO: 1884962
acaagaguaauucguguuu

SEQ ID NO: 2305451 - RNA, 19 nt, Artificial Sequence
  Description of Artificial Sequence: Synthetic oligonucleotide
  Antisense strand to SEQ ID NO: 2305450
aaacacgaauuacucuugu

SEQ ID NO: 2305452 - RNA, 19 nt, Artificial Sequence
  Description of Artificial Sequence: Synthetic oligonucleotide
  Sense strand starting at position 3817 of SEQ ID NO: 1884962
aagaguaauucguguuucc

SEQ ID NO: 2305453 - RNA, 19 nt, Artificial Sequence
  Description of Artificial Sequence: Synthetic oligonucleotide
  Antisense strand to SEQ ID NO: 2305452
ggaaacacgaauuacucuu

SEQ ID NO: 2305454 - RNA, 19 nt, Artificial Sequence
  Description of Artificial Sequence: Synthetic oligonucleotide
  Sense strand starting at position 3820 of SEQ ID NO: 1884962
aguaauucguguuucccaa

SEQ ID NO: 2305455 - RNA, 19 nt, Artificial Sequence
  Description of Artificial Sequence: Synthetic oligonucleotide
  Antisense strand to SEQ ID NO: 2305454
uugggaaacacgaauuacu

SEQ ID NO: 2305456 - RNA, 19 nt, Artificial Sequence
  Description of Artificial Sequence: Synthetic oligonucleotide
  Sense strand starting at position 3824 of SEQ ID NO: 1884962
auucguguuucccaaaggu

SEQ ID NO: 2305457 - RNA, 19 nt, Artificial Sequence
  Description of Artificial Sequence: Synthetic oligonucleotide
  Antisense strand to SEQ ID NO: 2305456
accuuugggaaacacgaau

SEQ ID NO: 2305458 - RNA, 19 nt, Artificial Sequence
  Description of Artificial Sequence: Synthetic oligonucleotide
  Sense strand starting at position 3858 of SEQ ID NO: 1884962
auccauuucucucagggaa

SEQ ID NO: 2305459 - RNA, 19 nt, Artificial Sequence
  Description of Artificial Sequence: Synthetic oligonucleotide
  Antisense strand to SEQ ID NO: 2305458
uucccugagagaaauggau

SEQ ID NO: 2305460 - RNA, 19 nt, Artificial Sequence
  Description of Artificial Sequence: Synthetic oligonucleotide
  Sense strand starting at position 3971 of SEQ ID NO: 1884962
cccuguuucucccaaguau

SEQ ID NO: 2305461 - RNA, 19 nt, Artificial Sequence
  Description of Artificial Sequence: Synthetic oligonucleotide
  Antisense strand to SEQ ID NO: 2305460
auacuugggagaaacaggg

SEQ ID NO: 2305462 - RNA, 19 nt, Artificial Sequence
  Description of Artificial Sequence: Synthetic oligonucleotide
  Sense strand starting at position 310 of SEQ ID NO: 1884963
acuugugagaucugggacu

SEQ ID NO: 2305463 - RNA, 19 nt, Artificial Sequence
  Description of Artificial Sequence: Synthetic oligonucleotide
  Antisense strand to SEQ ID NO: 2305462
agucccagaucucacaagu

SEQ ID NO: 2305464 - RNA, 19 nt, Artificial Sequence
  Description of Artificial Sequence: Synthetic oligonucleotide
  Sense strand starting at position 312 of SEQ ID NO: 1884963
uugugagaucugggacuuc

SEQ ID NO: 2305465 - RNA, 19 nt, Artificial Sequence
  Description of Artificial Sequence: Synthetic oligonucleotide
  Antisense strand to SEQ ID NO: 2305464
gaagucccagaucucacaa

SEQ ID NO: 2305466 - RNA, 19 nt, Artificial Sequence
  Description of Artificial Sequence: Synthetic oligonucleotide
  Sense strand starting at position 424 of SEQ ID NO: 1884963
cuaauuuaguccucguaag

SEQ ID NO: 2305467 - RNA, 19 nt, Artificial Sequence
  Description of Artificial Sequence: Synthetic oligonucleotide
  Antisense strand to SEQ ID NO: 2305466
cuuacgaggacuaaauuag

SEQ ID NO: 2305468 - RNA, 19 nt, Artificial Sequence
  Description of Artificial Sequence: Synthetic oligonucleotide
  Sense strand starting at position 447 of SEQ ID NO: 1884963
ccacaagguguuuacuagu

SEQ ID NO: 2305469 - RNA, 19 nt, Artificial Sequence
  Description of Artificial Sequence: Synthetic oligonucleotide
  Antisense strand to SEQ ID NO: 2305468
acuaguaaacaccuugugg

SEQ ID NO: 2305470 - RNA, 19 nt, Artificial Sequence
  Description of Artificial Sequence: Synthetic oligonucleotide
  Sense strand starting at position 509 of SEQ ID NO: 1884963
guuaaauuacgugacccaa

SEQ ID NO: 2305471 - RNA, 19 nt, Artificial Sequence
  Description of Artificial Sequence: Synthetic oligonucleotide
  Antisense strand to SEQ ID NO: 2305470
uugggucacguaauuuaac

SEQ ID NO: 2305472 - RNA, 19 nt, Artificial Sequence
  Description of Artificial Sequence: Synthetic oligonucleotide
  Sense strand starting at position 511 of SEQ ID NO: 1884963
uaaauuacgugacccaaga

SEQ ID NO: 2305473 - RNA, 19 nt, Artificial Sequence
  Description of Artificial Sequence: Synthetic oligonucleotide
  Antisense strand to SEQ ID NO: 2305472
ucuugggucacguaauuua

SEQ ID NO: 2305474 - RNA, 19 nt, Artificial Sequence
  Description of Artificial Sequence: Synthetic oligonucleotide
  Sense strand starting at position 524 of SEQ ID NO: 1884963
ccaagaucacaugguuagu

SEQ ID NO: 2305475 - RNA, 19 nt, Artificial Sequence
  Description of Artificial Sequence: Synthetic oligonucleotide
  Antisense strand to SEQ ID NO: 2305474
acuaaccaugugaucuugg

SEQ ID NO: 2305476 - RNA, 19 nt, Artificial Sequence
  Description of Artificial Sequence: Synthetic oligonucleotide
  Sense strand starting at position 700 of SEQ ID NO: 1884963
caaugagcugcugggagau

SEQ ID NO: 2305477 - RNA, 19 nt, Artificial Sequence
  Description of Artificial Sequence: Synthetic oligonucleotide
  Antisense strand to SEQ ID NO: 2305476
aucucccagcagcucauug

SEQ ID NO: 2305478 - RNA, 19 nt, Artificial Sequence
  Description of Artificial Sequence: Synthetic oligonucleotide
  Sense strand starting at position 710 of SEQ ID NO: 1884963
cugggagauuaauuacagu

SEQ ID NO: 2305479 - RNA, 19 nt, Artificial Sequence
  Description of Artificial Sequence: Synthetic oligonucleotide
  Antisense strand to SEQ ID NO: 2305478
acuguaauuaaucucccag

SEQ ID NO: 2305480 - RNA, 19 nt, Artificial Sequence
  Description of Artificial Sequence: Synthetic oligonucleotide
  Sense strand starting at position 759 of SEQ ID NO: 1884963
agucaaacucauggucaca

SEQ ID NO: 2305481 - RNA, 19 nt, Artificial Sequence
  Description of Artificial Sequence: Synthetic oligonucleotide
  Antisense strand to SEQ ID NO: 2305480
ugugaccaugaguuugacu

SEQ ID NO: 2305482 - RNA, 19 nt, Artificial Sequence
  Description of Artificial Sequence: Synthetic oligonucleotide
  Sense strand starting at position 1214 of SEQ ID NO: 1884963
ggcacauacgcguuuguau

SEQ ID NO: 2305483 - RNA, 19 nt, Artificial Sequence
  Description of Artificial Sequence: Synthetic oligonucleotide
  Antisense strand to SEQ ID NO: 2305482
auacaaacgcguaugugcc

SEQ ID NO: 2305484 - RNA, 19 nt, Artificial Sequence
  Description of Artificial Sequence: Synthetic oligonucleotide
  Sense strand starting at position 1215 of SEQ ID NO: 1884963
gcacauacgcguuuguaua

SEQ ID NO: 2305485 - RNA, 19 nt, Artificial Sequence
  Description of Artificial Sequence: Synthetic oligonucleotide
  Antisense strand to SEQ ID NO: 2305484
uauacaaacgcguaugugc

SEQ ID NO: 2305486 - RNA, 19 nt, Artificial Sequence
  Description of Artificial Sequence: Synthetic oligonucleotide
  Sense strand starting at position 1343 of SEQ ID NO: 1884963
auucguaguauggauguau

SEQ ID NO: 2305487 - RNA, 19 nt, Artificial Sequence
  Description of Artificial Sequence: Synthetic oligonucleotide
  Antisense strand to SEQ ID NO: 2305486
auacauccauacuacgaau

SEQ ID NO: 2305488 - RNA, 19 nt, Artificial Sequence
  Description of Artificial Sequence: Synthetic oligonucleotide
  Sense strand starting at position 1347 of SEQ ID NO: 1884963
guaguauggauguauugag

SEQ ID NO: 2305489 - RNA, 19 nt, Artificial Sequence
  Description of Artificial Sequence: Synthetic oligonucleotide
  Antisense strand to SEQ ID NO: 2305488
cucaauacauccauacuac

SEQ ID NO: 2305490 - RNA, 19 nt, Artificial Sequence
  Description of Artificial Sequence: Synthetic oligonucleotide
  Sense strand starting at position 1357 of SEQ ID NO: 1884963
uguauugagcuuuauguaa

SEQ ID NO: 2305491 - RNA, 19 nt, Artificial Sequence
  Description of Artificial Sequence: Synthetic oligonucleotide
  Antisense strand to SEQ ID NO: 2305490
uuacauaaagcucaauaca

SEQ ID NO: 2305492 - RNA, 19 nt, Artificial Sequence
  Description of Artificial Sequence: Synthetic oligonucleotide
  Sense strand starting at position 1438 of SEQ ID NO: 1884963
gugcaaauacguguaugca

SEQ ID NO: 2305493 - RNA, 19 nt, Artificial Sequence
  Description of Artificial Sequence: Synthetic oligonucleotide
  Antisense strand to SEQ ID NO: 2305492
ugcauacacguauuugcac

SEQ ID NO: 2305494 - RNA, 19 nt, Artificial Sequence
  Description of Artificial Sequence: Synthetic oligonucleotide
  Sense strand starting at position 1822 of SEQ ID NO: 1884963
gggaguaacuuucccaggu

SEQ ID NO: 2305495 - RNA, 19 nt, Artificial Sequence
  Description of Artificial Sequence: Synthetic oligonucleotide
  Antisense strand to SEQ ID NO: 2305494
accugggaaaguuacuccc

SEQ ID NO: 2305496 - RNA, 19 nt, Artificial Sequence
  Description of Artificial Sequence: Synthetic oligonucleotide
  Sense strand starting at position 1823 of SEQ ID NO: 1884963
ggaguaacuuucccaggua

SEQ ID NO: 2305497 - RNA, 19 nt, Artificial Sequence
  Description of Artificial Sequence: Synthetic oligonucleotide
  Antisense strand to SEQ ID NO: 2305496
uaccugggaaaguuacucc

SEQ ID NO: 2305498 - RNA, 19 nt, Artificial Sequence
  Description of Artificial Sequence: Synthetic oligonucleotide
  Sense strand starting at position 1826 of SEQ ID NO: 1884963
guaacuuucccagguauua

SEQ ID NO: 2305499 - RNA, 19 nt, Artificial Sequence
  Description of Artificial Sequence: Synthetic oligonucleotide
  Antisense strand to SEQ ID NO: 2305498
uaauaccugggaaaguuac

SEQ ID NO: 2305500 - RNA, 19 nt, Artificial Sequence
  Description of Artificial Sequence: Synthetic oligonucleotide
  Sense strand starting at position 2700 of SEQ ID NO: 1884963
ucccaucgcguugcuauaa

SEQ ID NO: 2305501 - RNA, 19 nt, Artificial Sequence
  Description of Artificial Sequence: Synthetic oligonucleotide
  Antisense strand to SEQ ID NO: 2305500
uuauagcaacgcgauggga

SEQ ID NO: 2305502 - RNA, 19 nt, Artificial Sequence
  Description of Artificial Sequence: Synthetic oligonucleotide
  Sense strand starting at position 2712 of SEQ ID NO: 1884963
gcuauaaccguagaaggga

SEQ ID NO: 2305503 - RNA, 19 nt, Artificial Sequence
  Description of Artificial Sequence: Synthetic oligonucleotide
  Antisense strand to SEQ ID NO: 2305502
ucccuucuacgguuauagc

SEQ ID NO: 2305504 - RNA, 19 nt, Artificial Sequence
  Description of Artificial Sequence: Synthetic oligonucleotide
  Sense strand starting at position 2761 of SEQ ID NO: 1884963
uaaacacgugaaugucauu

SEQ ID NO: 2305505 - RNA, 19 nt, Artificial Sequence
  Description of Artificial Sequence: Synthetic oligonucleotide
  Antisense strand to SEQ ID NO: 2305504
aaugacauucacguguuua

SEQ ID NO: 2305506 - RNA, 19 nt, Artificial Sequence
  Description of Artificial Sequence: Synthetic oligonucleotide
  Sense strand starting at position 2835 of SEQ ID NO: 1884963
gcaguuuccaucgcaguua

SEQ ID NO: 2305507 - RNA, 19 nt, Artificial Sequence
  Description of Artificial Sequence: Synthetic oligonucleotide
  Antisense strand to SEQ ID NO: 2305506
uaacugcgauggaaacugc

SEQ ID NO: 2305508 - RNA, 19 nt, Artificial Sequence
  Description of Artificial Sequence: Synthetic oligonucleotide
  Sense strand starting at position 2896 of SEQ ID NO: 1884963
acaagaucgaauugucuga

SEQ ID NO: 2305509 - RNA, 19 nt, Artificial Sequence
  Description of Artificial Sequence: Synthetic oligonucleotide
  Antisense strand to SEQ ID NO: 2305508
ucagacaauucgaucuugu

SEQ ID NO: 2305510 - RNA, 19 nt, Artificial Sequence
  Description of Artificial Sequence: Synthetic oligonucleotide
  Sense strand starting at position 2898 of SEQ ID NO: 1884963
aagaucgaauugucugauu

SEQ ID NO: 2305511 - RNA, 19 nt, Artificial Sequence
  Description of Artificial Sequence: Synthetic oligonucleotide
  Antisense strand to SEQ ID NO: 2305510
aaucagacaauucgaucuu

SEQ ID NO: 2305512 - RNA, 19 nt, Artificial Sequence
  Description of Artificial Sequence: Synthetic oligonucleotide
  Sense strand starting at position 2922 of SEQ ID NO: 1884963
uuagaagucuaucccgaaa

SEQ ID NO: 2305513 - RNA, 19 nt, Artificial Sequence
  Description of Artificial Sequence: Synthetic oligonucleotide
  Antisense strand to SEQ ID NO: 2305512
uuucgggauagacuucuaa

SEQ ID NO: 2305514 - RNA, 19 nt, Artificial Sequence
  Description of Artificial Sequence: Synthetic oligonucleotide
  Sense strand starting at position 2991 of SEQ ID NO: 1884963
gugaaacucuacuugaaau

SEQ ID NO: 2305515 - RNA, 19 nt, Artificial Sequence
  Description of Artificial Sequence: Synthetic oligonucleotide
  Antisense strand to SEQ ID NO: 2305514
auuucaaguagaguuucac

SEQ ID NO: 2305516 - RNA, 19 nt, Artificial Sequence
  Description of Artificial Sequence: Synthetic oligonucleotide
  Sense strand starting at position 3031 of SEQ ID NO: 1884963
uucuuaucuuuggucauag

SEQ ID NO: 2305517 - RNA, 19 nt, Artificial Sequence
  Description of Artificial Sequence: Synthetic oligonucleotide
  Antisense strand to SEQ ID NO: 2305516
cuaugaccaaagauaagaa

SEQ ID NO: 2305518 - RNA, 19 nt, Artificial Sequence
  Description of Artificial Sequence: Synthetic oligonucleotide
  Sense strand starting at position 3033 of SEQ ID NO: 1884963
cuuaucuuuggucauagua

SEQ ID NO: 2305519 - RNA, 19 nt, Artificial Sequence
  Description of Artificial Sequence: Synthetic oligonucleotide
  Antisense strand to SEQ ID NO: 2305518
uacuaugaccaaagauaag

SEQ ID NO: 2305520 - RNA, 19 nt, Artificial Sequence
  Description of Artificial Sequence: Synthetic oligonucleotide
  Sense strand starting at position 3047 of SEQ ID NO: 1884963
uaguaaucuguguaaguga

SEQ ID NO: 2305521 - RNA, 19 nt, Artificial Sequence
  Description of Artificial Sequence: Synthetic oligonucleotide
  Antisense strand to SEQ ID NO: 2305520
ucacuuacacagauuacua

SEQ ID NO: 2305522 - RNA, 19 nt, Artificial Sequence
  Description of Artificial Sequence: Synthetic oligonucleotide
  Sense strand starting at position 3054 of SEQ ID NO: 1884963
cuguguaagugaucuaaga

SEQ ID NO: 2305523 - RNA, 19 nt, Artificial Sequence
  Description of Artificial Sequence: Synthetic oligonucleotide
  Antisense strand to SEQ ID NO: 2305522
ucuuagaucacuuacacag

SEQ ID NO: 2305524 - RNA, 19 nt, Artificial Sequence
  Description of Artificial Sequence: Synthetic oligonucleotide
  Sense strand starting at position 3056 of SEQ ID NO: 1884963
guguaagugaucuaagaga

SEQ ID NO: 2305525 - RNA, 19 nt, Artificial Sequence
  Description of Artificial Sequence: Synthetic oligonucleotide
  Antisense strand to SEQ ID NO: 2305524
ucucuuagaucacuuacac

SEQ ID NO: 2305526 - RNA, 19 nt, Artificial Sequence
  Description of Artificial Sequence: Synthetic oligonucleotide
  Sense strand starting at position 3179 of SEQ ID NO: 1884963
agagacuaaugccuacaau

SEQ ID NO: 2305527 - RNA, 19 nt, Artificial Sequence
  Description of Artificial Sequence: Synthetic oligonucleotide
  Antisense strand to SEQ ID NO: 2305526
auuguaggcauuagucucu

SEQ ID NO: 2305528 - RNA, 19 nt, Artificial Sequence
  Description of Artificial Sequence: Synthetic oligonucleotide
  Sense strand starting at position 3228 of SEQ ID NO: 1884963
agagaagagugagcuacau

SEQ ID NO: 2305529 - RNA, 19 nt, Artificial Sequence
  Description of Artificial Sequence: Synthetic oligonucleotide
  Antisense strand to SEQ ID NO: 2305528
auguagcucacucuucucu

SEQ ID NO: 2305530 - RNA, 19 nt, Artificial Sequence
  Description of Artificial Sequence: Synthetic oligonucleotide
  Sense strand starting at position 3577 of SEQ ID NO: 1884963
ugaacuguaccuugucaua

SEQ ID NO: 2305531 - RNA, 19 nt, Artificial Sequence
  Description of Artificial Sequence: Synthetic oligonucleotide
  Antisense strand to SEQ ID NO: 2305530
uaugacaagguacaguuca

SEQ ID NO: 2305532 - RNA, 19 nt, Artificial Sequence
  Description of Artificial Sequence: Synthetic oligonucleotide
  Sense strand starting at position 3674 of SEQ ID NO: 1884963
ugguucagccuggaguaga

SEQ ID NO: 2305533 - RNA, 19 nt, Artificial Sequence
  Description of Artificial Sequence: Synthetic oligonucleotide
  Antisense strand to SEQ ID NO: 2305532
ucuacuccaggcugaacca

SEQ ID NO: 2305534 - RNA, 19 nt, Artificial Sequence
  Description of Artificial Sequence: Synthetic oligonucleotide
  Sense strand starting at position 3685 of SEQ ID NO: 1884963
ggaguagaauggucugauu

SEQ ID NO: 2305535 - RNA, 19 nt, Artificial Sequence
  Description of Artificial Sequence: Synthetic oligonucleotide
  Antisense strand to SEQ ID NO: 2305534
aaucagaccauucuacucc

SEQ ID NO: 2305536 - RNA, 19 nt, Artificial Sequence
  Description of Artificial Sequence: Synthetic oligonucleotide
  Sense strand starting at position 3786 of SEQ ID NO: 1884963
caaagaugagcauguuaag

SEQ ID NO: 2305537 - RNA, 19 nt, Artificial Sequence
  Description of Artificial Sequence: Synthetic oligonucleotide
  Antisense strand to SEQ ID NO: 2305536
cuuaacaugcucaucuuug

SEQ ID NO: 2305538 - RNA, 19 nt, Artificial Sequence
  Description of Artificial Sequence: Synthetic oligonucleotide
  Sense strand starting at position 3793 of SEQ ID NO: 1884963
gagcauguuaaguagguuu

SEQ ID NO: 2305539 - RNA, 19 nt, Artificial Sequence
  Description of Artificial Sequence: Synthetic oligonucleotide
  Antisense strand to SEQ ID NO: 2305538
aaaccuacuuaacaugcuc

SEQ ID NO: 2305540 - RNA, 19 nt, Artificial Sequence
  Description of Artificial Sequence: Synthetic oligonucleotide
  Sense strand starting at position 3893 of SEQ ID NO: 1884963
guuuauugucagcaaggaa

SEQ ID NO: 2305541 - RNA, 19 nt, Artificial Sequence
  Description of Artificial Sequence: Synthetic oligonucleotide
  Antisense strand to SEQ ID NO: 2305540
uuccuugcugacaauaaac

SEQ ID NO: 2305542 - RNA, 19 nt, Artificial Sequence
  Description of Artificial Sequence: Synthetic oligonucleotide
  Sense strand starting at position 222 of SEQ ID NO: 1884964
guuaguaugcaucaaugau

SEQ ID NO: 2305543 - RNA, 19 nt, Artificial Sequence
  Description of Artificial Sequence: Synthetic oligonucleotide
  Antisense strand to SEQ ID NO: 2305542
aucauugaugcauacuaac

SEQ ID NO: 2305544 - RNA, 19 nt, Artificial Sequence
  Description of Artificial Sequence: Synthetic oligonucleotide
  Sense strand starting at position 279 of SEQ ID NO: 1884964
ucauauuugcuguguuuau

SEQ ID NO: 2305545 - RNA, 19 nt, Artificial Sequence
  Description of Artificial Sequence: Synthetic oligonucleotide
  Antisense strand to SEQ ID NO: 2305544
auaaacacagcaaauauga

SEQ ID NO: 2305546 - RNA, 19 nt, Artificial Sequence
  Description of Artificial Sequence: Synthetic oligonucleotide
  Sense strand starting at position 363 of SEQ ID NO: 1884964
gugcccuuacuugagacaa

SEQ ID NO: 2305547 - RNA, 19 nt, Artificial Sequence
  Description of Artificial Sequence: Synthetic oligonucleotide
  Antisense strand to SEQ ID NO: 2305546
uugucucaaguaagggcac

SEQ ID NO: 2305548 - RNA, 19 nt, Artificial Sequence
  Description of Artificial Sequence: Synthetic oligonucleotide
  Sense strand starting at position 441 of SEQ ID NO: 1884964
gggaaauuauccuuccagc

SEQ ID NO: 2305549 - RNA, 19 nt, Artificial Sequence
  Description of Artificial Sequence: Synthetic oligonucleotide
  Antisense strand to SEQ ID NO: 2305548
gcuggaaggauaauuuccc

SEQ ID NO: 2305550 - RNA, 19 nt, Artificial Sequence
  Description of Artificial Sequence: Synthetic oligonucleotide
  Sense strand starting at position 678 of SEQ ID NO: 1884964
caaauagugagauggaugu

SEQ ID NO: 2305551 - RNA, 19 nt, Artificial Sequence
  Description of Artificial Sequence: Synthetic oligonucleotide
  Antisense strand to SEQ ID NO: 2305550
acauccaucucacuauuug

SEQ ID NO: 2305552 - RNA, 19 nt, Artificial Sequence
  Description of Artificial Sequence: Synthetic oligonucleotide
  Sense strand starting at position 699 of SEQ ID NO: 1884964
cgucuuaauuucuugucca

SEQ ID NO: 2305553 - RNA, 19 nt, Artificial Sequence
  Description of Artificial Sequence: Synthetic oligonucleotide
  Antisense strand to SEQ ID NO: 2305552
uggacaagaaauuaagacg

SEQ ID NO: 2305554 - RNA, 19 nt, Artificial Sequence
  Description of Artificial Sequence: Synthetic oligonucleotide
  Sense strand starting at position 702 of SEQ ID NO: 1884964
cuuaauuucuuguccaugu

SEQ ID NO: 2305555 - RNA, 19 nt, Artificial Sequence
  Description of Artificial Sequence: Synthetic oligonucleotide
  Antisense strand to SEQ ID NO: 2305554
acauggacaagaaauuaag

SEQ ID NO: 2305556 - RNA, 19 nt, Artificial Sequence
  Description of Artificial Sequence: Synthetic oligonucleotide
  Sense strand starting at position 712 of SEQ ID NO: 1884964
uguccaugugaugaugaau

SEQ ID NO: 2305557 - RNA, 19 nt, Artificial Sequence
  Description of Artificial Sequence: Synthetic oligonucleotide
  Antisense strand to SEQ ID NO: 2305556
auucaucaucacauggaca

SEQ ID NO: 2305558 - RNA, 19 nt, Artificial Sequence
  Description of Artificial Sequence: Synthetic oligonucleotide
  Sense strand starting at position 737 of SEQ ID NO: 1884964
uccuuuagaugguuuaauu

SEQ ID NO: 2305559 - RNA, 19 nt, Artificial Sequence
  Description of Artificial Sequence: Synthetic oligonucleotide
  Antisense strand to SEQ ID NO: 2305558
aauuaaaccaucuaaagga

SEQ ID NO: 2305560 - RNA, 19 nt, Artificial Sequence
  Description of Artificial Sequence: Synthetic oligonucleotide
  Sense strand starting at position 795 of SEQ ID NO: 1884964
gcuuucuuugcacaaagau

SEQ ID NO: 2305561 - RNA, 19 nt, Artificial Sequence
  Description of Artificial Sequence: Synthetic oligonucleotide
  Antisense strand to SEQ ID NO: 2305560
aucuuugugcaaagaaagc

SEQ ID NO: 2305562 - RNA, 19 nt, Artificial Sequence
  Description of Artificial Sequence: Synthetic oligonucleotide
  Sense strand starting at position 880 of SEQ ID NO: 1884964
agugauccauuacuugauu

SEQ ID NO: 2305563 - RNA, 19 nt, Artificial Sequence
  Description of Artificial Sequence: Synthetic oligonucleotide
  Antisense strand to SEQ ID NO: 2305562
aaucaaguaauggaucacu

SEQ ID NO: 2305564 - RNA, 19 nt, Artificial Sequence
  Description of Artificial Sequence: Synthetic oligonucleotide
  Sense strand starting at position 913 of SEQ ID NO: 1884964
agaccuaaguguuuaaauu

SEQ ID NO: 2305565 - RNA, 19 nt, Artificial Sequence
  Description of Artificial Sequence: Synthetic oligonucleotide
  Antisense strand to SEQ ID NO: 2305564
aauuuaaacacuuaggucu

SEQ ID NO: 2305566 - RNA, 19 nt, Artificial Sequence
  Description of Artificial Sequence: Synthetic oligonucleotide
  Sense strand starting at position 964 of SEQ ID NO: 1884964
cuaucuuggguuuagcaaa

SEQ ID NO: 2305567 - RNA, 19 nt, Artificial Sequence
  Description of Artificial Sequence: Synthetic oligonucleotide
  Antisense strand to SEQ ID NO: 2305566
uuugcuaaacccaagauag

SEQ ID NO: 2305568 - RNA, 19 nt, Artificial Sequence
  Description of Artificial Sequence: Synthetic oligonucleotide
  Sense strand starting at position 1226 of SEQ ID NO: 1884964
uuggauaucuggucuuuag

SEQ ID NO: 2305569 - RNA, 19 nt, Artificial Sequence
  Description of Artificial Sequence: Synthetic oligonucleotide
  Antisense strand to SEQ ID NO: 2305568
cuaaagaccagauauccaa

SEQ ID NO: 2305570 - RNA, 19 nt, Artificial Sequence
  Description of Artificial Sequence: Synthetic oligonucleotide
  Sense strand starting at position 1229 of SEQ ID NO: 1884964
gauaucuggucuuuagaua

SEQ ID NO: 2305571 - RNA, 19 nt, Artificial Sequence
  Description of Artificial Sequence: Synthetic oligonucleotide
  Antisense strand to SEQ ID NO: 2305570
uaucuaaagaccagauauc

SEQ ID NO: 2305572 - RNA, 19 nt, Artificial Sequence
  Description of Artificial Sequence: Synthetic oligonucleotide
  Sense strand starting at position 1289 of SEQ ID NO: 1884964
gccuaugaccuggaagcuu

SEQ ID NO: 2305573 - RNA, 19 nt, Artificial Sequence
  Description of Artificial Sequence: Synthetic oligonucleotide
  Antisense strand to SEQ ID NO: 2305572
aagcuuccaggucauaggc

SEQ ID NO: 2305574 - RNA, 19 nt, Artificial Sequence
  Description of Artificial Sequence: Synthetic oligonucleotide
  Sense strand starting at position 1437 of SEQ ID NO: 1884964
uguccuuaaccuugacaga

SEQ ID NO: 2305575 - RNA, 19 nt, Artificial Sequence
  Description of Artificial Sequence: Synthetic oligonucleotide
  Antisense strand to SEQ ID NO: 2305574
ucugucaagguuaaggaca

SEQ ID NO: 2305576 - RNA, 19 nt, Artificial Sequence
  Description of Artificial Sequence: Synthetic oligonucleotide
  Sense strand starting at position 1462 of SEQ ID NO: 1884964
uucuaaauugauugagucu

SEQ ID NO: 2305577 - RNA, 19 nt, Artificial Sequence
  Description of Artificial Sequence: Synthetic oligonucleotide
  Antisense strand to SEQ ID NO: 2305576
agacucaaucaauuuagaa

SEQ ID NO: 2305578 - RNA, 19 nt, Artificial Sequence
  Description of Artificial Sequence: Synthetic oligonucleotide
  Sense strand starting at position 1498 of SEQ ID NO: 1884964
gguuuacaacgugaaauac

SEQ ID NO: 2305579 - RNA, 19 nt, Artificial Sequence
  Description of Artificial Sequence: Synthetic oligonucleotide
  Antisense strand to SEQ ID NO: 2305578
guauuucacguuguaaacc

SEQ ID NO: 2305580 - RNA, 19 nt, Artificial Sequence
  Description of Artificial Sequence: Synthetic oligonucleotide
  Sense strand starting at position 1507 of SEQ ID NO: 1884964
cgugaaauacauuaugcuu

SEQ ID NO: 2305581 - RNA, 19 nt, Artificial Sequence
  Description of Artificial Sequence: Synthetic oligonucleotide
  Antisense strand to SEQ ID NO: 2305580
aagcauaauguauuucacg

SEQ ID NO: 2305582 - RNA, 19 nt, Artificial Sequence
  Description of Artificial Sequence: Synthetic oligonucleotide
  Sense strand starting at position 1593 of SEQ ID NO: 1884964
gaccuuugugccguccauu

SEQ ID NO: 2305583 - RNA, 19 nt, Artificial Sequence
  Description of Artificial Sequence: Synthetic oligonucleotide
  Antisense strand to SEQ ID NO: 2305582
aauggacggcacaaagguc

SEQ ID NO: 2305584 - RNA, 19 nt, Artificial Sequence
  Description of Artificial Sequence: Synthetic oligonucleotide
  Sense strand starting at position 1685 of SEQ ID NO: 1884964
ugacaucuguagguaggau

SEQ ID NO: 2305585 - RNA, 19 nt, Artificial Sequence
  Description of Artificial Sequence: Synthetic oligonucleotide
  Antisense strand to SEQ ID NO: 2305584
auccuaccuacagauguca

SEQ ID NO: 2305586 - RNA, 19 nt, Artificial Sequence
  Description of Artificial Sequence: Synthetic oligonucleotide
  Sense strand starting at position 1991 of SEQ ID NO: 1884964
gcaagagaaugcuugggaa

SEQ ID NO: 2305587 - RNA, 19 nt, Artificial Sequence
  Description of Artificial Sequence: Synthetic oligonucleotide
  Antisense strand to SEQ ID NO: 2305586
uucccaagcauucucuugc

SEQ ID NO: 2305588 - RNA, 19 nt, Artificial Sequence
  Description of Artificial Sequence: Synthetic oligonucleotide
  Sense strand starting at position 2006 of SEQ ID NO: 1884964
ggaagaacuuuguuaccca

SEQ ID NO: 2305589 - RNA, 19 nt, Artificial Sequence
  Description of Artificial Sequence: Synthetic oligonucleotide
  Antisense strand to SEQ ID NO: 2305588
uggguaacaaaguucuucc

SEQ ID NO: 2305590 - RNA, 19 nt, Artificial Sequence
  Description of Artificial Sequence: Synthetic oligonucleotide
  Sense strand starting at position 2287 of SEQ ID NO: 1884964
gaugguaaguaauccuucu

SEQ ID NO: 2305591 - RNA, 19 nt, Artificial Sequence
  Description of Artificial Sequence: Synthetic oligonucleotide
  Antisense strand to SEQ ID NO: 2305590
agaaggauuacuuaccauc

SEQ ID NO: 2305592 - RNA, 19 nt, Artificial Sequence
  Description of Artificial Sequence: Synthetic oligonucleotide
  Sense strand starting at position 2420 of SEQ ID NO: 1884964
ccaggaaauccuugagcuu

SEQ ID NO: 2305593 - RNA, 19 nt, Artificial Sequence
  Description of Artificial Sequence: Synthetic oligonucleotide
  Antisense strand to SEQ ID NO: 2305592
aagcucaaggauuuccugg

SEQ ID NO: 2305594 - RNA, 19 nt, Artificial Sequence
  Description of Artificial Sequence: Synthetic oligonucleotide
  Sense strand starting at position 2458 of SEQ ID NO: 1884964
cuuugagugaguuagauac

SEQ ID NO: 2305595 - RNA, 19 nt, Artificial Sequence
  Description of Artificial Sequence: Synthetic oligonucleotide
  Antisense strand to SEQ ID NO: 2305594
guaucuaacucacucaaag

SEQ ID NO: 2305596 - RNA, 19 nt, Artificial Sequence
  Description of Artificial Sequence: Synthetic oligonucleotide
  Sense strand starting at position 2479 of SEQ ID NO: 1884964
uggguuugucaucaguuaa

SEQ ID NO: 2305597 - RNA, 19 nt, Artificial Sequence
  Description of Artificial Sequence: Synthetic oligonucleotide
  Antisense strand to SEQ ID NO: 2305596
uuaacugaugacaaaccca

SEQ ID NO: 2305598 - RNA, 19 nt, Artificial Sequence
  Description of Artificial Sequence: Synthetic oligonucleotide
  Sense strand starting at position 2504 of SEQ ID NO: 1884964
ucugaauaggucuaucucu

SEQ ID NO: 2305599 - RNA, 19 nt, Artificial Sequence
  Description of Artificial Sequence: Synthetic oligonucleotide
  Antisense strand to SEQ ID NO: 2305598
agagauagaccuauucaga

SEQ ID NO: 2305600 - RNA, 19 nt, Artificial Sequence
  Description of Artificial Sequence: Synthetic oligonucleotide
  Sense strand starting at position 2590 of SEQ ID NO: 1884964
guguguauaugggucauuu

SEQ ID NO: 2305601 - RNA, 19 nt, Artificial Sequence
  Description of Artificial Sequence: Synthetic oligonucleotide
  Antisense strand to SEQ ID NO: 2305600
aaaugacccauauacacac

SEQ ID NO: 2305602 - RNA, 19 nt, Artificial Sequence
  Description of Artificial Sequence: Synthetic oligonucleotide
  Sense strand starting at position 2616 of SEQ ID NO: 1884964
uagauaugguuucuguaag

SEQ ID NO: 2305603 - RNA, 19 nt, Artificial Sequence
  Description of Artificial Sequence: Synthetic oligonucleotide
  Antisense strand to SEQ ID NO: 2305602
cuuacagaaaccauaucua

SEQ ID NO: 2305604 - RNA, 19 nt, Artificial Sequence
  Description of Artificial Sequence: Synthetic oligonucleotide
  Sense strand starting at position 2967 of SEQ ID NO: 1884964
ggaagaccgcauuauccau

SEQ ID NO: 2305605 - RNA, 19 nt, Artificial Sequence
  Description of Artificial Sequence: Synthetic oligonucleotide
  Antisense strand to SEQ ID NO: 2305604
auggauaaugcggucuucc

SEQ ID NO: 2305606 - RNA, 19 nt, Artificial Sequence
  Description of Artificial Sequence: Synthetic oligonucleotide
  Sense strand starting at position 3282 of SEQ ID NO: 1884964
gaagaaacagcuugaagua

SEQ ID NO: 2305607 - RNA, 19 nt, Artificial Sequence
  Description of Artificial Sequence: Synthetic oligonucleotide
  Antisense strand to SEQ ID NO: 2305606
uacuucaagcuguuucuuc

SEQ ID NO: 2305608 - RNA, 19 nt, Artificial Sequence
  Description of Artificial Sequence: Synthetic oligonucleotide
  Sense strand starting at position 3415 of SEQ ID NO: 1884964
aggaaagaagcuugcaaua

SEQ ID NO: 2305609 - RNA, 19 nt, Artificial Sequence
  Description of Artificial Sequence: Synthetic oligonucleotide
  Antisense strand to SEQ ID NO: 2305608
uauugcaagcuucuuuccu

SEQ ID NO: 2305610 - RNA, 19 nt, Artificial Sequence
  Description of Artificial Sequence: Synthetic oligonucleotide
  Sense strand starting at position 3463 of SEQ ID NO: 1884964
agcucaaugccuugagaaa

SEQ ID NO: 2305611 - RNA, 19 nt, Artificial Sequence
  Description of Artificial Sequence: Synthetic oligonucleotide
  Antisense strand to SEQ ID NO: 2305610
uuucucaaggcauugagcu

SEQ ID NO: 2305612 - RNA, 19 nt, Artificial Sequence
  Description of Artificial Sequence: Synthetic oligonucleotide
  Sense strand starting at position 3482 of SEQ ID NO: 1884964
agcaaaugcaccggagaaa

SEQ ID NO: 2305613 - RNA, 19 nt, Artificial Sequence
  Description of Artificial Sequence: Synthetic oligonucleotide
  Antisense strand to SEQ ID NO: 2305612
uuucuccggugcauuugcu

SEQ ID NO: 2305614 - RNA, 19 nt, Artificial Sequence
  Description of Artificial Sequence: Synthetic oligonucleotide
  Sense strand starting at position 3504 of SEQ ID NO: 1884964
guuagauagagcugaauua

SEQ ID NO: 2305615 - RNA, 19 nt, Artificial Sequence
  Description of Artificial Sequence: Synthetic oligonucleotide
  Antisense strand to SEQ ID NO: 2305614
uaauucagcucuaucuaac

SEQ ID NO: 2305616 - RNA, 19 nt, Artificial Sequence
  Description of Artificial Sequence: Synthetic oligonucleotide
  Sense strand starting at position 3515 of SEQ ID NO: 1884964
cugaauuaaaggugagcuu

SEQ ID NO: 2305617 - RNA, 19 nt, Artificial Sequence
  Description of Artificial Sequence: Synthetic oligonucleotide
  Antisense strand to SEQ ID NO: 2305616
aagcucaccuuuaauucag

SEQ ID NO: 2305618 - RNA, 19 nt, Artificial Sequence
  Description of Artificial Sequence: Synthetic oligonucleotide
  Sense strand starting at position 3516 of SEQ ID NO: 1884964
ugaauuaaaggugagcuuu

SEQ ID NO: 2305619 - RNA, 19 nt, Artificial Sequence
  Description of Artificial Sequence: Synthetic oligonucleotide
  Antisense strand to SEQ ID NO: 2305618
aaagcucaccuuuaauuca

SEQ ID NO: 2305620 - RNA, 19 nt, Artificial Sequence
  Description of Artificial Sequence: Synthetic oligonucleotide
  Sense strand starting at position 3876 of SEQ ID NO: 1884964
ccaguacagcucugggaga

SEQ ID NO: 2305621 - RNA, 19 nt, Artificial Sequence
  Description of Artificial Sequence: Synthetic oligonucleotide
  Antisense strand to SEQ ID NO: 2305620
ucucccagagcuguacugg

SEQ ID NO: 2305622 - RNA, 19 nt, Artificial Sequence
  Description of Artificial Sequence: Synthetic oligonucleotide
  Sense strand starting at position 103 of SEQ ID NO: 1884965
caagcaggccgugaaauau

SEQ ID NO: 2305623 - RNA, 19 nt, Artificial Sequence
  Description of Artificial Sequence: Synthetic oligonucleotide
  Antisense strand to SEQ ID NO: 2305622
auauuucacggccugcuug

SEQ ID NO: 2305624 - RNA, 19 nt, Artificial Sequence
  Description of Artificial Sequence: Synthetic oligonucleotide
  Sense strand starting at position 162 of SEQ ID NO: 1884965
ggugcuguucugagaggcu

SEQ ID NO: 2305625 - RNA, 19 nt, Artificial Sequence
  Description of Artificial Sequence: Synthetic oligonucleotide
  Antisense strand to SEQ ID NO: 2305624
agccucucagaacagcacc

SEQ ID NO: 2305626 - RNA, 19 nt, Artificial Sequence
  Description of Artificial Sequence: Synthetic oligonucleotide
  Sense strand starting at position 229 of SEQ ID NO: 1884965
gcugcuaaucuguacccaa

SEQ ID NO: 2305627 - RNA, 19 nt, Artificial Sequence
  Description of Artificial Sequence: Synthetic oligonucleotide
  Antisense strand to SEQ ID NO: 2305626
uuggguacagauuagcagc

SEQ ID NO: 2305628 - RNA, 19 nt, Artificial Sequence
  Description of Artificial Sequence: Synthetic oligonucleotide
  Sense strand starting at position 232 of SEQ ID NO: 1884965
gcuaaucuguacccaauga

SEQ ID NO: 2305629 - RNA, 19 nt, Artificial Sequence
  Description of Artificial Sequence: Synthetic oligonucleotide
  Antisense strand to SEQ ID NO: 2305628
ucauuggguacagauuagc

SEQ ID NO: 2305630 - RNA, 19 nt, Artificial Sequence
  Description of Artificial Sequence: Synthetic oligonucleotide
  Sense strand starting at position 618 of SEQ ID NO: 1884965
ccucucaauuugggaagaa

SEQ ID NO: 2305631 - RNA, 19 nt, Artificial Sequence
  Description of Artificial Sequence: Synthetic oligonucleotide
  Antisense strand to SEQ ID NO: 2305630
uucuucccaaauugagagg

SEQ ID NO: 2305632 - RNA, 19 nt, Artificial Sequence
  Description of Artificial Sequence: Synthetic oligonucleotide
  Sense strand starting at position 619 of SEQ ID NO: 1884965
cucucaauuugggaagaaa

SEQ ID NO: 2305633 - RNA, 19 nt, Artificial Sequence
  Description of Artificial Sequence: Synthetic oligonucleotide
  Antisense strand to SEQ ID NO: 2305632
uuucuucccaaauugagag

SEQ ID NO: 2305634 - RNA, 19 nt, Artificial Sequence
  Description of Artificial Sequence: Synthetic oligonucleotide
  Sense strand starting at position 651 of SEQ ID NO: 1884965
acugauucguaagucucaa

SEQ ID NO: 2305635 - RNA, 19 nt, Artificial Sequence
  Description of Artificial Sequence: Synthetic oligonucleotide
  Antisense strand to SEQ ID NO: 2305634
uugagacuuacgaaucagu

SEQ ID NO: 2305636 - RNA, 19 nt, Artificial Sequence
  Description of Artificial Sequence: Synthetic oligonucleotide
  Sense strand starting at position 703 of SEQ ID NO: 1884965
gugcauguauaucuuaaag

SEQ ID NO: 2305637 - RNA, 19 nt, Artificial Sequence
  Description of Artificial Sequence: Synthetic oligonucleotide
  Antisense strand to SEQ ID NO: 2305636
cuuuaagauauacaugcac

SEQ ID NO: 2305638 - RNA, 19 nt, Artificial Sequence
  Description of Artificial Sequence: Synthetic oligonucleotide
  Sense strand starting at position 727 of SEQ ID NO: 1884965
acggauggcugucuaauga

SEQ ID NO: 2305639 - RNA, 19 nt, Artificial Sequence
  Description of Artificial Sequence: Synthetic oligonucleotide
  Antisense strand to SEQ ID NO: 2305638
ucauuagacagccauccgu

SEQ ID NO: 2305640 - RNA, 19 nt, Artificial Sequence
  Description of Artificial Sequence: Synthetic oligonucleotide
  Sense strand starting at position 846 of SEQ ID NO: 1884965
uguuguauaccaggaacuu

SEQ ID NO: 2305641 - RNA, 19 nt, Artificial Sequence
  Description of Artificial Sequence: Synthetic oligonucleotide
  Antisense strand to SEQ ID NO: 2305640
aaguuccugguauacaaca

SEQ ID NO: 2305642 - RNA, 19 nt, Artificial Sequence
  Description of Artificial Sequence: Synthetic oligonucleotide
  Sense strand starting at position 929 of SEQ ID NO: 1884965
ccauucucaaggugaggaa

SEQ ID NO: 2305643 - RNA, 19 nt, Artificial Sequence
  Description of Artificial Sequence: Synthetic oligonucleotide
  Antisense strand to SEQ ID NO: 2305642
uuccucaccuugagaaugg

SEQ ID NO: 2305644 - RNA, 19 nt, Artificial Sequence
  Description of Artificial Sequence: Synthetic oligonucleotide
  Sense strand starting at position 962 of SEQ ID NO: 1884965
ggcuccaugacuugaagua

SEQ ID NO: 2305645 - RNA, 19 nt, Artificial Sequence
  Description of Artificial Sequence: Synthetic oligonucleotide
  Antisense strand to SEQ ID NO: 2305644
uacuucaagucauggagcc

SEQ ID NO: 2305646 - RNA, 19 nt, Artificial Sequence
  Description of Artificial Sequence: Synthetic oligonucleotide
  Sense strand starting at position 963 of SEQ ID NO: 1884965
gcuccaugacuugaaguaa

SEQ ID NO: 2305647 - RNA, 19 nt, Artificial Sequence
  Description of Artificial Sequence: Synthetic oligonucleotide
  Antisense strand to SEQ ID NO: 2305646
uuacuucaagucauggagc

SEQ ID NO: 2305648 - RNA, 19 nt, Artificial Sequence
  Description of Artificial Sequence: Synthetic oligonucleotide
  Sense strand starting at position 1012 of SEQ ID NO: 1884965
cuguuauuggcauagagca

SEQ ID NO: 2305649 - RNA, 19 nt, Artificial Sequence
  Description of Artificial Sequence: Synthetic oligonucleotide
  Antisense strand to SEQ ID NO: 2305648
ugcucuaugccaauaacag

SEQ ID NO: 2305650 - RNA, 19 nt, Artificial Sequence
  Description of Artificial Sequence: Synthetic oligonucleotide
  Sense strand starting at position 1267 of SEQ ID NO: 1884965
cuaaauuguaaggguaguu

SEQ ID NO: 2305651 - RNA, 19 nt, Artificial Sequence
  Description of Artificial Sequence: Synthetic oligonucleotide
  Antisense strand to SEQ ID NO: 2305650
aacuacccuuacaauuuag

SEQ ID NO: 2305652 - RNA, 19 nt, Artificial Sequence
  Description of Artificial Sequence: Synthetic oligonucleotide
  Sense strand starting at position 1280 of SEQ ID NO: 1884965
guaguuugaacuuaguucu

SEQ ID NO: 2305653 - RNA, 19 nt, Artificial Sequence
  Description of Artificial Sequence: Synthetic oligonucleotide
  Antisense strand to SEQ ID NO: 2305652
agaacuaaguucaaacuac

SEQ ID NO: 2305654 - RNA, 19 nt, Artificial Sequence
  Description of Artificial Sequence: Synthetic oligonucleotide
  Sense strand starting at position 1287 of SEQ ID NO: 1884965
gaacuuaguucuuugggua

SEQ ID NO: 2305655 - RNA, 19 nt, Artificial Sequence
  Description of Artificial Sequence: Synthetic oligonucleotide
  Antisense strand to SEQ ID NO: 2305654
uacccaaagaacuaaguuc

SEQ ID NO: 2305656 - RNA, 19 nt, Artificial Sequence
  Description of Artificial Sequence: Synthetic oligonucleotide
  Sense strand starting at position 1288 of SEQ ID NO: 1884965
aacuuaguucuuuggguac

SEQ ID NO: 2305657 - RNA, 19 nt, Artificial Sequence
  Description of Artificial Sequence: Synthetic oligonucleotide
  Antisense strand to SEQ ID NO: 2305656
guacccaaagaacuaaguu

SEQ ID NO: 2305658 - RNA, 19 nt, Artificial Sequence
  Description of Artificial Sequence: Synthetic oligonucleotide
  Sense strand starting at position 1363 of SEQ ID NO: 1884965
uuucuucguccucaugaca

SEQ ID NO: 2305659 - RNA, 19 nt, Artificial Sequence
  Description of Artificial Sequence: Synthetic oligonucleotide
  Antisense strand to SEQ ID NO: 2305658
ugucaugaggacgaagaaa

SEQ ID NO: 2305660 - RNA, 19 nt, Artificial Sequence
  Description of Artificial Sequence: Synthetic oligonucleotide
  Sense strand starting at position 1465 of SEQ ID NO: 1884965
accuuuguugagcauguua

SEQ ID NO: 2305661 - RNA, 19 nt, Artificial Sequence
  Description of Artificial Sequence: Synthetic oligonucleotide
  Antisense strand to SEQ ID NO: 2305660
uaacaugcucaacaaaggu

SEQ ID NO: 2305662 - RNA, 19 nt, Artificial Sequence
  Description of Artificial Sequence: Synthetic oligonucleotide
  Sense strand starting at position 1587 of SEQ ID NO: 1884965
ggcaauaggugguuuagau

SEQ ID NO: 2305663 - RNA, 19 nt, Artificial Sequence
  Description of Artificial Sequence: Synthetic oligonucleotide
  Antisense strand to SEQ ID NO: 2305662
aucuaaaccaccuauugcc

SEQ ID NO: 2305664 - RNA, 19 nt, Artificial Sequence
  Description of Artificial Sequence: Synthetic oligonucleotide
  Sense strand starting at position 1618 of SEQ ID NO: 1884965
ccugaaaccugggcuuagu

SEQ ID NO: 2305665 - RNA, 19 nt, Artificial Sequence
  Description of Artificial Sequence: Synthetic oligonucleotide
  Antisense strand to SEQ ID NO: 2305664
acuaagcccagguuucagg

SEQ ID NO: 2305666 - RNA, 19 nt, Artificial Sequence
  Description of Artificial Sequence: Synthetic oligonucleotide
  Sense strand starting at position 1827 of SEQ ID NO: 1884965
gcguguaggacgcuucauu

SEQ ID NO: 2305667 - RNA, 19 nt, Artificial Sequence
  Description of Artificial Sequence: Synthetic oligonucleotide
  Antisense strand to SEQ ID NO: 2305666
aaugaagcguccuacacgc

SEQ ID NO: 2305668 - RNA, 19 nt, Artificial Sequence
  Description of Artificial Sequence: Synthetic oligonucleotide
  Sense strand starting at position 1870 of SEQ ID NO: 1884965
cgcacagaucaauguuaac

SEQ ID NO: 2305669 - RNA, 19 nt, Artificial Sequence
  Description of Artificial Sequence: Synthetic oligonucleotide
  Antisense strand to SEQ ID NO: 2305668
guuaacauugaucugugcg

SEQ ID NO: 2305670 - RNA, 19 nt, Artificial Sequence
  Description of Artificial Sequence: Synthetic oligonucleotide
  Sense strand starting at position 2240 of SEQ ID NO: 1884965
cggugucagcuccagauaa

SEQ ID NO: 2305671 - RNA, 19 nt, Artificial Sequence
  Description of Artificial Sequence: Synthetic oligonucleotide
  Antisense strand to SEQ ID NO: 2305670
uuaucuggagcugacaccg

SEQ ID NO: 2305672 - RNA, 19 nt, Artificial Sequence
  Description of Artificial Sequence: Synthetic oligonucleotide
  Sense strand starting at position 2242 of SEQ ID NO: 1884965
gugucagcuccagauaauc

SEQ ID NO: 2305673 - RNA, 19 nt, Artificial Sequence
  Description of Artificial Sequence: Synthetic oligonucleotide
  Antisense strand to SEQ ID NO: 2305672
gauuaucuggagcugacac

SEQ ID NO: 2305674 - RNA, 19 nt, Artificial Sequence
  Description of Artificial Sequence: Synthetic oligonucleotide
  Sense strand starting at position 2251 of SEQ ID NO: 1884965
ccagauaaucuuggcagca

SEQ ID NO: 2305675 - RNA, 19 nt, Artificial Sequence
  Description of Artificial Sequence: Synthetic oligonucleotide
  Antisense strand to SEQ ID NO: 2305674
ugcugccaagauuaucugg

SEQ ID NO: 2305676 - RNA, 19 nt, Artificial Sequence
  Description of Artificial Sequence: Synthetic oligonucleotide
  Sense strand starting at position 2404 of SEQ ID NO: 1884965
gugauugggugcccauaca

SEQ ID NO: 2305677 - RNA, 19 nt, Artificial Sequence
  Description of Artificial Sequence: Synthetic oligonucleotide
  Antisense strand to SEQ ID NO: 2305676
uguaugggcacccaaucac

SEQ ID NO: 2305678 - RNA, 19 nt, Artificial Sequence
  Description of Artificial Sequence: Synthetic oligonucleotide
  Sense strand starting at position 2511 of SEQ ID NO: 1884965
gggagauaaacgcaauggu

SEQ ID NO: 2305679 - RNA, 19 nt, Artificial Sequence
  Description of Artificial Sequence: Synthetic oligonucleotide
  Antisense strand to SEQ ID NO: 2305678
accauugcguuuaucuccc

SEQ ID NO: 2305680 - RNA, 19 nt, Artificial Sequence
  Description of Artificial Sequence: Synthetic oligonucleotide
  Sense strand starting at position 2519 of SEQ ID NO: 1884965
aacgcaauggucgacagaa

SEQ ID NO: 2305681 - RNA, 19 nt, Artificial Sequence
  Description of Artificial Sequence: Synthetic oligonucleotide
  Antisense strand to SEQ ID NO: 2305680
uucugucgaccauugcguu

SEQ ID NO: 2305682 - RNA, 19 nt, Artificial Sequence
  Description of Artificial Sequence: Synthetic oligonucleotide
  Sense strand starting at position 2564 of SEQ ID NO: 1884965
agggaagacuccuagagag

SEQ ID NO: 2305683 - RNA, 19 nt, Artificial Sequence
  Description of Artificial Sequence: Synthetic oligonucleotide
  Antisense strand to SEQ ID NO: 2305682
cucucuaggagucuucccu

SEQ ID NO: 2305684 - RNA, 19 nt, Artificial Sequence
  Description of Artificial Sequence: Synthetic oligonucleotide
  Sense strand starting at position 2831 of SEQ ID NO: 1884965
gaaggauggcucugaagau

SEQ ID NO: 2305685 - RNA, 19 nt, Artificial Sequence
  Description of Artificial Sequence: Synthetic oligonucleotide
  Antisense strand to SEQ ID NO: 2305684
aucuucagagccauccuuc

SEQ ID NO: 2305686 - RNA, 19 nt, Artificial Sequence
  Description of Artificial Sequence: Synthetic oligonucleotide
  Sense strand starting at position 3038 of SEQ ID NO: 1884965
cuccgagcugaugagaauu

SEQ ID NO: 2305687 - RNA, 19 nt, Artificial Sequence
  Description of Artificial Sequence: Synthetic oligonucleotide
  Antisense strand to SEQ ID NO: 2305686
aauucucaucagcucggag

SEQ ID NO: 2305688 - RNA, 19 nt, Artificial Sequence
  Description of Artificial Sequence: Synthetic oligonucleotide
  Sense strand starting at position 3428 of SEQ ID NO: 1884965
agcaauuaaccaugucgau

SEQ ID NO: 2305689 - RNA, 19 nt, Artificial Sequence
  Description of Artificial Sequence: Synthetic oligonucleotide
  Antisense strand to SEQ ID NO: 2305688
aucgacaugguuaauugcu

SEQ ID NO: 2305690 - RNA, 19 nt, Artificial Sequence
  Description of Artificial Sequence: Synthetic oligonucleotide
  Sense strand starting at position 3507 of SEQ ID NO: 1884965
agcaauggccgugacaaga

SEQ ID NO: 2305691 - RNA, 19 nt, Artificial Sequence
  Description of Artificial Sequence: Synthetic oligonucleotide
  Antisense strand to SEQ ID NO: 2305690
ucuugucacggccauugcu

SEQ ID NO: 2305692 - RNA, 19 nt, Artificial Sequence
  Description of Artificial Sequence: Synthetic oligonucleotide
  Sense strand starting at position 3518 of SEQ ID NO: 1884965
ugacaagagaaguguuaau

SEQ ID NO: 2305693 - RNA, 19 nt, Artificial Sequence
  Description of Artificial Sequence: Synthetic oligonucleotide
  Antisense strand to SEQ ID NO: 2305692
auuaacacuucucuuguca

SEQ ID NO: 2305694 - RNA, 19 nt, Artificial Sequence
  Description of Artificial Sequence: Synthetic oligonucleotide
  Sense strand starting at position 3658 of SEQ ID NO: 1884965
gguucugauuuguaagaug

SEQ ID NO: 2305695 - RNA, 19 nt, Artificial Sequence
  Description of Artificial Sequence: Synthetic oligonucleotide
  Antisense strand to SEQ ID NO: 2305694
caucuuacaaaucagaacc

SEQ ID NO: 2305696 - RNA, 19 nt, Artificial Sequence
  Description of Artificial Sequence: Synthetic oligonucleotide
  Sense strand starting at position 3694 of SEQ ID NO: 1884965
ggugcuccugaggaugauu

SEQ ID NO: 2305697 - RNA, 19 nt, Artificial Sequence
  Description of Artificial Sequence: Synthetic oligonucleotide
  Antisense strand to SEQ ID NO: 2305696
aaucauccucaggagcacc

SEQ ID NO: 2305698 - RNA, 19 nt, Artificial Sequence
  Description of Artificial Sequence: Synthetic oligonucleotide
  Sense strand starting at position 3728 of SEQ ID NO: 1884965
gugguagcuaucugaaaga

SEQ ID NO: 2305699 - RNA, 19 nt, Artificial Sequence
  Description of Artificial Sequence: Synthetic oligonucleotide
  Antisense strand to SEQ ID NO: 2305698
ucuuucagauagcuaccac

SEQ ID NO: 2305700 - RNA, 19 nt, Artificial Sequence
  Description of Artificial Sequence: Synthetic oligonucleotide
  Sense strand starting at position 3795 of SEQ ID NO: 1884965
augugucugcaccaugaua

SEQ ID NO: 2305701 - RNA, 19 nt, Artificial Sequence
  Description of Artificial Sequence: Synthetic oligonucleotide
  Antisense strand to SEQ ID NO: 2305700
uaucauggugcagacacau

SEQ ID NO: 2305702 - RNA, 19 nt, Artificial Sequence
  Description of Artificial Sequence: Synthetic oligonucleotide
  Sense strand starting at position 1309 of SEQ ID NO: 1884966
ucaacaaucuggucaacug

SEQ ID NO: 2305703 - RNA, 19 nt, Artificial Sequence
  Description of Artificial Sequence: Synthetic oligonucleotide
  Antisense strand to SEQ ID NO: 2305702
caguugaccagauuguuga

SEQ ID NO: 2305704 - RNA, 19 nt, Artificial Sequence
  Description of Artificial Sequence: Synthetic oligonucleotide
  Sense strand starting at position 1387 of SEQ ID NO: 1884966
gcuagacucacgcagcuaa

SEQ ID NO: 2305705 - RNA, 19 nt, Artificial Sequence
  Description of Artificial Sequence: Synthetic oligonucleotide
  Antisense strand to SEQ ID NO: 2305704
uuagcugcgugagucuagc

SEQ ID NO: 2305706 - RNA, 19 nt, Artificial Sequence
  Description of Artificial Sequence: Synthetic oligonucleotide
  Sense strand starting at position 1479 of SEQ ID NO: 1884966
ggcucaguuucuguaagag

SEQ ID NO: 2305707 - RNA, 19 nt, Artificial Sequence
  Description of Artificial Sequence: Synthetic oligonucleotide
  Antisense strand to SEQ ID NO: 2305706
cucuuacagaaacugagcc

SEQ ID NO: 2305708 - RNA, 19 nt, Artificial Sequence
  Description of Artificial Sequence: Synthetic oligonucleotide
  Sense strand starting at position 2228 of SEQ ID NO: 1884966
gaaagaaggcccugugauc

SEQ ID NO: 2305709 - RNA, 19 nt, Artificial Sequence
  Description of Artificial Sequence: Synthetic oligonucleotide
  Antisense strand to SEQ ID NO: 2305708
gaucacagggccuucuuuc

SEQ ID NO: 2305710 - RNA, 19 nt, Artificial Sequence
  Description of Artificial Sequence: Synthetic oligonucleotide
  Sense strand starting at position 2262 of SEQ ID NO: 1884966
auaauugacucuguuaugu

SEQ ID NO: 2305711 - RNA, 19 nt, Artificial Sequence
  Description of Artificial Sequence: Synthetic oligonucleotide
  Antisense strand to SEQ ID NO: 2305710
acauaacagagucaauuau

SEQ ID NO: 2305712 - RNA, 19 nt, Artificial Sequence
  Description of Artificial Sequence: Synthetic oligonucleotide
  Sense strand starting at position 2311 of SEQ ID NO: 1884966
aucugaaguuauucuuaag

SEQ ID NO: 2305713 - RNA, 19 nt, Artificial Sequence
  Description of Artificial Sequence: Synthetic oligonucleotide
  Antisense strand to SEQ ID NO: 2305712
cuuaagaauaacuucagau

SEQ ID NO: 2305714 - RNA, 19 nt, Artificial Sequence
  Description of Artificial Sequence: Synthetic oligonucleotide
  Sense strand starting at position 2437 of SEQ ID NO: 1884966
uguuucucaugggcacaua

SEQ ID NO: 2305715 - RNA, 19 nt, Artificial Sequence
  Description of Artificial Sequence: Synthetic oligonucleotide
  Antisense strand to SEQ ID NO: 2305714
uaugugcccaugagaaaca

SEQ ID NO: 2305716 - RNA, 19 nt, Artificial Sequence
  Description of Artificial Sequence: Synthetic oligonucleotide
  Sense strand starting at position 2438 of SEQ ID NO: 1884966
guuucucaugggcacauaa

SEQ ID NO: 2305717 - RNA, 19 nt, Artificial Sequence
  Description of Artificial Sequence: Synthetic oligonucleotide
  Antisense strand to SEQ ID NO: 2305716
uuaugugcccaugagaaac

SEQ ID NO: 2305718 - RNA, 19 nt, Artificial Sequence
  Description of Artificial Sequence: Synthetic oligonucleotide
  Sense strand starting at position 2440 of SEQ ID NO: 1884966
uucucaugggcacauaauu

SEQ ID NO: 2305719 - RNA, 19 nt, Artificial Sequence
  Description of Artificial Sequence: Synthetic oligonucleotide
  Antisense strand to SEQ ID NO: 2305718
aauuaugugcccaugagaa

SEQ ID NO: 2305720 - RNA, 19 nt, Artificial Sequence
  Description of Artificial Sequence: Synthetic oligonucleotide
  Sense strand starting at position 2488 of SEQ ID NO: 1884966
auugaaugcuuguuauuag

SEQ ID NO: 2305721 - RNA, 19 nt, Artificial Sequence
  Description of Artificial Sequence: Synthetic oligonucleotide
  Antisense strand to SEQ ID NO: 2305720
cuaauaacaagcauucaau

SEQ ID NO: 2305722 - RNA, 19 nt, Artificial Sequence
  Description of Artificial Sequence: Synthetic oligonucleotide
  Sense strand starting at position 2497 of SEQ ID NO: 1884966
uuguuauuaguggauauac

SEQ ID NO: 2305723 - RNA, 19 nt, Artificial Sequence
  Description of Artificial Sequence: Synthetic oligonucleotide
  Antisense strand to SEQ ID NO: 2305722
guauauccacuaauaacaa

SEQ ID NO: 2305724 - RNA, 19 nt, Artificial Sequence
  Description of Artificial Sequence: Synthetic oligonucleotide
  Sense strand starting at position 2499 of SEQ ID NO: 1884966
guuauuaguggauauacuu

SEQ ID NO: 2305725 - RNA, 19 nt, Artificial Sequence
  Description of Artificial Sequence: Synthetic oligonucleotide
  Antisense strand to SEQ ID NO: 2305724
aaguauauccacuaauaac

SEQ ID NO: 2305726 - RNA, 19 nt, Artificial Sequence
  Description of Artificial Sequence: Synthetic oligonucleotide
  Sense strand starting at position 2667 of SEQ ID NO: 1884966
gaucaagaguaucauaaga

SEQ ID NO: 2305727 - RNA, 19 nt, Artificial Sequence
  Description of Artificial Sequence: Synthetic oligonucleotide
  Antisense strand to SEQ ID NO: 2305726
ucuuaugauacucuugauc

SEQ ID NO: 2305728 - RNA, 19 nt, Artificial Sequence
  Description of Artificial Sequence: Synthetic oligonucleotide
  Sense strand starting at position 2709 of SEQ ID NO: 1884966
aaaugcugugaucagggua

SEQ ID NO: 2305729 - RNA, 19 nt, Artificial Sequence
  Description of Artificial Sequence: Synthetic oligonucleotide
  Antisense strand to SEQ ID NO: 2305728
uacccugaucacagcauuu

SEQ ID NO: 2305730 - RNA, 19 nt, Artificial Sequence
  Description of Artificial Sequence: Synthetic oligonucleotide
  Sense strand starting at position 2759 of SEQ ID NO: 1884966
gguuuaaggcaguaaggaa

SEQ ID NO: 2305731 - RNA, 19 nt, Artificial Sequence
  Description of Artificial Sequence: Synthetic oligonucleotide
  Antisense strand to SEQ ID NO: 2305730
uuccuuacugccuuaaacc

SEQ ID NO: 2305732 - RNA, 19 nt, Artificial Sequence
  Description of Artificial Sequence: Synthetic oligonucleotide
  Sense strand starting at position 2830 of SEQ ID NO: 1884966
gugugaaggcuucaaguca

SEQ ID NO: 2305733 - RNA, 19 nt, Artificial Sequence
  Description of Artificial Sequence: Synthetic oligonucleotide
  Antisense strand to SEQ ID NO: 2305732
ugacuugaagccuucacac

SEQ ID NO: 2305734 - RNA, 19 nt, Artificial Sequence
  Description of Artificial Sequence: Synthetic oligonucleotide
  Sense strand starting at position 2850 of SEQ ID NO: 1884966
guagaaagauucucaacug

SEQ ID NO: 2305735 - RNA, 19 nt, Artificial Sequence
  Description of Artificial Sequence: Synthetic oligonucleotide
  Antisense strand to SEQ ID NO: 2305734
caguugagaaucuuucuac

SEQ ID NO: 2305736 - RNA, 19 nt, Artificial Sequence
  Description of Artificial Sequence: Synthetic oligonucleotide
  Sense strand starting at position 2882 of SEQ ID NO: 1884966
aggaguuuaguauggcuga

SEQ ID NO: 2305737 - RNA, 19 nt, Artificial Sequence
  Description of Artificial Sequence: Synthetic oligonucleotide
  Antisense strand to SEQ ID NO: 2305736
ucagccauacuaaacuccu

SEQ ID NO: 2305738 - RNA, 19 nt, Artificial Sequence
  Description of Artificial Sequence: Synthetic oligonucleotide
  Sense strand starting at position 2885 of SEQ ID NO: 1884966
aguuuaguauggcugagga

SEQ ID NO: 2305739 - RNA, 19 nt, Artificial Sequence
  Description of Artificial Sequence: Synthetic oligonucleotide
  Antisense strand to SEQ ID NO: 2305738
uccucagccauacuaaacu

SEQ ID NO: 2305740 - RNA, 19 nt, Artificial Sequence
  Description of Artificial Sequence: Synthetic oligonucleotide
  Sense strand starting at position 2964 of SEQ ID NO: 1884966
uguacaaguaugggacauu

SEQ ID NO: 2305741 - RNA, 19 nt, Artificial Sequence
  Description of Artificial Sequence: Synthetic oligonucleotide
  Antisense strand to SEQ ID NO: 2305740
aaugucccauacuuguaca

SEQ ID NO: 2305742 - RNA, 19 nt, Artificial Sequence
  Description of Artificial Sequence: Synthetic oligonucleotide
  Sense strand starting at position 2965 of SEQ ID NO: 1884966
guacaaguaugggacauuu

SEQ ID NO: 2305743 - RNA, 19 nt, Artificial Sequence
  Description of Artificial Sequence: Synthetic oligonucleotide
  Antisense strand to SEQ ID NO: 2305742
aaaugucccauacuuguac

SEQ ID NO: 2305744 - RNA, 19 nt, Artificial Sequence
  Description of Artificial Sequence: Synthetic oligonucleotide
  Sense strand starting at position 3038 of SEQ ID NO: 1884966
uagucuggaugacuuagaa

SEQ ID NO: 2305745 - RNA, 19 nt, Artificial Sequence
  Description of Artificial Sequence: Synthetic oligonucleotide
  Antisense strand to SEQ ID NO: 2305744
uucuaagucauccagacua

SEQ ID NO: 2305746 - RNA, 19 nt, Artificial Sequence
  Description of Artificial Sequence: Synthetic oligonucleotide
  Sense strand starting at position 3042 of SEQ ID NO: 1884966
cuggaugacuuagaaugaa

SEQ ID NO: 2305747 - RNA, 19 nt, Artificial Sequence
  Description of Artificial Sequence: Synthetic oligonucleotide
  Antisense strand to SEQ ID NO: 2305746
uucauucuaagucauccag

SEQ ID NO: 2305748 - RNA, 19 nt, Artificial Sequence
  Description of Artificial Sequence: Synthetic oligonucleotide
  Sense strand starting at position 3062 of SEQ ID NO: 1884966
acaccaguguuucuguaaa

SEQ ID NO: 2305749 - RNA, 19 nt, Artificial Sequence
  Description of Artificial Sequence: Synthetic oligonucleotide
  Antisense strand to SEQ ID NO: 2305748
uuuacagaaacacuggugu

SEQ ID NO: 2305750 - RNA, 19 nt, Artificial Sequence
  Description of Artificial Sequence: Synthetic oligonucleotide
  Sense strand starting at position 3064 of SEQ ID NO: 1884966
accaguguuucuguaaaua

SEQ ID NO: 2305751 - RNA, 19 nt, Artificial Sequence
  Description of Artificial Sequence: Synthetic oligonucleotide
  Antisense strand to SEQ ID NO: 2305750
uauuuacagaaacacuggu

SEQ ID NO: 2305752 - RNA, 19 nt, Artificial Sequence
  Description of Artificial Sequence: Synthetic oligonucleotide
  Sense strand starting at position 3255 of SEQ ID NO: 1884966
uauccuguugugggacauu

SEQ ID NO: 2305753 - RNA, 19 nt, Artificial Sequence
  Description of Artificial Sequence: Synthetic oligonucleotide
  Antisense strand to SEQ ID NO: 2305752
aaugucccacaacaggaua

SEQ ID NO: 2305754 - RNA, 19 nt, Artificial Sequence
  Description of Artificial Sequence: Synthetic oligonucleotide
  Sense strand starting at position 3351 of SEQ ID NO: 1884966
ugucacucuccuggguauu

SEQ ID NO: 2305755 - RNA, 19 nt, Artificial Sequence
  Description of Artificial Sequence: Synthetic oligonucleotide
  Antisense strand to SEQ ID NO: 2305754
aauacccaggagagugaca

SEQ ID NO: 2305756 - RNA, 19 nt, Artificial Sequence
  Description of Artificial Sequence: Synthetic oligonucleotide
  Sense strand starting at position 3363 of SEQ ID NO: 1884966
ggguauuuauguagcggua

SEQ ID NO: 2305757 - RNA, 19 nt, Artificial Sequence
  Description of Artificial Sequence: Synthetic oligonucleotide
  Antisense strand to SEQ ID NO: 2305756
uaccgcuacauaaauaccc

SEQ ID NO: 2305758 - RNA, 19 nt, Artificial Sequence
  Description of Artificial Sequence: Synthetic oligonucleotide
  Sense strand starting at position 3398 of SEQ ID NO: 1884966
aggcucuguggaugaugaa

SEQ ID NO: 2305759 - RNA, 19 nt, Artificial Sequence
  Description of Artificial Sequence: Synthetic oligonucleotide
  Antisense strand to SEQ ID NO: 2305758
uucaucauccacagagccu

SEQ ID NO: 2305760 - RNA, 19 nt, Artificial Sequence
  Description of Artificial Sequence: Synthetic oligonucleotide
  Sense strand starting at position 3399 of SEQ ID NO: 1884966
ggcucuguggaugaugaau

SEQ ID NO: 2305761 - RNA, 19 nt, Artificial Sequence
  Description of Artificial Sequence: Synthetic oligonucleotide
  Antisense strand to SEQ ID NO: 2305760
auucaucauccacagagcc

SEQ ID NO: 2305762 - RNA, 19 nt, Artificial Sequence
  Description of Artificial Sequence: Synthetic oligonucleotide
  Sense strand starting at position 3455 of SEQ ID NO: 1884966
gagagauucgguugcucca

SEQ ID NO: 2305763 - RNA, 19 nt, Artificial Sequence
  Description of Artificial Sequence: Synthetic oligonucleotide
  Antisense strand to SEQ ID NO: 2305762
uggagcaaccgaaucucuc

SEQ ID NO: 2305764 - RNA, 19 nt, Artificial Sequence
  Description of Artificial Sequence: Synthetic oligonucleotide
  Sense strand starting at position 3614 of SEQ ID NO: 1884966
guguaaggugcuaggucuu

SEQ ID NO: 2305765 - RNA, 19 nt, Artificial Sequence
  Description of Artificial Sequence: Synthetic oligonucleotide
  Antisense strand to SEQ ID NO: 2305764
aagaccuagcaccuuacac

SEQ ID NO: 2305766 - RNA, 19 nt, Artificial Sequence
  Description of Artificial Sequence: Synthetic oligonucleotide
  Sense strand starting at position 3636 of SEQ ID NO: 1884966
cuaauuuauuucuggaagu

SEQ ID NO: 2305767 - RNA, 19 nt, Artificial Sequence
  Description of Artificial Sequence: Synthetic oligonucleotide
  Antisense strand to SEQ ID NO: 2305766
acuuccagaaauaaauuag

SEQ ID NO: 2305768 - RNA, 19 nt, Artificial Sequence
  Description of Artificial Sequence: Synthetic oligonucleotide
  Sense strand starting at position 3659 of SEQ ID NO: 1884966
aauauauucuggguauaag

SEQ ID NO: 2305769 - RNA, 19 nt, Artificial Sequence
  Description of Artificial Sequence: Synthetic oligonucleotide
  Antisense strand to SEQ ID NO: 2305768
cuuauacccagaauauauu

SEQ ID NO: 2305770 - RNA, 19 nt, Artificial Sequence
  Description of Artificial Sequence: Synthetic oligonucleotide
  Sense strand starting at position 3860 of SEQ ID NO: 1884966
ugcaguauugacuaaagca

SEQ ID NO: 2305771 - RNA, 19 nt, Artificial Sequence
  Description of Artificial Sequence: Synthetic oligonucleotide
  Antisense strand to SEQ ID NO: 2305770
ugcuuuagucaauacugca

SEQ ID NO: 2305772 - RNA, 19 nt, Artificial Sequence
  Description of Artificial Sequence: Synthetic oligonucleotide
  Sense strand starting at position 3886 of SEQ ID NO: 1884966
ggaauuacagcucaguuga

SEQ ID NO: 2305773 - RNA, 19 nt, Artificial Sequence
  Description of Artificial Sequence: Synthetic oligonucleotide
  Antisense strand to SEQ ID NO: 2305772
ucaacugagcuguaauucc

SEQ ID NO: 2305774 - RNA, 19 nt, Artificial Sequence
  Description of Artificial Sequence: Synthetic oligonucleotide
  Sense strand starting at position 3913 of SEQ ID NO: 1884966
cuggccugaucucugaaua

SEQ ID NO: 2305775 - RNA, 19 nt, Artificial Sequence
  Description of Artificial Sequence: Synthetic oligonucleotide
  Antisense strand to SEQ ID NO: 2305774
uauucagagaucaggccag

SEQ ID NO: 2305776 - RNA, 19 nt, Artificial Sequence
  Description of Artificial Sequence: Synthetic oligonucleotide
  Sense strand starting at position 3943 of SEQ ID NO: 1884966
ucauauuaagugugagucu

SEQ ID NO: 2305777 - RNA, 19 nt, Artificial Sequence
  Description of Artificial Sequence: Synthetic oligonucleotide
  Antisense strand to SEQ ID NO: 2305776
agacucacacuuaauauga

SEQ ID NO: 2305778 - RNA, 19 nt, Artificial Sequence
  Description of Artificial Sequence: Synthetic oligonucleotide
  Sense strand starting at position 3950 of SEQ ID NO: 1884966
aagugugagucuuucuaau

SEQ ID NO: 2305779 - RNA, 19 nt, Artificial Sequence
  Description of Artificial Sequence: Synthetic oligonucleotide
  Antisense strand to SEQ ID NO: 2305778
auuagaaagacucacacuu

SEQ ID NO: 2305780 - RNA, 19 nt, Artificial Sequence
  Description of Artificial Sequence: Synthetic oligonucleotide
  Sense strand starting at position 3952 of SEQ ID NO: 1884966
gugugagucuuucuaauaa

SEQ ID NO: 2305781 - RNA, 19 nt, Artificial Sequence
  Description of Artificial Sequence: Synthetic oligonucleotide
  Antisense strand to SEQ ID NO: 2305780
uuauuagaaagacucacac

SEQ ID NO: 2305782 - RNA, 19 nt, Artificial Sequence
  Description of Artificial Sequence: Synthetic oligonucleotide
  Sense strand starting at position 344 of SEQ ID NO: 1884967
cggagaaucccuugagccu

SEQ ID NO: 2305783 - RNA, 19 nt, Artificial Sequence
  Description of Artificial Sequence: Synthetic oligonucleotide
  Antisense strand to SEQ ID NO: 2305782
aggcucaagggauucuccg

SEQ ID NO: 2305784 - RNA, 19 nt, Artificial Sequence
  Description of Artificial Sequence: Synthetic oligonucleotide
  Sense strand starting at position 475 of SEQ ID NO: 1884967
acauauuagccauagcgga

SEQ ID NO: 2305785 - RNA, 19 nt, Artificial Sequence
  Description of Artificial Sequence: Synthetic oligonucleotide
  Antisense strand to SEQ ID NO: 2305784
uccgcuauggcuaauaugu

SEQ ID NO: 2305786 - RNA, 19 nt, Artificial Sequence
  Description of Artificial Sequence: Synthetic oligonucleotide
  Sense strand starting at position 522 of SEQ ID NO: 1884967
uuuguaaauccuggacaua

SEQ ID NO: 2305787 - RNA, 19 nt, Artificial Sequence
  Description of Artificial Sequence: Synthetic oligonucleotide
  Antisense strand to SEQ ID NO: 2305786
uauguccaggauuuacaaa

SEQ ID NO: 2305788 - RNA, 19 nt, Artificial Sequence
  Description of Artificial Sequence: Synthetic oligonucleotide
  Sense strand starting at position 525 of SEQ ID NO: 1884967
guaaauccuggacauaguu

SEQ ID NO: 2305789 - RNA, 19 nt, Artificial Sequence
  Description of Artificial Sequence: Synthetic oligonucleotide
  Antisense strand to SEQ ID NO: 2305788
aacuauguccaggauuuac

SEQ ID NO: 2305790 - RNA, 19 nt, Artificial Sequence
  Description of Artificial Sequence: Synthetic oligonucleotide
  Sense strand starting at position 562 of SEQ ID NO: 1884967
auaagaaaucaauggcuug

SEQ ID NO: 2305791 - RNA, 19 nt, Artificial Sequence
  Description of Artificial Sequence: Synthetic oligonucleotide
  Antisense strand to SEQ ID NO: 2305790
caagccauugauuucuuau

SEQ ID NO: 2305792 - RNA, 19 nt, Artificial Sequence
  Description of Artificial Sequence: Synthetic oligonucleotide
  Sense strand starting at position 621 of SEQ ID NO: 1884967
ggugaagccucauuccuua

SEQ ID NO: 2305793 - RNA, 19 nt, Artificial Sequence
  Description of Artificial Sequence: Synthetic oligonucleotide
  Antisense strand to SEQ ID NO: 2305792
uaaggaaugaggcuucacc

SEQ ID NO: 2305794 - RNA, 19 nt, Artificial Sequence
  Description of Artificial Sequence: Synthetic oligonucleotide
  Sense strand starting at position 696 of SEQ ID NO: 1884967
guaacaagaugaguuagau

SEQ ID NO: 2305795 - RNA, 19 nt, Artificial Sequence
  Description of Artificial Sequence: Synthetic oligonucleotide
  Antisense strand to SEQ ID NO: 2305794
aucuaacucaucuuguuac

SEQ ID NO: 2305796 - RNA, 19 nt, Artificial Sequence
  Description of Artificial Sequence: Synthetic oligonucleotide
  Sense strand starting at position 702 of SEQ ID NO: 1884967
agaugaguuagaugcagca

SEQ ID NO: 2305797 - RNA, 19 nt, Artificial Sequence
  Description of Artificial Sequence: Synthetic oligonucleotide
  Antisense strand to SEQ ID NO: 2305796
ugcugcaucuaacucaucu

SEQ ID NO: 2305798 - RNA, 19 nt, Artificial Sequence
  Description of Artificial Sequence: Synthetic oligonucleotide
  Sense strand starting at position 704 of SEQ ID NO: 1884967
augaguuagaugcagcagu

SEQ ID NO: 2305799 - RNA, 19 nt, Artificial Sequence
  Description of Artificial Sequence: Synthetic oligonucleotide
  Antisense strand to SEQ ID NO: 2305798
acugcugcaucuaacucau

SEQ ID NO: 2305800 - RNA, 19 nt, Artificial Sequence
  Description of Artificial Sequence: Synthetic oligonucleotide
  Sense strand starting at position 930 of SEQ ID NO: 1884967
ucccuuugccuugaaagcu

SEQ ID NO: 2305801 - RNA, 19 nt, Artificial Sequence
  Description of Artificial Sequence: Synthetic oligonucleotide
  Antisense strand to SEQ ID NO: 2305800
agcuuucaaggcaaaggga

SEQ ID NO: 2305802 - RNA, 19 nt, Artificial Sequence
  Description of Artificial Sequence: Synthetic oligonucleotide
  Sense strand starting at position 940 of SEQ ID NO: 1884967
uugaaagcucuuggucaau

SEQ ID NO: 2305803 - RNA, 19 nt, Artificial Sequence
  Description of Artificial Sequence: Synthetic oligonucleotide
  Antisense strand to SEQ ID NO: 2305802
auugaccaagagcuuucaa

SEQ ID NO: 2305804 - RNA, 19 nt, Artificial Sequence
  Description of Artificial Sequence: Synthetic oligonucleotide
  Sense strand starting at position 1020 of SEQ ID NO: 1884967
ugcagaucuggucaaaucu

SEQ ID NO: 2305805 - RNA, 19 nt, Artificial Sequence
  Description of Artificial Sequence: Synthetic oligonucleotide
  Antisense strand to SEQ ID NO: 2305804
agauuugaccagaucugca

SEQ ID NO: 2305806 - RNA, 19 nt, Artificial Sequence
  Description of Artificial Sequence: Synthetic oligonucleotide
  Sense strand starting at position 1028 of SEQ ID NO: 1884967
uggucaaaucuuugucuga

SEQ ID NO: 2305807 - RNA, 19 nt, Artificial Sequence
  Description of Artificial Sequence: Synthetic oligonucleotide
  Antisense strand to SEQ ID NO: 2305806
ucagacaaagauuugacca

SEQ ID NO: 2305808 - RNA, 19 nt, Artificial Sequence
  Description of Artificial Sequence: Synthetic oligonucleotide
  Sense strand starting at position 1029 of SEQ ID NO: 1884967
ggucaaaucuuugucugaa

SEQ ID NO: 2305809 - RNA, 19 nt, Artificial Sequence
  Description of Artificial Sequence: Synthetic oligonucleotide
  Antisense strand to SEQ ID NO: 2305808
uucagacaaagauuugacc

SEQ ID NO: 2305810 - RNA, 19 nt, Artificial Sequence
  Description of Artificial Sequence: Synthetic oligonucleotide
  Sense strand starting at position 1030 of SEQ ID NO: 1884967
gucaaaucuuugucugaaa

SEQ ID NO: 2305811 - RNA, 19 nt, Artificial Sequence
  Description of Artificial Sequence: Synthetic oligonucleotide
  Antisense strand to SEQ ID NO: 2305810
uuucagacaaagauuugac

SEQ ID NO: 2305812 - RNA, 19 nt, Artificial Sequence
  Description of Artificial Sequence: Synthetic oligonucleotide
  Sense strand starting at position 1081 of SEQ ID NO: 1884967
guacacgugugaucauuua

SEQ ID NO: 2305813 - RNA, 19 nt, Artificial Sequence
  Description of Artificial Sequence: Synthetic oligonucleotide
  Antisense strand to SEQ ID NO: 2305812
uaaaugaucacacguguac

SEQ ID NO: 2305814 - RNA, 19 nt, Artificial Sequence
  Description of Artificial Sequence: Synthetic oligonucleotide
  Sense strand starting at position 1256 of SEQ ID NO: 1884967
gcagaauggccugaguuug

SEQ ID NO: 2305815 - RNA, 19 nt, Artificial Sequence
  Description of Artificial Sequence: Synthetic oligonucleotide
  Antisense strand to SEQ ID NO: 2305814
caaacucaggccauucugc

SEQ ID NO: 2305816 - RNA, 19 nt, Artificial Sequence
  Description of Artificial Sequence: Synthetic oligonucleotide
  Sense strand starting at position 1275 of SEQ ID NO: 1884967
gguuucucgagcuaccuua

SEQ ID NO: 2305817 - RNA, 19 nt, Artificial Sequence
  Description of Artificial Sequence: Synthetic oligonucleotide
  Antisense strand to SEQ ID NO: 2305816
uaagguagcucgagaaacc

SEQ ID NO: 2305818 - RNA, 19 nt, Artificial Sequence
  Description of Artificial Sequence: Synthetic oligonucleotide
  Sense strand starting at position 1344 of SEQ ID NO: 1884967
agagguuguuuguuccaag

SEQ ID NO: 2305819 - RNA, 19 nt, Artificial Sequence
  Description of Artificial Sequence: Synthetic oligonucleotide
  Antisense strand to SEQ ID NO: 2305818
cuuggaacaaacaaccucu

SEQ ID NO: 2305820 - RNA, 19 nt, Artificial Sequence
  Description of Artificial Sequence: Synthetic oligonucleotide
  Sense strand starting at position 1441 of SEQ ID NO: 1884967
uguuacuuagcaugagauc

SEQ ID NO: 2305821 - RNA, 19 nt, Artificial Sequence
  Description of Artificial Sequence: Synthetic oligonucleotide
  Antisense strand to SEQ ID NO: 2305820
gaucucaugcuaaguaaca

SEQ ID NO: 2305822 - RNA, 19 nt, Artificial Sequence
  Description of Artificial Sequence: Synthetic oligonucleotide
  Sense strand starting at position 1486 of SEQ ID NO: 1884967
agccauugccaguauuaau

SEQ ID NO: 2305823 - RNA, 19 nt, Artificial Sequence
  Description of Artificial Sequence: Synthetic oligonucleotide
  Antisense strand to SEQ ID NO: 2305822
auuaauacuggcaauggcu

SEQ ID NO: 2305824 - RNA, 19 nt, Artificial Sequence
  Description of Artificial Sequence: Synthetic oligonucleotide
  Sense strand starting at position 1557 of SEQ ID NO: 1884967
acguuuaagcuagaguuga

SEQ ID NO: 2305825 - RNA, 19 nt, Artificial Sequence
  Description of Artificial Sequence: Synthetic oligonucleotide
  Antisense strand to SEQ ID NO: 2305824
ucaacucuagcuuaaacgu

SEQ ID NO: 2305826 - RNA, 19 nt, Artificial Sequence
  Description of Artificial Sequence: Synthetic oligonucleotide
  Sense strand starting at position 1568 of SEQ ID NO: 1884967
agaguugacucuuuaaaua

SEQ ID NO: 2305827 - RNA, 19 nt, Artificial Sequence
  Description of Artificial Sequence: Synthetic oligonucleotide
  Antisense strand to SEQ ID NO: 2305826
uauuuaaagagucaacucu

SEQ ID NO: 2305828 - RNA, 19 nt, Artificial Sequence
  Description of Artificial Sequence: Synthetic oligonucleotide
  Sense strand starting at position 1740 of SEQ ID NO: 1884967
gggcgaauucuggacguau

SEQ ID NO: 2305829 - RNA, 19 nt, Artificial Sequence
  Description of Artificial Sequence: Synthetic oligonucleotide
  Antisense strand to SEQ ID NO: 2305828
auacguccagaauucgccc

SEQ ID NO: 2305830 - RNA, 19 nt, Artificial Sequence
  Description of Artificial Sequence: Synthetic oligonucleotide
  Sense strand starting at position 1741 of SEQ ID NO: 1884967
ggcgaauucuggacguauc

SEQ ID NO: 2305831 - RNA, 19 nt, Artificial Sequence
  Description of Artificial Sequence: Synthetic oligonucleotide
  Antisense strand to SEQ ID NO: 2305830
gauacguccagaauucgcc

SEQ ID NO: 2305832 - RNA, 19 nt, Artificial Sequence
  Description of Artificial Sequence: Synthetic oligonucleotide
  Sense strand starting at position 1874 of SEQ ID NO: 1884967
uaggguccucauuggcaaa

SEQ ID NO: 2305833 - RNA, 19 nt, Artificial Sequence
  Description of Artificial Sequence: Synthetic oligonucleotide
  Antisense strand to SEQ ID NO: 2305832
uuugccaaugaggacccua

SEQ ID NO: 2305834 - RNA, 19 nt, Artificial Sequence
  Description of Artificial Sequence: Synthetic oligonucleotide
  Sense strand starting at position 1887 of SEQ ID NO: 1884967
ggcaaaguugaggguauaa

SEQ ID NO: 2305835 - RNA, 19 nt, Artificial Sequence
  Description of Artificial Sequence: Synthetic oligonucleotide
  Antisense strand to SEQ ID NO: 2305834
uuauacccucaacuuugcc

SEQ ID NO: 2305836 - RNA, 19 nt, Artificial Sequence
  Description of Artificial Sequence: Synthetic oligonucleotide
  Sense strand starting at position 3046 of SEQ ID NO: 1884967
ggaaauggcgugaguguug

SEQ ID NO: 2305837 - RNA, 19 nt, Artificial Sequence
  Description of Artificial Sequence: Synthetic oligonucleotide
  Antisense strand to SEQ ID NO: 2305836
caacacucacgccauuucc

SEQ ID NO: 2305838 - RNA, 19 nt, Artificial Sequence
  Description of Artificial Sequence: Synthetic oligonucleotide
  Sense strand starting at position 3125 of SEQ ID NO: 1884967
ucggauucgaucuaagcau

SEQ ID NO: 2305839 - RNA, 19 nt, Artificial Sequence
  Description of Artificial Sequence: Synthetic oligonucleotide
  Antisense strand to SEQ ID NO: 2305838
augcuuagaucgaauccga

SEQ ID NO: 2305840 - RNA, 19 nt, Artificial Sequence
  Description of Artificial Sequence: Synthetic oligonucleotide
  Sense strand starting at position 3142 of SEQ ID NO: 1884967
auguuuguggaguaacaga

SEQ ID NO: 2305841 - RNA, 19 nt, Artificial Sequence
  Description of Artificial Sequence: Synthetic oligonucleotide
  Antisense strand to SEQ ID NO: 2305840
ucuguuacuccacaaacau

SEQ ID NO: 2305842 - RNA, 19 nt, Artificial Sequence
  Description of Artificial Sequence: Synthetic oligonucleotide
  Sense strand starting at position 3169 of SEQ ID NO: 1884967
gugcuuggaauugagucua

SEQ ID NO: 2305843 - RNA, 19 nt, Artificial Sequence
  Description of Artificial Sequence: Synthetic oligonucleotide
  Antisense strand to SEQ ID NO: 2305842
uagacucaauuccaagcac

SEQ ID NO: 2305844 - RNA, 19 nt, Artificial Sequence
  Description of Artificial Sequence: Synthetic oligonucleotide
  Sense strand starting at position 3174 of SEQ ID NO: 1884967
uggaauugagucuagucuu

SEQ ID NO: 2305845 - RNA, 19 nt, Artificial Sequence
  Description of Artificial Sequence: Synthetic oligonucleotide
  Antisense strand to SEQ ID NO: 2305844
aagacuagacucaauucca

SEQ ID NO: 2305846 - RNA, 19 nt, Artificial Sequence
  Description of Artificial Sequence: Synthetic oligonucleotide
  Sense strand starting at position 3415 of SEQ ID NO: 1884967
uggcuugacaucuggaaag

SEQ ID NO: 2305847 - RNA, 19 nt, Artificial Sequence
  Description of Artificial Sequence: Synthetic oligonucleotide
  Antisense strand to SEQ ID NO: 2305846
cuuuccagaugucaagcca

SEQ ID NO: 2305848 - RNA, 19 nt, Artificial Sequence
  Description of Artificial Sequence: Synthetic oligonucleotide
  Sense strand starting at position 3483 of SEQ ID NO: 1884967
ucugcauugggcugagaau

SEQ ID NO: 2305849 - RNA, 19 nt, Artificial Sequence
  Description of Artificial Sequence: Synthetic oligonucleotide
  Antisense strand to SEQ ID NO: 2305848
auucucagcccaaugcaga

SEQ ID NO: 2305850 - RNA, 19 nt, Artificial Sequence
  Description of Artificial Sequence: Synthetic oligonucleotide
  Sense strand starting at position 3484 of SEQ ID NO: 1884967
cugcauugggcugagaaug

SEQ ID NO: 2305851 - RNA, 19 nt, Artificial Sequence
  Description of Artificial Sequence: Synthetic oligonucleotide
  Antisense strand to SEQ ID NO: 2305850
cauucucagcccaaugcag

SEQ ID NO: 2305852 - RNA, 19 nt, Artificial Sequence
  Description of Artificial Sequence: Synthetic oligonucleotide
  Sense strand starting at position 3563 of SEQ ID NO: 1884967
uggcuaacuguugaaguuu

SEQ ID NO: 2305853 - RNA, 19 nt, Artificial Sequence
  Description of Artificial Sequence: Synthetic oligonucleotide
  Antisense strand to SEQ ID NO: 2305852
aaacuucaacaguuagcca

SEQ ID NO: 2305854 - RNA, 19 nt, Artificial Sequence
  Description of Artificial Sequence: Synthetic oligonucleotide
  Sense strand starting at position 3742 of SEQ ID NO: 1884967
uguaguugugaugaauaug

SEQ ID NO: 2305855 - RNA, 19 nt, Artificial Sequence
  Description of Artificial Sequence: Synthetic oligonucleotide
  Antisense strand to SEQ ID NO: 2305854
cauauucaucacaacuaca

SEQ ID NO: 2305856 - RNA, 19 nt, Artificial Sequence
  Description of Artificial Sequence: Synthetic oligonucleotide
  Sense strand starting at position 3750 of SEQ ID NO: 1884967
ugaugaauaugacacagaa

SEQ ID NO: 2305857 - RNA, 19 nt, Artificial Sequence
  Description of Artificial Sequence: Synthetic oligonucleotide
  Antisense strand to SEQ ID NO: 2305856
uucugugucauauucauca

SEQ ID NO: 2305858 - RNA, 19 nt, Artificial Sequence
  Description of Artificial Sequence: Synthetic oligonucleotide
  Sense strand starting at position 3766 of SEQ ID NO: 1884967
gaauacacucaguggcuua

SEQ ID NO: 2305859 - RNA, 19 nt, Artificial Sequence
  Description of Artificial Sequence: Synthetic oligonucleotide
  Antisense strand to SEQ ID NO: 2305858
uaagccacugaguguauuc

SEQ ID NO: 2305860 - RNA, 19 nt, Artificial Sequence
  Description of Artificial Sequence: Synthetic oligonucleotide
  Sense strand starting at position 3962 of SEQ ID NO: 1884967
uugagaugggucugcuuag

SEQ ID NO: 2305861 - RNA, 19 nt, Artificial Sequence
  Description of Artificial Sequence: Synthetic oligonucleotide
  Antisense strand to SEQ ID NO: 2305860
cuaagcagacccaucucaa

SEQ ID NO: 2305862 - RNA, 19 nt, Artificial Sequence
  Description of Artificial Sequence: Synthetic oligonucleotide
  Sense strand starting at position 1 of SEQ ID NO: 1884969
ggaacuagguaguccucua

SEQ ID NO: 2305863 - RNA, 19 nt, Artificial Sequence
  Description of Artificial Sequence: Synthetic oligonucleotide
  Antisense strand to SEQ ID NO: 2305862
uagaggacuaccuaguucc

SEQ ID NO: 2305864 - RNA, 19 nt, Artificial Sequence
  Description of Artificial Sequence: Synthetic oligonucleotide
  Sense strand starting at position 6 of SEQ ID NO: 1884969
uagguaguccucuaagcag

SEQ ID NO: 2305865 - RNA, 19 nt, Artificial Sequence
  Description of Artificial Sequence: Synthetic oligonucleotide
  Antisense strand to SEQ ID NO: 2305864
cugcuuagaggacuaccua

SEQ ID NO: 2305866 - RNA, 19 nt, Artificial Sequence
  Description of Artificial Sequence: Synthetic oligonucleotide
  Sense strand starting at position 15 of SEQ ID NO: 1884969
cucuaagcaggugaauaau

SEQ ID NO: 2305867 - RNA, 19 nt, Artificial Sequence
  Description of Artificial Sequence: Synthetic oligonucleotide
  Antisense strand to SEQ ID NO: 2305866
auuauucaccugcuuagag

SEQ ID NO: 2305868 - RNA, 19 nt, Artificial Sequence
  Description of Artificial Sequence: Synthetic oligonucleotide
  Sense strand starting at position 78 of SEQ ID NO: 1884969
aaguuuauuuggcuccgaa

SEQ ID NO: 2305869 - RNA, 19 nt, Artificial Sequence
  Description of Artificial Sequence: Synthetic oligonucleotide
  Antisense strand to SEQ ID NO: 2305868
uucggagccaaauaaacuu

SEQ ID NO: 2305870 - RNA, 19 nt, Artificial Sequence
  Description of Artificial Sequence: Synthetic oligonucleotide
  Sense strand starting at position 391 of SEQ ID NO: 1884969
ggaucuguuugguuggaga

SEQ ID NO: 2305871 - RNA, 19 nt, Artificial Sequence
  Description of Artificial Sequence: Synthetic oligonucleotide
  Antisense strand to SEQ ID NO: 2305870
ucuccaaccaaacagaucc

SEQ ID NO: 2305872 - RNA, 19 nt, Artificial Sequence
  Description of Artificial Sequence: Synthetic oligonucleotide
  Sense strand starting at position 393 of SEQ ID NO: 1884969
aucuguuugguuggagaac

SEQ ID NO: 2305873 - RNA, 19 nt, Artificial Sequence
  Description of Artificial Sequence: Synthetic oligonucleotide
  Antisense strand to SEQ ID NO: 2305872
guucuccaaccaaacagau

SEQ ID NO: 2305874 - RNA, 19 nt, Artificial Sequence
  Description of Artificial Sequence: Synthetic oligonucleotide
  Sense strand starting at position 492 of SEQ ID NO: 1884969
ggguaauugacagguuuaa

SEQ ID NO: 2305875 - RNA, 19 nt, Artificial Sequence
  Description of Artificial Sequence: Synthetic oligonucleotide
  Antisense strand to SEQ ID NO: 2305874
uuaaaccugucaauuaccc

SEQ ID NO: 2305876 - RNA, 19 nt, Artificial Sequence
  Description of Artificial Sequence: Synthetic oligonucleotide
  Sense strand starting at position 811 of SEQ ID NO: 1884969
uugggauuacauugugaug

SEQ ID NO: 2305877 - RNA, 19 nt, Artificial Sequence
  Description of Artificial Sequence: Synthetic oligonucleotide
  Antisense strand to SEQ ID NO: 2305876
caucacaauguaaucccaa

SEQ ID NO: 2305878 - RNA, 19 nt, Artificial Sequence
  Description of Artificial Sequence: Synthetic oligonucleotide
  Sense strand starting at position 823 of SEQ ID NO: 1884969
ugugauguaccugauaaua

SEQ ID NO: 2305879 - RNA, 19 nt, Artificial Sequence
  Description of Artificial Sequence: Synthetic oligonucleotide
  Antisense strand to SEQ ID NO: 2305878
uauuaucagguacaucaca

SEQ ID NO: 2305880 - RNA, 19 nt, Artificial Sequence
  Description of Artificial Sequence: Synthetic oligonucleotide
  Sense strand starting at position 882 of SEQ ID NO: 1884969
gaaggccucaguugggaau

SEQ ID NO: 2305881 - RNA, 19 nt, Artificial Sequence
  Description of Artificial Sequence: Synthetic oligonucleotide
  Antisense strand to SEQ ID NO: 2305880
auucccaacugaggccuuc

SEQ ID NO: 2305882 - RNA, 19 nt, Artificial Sequence
  Description of Artificial Sequence: Synthetic oligonucleotide
  Sense strand starting at position 1032 of SEQ ID NO: 1884969
uugagaauagcagguuaua

SEQ ID NO: 2305883 - RNA, 19 nt, Artificial Sequence
  Description of Artificial Sequence: Synthetic oligonucleotide
  Antisense strand to SEQ ID NO: 2305882
uauaaccugcuauucucaa

SEQ ID NO: 2305884 - RNA, 19 nt, Artificial Sequence
  Description of Artificial Sequence: Synthetic oligonucleotide
  Sense strand starting at position 1035 of SEQ ID NO: 1884969
agaauagcagguuauaucu

SEQ ID NO: 2305885 - RNA, 19 nt, Artificial Sequence
  Description of Artificial Sequence: Synthetic oligonucleotide
  Antisense strand to SEQ ID NO: 2305884
agauauaaccugcuauucu

SEQ ID NO: 2305886 - RNA, 19 nt, Artificial Sequence
  Description of Artificial Sequence: Synthetic oligonucleotide
  Sense strand starting at position 1100 of SEQ ID NO: 1884969
uggugaugaaucugaaauc

SEQ ID NO: 2305887 - RNA, 19 nt, Artificial Sequence
  Description of Artificial Sequence: Synthetic oligonucleotide
  Antisense strand to SEQ ID NO: 2305886
gauuucagauucaucacca

SEQ ID NO: 2305888 - RNA, 19 nt, Artificial Sequence
  Description of Artificial Sequence: Synthetic oligonucleotide
  Sense strand starting at position 1185 of SEQ ID NO: 1884969
uguugcugugaauaaagga

SEQ ID NO: 2305889 - RNA, 19 nt, Artificial Sequence
  Description of Artificial Sequence: Synthetic oligonucleotide
  Antisense strand to SEQ ID NO: 2305888
uccuuuauucacagcaaca

SEQ ID NO: 2305890 - RNA, 19 nt, Artificial Sequence
  Description of Artificial Sequence: Synthetic oligonucleotide
  Sense strand starting at position 1200 of SEQ ID NO: 1884969
aggaacauuugcuaagaau

SEQ ID NO: 2305891 - RNA, 19 nt, Artificial Sequence
  Description of Artificial Sequence: Synthetic oligonucleotide
  Antisense strand to SEQ ID NO: 2305890
auucuuagcaaauguuccu

SEQ ID NO: 2305892 - RNA, 19 nt, Artificial Sequence
  Description of Artificial Sequence: Synthetic oligonucleotide
  Sense strand starting at position 1406 of SEQ ID NO: 1884969
ugaauaaugcuuugaaggu

SEQ ID NO: 2305893 - RNA, 19 nt, Artificial Sequence
  Description of Artificial Sequence: Synthetic oligonucleotide
  Antisense strand to SEQ ID NO: 2305892
accuucaaagcauuauuca

SEQ ID NO: 2305894 - RNA, 19 nt, Artificial Sequence
  Description of Artificial Sequence: Synthetic oligonucleotide
  Sense strand starting at position 1474 of SEQ ID NO: 1884969
ggagaugaccucuguugau

SEQ ID NO: 2305895 - RNA, 19 nt, Artificial Sequence
  Description of Artificial Sequence: Synthetic oligonucleotide
  Antisense strand to SEQ ID NO: 2305894
aucaacagaggucaucucc

SEQ ID NO: 2305896 - RNA, 19 nt, Artificial Sequence
  Description of Artificial Sequence: Synthetic oligonucleotide
  Sense strand starting at position 1481 of SEQ ID NO: 1884969
accucuguugaugacuuaa

SEQ ID NO: 2305897 - RNA, 19 nt, Artificial Sequence
  Description of Artificial Sequence: Synthetic oligonucleotide
  Antisense strand to SEQ ID NO: 2305896
uuaagucaucaacagaggu

SEQ ID NO: 2305898 - RNA, 19 nt, Artificial Sequence
  Description of Artificial Sequence: Synthetic oligonucleotide
  Sense strand starting at position 1483 of SEQ ID NO: 1884969
cucuguugaugacuuaaag

SEQ ID NO: 2305899 - RNA, 19 nt, Artificial Sequence
  Description of Artificial Sequence: Synthetic oligonucleotide
  Antisense strand to SEQ ID NO: 2305898
cuuuaagucaucaacagag

SEQ ID NO: 2305900 - RNA, 19 nt, Artificial Sequence
  Description of Artificial Sequence: Synthetic oligonucleotide
  Sense strand starting at position 1501 of SEQ ID NO: 1884969
gaaagacaagucuguuuag

SEQ ID NO: 2305901 - RNA, 19 nt, Artificial Sequence
  Description of Artificial Sequence: Synthetic oligonucleotide
  Antisense strand to SEQ ID NO: 2305900
cuaaacagacuugucuuuc

SEQ ID NO: 2305902 - RNA, 19 nt, Artificial Sequence
  Description of Artificial Sequence: Synthetic oligonucleotide
  Sense strand starting at position 1616 of SEQ ID NO: 1884969
gcucguuggagauaacaua

SEQ ID NO: 2305903 - RNA, 19 nt, Artificial Sequence
  Description of Artificial Sequence: Synthetic oligonucleotide
  Antisense strand to SEQ ID NO: 2305902
uauguuaucuccaacgagc

SEQ ID NO: 2305904 - RNA, 19 nt, Artificial Sequence
  Description of Artificial Sequence: Synthetic oligonucleotide
  Sense strand starting at position 1761 of SEQ ID NO: 1884969
gggcuuguuccugauaagg

SEQ ID NO: 2305905 - RNA, 19 nt, Artificial Sequence
  Description of Artificial Sequence: Synthetic oligonucleotide
  Antisense strand to SEQ ID NO: 2305904
ccuuaucaggaacaagccc

SEQ ID NO: 2305906 - RNA, 19 nt, Artificial Sequence
  Description of Artificial Sequence: Synthetic oligonucleotide
  Sense strand starting at position 2017 of SEQ ID NO: 1884969
ugcagcacacgauaagaau

SEQ ID NO: 2305907 - RNA, 19 nt, Artificial Sequence
  Description of Artificial Sequence: Synthetic oligonucleotide
  Antisense strand to SEQ ID NO: 2305906
auucuuaucgugugcugca

SEQ ID NO: 2305908 - RNA, 19 nt, Artificial Sequence
  Description of Artificial Sequence: Synthetic oligonucleotide
  Sense strand starting at position 2114 of SEQ ID NO: 1884969
ccucaucuuggacaguuaa

SEQ ID NO: 2305909 - RNA, 19 nt, Artificial Sequence
  Description of Artificial Sequence: Synthetic oligonucleotide
  Antisense strand to SEQ ID NO: 2305908
uuaacuguccaagaugagg

SEQ ID NO: 2305910 - RNA, 19 nt, Artificial Sequence
  Description of Artificial Sequence: Synthetic oligonucleotide
  Sense strand starting at position 2643 of SEQ ID NO: 1884969
gagaauuuaugacauggcu

SEQ ID NO: 2305911 - RNA, 19 nt, Artificial Sequence
  Description of Artificial Sequence: Synthetic oligonucleotide
  Antisense strand to SEQ ID NO: 2305910
agccaugucauaaauucuc

SEQ ID NO: 2305912 - RNA, 19 nt, Artificial Sequence
  Description of Artificial Sequence: Synthetic oligonucleotide
  Sense strand starting at position 2657 of SEQ ID NO: 1884969
uggcuuggacuuuaagauu

SEQ ID NO: 2305913 - RNA, 19 nt, Artificial Sequence
  Description of Artificial Sequence: Synthetic oligonucleotide
  Antisense strand to SEQ ID NO: 2305912
aaucuuaaaguccaagcca

SEQ ID NO: 2305914 - RNA, 19 nt, Artificial Sequence
  Description of Artificial Sequence: Synthetic oligonucleotide
  Sense strand starting at position 2818 of SEQ ID NO: 1884969
gguuuauuccucuacaugg

SEQ ID NO: 2305915 - RNA, 19 nt, Artificial Sequence
  Description of Artificial Sequence: Synthetic oligonucleotide
  Antisense strand to SEQ ID NO: 2305914
ccauguagaggaauaaacc

SEQ ID NO: 2305916 - RNA, 19 nt, Artificial Sequence
  Description of Artificial Sequence: Synthetic oligonucleotide
  Sense strand starting at position 2873 of SEQ ID NO: 1884969
uguguagucauugccaugu

SEQ ID NO: 2305917 - RNA, 19 nt, Artificial Sequence
  Description of Artificial Sequence: Synthetic oligonucleotide
  Antisense strand to SEQ ID NO: 2305916
acauggcaaugacuacaca

SEQ ID NO: 2305918 - RNA, 19 nt, Artificial Sequence
  Description of Artificial Sequence: Synthetic oligonucleotide
  Sense strand starting at position 2886 of SEQ ID NO: 1884969
ccaugugaccguuagggaa

SEQ ID NO: 2305919 - RNA, 19 nt, Artificial Sequence
  Description of Artificial Sequence: Synthetic oligonucleotide
  Antisense strand to SEQ ID NO: 2305918
uucccuaacggucacaugg

SEQ ID NO: 2305920 - RNA, 19 nt, Artificial Sequence
  Description of Artificial Sequence: Synthetic oligonucleotide
  Sense strand starting at position 2935 of SEQ ID NO: 1884969
cucagaaucugaguccuca

SEQ ID NO: 2305921 - RNA, 19 nt, Artificial Sequence
  Description of Artificial Sequence: Synthetic oligonucleotide
  Antisense strand to SEQ ID NO: 2305920
ugaggacucagauucugag

SEQ ID NO: 2305922 - RNA, 19 nt, Artificial Sequence
  Description of Artificial Sequence: Synthetic oligonucleotide
  Sense strand starting at position 3151 of SEQ ID NO: 1884969
uaagguuauuggcuaggga

SEQ ID NO: 2305923 - RNA, 19 nt, Artificial Sequence
  Description of Artificial Sequence: Synthetic oligonucleotide
  Antisense strand to SEQ ID NO: 2305922
ucccuagccaauaaccuua

SEQ ID NO: 2305924 - RNA, 19 nt, Artificial Sequence
  Description of Artificial Sequence: Synthetic oligonucleotide
  Sense strand starting at position 3210 of SEQ ID NO: 1884969
ugcugaagaucucccauau

SEQ ID NO: 2305925 - RNA, 19 nt, Artificial Sequence
  Description of Artificial Sequence: Synthetic oligonucleotide
  Antisense strand to SEQ ID NO: 2305924
auaugggagaucuucagca

SEQ ID NO: 2305926 - RNA, 19 nt, Artificial Sequence
  Description of Artificial Sequence: Synthetic oligonucleotide
  Sense strand starting at position 3302 of SEQ ID NO: 1884969
cagaaaggcuuucucgaaa

SEQ ID NO: 2305927 - RNA, 19 nt, Artificial Sequence
  Description of Artificial Sequence: Synthetic oligonucleotide
  Antisense strand to SEQ ID NO: 2305926
uuucgagaaagccuuucug

SEQ ID NO: 2305928 - RNA, 19 nt, Artificial Sequence
  Description of Artificial Sequence: Synthetic oligonucleotide
  Sense strand starting at position 3354 of SEQ ID NO: 1884969
ccgggaauugcucaggaug

SEQ ID NO: 2305929 - RNA, 19 nt, Artificial Sequence
  Description of Artificial Sequence: Synthetic oligonucleotide
  Antisense strand to SEQ ID NO: 2305928
cauccugagcaauucccgg

SEQ ID NO: 2305930 - RNA, 19 nt, Artificial Sequence
  Description of Artificial Sequence: Synthetic oligonucleotide
  Sense strand starting at position 3357 of SEQ ID NO: 1884969
ggaauugcucaggauguca

SEQ ID NO: 2305931 - RNA, 19 nt, Artificial Sequence
  Description of Artificial Sequence: Synthetic oligonucleotide
  Antisense strand to SEQ ID NO: 2305930
ugacauccugagcaauucc

SEQ ID NO: 2305932 - RNA, 19 nt, Artificial Sequence
  Description of Artificial Sequence: Synthetic oligonucleotide
  Sense strand starting at position 3544 of SEQ ID NO: 1884969
cugcucuaaugacugauua

SEQ ID NO: 2305933 - RNA, 19 nt, Artificial Sequence
  Description of Artificial Sequence: Synthetic oligonucleotide
  Antisense strand to SEQ ID NO: 2305932
uaaucagucauuagagcag

SEQ ID NO: 2305934 - RNA, 19 nt, Artificial Sequence
  Description of Artificial Sequence: Synthetic oligonucleotide
  Sense strand starting at position 3545 of SEQ ID NO: 1884969
ugcucuaaugacugauuau

SEQ ID NO: 2305935 - RNA, 19 nt, Artificial Sequence
  Description of Artificial Sequence: Synthetic oligonucleotide
  Antisense strand to SEQ ID NO: 2305934
auaaucagucauuagagca

SEQ ID NO: 2305936 - RNA, 19 nt, Artificial Sequence
  Description of Artificial Sequence: Synthetic oligonucleotide
  Sense strand starting at position 3613 of SEQ ID NO: 1884969
gcuccuugaaccgaugacu

SEQ ID NO: 2305937 - RNA, 19 nt, Artificial Sequence
  Description of Artificial Sequence: Synthetic oligonucleotide
  Antisense strand to SEQ ID NO: 2305936
agucaucgguucaaggagc

SEQ ID NO: 2305938 - RNA, 19 nt, Artificial Sequence
  Description of Artificial Sequence: Synthetic oligonucleotide
  Sense strand starting at position 3656 of SEQ ID NO: 1884969
accugaaacuuuccugaug

SEQ ID NO: 2305939 - RNA, 19 nt, Artificial Sequence
  Description of Artificial Sequence: Synthetic oligonucleotide
  Antisense strand to SEQ ID NO: 2305938
caucaggaaaguuucaggu

SEQ ID NO: 2305940 - RNA, 19 nt, Artificial Sequence
  Description of Artificial Sequence: Synthetic oligonucleotide
  Sense strand starting at position 3659 of SEQ ID NO: 1884969
ugaaacuuuccugauggca

SEQ ID NO: 2305941 - RNA, 19 nt, Artificial Sequence
  Description of Artificial Sequence: Synthetic oligonucleotide
  Antisense strand to SEQ ID NO: 2305940
ugccaucaggaaaguuuca

SEQ ID NO: 2305942 - RNA, 19 nt, Artificial Sequence
  Description of Artificial Sequence: Synthetic oligonucleotide
  Sense strand starting at position 591 of SEQ ID NO: 1884968
gucacaguagaagguaauu

SEQ ID NO: 2305943 - RNA, 19 nt, Artificial Sequence
  Description of Artificial Sequence: Synthetic oligonucleotide
  Antisense strand to SEQ ID NO: 2305942
aauuaccuucuacugugac

SEQ ID NO: 2305944 - RNA, 19 nt, Artificial Sequence
  Description of Artificial Sequence: Synthetic oligonucleotide
  Sense strand starting at position 632 of SEQ ID NO: 1884968
guggccuauauuuggcaaa

SEQ ID NO: 2305945 - RNA, 19 nt, Artificial Sequence
  Description of Artificial Sequence: Synthetic oligonucleotide
  Antisense strand to SEQ ID NO: 2305944
uuugccaaauauaggccac

SEQ ID NO: 2305946 - RNA, 19 nt, Artificial Sequence
  Description of Artificial Sequence: Synthetic oligonucleotide
  Sense strand starting at position 784 of SEQ ID NO: 1884968
gagcaaccacagugagaaa

SEQ ID NO: 2305947 - RNA, 19 nt, Artificial Sequence
  Description of Artificial Sequence: Synthetic oligonucleotide
  Antisense strand to SEQ ID NO: 2305946
uuucucacugugguugcuc

SEQ ID NO: 2305948 - RNA, 19 nt, Artificial Sequence
  Description of Artificial Sequence: Synthetic oligonucleotide
  Sense strand starting at position 836 of SEQ ID NO: 1884968
agaggauaguggcuuugau

SEQ ID NO: 2305949 - RNA, 19 nt, Artificial Sequence
  Description of Artificial Sequence: Synthetic oligonucleotide
  Antisense strand to SEQ ID NO: 2305948
aucaaagccacuauccucu

SEQ ID NO: 2305950 - RNA, 19 nt, Artificial Sequence
  Description of Artificial Sequence: Synthetic oligonucleotide
  Sense strand starting at position 849 of SEQ ID NO: 1884968
uuugauucugaauggacuu

SEQ ID NO: 2305951 - RNA, 19 nt, Artificial Sequence
  Description of Artificial Sequence: Synthetic oligonucleotide
  Antisense strand to SEQ ID NO: 2305950
aaguccauucagaaucaaa

SEQ ID NO: 2305952 - RNA, 19 nt, Artificial Sequence
  Description of Artificial Sequence: Synthetic oligonucleotide
  Sense strand starting at position 871 of SEQ ID NO: 1884968
cuacauuuggcaugcuuua

SEQ ID NO: 2305953 - RNA, 19 nt, Artificial Sequence
  Description of Artificial Sequence: Synthetic oligonucleotide
  Antisense strand to SEQ ID NO: 2305952
uaaagcaugccaaauguag

SEQ ID NO: 2305954 - RNA, 19 nt, Artificial Sequence
  Description of Artificial Sequence: Synthetic oligonucleotide
  Sense strand starting at position 911 of SEQ ID NO: 1884968
ugagaugaaguuuguuaau

SEQ ID NO: 2305955 - RNA, 19 nt, Artificial Sequence
  Description of Artificial Sequence: Synthetic oligonucleotide
  Antisense strand to SEQ ID NO: 2305954
auuaacaaacuucaucuca

SEQ ID NO: 2305956 - RNA, 19 nt, Artificial Sequence
  Description of Artificial Sequence: Synthetic oligonucleotide
  Sense strand starting at position 913 of SEQ ID NO: 1884968
agaugaaguuuguuaauug

SEQ ID NO: 2305957 - RNA, 19 nt, Artificial Sequence
  Description of Artificial Sequence: Synthetic oligonucleotide
  Antisense strand to SEQ ID NO: 2305956
caauuaacaaacuucaucu

SEQ ID NO: 2305958 - RNA, 19 nt, Artificial Sequence
  Description of Artificial Sequence: Synthetic oligonucleotide
  Sense strand starting at position 1084 of SEQ ID NO: 1884968
ccuucuaagucaguugaaa

SEQ ID NO: 2305959 - RNA, 19 nt, Artificial Sequence
  Description of Artificial Sequence: Synthetic oligonucleotide
  Antisense strand to SEQ ID NO: 2305958
uuucaacugacuuagaagg

SEQ ID NO: 2305960 - RNA, 19 nt, Artificial Sequence
  Description of Artificial Sequence: Synthetic oligonucleotide
  Sense strand starting at position 1147 of SEQ ID NO: 1884968
cagaaugguugaccuguga

SEQ ID NO: 2305961 - RNA, 19 nt, Artificial Sequence
  Description of Artificial Sequence: Synthetic oligonucleotide
  Antisense strand to SEQ ID NO: 2305960
ucacaggucaaccauucug

SEQ ID NO: 2305962 - RNA, 19 nt, Artificial Sequence
  Description of Artificial Sequence: Synthetic oligonucleotide
  Sense strand starting at position 1230 of SEQ ID NO: 1884968
caaacaucaugguugguga

SEQ ID NO: 2305963 - RNA, 19 nt, Artificial Sequence
  Description of Artificial Sequence: Synthetic oligonucleotide
  Antisense strand to SEQ ID NO: 2305962
ucaccaaccaugauguuug

SEQ ID NO: 2305964 - RNA, 19 nt, Artificial Sequence
  Description of Artificial Sequence: Synthetic oligonucleotide
  Sense strand starting at position 1233 of SEQ ID NO: 1884968
acaucaugguuggugacau

SEQ ID NO: 2305965 - RNA, 19 nt, Artificial Sequence
  Description of Artificial Sequence: Synthetic oligonucleotide
  Antisense strand to SEQ ID NO: 2305964
augucaccaaccaugaugu

SEQ ID NO: 2305966 - RNA, 19 nt, Artificial Sequence
  Description of Artificial Sequence: Synthetic oligonucleotide
  Sense strand starting at position 1378 of SEQ ID NO: 1884968
acaauuguuuccuuggacu

SEQ ID NO: 2305967 - RNA, 19 nt, Artificial Sequence
  Description of Artificial Sequence: Synthetic oligonucleotide
  Antisense strand to SEQ ID NO: 2305966
aguccaaggaaacaauugu

SEQ ID NO: 2305968 - RNA, 19 nt, Artificial Sequence
  Description of Artificial Sequence: Synthetic oligonucleotide
  Sense strand starting at position 1488 of SEQ ID NO: 1884968
guuuaugugagugauacua

SEQ ID NO: 2305969 - RNA, 19 nt, Artificial Sequence
  Description of Artificial Sequence: Synthetic oligonucleotide
  Antisense strand to SEQ ID NO: 2305968
uaguaucacucacauaaac

SEQ ID NO: 2305970 - RNA, 19 nt, Artificial Sequence
  Description of Artificial Sequence: Synthetic oligonucleotide
  Sense strand starting at position 1549 of SEQ ID NO: 1884968
ggucaauugcagcagaaug

SEQ ID NO: 2305971 - RNA, 19 nt, Artificial Sequence
  Description of Artificial Sequence: Synthetic oligonucleotide
  Antisense strand to SEQ ID NO: 2305970
cauucugcugcaauugacc

SEQ ID NO: 2305972 - RNA, 19 nt, Artificial Sequence
  Description of Artificial Sequence: Synthetic oligonucleotide
  Sense strand starting at position 1551 of SEQ ID NO: 1884968
ucaauugcagcagaaugaa

SEQ ID NO: 2305973 - RNA, 19 nt, Artificial Sequence
  Description of Artificial Sequence: Synthetic oligonucleotide
  Antisense strand to SEQ ID NO: 2305972
uucauucugcugcaauuga

SEQ ID NO: 2305974 - RNA, 19 nt, Artificial Sequence
  Description of Artificial Sequence: Synthetic oligonucleotide
  Sense strand starting at position 2053 of SEQ ID NO: 1884968
ucaguuucccagggaagaa

SEQ ID NO: 2305975 - RNA, 19 nt, Artificial Sequence
  Description of Artificial Sequence: Synthetic oligonucleotide
  Antisense strand to SEQ ID NO: 2305974
uucuucccugggaaacuga

SEQ ID NO: 2305976 - RNA, 19 nt, Artificial Sequence
  Description of Artificial Sequence: Synthetic oligonucleotide
  Sense strand starting at position 2091 of SEQ ID NO: 1884968
gcauaagcuuaucuaggaa

SEQ ID NO: 2305977 - RNA, 19 nt, Artificial Sequence
  Description of Artificial Sequence: Synthetic oligonucleotide
  Antisense strand to SEQ ID NO: 2305976
uuccuagauaagcuuaugc

SEQ ID NO: 2305978 - RNA, 19 nt, Artificial Sequence
  Description of Artificial Sequence: Synthetic oligonucleotide
  Sense strand starting at position 2094 of SEQ ID NO: 1884968
uaagcuuaucuaggaagag

SEQ ID NO: 2305979 - RNA, 19 nt, Artificial Sequence
  Description of Artificial Sequence: Synthetic oligonucleotide
  Antisense strand to SEQ ID NO: 2305978
cucuuccuagauaagcuua

SEQ ID NO: 2305980 - RNA, 19 nt, Artificial Sequence
  Description of Artificial Sequence: Synthetic oligonucleotide
  Sense strand starting at position 2195 of SEQ ID NO: 1884968
agaguuuguguuuauugau

SEQ ID NO: 2305981 - RNA, 19 nt, Artificial Sequence
  Description of Artificial Sequence: Synthetic oligonucleotide
  Antisense strand to SEQ ID NO: 2305980
aucaauaaacacaaacucu

SEQ ID NO: 2305982 - RNA, 19 nt, Artificial Sequence
  Description of Artificial Sequence: Synthetic oligonucleotide
  Sense strand starting at position 2228 of SEQ ID NO: 1884968
uugcuuauuggauauuaac

SEQ ID NO: 2305983 - RNA, 19 nt, Artificial Sequence
  Description of Artificial Sequence: Synthetic oligonucleotide
  Antisense strand to SEQ ID NO: 2305982
guuaauauccaauaagcaa

SEQ ID NO: 2305984 - RNA, 19 nt, Artificial Sequence
  Description of Artificial Sequence: Synthetic oligonucleotide
  Sense strand starting at position 2339 of SEQ ID NO: 1884968
cucauuaucuagucaggga

SEQ ID NO: 2305985 - RNA, 19 nt, Artificial Sequence
  Description of Artificial Sequence: Synthetic oligonucleotide
  Antisense strand to SEQ ID NO: 2305984
ucccugacuagauaaugag

SEQ ID NO: 2305986 - RNA, 19 nt, Artificial Sequence
  Description of Artificial Sequence: Synthetic oligonucleotide
  Sense strand starting at position 2570 of SEQ ID NO: 1884968
acgugaaauaggcaauguu

SEQ ID NO: 2305987 - RNA, 19 nt, Artificial Sequence
  Description of Artificial Sequence: Synthetic oligonucleotide
  Antisense strand to SEQ ID NO: 2305986
aacauugccuauuucacgu

SEQ ID NO: 2305988 - RNA, 19 nt, Artificial Sequence
  Description of Artificial Sequence: Synthetic oligonucleotide
  Sense strand starting at position 2573 of SEQ ID NO: 1884968
ugaaauaggcaauguuauu

SEQ ID NO: 2305989 - RNA, 19 nt, Artificial Sequence
  Description of Artificial Sequence: Synthetic oligonucleotide
  Antisense strand to SEQ ID NO: 2305988
aauaacauugccuauuuca

SEQ ID NO: 2305990 - RNA, 19 nt, Artificial Sequence
  Description of Artificial Sequence: Synthetic oligonucleotide
  Sense strand starting at position 2643 of SEQ ID NO: 1884968
agguuauacggcuaguaag

SEQ ID NO: 2305991 - RNA, 19 nt, Artificial Sequence
  Description of Artificial Sequence: Synthetic oligonucleotide
  Antisense strand to SEQ ID NO: 2305990
cuuacuagccguauaaccu

SEQ ID NO: 2305992 - RNA, 19 nt, Artificial Sequence
  Description of Artificial Sequence: Synthetic oligonucleotide
  Sense strand starting at position 2708 of SEQ ID NO: 1884968
gugcauaaccaauaugcua

SEQ ID NO: 2305993 - RNA, 19 nt, Artificial Sequence
  Description of Artificial Sequence: Synthetic oligonucleotide
  Antisense strand to SEQ ID NO: 2305992
uagcauauugguuaugcac

SEQ ID NO: 2305994 - RNA, 19 nt, Artificial Sequence
  Description of Artificial Sequence: Synthetic oligonucleotide
  Sense strand starting at position 2743 of SEQ ID NO: 1884968
agagauuguuaugucggaa

SEQ ID NO: 2305995 - RNA, 19 nt, Artificial Sequence
  Description of Artificial Sequence: Synthetic oligonucleotide
  Antisense strand to SEQ ID NO: 2305994
uuccgacauaacaaucucu

SEQ ID NO: 2305996 - RNA, 19 nt, Artificial Sequence
  Description of Artificial Sequence: Synthetic oligonucleotide
  Sense strand starting at position 2825 of SEQ ID NO: 1884968
auaucagccagagaugguu

SEQ ID NO: 2305997 - RNA, 19 nt, Artificial Sequence
  Description of Artificial Sequence: Synthetic oligonucleotide
  Antisense strand to SEQ ID NO: 2305996
aaccaucucuggcugauau

SEQ ID NO: 2305998 - RNA, 19 nt, Artificial Sequence
  Description of Artificial Sequence: Synthetic oligonucleotide
  Sense strand starting at position 2920 of SEQ ID NO: 1884968
ggaacuagguaguccucua

SEQ ID NO: 2305999 - RNA, 19 nt, Artificial Sequence
  Description of Artificial Sequence: Synthetic oligonucleotide
  Antisense strand to SEQ ID NO: 2305998
uagaggacuaccuaguucc

SEQ ID NO: 2306000 - RNA, 19 nt, Artificial Sequence
  Description of Artificial Sequence: Synthetic oligonucleotide
  Sense strand starting at position 2925 of SEQ ID NO: 1884968
uagguaguccucuaagcag

SEQ ID NO: 2306001 - RNA, 19 nt, Artificial Sequence
  Description of Artificial Sequence: Synthetic oligonucleotide
  Antisense strand to SEQ ID NO: 2306000
cugcuuagaggacuaccua

SEQ ID NO: 2306002 - RNA, 19 nt, Artificial Sequence
  Description of Artificial Sequence: Synthetic oligonucleotide
  Sense strand starting at position 2934 of SEQ ID NO: 1884968
cucuaagcaggugaauaau

SEQ ID NO: 2306003 - RNA, 19 nt, Artificial Sequence
  Description of Artificial Sequence: Synthetic oligonucleotide
  Antisense strand to SEQ ID NO: 2306002
auuauucaccugcuuagag

SEQ ID NO: 2306004 - RNA, 19 nt, Artificial Sequence
  Description of Artificial Sequence: Synthetic oligonucleotide
  Sense strand starting at position 2997 of SEQ ID NO: 1884968
aaguuuauuuggcuccgaa

SEQ ID NO: 2306005 - RNA, 19 nt, Artificial Sequence
  Description of Artificial Sequence: Synthetic oligonucleotide
  Antisense strand to SEQ ID NO: 2306004
uucggagccaaauaaacuu

SEQ ID NO: 2306006 - RNA, 19 nt, Artificial Sequence
  Description of Artificial Sequence: Synthetic oligonucleotide
  Sense strand starting at position 3310 of SEQ ID NO: 1884968
ggaucuguuugguuggaga

SEQ ID NO: 2306007 - RNA, 19 nt, Artificial Sequence
  Description of Artificial Sequence: Synthetic oligonucleotide
  Antisense strand to SEQ ID NO: 2306006
ucuccaaccaaacagaucc

SEQ ID NO: 2306008 - RNA, 19 nt, Artificial Sequence
  Description of Artificial Sequence: Synthetic oligonucleotide
  Sense strand starting at position 3312 of SEQ ID NO: 1884968
aucuguuugguuggagaac

SEQ ID NO: 2306009 - RNA, 19 nt, Artificial Sequence
  Description of Artificial Sequence: Synthetic oligonucleotide
  Antisense strand to SEQ ID NO: 2306008
guucuccaaccaaacagau

SEQ ID NO: 2306010 - RNA, 19 nt, Artificial Sequence
  Description of Artificial Sequence: Synthetic oligonucleotide
  Sense strand starting at position 3411 of SEQ ID NO: 1884968
ggguaauugacagguuuaa

SEQ ID NO: 2306011 - RNA, 19 nt, Artificial Sequence
  Description of Artificial Sequence: Synthetic oligonucleotide
  Antisense strand to SEQ ID NO: 2306010
uuaaaccugucaauuaccc

SEQ ID NO: 2306012 - RNA, 19 nt, Artificial Sequence
  Description of Artificial Sequence: Synthetic oligonucleotide
  Sense strand starting at position 3730 of SEQ ID NO: 1884968
uugggauuacauugugaug

SEQ ID NO: 2306013 - RNA, 19 nt, Artificial Sequence
  Description of Artificial Sequence: Synthetic oligonucleotide
  Antisense strand to SEQ ID NO: 2306012
caucacaauguaaucccaa

SEQ ID NO: 2306014 - RNA, 19 nt, Artificial Sequence
  Description of Artificial Sequence: Synthetic oligonucleotide
  Sense strand starting at position 3742 of SEQ ID NO: 1884968
ugugauguaccugauaaua

SEQ ID NO: 2306015 - RNA, 19 nt, Artificial Sequence
  Description of Artificial Sequence: Synthetic oligonucleotide
  Antisense strand to SEQ ID NO: 2306014
uauuaucagguacaucaca

SEQ ID NO: 2306016 - RNA, 19 nt, Artificial Sequence
  Description of Artificial Sequence: Synthetic oligonucleotide
  Sense strand starting at position 3801 of SEQ ID NO: 1884968
gaaggccucaguugggaau

SEQ ID NO: 2306017 - RNA, 19 nt, Artificial Sequence
  Description of Artificial Sequence: Synthetic oligonucleotide
  Antisense strand to SEQ ID NO: 2306016
auucccaacugaggccuuc

SEQ ID NO: 2306018 - RNA, 19 nt, Artificial Sequence
  Description of Artificial Sequence: Synthetic oligonucleotide
  Sense strand starting at position 3951 of SEQ ID NO: 1884968
uugagaauagcagguuaua

SEQ ID NO: 2306019 - RNA, 19 nt, Artificial Sequence
  Description of Artificial Sequence: Synthetic oligonucleotide
  Antisense strand to SEQ ID NO: 2306018
uauaaccugcuauucucaa

SEQ ID NO: 2306020 - RNA, 19 nt, Artificial Sequence
  Description of Artificial Sequence: Synthetic oligonucleotide
  Sense strand starting at position 3954 of SEQ ID NO: 1884968
agaauagcagguuauaucu

SEQ ID NO: 2306021 - RNA, 19 nt, Artificial Sequence
  Description of Artificial Sequence: Synthetic oligonucleotide
  Antisense strand to SEQ ID NO: 2306020
agauauaaccugcuauucu

SEQ ID NO: 2306022 - RNA, 19 nt, Artificial Sequence
  Description of Artificial Sequence: Synthetic oligonucleotide
  Sense strand starting at position 148 of SEQ ID NO: 1884970
agacgagacacguaaguuu

SEQ ID NO: 2306023 - RNA, 19 nt, Artificial Sequence
  Description of Artificial Sequence: Synthetic oligonucleotide
  Antisense strand to SEQ ID NO: 2306022
aaacuuacgugucucgucu

SEQ ID NO: 2306024 - RNA, 19 nt, Artificial Sequence
  Description of Artificial Sequence: Synthetic oligonucleotide
  Sense strand starting at position 547 of SEQ ID NO: 1884970
auauaaggcucucuuagua

SEQ ID NO: 2306025 - RNA, 19 nt, Artificial Sequence
  Description of Artificial Sequence: Synthetic oligonucleotide
  Antisense strand to SEQ ID NO: 2306024
uacuaagagagccuuauau

SEQ ID NO: 2306026 - RNA, 19 nt, Artificial Sequence
  Description of Artificial Sequence: Synthetic oligonucleotide
  Sense strand starting at position 557 of SEQ ID NO: 1884970
cucuuaguaucccugggaa

SEQ ID NO: 2306027 - RNA, 19 nt, Artificial Sequence
  Description of Artificial Sequence: Synthetic oligonucleotide
  Antisense strand to SEQ ID NO: 2306026
uucccagggauacuaagag

SEQ ID NO: 2306028 - RNA, 19 nt, Artificial Sequence
  Description of Artificial Sequence: Synthetic oligonucleotide
  Sense strand starting at position 559 of SEQ ID NO: 1884970
cuuaguaucccugggaaga

SEQ ID NO: 2306029 - RNA, 19 nt, Artificial Sequence
  Description of Artificial Sequence: Synthetic oligonucleotide
  Antisense strand to SEQ ID NO: 2306028
ucuucccagggauacuaag

SEQ ID NO: 2306030 - RNA, 19 nt, Artificial Sequence
  Description of Artificial Sequence: Synthetic oligonucleotide
  Sense strand starting at position 560 of SEQ ID NO: 1884970
uuaguaucccugggaagag

SEQ ID NO: 2306031 - RNA, 19 nt, Artificial Sequence
  Description of Artificial Sequence: Synthetic oligonucleotide
  Antisense strand to SEQ ID NO: 2306030
cucuucccagggauacuaa

SEQ ID NO: 2306032 - RNA, 19 nt, Artificial Sequence
  Description of Artificial Sequence: Synthetic oligonucleotide
  Sense strand starting at position 597 of SEQ ID NO: 1884970
acggguuuaggaugacaca

SEQ ID NO: 2306033 - RNA, 19 nt, Artificial Sequence
  Description of Artificial Sequence: Synthetic oligonucleotide
  Antisense strand to SEQ ID NO: 2306032
ugugucauccuaaacccgu

SEQ ID NO: 2306034 - RNA, 19 nt, Artificial Sequence
  Description of Artificial Sequence: Synthetic oligonucleotide
  Sense strand starting at position 623 of SEQ ID NO: 1884970
aaauuauccgauuagugca

SEQ ID NO: 2306035 - RNA, 19 nt, Artificial Sequence
  Description of Artificial Sequence: Synthetic oligonucleotide
  Antisense strand to SEQ ID NO: 2306034
ugcacuaaucggauaauuu

SEQ ID NO: 2306036 - RNA, 19 nt, Artificial Sequence
  Description of Artificial Sequence: Synthetic oligonucleotide
  Sense strand starting at position 772 of SEQ ID NO: 1884970
acagaagucggcugauaaa

SEQ ID NO: 2306037 - RNA, 19 nt, Artificial Sequence
  Description of Artificial Sequence: Synthetic oligonucleotide
  Antisense strand to SEQ ID NO: 2306036
uuuaucagccgacuucugu

SEQ ID NO: 2306038 - RNA, 19 nt, Artificial Sequence
  Description of Artificial Sequence: Synthetic oligonucleotide
  Sense strand starting at position 1188 of SEQ ID NO: 1884970
acuuaugaauuguuugaag

SEQ ID NO: 2306039 - RNA, 19 nt, Artificial Sequence
  Description of Artificial Sequence: Synthetic oligonucleotide
  Antisense strand to SEQ ID NO: 2306038
cuucaaacaauucauaagu

SEQ ID NO: 2306040 - RNA, 19 nt, Artificial Sequence
  Description of Artificial Sequence: Synthetic oligonucleotide
  Sense strand starting at position 1190 of SEQ ID NO: 1884970
uuaugaauuguuugaagag

SEQ ID NO: 2306041 - RNA, 19 nt, Artificial Sequence
  Description of Artificial Sequence: Synthetic oligonucleotide
  Antisense strand to SEQ ID NO: 2306040
cucuucaaacaauucauaa

SEQ ID NO: 2306042 - RNA, 19 nt, Artificial Sequence
  Description of Artificial Sequence: Synthetic oligonucleotide
  Sense strand starting at position 1325 of SEQ ID NO: 1884970
acauaccaguggucaguua

SEQ ID NO: 2306043 - RNA, 19 nt, Artificial Sequence
  Description of Artificial Sequence: Synthetic oligonucleotide
  Antisense strand to SEQ ID NO: 2306042
uaacugaccacugguaugu

SEQ ID NO: 2306044 - RNA, 19 nt, Artificial Sequence
  Description of Artificial Sequence: Synthetic oligonucleotide
  Sense strand starting at position 1326 of SEQ ID NO: 1884970
cauaccaguggucaguuaa

SEQ ID NO: 2306045 - RNA, 19 nt, Artificial Sequence
  Description of Artificial Sequence: Synthetic oligonucleotide
  Antisense strand to SEQ ID NO: 2306044
uuaacugaccacugguaug

SEQ ID NO: 2306046 - RNA, 19 nt, Artificial Sequence
  Description of Artificial Sequence: Synthetic oligonucleotide
  Sense strand starting at position 1596 of SEQ ID NO: 1884970
ggaucuuacugcuccuuga

SEQ ID NO: 2306047 - RNA, 19 nt, Artificial Sequence
  Description of Artificial Sequence: Synthetic oligonucleotide
  Antisense strand to SEQ ID NO: 2306046
ucaaggagcaguaagaucc

SEQ ID NO: 2306048 - RNA, 19 nt, Artificial Sequence
  Description of Artificial Sequence: Synthetic oligonucleotide
  Sense strand starting at position 1900 of SEQ ID NO: 1884970
cuuacauuguuugcaggaa

SEQ ID NO: 2306049 - RNA, 19 nt, Artificial Sequence
  Description of Artificial Sequence: Synthetic oligonucleotide
  Antisense strand to SEQ ID NO: 2306048
uuccugcaaacaauguaag

SEQ ID NO: 2306050 - RNA, 19 nt, Artificial Sequence
  Description of Artificial Sequence: Synthetic oligonucleotide
  Sense strand starting at position 1904 of SEQ ID NO: 1884970
cauuguuugcaggaaggga

SEQ ID NO: 2306051 - RNA, 19 nt, Artificial Sequence
  Description of Artificial Sequence: Synthetic oligonucleotide
  Antisense strand to SEQ ID NO: 2306050
ucccuuccugcaaacaaug

SEQ ID NO: 2306052 - RNA, 19 nt, Artificial Sequence
  Description of Artificial Sequence: Synthetic oligonucleotide
  Sense strand starting at position 2236 of SEQ ID NO: 1884970
acuagcagucaggaaaguu

SEQ ID NO: 2306053 - RNA, 19 nt, Artificial Sequence
  Description of Artificial Sequence: Synthetic oligonucleotide
  Antisense strand to SEQ ID NO: 2306052
aacuuuccugacugcuagu

SEQ ID NO: 2306054 - RNA, 19 nt, Artificial Sequence
  Description of Artificial Sequence: Synthetic oligonucleotide
  Sense strand starting at position 2437 of SEQ ID NO: 1884970
gaaggcugcguguucgaau

SEQ ID NO: 2306055 - RNA, 19 nt, Artificial Sequence
  Description of Artificial Sequence: Synthetic oligonucleotide
  Antisense strand to SEQ ID NO: 2306054
auucgaacacgcagccuuc

SEQ ID NO: 2306056 - RNA, 19 nt, Artificial Sequence
  Description of Artificial Sequence: Synthetic oligonucleotide
  Sense strand starting at position 2519 of SEQ ID NO: 1884970
agguguauuccugccgcca

SEQ ID NO: 2306057 - RNA, 19 nt, Artificial Sequence
  Description of Artificial Sequence: Synthetic oligonucleotide
  Antisense strand to SEQ ID NO: 2306056
uggcggcaggaauacaccu

SEQ ID NO: 2306058 - RNA, 19 nt, Artificial Sequence
  Description of Artificial Sequence: Synthetic oligonucleotide
  Sense strand starting at position 2520 of SEQ ID NO: 1884970
gguguauuccugccgccaa

SEQ ID NO: 2306059 - RNA, 19 nt, Artificial Sequence
  Description of Artificial Sequence: Synthetic oligonucleotide
  Antisense strand to SEQ ID NO: 2306058
uuggcggcaggaauacacc

SEQ ID NO: 2306060 - RNA, 19 nt, Artificial Sequence
  Description of Artificial Sequence: Synthetic oligonucleotide
  Sense strand starting at position 2522 of SEQ ID NO: 1884970
uguauuccugccgccaauu

SEQ ID NO: 2306061 - RNA, 19 nt, Artificial Sequence
  Description of Artificial Sequence: Synthetic oligonucleotide
  Antisense strand to SEQ ID NO: 2306060
aauuggcggcaggaauaca

SEQ ID NO: 2306062 - RNA, 19 nt, Artificial Sequence
  Description of Artificial Sequence: Synthetic oligonucleotide
  Sense strand starting at position 2582 of SEQ ID NO: 1884970
ugauacuaauccuugguuu

SEQ ID NO: 2306063 - RNA, 19 nt, Artificial Sequence
  Description of Artificial Sequence: Synthetic oligonucleotide
  Antisense strand to SEQ ID NO: 2306062
aaaccaaggauuaguauca

SEQ ID NO: 2306064 - RNA, 19 nt, Artificial Sequence
  Description of Artificial Sequence: Synthetic oligonucleotide
  Sense strand starting at position 2583 of SEQ ID NO: 1884970
gauacuaauccuugguuug

SEQ ID NO: 2306065 - RNA, 19 nt, Artificial Sequence
  Description of Artificial Sequence: Synthetic oligonucleotide
  Antisense strand to SEQ ID NO: 2306064
caaaccaaggauuaguauc

SEQ ID NO: 2306066 - RNA, 19 nt, Artificial Sequence
  Description of Artificial Sequence: Synthetic oligonucleotide
  Sense strand starting at position 2593 of SEQ ID NO: 1884970
cuugguuugcaggaagaua

SEQ ID NO: 2306067 - RNA, 19 nt, Artificial Sequence
  Description of Artificial Sequence: Synthetic oligonucleotide
  Antisense strand to SEQ ID NO: 2306066
uaucuuccugcaaaccaag

SEQ ID NO: 2306068 - RNA, 19 nt, Artificial Sequence
  Description of Artificial Sequence: Synthetic oligonucleotide
  Sense strand starting at position 2692 of SEQ ID NO: 1884970
caugcauaauguguaaaga

SEQ ID NO: 2306069 - RNA, 19 nt, Artificial Sequence
  Description of Artificial Sequence: Synthetic oligonucleotide
  Antisense strand to SEQ ID NO: 2306068
ucuuuacacauuaugcaug

SEQ ID NO: 2306070 - RNA, 19 nt, Artificial Sequence
  Description of Artificial Sequence: Synthetic oligonucleotide
  Sense strand starting at position 2693 of SEQ ID NO: 1884970
augcauaauguguaaagag

SEQ ID NO: 2306071 - RNA, 19 nt, Artificial Sequence
  Description of Artificial Sequence: Synthetic oligonucleotide
  Antisense strand to SEQ ID NO: 2306070
cucuuuacacauuaugcau

SEQ ID NO: 2306072 - RNA, 19 nt, Artificial Sequence
  Description of Artificial Sequence: Synthetic oligonucleotide
  Sense strand starting at position 2701 of SEQ ID NO: 1884970
uguguaaagagguggacua

SEQ ID NO: 2306073 - RNA, 19 nt, Artificial Sequence
  Description of Artificial Sequence: Synthetic oligonucleotide
  Antisense strand to SEQ ID NO: 2306072
uaguccaccucuuuacaca

SEQ ID NO: 2306074 - RNA, 19 nt, Artificial Sequence
  Description of Artificial Sequence: Synthetic oligonucleotide
  Sense strand starting at position 2702 of SEQ ID NO: 1884970
guguaaagagguggacuau

SEQ ID NO: 2306075 - RNA, 19 nt, Artificial Sequence
  Description of Artificial Sequence: Synthetic oligonucleotide
  Antisense strand to SEQ ID NO: 2306074
auaguccaccucuuuacac

SEQ ID NO: 2306076 - RNA, 19 nt, Artificial Sequence
  Description of Artificial Sequence: Synthetic oligonucleotide
  Sense strand starting at position 2742 of SEQ ID NO: 1884970
guaucaguccacuagucua

SEQ ID NO: 2306077 - RNA, 19 nt, Artificial Sequence
  Description of Artificial Sequence: Synthetic oligonucleotide
  Antisense strand to SEQ ID NO: 2306076
uagacuaguggacugauac

SEQ ID NO: 2306078 - RNA, 19 nt, Artificial Sequence
  Description of Artificial Sequence: Synthetic oligonucleotide
  Sense strand starting at position 2755 of SEQ ID NO: 1884970
agucuaucacaggaagugu

SEQ ID NO: 2306079 - RNA, 19 nt, Artificial Sequence
  Description of Artificial Sequence: Synthetic oligonucleotide
  Antisense strand to SEQ ID NO: 2306078
acacuuccugugauagacu

SEQ ID NO: 2306080 - RNA, 19 nt, Artificial Sequence
  Description of Artificial Sequence: Synthetic oligonucleotide
  Sense strand starting at position 2835 of SEQ ID NO: 1884970
aguacaauaguguacaauu

SEQ ID NO: 2306081 - RNA, 19 nt, Artificial Sequence
  Description of Artificial Sequence: Synthetic oligonucleotide
  Antisense strand to SEQ ID NO: 2306080
aauuguacacuauuguacu

SEQ ID NO: 2306082 - RNA, 19 nt, Artificial Sequence
  Description of Artificial Sequence: Synthetic oligonucleotide
  Sense strand starting at position 2865 of SEQ ID NO: 1884970
auauuaugcuaaucaagug

SEQ ID NO: 2306083 - RNA, 19 nt, Artificial Sequence
  Description of Artificial Sequence: Synthetic oligonucleotide
  Antisense strand to SEQ ID NO: 2306082
cacuugauuagcauaauau

SEQ ID NO: 2306084 - RNA, 19 nt, Artificial Sequence
  Description of Artificial Sequence: Synthetic oligonucleotide
  Sense strand starting at position 2919 of SEQ ID NO: 1884970
ccucacaaugugugacuau

SEQ ID NO: 2306085 - RNA, 19 nt, Artificial Sequence
  Description of Artificial Sequence: Synthetic oligonucleotide
  Antisense strand to SEQ ID NO: 2306084
auagucacacauugugagg

SEQ ID NO: 2306086 - RNA, 19 nt, Artificial Sequence
  Description of Artificial Sequence: Synthetic oligonucleotide
  Sense strand starting at position 3408 of SEQ ID NO: 1884970
gauuaugcgagugaugacu

SEQ ID NO: 2306087 - RNA, 19 nt, Artificial Sequence
  Description of Artificial Sequence: Synthetic oligonucleotide
  Antisense strand to SEQ ID NO: 2306086
agucaucacucgcauaauc

SEQ ID NO: 2306088 - RNA, 19 nt, Artificial Sequence
  Description of Artificial Sequence: Synthetic oligonucleotide
  Sense strand starting at position 3497 of SEQ ID NO: 1884970
ccaggacucuuaguacuaa

SEQ ID NO: 2306089 - RNA, 19 nt, Artificial Sequence
  Description of Artificial Sequence: Synthetic oligonucleotide
  Antisense strand to SEQ ID NO: 2306088
uuaguacuaagaguccugg

SEQ ID NO: 2306090 - RNA, 19 nt, Artificial Sequence
  Description of Artificial Sequence: Synthetic oligonucleotide
  Sense strand starting at position 3685 of SEQ ID NO: 1884970
guagcaguauaccuggaaa

SEQ ID NO: 2306091 - RNA, 19 nt, Artificial Sequence
  Description of Artificial Sequence: Synthetic oligonucleotide
  Antisense strand to SEQ ID NO: 2306090
uuuccagguauacugcuac

SEQ ID NO: 2306092 - RNA, 19 nt, Artificial Sequence
  Description of Artificial Sequence: Synthetic oligonucleotide
  Sense strand starting at position 3687 of SEQ ID NO: 1884970
agcaguauaccuggaaauu

SEQ ID NO: 2306093 - RNA, 19 nt, Artificial Sequence
  Description of Artificial Sequence: Synthetic oligonucleotide
  Antisense strand to SEQ ID NO: 2306092
aauuuccagguauacugcu

SEQ ID NO: 2306094 - RNA, 19 nt, Artificial Sequence
  Description of Artificial Sequence: Synthetic oligonucleotide
  Sense strand starting at position 3688 of SEQ ID NO: 1884970
gcaguauaccuggaaauua

SEQ ID NO: 2306095 - RNA, 19 nt, Artificial Sequence
  Description of Artificial Sequence: Synthetic oligonucleotide
  Antisense strand to SEQ ID NO: 2306094
uaauuuccagguauacugc

SEQ ID NO: 2306096 - RNA, 19 nt, Artificial Sequence
  Description of Artificial Sequence: Synthetic oligonucleotide
  Sense strand starting at position 3795 of SEQ ID NO: 1884970
cucugaugagccugauacu

SEQ ID NO: 2306097 - RNA, 19 nt, Artificial Sequence
  Description of Artificial Sequence: Synthetic oligonucleotide
  Antisense strand to SEQ ID NO: 2306096
aguaucaggcucaucagag

SEQ ID NO: 2306098 - RNA, 19 nt, Artificial Sequence
  Description of Artificial Sequence: Synthetic oligonucleotide
  Sense strand starting at position 3920 of SEQ ID NO: 1884970
ucauguuacuugguaagaa

SEQ ID NO: 2306099 - RNA, 19 nt, Artificial Sequence
  Description of Artificial Sequence: Synthetic oligonucleotide
  Antisense strand to SEQ ID NO: 2306098
uucuuaccaaguaacauga

SEQ ID NO: 2306100 - RNA, 19 nt, Artificial Sequence
  Description of Artificial Sequence: Synthetic oligonucleotide
  Sense strand starting at position 3930 of SEQ ID NO: 1884970
ugguaagaaccaugaaagu

SEQ ID NO: 2306101 - RNA, 19 nt, Artificial Sequence
  Description of Artificial Sequence: Synthetic oligonucleotide
  Antisense strand to SEQ ID NO: 2306100
acuuucaugguucuuacca

SEQ ID NO: 2306102 - RNA, 19 nt, Artificial Sequence
  Description of Artificial Sequence: Synthetic oligonucleotide
  Sense strand starting at position 111 of SEQ ID NO: 1884971
uguaguaacuacucagaaa

SEQ ID NO: 2306103 - RNA, 19 nt, Artificial Sequence
  Description of Artificial Sequence: Synthetic oligonucleotide
  Antisense strand to SEQ ID NO: 2306102
uuucugaguaguuacuaca

SEQ ID NO: 2306104 - RNA, 19 nt, Artificial Sequence
  Description of Artificial Sequence: Synthetic oligonucleotide
  Sense strand starting at position 175 of SEQ ID NO: 1884971
guaggauuucucugccuua

SEQ ID NO: 2306105 - RNA, 19 nt, Artificial Sequence
  Description of Artificial Sequence: Synthetic oligonucleotide
  Antisense strand to SEQ ID NO: 2306104
uaaggcagagaaauccuac

SEQ ID NO: 2306106 - RNA, 19 nt, Artificial Sequence
  Description of Artificial Sequence: Synthetic oligonucleotide
  Sense strand starting at position 194 of SEQ ID NO: 1884971
gaucauauguguuuaaaug

SEQ ID NO: 2306107 - RNA, 19 nt, Artificial Sequence
  Description of Artificial Sequence: Synthetic oligonucleotide
  Antisense strand to SEQ ID NO: 2306106
cauuuaaacacauaugauc

SEQ ID NO: 2306108 - RNA, 19 nt, Artificial Sequence
  Description of Artificial Sequence: Synthetic oligonucleotide
  Sense strand starting at position 205 of SEQ ID NO: 1884971
uuuaaaugaguuugaagca

SEQ ID NO: 2306109 - RNA, 19 nt, Artificial Sequence
  Description of Artificial Sequence: Synthetic oligonucleotide
  Antisense strand to SEQ ID NO: 2306108
ugcuucaaacucauuuaaa

SEQ ID NO: 2306110 - RNA, 19 nt, Artificial Sequence
  Description of Artificial Sequence: Synthetic oligonucleotide
  Sense strand starting at position 221 of SEQ ID NO: 1884971
gcaucagagaucuaguugu

SEQ ID NO: 2306111 - RNA, 19 nt, Artificial Sequence
  Description of Artificial Sequence: Synthetic oligonucleotide
  Antisense strand to SEQ ID NO: 2306110
acaacuagaucucugaugc

SEQ ID NO: 2306112 - RNA, 19 nt, Artificial Sequence
  Description of Artificial Sequence: Synthetic oligonucleotide
  Sense strand starting at position 238 of SEQ ID NO: 1884971
guaaauucugaguaagcug

SEQ ID NO: 2306113 - RNA, 19 nt, Artificial Sequence
  Description of Artificial Sequence: Synthetic oligonucleotide
  Antisense strand to SEQ ID NO: 2306112
cagcuuacucagaauuuac

SEQ ID NO: 2306114 - RNA, 19 nt, Artificial Sequence
  Description of Artificial Sequence: Synthetic oligonucleotide
  Sense strand starting at position 317 of SEQ ID NO: 1884971
ggcagaaaguuuguaauau

SEQ ID NO: 2306115 - RNA, 19 nt, Artificial Sequence
  Description of Artificial Sequence: Synthetic oligonucleotide
  Antisense strand to SEQ ID NO: 2306114
auauuacaaacuuucugcc

SEQ ID NO: 2306116 - RNA, 19 nt, Artificial Sequence
  Description of Artificial Sequence: Synthetic oligonucleotide
  Sense strand starting at position 447 of SEQ ID NO: 1884971
aguuaucacugguuuauga

SEQ ID NO: 2306117 - RNA, 19 nt, Artificial Sequence
  Description of Artificial Sequence: Synthetic oligonucleotide
  Antisense strand to SEQ ID NO: 2306116
ucauaaaccagugauaacu

SEQ ID NO: 2306118 - RNA, 19 nt, Artificial Sequence
  Description of Artificial Sequence: Synthetic oligonucleotide
  Sense strand starting at position 457 of SEQ ID NO: 1884971
gguuuaugagacuauaguu

SEQ ID NO: 2306119 - RNA, 19 nt, Artificial Sequence
  Description of Artificial Sequence: Synthetic oligonucleotide
  Antisense strand to SEQ ID NO: 2306118
aacuauagucucauaaacc

SEQ ID NO: 2306120 - RNA, 19 nt, Artificial Sequence
  Description of Artificial Sequence: Synthetic oligonucleotide
  Sense strand starting at position 689 of SEQ ID NO: 1884971
ugcuuagaauucuccauag

SEQ ID NO: 2306121 - RNA, 19 nt, Artificial Sequence
  Description of Artificial Sequence: Synthetic oligonucleotide
  Antisense strand to SEQ ID NO: 2306120
cuauggagaauucuaagca

SEQ ID NO: 2306122 - RNA, 19 nt, Artificial Sequence
  Description of Artificial Sequence: Synthetic oligonucleotide
  Sense strand starting at position 901 of SEQ ID NO: 1884971
uaaucuuaauucgugagac

SEQ ID NO: 2306123 - RNA, 19 nt, Artificial Sequence
  Description of Artificial Sequence: Synthetic oligonucleotide
  Antisense strand to SEQ ID NO: 2306122
gucucacgaauuaagauua

SEQ ID NO: 2306124 - RNA, 19 nt, Artificial Sequence
  Description of Artificial Sequence: Synthetic oligonucleotide
  Sense strand starting at position 903 of SEQ ID NO: 1884971
aucuuaauucgugagacaa

SEQ ID NO: 2306125 - RNA, 19 nt, Artificial Sequence
  Description of Artificial Sequence: Synthetic oligonucleotide
  Antisense strand to SEQ ID NO: 2306124
uugucucacgaauuaagau

SEQ ID NO: 2306126 - RNA, 19 nt, Artificial Sequence
  Description of Artificial Sequence: Synthetic oligonucleotide
  Sense strand starting at position 916 of SEQ ID NO: 1884971
agacaaggccuuuguauca

SEQ ID NO: 2306127 - RNA, 19 nt, Artificial Sequence
  Description of Artificial Sequence: Synthetic oligonucleotide
  Antisense strand to SEQ ID NO: 2306126
ugauacaaaggccuugucu

SEQ ID NO: 2306128 - RNA, 19 nt, Artificial Sequence
  Description of Artificial Sequence: Synthetic oligonucleotide
  Sense strand starting at position 1124 of SEQ ID NO: 1884971
augagacauuuauacuaug

SEQ ID NO: 2306129 - RNA, 19 nt, Artificial Sequence
  Description of Artificial Sequence: Synthetic oligonucleotide
  Antisense strand to SEQ ID NO: 2306128
cauaguauaaaugucucau

SEQ ID NO: 2306130 - RNA, 19 nt, Artificial Sequence
  Description of Artificial Sequence: Synthetic oligonucleotide
  Sense strand starting at position 1157 of SEQ ID NO: 1884971
ugccaaacagaaugcuaua

SEQ ID NO: 2306131 - RNA, 19 nt, Artificial Sequence
  Description of Artificial Sequence: Synthetic oligonucleotide
  Antisense strand to SEQ ID NO: 2306130
uauagcauucuguuuggca

SEQ ID NO: 2306132 - RNA, 19 nt, Artificial Sequence
  Description of Artificial Sequence: Synthetic oligonucleotide
  Sense strand starting at position 1210 of SEQ ID NO: 1884971
acguauuaacuguaagaaa

SEQ ID NO: 2306133 - RNA, 19 nt, Artificial Sequence
  Description of Artificial Sequence: Synthetic oligonucleotide
  Antisense strand to SEQ ID NO: 2306132
uuucuuacaguuaauacgu

SEQ ID NO: 2306134 - RNA, 19 nt, Artificial Sequence
  Description of Artificial Sequence: Synthetic oligonucleotide
  Sense strand starting at position 1373 of SEQ ID NO: 1884971
caaugacuaugucuaggaa

SEQ ID NO: 2306135 - RNA, 19 nt, Artificial Sequence
  Description of Artificial Sequence: Synthetic oligonucleotide
  Antisense strand to SEQ ID NO: 2306134
uuccuagacauagucauug

SEQ ID NO: 2306136 - RNA, 19 nt, Artificial Sequence
  Description of Artificial Sequence: Synthetic oligonucleotide
  Sense strand starting at position 1496 of SEQ ID NO: 1884971
aagacaugguguccaucua

SEQ ID NO: 2306137 - RNA, 19 nt, Artificial Sequence
  Description of Artificial Sequence: Synthetic oligonucleotide
  Antisense strand to SEQ ID NO: 2306136
uagauggacaccaugucuu

SEQ ID NO: 2306138 - RNA, 19 nt, Artificial Sequence
  Description of Artificial Sequence: Synthetic oligonucleotide
  Sense strand starting at position 1876 of SEQ ID NO: 1884971
agaauugauucugcuccca

SEQ ID NO: 2306139 - RNA, 19 nt, Artificial Sequence
  Description of Artificial Sequence: Synthetic oligonucleotide
  Antisense strand to SEQ ID NO: 2306138
ugggagcagaaucaauucu

SEQ ID NO: 2306140 - RNA, 19 nt, Artificial Sequence
  Description of Artificial Sequence: Synthetic oligonucleotide
  Sense strand starting at position 1988 of SEQ ID NO: 1884971
cuacgugaagucuacuaaa

SEQ ID NO: 2306141 - RNA, 19 nt, Artificial Sequence
  Description of Artificial Sequence: Synthetic oligonucleotide
  Antisense strand to SEQ ID NO: 2306140
uuuaguagacuucacguag

SEQ ID NO: 2306142 - RNA, 19 nt, Artificial Sequence
  Description of Artificial Sequence: Synthetic oligonucleotide
  Sense strand starting at position 2022 of SEQ ID NO: 1884971
ucgguaaaccaguaugaau

SEQ ID NO: 2306143 - RNA, 19 nt, Artificial Sequence
  Description of Artificial Sequence: Synthetic oligonucleotide
  Antisense strand to SEQ ID NO: 2306142
auucauacugguuuaccga

SEQ ID NO: 2306144 - RNA, 19 nt, Artificial Sequence
  Description of Artificial Sequence: Synthetic oligonucleotide
  Sense strand starting at position 2165 of SEQ ID NO: 1884971
cuuuauagaucuguugaac

SEQ ID NO: 2306145 - RNA, 19 nt, Artificial Sequence
  Description of Artificial Sequence: Synthetic oligonucleotide
  Antisense strand to SEQ ID NO: 2306144
guucaacagaucuauaaag

SEQ ID NO: 2306146 - RNA, 19 nt, Artificial Sequence
  Description of Artificial Sequence: Synthetic oligonucleotide
  Sense strand starting at position 2235 of SEQ ID NO: 1884971
aucucuuaguguucuauuu

SEQ ID NO: 2306147 - RNA, 19 nt, Artificial Sequence
  Description of Artificial Sequence: Synthetic oligonucleotide
  Antisense strand to SEQ ID NO: 2306146
aaauagaacacuaagagau

SEQ ID NO: 2306148 - RNA, 19 nt, Artificial Sequence
  Description of Artificial Sequence: Synthetic oligonucleotide
  Sense strand starting at position 2473 of SEQ ID NO: 1884971
acaaguccacauugucaua

SEQ ID NO: 2306149 - RNA, 19 nt, Artificial Sequence
  Description of Artificial Sequence: Synthetic oligonucleotide
  Antisense strand to SEQ ID NO: 2306148
uaugacaauguggacuugu

SEQ ID NO: 2306150 - RNA, 19 nt, Artificial Sequence
  Description of Artificial Sequence: Synthetic oligonucleotide
  Sense strand starting at position 2614 of SEQ ID NO: 1884971
gguaaagauguugaguaau

SEQ ID NO: 2306151 - RNA, 19 nt, Artificial Sequence
  Description of Artificial Sequence: Synthetic oligonucleotide
  Antisense strand to SEQ ID NO: 2306150
auuacucaacaucuuuacc

SEQ ID NO: 2306152 - RNA, 19 nt, Artificial Sequence
  Description of Artificial Sequence: Synthetic oligonucleotide
  Sense strand starting at position 2616 of SEQ ID NO: 1884971
uaaagauguugaguaaugu

SEQ ID NO: 2306153 - RNA, 19 nt, Artificial Sequence
  Description of Artificial Sequence: Synthetic oligonucleotide
  Antisense strand to SEQ ID NO: 2306152
acauuacucaacaucuuua

SEQ ID NO: 2306154 - RNA, 19 nt, Artificial Sequence
  Description of Artificial Sequence: Synthetic oligonucleotide
  Sense strand starting at position 2653 of SEQ ID NO: 1884971
ugcuguucuuauuuaagca

SEQ ID NO: 2306155 - RNA, 19 nt, Artificial Sequence
  Description of Artificial Sequence: Synthetic oligonucleotide
  Antisense strand to SEQ ID NO: 2306154
ugcuuaaauaagaacagca

SEQ ID NO: 2306156 - RNA, 19 nt, Artificial Sequence
  Description of Artificial Sequence: Synthetic oligonucleotide
  Sense strand starting at position 2713 of SEQ ID NO: 1884971
cugggcauauaucucaaau

SEQ ID NO: 2306157 - RNA, 19 nt, Artificial Sequence
  Description of Artificial Sequence: Synthetic oligonucleotide
  Antisense strand to SEQ ID NO: 2306156
auuugagauauaugcccag

SEQ ID NO: 2306158 - RNA, 19 nt, Artificial Sequence
  Description of Artificial Sequence: Synthetic oligonucleotide
  Sense strand starting at position 2983 of SEQ ID NO: 1884971
guccuaucauacucugaga

SEQ ID NO: 2306159 - RNA, 19 nt, Artificial Sequence
  Description of Artificial Sequence: Synthetic oligonucleotide
  Antisense strand to SEQ ID NO: 2306158
ucucagaguaugauaggac

SEQ ID NO: 2306160 - RNA, 19 nt, Artificial Sequence
  Description of Artificial Sequence: Synthetic oligonucleotide
  Sense strand starting at position 3136 of SEQ ID NO: 1884971
ugagaacauugauaauuug

SEQ ID NO: 2306161 - RNA, 19 nt, Artificial Sequence
  Description of Artificial Sequence: Synthetic oligonucleotide
  Antisense strand to SEQ ID NO: 2306160
caaauuaucaauguucuca

SEQ ID NO: 2306162 - RNA, 19 nt, Artificial Sequence
  Description of Artificial Sequence: Synthetic oligonucleotide
  Sense strand starting at position 3596 of SEQ ID NO: 1884971
gaagucugacauugccaga

SEQ ID NO: 2306163 - RNA, 19 nt, Artificial Sequence
  Description of Artificial Sequence: Synthetic oligonucleotide
  Antisense strand to SEQ ID NO: 2306162
ucuggcaaugucagacuuc

SEQ ID NO: 2306164 - RNA, 19 nt, Artificial Sequence
  Description of Artificial Sequence: Synthetic oligonucleotide
  Sense strand starting at position 3601 of SEQ ID NO: 1884971
cugacauugccagacauug

SEQ ID NO: 2306165 - RNA, 19 nt, Artificial Sequence
  Description of Artificial Sequence: Synthetic oligonucleotide
  Antisense strand to SEQ ID NO: 2306164
caaugucuggcaaugucag

SEQ ID NO: 2306166 - RNA, 19 nt, Artificial Sequence
  Description of Artificial Sequence: Synthetic oligonucleotide
  Sense strand starting at position 3606 of SEQ ID NO: 1884971
auugccagacauugguaaa

SEQ ID NO: 2306167 - RNA, 19 nt, Artificial Sequence
  Description of Artificial Sequence: Synthetic oligonucleotide
  Antisense strand to SEQ ID NO: 2306166
uuuaccaaugucuggcaau

SEQ ID NO: 2306168 - RNA, 19 nt, Artificial Sequence
  Description of Artificial Sequence: Synthetic oligonucleotide
  Sense strand starting at position 3607 of SEQ ID NO: 1884971
uugccagacauugguaaag

SEQ ID NO: 2306169 - RNA, 19 nt, Artificial Sequence
  Description of Artificial Sequence: Synthetic oligonucleotide
  Antisense strand to SEQ ID NO: 2306168
cuuuaccaaugucuggcaa

SEQ ID NO: 2306170 - RNA, 19 nt, Artificial Sequence
  Description of Artificial Sequence: Synthetic oligonucleotide
  Sense strand starting at position 3618 of SEQ ID NO: 1884971
ugguaaagauuugaaugaa

SEQ ID NO: 2306171 - RNA, 19 nt, Artificial Sequence
  Description of Artificial Sequence: Synthetic oligonucleotide
  Antisense strand to SEQ ID NO: 2306170
uucauucaaaucuuuacca

SEQ ID NO: 2306172 - RNA, 19 nt, Artificial Sequence
  Description of Artificial Sequence: Synthetic oligonucleotide
  Sense strand starting at position 3749 of SEQ ID NO: 1884971
acucuuagguacccuagaa

SEQ ID NO: 2306173 - RNA, 19 nt, Artificial Sequence
  Description of Artificial Sequence: Synthetic oligonucleotide
  Antisense strand to SEQ ID NO: 2306172
uucuaggguaccuaagagu

SEQ ID NO: 2306174 - RNA, 19 nt, Artificial Sequence
  Description of Artificial Sequence: Synthetic oligonucleotide
  Sense strand starting at position 3771 of SEQ ID NO: 1884971
agaagaauuguugggcaug

SEQ ID NO: 2306175 - RNA, 19 nt, Artificial Sequence
  Description of Artificial Sequence: Synthetic oligonucleotide
  Antisense strand to SEQ ID NO: 2306174
caugcccaacaauucuucu

SEQ ID NO: 2306176 - RNA, 19 nt, Artificial Sequence
  Description of Artificial Sequence: Synthetic oligonucleotide
  Sense strand starting at position 3774 of SEQ ID NO: 1884971
agaauuguugggcauguau

SEQ ID NO: 2306177 - RNA, 19 nt, Artificial Sequence
  Description of Artificial Sequence: Synthetic oligonucleotide
  Antisense strand to SEQ ID NO: 2306176
auacaugcccaacaauucu

SEQ ID NO: 2306178 - RNA, 19 nt, Artificial Sequence
  Description of Artificial Sequence: Synthetic oligonucleotide
  Sense strand starting at position 3917 of SEQ ID NO: 1884971
auaauuaugcaguggaaua

SEQ ID NO: 2306179 - RNA, 19 nt, Artificial Sequence
  Description of Artificial Sequence: Synthetic oligonucleotide
  Antisense strand to SEQ ID NO: 2306178
uauuccacugcauaauuau

SEQ ID NO: 2306180 - RNA, 19 nt, Artificial Sequence
  Description of Artificial Sequence: Synthetic oligonucleotide
  Sense strand starting at position 3919 of SEQ ID NO: 1884971
aauuaugcaguggaauauu

SEQ ID NO: 2306181 - RNA, 19 nt, Artificial Sequence
  Description of Artificial Sequence: Synthetic oligonucleotide
  Antisense strand to SEQ ID NO: 2306180
aauauuccacugcauaauu

SEQ ID NO: 2306182 - RNA, 19 nt, Artificial Sequence
  Description of Artificial Sequence: Synthetic oligonucleotide
  Sense strand starting at position 43 of SEQ ID NO: 1884972
gagagaaugguauguagac

SEQ ID NO: 2306183 - RNA, 19 nt, Artificial Sequence
  Description of Artificial Sequence: Synthetic oligonucleotide
  Antisense strand to SEQ ID NO: 2306182
gucuacauaccauucucuc

SEQ ID NO: 2306184 - RNA, 19 nt, Artificial Sequence
  Description of Artificial Sequence: Synthetic oligonucleotide
  Sense strand starting at position 92 of SEQ ID NO: 1884972
acaccucaguucucaguaa

SEQ ID NO: 2306185 - RNA, 19 nt, Artificial Sequence
  Description of Artificial Sequence: Synthetic oligonucleotide
  Antisense strand to SEQ ID NO: 2306184
uuacugagaacugaggugu

SEQ ID NO: 2306186 - RNA, 19 nt, Artificial Sequence
  Description of Artificial Sequence: Synthetic oligonucleotide
  Sense strand starting at position 170 of SEQ ID NO: 1884972
acagcaacagucuaguaau

SEQ ID NO: 2306187 - RNA, 19 nt, Artificial Sequence
  Description of Artificial Sequence: Synthetic oligonucleotide
  Antisense strand to SEQ ID NO: 2306186
auuacuagacuguugcugu

SEQ ID NO: 2306188 - RNA, 19 nt, Artificial Sequence
  Description of Artificial Sequence: Synthetic oligonucleotide
  Sense strand starting at position 254 of SEQ ID NO: 1884972
gauguauugcccuauguuu

SEQ ID NO: 2306189 - RNA, 19 nt, Artificial Sequence
  Description of Artificial Sequence: Synthetic oligonucleotide
  Antisense strand to SEQ ID NO: 2306188
aaacauagggcaauacauc

SEQ ID NO: 2306190 - RNA, 19 nt, Artificial Sequence
  Description of Artificial Sequence: Synthetic oligonucleotide
  Sense strand starting at position 282 of SEQ ID NO: 1884972
cuagaagaguucuuagugu

SEQ ID NO: 2306191 - RNA, 19 nt, Artificial Sequence
  Description of Artificial Sequence: Synthetic oligonucleotide
  Antisense strand to SEQ ID NO: 2306190
acacuaagaacucuucuag

SEQ ID NO: 2306192 - RNA, 19 nt, Artificial Sequence
  Description of Artificial Sequence: Synthetic oligonucleotide
  Sense strand starting at position 521 of SEQ ID NO: 1884972
aucuuauugguaugaacac

SEQ ID NO: 2306193 - RNA, 19 nt, Artificial Sequence
  Description of Artificial Sequence: Synthetic oligonucleotide
  Antisense strand to SEQ ID NO: 2306192
guguucauaccaauaagau

SEQ ID NO: 2306194 - RNA, 19 nt, Artificial Sequence
  Description of Artificial Sequence: Synthetic oligonucleotide
  Sense strand starting at position 584 of SEQ ID NO: 1884972
ccaugacaccuguauugua

SEQ ID NO: 2306195 - RNA, 19 nt, Artificial Sequence
  Description of Artificial Sequence: Synthetic oligonucleotide
  Antisense strand to SEQ ID NO: 2306194
uacaauacaggugucaugg

SEQ ID NO: 2306196 - RNA, 19 nt, Artificial Sequence
  Description of Artificial Sequence: Synthetic oligonucleotide
  Sense strand starting at position 604 of SEQ ID NO: 1884972
ucuuaucagucauuacaug

SEQ ID NO: 2306197 - RNA, 19 nt, Artificial Sequence
  Description of Artificial Sequence: Synthetic oligonucleotide
  Antisense strand to SEQ ID NO: 2306196
cauguaaugacugauaaga

SEQ ID NO: 2306198 - RNA, 19 nt, Artificial Sequence
  Description of Artificial Sequence: Synthetic oligonucleotide
  Sense strand starting at position 683 of SEQ ID NO: 1884972
gaggguugcuucccauuau

SEQ ID NO: 2306199 - RNA, 19 nt, Artificial Sequence
  Description of Artificial Sequence: Synthetic oligonucleotide
  Antisense strand to SEQ ID NO: 2306198
auaaugggaagcaacccuc

SEQ ID NO: 2306200 - RNA, 19 nt, Artificial Sequence
  Description of Artificial Sequence: Synthetic oligonucleotide
  Sense strand starting at position 872 of SEQ ID NO: 1884972
acauuaugugaccaaagca

SEQ ID NO: 2306201 - RNA, 19 nt, Artificial Sequence
  Description of Artificial Sequence: Synthetic oligonucleotide
  Antisense strand to SEQ ID NO: 2306200
ugcuuuggucacauaaugu

SEQ ID NO: 2306202 - RNA, 19 nt, Artificial Sequence
  Description of Artificial Sequence: Synthetic oligonucleotide
  Sense strand starting at position 933 of SEQ ID NO: 1884972
cagaguuucugacuuacug

SEQ ID NO: 2306203 - RNA, 19 nt, Artificial Sequence
  Description of Artificial Sequence: Synthetic oligonucleotide
  Antisense strand to SEQ ID NO: 2306202
caguaagucagaaacucug

SEQ ID NO: 2306204 - RNA, 19 nt, Artificial Sequence
  Description of Artificial Sequence: Synthetic oligonucleotide
  Sense strand starting at position 1002 of SEQ ID NO: 1884972
agguuaagugcuggauaaa

SEQ ID NO: 2306205 - RNA, 19 nt, Artificial Sequence
  Description of Artificial Sequence: Synthetic oligonucleotide
  Antisense strand to SEQ ID NO: 2306204
uuuauccagcacuuaaccu

SEQ ID NO: 2306206 - RNA, 19 nt, Artificial Sequence
  Description of Artificial Sequence: Synthetic oligonucleotide
  Sense strand starting at position 1003 of SEQ ID NO: 1884972
gguuaagugcuggauaaau

SEQ ID NO: 2306207 - RNA, 19 nt, Artificial Sequence
  Description of Artificial Sequence: Synthetic oligonucleotide
  Antisense strand to SEQ ID NO: 2306206
auuuauccagcacuuaacc

SEQ ID NO: 2306208 - RNA, 19 nt, Artificial Sequence
  Description of Artificial Sequence: Synthetic oligonucleotide
  Sense strand starting at position 1005 of SEQ ID NO: 1884972
uuaagugcuggauaaaugu

SEQ ID NO: 2306209 - RNA, 19 nt, Artificial Sequence
  Description of Artificial Sequence: Synthetic oligonucleotide
  Antisense strand to SEQ ID NO: 2306208
acauuuauccagcacuuaa

SEQ ID NO: 2306210 - RNA, 19 nt, Artificial Sequence
  Description of Artificial Sequence: Synthetic oligonucleotide
  Sense strand starting at position 1079 of SEQ ID NO: 1884972
aagaguaugcacugcagau

SEQ ID NO: 2306211 - RNA, 19 nt, Artificial Sequence
  Description of Artificial Sequence: Synthetic oligonucleotide
  Antisense strand to SEQ ID NO: 2306210
aucugcagugcauacucuu

SEQ ID NO: 2306212 - RNA, 19 nt, Artificial Sequence
  Description of Artificial Sequence: Synthetic oligonucleotide
  Sense strand starting at position 1081 of SEQ ID NO: 1884972
gaguaugcacugcagauaa

SEQ ID NO: 2306213 - RNA, 19 nt, Artificial Sequence
  Description of Artificial Sequence: Synthetic oligonucleotide
  Antisense strand to SEQ ID NO: 2306212
uuaucugcagugcauacuc

SEQ ID NO: 2306214 - RNA, 19 nt, Artificial Sequence
  Description of Artificial Sequence: Synthetic oligonucleotide
  Sense strand starting at position 1296 of SEQ ID NO: 1884972
ugucuuuauagggagcaga

SEQ ID NO: 2306215 - RNA, 19 nt, Artificial Sequence
  Description of Artificial Sequence: Synthetic oligonucleotide
  Antisense strand to SEQ ID NO: 2306214
ucugcucccuauaaagaca

SEQ ID NO: 2306216 - RNA, 19 nt, Artificial Sequence
  Description of Artificial Sequence: Synthetic oligonucleotide
  Sense strand starting at position 1440 of SEQ ID NO: 1884972
uugagaccuuucuuccaag

SEQ ID NO: 2306217 - RNA, 19 nt, Artificial Sequence
  Description of Artificial Sequence: Synthetic oligonucleotide
  Antisense strand to SEQ ID NO: 2306216
cuuggaagaaaggucucaa

SEQ ID NO: 2306218 - RNA, 19 nt, Artificial Sequence
  Description of Artificial Sequence: Synthetic oligonucleotide
  Sense strand starting at position 1614 of SEQ ID NO: 1884972
aguuguaagguccaaauga

SEQ ID NO: 2306219 - RNA, 19 nt, Artificial Sequence
  Description of Artificial Sequence: Synthetic oligonucleotide
  Antisense strand to SEQ ID NO: 2306218
ucauuuggaccuuacaacu

SEQ ID NO: 2306220 - RNA, 19 nt, Artificial Sequence
  Description of Artificial Sequence: Synthetic oligonucleotide
  Sense strand starting at position 1768 of SEQ ID NO: 1884972
ccagacuuaaguuggagau

SEQ ID NO: 2306221 - RNA, 19 nt, Artificial Sequence
  Description of Artificial Sequence: Synthetic oligonucleotide
  Antisense strand to SEQ ID NO: 2306220
aucuccaacuuaagucugg

SEQ ID NO: 2306222 - RNA, 19 nt, Artificial Sequence
  Description of Artificial Sequence: Synthetic oligonucleotide
  Sense strand starting at position 1858 of SEQ ID NO: 1884972
gguagcugauuccuagaaa

SEQ ID NO: 2306223 - RNA, 19 nt, Artificial Sequence
  Description of Artificial Sequence: Synthetic oligonucleotide
  Antisense strand to SEQ ID NO: 2306222
uuucuaggaaucagcuacc

SEQ ID NO: 2306224 - RNA, 19 nt, Artificial Sequence
  Description of Artificial Sequence: Synthetic oligonucleotide
  Sense strand starting at position 2842 of SEQ ID NO: 1884972
ucuuauuggcaauauugau

SEQ ID NO: 2306225 - RNA, 19 nt, Artificial Sequence
  Description of Artificial Sequence: Synthetic oligonucleotide
  Antisense strand to SEQ ID NO: 2306224
aucaauauugccaauaaga

SEQ ID NO: 2306226 - RNA, 19 nt, Artificial Sequence
  Description of Artificial Sequence: Synthetic oligonucleotide
  Sense strand starting at position 2907 of SEQ ID NO: 1884972
ucacucggauucuuaaaua

SEQ ID NO: 2306227 - RNA, 19 nt, Artificial Sequence
  Description of Artificial Sequence: Synthetic oligonucleotide
  Antisense strand to SEQ ID NO: 2306226
uauuuaagaauccgaguga

SEQ ID NO: 2306228 - RNA, 19 nt, Artificial Sequence
  Description of Artificial Sequence: Synthetic oligonucleotide
  Sense strand starting at position 2994 of SEQ ID NO: 1884972
uggaguaggcuuugaacuu

SEQ ID NO: 2306229 - RNA, 19 nt, Artificial Sequence
  Description of Artificial Sequence: Synthetic oligonucleotide
  Antisense strand to SEQ ID NO: 2306228
aaguucaaagccuacucca

SEQ ID NO: 2306230 - RNA, 19 nt, Artificial Sequence
  Description of Artificial Sequence: Synthetic oligonucleotide
  Sense strand starting at position 3209 of SEQ ID NO: 1884972
ggauaaauuuaaggcacuu

SEQ ID NO: 2306231 - RNA, 19 nt, Artificial Sequence
  Description of Artificial Sequence: Synthetic oligonucleotide
  Antisense strand to SEQ ID NO: 2306230
aagugccuuaaauuuaucc

SEQ ID NO: 2306232 - RNA, 19 nt, Artificial Sequence
  Description of Artificial Sequence: Synthetic oligonucleotide
  Sense strand starting at position 3350 of SEQ ID NO: 1884972
ugagucugucuuugcauuu

SEQ ID NO: 2306233 - RNA, 19 nt, Artificial Sequence
  Description of Artificial Sequence: Synthetic oligonucleotide
  Antisense strand to SEQ ID NO: 2306232
aaaugcaaagacagacuca

SEQ ID NO: 2306234 - RNA, 19 nt, Artificial Sequence
  Description of Artificial Sequence: Synthetic oligonucleotide
  Sense strand starting at position 3376 of SEQ ID NO: 1884972
augggaaacuuugaauuuc

SEQ ID NO: 2306235 - RNA, 19 nt, Artificial Sequence
  Description of Artificial Sequence: Synthetic oligonucleotide
  Antisense strand to SEQ ID NO: 2306234
gaaauucaaaguuucccau

SEQ ID NO: 2306236 - RNA, 19 nt, Artificial Sequence
  Description of Artificial Sequence: Synthetic oligonucleotide
  Sense strand starting at position 3426 of SEQ ID NO: 1884972
guucuuaucuaacuggauc

SEQ ID NO: 2306237 - RNA, 19 nt, Artificial Sequence
  Description of Artificial Sequence: Synthetic oligonucleotide
  Antisense strand to SEQ ID NO: 2306236
gauccaguuagauaagaac

SEQ ID NO: 2306238 - RNA, 19 nt, Artificial Sequence
  Description of Artificial Sequence: Synthetic oligonucleotide
  Sense strand starting at position 3484 of SEQ ID NO: 1884972
ucauguacauguguacaua

SEQ ID NO: 2306239 - RNA, 19 nt, Artificial Sequence
  Description of Artificial Sequence: Synthetic oligonucleotide
  Antisense strand to SEQ ID NO: 2306238
uauguacacauguacauga

SEQ ID NO: 2306240 - RNA, 19 nt, Artificial Sequence
  Description of Artificial Sequence: Synthetic oligonucleotide
  Sense strand starting at position 3485 of SEQ ID NO: 1884972
cauguacauguguacauau

SEQ ID NO: 2306241 - RNA, 19 nt, Artificial Sequence
  Description of Artificial Sequence: Synthetic oligonucleotide
  Antisense strand to SEQ ID NO: 2306240
auauguacacauguacaug

SEQ ID NO: 2306242 - RNA, 19 nt, Artificial Sequence
  Description of Artificial Sequence: Synthetic oligonucleotide
  Sense strand starting at position 3543 of SEQ ID NO: 1884972
aggauaaacuauguuacuu

SEQ ID NO: 2306243 - RNA, 19 nt, Artificial Sequence
  Description of Artificial Sequence: Synthetic oligonucleotide
  Antisense strand to SEQ ID NO: 2306242
aaguaacauaguuuauccu

SEQ ID NO: 2306244 - RNA, 19 nt, Artificial Sequence
  Description of Artificial Sequence: Synthetic oligonucleotide
  Sense strand starting at position 3569 of SEQ ID NO: 1884972
uauuauguguaccugaagu

SEQ ID NO: 2306245 - RNA, 19 nt, Artificial Sequence
  Description of Artificial Sequence: Synthetic oligonucleotide
  Antisense strand to SEQ ID NO: 2306244
acuucagguacacauaaua

SEQ ID NO: 2306246 - RNA, 19 nt, Artificial Sequence
  Description of Artificial Sequence: Synthetic oligonucleotide
  Sense strand starting at position 3571 of SEQ ID NO: 1884972
uuauguguaccugaagugu

SEQ ID NO: 2306247 - RNA, 19 nt, Artificial Sequence
  Description of Artificial Sequence: Synthetic oligonucleotide
  Antisense strand to SEQ ID NO: 2306246
acacuucagguacacauaa

SEQ ID NO: 2306248 - RNA, 19 nt, Artificial Sequence
  Description of Artificial Sequence: Synthetic oligonucleotide
  Sense strand starting at position 3640 of SEQ ID NO: 1884972
uguggcuuugcucauuaaa

SEQ ID NO: 2306249 - RNA, 19 nt, Artificial Sequence
  Description of Artificial Sequence: Synthetic oligonucleotide
  Antisense strand to SEQ ID NO: 2306248
uuuaaugagcaaagccaca

SEQ ID NO: 2306250 - RNA, 19 nt, Artificial Sequence
  Description of Artificial Sequence: Synthetic oligonucleotide
  Sense strand starting at position 3643 of SEQ ID NO: 1884972
ggcuuugcucauuaaauag

SEQ ID NO: 2306251 - RNA, 19 nt, Artificial Sequence
  Description of Artificial Sequence: Synthetic oligonucleotide
  Antisense strand to SEQ ID NO: 2306250
cuauuuaaugagcaaagcc

SEQ ID NO: 2306252 - RNA, 19 nt, Artificial Sequence
  Description of Artificial Sequence: Synthetic oligonucleotide
  Sense strand starting at position 3676 of SEQ ID NO: 1884972
ggaggugacauugguguaa

SEQ ID NO: 2306253 - RNA, 19 nt, Artificial Sequence
  Description of Artificial Sequence: Synthetic oligonucleotide
  Antisense strand to SEQ ID NO: 2306252
uuacaccaaugucaccucc

SEQ ID NO: 2306254 - RNA, 19 nt, Artificial Sequence
  Description of Artificial Sequence: Synthetic oligonucleotide
  Sense strand starting at position 3680 of SEQ ID NO: 1884972
gugacauugguguaaacua

SEQ ID NO: 2306255 - RNA, 19 nt, Artificial Sequence
  Description of Artificial Sequence: Synthetic oligonucleotide
  Antisense strand to SEQ ID NO: 2306254
uaguuuacaccaaugucac

SEQ ID NO: 2306256 - RNA, 19 nt, Artificial Sequence
  Description of Artificial Sequence: Synthetic oligonucleotide
  Sense strand starting at position 3718 of SEQ ID NO: 1884972
gaaauaagguuccuacuug

SEQ ID NO: 2306257 - RNA, 19 nt, Artificial Sequence
  Description of Artificial Sequence: Synthetic oligonucleotide
  Antisense strand to SEQ ID NO: 2306256
caaguaggaaccuuauuuc

SEQ ID NO: 2306258 - RNA, 19 nt, Artificial Sequence
  Description of Artificial Sequence: Synthetic oligonucleotide
  Sense strand starting at position 3797 of SEQ ID NO: 1884972
gaguacaaucagugguacu

SEQ ID NO: 2306259 - RNA, 19 nt, Artificial Sequence
  Description of Artificial Sequence: Synthetic oligonucleotide
  Antisense strand to SEQ ID NO: 2306258
aguaccacugauuguacuc

SEQ ID NO: 2306260 - RNA, 19 nt, Artificial Sequence
  Description of Artificial Sequence: Synthetic oligonucleotide
  Sense strand starting at position 3982 of SEQ ID NO: 1884972
uuggauauuccauguaaau

SEQ ID NO: 2306261 - RNA, 19 nt, Artificial Sequence
  Description of Artificial Sequence: Synthetic oligonucleotide
  Antisense strand to SEQ ID NO: 2306260
auuuacauggaauauccaa

SEQ ID NO: 2306262 - RNA, 19 nt, Artificial Sequence
  Description of Artificial Sequence: Synthetic oligonucleotide
  Sense strand starting at position 201 of SEQ ID NO: 1884973
ugaauaauguugucaaggu

SEQ ID NO: 2306263 - RNA, 19 nt, Artificial Sequence
  Description of Artificial Sequence: Synthetic oligonucleotide
  Antisense strand to SEQ ID NO: 2306262
accuugacaacauuauuca

SEQ ID NO: 2306264 - RNA, 19 nt, Artificial Sequence
  Description of Artificial Sequence: Synthetic oligonucleotide
  Sense strand starting at position 389 of SEQ ID NO: 1884973
aucaguauggacuggugua

SEQ ID NO: 2306265 - RNA, 19 nt, Artificial Sequence
  Description of Artificial Sequence: Synthetic oligonucleotide
  Antisense strand to SEQ ID NO: 2306264
uacaccaguccauacugau

SEQ ID NO: 2306266 - RNA, 19 nt, Artificial Sequence
  Description of Artificial Sequence: Synthetic oligonucleotide
  Sense strand starting at position 462 of SEQ ID NO: 1884973
ugaguuauucuccauuccu

SEQ ID NO: 2306267 - RNA, 19 nt, Artificial Sequence
  Description of Artificial Sequence: Synthetic oligonucleotide
  Antisense strand to SEQ ID NO: 2306266
aggaauggagaauaacuca

SEQ ID NO: 2306268 - RNA, 19 nt, Artificial Sequence
  Description of Artificial Sequence: Synthetic oligonucleotide
  Sense strand starting at position 612 of SEQ ID NO: 1884973
uguaaaccucaagacuagu

SEQ ID NO: 2306269 - RNA, 19 nt, Artificial Sequence
  Description of Artificial Sequence: Synthetic oligonucleotide
  Antisense strand to SEQ ID NO: 2306268
acuagucuugagguuuaca

SEQ ID NO: 2306270 - RNA, 19 nt, Artificial Sequence
  Description of Artificial Sequence: Synthetic oligonucleotide
  Sense strand starting at position 618 of SEQ ID NO: 1884973
ccucaagacuaguuagaca

SEQ ID NO: 2306271 - RNA, 19 nt, Artificial Sequence
  Description of Artificial Sequence: Synthetic oligonucleotide
  Antisense strand to SEQ ID NO: 2306270
ugucuaacuagucuugagg

SEQ ID NO: 2306272 - RNA, 19 nt, Artificial Sequence
  Description of Artificial Sequence: Synthetic oligonucleotide
  Sense strand starting at position 695 of SEQ ID NO: 1884973
cccagagaacacuguacuu

SEQ ID NO: 2306273 - RNA, 19 nt, Artificial Sequence
  Description of Artificial Sequence: Synthetic oligonucleotide
  Antisense strand to SEQ ID NO: 2306272
aaguacaguguucucuggg

SEQ ID NO: 2306274 - RNA, 19 nt, Artificial Sequence
  Description of Artificial Sequence: Synthetic oligonucleotide
  Sense strand starting at position 700 of SEQ ID NO: 1884973
agaacacuguacuuagauu

SEQ ID NO: 2306275 - RNA, 19 nt, Artificial Sequence
  Description of Artificial Sequence: Synthetic oligonucleotide
  Antisense strand to SEQ ID NO: 2306274
aaucuaaguacaguguucu

SEQ ID NO: 2306276 - RNA, 19 nt, Artificial Sequence
  Description of Artificial Sequence: Synthetic oligonucleotide
  Sense strand starting at position 764 of SEQ ID NO: 1884973
agcaucagauaguccuaaa

SEQ ID NO: 2306277 - RNA, 19 nt, Artificial Sequence
  Description of Artificial Sequence: Synthetic oligonucleotide
  Antisense strand to SEQ ID NO: 2306276
uuuaggacuaucugaugcu

SEQ ID NO: 2306278 - RNA, 19 nt, Artificial Sequence
  Description of Artificial Sequence: Synthetic oligonucleotide
  Sense strand starting at position 927 of SEQ ID NO: 1884973
cuugacacuucuucugaga

SEQ ID NO: 2306279 - RNA, 19 nt, Artificial Sequence
  Description of Artificial Sequence: Synthetic oligonucleotide
  Antisense strand to SEQ ID NO: 2306278
ucucagaagaagugucaag

SEQ ID NO: 2306280 - RNA, 19 nt, Artificial Sequence
  Description of Artificial Sequence: Synthetic oligonucleotide
  Sense strand starting at position 1303 of SEQ ID NO: 1884973
ugacgcagacaauguaaua

SEQ ID NO: 2306281 - RNA, 19 nt, Artificial Sequence
  Description of Artificial Sequence: Synthetic oligonucleotide
  Antisense strand to SEQ ID NO: 2306280
uauuacauugucugcguca

SEQ ID NO: 2306282 - RNA, 19 nt, Artificial Sequence
  Description of Artificial Sequence: Synthetic oligonucleotide
  Sense strand starting at position 1419 of SEQ ID NO: 1884973
guuuccuuucuggauuacu

SEQ ID NO: 2306283 - RNA, 19 nt, Artificial Sequence
  Description of Artificial Sequence: Synthetic oligonucleotide
  Antisense strand to SEQ ID NO: 2306282
aguaauccagaaaggaaac

SEQ ID NO: 2306284 - RNA, 19 nt, Artificial Sequence
  Description of Artificial Sequence: Synthetic oligonucleotide
  Sense strand starting at position 1461 of SEQ ID NO: 1884973
cagagugacuuguugauaa

SEQ ID NO: 2306285 - RNA, 19 nt, Artificial Sequence
  Description of Artificial Sequence: Synthetic oligonucleotide
  Antisense strand to SEQ ID NO: 2306284
uuaucaacaagucacucug

SEQ ID NO: 2306286 - RNA, 19 nt, Artificial Sequence
  Description of Artificial Sequence: Synthetic oligonucleotide
  Sense strand starting at position 1463 of SEQ ID NO: 1884973
gagugacuuguugauaacu

SEQ ID NO: 2306287 - RNA, 19 nt, Artificial Sequence
  Description of Artificial Sequence: Synthetic oligonucleotide
  Antisense strand to SEQ ID NO: 2306286
aguuaucaacaagucacuc

SEQ ID NO: 2306288 - RNA, 19 nt, Artificial Sequence
  Description of Artificial Sequence: Synthetic oligonucleotide
  Sense strand starting at position 1691 of SEQ ID NO: 1884973
gcuguuguggguucgaauc

SEQ ID NO: 2306289 - RNA, 19 nt, Artificial Sequence
  Description of Artificial Sequence: Synthetic oligonucleotide
  Antisense strand to SEQ ID NO: 2306288
gauucgaacccacaacagc

SEQ ID NO: 2306290 - RNA, 19 nt, Artificial Sequence
  Description of Artificial Sequence: Synthetic oligonucleotide
  Sense strand starting at position 1713 of SEQ ID NO: 1884973
ggucuaucuagcguuucuu

SEQ ID NO: 2306291 - RNA, 19 nt, Artificial Sequence
  Description of Artificial Sequence: Synthetic oligonucleotide
  Antisense strand to SEQ ID NO: 2306290
aagaaacgcuagauagacc

SEQ ID NO: 2306292 - RNA, 19 nt, Artificial Sequence
  Description of Artificial Sequence: Synthetic oligonucleotide
  Sense strand starting at position 1780 of SEQ ID NO: 1884973
cucacauguggguauugaa

SEQ ID NO: 2306293 - RNA, 19 nt, Artificial Sequence
  Description of Artificial Sequence: Synthetic oligonucleotide
  Antisense strand to SEQ ID NO: 2306292
uucaauacccacaugugag

SEQ ID NO: 2306294 - RNA, 19 nt, Artificial Sequence
  Description of Artificial Sequence: Synthetic oligonucleotide
  Sense strand starting at position 1787 of SEQ ID NO: 1884973
guggguauugaagagcuua

SEQ ID NO: 2306295 - RNA, 19 nt, Artificial Sequence
  Description of Artificial Sequence: Synthetic oligonucleotide
  Antisense strand to SEQ ID NO: 2306294
uaagcucuucaauacccac

SEQ ID NO: 2306296 - RNA, 19 nt, Artificial Sequence
  Description of Artificial Sequence: Synthetic oligonucleotide
  Sense strand starting at position 1792 of SEQ ID NO: 1884973
uauugaagagcuuaauagu

SEQ ID NO: 2306297 - RNA, 19 nt, Artificial Sequence
  Description of Artificial Sequence: Synthetic oligonucleotide
  Antisense strand to SEQ ID NO: 2306296
acuauuaagcucuucaaua

SEQ ID NO: 2306298 - RNA, 19 nt, Artificial Sequence
  Description of Artificial Sequence: Synthetic oligonucleotide
  Sense strand starting at position 1967 of SEQ ID NO: 1884973
ccuccuaauccggaacuga

SEQ ID NO: 2306299 - RNA, 19 nt, Artificial Sequence
  Description of Artificial Sequence: Synthetic oligonucleotide
  Antisense strand to SEQ ID NO: 2306298
ucaguuccggauuaggagg

SEQ ID NO: 2306300 - RNA, 19 nt, Artificial Sequence
  Description of Artificial Sequence: Synthetic oligonucleotide
  Sense strand starting at position 2753 of SEQ ID NO: 1884973
uguagugagauuuggcuca

SEQ ID NO: 2306301 - RNA, 19 nt, Artificial Sequence
  Description of Artificial Sequence: Synthetic oligonucleotide
  Antisense strand to SEQ ID NO: 2306300
ugagccaaaucucacuaca

SEQ ID NO: 2306302 - RNA, 19 nt, Artificial Sequence
  Description of Artificial Sequence: Synthetic oligonucleotide
  Sense strand starting at position 2799 of SEQ ID NO: 1884973
agaacagucuguuucuuaa

SEQ ID NO: 2306303 - RNA, 19 nt, Artificial Sequence
  Description of Artificial Sequence: Synthetic oligonucleotide
  Antisense strand to SEQ ID NO: 2306302
uuaagaaacagacuguucu

SEQ ID NO: 2306304 - RNA, 19 nt, Artificial Sequence
  Description of Artificial Sequence: Synthetic oligonucleotide
  Sense strand starting at position 2872 of SEQ ID NO: 1884973
cuuugaacccuuuagugca

SEQ ID NO: 2306305 - RNA, 19 nt, Artificial Sequence
  Description of Artificial Sequence: Synthetic oligonucleotide
  Antisense strand to SEQ ID NO: 2306304
ugcacuaaaggguucaaag

SEQ ID NO: 2306306 - RNA, 19 nt, Artificial Sequence
  Description of Artificial Sequence: Synthetic oligonucleotide
  Sense strand starting at position 2886 of SEQ ID NO: 1884973
gugcaaaggucuccagaaa

SEQ ID NO: 2306307 - RNA, 19 nt, Artificial Sequence
  Description of Artificial Sequence: Synthetic oligonucleotide
  Antisense strand to SEQ ID NO: 2306306
uuucuggagaccuuugcac

SEQ ID NO: 2306308 - RNA, 19 nt, Artificial Sequence
  Description of Artificial Sequence: Synthetic oligonucleotide
  Sense strand starting at position 2887 of SEQ ID NO: 1884973
ugcaaaggucuccagaaac

SEQ ID NO: 2306309 - RNA, 19 nt, Artificial Sequence
  Description of Artificial Sequence: Synthetic oligonucleotide
  Antisense strand to SEQ ID NO: 2306308
guuucuggagaccuuugca

SEQ ID NO: 2306310 - RNA, 19 nt, Artificial Sequence
  Description of Artificial Sequence: Synthetic oligonucleotide
  Sense strand starting at position 3032 of SEQ ID NO: 1884973
agacaagaaugggaggauu

SEQ ID NO: 2306311 - RNA, 19 nt, Artificial Sequence
  Description of Artificial Sequence: Synthetic oligonucleotide
  Antisense strand to SEQ ID NO: 2306310
aauccucccauucuugucu

SEQ ID NO: 2306312 - RNA, 19 nt, Artificial Sequence
  Description of Artificial Sequence: Synthetic oligonucleotide
  Sense strand starting at position 3040 of SEQ ID NO: 1884973
augggaggauuauuguguu

SEQ ID NO: 2306313 - RNA, 19 nt, Artificial Sequence
  Description of Artificial Sequence: Synthetic oligonucleotide
  Antisense strand to SEQ ID NO: 2306312
aacacaauaauccucccau

SEQ ID NO: 2306314 - RNA, 19 nt, Artificial Sequence
  Description of Artificial Sequence: Synthetic oligonucleotide
  Sense strand starting at position 3085 of SEQ ID NO: 1884973
agauaaagcagcugauguu

SEQ ID NO: 2306315 - RNA, 19 nt, Artificial Sequence
  Description of Artificial Sequence: Synthetic oligonucleotide
  Antisense strand to SEQ ID NO: 2306314
aacaucagcugcuuuaucu

SEQ ID NO: 2306316 - RNA, 19 nt, Artificial Sequence
  Description of Artificial Sequence: Synthetic oligonucleotide
  Sense strand starting at position 3092 of SEQ ID NO: 1884973
gcagcugauguuuaauuga

SEQ ID NO: 2306317 - RNA, 19 nt, Artificial Sequence
  Description of Artificial Sequence: Synthetic oligonucleotide
  Antisense strand to SEQ ID NO: 2306316
ucaauuaaacaucagcugc

SEQ ID NO: 2306318 - RNA, 19 nt, Artificial Sequence
  Description of Artificial Sequence: Synthetic oligonucleotide
  Sense strand starting at position 3095 of SEQ ID NO: 1884973
gcugauguuuaauugagga

SEQ ID NO: 2306319 - RNA, 19 nt, Artificial Sequence
  Description of Artificial Sequence: Synthetic oligonucleotide
  Antisense strand to SEQ ID NO: 2306318
uccucaauuaaacaucagc

SEQ ID NO: 2306320 - RNA, 19 nt, Artificial Sequence
  Description of Artificial Sequence: Synthetic oligonucleotide
  Sense strand starting at position 3187 of SEQ ID NO: 1884973
acgcaaauugguuaaaucu

SEQ ID NO: 2306321 - RNA, 19 nt, Artificial Sequence
  Description of Artificial Sequence: Synthetic oligonucleotide
  Antisense strand to SEQ ID NO: 2306320
agauuuaaccaauuugcgu

SEQ ID NO: 2306322 - RNA, 19 nt, Artificial Sequence
  Description of Artificial Sequence: Synthetic oligonucleotide
  Sense strand starting at position 3237 of SEQ ID NO: 1884973
uucucuguucuugauagga

SEQ ID NO: 2306323 - RNA, 19 nt, Artificial Sequence
  Description of Artificial Sequence: Synthetic oligonucleotide
  Antisense strand to SEQ ID NO: 2306322
uccuaucaagaacagagaa

SEQ ID NO: 2306324 - RNA, 19 nt, Artificial Sequence
  Description of Artificial Sequence: Synthetic oligonucleotide
  Sense strand starting at position 3246 of SEQ ID NO: 1884973
cuugauaggagcuguaauu

SEQ ID NO: 2306325 - RNA, 19 nt, Artificial Sequence
  Description of Artificial Sequence: Synthetic oligonucleotide
  Antisense strand to SEQ ID NO: 2306324
aauuacagcuccuaucaag

SEQ ID NO: 2306326 - RNA, 19 nt, Artificial Sequence
  Description of Artificial Sequence: Synthetic oligonucleotide
  Sense strand starting at position 3668 of SEQ ID NO: 1884973
agagguuagcuagaguguu

SEQ ID NO: 2306327 - RNA, 19 nt, Artificial Sequence
  Description of Artificial Sequence: Synthetic oligonucleotide
  Antisense strand to SEQ ID NO: 2306326
aacacucuagcuaaccucu

SEQ ID NO: 2306328 - RNA, 19 nt, Artificial Sequence
  Description of Artificial Sequence: Synthetic oligonucleotide
  Sense strand starting at position 3745 of SEQ ID NO: 1884973
agauuucuggcauggcuuu

SEQ ID NO: 2306329 - RNA, 19 nt, Artificial Sequence
  Description of Artificial Sequence: Synthetic oligonucleotide
  Antisense strand to SEQ ID NO: 2306328
aaagccaugccagaaaucu

SEQ ID NO: 2306330 - RNA, 19 nt, Artificial Sequence
  Description of Artificial Sequence: Synthetic oligonucleotide
  Sense strand starting at position 3886 of SEQ ID NO: 1884973
agaacaguucuauggcauc

SEQ ID NO: 2306331 - RNA, 19 nt, Artificial Sequence
  Description of Artificial Sequence: Synthetic oligonucleotide
  Antisense strand to SEQ ID NO: 2306330
gaugccauagaacuguucu

SEQ ID NO: 2306332 - RNA, 19 nt, Artificial Sequence
  Description of Artificial Sequence: Synthetic oligonucleotide
  Sense strand starting at position 3897 of SEQ ID NO: 1884973
auggcaucccuggauuaac

SEQ ID NO: 2306333 - RNA, 19 nt, Artificial Sequence
  Description of Artificial Sequence: Synthetic oligonucleotide
  Antisense strand to SEQ ID NO: 2306332
guuaauccagggaugccau

SEQ ID NO: 2306334 - RNA, 19 nt, Artificial Sequence
  Description of Artificial Sequence: Synthetic oligonucleotide
  Sense strand starting at position 3929 of SEQ ID NO: 1884973
cuauaaugagccugggaau

SEQ ID NO: 2306335 - RNA, 19 nt, Artificial Sequence
  Description of Artificial Sequence: Synthetic oligonucleotide
  Antisense strand to SEQ ID NO: 2306334
auucccaggcucauuauag

SEQ ID NO: 2306336 - RNA, 19 nt, Artificial Sequence
  Description of Artificial Sequence: Synthetic oligonucleotide
  Sense strand starting at position 3930 of SEQ ID NO: 1884973
uauaaugagccugggaaua

SEQ ID NO: 2306337 - RNA, 19 nt, Artificial Sequence
  Description of Artificial Sequence: Synthetic oligonucleotide
  Antisense strand to SEQ ID NO: 2306336
uauucccaggcucauuaua

SEQ ID NO: 2306338 - RNA, 19 nt, Artificial Sequence
  Description of Artificial Sequence: Synthetic oligonucleotide
  Sense strand starting at position 3940 of SEQ ID NO: 1884973
cugggaauauuaccuucua

SEQ ID NO: 2306339 - RNA, 19 nt, Artificial Sequence
  Description of Artificial Sequence: Synthetic oligonucleotide
  Antisense strand to SEQ ID NO: 2306338
uagaagguaauauucccag

SEQ ID NO: 2306340 - RNA, 19 nt, Artificial Sequence
  Description of Artificial Sequence: Synthetic oligonucleotide
  Sense strand starting at position 3941 of SEQ ID NO: 1884973
ugggaauauuaccuucuag

SEQ ID NO: 2306341 - RNA, 19 nt, Artificial Sequence
  Description of Artificial Sequence: Synthetic oligonucleotide
  Antisense strand to SEQ ID NO: 2306340
cuagaagguaauauuccca

SEQ ID NO: 2306342 - RNA, 19 nt, Artificial Sequence
  Description of Artificial Sequence: Synthetic oligonucleotide
  Sense strand starting at position 227 of SEQ ID NO: 1884974
ccuucuugcugauucuuga

SEQ ID NO: 2306343 - RNA, 19 nt, Artificial Sequence
  Description of Artificial Sequence: Synthetic oligonucleotide
  Antisense strand to SEQ ID NO: 2306342
ucaagaaucagcaagaagg

SEQ ID NO: 2306344 - RNA, 19 nt, Artificial Sequence
  Description of Artificial Sequence: Synthetic oligonucleotide
  Sense strand starting at position 230 of SEQ ID NO: 1884974
ucuugcugauucuugaaca

SEQ ID NO: 2306345 - RNA, 19 nt, Artificial Sequence
  Description of Artificial Sequence: Synthetic oligonucleotide
  Antisense strand to SEQ ID NO: 2306344
uguucaagaaucagcaaga

SEQ ID NO: 2306346 - RNA, 19 nt, Artificial Sequence
  Description of Artificial Sequence: Synthetic oligonucleotide
  Sense strand starting at position 289 of SEQ ID NO: 1884974
ccagaaaucuuuccuugga

SEQ ID NO: 2306347 - RNA, 19 nt, Artificial Sequence
  Description of Artificial Sequence: Synthetic oligonucleotide
  Antisense strand to SEQ ID NO: 2306346
uccaaggaaagauuucugg

SEQ ID NO: 2306348 - RNA, 19 nt, Artificial Sequence
  Description of Artificial Sequence: Synthetic oligonucleotide
  Sense strand starting at position 291 of SEQ ID NO: 1884974
agaaaucuuuccuuggauu

SEQ ID NO: 2306349 - RNA, 19 nt, Artificial Sequence
  Description of Artificial Sequence: Synthetic oligonucleotide
  Antisense strand to SEQ ID NO: 2306348
aauccaaggaaagauuucu

SEQ ID NO: 2306350 - RNA, 19 nt, Artificial Sequence
  Description of Artificial Sequence: Synthetic oligonucleotide
  Sense strand starting at position 354 of SEQ ID NO: 1884974
auguuaccuccugagauuc

SEQ ID NO: 2306351 - RNA, 19 nt, Artificial Sequence
  Description of Artificial Sequence: Synthetic oligonucleotide
  Antisense strand to SEQ ID NO: 2306350
gaaucucaggagguaacau

SEQ ID NO: 2306352 - RNA, 19 nt, Artificial Sequence
  Description of Artificial Sequence: Synthetic oligonucleotide
  Sense strand starting at position 542 of SEQ ID NO: 1884974
uccaaugucuaguagauuu

SEQ ID NO: 2306353 - RNA, 19 nt, Artificial Sequence
  Description of Artificial Sequence: Synthetic oligonucleotide
  Antisense strand to SEQ ID NO: 2306352
aaaucuacuagacauugga

SEQ ID NO: 2306354 - RNA, 19 nt, Artificial Sequence
  Description of Artificial Sequence: Synthetic oligonucleotide
  Sense strand starting at position 564 of SEQ ID NO: 1884974
acauacugaugugcaauua

SEQ ID NO: 2306355 - RNA, 19 nt, Artificial Sequence
  Description of Artificial Sequence: Synthetic oligonucleotide
  Antisense strand to SEQ ID NO: 2306354
uaauugcacaucaguaugu

SEQ ID NO: 2306356 - RNA, 19 nt, Artificial Sequence
  Description of Artificial Sequence: Synthetic oligonucleotide
  Sense strand starting at position 574 of SEQ ID NO: 1884974
gugcaauuaauacgugaau

SEQ ID NO: 2306357 - RNA, 19 nt, Artificial Sequence
  Description of Artificial Sequence: Synthetic oligonucleotide
  Antisense strand to SEQ ID NO: 2306356
auucacguauuaauugcac

SEQ ID NO: 2306358 - RNA, 19 nt, Artificial Sequence
  Description of Artificial Sequence: Synthetic oligonucleotide
  Sense strand starting at position 575 of SEQ ID NO: 1884974
ugcaauuaauacgugaaug

SEQ ID NO: 2306359 - RNA, 19 nt, Artificial Sequence
  Description of Artificial Sequence: Synthetic oligonucleotide
  Antisense strand to SEQ ID NO: 2306358
cauucacguauuaauugca

SEQ ID NO: 2306360 - RNA, 19 nt, Artificial Sequence
  Description of Artificial Sequence: Synthetic oligonucleotide
  Sense strand starting at position 576 of SEQ ID NO: 1884974
gcaauuaauacgugaauga

SEQ ID NO: 2306361 - RNA, 19 nt, Artificial Sequence
  Description of Artificial Sequence: Synthetic oligonucleotide
  Antisense strand to SEQ ID NO: 2306360
ucauucacguauuaauugc

SEQ ID NO: 2306362 - RNA, 19 nt, Artificial Sequence
  Description of Artificial Sequence: Synthetic oligonucleotide
  Sense strand starting at position 580 of SEQ ID NO: 1884974
uuaauacgugaaugaagaa

SEQ ID NO: 2306363 - RNA, 19 nt, Artificial Sequence
  Description of Artificial Sequence: Synthetic oligonucleotide
  Antisense strand to SEQ ID NO: 2306362
uucuucauucacguauuaa

SEQ ID NO: 2306364 - RNA, 19 nt, Artificial Sequence
  Description of Artificial Sequence: Synthetic oligonucleotide
  Sense strand starting at position 642 of SEQ ID NO: 1884974
auagguuaucgguggagag

SEQ ID NO: 2306365 - RNA, 19 nt, Artificial Sequence
  Description of Artificial Sequence: Synthetic oligonucleotide
  Antisense strand to SEQ ID NO: 2306364
cucuccaccgauaaccuau

SEQ ID NO: 2306366 - RNA, 19 nt, Artificial Sequence
  Description of Artificial Sequence: Synthetic oligonucleotide
  Sense strand starting at position 643 of SEQ ID NO: 1884974
uagguuaucgguggagagu

SEQ ID NO: 2306367 - RNA, 19 nt, Artificial Sequence
  Description of Artificial Sequence: Synthetic oligonucleotide
  Antisense strand to SEQ ID NO: 2306366
acucuccaccgauaaccua

SEQ ID NO: 2306368 - RNA, 19 nt, Artificial Sequence
  Description of Artificial Sequence: Synthetic oligonucleotide
  Sense strand starting at position 644 of SEQ ID NO: 1884974
agguuaucgguggagagua

SEQ ID NO: 2306369 - RNA, 19 nt, Artificial Sequence
  Description of Artificial Sequence: Synthetic oligonucleotide
  Antisense strand to SEQ ID NO: 2306368
uacucuccaccgauaaccu

SEQ ID NO: 2306370 - RNA, 19 nt, Artificial Sequence
  Description of Artificial Sequence: Synthetic oligonucleotide
  Sense strand starting at position 831 of SEQ ID NO: 1884974
gaaauaacuccacguaagg

SEQ ID NO: 2306371 - RNA, 19 nt, Artificial Sequence
  Description of Artificial Sequence: Synthetic oligonucleotide
  Antisense strand to SEQ ID NO: 2306370
ccuuacguggaguuauuuc

SEQ ID NO: 2306372 - RNA, 19 nt, Artificial Sequence
  Description of Artificial Sequence: Synthetic oligonucleotide
  Sense strand starting at position 849 of SEQ ID NO: 1884974
guuaaugcuccguaaacag

SEQ ID NO: 2306373 - RNA, 19 nt, Artificial Sequence
  Description of Artificial Sequence: Synthetic oligonucleotide
  Antisense strand to SEQ ID NO: 2306372
cuguuuacggagcauuaac

SEQ ID NO: 2306374 - RNA, 19 nt, Artificial Sequence
  Description of Artificial Sequence: Synthetic oligonucleotide
  Sense strand starting at position 2085 of SEQ ID NO: 1884974
ugugauuugugcucagcug

SEQ ID NO: 2306375 - RNA, 19 nt, Artificial Sequence
  Description of Artificial Sequence: Synthetic oligonucleotide
  Antisense strand to SEQ ID NO: 2306374
cagcugagcacaaaucaca

SEQ ID NO: 2306376 - RNA, 19 nt, Artificial Sequence
  Description of Artificial Sequence: Synthetic oligonucleotide
  Sense strand starting at position 2153 of SEQ ID NO: 1884974
cgaagagagcccuacuacu

SEQ ID NO: 2306377 - RNA, 19 nt, Artificial Sequence
  Description of Artificial Sequence: Synthetic oligonucleotide
  Antisense strand to SEQ ID NO: 2306376
aguaguagggcucucuucg

SEQ ID NO: 2306378 - RNA, 19 nt, Artificial Sequence
  Description of Artificial Sequence: Synthetic oligonucleotide
  Sense strand starting at position 2218 of SEQ ID NO: 1884974
ccggauggucuacagaacu

SEQ ID NO: 2306379 - RNA, 19 nt, Artificial Sequence
  Description of Artificial Sequence: Synthetic oligonucleotide
  Antisense strand to SEQ ID NO: 2306378
aguucuguagaccauccgg

SEQ ID NO: 2306380 - RNA, 19 nt, Artificial Sequence
  Description of Artificial Sequence: Synthetic oligonucleotide
  Sense strand starting at position 2235 of SEQ ID NO: 1884974
cuuggagaguuggaauuua

SEQ ID NO: 2306381 - RNA, 19 nt, Artificial Sequence
  Description of Artificial Sequence: Synthetic oligonucleotide
  Antisense strand to SEQ ID NO: 2306380
uaaauuccaacucuccaag

SEQ ID NO: 2306382 - RNA, 19 nt, Artificial Sequence
  Description of Artificial Sequence: Synthetic oligonucleotide
  Sense strand starting at position 2263 of SEQ ID NO: 1884974
cccgauuuguuugaaauca

SEQ ID NO: 2306383 - RNA, 19 nt, Artificial Sequence
  Description of Artificial Sequence: Synthetic oligonucleotide
  Antisense strand to SEQ ID NO: 2306382
ugauuucaaacaaaucggg

SEQ ID NO: 2306384 - RNA, 19 nt, Artificial Sequence
  Description of Artificial Sequence: Synthetic oligonucleotide
  Sense strand starting at position 2341 of SEQ ID NO: 1884974
ggaauagguuguccucacu

SEQ ID NO: 2306385 - RNA, 19 nt, Artificial Sequence
  Description of Artificial Sequence: Synthetic oligonucleotide
  Antisense strand to SEQ ID NO: 2306384
agugaggacaaccuauucc

SEQ ID NO: 2306386 - RNA, 19 nt, Artificial Sequence
  Description of Artificial Sequence: Synthetic oligonucleotide
  Sense strand starting at position 2402 of SEQ ID NO: 1884974
cuaggaagcauugaguuua

SEQ ID NO: 2306387 - RNA, 19 nt, Artificial Sequence
  Description of Artificial Sequence: Synthetic oligonucleotide
  Antisense strand to SEQ ID NO: 2306386
uaaacucaaugcuuccuag

SEQ ID NO: 2306388 - RNA, 19 nt, Artificial Sequence
  Description of Artificial Sequence: Synthetic oligonucleotide
  Sense strand starting at position 2410 of SEQ ID NO: 1884974
cauugaguuuacuuaggaa

SEQ ID NO: 2306389 - RNA, 19 nt, Artificial Sequence
  Description of Artificial Sequence: Synthetic oligonucleotide
  Antisense strand to SEQ ID NO: 2306388
uuccuaaguaaacucaaug

SEQ ID NO: 2306390 - RNA, 19 nt, Artificial Sequence
  Description of Artificial Sequence: Synthetic oligonucleotide
  Sense strand starting at position 2444 of SEQ ID NO: 1884974
gugacuuaacugcacuuaa

SEQ ID NO: 2306391 - RNA, 19 nt, Artificial Sequence
  Description of Artificial Sequence: Synthetic oligonucleotide
  Antisense strand to SEQ ID NO: 2306390
uuaagugcaguuaagucac

SEQ ID NO: 2306392 - RNA, 19 nt, Artificial Sequence
  Description of Artificial Sequence: Synthetic oligonucleotide
  Sense strand starting at position 2572 of SEQ ID NO: 1884974
ccaguuaucugucuugaca

SEQ ID NO: 2306393 - RNA, 19 nt, Artificial Sequence
  Description of Artificial Sequence: Synthetic oligonucleotide
  Antisense strand to SEQ ID NO: 2306392
ugucaagacagauaacugg

SEQ ID NO: 2306394 - RNA, 19 nt, Artificial Sequence
  Description of Artificial Sequence: Synthetic oligonucleotide
  Sense strand starting at position 2583 of SEQ ID NO: 1884974
ucuugacagcuguagcuaa

SEQ ID NO: 2306395 - RNA, 19 nt, Artificial Sequence
  Description of Artificial Sequence: Synthetic oligonucleotide
  Antisense strand to SEQ ID NO: 2306394
uuagcuacagcugucaaga

SEQ ID NO: 2306396 - RNA, 19 nt, Artificial Sequence
  Description of Artificial Sequence: Synthetic oligonucleotide
  Sense strand starting at position 2598 of SEQ ID NO: 1884974
cuaagaaauuagucuuaug

SEQ ID NO: 2306397 - RNA, 19 nt, Artificial Sequence
  Description of Artificial Sequence: Synthetic oligonucleotide
  Antisense strand to SEQ ID NO: 2306396
cauaagacuaauuucuuag

SEQ ID NO: 2306398 - RNA, 19 nt, Artificial Sequence
  Description of Artificial Sequence: Synthetic oligonucleotide
  Sense strand starting at position 2624 of SEQ ID NO: 1884974
aacauugacgcuuaaaguu

SEQ ID NO: 2306399 - RNA, 19 nt, Artificial Sequence
  Description of Artificial Sequence: Synthetic oligonucleotide
  Antisense strand to SEQ ID NO: 2306398
aacuuuaagcgucaauguu

SEQ ID NO: 2306400 - RNA, 19 nt, Artificial Sequence
  Description of Artificial Sequence: Synthetic oligonucleotide
  Sense strand starting at position 2677 of SEQ ID NO: 1884974
agcccagugcauugaauaa

SEQ ID NO: 2306401 - RNA, 19 nt, Artificial Sequence
  Description of Artificial Sequence: Synthetic oligonucleotide
  Antisense strand to SEQ ID NO: 2306400
uuauucaaugcacugggcu

SEQ ID NO: 2306402 - RNA, 19 nt, Artificial Sequence
  Description of Artificial Sequence: Synthetic oligonucleotide
  Sense strand starting at position 2752 of SEQ ID NO: 1884974
ucaagacaguuacuaguaa

SEQ ID NO: 2306403 - RNA, 19 nt, Artificial Sequence
  Description of Artificial Sequence: Synthetic oligonucleotide
  Antisense strand to SEQ ID NO: 2306402
uuacuaguaacugucuuga

SEQ ID NO: 2306404 - RNA, 19 nt, Artificial Sequence
  Description of Artificial Sequence: Synthetic oligonucleotide
  Sense strand starting at position 2795 of SEQ ID NO: 1884974
aauucuuuaggugguguau

SEQ ID NO: 2306405 - RNA, 19 nt, Artificial Sequence
  Description of Artificial Sequence: Synthetic oligonucleotide
  Antisense strand to SEQ ID NO: 2306404
auacaccaccuaaagaauu

SEQ ID NO: 2306406 - RNA, 19 nt, Artificial Sequence
  Description of Artificial Sequence: Synthetic oligonucleotide
  Sense strand starting at position 2806 of SEQ ID NO: 1884974
ugguguauauaguuucuca

SEQ ID NO: 2306407 - RNA, 19 nt, Artificial Sequence
  Description of Artificial Sequence: Synthetic oligonucleotide
  Antisense strand to SEQ ID NO: 2306406
ugagaaacuauauacacca

SEQ ID NO: 2306408 - RNA, 19 nt, Artificial Sequence
  Description of Artificial Sequence: Synthetic oligonucleotide
  Sense strand starting at position 3606 of SEQ ID NO: 1884974
ggcacagaggcaugauaug

SEQ ID NO: 2306409 - RNA, 19 nt, Artificial Sequence
  Description of Artificial Sequence: Synthetic oligonucleotide
  Antisense strand to SEQ ID NO: 2306408
cauaucaugccucugugcc

SEQ ID NO: 2306410 - RNA, 19 nt, Artificial Sequence
  Description of Artificial Sequence: Synthetic oligonucleotide
  Sense strand starting at position 3624 of SEQ ID NO: 1884974
gccgccugaaguuauuuaa

SEQ ID NO: 2306411 - RNA, 19 nt, Artificial Sequence
  Description of Artificial Sequence: Synthetic oligonucleotide
  Antisense strand to SEQ ID NO: 2306410
uuaaauaacuucaggcggc

SEQ ID NO: 2306412 - RNA, 19 nt, Artificial Sequence
  Description of Artificial Sequence: Synthetic oligonucleotide
  Sense strand starting at position 3798 of SEQ ID NO: 1884974
uuuaauuaaguguggaaag

SEQ ID NO: 2306413 - RNA, 19 nt, Artificial Sequence
  Description of Artificial Sequence: Synthetic oligonucleotide
  Antisense strand to SEQ ID NO: 2306412
cuuuccacacuuaauuaaa

SEQ ID NO: 2306414 - RNA, 19 nt, Artificial Sequence
  Description of Artificial Sequence: Synthetic oligonucleotide
  Sense strand starting at position 3819 of SEQ ID NO: 1884974
ugaggaguacuguguuaaa

SEQ ID NO: 2306415 - RNA, 19 nt, Artificial Sequence
  Description of Artificial Sequence: Synthetic oligonucleotide
  Antisense strand to SEQ ID NO: 2306414
uuuaacacaguacuccuca

SEQ ID NO: 2306416 - RNA, 19 nt, Artificial Sequence
  Description of Artificial Sequence: Synthetic oligonucleotide
  Sense strand starting at position 3828 of SEQ ID NO: 1884974
cuguguuaaauaggguagu

SEQ ID NO: 2306417 - RNA, 19 nt, Artificial Sequence
  Description of Artificial Sequence: Synthetic oligonucleotide
  Antisense strand to SEQ ID NO: 2306416
acuacccuauuuaacacag

SEQ ID NO: 2306418 - RNA, 19 nt, Artificial Sequence
  Description of Artificial Sequence: Synthetic oligonucleotide
  Sense strand starting at position 3897 of SEQ ID NO: 1884974
cacugucucagggaagagu

SEQ ID NO: 2306419 - RNA, 19 nt, Artificial Sequence
  Description of Artificial Sequence: Synthetic oligonucleotide
  Antisense strand to SEQ ID NO: 2306418
acucuucccugagacagug

SEQ ID NO: 2306420 - RNA, 19 nt, Artificial Sequence
  Description of Artificial Sequence: Synthetic oligonucleotide
  Sense strand starting at position 3964 of SEQ ID NO: 1884974
uguagugugauguaggaag

SEQ ID NO: 2306421 - RNA, 19 nt, Artificial Sequence
  Description of Artificial Sequence: Synthetic oligonucleotide
  Antisense strand to SEQ ID NO: 2306420
cuuccuacaucacacuaca

SEQ ID NO: 2306422 - RNA, 19 nt, Artificial Sequence
  Description of Artificial Sequence: Synthetic oligonucleotide
  Sense strand starting at position 40 of SEQ ID NO: 1884975
gucccugcaggguagaauu

SEQ ID NO: 2306423 - RNA, 19 nt, Artificial Sequence
  Description of Artificial Sequence: Synthetic oligonucleotide
  Antisense strand to SEQ ID NO: 2306422
aauucuacccugcagggac

SEQ ID NO: 2306424 - RNA, 19 nt, Artificial Sequence
  Description of Artificial Sequence: Synthetic oligonucleotide
  Sense strand starting at position 198 of SEQ ID NO: 1884975
aaguuauuagcuuacagug

SEQ ID NO: 2306425 - RNA, 19 nt, Artificial Sequence
  Description of Artificial Sequence: Synthetic oligonucleotide
  Antisense strand to SEQ ID NO: 2306424
cacuguaagcuaauaacuu

SEQ ID NO: 2306426 - RNA, 19 nt, Artificial Sequence
  Description of Artificial Sequence: Synthetic oligonucleotide
  Sense strand starting at position 203 of SEQ ID NO: 1884975
auuagcuuacagugaggaa

SEQ ID NO: 2306427 - RNA, 19 nt, Artificial Sequence
  Description of Artificial Sequence: Synthetic oligonucleotide
  Antisense strand to SEQ ID NO: 2306426
uuccucacuguaagcuaau

SEQ ID NO: 2306428 - RNA, 19 nt, Artificial Sequence
  Description of Artificial Sequence: Synthetic oligonucleotide
  Sense strand starting at position 427 of SEQ ID NO: 1884975
acgggaugcacauauuaug

SEQ ID NO: 2306429 - RNA, 19 nt, Artificial Sequence
  Description of Artificial Sequence: Synthetic oligonucleotide
  Antisense strand to SEQ ID NO: 2306428
cauaauaugugcaucccgu

SEQ ID NO: 2306430 - RNA, 19 nt, Artificial Sequence
  Description of Artificial Sequence: Synthetic oligonucleotide
  Sense strand starting at position 518 of SEQ ID NO: 1884975
uagcgcaaugcguuccuua

SEQ ID NO: 2306431 - RNA, 19 nt, Artificial Sequence
  Description of Artificial Sequence: Synthetic oligonucleotide
  Antisense strand to SEQ ID NO: 2306430
uaaggaacgcauugcgcua

SEQ ID NO: 2306432 - RNA, 19 nt, Artificial Sequence
  Description of Artificial Sequence: Synthetic oligonucleotide
  Sense strand starting at position 606 of SEQ ID NO: 1884975
uuaugugcaguccaugaca

SEQ ID NO: 2306433 - RNA, 19 nt, Artificial Sequence
  Description of Artificial Sequence: Synthetic oligonucleotide
  Antisense strand to SEQ ID NO: 2306432
ugucauggacugcacauaa

SEQ ID NO: 2306434 - RNA, 19 nt, Artificial Sequence
  Description of Artificial Sequence: Synthetic oligonucleotide
  Sense strand starting at position 857 of SEQ ID NO: 1884975
gggagcuacuuacuagacu

SEQ ID NO: 2306435 - RNA, 19 nt, Artificial Sequence
  Description of Artificial Sequence: Synthetic oligonucleotide
  Antisense strand to SEQ ID NO: 2306434
agucuaguaaguagcuccc

SEQ ID NO: 2306436 - RNA, 19 nt, Artificial Sequence
  Description of Artificial Sequence: Synthetic oligonucleotide
  Sense strand starting at position 866 of SEQ ID NO: 1884975
uuacuagacuuggccuuua

SEQ ID NO: 2306437 - RNA, 19 nt, Artificial Sequence
  Description of Artificial Sequence: Synthetic oligonucleotide
  Antisense strand to SEQ ID NO: 2306436
uaaaggccaagucuaguaa

SEQ ID NO: 2306438 - RNA, 19 nt, Artificial Sequence
  Description of Artificial Sequence: Synthetic oligonucleotide
  Sense strand starting at position 876 of SEQ ID NO: 1884975
uggccuuuaauagagagua

SEQ ID NO: 2306439 - RNA, 19 nt, Artificial Sequence
  Description of Artificial Sequence: Synthetic oligonucleotide
  Antisense strand to SEQ ID NO: 2306438
uacucucuauuaaaggcca

SEQ ID NO: 2306440 - RNA, 19 nt, Artificial Sequence
  Description of Artificial Sequence: Synthetic oligonucleotide
  Sense strand starting at position 1188 of SEQ ID NO: 1884975
aggcacugucuccaaagua

SEQ ID NO: 2306441 - RNA, 19 nt, Artificial Sequence
  Description of Artificial Sequence: Synthetic oligonucleotide
  Antisense strand to SEQ ID NO: 2306440
uacuuuggagacagugccu

SEQ ID NO: 2306442 - RNA, 19 nt, Artificial Sequence
  Description of Artificial Sequence: Synthetic oligonucleotide
  Sense strand starting at position 1339 of SEQ ID NO: 1884975
aggauacucugggcccaaa

SEQ ID NO: 2306443 - RNA, 19 nt, Artificial Sequence
  Description of Artificial Sequence: Synthetic oligonucleotide
  Antisense strand to SEQ ID NO: 2306442
uuugggcccagaguauccu

SEQ ID NO: 2306444 - RNA, 19 nt, Artificial Sequence
  Description of Artificial Sequence: Synthetic oligonucleotide
  Sense strand starting at position 1435 of SEQ ID NO: 1884975
ggaauacucucggcugaca

SEQ ID NO: 2306445 - RNA, 19 nt, Artificial Sequence
  Description of Artificial Sequence: Synthetic oligonucleotide
  Antisense strand to SEQ ID NO: 2306444
ugucagccgagaguauucc

SEQ ID NO: 2306446 - RNA, 19 nt, Artificial Sequence
  Description of Artificial Sequence: Synthetic oligonucleotide
  Sense strand starting at position 1485 of SEQ ID NO: 1884975
ugagaucucccuuggugga

SEQ ID NO: 2306447 - RNA, 19 nt, Artificial Sequence
  Description of Artificial Sequence: Synthetic oligonucleotide
  Antisense strand to SEQ ID NO: 2306446
uccaccaagggagaucuca

SEQ ID NO: 2306448 - RNA, 19 nt, Artificial Sequence
  Description of Artificial Sequence: Synthetic oligonucleotide
  Sense strand starting at position 1486 of SEQ ID NO: 1884975
gagaucucccuugguggau

SEQ ID NO: 2306449 - RNA, 19 nt, Artificial Sequence
  Description of Artificial Sequence: Synthetic oligonucleotide
  Antisense strand to SEQ ID NO: 2306448
auccaccaagggagaucuc

SEQ ID NO: 2306450 - RNA, 19 nt, Artificial Sequence
  Description of Artificial Sequence: Synthetic oligonucleotide
  Sense strand starting at position 1490 of SEQ ID NO: 1884975
ucucccuugguggauuaaa

SEQ ID NO: 2306451 - RNA, 19 nt, Artificial Sequence
  Description of Artificial Sequence: Synthetic oligonucleotide
  Antisense strand to SEQ ID NO: 2306450
uuuaauccaccaagggaga

SEQ ID NO: 2306452 - RNA, 19 nt, Artificial Sequence
  Description of Artificial Sequence: Synthetic oligonucleotide
  Sense strand starting at position 2233 of SEQ ID NO: 1884975
ggcuucagagauuguugga

SEQ ID NO: 2306453 - RNA, 19 nt, Artificial Sequence
  Description of Artificial Sequence: Synthetic oligonucleotide
  Antisense strand to SEQ ID NO: 2306452
uccaacaaucucugaagcc

SEQ ID NO: 2306454 - RNA, 19 nt, Artificial Sequence
  Description of Artificial Sequence: Synthetic oligonucleotide
  Sense strand starting at position 2287 of SEQ ID NO: 1884975
guacccucucguguuuauu

SEQ ID NO: 2306455 - RNA, 19 nt, Artificial Sequence
  Description of Artificial Sequence: Synthetic oligonucleotide
  Antisense strand to SEQ ID NO: 2306454
aauaaacacgagaggguac

SEQ ID NO: 2306456 - RNA, 19 nt, Artificial Sequence
  Description of Artificial Sequence: Synthetic oligonucleotide
  Sense strand starting at position 2289 of SEQ ID NO: 1884975
acccucucguguuuauuua

SEQ ID NO: 2306457 - RNA, 19 nt, Artificial Sequence
  Description of Artificial Sequence: Synthetic oligonucleotide
  Antisense strand to SEQ ID NO: 2306456
uaaauaaacacgagagggu

SEQ ID NO: 2306458 - RNA, 19 nt, Artificial Sequence
  Description of Artificial Sequence: Synthetic oligonucleotide
  Sense strand starting at position 2290 of SEQ ID NO: 1884975
cccucucguguuuauuuau

SEQ ID NO: 2306459 - RNA, 19 nt, Artificial Sequence
  Description of Artificial Sequence: Synthetic oligonucleotide
  Antisense strand to SEQ ID NO: 2306458
auaaauaaacacgagaggg

SEQ ID NO: 2306460 - RNA, 19 nt, Artificial Sequence
  Description of Artificial Sequence: Synthetic oligonucleotide
  Sense strand starting at position 2293 of SEQ ID NO: 1884975
ucucguguuuauuuauuga

SEQ ID NO: 2306461 - RNA, 19 nt, Artificial Sequence
  Description of Artificial Sequence: Synthetic oligonucleotide
  Antisense strand to SEQ ID NO: 2306460
ucaauaaauaaacacgaga

SEQ ID NO: 2306462 - RNA, 19 nt, Artificial Sequence
  Description of Artificial Sequence: Synthetic oligonucleotide
  Sense strand starting at position 2296 of SEQ ID NO: 1884975
cguguuuauuuauugacca

SEQ ID NO: 2306463 - RNA, 19 nt, Artificial Sequence
  Description of Artificial Sequence: Synthetic oligonucleotide
  Antisense strand to SEQ ID NO: 2306462
uggucaauaaauaaacacg

SEQ ID NO: 2306464 - RNA, 19 nt, Artificial Sequence
  Description of Artificial Sequence: Synthetic oligonucleotide
  Sense strand starting at position 2705 of SEQ ID NO: 1884975
uugagaguuuaagugugaa

SEQ ID NO: 2306465 - RNA, 19 nt, Artificial Sequence
  Description of Artificial Sequence: Synthetic oligonucleotide
  Antisense strand to SEQ ID NO: 2306464
uucacacuuaaacucucaa

SEQ ID NO: 2306466 - RNA, 19 nt, Artificial Sequence
  Description of Artificial Sequence: Synthetic oligonucleotide
  Sense strand starting at position 2772 of SEQ ID NO: 1884975
ucugguaagaaaugaguuu

SEQ ID NO: 2306467 - RNA, 19 nt, Artificial Sequence
  Description of Artificial Sequence: Synthetic oligonucleotide
  Antisense strand to SEQ ID NO: 2306466
aaacucauuucuuaccaga

SEQ ID NO: 2306468 - RNA, 19 nt, Artificial Sequence
  Description of Artificial Sequence: Synthetic oligonucleotide
  Sense strand starting at position 2784 of SEQ ID NO: 1884975
ugaguuuggaaucggcaaa

SEQ ID NO: 2306469 - RNA, 19 nt, Artificial Sequence
  Description of Artificial Sequence: Synthetic oligonucleotide
  Antisense strand to SEQ ID NO: 2306468
uuugccgauuccaaacuca

SEQ ID NO: 2306470 - RNA, 19 nt, Artificial Sequence
  Description of Artificial Sequence: Synthetic oligonucleotide
  Sense strand starting at position 2785 of SEQ ID NO: 1884975
gaguuuggaaucggcaaau

SEQ ID NO: 2306471 - RNA, 19 nt, Artificial Sequence
  Description of Artificial Sequence: Synthetic oligonucleotide
  Antisense strand to SEQ ID NO: 2306470
auuugccgauuccaaacuc

SEQ ID NO: 2306472 - RNA, 19 nt, Artificial Sequence
  Description of Artificial Sequence: Synthetic oligonucleotide
  Sense strand starting at position 2850 of SEQ ID NO: 1884975
cugauuauccgugauuacc

SEQ ID NO: 2306473 - RNA, 19 nt, Artificial Sequence
  Description of Artificial Sequence: Synthetic oligonucleotide
  Antisense strand to SEQ ID NO: 2306472
gguaaucacggauaaucag

SEQ ID NO: 2306474 - RNA, 19 nt, Artificial Sequence
  Description of Artificial Sequence: Synthetic oligonucleotide
  Sense strand starting at position 2908 of SEQ ID NO: 1884975
gggaacucagcuuguugga

SEQ ID NO: 2306475 - RNA, 19 nt, Artificial Sequence
  Description of Artificial Sequence: Synthetic oligonucleotide
  Antisense strand to SEQ ID NO: 2306474
uccaacaagcugaguuccc

SEQ ID NO: 2306476 - RNA, 19 nt, Artificial Sequence
  Description of Artificial Sequence: Synthetic oligonucleotide
  Sense strand starting at position 3008 of SEQ ID NO: 1884975
acuggagccucauuaagaa

SEQ ID NO: 2306477 - RNA, 19 nt, Artificial Sequence
  Description of Artificial Sequence: Synthetic oligonucleotide
  Antisense strand to SEQ ID NO: 2306476
uucuuaaugaggcuccagu

SEQ ID NO: 2306478 - RNA, 19 nt, Artificial Sequence
  Description of Artificial Sequence: Synthetic oligonucleotide
  Sense strand starting at position 3017 of SEQ ID NO: 1884975
ucauuaagaacguggauga

SEQ ID NO: 2306479 - RNA, 19 nt, Artificial Sequence
  Description of Artificial Sequence: Synthetic oligonucleotide
  Antisense strand to SEQ ID NO: 2306478
ucauccacguucuuaauga

SEQ ID NO: 2306480 - RNA, 19 nt, Artificial Sequence
  Description of Artificial Sequence: Synthetic oligonucleotide
  Sense strand starting at position 3135 of SEQ ID NO: 1884975
gagaguguaccuuacggaa

SEQ ID NO: 2306481 - RNA, 19 nt, Artificial Sequence
  Description of Artificial Sequence: Synthetic oligonucleotide
  Antisense strand to SEQ ID NO: 2306480
uuccguaagguacacucuc

SEQ ID NO: 2306482 - RNA, 19 nt, Artificial Sequence
  Description of Artificial Sequence: Synthetic oligonucleotide
  Sense strand starting at position 3159 of SEQ ID NO: 1884975
gccacaugccaggaaguau

SEQ ID NO: 2306483 - RNA, 19 nt, Artificial Sequence
  Description of Artificial Sequence: Synthetic oligonucleotide
  Antisense strand to SEQ ID NO: 2306482
auacuuccuggcauguggc

SEQ ID NO: 2306484 - RNA, 19 nt, Artificial Sequence
  Description of Artificial Sequence: Synthetic oligonucleotide
  Sense strand starting at position 3234 of SEQ ID NO: 1884975
gcaguuguccaagauuaag

SEQ ID NO: 2306485 - RNA, 19 nt, Artificial Sequence
  Description of Artificial Sequence: Synthetic oligonucleotide
  Antisense strand to SEQ ID NO: 2306484
cuuaaucuuggacaacugc

SEQ ID NO: 2306486 - RNA, 19 nt, Artificial Sequence
  Description of Artificial Sequence: Synthetic oligonucleotide
  Sense strand starting at position 3253 of SEQ ID NO: 1884975
augagcugggccuagaaua

SEQ ID NO: 2306487 - RNA, 19 nt, Artificial Sequence
  Description of Artificial Sequence: Synthetic oligonucleotide
  Antisense strand to SEQ ID NO: 2306486
uauucuaggcccagcucau

SEQ ID NO: 2306488 - RNA, 19 nt, Artificial Sequence
  Description of Artificial Sequence: Synthetic oligonucleotide
  Sense strand starting at position 3272 of SEQ ID NO: 1884975
ggguguugacccugauaag

SEQ ID NO: 2306489 - RNA, 19 nt, Artificial Sequence
  Description of Artificial Sequence: Synthetic oligonucleotide
  Antisense strand to SEQ ID NO: 2306488
cuuaucagggucaacaccc

SEQ ID NO: 2306490 - RNA, 19 nt, Artificial Sequence
  Description of Artificial Sequence: Synthetic oligonucleotide
  Sense strand starting at position 3331 of SEQ ID NO: 1884975
uuaauauggauuggugacu

SEQ ID NO: 2306491 - RNA, 19 nt, Artificial Sequence
  Description of Artificial Sequence: Synthetic oligonucleotide
  Antisense strand to SEQ ID NO: 2306490
agucaccaauccauauuaa

SEQ ID NO: 2306492 - RNA, 19 nt, Artificial Sequence
  Description of Artificial Sequence: Synthetic oligonucleotide
  Sense strand starting at position 3340 of SEQ ID NO: 1884975
auuggugacugauuggaua

SEQ ID NO: 2306493 - RNA, 19 nt, Artificial Sequence
  Description of Artificial Sequence: Synthetic oligonucleotide
  Antisense strand to SEQ ID NO: 2306492
uauccaaucagucaccaau

SEQ ID NO: 2306494 - RNA, 19 nt, Artificial Sequence
  Description of Artificial Sequence: Synthetic oligonucleotide
  Sense strand starting at position 3354 of SEQ ID NO: 1884975
ggauauaguuuaguccacu

SEQ ID NO: 2306495 - RNA, 19 nt, Artificial Sequence
  Description of Artificial Sequence: Synthetic oligonucleotide
  Antisense strand to SEQ ID NO: 2306494
aguggacuaaacuauaucc

SEQ ID NO: 2306496 - RNA, 19 nt, Artificial Sequence
  Description of Artificial Sequence: Synthetic oligonucleotide
  Sense strand starting at position 3396 of SEQ ID NO: 1884975
gccugauugaagggaacuu

SEQ ID NO: 2306497 - RNA, 19 nt, Artificial Sequence
  Description of Artificial Sequence: Synthetic oligonucleotide
  Antisense strand to SEQ ID NO: 2306496
aaguucccuucaaucaggc

SEQ ID NO: 2306498 - RNA, 19 nt, Artificial Sequence
  Description of Artificial Sequence: Synthetic oligonucleotide
  Sense strand starting at position 3518 of SEQ ID NO: 1884975
ucagguugauguccaacua

SEQ ID NO: 2306499 - RNA, 19 nt, Artificial Sequence
  Description of Artificial Sequence: Synthetic oligonucleotide
  Antisense strand to SEQ ID NO: 2306498
uaguuggacaucaaccuga

SEQ ID NO: 2306500 - RNA, 19 nt, Artificial Sequence
  Description of Artificial Sequence: Synthetic oligonucleotide
  Sense strand starting at position 3563 of SEQ ID NO: 1884975
auaaucuggcuccagcaaa

SEQ ID NO: 2306501 - RNA, 19 nt, Artificial Sequence
  Description of Artificial Sequence: Synthetic oligonucleotide
  Antisense strand to SEQ ID NO: 2306500
uuugcuggagccagauuau

SEQ ID NO: 2306502 - RNA, 19 nt, Artificial Sequence
  Description of Artificial Sequence: Synthetic oligonucleotide
  Sense strand starting at position 2 of SEQ ID NO: 1884976
guauccagucuauagcaaa

SEQ ID NO: 2306503 - RNA, 19 nt, Artificial Sequence
  Description of Artificial Sequence: Synthetic oligonucleotide
  Antisense strand to SEQ ID NO: 2306502
uuugcuauagacuggauac

SEQ ID NO: 2306504 - RNA, 19 nt, Artificial Sequence
  Description of Artificial Sequence: Synthetic oligonucleotide
  Sense strand starting at position 107 of SEQ ID NO: 1884976
auacuuuaucuuugugacu

SEQ ID NO: 2306505 - RNA, 19 nt, Artificial Sequence
  Description of Artificial Sequence: Synthetic oligonucleotide
  Antisense strand to SEQ ID NO: 2306504
agucacaaagauaaaguau

SEQ ID NO: 2306506 - RNA, 19 nt, Artificial Sequence
  Description of Artificial Sequence: Synthetic oligonucleotide
  Sense strand starting at position 119 of SEQ ID NO: 1884976
ugugacuuauuccuauaua

SEQ ID NO: 2306507 - RNA, 19 nt, Artificial Sequence
  Description of Artificial Sequence: Synthetic oligonucleotide
  Antisense strand to SEQ ID NO: 2306506
uauauaggaauaagucaca

SEQ ID NO: 2306508 - RNA, 19 nt, Artificial Sequence
  Description of Artificial Sequence: Synthetic oligonucleotide
  Sense strand starting at position 154 of SEQ ID NO: 1884976
cugagaccauuagugcuau

SEQ ID NO: 2306509 - RNA, 19 nt, Artificial Sequence
  Description of Artificial Sequence: Synthetic oligonucleotide
  Antisense strand to SEQ ID NO: 2306508
auagcacuaauggucucag

SEQ ID NO: 2306510 - RNA, 19 nt, Artificial Sequence
  Description of Artificial Sequence: Synthetic oligonucleotide
  Sense strand starting at position 160 of SEQ ID NO: 1884976
ccauuagugcuaugaacaa

SEQ ID NO: 2306511 - RNA, 19 nt, Artificial Sequence
  Description of Artificial Sequence: Synthetic oligonucleotide
  Antisense strand to SEQ ID NO: 2306510
uuguucauagcacuaaugg

SEQ ID NO: 2306512 - RNA, 19 nt, Artificial Sequence
  Description of Artificial Sequence: Synthetic oligonucleotide
  Sense strand starting at position 225 of SEQ ID NO: 1884976
cugugcauuuguuugguaa

SEQ ID NO: 2306513 - RNA, 19 nt, Artificial Sequence
  Description of Artificial Sequence: Synthetic oligonucleotide
  Antisense strand to SEQ ID NO: 2306512
uuaccaaacaaaugcacag

SEQ ID NO: 2306514 - RNA, 19 nt, Artificial Sequence
  Description of Artificial Sequence: Synthetic oligonucleotide
  Sense strand starting at position 226 of SEQ ID NO: 1884976
ugugcauuuguuugguaaa

SEQ ID NO: 2306515 - RNA, 19 nt, Artificial Sequence
  Description of Artificial Sequence: Synthetic oligonucleotide
  Antisense strand to SEQ ID NO: 2306514
uuuaccaaacaaaugcaca

SEQ ID NO: 2306516 - RNA, 19 nt, Artificial Sequence
  Description of Artificial Sequence: Synthetic oligonucleotide
  Sense strand starting at position 294 of SEQ ID NO: 1884976
ccucauuccuggccaggaa

SEQ ID NO: 2306517 - RNA, 19 nt, Artificial Sequence
  Description of Artificial Sequence: Synthetic oligonucleotide
  Antisense strand to SEQ ID NO: 2306516
uuccuggccaggaaugagg

SEQ ID NO: 2306518 - RNA, 19 nt, Artificial Sequence
  Description of Artificial Sequence: Synthetic oligonucleotide
  Sense strand starting at position 295 of SEQ ID NO: 1884976
cucauuccuggccaggaau

SEQ ID NO: 2306519 - RNA, 19 nt, Artificial Sequence
  Description of Artificial Sequence: Synthetic oligonucleotide
  Antisense strand to SEQ ID NO: 2306518
auuccuggccaggaaugag

SEQ ID NO: 2306520 - RNA, 19 nt, Artificial Sequence
  Description of Artificial Sequence: Synthetic oligonucleotide
  Sense strand starting at position 404 of SEQ ID NO: 1884976
uuucucaaucuguaucgga

SEQ ID NO: 2306521 - RNA, 19 nt, Artificial Sequence
  Description of Artificial Sequence: Synthetic oligonucleotide
  Antisense strand to SEQ ID NO: 2306520
uccgauacagauugagaaa

SEQ ID NO: 2306522 - RNA, 19 nt, Artificial Sequence
  Description of Artificial Sequence: Synthetic oligonucleotide
  Sense strand starting at position 408 of SEQ ID NO: 1884976
ucaaucuguaucggaagaa

SEQ ID NO: 2306523 - RNA, 19 nt, Artificial Sequence
  Description of Artificial Sequence: Synthetic oligonucleotide
  Antisense strand to SEQ ID NO: 2306522
uucuuccgauacagauuga

SEQ ID NO: 2306524 - RNA, 19 nt, Artificial Sequence
  Description of Artificial Sequence: Synthetic oligonucleotide
  Sense strand starting at position 567 of SEQ ID NO: 1884976
ugaguauaccugcaugcau

SEQ ID NO: 2306525 - RNA, 19 nt, Artificial Sequence
  Description of Artificial Sequence: Synthetic oligonucleotide
  Antisense strand to SEQ ID NO: 2306524
augcaugcagguauacuca

SEQ ID NO: 2306526 - RNA, 19 nt, Artificial Sequence
  Description of Artificial Sequence: Synthetic oligonucleotide
  Sense strand starting at position 587 of SEQ ID NO: 1884976
augguaauaguguauguau

SEQ ID NO: 2306527 - RNA, 19 nt, Artificial Sequence
  Description of Artificial Sequence: Synthetic oligonucleotide
  Antisense strand to SEQ ID NO: 2306526
auacauacacuauuaccau

SEQ ID NO: 2306528 - RNA, 19 nt, Artificial Sequence
  Description of Artificial Sequence: Synthetic oligonucleotide
  Sense strand starting at position 821 of SEQ ID NO: 1884976
uauguuuguguaugcauuu

SEQ ID NO: 2306529 - RNA, 19 nt, Artificial Sequence
  Description of Artificial Sequence: Synthetic oligonucleotide
  Antisense strand to SEQ ID NO: 2306528
aaaugcauacacaaacaua

SEQ ID NO: 2306530 - RNA, 19 nt, Artificial Sequence
  Description of Artificial Sequence: Synthetic oligonucleotide
  Sense strand starting at position 897 of SEQ ID NO: 1884976
gugguuaauaugcauuugu

SEQ ID NO: 2306531 - RNA, 19 nt, Artificial Sequence
  Description of Artificial Sequence: Synthetic oligonucleotide
  Antisense strand to SEQ ID NO: 2306530
acaaaugcauauuaaccac

SEQ ID NO: 2306532 - RNA, 19 nt, Artificial Sequence
  Description of Artificial Sequence: Synthetic oligonucleotide
  Sense strand starting at position 901 of SEQ ID NO: 1884976
uuaauaugcauuugugugu

SEQ ID NO: 2306533 - RNA, 19 nt, Artificial Sequence
  Description of Artificial Sequence: Synthetic oligonucleotide
  Antisense strand to SEQ ID NO: 2306532
acacacaaaugcauauuaa

SEQ ID NO: 2306534 - RNA, 19 nt, Artificial Sequence
  Description of Artificial Sequence: Synthetic oligonucleotide
  Sense strand starting at position 902 of SEQ ID NO: 1884976
uaauaugcauuugugugua

SEQ ID NO: 2306535 - RNA, 19 nt, Artificial Sequence
  Description of Artificial Sequence: Synthetic oligonucleotide
  Antisense strand to SEQ ID NO: 2306534
uacacacaaaugcauauua

SEQ ID NO: 2306536 - RNA, 19 nt, Artificial Sequence
  Description of Artificial Sequence: Synthetic oligonucleotide
  Sense strand starting at position 906 of SEQ ID NO: 1884976
augcauuuguguguaucuu

SEQ ID NO: 2306537 - RNA, 19 nt, Artificial Sequence
  Description of Artificial Sequence: Synthetic oligonucleotide
  Antisense strand to SEQ ID NO: 2306536
aagauacacacaaaugcau

SEQ ID NO: 2306538 - RNA, 19 nt, Artificial Sequence
  Description of Artificial Sequence: Synthetic oligonucleotide
  Sense strand starting at position 907 of SEQ ID NO: 1884976
ugcauuuguguguaucuua

SEQ ID NO: 2306539 - RNA, 19 nt, Artificial Sequence
  Description of Artificial Sequence: Synthetic oligonucleotide
  Antisense strand to SEQ ID NO: 2306538
uaagauacacacaaaugca

SEQ ID NO: 2306540 - RNA, 19 nt, Artificial Sequence
  Description of Artificial Sequence: Synthetic oligonucleotide
  Sense strand starting at position 969 of SEQ ID NO: 1884976
ucugaagucuagucacauu

SEQ ID NO: 2306541 - RNA, 19 nt, Artificial Sequence
  Description of Artificial Sequence: Synthetic oligonucleotide
  Antisense strand to SEQ ID NO: 2306540
aaugugacuagacuucaga

SEQ ID NO: 2306542 - RNA, 19 nt, Artificial Sequence
  Description of Artificial Sequence: Synthetic oligonucleotide
  Sense strand starting at position 1412 of SEQ ID NO: 1884976
cuuggucacuuaccauuau

SEQ ID NO: 2306543 - RNA, 19 nt, Artificial Sequence
  Description of Artificial Sequence: Synthetic oligonucleotide
  Antisense strand to SEQ ID NO: 2306542
auaaugguaagugaccaag

SEQ ID NO: 2306544 - RNA, 19 nt, Artificial Sequence
  Description of Artificial Sequence: Synthetic oligonucleotide
  Sense strand starting at position 1528 of SEQ ID NO: 1884976
guggaaucuuccuuucuca

SEQ ID NO: 2306545 - RNA, 19 nt, Artificial Sequence
  Description of Artificial Sequence: Synthetic oligonucleotide
  Antisense strand to SEQ ID NO: 2306544
ugagaaaggaagauuccac

SEQ ID NO: 2306546 - RNA, 19 nt, Artificial Sequence
  Description of Artificial Sequence: Synthetic oligonucleotide
  Sense strand starting at position 1593 of SEQ ID NO: 1884976
aucagaauuccacgguuau

SEQ ID NO: 2306547 - RNA, 19 nt, Artificial Sequence
  Description of Artificial Sequence: Synthetic oligonucleotide
  Antisense strand to SEQ ID NO: 2306546
auaaccguggaauucugau

SEQ ID NO: 2306548 - RNA, 19 nt, Artificial Sequence
  Description of Artificial Sequence: Synthetic oligonucleotide
  Sense strand starting at position 1594 of SEQ ID NO: 1884976
ucagaauuccacgguuauu

SEQ ID NO: 2306549 - RNA, 19 nt, Artificial Sequence
  Description of Artificial Sequence: Synthetic oligonucleotide
  Antisense strand to SEQ ID NO: 2306548
aauaaccguggaauucuga

SEQ ID NO: 2306550 - RNA, 19 nt, Artificial Sequence
  Description of Artificial Sequence: Synthetic oligonucleotide
  Sense strand starting at position 1863 of SEQ ID NO: 1884976
agauuuggccuccgcugaa

SEQ ID NO: 2306551 - RNA, 19 nt, Artificial Sequence
  Description of Artificial Sequence: Synthetic oligonucleotide
  Antisense strand to SEQ ID NO: 2306550
uucagcggaggccaaaucu

SEQ ID NO: 2306552 - RNA, 19 nt, Artificial Sequence
  Description of Artificial Sequence: Synthetic oligonucleotide
  Sense strand starting at position 2514 of SEQ ID NO: 1884976
uggaauauccuauguauuc

SEQ ID NO: 2306553 - RNA, 19 nt, Artificial Sequence
  Description of Artificial Sequence: Synthetic oligonucleotide
  Antisense strand to SEQ ID NO: 2306552
gaauacauaggauauucca

SEQ ID NO: 2306554 - RNA, 19 nt, Artificial Sequence
  Description of Artificial Sequence: Synthetic oligonucleotide
  Sense strand starting at position 2515 of SEQ ID NO: 1884976
ggaauauccuauguauucu

SEQ ID NO: 2306555 - RNA, 19 nt, Artificial Sequence
  Description of Artificial Sequence: Synthetic oligonucleotide
  Antisense strand to SEQ ID NO: 2306554
agaauacauaggauauucc

SEQ ID NO: 2306556 - RNA, 19 nt, Artificial Sequence
  Description of Artificial Sequence: Synthetic oligonucleotide
  Sense strand starting at position 2695 of SEQ ID NO: 1884976
uuuguuugagcuuaacuaa

SEQ ID NO: 2306557 - RNA, 19 nt, Artificial Sequence
  Description of Artificial Sequence: Synthetic oligonucleotide
  Antisense strand to SEQ ID NO: 2306556
uuaguuaagcucaaacaaa

SEQ ID NO: 2306558 - RNA, 19 nt, Artificial Sequence
  Description of Artificial Sequence: Synthetic oligonucleotide
  Sense strand starting at position 2698 of SEQ ID NO: 1884976
guuugagcuuaacuaagaa

SEQ ID NO: 2306559 - RNA, 19 nt, Artificial Sequence
  Description of Artificial Sequence: Synthetic oligonucleotide
  Antisense strand to SEQ ID NO: 2306558
uucuuaguuaagcucaaac

SEQ ID NO: 2306560 - RNA, 19 nt, Artificial Sequence
  Description of Artificial Sequence: Synthetic oligonucleotide
  Sense strand starting at position 2710 of SEQ ID NO: 1884976
cuaagaaucuggguuucug

SEQ ID NO: 2306561 - RNA, 19 nt, Artificial Sequence
  Description of Artificial Sequence: Synthetic oligonucleotide
  Antisense strand to SEQ ID NO: 2306560
cagaaacccagauucuuag

SEQ ID NO: 2306562 - RNA, 19 nt, Artificial Sequence
  Description of Artificial Sequence: Synthetic oligonucleotide
  Sense strand starting at position 2768 of SEQ ID NO: 1884976
auugaaaggcaagguuauu

SEQ ID NO: 2306563 - RNA, 19 nt, Artificial Sequence
  Description of Artificial Sequence: Synthetic oligonucleotide
  Antisense strand to SEQ ID NO: 2306562
aauaaccuugccuuucaau

SEQ ID NO: 2306564 - RNA, 19 nt, Artificial Sequence
  Description of Artificial Sequence: Synthetic oligonucleotide
  Sense strand starting at position 3091 of SEQ ID NO: 1884976
ggcuuuguauuucuucuua

SEQ ID NO: 2306565 - RNA, 19 nt, Artificial Sequence
  Description of Artificial Sequence: Synthetic oligonucleotide
  Antisense strand to SEQ ID NO: 2306564
uaagaagaaauacaaagcc

SEQ ID NO: 2306566 - RNA, 19 nt, Artificial Sequence
  Description of Artificial Sequence: Synthetic oligonucleotide
  Sense strand starting at position 3207 of SEQ ID NO: 1884976
ccuuguaugccauagaaau

SEQ ID NO: 2306567 - RNA, 19 nt, Artificial Sequence
  Description of Artificial Sequence: Synthetic oligonucleotide
  Antisense strand to SEQ ID NO: 2306566
auuucuauggcauacaagg

SEQ ID NO: 2306568 - RNA, 19 nt, Artificial Sequence
  Description of Artificial Sequence: Synthetic oligonucleotide
  Sense strand starting at position 3401 of SEQ ID NO: 1884976
gaaggagucuaguugagag

SEQ ID NO: 2306569 - RNA, 19 nt, Artificial Sequence
  Description of Artificial Sequence: Synthetic oligonucleotide
  Antisense strand to SEQ ID NO: 2306568
cucucaacuagacuccuuc

SEQ ID NO: 2306570 - RNA, 19 nt, Artificial Sequence
  Description of Artificial Sequence: Synthetic oligonucleotide
  Sense strand starting at position 3404 of SEQ ID NO: 1884976
ggagucuaguugagaggaa

SEQ ID NO: 2306571 - RNA, 19 nt, Artificial Sequence
  Description of Artificial Sequence: Synthetic oligonucleotide
  Antisense strand to SEQ ID NO: 2306570
uuccucucaacuagacucc

SEQ ID NO: 2306572 - RNA, 19 nt, Artificial Sequence
  Description of Artificial Sequence: Synthetic oligonucleotide
  Sense strand starting at position 3495 of SEQ ID NO: 1884976
agugcuacaucucuaagau

SEQ ID NO: 2306573 - RNA, 19 nt, Artificial Sequence
  Description of Artificial Sequence: Synthetic oligonucleotide
  Antisense strand to SEQ ID NO: 2306572
aucuuagagauguagcacu

SEQ ID NO: 2306574 - RNA, 19 nt, Artificial Sequence
  Description of Artificial Sequence: Synthetic oligonucleotide
  Sense strand starting at position 3496 of SEQ ID NO: 1884976
gugcuacaucucuaagaua

SEQ ID NO: 2306575 - RNA, 19 nt, Artificial Sequence
  Description of Artificial Sequence: Synthetic oligonucleotide
  Antisense strand to SEQ ID NO: 2306574
uaucuuagagauguagcac

SEQ ID NO: 2306576 - RNA, 19 nt, Artificial Sequence
  Description of Artificial Sequence: Synthetic oligonucleotide
  Sense strand starting at position 3639 of SEQ ID NO: 1884976
augugauucuagucugagg

SEQ ID NO: 2306577 - RNA, 19 nt, Artificial Sequence
  Description of Artificial Sequence: Synthetic oligonucleotide
  Antisense strand to SEQ ID NO: 2306576
ccucagacuagaaucacau

SEQ ID NO: 2306578 - RNA, 19 nt, Artificial Sequence
  Description of Artificial Sequence: Synthetic oligonucleotide
  Sense strand starting at position 3641 of SEQ ID NO: 1884976
gugauucuagucugaggag

SEQ ID NO: 2306579 - RNA, 19 nt, Artificial Sequence
  Description of Artificial Sequence: Synthetic oligonucleotide
  Antisense strand to SEQ ID NO: 2306578
cuccucagacuagaaucac

SEQ ID NO: 2306580 - RNA, 19 nt, Artificial Sequence
  Description of Artificial Sequence: Synthetic oligonucleotide
  Sense strand starting at position 3825 of SEQ ID NO: 1884976
gagcaaugaccucaaugug

SEQ ID NO: 2306581 - RNA, 19 nt, Artificial Sequence
  Description of Artificial Sequence: Synthetic oligonucleotide
  Antisense strand to SEQ ID NO: 2306580
cacauugaggucauugcuc

SEQ ID NO: 2306582 - RNA, 19 nt, Artificial Sequence
  Description of Artificial Sequence: Synthetic oligonucleotide
  Sense strand starting at position 64 of SEQ ID NO: 1884977
uaccuuuaguauguaagga

SEQ ID NO: 2306583 - RNA, 19 nt, Artificial Sequence
  Description of Artificial Sequence: Synthetic oligonucleotide
  Antisense strand to SEQ ID NO: 2306582
uccuuacauacuaaaggua

SEQ ID NO: 2306584 - RNA, 19 nt, Artificial Sequence
  Description of Artificial Sequence: Synthetic oligonucleotide
  Sense strand starting at position 419 of SEQ ID NO: 1884977
gaauaaucugggcacgcau

SEQ ID NO: 2306585 - RNA, 19 nt, Artificial Sequence
  Description of Artificial Sequence: Synthetic oligonucleotide
  Antisense strand to SEQ ID NO: 2306584
augcgugcccagauuauuc

SEQ ID NO: 2306586 - RNA, 19 nt, Artificial Sequence
  Description of Artificial Sequence: Synthetic oligonucleotide
  Sense strand starting at position 444 of SEQ ID NO: 1884977
ggccaugacucugcaauuu

SEQ ID NO: 2306587 - RNA, 19 nt, Artificial Sequence
  Description of Artificial Sequence: Synthetic oligonucleotide
  Antisense strand to SEQ ID NO: 2306586
aaauugcagagucauggcc

SEQ ID NO: 2306588 - RNA, 19 nt, Artificial Sequence
  Description of Artificial Sequence: Synthetic oligonucleotide
  Sense strand starting at position 1055 of SEQ ID NO: 1884977
cagcacucacuggguaaga

SEQ ID NO: 2306589 - RNA, 19 nt, Artificial Sequence
  Description of Artificial Sequence: Synthetic oligonucleotide
  Antisense strand to SEQ ID NO: 2306588
ucuuacccagugagugcug

SEQ ID NO: 2306590 - RNA, 19 nt, Artificial Sequence
  Description of Artificial Sequence: Synthetic oligonucleotide
  Sense strand starting at position 1056 of SEQ ID NO: 1884977
agcacucacuggguaagaa

SEQ ID NO: 2306591 - RNA, 19 nt, Artificial Sequence
  Description of Artificial Sequence: Synthetic oligonucleotide
  Antisense strand to SEQ ID NO: 2306590
uucuuacccagugagugcu

SEQ ID NO: 2306592 - RNA, 19 nt, Artificial Sequence
  Description of Artificial Sequence: Synthetic oligonucleotide
  Sense strand starting at position 1094 of SEQ ID NO: 1884977
ggaauauaaacguggagcu

SEQ ID NO: 2306593 - RNA, 19 nt, Artificial Sequence
  Description of Artificial Sequence: Synthetic oligonucleotide
  Antisense strand to SEQ ID NO: 2306592
agcuccacguuuauauucc

SEQ ID NO: 2306594 - RNA, 19 nt, Artificial Sequence
  Description of Artificial Sequence: Synthetic oligonucleotide
  Sense strand starting at position 1326 of SEQ ID NO: 1884977
cuugucacuggcuauaaua

SEQ ID NO: 2306595 - RNA, 19 nt, Artificial Sequence
  Description of Artificial Sequence: Synthetic oligonucleotide
  Antisense strand to SEQ ID NO: 2306594
uauuauagccagugacaag

SEQ ID NO: 2306596 - RNA, 19 nt, Artificial Sequence
  Description of Artificial Sequence: Synthetic oligonucleotide
  Sense strand starting at position 1404 of SEQ ID NO: 1884977
gcaguaguauuauuuagua

SEQ ID NO: 2306597 - RNA, 19 nt, Artificial Sequence
  Description of Artificial Sequence: Synthetic oligonucleotide
  Antisense strand to SEQ ID NO: 2306596
uacuaaauaauacuacugc

SEQ ID NO: 2306598 - RNA, 19 nt, Artificial Sequence
  Description of Artificial Sequence: Synthetic oligonucleotide
  Sense strand starting at position 1481 of SEQ ID NO: 1884977
gccuuacaauaggcauaaa

SEQ ID NO: 2306599 - RNA, 19 nt, Artificial Sequence
  Description of Artificial Sequence: Synthetic oligonucleotide
  Antisense strand to SEQ ID NO: 2306598
uuuaugccuauuguaaggc

SEQ ID NO: 2306600 - RNA, 19 nt, Artificial Sequence
  Description of Artificial Sequence: Synthetic oligonucleotide
  Sense strand starting at position 1500 of SEQ ID NO: 1884977
ggccacuaugcccaugaaa

SEQ ID NO: 2306601 - RNA, 19 nt, Artificial Sequence
  Description of Artificial Sequence: Synthetic oligonucleotide
  Antisense strand to SEQ ID NO: 2306600
uuucaugggcauaguggcc

SEQ ID NO: 2306602 - RNA, 19 nt, Artificial Sequence
  Description of Artificial Sequence: Synthetic oligonucleotide
  Sense strand starting at position 1640 of SEQ ID NO: 1884977
acaggagguuacuuugacu

SEQ ID NO: 2306603 - RNA, 19 nt, Artificial Sequence
  Description of Artificial Sequence: Synthetic oligonucleotide
  Antisense strand to SEQ ID NO: 2306602
agucaaaguaaccuccugu

SEQ ID NO: 2306604 - RNA, 19 nt, Artificial Sequence
  Description of Artificial Sequence: Synthetic oligonucleotide
  Sense strand starting at position 1645 of SEQ ID NO: 1884977
agguuacuuugacuugaaa

SEQ ID NO: 2306605 - RNA, 19 nt, Artificial Sequence
  Description of Artificial Sequence: Synthetic oligonucleotide
  Antisense strand to SEQ ID NO: 2306604
uuucaagucaaaguaaccu

SEQ ID NO: 2306606 - RNA, 19 nt, Artificial Sequence
  Description of Artificial Sequence: Synthetic oligonucleotide
  Sense strand starting at position 1662 of SEQ ID NO: 1884977
aaaggcuaaguuuggaaau

SEQ ID NO: 2306607 - RNA, 19 nt, Artificial Sequence
  Description of Artificial Sequence: Synthetic oligonucleotide
  Antisense strand to SEQ ID NO: 2306606
auuuccaaacuuagccuuu

SEQ ID NO: 2306608 - RNA, 19 nt, Artificial Sequence
  Description of Artificial Sequence: Synthetic oligonucleotide
  Sense strand starting at position 1714 of SEQ ID NO: 1884977
auuccuggaguuugagaaa

SEQ ID NO: 2306609 - RNA, 19 nt, Artificial Sequence
  Description of Artificial Sequence: Synthetic oligonucleotide
  Antisense strand to SEQ ID NO: 2306608
uuucucaaacuccaggaau

SEQ ID NO: 2306610 - RNA, 19 nt, Artificial Sequence
  Description of Artificial Sequence: Synthetic oligonucleotide
  Sense strand starting at position 2180 of SEQ ID NO: 1884977
uagaaacucugguuccuga

SEQ ID NO: 2306611 - RNA, 19 nt, Artificial Sequence
  Description of Artificial Sequence: Synthetic oligonucleotide
  Antisense strand to SEQ ID NO: 2306610
ucaggaaccagaguuucua

SEQ ID NO: 2306612 - RNA, 19 nt, Artificial Sequence
  Description of Artificial Sequence: Synthetic oligonucleotide
  Sense strand starting at position 2252 of SEQ ID NO: 1884977
cucugaauucucgaacauu

SEQ ID NO: 2306613 - RNA, 19 nt, Artificial Sequence
  Description of Artificial Sequence: Synthetic oligonucleotide
  Antisense strand to SEQ ID NO: 2306612
aauguucgagaauucagag

SEQ ID NO: 2306614 - RNA, 19 nt, Artificial Sequence
  Description of Artificial Sequence: Synthetic oligonucleotide
  Sense strand starting at position 2343 of SEQ ID NO: 1884977
auuagcaggcauugacaau

SEQ ID NO: 2306615 - RNA, 19 nt, Artificial Sequence
  Description of Artificial Sequence: Synthetic oligonucleotide
  Antisense strand to SEQ ID NO: 2306614
auugucaaugccugcuaau

SEQ ID NO: 2306616 - RNA, 19 nt, Artificial Sequence
  Description of Artificial Sequence: Synthetic oligonucleotide
  Sense strand starting at position 2433 of SEQ ID NO: 1884977
auguaacccucaguaaaga

SEQ ID NO: 2306617 - RNA, 19 nt, Artificial Sequence
  Description of Artificial Sequence: Synthetic oligonucleotide
  Antisense strand to SEQ ID NO: 2306616
ucuuuacugaggguuacau

SEQ ID NO: 2306618 - RNA, 19 nt, Artificial Sequence
  Description of Artificial Sequence: Synthetic oligonucleotide
  Sense strand starting at position 2434 of SEQ ID NO: 1884977
uguaacccucaguaaagau

SEQ ID NO: 2306619 - RNA, 19 nt, Artificial Sequence
  Description of Artificial Sequence: Synthetic oligonucleotide
  Antisense strand to SEQ ID NO: 2306618
aucuuuacugaggguuaca

SEQ ID NO: 2306620 - RNA, 19 nt, Artificial Sequence
  Description of Artificial Sequence: Synthetic oligonucleotide
  Sense strand starting at position 2485 of SEQ ID NO: 1884977
caauuugcuuugucacgau

SEQ ID NO: 2306621 - RNA, 19 nt, Artificial Sequence
  Description of Artificial Sequence: Synthetic oligonucleotide
  Antisense strand to SEQ ID NO: 2306620
aucgugacaaagcaaauug

SEQ ID NO: 2306622 - RNA, 19 nt, Artificial Sequence
  Description of Artificial Sequence: Synthetic oligonucleotide
  Sense strand starting at position 2548 of SEQ ID NO: 1884977
acuggaucagcucauuaca

SEQ ID NO: 2306623 - RNA, 19 nt, Artificial Sequence
  Description of Artificial Sequence: Synthetic oligonucleotide
  Antisense strand to SEQ ID NO: 2306622
uguaaugagcugauccagu

SEQ ID NO: 2306624 - RNA, 19 nt, Artificial Sequence
  Description of Artificial Sequence: Synthetic oligonucleotide
  Sense strand starting at position 2593 of SEQ ID NO: 1884977
ggagguuuagaggaacguu

SEQ ID NO: 2306625 - RNA, 19 nt, Artificial Sequence
  Description of Artificial Sequence: Synthetic oligonucleotide
  Antisense strand to SEQ ID NO: 2306624
aacguuccucuaaaccucc

SEQ ID NO: 2306626 - RNA, 19 nt, Artificial Sequence
  Description of Artificial Sequence: Synthetic oligonucleotide
  Sense strand starting at position 2619 of SEQ ID NO: 1884977
gccguagauauuuagccua

SEQ ID NO: 2306627 - RNA, 19 nt, Artificial Sequence
  Description of Artificial Sequence: Synthetic oligonucleotide
  Antisense strand to SEQ ID NO: 2306626
uaggcuaaauaucuacggc

SEQ ID NO: 2306628 - RNA, 19 nt, Artificial Sequence
  Description of Artificial Sequence: Synthetic oligonucleotide
  Sense strand starting at position 2842 of SEQ ID NO: 1884977
uccuuuaggcuuuaaagga

SEQ ID NO: 2306629 - RNA, 19 nt, Artificial Sequence
  Description of Artificial Sequence: Synthetic oligonucleotide
  Antisense strand to SEQ ID NO: 2306628
uccuuuaaagccuaaagga

SEQ ID NO: 2306630 - RNA, 19 nt, Artificial Sequence
  Description of Artificial Sequence: Synthetic oligonucleotide
  Sense strand starting at position 2876 of SEQ ID NO: 1884977
cuuucuaggaugugaugga

SEQ ID NO: 2306631 - RNA, 19 nt, Artificial Sequence
  Description of Artificial Sequence: Synthetic oligonucleotide
  Antisense strand to SEQ ID NO: 2306630
uccaucacauccuagaaag

SEQ ID NO: 2306632 - RNA, 19 nt, Artificial Sequence
  Description of Artificial Sequence: Synthetic oligonucleotide
  Sense strand starting at position 2928 of SEQ ID NO: 1884977
accaguuugcucuaggaac

SEQ ID NO: 2306633 - RNA, 19 nt, Artificial Sequence
  Description of Artificial Sequence: Synthetic oligonucleotide
  Antisense strand to SEQ ID NO: 2306632
guuccuagagcaaacuggu

SEQ ID NO: 2306634 - RNA, 19 nt, Artificial Sequence
  Description of Artificial Sequence: Synthetic oligonucleotide
  Sense strand starting at position 3085 of SEQ ID NO: 1884977
cuuuguaaaguauacuaga

SEQ ID NO: 2306635 - RNA, 19 nt, Artificial Sequence
  Description of Artificial Sequence: Synthetic oligonucleotide
  Antisense strand to SEQ ID NO: 2306634
ucuaguauacuuuacaaag

SEQ ID NO: 2306636 - RNA, 19 nt, Artificial Sequence
  Description of Artificial Sequence: Synthetic oligonucleotide
  Sense strand starting at position 3096 of SEQ ID NO: 1884977
auacuagaaucugucugua

SEQ ID NO: 2306637 - RNA, 19 nt, Artificial Sequence
  Description of Artificial Sequence: Synthetic oligonucleotide
  Antisense strand to SEQ ID NO: 2306636
uacagacagauucuaguau

SEQ ID NO: 2306638 - RNA, 19 nt, Artificial Sequence
  Description of Artificial Sequence: Synthetic oligonucleotide
  Sense strand starting at position 3098 of SEQ ID NO: 1884977
acuagaaucugucuguaac

SEQ ID NO: 2306639 - RNA, 19 nt, Artificial Sequence
  Description of Artificial Sequence: Synthetic oligonucleotide
  Antisense strand to SEQ ID NO: 2306638
guuacagacagauucuagu

SEQ ID NO: 2306640 - RNA, 19 nt, Artificial Sequence
  Description of Artificial Sequence: Synthetic oligonucleotide
  Sense strand starting at position 3110 of SEQ ID NO: 1884977
cuguaacauuaacuggaau

SEQ ID NO: 2306641 - RNA, 19 nt, Artificial Sequence
  Description of Artificial Sequence: Synthetic oligonucleotide
  Antisense strand to SEQ ID NO: 2306640
auuccaguuaauguuacag

SEQ ID NO: 2306642 - RNA, 19 nt, Artificial Sequence
  Description of Artificial Sequence: Synthetic oligonucleotide
  Sense strand starting at position 3159 of SEQ ID NO: 1884977
ucugaauucucuccaaagg

SEQ ID NO: 2306643 - RNA, 19 nt, Artificial Sequence
  Description of Artificial Sequence: Synthetic oligonucleotide
  Antisense strand to SEQ ID NO: 2306642
ccuuuggagagaauucaga

SEQ ID NO: 2306644 - RNA, 19 nt, Artificial Sequence
  Description of Artificial Sequence: Synthetic oligonucleotide
  Sense strand starting at position 3170 of SEQ ID NO: 1884977
uccaaaggaguuugguauu

SEQ ID NO: 2306645 - RNA, 19 nt, Artificial Sequence
  Description of Artificial Sequence: Synthetic oligonucleotide
  Antisense strand to SEQ ID NO: 2306644
aauaccaaacuccuuugga

SEQ ID NO: 2306646 - RNA, 19 nt, Artificial Sequence
  Description of Artificial Sequence: Synthetic oligonucleotide
  Sense strand starting at position 3222 of SEQ ID NO: 1884977
ggugauacaggccaaaucu

SEQ ID NO: 2306647 - RNA, 19 nt, Artificial Sequence
  Description of Artificial Sequence: Synthetic oligonucleotide
  Antisense strand to SEQ ID NO: 2306646
agauuuggccuguaucacc

SEQ ID NO: 2306648 - RNA, 19 nt, Artificial Sequence
  Description of Artificial Sequence: Synthetic oligonucleotide
  Sense strand starting at position 3270 of SEQ ID NO: 1884977
gagagcuacuguuuagaua

SEQ ID NO: 2306649 - RNA, 19 nt, Artificial Sequence
  Description of Artificial Sequence: Synthetic oligonucleotide
  Antisense strand to SEQ ID NO: 2306648
uaucuaaacaguagcucuc

SEQ ID NO: 2306650 - RNA, 19 nt, Artificial Sequence
  Description of Artificial Sequence: Synthetic oligonucleotide
  Sense strand starting at position 3271 of SEQ ID NO: 1884977
agagcuacuguuuagauaa

SEQ ID NO: 2306651 - RNA, 19 nt, Artificial Sequence
  Description of Artificial Sequence: Synthetic oligonucleotide
  Antisense strand to SEQ ID NO: 2306650
uuaucuaaacaguagcucu

SEQ ID NO: 2306652 - RNA, 19 nt, Artificial Sequence
  Description of Artificial Sequence: Synthetic oligonucleotide
  Sense strand starting at position 3298 of SEQ ID NO: 1884977
acagaaugcuaguugaaug

SEQ ID NO: 2306653 - RNA, 19 nt, Artificial Sequence
  Description of Artificial Sequence: Synthetic oligonucleotide
  Antisense strand to SEQ ID NO: 2306652
cauucaacuagcauucugu

SEQ ID NO: 2306654 - RNA, 19 nt, Artificial Sequence
  Description of Artificial Sequence: Synthetic oligonucleotide
  Sense strand starting at position 3430 of SEQ ID NO: 1884977
cguuauccugccucagcau

SEQ ID NO: 2306655 - RNA, 19 nt, Artificial Sequence
  Description of Artificial Sequence: Synthetic oligonucleotide
  Antisense strand to SEQ ID NO: 2306654
augcugaggcaggauaacg

SEQ ID NO: 2306656 - RNA, 19 nt, Artificial Sequence
  Description of Artificial Sequence: Synthetic oligonucleotide
  Sense strand starting at position 3656 of SEQ ID NO: 1884977
gcacuugacucaucuaaug

SEQ ID NO: 2306657 - RNA, 19 nt, Artificial Sequence
  Description of Artificial Sequence: Synthetic oligonucleotide
  Antisense strand to SEQ ID NO: 2306656
cauuagaugagucaagugc

SEQ ID NO: 2306658 - RNA, 19 nt, Artificial Sequence
  Description of Artificial Sequence: Synthetic oligonucleotide
  Sense strand starting at position 3801 of SEQ ID NO: 1884977
uguaucaggcaauauuaua

SEQ ID NO: 2306659 - RNA, 19 nt, Artificial Sequence
  Description of Artificial Sequence: Synthetic oligonucleotide
  Antisense strand to SEQ ID NO: 2306658
uauaauauugccugauaca

SEQ ID NO: 2306660 - RNA, 19 nt, Artificial Sequence
  Description of Artificial Sequence: Synthetic oligonucleotide
  Sense strand starting at position 3957 of SEQ ID NO: 1884977
agagcuguccuccaggauu

SEQ ID NO: 2306661 - RNA, 19 nt, Artificial Sequence
  Description of Artificial Sequence: Synthetic oligonucleotide
  Antisense strand to SEQ ID NO: 2306660
aauccuggaggacagcucu

SEQ ID NO: 2306662 - RNA, 19 nt, Artificial Sequence
  Description of Artificial Sequence: Synthetic oligonucleotide
  Sense strand starting at position 49 of SEQ ID NO: 1884978
cuguuaaaugcuguguguu

SEQ ID NO: 2306663 - RNA, 19 nt, Artificial Sequence
  Description of Artificial Sequence: Synthetic oligonucleotide
  Antisense strand to SEQ ID NO: 2306662
aacacacagcauuuaacag

SEQ ID NO: 2306664 - RNA, 19 nt, Artificial Sequence
  Description of Artificial Sequence: Synthetic oligonucleotide
  Sense strand starting at position 199 of SEQ ID NO: 1884978
uaccuuuaguauguaagga

SEQ ID NO: 2306665 - RNA, 19 nt, Artificial Sequence
  Description of Artificial Sequence: Synthetic oligonucleotide
  Antisense strand to SEQ ID NO: 2306664
uccuuacauacuaaaggua

SEQ ID NO: 2306666 - RNA, 19 nt, Artificial Sequence
  Description of Artificial Sequence: Synthetic oligonucleotide
  Sense strand starting at position 554 of SEQ ID NO: 1884978
gaauaaucugggcacgcau

SEQ ID NO: 2306667 - RNA, 19 nt, Artificial Sequence
  Description of Artificial Sequence: Synthetic oligonucleotide
  Antisense strand to SEQ ID NO: 2306666
augcgugcccagauuauuc

SEQ ID NO: 2306668 - RNA, 19 nt, Artificial Sequence
  Description of Artificial Sequence: Synthetic oligonucleotide
  Sense strand starting at position 579 of SEQ ID NO: 1884978
ggccaugacucugcaauuu

SEQ ID NO: 2306669 - RNA, 19 nt, Artificial Sequence
  Description of Artificial Sequence: Synthetic oligonucleotide
  Antisense strand to SEQ ID NO: 2306668
aaauugcagagucauggcc

SEQ ID NO: 2306670 - RNA, 19 nt, Artificial Sequence
  Description of Artificial Sequence: Synthetic oligonucleotide
  Sense strand starting at position 1190 of SEQ ID NO: 1884978
cagcacucacuggguaaga

SEQ ID NO: 2306671 - RNA, 19 nt, Artificial Sequence
  Description of Artificial Sequence: Synthetic oligonucleotide
  Antisense strand to SEQ ID NO: 2306670
ucuuacccagugagugcug

SEQ ID NO: 2306672 - RNA, 19 nt, Artificial Sequence
  Description of Artificial Sequence: Synthetic oligonucleotide
  Sense strand starting at position 1191 of SEQ ID NO: 1884978
agcacucacuggguaagaa

SEQ ID NO: 2306673 - RNA, 19 nt, Artificial Sequence
  Description of Artificial Sequence: Synthetic oligonucleotide
  Antisense strand to SEQ ID NO: 2306672
uucuuacccagugagugcu

SEQ ID NO: 2306674 - RNA, 19 nt, Artificial Sequence
  Description of Artificial Sequence: Synthetic oligonucleotide
  Sense strand starting at position 1229 of SEQ ID NO: 1884978
ggaauauaaacguggagcu

SEQ ID NO: 2306675 - RNA, 19 nt, Artificial Sequence
  Description of Artificial Sequence: Synthetic oligonucleotide
  Antisense strand to SEQ ID NO: 2306674
agcuccacguuuauauucc

SEQ ID NO: 2306676 - RNA, 19 nt, Artificial Sequence
  Description of Artificial Sequence: Synthetic oligonucleotide
  Sense strand starting at position 1461 of SEQ ID NO: 1884978
cuugucacuggcuauaaua

SEQ ID NO: 2306677 - RNA, 19 nt, Artificial Sequence
  Description of Artificial Sequence: Synthetic oligonucleotide
  Antisense strand to SEQ ID NO: 2306676
uauuauagccagugacaag

SEQ ID NO: 2306678 - RNA, 19 nt, Artificial Sequence
  Description of Artificial Sequence: Synthetic oligonucleotide
  Sense strand starting at position 1539 of SEQ ID NO: 1884978
gcaguaguauuauuuagua

SEQ ID NO: 2306679 - RNA, 19 nt, Artificial Sequence
  Description of Artificial Sequence: Synthetic oligonucleotide
  Antisense strand to SEQ ID NO: 2306678
uacuaaauaauacuacugc

SEQ ID NO: 2306680 - RNA, 19 nt, Artificial Sequence
  Description of Artificial Sequence: Synthetic oligonucleotide
  Sense strand starting at position 1616 of SEQ ID NO: 1884978
gccuuacaauaggcauaaa

SEQ ID NO: 2306681 - RNA, 19 nt, Artificial Sequence
  Description of Artificial Sequence: Synthetic oligonucleotide
  Antisense strand to SEQ ID NO: 2306680
uuuaugccuauuguaaggc

SEQ ID NO: 2306682 - RNA, 19 nt, Artificial Sequence
  Description of Artificial Sequence: Synthetic oligonucleotide
  Sense strand starting at position 1635 of SEQ ID NO: 1884978
ggccacuaugcccaugaaa

SEQ ID NO: 2306683 - RNA, 19 nt, Artificial Sequence
  Description of Artificial Sequence: Synthetic oligonucleotide
  Antisense strand to SEQ ID NO: 2306682
uuucaugggcauaguggcc

SEQ ID NO: 2306684 - RNA, 19 nt, Artificial Sequence
  Description of Artificial Sequence: Synthetic oligonucleotide
  Sense strand starting at position 1775 of SEQ ID NO: 1884978
acaggagguuacuuugacu

SEQ ID NO: 2306685 - RNA, 19 nt, Artificial Sequence
  Description of Artificial Sequence: Synthetic oligonucleotide
  Antisense strand to SEQ ID NO: 2306684
agucaaaguaaccuccugu

SEQ ID NO: 2306686 - RNA, 19 nt, Artificial Sequence
  Description of Artificial Sequence: Synthetic oligonucleotide
  Sense strand starting at position 1780 of SEQ ID NO: 1884978
agguuacuuugacuugaaa

SEQ ID NO: 2306687 - RNA, 19 nt, Artificial Sequence
  Description of Artificial Sequence: Synthetic oligonucleotide
  Antisense strand to SEQ ID NO: 2306686
uuucaagucaaaguaaccu

SEQ ID NO: 2306688 - RNA, 19 nt, Artificial Sequence
  Description of Artificial Sequence: Synthetic oligonucleotide
  Sense strand starting at position 1797 of SEQ ID NO: 1884978
aaaggcuaaguuuggaaau

SEQ ID NO: 2306689 - RNA, 19 nt, Artificial Sequence
  Description of Artificial Sequence: Synthetic oligonucleotide
  Antisense strand to SEQ ID NO: 2306688
auuuccaaacuuagccuuu

SEQ ID NO: 2306690 - RNA, 19 nt, Artificial Sequence
  Description of Artificial Sequence: Synthetic oligonucleotide
  Sense strand starting at position 1849 of SEQ ID NO: 1884978
auuccuggaguuugagaaa

SEQ ID NO: 2306691 - RNA, 19 nt, Artificial Sequence
  Description of Artificial Sequence: Synthetic oligonucleotide
  Antisense strand to SEQ ID NO: 2306690
uuucucaaacuccaggaau

SEQ ID NO: 2306692 - RNA, 19 nt, Artificial Sequence
  Description of Artificial Sequence: Synthetic oligonucleotide
  Sense strand starting at position 2315 of SEQ ID NO: 1884978
uagaaacucugguuccuga

SEQ ID NO: 2306693 - RNA, 19 nt, Artificial Sequence
  Description of Artificial Sequence: Synthetic oligonucleotide
  Antisense strand to SEQ ID NO: 2306692
ucaggaaccagaguuucua

SEQ ID NO: 2306694 - RNA, 19 nt, Artificial Sequence
  Description of Artificial Sequence: Synthetic oligonucleotide
  Sense strand starting at position 2387 of SEQ ID NO: 1884978
cucugaauucucgaacauu

SEQ ID NO: 2306695 - RNA, 19 nt, Artificial Sequence
  Description of Artificial Sequence: Synthetic oligonucleotide
  Antisense strand to SEQ ID NO: 2306694
aauguucgagaauucagag

SEQ ID NO: 2306696 - RNA, 19 nt, Artificial Sequence
  Description of Artificial Sequence: Synthetic oligonucleotide
  Sense strand starting at position 2478 of SEQ ID NO: 1884978
auuagcaggcauugacaau

SEQ ID NO: 2306697 - RNA, 19 nt, Artificial Sequence
  Description of Artificial Sequence: Synthetic oligonucleotide
  Antisense strand to SEQ ID NO: 2306696
auugucaaugccugcuaau

SEQ ID NO: 2306698 - RNA, 19 nt, Artificial Sequence
  Description of Artificial Sequence: Synthetic oligonucleotide
  Sense strand starting at position 2568 of SEQ ID NO: 1884978
auguaacccucaguaaaga

SEQ ID NO: 2306699 - RNA, 19 nt, Artificial Sequence
  Description of Artificial Sequence: Synthetic oligonucleotide
  Antisense strand to SEQ ID NO: 2306698
ucuuuacugaggguuacau

SEQ ID NO: 2306700 - RNA, 19 nt, Artificial Sequence
  Description of Artificial Sequence: Synthetic oligonucleotide
  Sense strand starting at position 2569 of SEQ ID NO: 1884978
uguaacccucaguaaagau

SEQ ID NO: 2306701 - RNA, 19 nt, Artificial Sequence
  Description of Artificial Sequence: Synthetic oligonucleotide
  Antisense strand to SEQ ID NO: 2306700
aucuuuacugaggguuaca

SEQ ID NO: 2306702 - RNA, 19 nt, Artificial Sequence
  Description of Artificial Sequence: Synthetic oligonucleotide
  Sense strand starting at position 2620 of SEQ ID NO: 1884978
caauuugcuuugucacgau

SEQ ID NO: 2306703 - RNA, 19 nt, Artificial Sequence
  Description of Artificial Sequence: Synthetic oligonucleotide
  Antisense strand to SEQ ID NO: 2306702
aucgugacaaagcaaauug

SEQ ID NO: 2306704 - RNA, 19 nt, Artificial Sequence
  Description of Artificial Sequence: Synthetic oligonucleotide
  Sense strand starting at position 2683 of SEQ ID NO: 1884978
acuggaucagcucauuaca

SEQ ID NO: 2306705 - RNA, 19 nt, Artificial Sequence
  Description of Artificial Sequence: Synthetic oligonucleotide
  Antisense strand to SEQ ID NO: 2306704
uguaaugagcugauccagu

SEQ ID NO: 2306706 - RNA, 19 nt, Artificial Sequence
  Description of Artificial Sequence: Synthetic oligonucleotide
  Sense strand starting at position 2728 of SEQ ID NO: 1884978
ggagguuuagaggaacguu

SEQ ID NO: 2306707 - RNA, 19 nt, Artificial Sequence
  Description of Artificial Sequence: Synthetic oligonucleotide
  Antisense strand to SEQ ID NO: 2306706
aacguuccucuaaaccucc

SEQ ID NO: 2306708 - RNA, 19 nt, Artificial Sequence
  Description of Artificial Sequence: Synthetic oligonucleotide
  Sense strand starting at position 2754 of SEQ ID NO: 1884978
gccguagauauuuagccua

SEQ ID NO: 2306709 - RNA, 19 nt, Artificial Sequence
  Description of Artificial Sequence: Synthetic oligonucleotide
  Antisense strand to SEQ ID NO: 2306708
uaggcuaaauaucuacggc

SEQ ID NO: 2306710 - RNA, 19 nt, Artificial Sequence
  Description of Artificial Sequence: Synthetic oligonucleotide
  Sense strand starting at position 2977 of SEQ ID NO: 1884978
uccuuuaggcuuuaaagga

SEQ ID NO: 2306711 - RNA, 19 nt, Artificial Sequence
  Description of Artificial Sequence: Synthetic oligonucleotide
  Antisense strand to SEQ ID NO: 2306710
uccuuuaaagccuaaagga

SEQ ID NO: 2306712 - RNA, 19 nt, Artificial Sequence
  Description of Artificial Sequence: Synthetic oligonucleotide
  Sense strand starting at position 3011 of SEQ ID NO: 1884978
cuuucuaggaugugaugga

SEQ ID NO: 2306713 - RNA, 19 nt, Artificial Sequence
  Description of Artificial Sequence: Synthetic oligonucleotide
  Antisense strand to SEQ ID NO: 2306712
uccaucacauccuagaaag

SEQ ID NO: 2306714 - RNA, 19 nt, Artificial Sequence
  Description of Artificial Sequence: Synthetic oligonucleotide
  Sense strand starting at position 3063 of SEQ ID NO: 1884978
accaguuugcucuaggaac

SEQ ID NO: 2306715 - RNA, 19 nt, Artificial Sequence
  Description of Artificial Sequence: Synthetic oligonucleotide
  Antisense strand to SEQ ID NO: 2306714
guuccuagagcaaacuggu

SEQ ID NO: 2306716 - RNA, 19 nt, Artificial Sequence
  Description of Artificial Sequence: Synthetic oligonucleotide
  Sense strand starting at position 3220 of SEQ ID NO: 1884978
cuuuguaaaguauacuaga

SEQ ID NO: 2306717 - RNA, 19 nt, Artificial Sequence
  Description of Artificial Sequence: Synthetic oligonucleotide
  Antisense strand to SEQ ID NO: 2306716
ucuaguauacuuuacaaag

SEQ ID NO: 2306718 - RNA, 19 nt, Artificial Sequence
  Description of Artificial Sequence: Synthetic oligonucleotide
  Sense strand starting at position 3231 of SEQ ID NO: 1884978
auacuagaaucugucugua

SEQ ID NO: 2306719 - RNA, 19 nt, Artificial Sequence
  Description of Artificial Sequence: Synthetic oligonucleotide
  Antisense strand to SEQ ID NO: 2306718
uacagacagauucuaguau

SEQ ID NO: 2306720 - RNA, 19 nt, Artificial Sequence
  Description of Artificial Sequence: Synthetic oligonucleotide
  Sense strand starting at position 3233 of SEQ ID NO: 1884978
acuagaaucugucuguaac

SEQ ID NO: 2306721 - RNA, 19 nt, Artificial Sequence
  Description of Artificial Sequence: Synthetic oligonucleotide
  Antisense strand to SEQ ID NO: 2306720
guuacagacagauucuagu

SEQ ID NO: 2306722 - RNA, 19 nt, Artificial Sequence
  Description of Artificial Sequence: Synthetic oligonucleotide
  Sense strand starting at position 3245 of SEQ ID NO: 1884978
cuguaacauuaacuggaau

SEQ ID NO: 2306723 - RNA, 19 nt, Artificial Sequence
  Description of Artificial Sequence: Synthetic oligonucleotide
  Antisense strand to SEQ ID NO: 2306722
auuccaguuaauguuacag

SEQ ID NO: 2306724 - RNA, 19 nt, Artificial Sequence
  Description of Artificial Sequence: Synthetic oligonucleotide
  Sense strand starting at position 3294 of SEQ ID NO: 1884978
ucugaauucucuccaaagg

SEQ ID NO: 2306725 - RNA, 19 nt, Artificial Sequence
  Description of Artificial Sequence: Synthetic oligonucleotide
  Antisense strand to SEQ ID NO: 2306724
ccuuuggagagaauucaga

SEQ ID NO: 2306726 - RNA, 19 nt, Artificial Sequence
  Description of Artificial Sequence: Synthetic oligonucleotide
  Sense strand starting at position 3305 of SEQ ID NO: 1884978
uccaaaggaguuugguauu

SEQ ID NO: 2306727 - RNA, 19 nt, Artificial Sequence
  Description of Artificial Sequence: Synthetic oligonucleotide
  Antisense strand to SEQ ID NO: 2306726
aauaccaaacuccuuugga

SEQ ID NO: 2306728 - RNA, 19 nt, Artificial Sequence
  Description of Artificial Sequence: Synthetic oligonucleotide
  Sense strand starting at position 3357 of SEQ ID NO: 1884978
ggugauacaggccaaaucu

SEQ ID NO: 2306729 - RNA, 19 nt, Artificial Sequence
  Description of Artificial Sequence: Synthetic oligonucleotide
  Antisense strand to SEQ ID NO: 2306728
agauuuggccuguaucacc

SEQ ID NO: 2306730 - RNA, 19 nt, Artificial Sequence
  Description of Artificial Sequence: Synthetic oligonucleotide
  Sense strand starting at position 3405 of SEQ ID NO: 1884978
gagagcuacuguuuagaua

SEQ ID NO: 2306731 - RNA, 19 nt, Artificial Sequence
  Description of Artificial Sequence: Synthetic oligonucleotide
  Antisense strand to SEQ ID NO: 2306730
uaucuaaacaguagcucuc

SEQ ID NO: 2306732 - RNA, 19 nt, Artificial Sequence
  Description of Artificial Sequence: Synthetic oligonucleotide
  Sense strand starting at position 3406 of SEQ ID NO: 1884978
agagcuacuguuuagauaa

SEQ ID NO: 2306733 - RNA, 19 nt, Artificial Sequence
  Description of Artificial Sequence: Synthetic oligonucleotide
  Antisense strand to SEQ ID NO: 2306732
uuaucuaaacaguagcucu

SEQ ID NO: 2306734 - RNA, 19 nt, Artificial Sequence
  Description of Artificial Sequence: Synthetic oligonucleotide
  Sense strand starting at position 3433 of SEQ ID NO: 1884978
acagaaugcuaguugaaug

SEQ ID NO: 2306735 - RNA, 19 nt, Artificial Sequence
  Description of Artificial Sequence: Synthetic oligonucleotide
  Antisense strand to SEQ ID NO: 2306734
cauucaacuagcauucugu

SEQ ID NO: 2306736 - RNA, 19 nt, Artificial Sequence
  Description of Artificial Sequence: Synthetic oligonucleotide
  Sense strand starting at position 3565 of SEQ ID NO: 1884978
cguuauccugccucagcau

SEQ ID NO: 2306737 - RNA, 19 nt, Artificial Sequence
  Description of Artificial Sequence: Synthetic oligonucleotide
  Antisense strand to SEQ ID NO: 2306736
augcugaggcaggauaacg

SEQ ID NO: 2306738 - RNA, 19 nt, Artificial Sequence
  Description of Artificial Sequence: Synthetic oligonucleotide
  Sense strand starting at position 3791 of SEQ ID NO: 1884978
gcacuugacucaucuaaug

SEQ ID NO: 2306739 - RNA, 19 nt, Artificial Sequence
  Description of Artificial Sequence: Synthetic oligonucleotide
  Antisense strand to SEQ ID NO: 2306738
cauuagaugagucaagugc

SEQ ID NO: 2306740 - RNA, 19 nt, Artificial Sequence
  Description of Artificial Sequence: Synthetic oligonucleotide
  Sense strand starting at position 3936 of SEQ ID NO: 1884978
uguaucaggcaauauuaua

SEQ ID NO: 2306741 - RNA, 19 nt, Artificial Sequence
  Description of Artificial Sequence: Synthetic oligonucleotide
  Antisense strand to SEQ ID NO: 2306740
uauaauauugccugauaca

SEQ ID NO: 2306742 - RNA, 19 nt, Artificial Sequence
  Description of Artificial Sequence: Synthetic oligonucleotide
  Sense strand starting at position 606 of SEQ ID NO: 1884979
ucaguauguaugggacauc

SEQ ID NO: 2306743 - RNA, 19 nt, Artificial Sequence
  Description of Artificial Sequence: Synthetic oligonucleotide
  Antisense strand to SEQ ID NO: 2306742
gaugucccauacauacuga

SEQ ID NO: 2306744 - RNA, 19 nt, Artificial Sequence
  Description of Artificial Sequence: Synthetic oligonucleotide
  Sense strand starting at position 609 of SEQ ID NO: 1884979
guauguaugggacaucuag

SEQ ID NO: 2306745 - RNA, 19 nt, Artificial Sequence
  Description of Artificial Sequence: Synthetic oligonucleotide
  Antisense strand to SEQ ID NO: 2306744
cuagaugucccauacauac

SEQ ID NO: 2306746 - RNA, 19 nt, Artificial Sequence
  Description of Artificial Sequence: Synthetic oligonucleotide
  Sense strand starting at position 616 of SEQ ID NO: 1884979
ugggacaucuaggagauuu

SEQ ID NO: 2306747 - RNA, 19 nt, Artificial Sequence
  Description of Artificial Sequence: Synthetic oligonucleotide
  Antisense strand to SEQ ID NO: 2306746
aaaucuccuagauguccca

SEQ ID NO: 2306748 - RNA, 19 nt, Artificial Sequence
  Description of Artificial Sequence: Synthetic oligonucleotide
  Sense strand starting at position 1157 of SEQ ID NO: 1884979
aagugugucagaugaguag

SEQ ID NO: 2306749 - RNA, 19 nt, Artificial Sequence
  Description of Artificial Sequence: Synthetic oligonucleotide
  Antisense strand to SEQ ID NO: 2306748
cuacucaucugacacacuu

SEQ ID NO: 2306750 - RNA, 19 nt, Artificial Sequence
  Description of Artificial Sequence: Synthetic oligonucleotide
  Sense strand starting at position 1161 of SEQ ID NO: 1884979
gugucagaugaguagcaca

SEQ ID NO: 2306751 - RNA, 19 nt, Artificial Sequence
  Description of Artificial Sequence: Synthetic oligonucleotide
  Antisense strand to SEQ ID NO: 2306750
ugugcuacucaucugacac

SEQ ID NO: 2306752 - RNA, 19 nt, Artificial Sequence
  Description of Artificial Sequence: Synthetic oligonucleotide
  Sense strand starting at position 1166 of SEQ ID NO: 1884979
agaugaguagcacagucaa

SEQ ID NO: 2306753 - RNA, 19 nt, Artificial Sequence
  Description of Artificial Sequence: Synthetic oligonucleotide
  Antisense strand to SEQ ID NO: 2306752
uugacugugcuacucaucu

SEQ ID NO: 2306754 - RNA, 19 nt, Artificial Sequence
  Description of Artificial Sequence: Synthetic oligonucleotide
  Sense strand starting at position 1199 of SEQ ID NO: 1884979
ugcggauuuauggguuagu

SEQ ID NO: 2306755 - RNA, 19 nt, Artificial Sequence
  Description of Artificial Sequence: Synthetic oligonucleotide
  Antisense strand to SEQ ID NO: 2306754
acuaacccauaaauccgca

SEQ ID NO: 2306756 - RNA, 19 nt, Artificial Sequence
  Description of Artificial Sequence: Synthetic oligonucleotide
  Sense strand starting at position 1200 of SEQ ID NO: 1884979
gcggauuuauggguuaguu

SEQ ID NO: 2306757 - RNA, 19 nt, Artificial Sequence
  Description of Artificial Sequence: Synthetic oligonucleotide
  Antisense strand to SEQ ID NO: 2306756
aacuaacccauaaauccgc

SEQ ID NO: 2306758 - RNA, 19 nt, Artificial Sequence
  Description of Artificial Sequence: Synthetic oligonucleotide
  Sense strand starting at position 1210 of SEQ ID NO: 1884979
ggguuaguugacugaggca

SEQ ID NO: 2306759 - RNA, 19 nt, Artificial Sequence
  Description of Artificial Sequence: Synthetic oligonucleotide
  Antisense strand to SEQ ID NO: 2306758
ugccucagucaacuaaccc

SEQ ID NO: 2306760 - RNA, 19 nt, Artificial Sequence
  Description of Artificial Sequence: Synthetic oligonucleotide
  Sense strand starting at position 1242 of SEQ ID NO: 1884979
gguguauuagcagguggaa

SEQ ID NO: 2306761 - RNA, 19 nt, Artificial Sequence
  Description of Artificial Sequence: Synthetic oligonucleotide
  Antisense strand to SEQ ID NO: 2306760
uuccaccugcuaauacacc

SEQ ID NO: 2306762 - RNA, 19 nt, Artificial Sequence
  Description of Artificial Sequence: Synthetic oligonucleotide
  Sense strand starting at position 1244 of SEQ ID NO: 1884979
uguauuagcagguggaauc

SEQ ID NO: 2306763 - RNA, 19 nt, Artificial Sequence
  Description of Artificial Sequence: Synthetic oligonucleotide
  Antisense strand to SEQ ID NO: 2306762
gauuccaccugcuaauaca

SEQ ID NO: 2306764 - RNA, 19 nt, Artificial Sequence
  Description of Artificial Sequence: Synthetic oligonucleotide
  Sense strand starting at position 1296 of SEQ ID NO: 1884979
gagaccuauagaugugagu

SEQ ID NO: 2306765 - RNA, 19 nt, Artificial Sequence
  Description of Artificial Sequence: Synthetic oligonucleotide
  Antisense strand to SEQ ID NO: 2306764
acucacaucuauaggucuc

SEQ ID NO: 2306766 - RNA, 19 nt, Artificial Sequence
  Description of Artificial Sequence: Synthetic oligonucleotide
  Sense strand starting at position 1302 of SEQ ID NO: 1884979
uauagaugugaguaucgca

SEQ ID NO: 2306767 - RNA, 19 nt, Artificial Sequence
  Description of Artificial Sequence: Synthetic oligonucleotide
  Antisense strand to SEQ ID NO: 2306766
ugcgauacucacaucuaua

SEQ ID NO: 2306768 - RNA, 19 nt, Artificial Sequence
  Description of Artificial Sequence: Synthetic oligonucleotide
  Sense strand starting at position 1310 of SEQ ID NO: 1884979
ugaguaucgcaccaauaac

SEQ ID NO: 2306769 - RNA, 19 nt, Artificial Sequence
  Description of Artificial Sequence: Synthetic oligonucleotide
  Antisense strand to SEQ ID NO: 2306768
guuauuggugcgauacuca

SEQ ID NO: 2306770 - RNA, 19 nt, Artificial Sequence
  Description of Artificial Sequence: Synthetic oligonucleotide
  Sense strand starting at position 1338 of SEQ ID NO: 1884979
agucauuugguuuguaagu

SEQ ID NO: 2306771 - RNA, 19 nt, Artificial Sequence
  Description of Artificial Sequence: Synthetic oligonucleotide
  Antisense strand to SEQ ID NO: 2306770
acuuacaaaccaaaugacu

SEQ ID NO: 2306772 - RNA, 19 nt, Artificial Sequence
  Description of Artificial Sequence: Synthetic oligonucleotide
  Sense strand starting at position 1339 of SEQ ID NO: 1884979
gucauuugguuuguaaguu

SEQ ID NO: 2306773 - RNA, 19 nt, Artificial Sequence
  Description of Artificial Sequence: Synthetic oligonucleotide
  Antisense strand to SEQ ID NO: 2306772
aacuuacaaaccaaaugac

SEQ ID NO: 2306774 - RNA, 19 nt, Artificial Sequence
  Description of Artificial Sequence: Synthetic oligonucleotide
  Sense strand starting at position 1512 of SEQ ID NO: 1884979
uugaucccuccaggacaau

SEQ ID NO: 2306775 - RNA, 19 nt, Artificial Sequence
  Description of Artificial Sequence: Synthetic oligonucleotide
  Antisense strand to SEQ ID NO: 2306774
auuguccuggagggaucaa

SEQ ID NO: 2306776 - RNA, 19 nt, Artificial Sequence
  Description of Artificial Sequence: Synthetic oligonucleotide
  Sense strand starting at position 1550 of SEQ ID NO: 1884979
ugcuguccucguuuguuau

SEQ ID NO: 2306777 - RNA, 19 nt, Artificial Sequence
  Description of Artificial Sequence: Synthetic oligonucleotide
  Antisense strand to SEQ ID NO: 2306776
auaacaaacgaggacagca

SEQ ID NO: 2306778 - RNA, 19 nt, Artificial Sequence
  Description of Artificial Sequence: Synthetic oligonucleotide
  Sense strand starting at position 1614 of SEQ ID NO: 1884979
gaaacauccggcuggagga

SEQ ID NO: 2306779 - RNA, 19 nt, Artificial Sequence
  Description of Artificial Sequence: Synthetic oligonucleotide
  Antisense strand to SEQ ID NO: 2306778
uccuccagccggauguuuc

SEQ ID NO: 2306780 - RNA, 19 nt, Artificial Sequence
  Description of Artificial Sequence: Synthetic oligonucleotide
  Sense strand starting at position 1645 of SEQ ID NO: 1884979
guggcagaguuccuagaaa

SEQ ID NO: 2306781 - RNA, 19 nt, Artificial Sequence
  Description of Artificial Sequence: Synthetic oligonucleotide
  Antisense strand to SEQ ID NO: 2306780
uuucuaggaacucugccac

SEQ ID NO: 2306782 - RNA, 19 nt, Artificial Sequence
  Description of Artificial Sequence: Synthetic oligonucleotide
  Sense strand starting at position 2283 of SEQ ID NO: 1884979
agucaugagcugcagacau

SEQ ID NO: 2306783 - RNA, 19 nt, Artificial Sequence
  Description of Artificial Sequence: Synthetic oligonucleotide
  Antisense strand to SEQ ID NO: 2306782
augucugcagcucaugacu

SEQ ID NO: 2306784 - RNA, 19 nt, Artificial Sequence
  Description of Artificial Sequence: Synthetic oligonucleotide
  Sense strand starting at position 2285 of SEQ ID NO: 1884979
ucaugagcugcagacauau

SEQ ID NO: 2306785 - RNA, 19 nt, Artificial Sequence
  Description of Artificial Sequence: Synthetic oligonucleotide
  Antisense strand to SEQ ID NO: 2306784
auaugucugcagcucauga

SEQ ID NO: 2306786 - RNA, 19 nt, Artificial Sequence
  Description of Artificial Sequence: Synthetic oligonucleotide
  Sense strand starting at position 2372 of SEQ ID NO: 1884979
gcacuauaugaugaguuag

SEQ ID NO: 2306787 - RNA, 19 nt, Artificial Sequence
  Description of Artificial Sequence: Synthetic oligonucleotide
  Antisense strand to SEQ ID NO: 2306786
cuaacucaucauauagugc

SEQ ID NO: 2306788 - RNA, 19 nt, Artificial Sequence
  Description of Artificial Sequence: Synthetic oligonucleotide
  Sense strand starting at position 2539 of SEQ ID NO: 1884979
gcauguucaguccuacguu

SEQ ID NO: 2306789 - RNA, 19 nt, Artificial Sequence
  Description of Artificial Sequence: Synthetic oligonucleotide
  Antisense strand to SEQ ID NO: 2306788
aacguaggacugaacaugc

SEQ ID NO: 2306790 - RNA, 19 nt, Artificial Sequence
  Description of Artificial Sequence: Synthetic oligonucleotide
  Sense strand starting at position 2554 of SEQ ID NO: 1884979
cguugaaucggugaggaau

SEQ ID NO: 2306791 - RNA, 19 nt, Artificial Sequence
  Description of Artificial Sequence: Synthetic oligonucleotide
  Antisense strand to SEQ ID NO: 2306790
auuccucaccgauucaacg

SEQ ID NO: 2306792 - RNA, 19 nt, Artificial Sequence
  Description of Artificial Sequence: Synthetic oligonucleotide
  Sense strand starting at position 2577 of SEQ ID NO: 1884979
uggugcaugcguuccuuaa

SEQ ID NO: 2306793 - RNA, 19 nt, Artificial Sequence
  Description of Artificial Sequence: Synthetic oligonucleotide
  Antisense strand to SEQ ID NO: 2306792
uuaaggaacgcaugcacca

SEQ ID NO: 2306794 - RNA, 19 nt, Artificial Sequence
  Description of Artificial Sequence: Synthetic oligonucleotide
  Sense strand starting at position 2578 of SEQ ID NO: 1884979
ggugcaugcguuccuuaag

SEQ ID NO: 2306795 - RNA, 19 nt, Artificial Sequence
  Description of Artificial Sequence: Synthetic oligonucleotide
  Antisense strand to SEQ ID NO: 2306794
cuuaaggaacgcaugcacc

SEQ ID NO: 2306796 - RNA, 19 nt, Artificial Sequence
  Description of Artificial Sequence: Synthetic oligonucleotide
  Sense strand starting at position 2590 of SEQ ID NO: 1884979
ccuuaagacgccgacuaaa

SEQ ID NO: 2306797 - RNA, 19 nt, Artificial Sequence
  Description of Artificial Sequence: Synthetic oligonucleotide
  Antisense strand to SEQ ID NO: 2306796
uuuagucggcgucuuaagg

SEQ ID NO: 2306798 - RNA, 19 nt, Artificial Sequence
  Description of Artificial Sequence: Synthetic oligonucleotide
  Sense strand starting at position 2861 of SEQ ID NO: 1884979
ucaacauuaucagucguua

SEQ ID NO: 2306799 - RNA, 19 nt, Artificial Sequence
  Description of Artificial Sequence: Synthetic oligonucleotide
  Antisense strand to SEQ ID NO: 2306798
uaacgacugauaauguuga

SEQ ID NO: 2306800 - RNA, 19 nt, Artificial Sequence
  Description of Artificial Sequence: Synthetic oligonucleotide
  Sense strand starting at position 2865 of SEQ ID NO: 1884979
cauuaucagucguuagaga

SEQ ID NO: 2306801 - RNA, 19 nt, Artificial Sequence
  Description of Artificial Sequence: Synthetic oligonucleotide
  Antisense strand to SEQ ID NO: 2306800
ucucuaacgacugauaaug

SEQ ID NO: 2306802 - RNA, 19 nt, Artificial Sequence
  Description of Artificial Sequence: Synthetic oligonucleotide
  Sense strand starting at position 2866 of SEQ ID NO: 1884979
auuaucagucguuagagag

SEQ ID NO: 2306803 - RNA, 19 nt, Artificial Sequence
  Description of Artificial Sequence: Synthetic oligonucleotide
  Antisense strand to SEQ ID NO: 2306802
cucucuaacgacugauaau

SEQ ID NO: 2306804 - RNA, 19 nt, Artificial Sequence
  Description of Artificial Sequence: Synthetic oligonucleotide
  Sense strand starting at position 2872 of SEQ ID NO: 1884979
agucguuagagagauguga

SEQ ID NO: 2306805 - RNA, 19 nt, Artificial Sequence
  Description of Artificial Sequence: Synthetic oligonucleotide
  Antisense strand to SEQ ID NO: 2306804
ucacaucucucuaacgacu

SEQ ID NO: 2306806 - RNA, 19 nt, Artificial Sequence
  Description of Artificial Sequence: Synthetic oligonucleotide
  Sense strand starting at position 2874 of SEQ ID NO: 1884979
ucguuagagagaugugaau

SEQ ID NO: 2306807 - RNA, 19 nt, Artificial Sequence
  Description of Artificial Sequence: Synthetic oligonucleotide
  Antisense strand to SEQ ID NO: 2306806
auucacaucucucuaacga

SEQ ID NO: 2306808 - RNA, 19 nt, Artificial Sequence
  Description of Artificial Sequence: Synthetic oligonucleotide
  Sense strand starting at position 2876 of SEQ ID NO: 1884979
guuagagagaugugaauca

SEQ ID NO: 2306809 - RNA, 19 nt, Artificial Sequence
  Description of Artificial Sequence: Synthetic oligonucleotide
  Antisense strand to SEQ ID NO: 2306808
ugauucacaucucucuaac

SEQ ID NO: 2306810 - RNA, 19 nt, Artificial Sequence
  Description of Artificial Sequence: Synthetic oligonucleotide
  Sense strand starting at position 2925 of SEQ ID NO: 1884979
cuaggaugucuacagucua

SEQ ID NO: 2306811 - RNA, 19 nt, Artificial Sequence
  Description of Artificial Sequence: Synthetic oligonucleotide
  Antisense strand to SEQ ID NO: 2306810
uagacuguagacauccuag

SEQ ID NO: 2306812 - RNA, 19 nt, Artificial Sequence
  Description of Artificial Sequence: Synthetic oligonucleotide
  Sense strand starting at position 3348 of SEQ ID NO: 1884979
ugugguagugaauaagauc

SEQ ID NO: 2306813 - RNA, 19 nt, Artificial Sequence
  Description of Artificial Sequence: Synthetic oligonucleotide
  Antisense strand to SEQ ID NO: 2306812
gaucuuauucacuaccaca

SEQ ID NO: 2306814 - RNA, 19 nt, Artificial Sequence
  Description of Artificial Sequence: Synthetic oligonucleotide
  Sense strand starting at position 3581 of SEQ ID NO: 1884979
uggauaaucagaugugcca

SEQ ID NO: 2306815 - RNA, 19 nt, Artificial Sequence
  Description of Artificial Sequence: Synthetic oligonucleotide
  Antisense strand to SEQ ID NO: 2306814
uggcacaucugauuaucca

SEQ ID NO: 2306816 - RNA, 19 nt, Artificial Sequence
  Description of Artificial Sequence: Synthetic oligonucleotide
  Sense strand starting at position 3827 of SEQ ID NO: 1884979
ugauaauguguauggagua

SEQ ID NO: 2306817 - RNA, 19 nt, Artificial Sequence
  Description of Artificial Sequence: Synthetic oligonucleotide
  Antisense strand to SEQ ID NO: 2306816
uacuccauacacauuauca

SEQ ID NO: 2306818 - RNA, 19 nt, Artificial Sequence
  Description of Artificial Sequence: Synthetic oligonucleotide
  Sense strand starting at position 3885 of SEQ ID NO: 1884979
gaaugugaugaggguuaca

SEQ ID NO: 2306819 - RNA, 19 nt, Artificial Sequence
  Description of Artificial Sequence: Synthetic oligonucleotide
  Antisense strand to SEQ ID NO: 2306818
uguaacccucaucacauuc

SEQ ID NO: 2306820 - RNA, 19 nt, Artificial Sequence
  Description of Artificial Sequence: Synthetic oligonucleotide
  Sense strand starting at position 3953 of SEQ ID NO: 1884979
cgaacuguacgguaugcaa

SEQ ID NO: 2306821 - RNA, 19 nt, Artificial Sequence
  Description of Artificial Sequence: Synthetic oligonucleotide
  Antisense strand to SEQ ID NO: 2306820
uugcauaccguacaguucg

SEQ ID NO: 2306822 - RNA, 19 nt, Artificial Sequence
  Description of Artificial Sequence: Synthetic oligonucleotide
  Sense strand starting at position 33 of SEQ ID NO: 1884980
cugcauaucucaucuguca

SEQ ID NO: 2306823 - RNA, 19 nt, Artificial Sequence
  Description of Artificial Sequence: Synthetic oligonucleotide
  Antisense strand to SEQ ID NO: 2306822
ugacagaugagauaugcag

SEQ ID NO: 2306824 - RNA, 19 nt, Artificial Sequence
  Description of Artificial Sequence: Synthetic oligonucleotide
  Sense strand starting at position 101 of SEQ ID NO: 1884980
gcagauuucugucucauuc

SEQ ID NO: 2306825 - RNA, 19 nt, Artificial Sequence
  Description of Artificial Sequence: Synthetic oligonucleotide
  Antisense strand to SEQ ID NO: 2306824
gaaugagacagaaaucugc

SEQ ID NO: 2306826 - RNA, 19 nt, Artificial Sequence
  Description of Artificial Sequence: Synthetic oligonucleotide
  Sense strand starting at position 1051 of SEQ ID NO: 1884980
aagugagacuguggccauu

SEQ ID NO: 2306827 - RNA, 19 nt, Artificial Sequence
  Description of Artificial Sequence: Synthetic oligonucleotide
  Antisense strand to SEQ ID NO: 2306826
aauggccacagucucacuu

SEQ ID NO: 2306828 - RNA, 19 nt, Artificial Sequence
  Description of Artificial Sequence: Synthetic oligonucleotide
  Sense strand starting at position 1221 of SEQ ID NO: 1884980
gcacgucuugccuucugua

SEQ ID NO: 2306829 - RNA, 19 nt, Artificial Sequence
  Description of Artificial Sequence: Synthetic oligonucleotide
  Antisense strand to SEQ ID NO: 2306828
uacagaaggcaagacgugc

SEQ ID NO: 2306830 - RNA, 19 nt, Artificial Sequence
  Description of Artificial Sequence: Synthetic oligonucleotide
  Sense strand starting at position 1262 of SEQ ID NO: 1884980
gacuuaggagcggguagau

SEQ ID NO: 2306831 - RNA, 19 nt, Artificial Sequence
  Description of Artificial Sequence: Synthetic oligonucleotide
  Antisense strand to SEQ ID NO: 2306830
aucuacccgcuccuaaguc

SEQ ID NO: 2306832 - RNA, 19 nt, Artificial Sequence
  Description of Artificial Sequence: Synthetic oligonucleotide
  Sense strand starting at position 1275 of SEQ ID NO: 1884980
guagaucaggucuagcagu

SEQ ID NO: 2306833 - RNA, 19 nt, Artificial Sequence
  Description of Artificial Sequence: Synthetic oligonucleotide
  Antisense strand to SEQ ID NO: 2306832
acugcuagaccugaucuac

SEQ ID NO: 2306834 - RNA, 19 nt, Artificial Sequence
  Description of Artificial Sequence: Synthetic oligonucleotide
  Sense strand starting at position 1662 of SEQ ID NO: 1884980
ugagucugaccucaagagu

SEQ ID NO: 2306835 - RNA, 19 nt, Artificial Sequence
  Description of Artificial Sequence: Synthetic oligonucleotide
  Antisense strand to SEQ ID NO: 2306834
acucuugaggucagacuca

SEQ ID NO: 2306836 - RNA, 19 nt, Artificial Sequence
  Description of Artificial Sequence: Synthetic oligonucleotide
  Sense strand starting at position 2596 of SEQ ID NO: 1884980
acaggcugucucuagaaca

SEQ ID NO: 2306837 - RNA, 19 nt, Artificial Sequence
  Description of Artificial Sequence: Synthetic oligonucleotide
  Antisense strand to SEQ ID NO: 2306836
uguucuagagacagccugu

SEQ ID NO: 2306838 - RNA, 19 nt, Artificial Sequence
  Description of Artificial Sequence: Synthetic oligonucleotide
  Sense strand starting at position 2623 of SEQ ID NO: 1884980
cccguaucgucaggccaga

SEQ ID NO: 2306839 - RNA, 19 nt, Artificial Sequence
  Description of Artificial Sequence: Synthetic oligonucleotide
  Antisense strand to SEQ ID NO: 2306838
ucuggccugacgauacggg

SEQ ID NO: 2306840 - RNA, 19 nt, Artificial Sequence
  Description of Artificial Sequence: Synthetic oligonucleotide
  Sense strand starting at position 2932 of SEQ ID NO: 1884980
gcgggagucugcaaaugga

SEQ ID NO: 2306841 - RNA, 19 nt, Artificial Sequence
  Description of Artificial Sequence: Synthetic oligonucleotide
  Antisense strand to SEQ ID NO: 2306840
uccauuugcagacucccgc

SEQ ID NO: 2306842 - RNA, 19 nt, Artificial Sequence
  Description of Artificial Sequence: Synthetic oligonucleotide
  Sense strand starting at position 3345 of SEQ ID NO: 1884980
gagggagcuuucugagcca

SEQ ID NO: 2306843 - RNA, 19 nt, Artificial Sequence
  Description of Artificial Sequence: Synthetic oligonucleotide
  Antisense strand to SEQ ID NO: 2306842
uggcucagaaagcucccuc

SEQ ID NO: 2306844 - RNA, 19 nt, Artificial Sequence
  Description of Artificial Sequence: Synthetic oligonucleotide
  Sense strand starting at position 3691 of SEQ ID NO: 1884980
gagaguguucucugcugug

SEQ ID NO: 2306845 - RNA, 19 nt, Artificial Sequence
  Description of Artificial Sequence: Synthetic oligonucleotide
  Antisense strand to SEQ ID NO: 2306844
cacagcagagaacacucuc

SEQ ID NO: 2306846 - RNA, 19 nt, Artificial Sequence
  Description of Artificial Sequence: Synthetic oligonucleotide
  Sense strand starting at position 3693 of SEQ ID NO: 1884980
gaguguucucugcugugca

SEQ ID NO: 2306847 - RNA, 19 nt, Artificial Sequence
  Description of Artificial Sequence: Synthetic oligonucleotide
  Antisense strand to SEQ ID NO: 2306846
ugcacagcagagaacacuc

SEQ ID NO: 2306848 - RNA, 19 nt, Artificial Sequence
  Description of Artificial Sequence: Synthetic oligonucleotide
  Sense strand starting at position 3694 of SEQ ID NO: 1884980
aguguucucugcugugcau

SEQ ID NO: 2306849 - RNA, 19 nt, Artificial Sequence
  Description of Artificial Sequence: Synthetic oligonucleotide
  Antisense strand to SEQ ID NO: 2306848
augcacagcagagaacacu

SEQ ID NO: 2306850 - RNA, 19 nt, Artificial Sequence
  Description of Artificial Sequence: Synthetic oligonucleotide
  Sense strand starting at position 3855 of SEQ ID NO: 1884980
gcaggugugccguugagga

SEQ ID NO: 2306851 - RNA, 19 nt, Artificial Sequence
  Description of Artificial Sequence: Synthetic oligonucleotide
  Antisense strand to SEQ ID NO: 2306850
uccucaacggcacaccugc

SEQ ID NO: 2306852 - RNA, 19 nt, Artificial Sequence
  Description of Artificial Sequence: Synthetic oligonucleotide
  Sense strand starting at position 3907 of SEQ ID NO: 1884980
ugaggaguguuucugagag

SEQ ID NO: 2306853 - RNA, 19 nt, Artificial Sequence
  Description of Artificial Sequence: Synthetic oligonucleotide
  Antisense strand to SEQ ID NO: 2306852
cucucagaaacacuccuca

SEQ ID NO: 2306854 - RNA, 19 nt, Artificial Sequence
  Description of Artificial Sequence: Synthetic oligonucleotide
  Sense strand starting at position 3909 of SEQ ID NO: 1884980
aggaguguuucugagagau

SEQ ID NO: 2306855 - RNA, 19 nt, Artificial Sequence
  Description of Artificial Sequence: Synthetic oligonucleotide
  Antisense strand to SEQ ID NO: 2306854
aucucucagaaacacuccu

SEQ ID NO: 2306856 - RNA, 19 nt, Artificial Sequence
  Description of Artificial Sequence: Synthetic oligonucleotide
  Sense strand starting at position 3911 of SEQ ID NO: 1884980
gaguguuucugagagauuc

SEQ ID NO: 2306857 - RNA, 19 nt, Artificial Sequence
  Description of Artificial Sequence: Synthetic oligonucleotide
  Antisense strand to SEQ ID NO: 2306856
gaaucucucagaaacacuc

SEQ ID NO: 2306858 - RNA, 19 nt, Artificial Sequence
  Description of Artificial Sequence: Synthetic oligonucleotide
  Sense strand starting at position 3913 of SEQ ID NO: 1884980
guguuucugagagauucga

SEQ ID NO: 2306859 - RNA, 19 nt, Artificial Sequence
  Description of Artificial Sequence: Synthetic oligonucleotide
  Antisense strand to SEQ ID NO: 2306858
ucgaaucucucagaaacac

SEQ ID NO: 2306860 - RNA, 19 nt, Artificial Sequence
  Description of Artificial Sequence: Synthetic oligonucleotide
  Sense strand starting at position 3917 of SEQ ID NO: 1884980
uucugagagauucgagucu

SEQ ID NO: 2306861 - RNA, 19 nt, Artificial Sequence
  Description of Artificial Sequence: Synthetic oligonucleotide
  Antisense strand to SEQ ID NO: 2306860
agacucgaaucucucagaa

SEQ ID NO: 2306862 - RNA, 19 nt, Artificial Sequence
  Description of Artificial Sequence: Synthetic oligonucleotide
  Sense strand starting at position 3932 of SEQ ID NO: 1884980
gucugagggcccugagauc

SEQ ID NO: 2306863 - RNA, 19 nt, Artificial Sequence
  Description of Artificial Sequence: Synthetic oligonucleotide
  Antisense strand to SEQ ID NO: 2306862
gaucucagggcccucagac

SEQ ID NO: 2306864 - RNA, 19 nt, Artificial Sequence
  Description of Artificial Sequence: Synthetic oligonucleotide
  Sense strand starting at position 3944 of SEQ ID NO: 1884980
ugagaucacgggugcagua

SEQ ID NO: 2306865 - RNA, 19 nt, Artificial Sequence
  Description of Artificial Sequence: Synthetic oligonucleotide
  Antisense strand to SEQ ID NO: 2306864
uacugcacccgugaucuca

SEQ ID NO: 2306866 - RNA, 19 nt, Artificial Sequence
  Description of Artificial Sequence: Synthetic oligonucleotide
  Sense strand starting at position 145 of SEQ ID NO: 1884981
agucaauuccaauaccugu

SEQ ID NO: 2306867 - RNA, 19 nt, Artificial Sequence
  Description of Artificial Sequence: Synthetic oligonucleotide
  Antisense strand to SEQ ID NO: 2306866
acagguauuggaauugacu

SEQ ID NO: 2306868 - RNA, 19 nt, Artificial Sequence
  Description of Artificial Sequence: Synthetic oligonucleotide
  Sense strand starting at position 152 of SEQ ID NO: 1884981
uccaauaccuguucuagag

SEQ ID NO: 2306869 - RNA, 19 nt, Artificial Sequence
  Description of Artificial Sequence: Synthetic oligonucleotide
  Antisense strand to SEQ ID NO: 2306868
cucuagaacagguauugga

SEQ ID NO: 2306870 - RNA, 19 nt, Artificial Sequence
  Description of Artificial Sequence: Synthetic oligonucleotide
  Sense strand starting at position 156 of SEQ ID NO: 1884981
auaccuguucuagagaggu

SEQ ID NO: 2306871 - RNA, 19 nt, Artificial Sequence
  Description of Artificial Sequence: Synthetic oligonucleotide
  Antisense strand to SEQ ID NO: 2306870
accucucuagaacagguau

SEQ ID NO: 2306872 - RNA, 19 nt, Artificial Sequence
  Description of Artificial Sequence: Synthetic oligonucleotide
  Sense strand starting at position 160 of SEQ ID NO: 1884981
cuguucuagagagguacuu

SEQ ID NO: 2306873 - RNA, 19 nt, Artificial Sequence
  Description of Artificial Sequence: Synthetic oligonucleotide
  Antisense strand to SEQ ID NO: 2306872
aaguaccucucuagaacag

SEQ ID NO: 2306874 - RNA, 19 nt, Artificial Sequence
  Description of Artificial Sequence: Synthetic oligonucleotide
  Sense strand starting at position 162 of SEQ ID NO: 1884981
guucuagagagguacuuau

SEQ ID NO: 2306875 - RNA, 19 nt, Artificial Sequence
  Description of Artificial Sequence: Synthetic oligonucleotide
  Antisense strand to SEQ ID NO: 2306874
auaaguaccucucuagaac

SEQ ID NO: 2306876 - RNA, 19 nt, Artificial Sequence
  Description of Artificial Sequence: Synthetic oligonucleotide
  Sense strand starting at position 196 of SEQ ID NO: 1884981
ggcaaugaauuguauuaca

SEQ ID NO: 2306877 - RNA, 19 nt, Artificial Sequence
  Description of Artificial Sequence: Synthetic oligonucleotide
  Antisense strand to SEQ ID NO: 2306876
uguaauacaauucauugcc

SEQ ID NO: 2306878 - RNA, 19 nt, Artificial Sequence
  Description of Artificial Sequence: Synthetic oligonucleotide
  Sense strand starting at position 201 of SEQ ID NO: 1884981
ugaauuguauuacaaggua

SEQ ID NO: 2306879 - RNA, 19 nt, Artificial Sequence
  Description of Artificial Sequence: Synthetic oligonucleotide
  Antisense strand to SEQ ID NO: 2306878
uaccuuguaauacaauuca

SEQ ID NO: 2306880 - RNA, 19 nt, Artificial Sequence
  Description of Artificial Sequence: Synthetic oligonucleotide
  Sense strand starting at position 238 of SEQ ID NO: 1884981
acgccuaugugguauccua

SEQ ID NO: 2306881 - RNA, 19 nt, Artificial Sequence
  Description of Artificial Sequence: Synthetic oligonucleotide
  Antisense strand to SEQ ID NO: 2306880
uaggauaccacauaggcgu

SEQ ID NO: 2306882 - RNA, 19 nt, Artificial Sequence
  Description of Artificial Sequence: Synthetic oligonucleotide
  Sense strand starting at position 251 of SEQ ID NO: 1884981
auccuauuccauggagaua

SEQ ID NO: 2306883 - RNA, 19 nt, Artificial Sequence
  Description of Artificial Sequence: Synthetic oligonucleotide
  Antisense strand to SEQ ID NO: 2306882
uaucuccauggaauaggau

SEQ ID NO: 2306884 - RNA, 19 nt, Artificial Sequence
  Description of Artificial Sequence: Synthetic oligonucleotide
  Sense strand starting at position 375 of SEQ ID NO: 1884981
gcagacaagaagugauuau

SEQ ID NO: 2306885 - RNA, 19 nt, Artificial Sequence
  Description of Artificial Sequence: Synthetic oligonucleotide
  Antisense strand to SEQ ID NO: 2306884
auaaucacuucuugucugc

SEQ ID NO: 2306886 - RNA, 19 nt, Artificial Sequence
  Description of Artificial Sequence: Synthetic oligonucleotide
  Sense strand starting at position 384 of SEQ ID NO: 1884981
aagugauuaucuugagguc

SEQ ID NO: 2306887 - RNA, 19 nt, Artificial Sequence
  Description of Artificial Sequence: Synthetic oligonucleotide
  Antisense strand to SEQ ID NO: 2306886
gaccucaagauaaucacuu

SEQ ID NO: 2306888 - RNA, 19 nt, Artificial Sequence
  Description of Artificial Sequence: Synthetic oligonucleotide
  Sense strand starting at position 387 of SEQ ID NO: 1884981
ugauuaucuugaggucuuu

SEQ ID NO: 2306889 - RNA, 19 nt, Artificial Sequence
  Description of Artificial Sequence: Synthetic oligonucleotide
  Antisense strand to SEQ ID NO: 2306888
aaagaccucaagauaauca

SEQ ID NO: 2306890 - RNA, 19 nt, Artificial Sequence
  Description of Artificial Sequence: Synthetic oligonucleotide
  Sense strand starting at position 452 of SEQ ID NO: 1884981
auugaacaggcuugaagau

SEQ ID NO: 2306891 - RNA, 19 nt, Artificial Sequence
  Description of Artificial Sequence: Synthetic oligonucleotide
  Antisense strand to SEQ ID NO: 2306890
aucuucaagccuguucaau

SEQ ID NO: 2306892 - RNA, 19 nt, Artificial Sequence
  Description of Artificial Sequence: Synthetic oligonucleotide
  Sense strand starting at position 461 of SEQ ID NO: 1884981
gcuugaagauucucgucuu

SEQ ID NO: 2306893 - RNA, 19 nt, Artificial Sequence
  Description of Artificial Sequence: Synthetic oligonucleotide
  Antisense strand to SEQ ID NO: 2306892
aagacgagaaucuucaagc

SEQ ID NO: 2306894 - RNA, 19 nt, Artificial Sequence
  Description of Artificial Sequence: Synthetic oligonucleotide
  Sense strand starting at position 462 of SEQ ID NO: 1884981
cuugaagauucucgucuuu

SEQ ID NO: 2306895 - RNA, 19 nt, Artificial Sequence
  Description of Artificial Sequence: Synthetic oligonucleotide
  Antisense strand to SEQ ID NO: 2306894
aaagacgagaaucuucaag

SEQ ID NO: 2306896 - RNA, 19 nt, Artificial Sequence
  Description of Artificial Sequence: Synthetic oligonucleotide
  Sense strand starting at position 507 of SEQ ID NO: 1884981
gggauuccaugggaaggaa

SEQ ID NO: 2306897 - RNA, 19 nt, Artificial Sequence
  Description of Artificial Sequence: Synthetic oligonucleotide
  Antisense strand to SEQ ID NO: 2306896
uuccuucccauggaauccc

SEQ ID NO: 2306898 - RNA, 19 nt, Artificial Sequence
  Description of Artificial Sequence: Synthetic oligonucleotide
  Sense strand starting at position 550 of SEQ ID NO: 1884981
gugcuaugauuccuaacug

SEQ ID NO: 2306899 - RNA, 19 nt, Artificial Sequence
  Description of Artificial Sequence: Synthetic oligonucleotide
  Antisense strand to SEQ ID NO: 2306898
caguuaggaaucauagcac

SEQ ID NO: 2306900 - RNA, 19 nt, Artificial Sequence
  Description of Artificial Sequence: Synthetic oligonucleotide
  Sense strand starting at position 572 of SEQ ID NO: 1884981
auacauauguaacaggaaa

SEQ ID NO: 2306901 - RNA, 19 nt, Artificial Sequence
  Description of Artificial Sequence: Synthetic oligonucleotide
  Antisense strand to SEQ ID NO: 2306900
uuuccuguuacauauguau

SEQ ID NO: 2306902 - RNA, 19 nt, Artificial Sequence
  Description of Artificial Sequence: Synthetic oligonucleotide
  Sense strand starting at position 649 of SEQ ID NO: 1884981
gcuuuaguuacuugugucu

SEQ ID NO: 2306903 - RNA, 19 nt, Artificial Sequence
  Description of Artificial Sequence: Synthetic oligonucleotide
  Antisense strand to SEQ ID NO: 2306902
agacacaaguaacuaaagc

SEQ ID NO: 2306904 - RNA, 19 nt, Artificial Sequence
  Description of Artificial Sequence: Synthetic oligonucleotide
  Sense strand starting at position 651 of SEQ ID NO: 1884981
uuuaguuacuugugucuuu

SEQ ID NO: 2306905 - RNA, 19 nt, Artificial Sequence
  Description of Artificial Sequence: Synthetic oligonucleotide
  Antisense strand to SEQ ID NO: 2306904
aaagacacaaguaacuaaa

SEQ ID NO: 2306906 - RNA, 19 nt, Artificial Sequence
  Description of Artificial Sequence: Synthetic oligonucleotide
  Sense strand starting at position 807 of SEQ ID NO: 1884981
auaugacaccucggaauac

SEQ ID NO: 2306907 - RNA, 19 nt, Artificial Sequence
  Description of Artificial Sequence: Synthetic oligonucleotide
  Antisense strand to SEQ ID NO: 2306906
guauuccgaggugucauau

SEQ ID NO: 2306908 - RNA, 19 nt, Artificial Sequence
  Description of Artificial Sequence: Synthetic oligonucleotide
  Sense strand starting at position 895 of SEQ ID NO: 1884981
guuuauaaaccugggauaa

SEQ ID NO: 2306909 - RNA, 19 nt, Artificial Sequence
  Description of Artificial Sequence: Synthetic oligonucleotide
  Antisense strand to SEQ ID NO: 2306908
uuaucccagguuuauaaac

SEQ ID NO: 2306910 - RNA, 19 nt, Artificial Sequence
  Description of Artificial Sequence: Synthetic oligonucleotide
  Sense strand starting at position 897 of SEQ ID NO: 1884981
uuauaaaccugggauaagu

SEQ ID NO: 2306911 - RNA, 19 nt, Artificial Sequence
  Description of Artificial Sequence: Synthetic oligonucleotide
  Antisense strand to SEQ ID NO: 2306910
acuuaucccagguuuauaa

SEQ ID NO: 2306912 - RNA, 19 nt, Artificial Sequence
  Description of Artificial Sequence: Synthetic oligonucleotide
  Sense strand starting at position 920 of SEQ ID NO: 1884981
ugaucuuucccuuaagcag

SEQ ID NO: 2306913 - RNA, 19 nt, Artificial Sequence
  Description of Artificial Sequence: Synthetic oligonucleotide
  Antisense strand to SEQ ID NO: 2306912
cugcuuaagggaaagauca

SEQ ID NO: 2306914 - RNA, 19 nt, Artificial Sequence
  Description of Artificial Sequence: Synthetic oligonucleotide
  Sense strand starting at position 935 of SEQ ID NO: 1884981
gcaggucucucgugugaga

SEQ ID NO: 2306915 - RNA, 19 nt, Artificial Sequence
  Description of Artificial Sequence: Synthetic oligonucleotide
  Antisense strand to SEQ ID NO: 2306914
ucucacacgagagaccugc

SEQ ID NO: 2306916 - RNA, 19 nt, Artificial Sequence
  Description of Artificial Sequence: Synthetic oligonucleotide
  Sense strand starting at position 1321 of SEQ ID NO: 1884981
aaacuuaggucuugcuaag

SEQ ID NO: 2306917 - RNA, 19 nt, Artificial Sequence
  Description of Artificial Sequence: Synthetic oligonucleotide
  Antisense strand to SEQ ID NO: 2306916
cuuagcaagaccuaaguuu

SEQ ID NO: 2306918 - RNA, 19 nt, Artificial Sequence
  Description of Artificial Sequence: Synthetic oligonucleotide
  Sense strand starting at position 1345 of SEQ ID NO: 1884981
cccaguuauuaugagauca

SEQ ID NO: 2306919 - RNA, 19 nt, Artificial Sequence
  Description of Artificial Sequence: Synthetic oligonucleotide
  Antisense strand to SEQ ID NO: 2306918
ugaucucauaauaacuggg

SEQ ID NO: 2306920 - RNA, 19 nt, Artificial Sequence
  Description of Artificial Sequence: Synthetic oligonucleotide
  Sense strand starting at position 3120 of SEQ ID NO: 1884981
cccauuugguuguuuguaa

SEQ ID NO: 2306921 - RNA, 19 nt, Artificial Sequence
  Description of Artificial Sequence: Synthetic oligonucleotide
  Antisense strand to SEQ ID NO: 2306920
uuacaaacaaccaaauggg

SEQ ID NO: 2306922 - RNA, 19 nt, Artificial Sequence
  Description of Artificial Sequence: Synthetic oligonucleotide
  Sense strand starting at position 3124 of SEQ ID NO: 1884981
uuugguuguuuguaacaaa

SEQ ID NO: 2306923 - RNA, 19 nt, Artificial Sequence
  Description of Artificial Sequence: Synthetic oligonucleotide
  Antisense strand to SEQ ID NO: 2306922
uuuguuacaaacaaccaaa

SEQ ID NO: 2306924 - RNA, 19 nt, Artificial Sequence
  Description of Artificial Sequence: Synthetic oligonucleotide
  Sense strand starting at position 3127 of SEQ ID NO: 1884981
gguuguuuguaacaaaguu

SEQ ID NO: 2306925 - RNA, 19 nt, Artificial Sequence
  Description of Artificial Sequence: Synthetic oligonucleotide
  Antisense strand to SEQ ID NO: 2306924
aacuuuguuacaaacaacc

SEQ ID NO: 2306926 - RNA, 19 nt, Artificial Sequence
  Description of Artificial Sequence: Synthetic oligonucleotide
  Sense strand starting at position 3143 of SEQ ID NO: 1884981
guuauaucuuuauccaugu

SEQ ID NO: 2306927 - RNA, 19 nt, Artificial Sequence
  Description of Artificial Sequence: Synthetic oligonucleotide
  Antisense strand to SEQ ID NO: 2306926
acauggauaaagauauaac

SEQ ID NO: 2306928 - RNA, 19 nt, Artificial Sequence
  Description of Artificial Sequence: Synthetic oligonucleotide
  Sense strand starting at position 40 of SEQ ID NO: 1884982
ugggcauauacuuauggua

SEQ ID NO: 2306929 - RNA, 19 nt, Artificial Sequence
  Description of Artificial Sequence: Synthetic oligonucleotide
  Antisense strand to SEQ ID NO: 2306928
uaccauaaguauaugccca

SEQ ID NO: 2306930 - RNA, 19 nt, Artificial Sequence
  Description of Artificial Sequence: Synthetic oligonucleotide
  Sense strand starting at position 147 of SEQ ID NO: 1884982
caguguauacuauguacca

SEQ ID NO: 2306931 - RNA, 19 nt, Artificial Sequence
  Description of Artificial Sequence: Synthetic oligonucleotide
  Antisense strand to SEQ ID NO: 2306930
ugguacauaguauacacug

SEQ ID NO: 2306932 - RNA, 19 nt, Artificial Sequence
  Description of Artificial Sequence: Synthetic oligonucleotide
  Sense strand starting at position 165 of SEQ ID NO: 1884982
agguucuaagugcaaugau

SEQ ID NO: 2306933 - RNA, 19 nt, Artificial Sequence
  Description of Artificial Sequence: Synthetic oligonucleotide
  Antisense strand to SEQ ID NO: 2306932
aucauugcacuuagaaccu

SEQ ID NO: 2306934 - RNA, 19 nt, Artificial Sequence
  Description of Artificial Sequence: Synthetic oligonucleotide
  Sense strand starting at position 175 of SEQ ID NO: 1884982
ugcaaugauaccgaaaguu

SEQ ID NO: 2306935 - RNA, 19 nt, Artificial Sequence
  Description of Artificial Sequence: Synthetic oligonucleotide
  Antisense strand to SEQ ID NO: 2306934
aacuuucgguaucauugca

SEQ ID NO: 2306936 - RNA, 19 nt, Artificial Sequence
  Description of Artificial Sequence: Synthetic oligonucleotide
  Sense strand starting at position 277 of SEQ ID NO: 1884982
agauguugauaagugcuau

SEQ ID NO: 2306937 - RNA, 19 nt, Artificial Sequence
  Description of Artificial Sequence: Synthetic oligonucleotide
  Antisense strand to SEQ ID NO: 2306936
auagcacuuaucaacaucu

SEQ ID NO: 2306938 - RNA, 19 nt, Artificial Sequence
  Description of Artificial Sequence: Synthetic oligonucleotide
  Sense strand starting at position 458 of SEQ ID NO: 1884982
ggaagauacuuccaggaaa

SEQ ID NO: 2306939 - RNA, 19 nt, Artificial Sequence
  Description of Artificial Sequence: Synthetic oligonucleotide
  Antisense strand to SEQ ID NO: 2306938
uuuccuggaaguaucuucc

SEQ ID NO: 2306940 - RNA, 19 nt, Artificial Sequence
  Description of Artificial Sequence: Synthetic oligonucleotide
  Sense strand starting at position 609 of SEQ ID NO: 1884982
aaggguuucuaaguggcau

SEQ ID NO: 2306941 - RNA, 19 nt, Artificial Sequence
  Description of Artificial Sequence: Synthetic oligonucleotide
  Antisense strand to SEQ ID NO: 2306940
augccacuuagaaacccuu

SEQ ID NO: 2306942 - RNA, 19 nt, Artificial Sequence
  Description of Artificial Sequence: Synthetic oligonucleotide
  Sense strand starting at position 828 of SEQ ID NO: 1884982
guagauucuggaugcaauu

SEQ ID NO: 2306943 - RNA, 19 nt, Artificial Sequence
  Description of Artificial Sequence: Synthetic oligonucleotide
  Antisense strand to SEQ ID NO: 2306942
aauugcauccagaaucuac

SEQ ID NO: 2306944 - RNA, 19 nt, Artificial Sequence
  Description of Artificial Sequence: Synthetic oligonucleotide
  Sense strand starting at position 857 of SEQ ID NO: 1884982
aucgacuagauuugugcau

SEQ ID NO: 2306945 - RNA, 19 nt, Artificial Sequence
  Description of Artificial Sequence: Synthetic oligonucleotide
  Antisense strand to SEQ ID NO: 2306944
augcacaaaucuagucgau

SEQ ID NO: 2306946 - RNA, 19 nt, Artificial Sequence
  Description of Artificial Sequence: Synthetic oligonucleotide
  Sense strand starting at position 898 of SEQ ID NO: 1884982
gaaagaauguaguaaagaa

SEQ ID NO: 2306947 - RNA, 19 nt, Artificial Sequence
  Description of Artificial Sequence: Synthetic oligonucleotide
  Antisense strand to SEQ ID NO: 2306946
uucuuuacuacauucuuuc

SEQ ID NO: 2306948 - RNA, 19 nt, Artificial Sequence
  Description of Artificial Sequence: Synthetic oligonucleotide
  Sense strand starting at position 923 of SEQ ID NO: 1884982
aguguuucucccuagcaaa

SEQ ID NO: 2306949 - RNA, 19 nt, Artificial Sequence
  Description of Artificial Sequence: Synthetic oligonucleotide
  Antisense strand to SEQ ID NO: 2306948
uuugcuagggagaaacacu

SEQ ID NO: 2306950 - RNA, 19 nt, Artificial Sequence
  Description of Artificial Sequence: Synthetic oligonucleotide
  Sense strand starting at position 1006 of SEQ ID NO: 1884982
cgagcagauacucagucuu

SEQ ID NO: 2306951 - RNA, 19 nt, Artificial Sequence
  Description of Artificial Sequence: Synthetic oligonucleotide
  Antisense strand to SEQ ID NO: 2306950
aagacugaguaucugcucg

SEQ ID NO: 2306952 - RNA, 19 nt, Artificial Sequence
  Description of Artificial Sequence: Synthetic oligonucleotide
  Sense strand starting at position 1008 of SEQ ID NO: 1884982
agcagauacucagucuuaa

SEQ ID NO: 2306953 - RNA, 19 nt, Artificial Sequence
  Description of Artificial Sequence: Synthetic oligonucleotide
  Antisense strand to SEQ ID NO: 2306952
uuaagacugaguaucugcu

SEQ ID NO: 2306954 - RNA, 19 nt, Artificial Sequence
  Description of Artificial Sequence: Synthetic oligonucleotide
  Sense strand starting at position 1020 of SEQ ID NO: 1884982
gucuuaaacuugcugauuu

SEQ ID NO: 2306955 - RNA, 19 nt, Artificial Sequence
  Description of Artificial Sequence: Synthetic oligonucleotide
  Antisense strand to SEQ ID NO: 2306954
aaaucagcaaguuuaagac

SEQ ID NO: 2306956 - RNA, 19 nt, Artificial Sequence
  Description of Artificial Sequence: Synthetic oligonucleotide
  Sense strand starting at position 1038 of SEQ ID NO: 1884982
uugauaugccuaugagacc

SEQ ID NO: 2306957 - RNA, 19 nt, Artificial Sequence
  Description of Artificial Sequence: Synthetic oligonucleotide
  Antisense strand to SEQ ID NO: 2306956
ggucucauaggcauaucaa

SEQ ID NO: 2306958 - RNA, 19 nt, Artificial Sequence
  Description of Artificial Sequence: Synthetic oligonucleotide
  Sense strand starting at position 1080 of SEQ ID NO: 1884982
ggcaguugaauacaugagu

SEQ ID NO: 2306959 - RNA, 19 nt, Artificial Sequence
  Description of Artificial Sequence: Synthetic oligonucleotide
  Antisense strand to SEQ ID NO: 2306958
acucauguauucaacugcc

SEQ ID NO: 2306960 - RNA, 19 nt, Artificial Sequence
  Description of Artificial Sequence: Synthetic oligonucleotide
  Sense strand starting at position 1112 of SEQ ID NO: 1884982
aaagguguggaucaaaguu

SEQ ID NO: 2306961 - RNA, 19 nt, Artificial Sequence
  Description of Artificial Sequence: Synthetic oligonucleotide
  Antisense strand to SEQ ID NO: 2306960
aacuuugauccacaccuuu

SEQ ID NO: 2306962 - RNA, 19 nt, Artificial Sequence
  Description of Artificial Sequence: Synthetic oligonucleotide
  Sense strand starting at position 1218 of SEQ ID NO: 1884982
ucugcagacugagcauuau

SEQ ID NO: 2306963 - RNA, 19 nt, Artificial Sequence
  Description of Artificial Sequence: Synthetic oligonucleotide
  Antisense strand to SEQ ID NO: 2306962
auaaugcucagucugcaga

SEQ ID NO: 2306964 - RNA, 19 nt, Artificial Sequence
  Description of Artificial Sequence: Synthetic oligonucleotide
  Sense strand starting at position 1224 of SEQ ID NO: 1884982
gacugagcauuaucgucaa

SEQ ID NO: 2306965 - RNA, 19 nt, Artificial Sequence
  Description of Artificial Sequence: Synthetic oligonucleotide
  Antisense strand to SEQ ID NO: 2306964
uugacgauaaugcucaguc

SEQ ID NO: 2306966 - RNA, 19 nt, Artificial Sequence
  Description of Artificial Sequence: Synthetic oligonucleotide
  Sense strand starting at position 1227 of SEQ ID NO: 1884982
ugagcauuaucgucaagau

SEQ ID NO: 2306967 - RNA, 19 nt, Artificial Sequence
  Description of Artificial Sequence: Synthetic oligonucleotide
  Antisense strand to SEQ ID NO: 2306966
aucuugacgauaaugcuca

SEQ ID NO: 2306968 - RNA, 19 nt, Artificial Sequence
  Description of Artificial Sequence: Synthetic oligonucleotide
  Sense strand starting at position 1228 of SEQ ID NO: 1884982
gagcauuaucgucaagaug

SEQ ID NO: 2306969 - RNA, 19 nt, Artificial Sequence
  Description of Artificial Sequence: Synthetic oligonucleotide
  Antisense strand to SEQ ID NO: 2306968
caucuugacgauaaugcuc

SEQ ID NO: 2306970 - RNA, 19 nt, Artificial Sequence
  Description of Artificial Sequence: Synthetic oligonucleotide
  Sense strand starting at position 1231 of SEQ ID NO: 1884982
cauuaucgucaagaugauu

SEQ ID NO: 2306971 - RNA, 19 nt, Artificial Sequence
  Description of Artificial Sequence: Synthetic oligonucleotide
  Antisense strand to SEQ ID NO: 2306970
aaucaucuugacgauaaug

SEQ ID NO: 2306972 - RNA, 19 nt, Artificial Sequence
  Description of Artificial Sequence: Synthetic oligonucleotide
  Sense strand starting at position 1234 of SEQ ID NO: 1884982
uaucgucaagaugauuaua

SEQ ID NO: 2306973 - RNA, 19 nt, Artificial Sequence
  Description of Artificial Sequence: Synthetic oligonucleotide
  Antisense strand to SEQ ID NO: 2306972
uauaaucaucuugacgaua

SEQ ID NO: 2306974 - RNA, 19 nt, Artificial Sequence
  Description of Artificial Sequence: Synthetic oligonucleotide
  Sense strand starting at position 1237 of SEQ ID NO: 1884982
cgucaagaugauuauaggu

SEQ ID NO: 2306975 - RNA, 19 nt, Artificial Sequence
  Description of Artificial Sequence: Synthetic oligonucleotide
  Antisense strand to SEQ ID NO: 2306974
accuauaaucaucuugacg

SEQ ID NO: 2306976 - RNA, 19 nt, Artificial Sequence
  Description of Artificial Sequence: Synthetic oligonucleotide
  Sense strand starting at position 1553 of SEQ ID NO: 1884982
gaauccuguccugagguca

SEQ ID NO: 2306977 - RNA, 19 nt, Artificial Sequence
  Description of Artificial Sequence: Synthetic oligonucleotide
  Antisense strand to SEQ ID NO: 2306976
ugaccucaggacaggauuc

SEQ ID NO: 2306978 - RNA, 19 nt, Artificial Sequence
  Description of Artificial Sequence: Synthetic oligonucleotide
  Sense strand starting at position 1979 of SEQ ID NO: 1884982
acuggaaugcucggaauaa

SEQ ID NO: 2306979 - RNA, 19 nt, Artificial Sequence
  Description of Artificial Sequence: Synthetic oligonucleotide
  Antisense strand to SEQ ID NO: 2306978
uuauuccgagcauuccagu

SEQ ID NO: 2306980 - RNA, 19 nt, Artificial Sequence
  Description of Artificial Sequence: Synthetic oligonucleotide
  Sense strand starting at position 3132 of SEQ ID NO: 1884982
uugaaaguuuccuccuuug

SEQ ID NO: 2306981 - RNA, 19 nt, Artificial Sequence
  Description of Artificial Sequence: Synthetic oligonucleotide
  Antisense strand to SEQ ID NO: 2306980
caaaggaggaaacuuucaa

SEQ ID NO: 2306982 - RNA, 19 nt, Artificial Sequence
  Description of Artificial Sequence: Synthetic oligonucleotide
  Sense strand starting at position 3197 of SEQ ID NO: 1884982
agcgauacugaauguauaa

SEQ ID NO: 2306983 - RNA, 19 nt, Artificial Sequence
  Description of Artificial Sequence: Synthetic oligonucleotide
  Antisense strand to SEQ ID NO: 2306982
uuauacauucaguaucgcu

SEQ ID NO: 2306984 - RNA, 19 nt, Artificial Sequence
  Description of Artificial Sequence: Synthetic oligonucleotide
  Sense strand starting at position 3279 of SEQ ID NO: 1884982
auccacauucuugggaauu

SEQ ID NO: 2306985 - RNA, 19 nt, Artificial Sequence
  Description of Artificial Sequence: Synthetic oligonucleotide
  Antisense strand to SEQ ID NO: 2306984
aauucccaagaauguggau

SEQ ID NO: 2306986 - RNA, 19 nt, Artificial Sequence
  Description of Artificial Sequence: Synthetic oligonucleotide
  Sense strand starting at position 3294 of SEQ ID NO: 1884982
aauuaaaugucacugugag

SEQ ID NO: 2306987 - RNA, 19 nt, Artificial Sequence
  Description of Artificial Sequence: Synthetic oligonucleotide
  Antisense strand to SEQ ID NO: 2306986
cucacagugacauuuaauu

SEQ ID NO: 2306988 - RNA, 19 nt, Artificial Sequence
  Description of Artificial Sequence: Synthetic oligonucleotide
  Sense strand starting at position 3295 of SEQ ID NO: 1884982
auuaaaugucacugugaga

SEQ ID NO: 2306989 - RNA, 19 nt, Artificial Sequence
  Description of Artificial Sequence: Synthetic oligonucleotide
  Antisense strand to SEQ ID NO: 2306988
ucucacagugacauuuaau

SEQ ID NO: 2306990 - RNA, 19 nt, Artificial Sequence
  Description of Artificial Sequence: Synthetic oligonucleotide
  Sense strand starting at position 3340 of SEQ ID NO: 1884982
uaauaagggcucugagacu

SEQ ID NO: 2306991 - RNA, 19 nt, Artificial Sequence
  Description of Artificial Sequence: Synthetic oligonucleotide
  Antisense strand to SEQ ID NO: 2306990
agucucagagcccuuauua

SEQ ID NO: 2306992 - RNA, 19 nt, Artificial Sequence
  Description of Artificial Sequence: Synthetic oligonucleotide
  Sense strand starting at position 3386 of SEQ ID NO: 1884982
cuaguaaggccuugacuac

SEQ ID NO: 2306993 - RNA, 19 nt, Artificial Sequence
  Description of Artificial Sequence: Synthetic oligonucleotide
  Antisense strand to SEQ ID NO: 2306992
guagucaaggccuuacuag

SEQ ID NO: 2306994 - RNA, 19 nt, Artificial Sequence
  Description of Artificial Sequence: Synthetic oligonucleotide
  Sense strand starting at position 3387 of SEQ ID NO: 1884982
uaguaaggccuugacuaca

SEQ ID NO: 2306995 - RNA, 19 nt, Artificial Sequence
  Description of Artificial Sequence: Synthetic oligonucleotide
  Antisense strand to SEQ ID NO: 2306994
uguagucaaggccuuacua

SEQ ID NO: 2306996 - RNA, 19 nt, Artificial Sequence
  Description of Artificial Sequence: Synthetic oligonucleotide
  Sense strand starting at position 3436 of SEQ ID NO: 1884982
gucaacucauugucacaca

SEQ ID NO: 2306997 - RNA, 19 nt, Artificial Sequence
  Description of Artificial Sequence: Synthetic oligonucleotide
  Antisense strand to SEQ ID NO: 2306996
ugugugacaaugaguugac

SEQ ID NO: 2306998 - RNA, 19 nt, Artificial Sequence
  Description of Artificial Sequence: Synthetic oligonucleotide
  Sense strand starting at position 3447 of SEQ ID NO: 1884982
gucacacacuuccugagaa

SEQ ID NO: 2306999 - RNA, 19 nt, Artificial Sequence
  Description of Artificial Sequence: Synthetic oligonucleotide
  Antisense strand to SEQ ID NO: 2306998
uucucaggaagugugugac

SEQ ID NO: 2307000 - RNA, 19 nt, Artificial Sequence
  Description of Artificial Sequence: Synthetic oligonucleotide
  Sense strand starting at position 3519 of SEQ ID NO: 1884982
uuaagaguuaaacggugau

SEQ ID NO: 2307001 - RNA, 19 nt, Artificial Sequence
  Description of Artificial Sequence: Synthetic oligonucleotide
  Antisense strand to SEQ ID NO: 2307000
aucaccguuuaacucuuaa

SEQ ID NO: 2307002 - RNA, 19 nt, Artificial Sequence
  Description of Artificial Sequence: Synthetic oligonucleotide
  Sense strand starting at position 3522 of SEQ ID NO: 1884982
agaguuaaacggugauucu

SEQ ID NO: 2307003 - RNA, 19 nt, Artificial Sequence
  Description of Artificial Sequence: Synthetic oligonucleotide
  Antisense strand to SEQ ID NO: 2307002
agaaucaccguuuaacucu

SEQ ID NO: 2307004 - RNA, 19 nt, Artificial Sequence
  Description of Artificial Sequence: Synthetic oligonucleotide
  Sense strand starting at position 3523 of SEQ ID NO: 1884982
gaguuaaacggugauucua

SEQ ID NO: 2307005 - RNA, 19 nt, Artificial Sequence
  Description of Artificial Sequence: Synthetic oligonucleotide
  Antisense strand to SEQ ID NO: 2307004
uagaaucaccguuuaacuc

SEQ ID NO: 2307006 - RNA, 19 nt, Artificial Sequence
  Description of Artificial Sequence: Synthetic oligonucleotide
  Sense strand starting at position 3525 of SEQ ID NO: 1884982
guuaaacggugauucuaua

SEQ ID NO: 2307007 - RNA, 19 nt, Artificial Sequence
  Description of Artificial Sequence: Synthetic oligonucleotide
  Antisense strand to SEQ ID NO: 2307006
uauagaaucaccguuuaac

SEQ ID NO: 2307008 - RNA, 19 nt, Artificial Sequence
  Description of Artificial Sequence: Synthetic oligonucleotide
  Sense strand starting at position 145 of SEQ ID NO: 1884983
agucaauuccaauaccugu

SEQ ID NO: 2307009 - RNA, 19 nt, Artificial Sequence
  Description of Artificial Sequence: Synthetic oligonucleotide
  Antisense strand to SEQ ID NO: 2307008
acagguauuggaauugacu

SEQ ID NO: 2307010 - RNA, 19 nt, Artificial Sequence
  Description of Artificial Sequence: Synthetic oligonucleotide
  Sense strand starting at position 152 of SEQ ID NO: 1884983
uccaauaccuguucuagag

SEQ ID NO: 2307011 - RNA, 19 nt, Artificial Sequence
  Description of Artificial Sequence: Synthetic oligonucleotide
  Antisense strand to SEQ ID NO: 2307010
cucuagaacagguauugga

SEQ ID NO: 2307012 - RNA, 19 nt, Artificial Sequence
  Description of Artificial Sequence: Synthetic oligonucleotide
  Sense strand starting at position 156 of SEQ ID NO: 1884983
auaccuguucuagagaggu

SEQ ID NO: 2307013 - RNA, 19 nt, Artificial Sequence
  Description of Artificial Sequence: Synthetic oligonucleotide
  Antisense strand to SEQ ID NO: 2307012
accucucuagaacagguau

SEQ ID NO: 2307014 - RNA, 19 nt, Artificial Sequence
  Description of Artificial Sequence: Synthetic oligonucleotide
  Sense strand starting at position 160 of SEQ ID NO: 1884983
cuguucuagagagguacuu

SEQ ID NO: 2307015 - RNA, 19 nt, Artificial Sequence
  Description of Artificial Sequence: Synthetic oligonucleotide
  Antisense strand to SEQ ID NO: 2307014
aaguaccucucuagaacag

SEQ ID NO: 2307016 - RNA, 19 nt, Artificial Sequence
  Description of Artificial Sequence: Synthetic oligonucleotide
  Sense strand starting at position 162 of SEQ ID NO: 1884983
guucuagagagguacuuau

SEQ ID NO: 2307017 - RNA, 19 nt, Artificial Sequence
  Description of Artificial Sequence: Synthetic oligonucleotide
  Antisense strand to SEQ ID NO: 2307016
auaaguaccucucuagaac

SEQ ID NO: 2307018 - RNA, 19 nt, Artificial Sequence
  Description of Artificial Sequence: Synthetic oligonucleotide
  Sense strand starting at position 196 of SEQ ID NO: 1884983
ggcaaugaauuguauuaca

SEQ ID NO: 2307019 - RNA, 19 nt, Artificial Sequence
  Description of Artificial Sequence: Synthetic oligonucleotide
  Antisense strand to SEQ ID NO: 2307018
uguaauacaauucauugcc

SEQ ID NO: 2307020 - RNA, 19 nt, Artificial Sequence
  Description of Artificial Sequence: Synthetic oligonucleotide
  Sense strand starting at position 201 of SEQ ID NO: 1884983
ugaauuguauuacaaggua

SEQ ID NO: 2307021 - RNA, 19 nt, Artificial Sequence
  Description of Artificial Sequence: Synthetic oligonucleotide
  Antisense strand to SEQ ID NO: 2307020
uaccuuguaauacaauuca

SEQ ID NO: 2307022 - RNA, 19 nt, Artificial Sequence
  Description of Artificial Sequence: Synthetic oligonucleotide
  Sense strand starting at position 238 of SEQ ID NO: 1884983
acgccuaugugguauccua

SEQ ID NO: 2307023 - RNA, 19 nt, Artificial Sequence
  Description of Artificial Sequence: Synthetic oligonucleotide
  Antisense strand to SEQ ID NO: 2307022
uaggauaccacauaggcgu

SEQ ID NO: 2307024 - RNA, 19 nt, Artificial Sequence
  Description of Artificial Sequence: Synthetic oligonucleotide
  Sense strand starting at position 251 of SEQ ID NO: 1884983
auccuauuccauggagaua

SEQ ID NO: 2307025 - RNA, 19 nt, Artificial Sequence
  Description of Artificial Sequence: Synthetic oligonucleotide
  Antisense strand to SEQ ID NO: 2307024
uaucuccauggaauaggau

SEQ ID NO: 2307026 - RNA, 19 nt, Artificial Sequence
  Description of Artificial Sequence: Synthetic oligonucleotide
  Sense strand starting at position 375 of SEQ ID NO: 1884983
gcagacaagaagugauuau

SEQ ID NO: 2307027 - RNA, 19 nt, Artificial Sequence
  Description of Artificial Sequence: Synthetic oligonucleotide
  Antisense strand to SEQ ID NO: 2307026
auaaucacuucuugucugc

SEQ ID NO: 2307028 - RNA, 19 nt, Artificial Sequence
  Description of Artificial Sequence: Synthetic oligonucleotide
  Sense strand starting at position 384 of SEQ ID NO: 1884983
aagugauuaucuugagguc

SEQ ID NO: 2307029 - RNA, 19 nt, Artificial Sequence
  Description of Artificial Sequence: Synthetic oligonucleotide
  Antisense strand to SEQ ID NO: 2307028
gaccucaagauaaucacuu

SEQ ID NO: 2307030 - RNA, 19 nt, Artificial Sequence
  Description of Artificial Sequence: Synthetic oligonucleotide
  Sense strand starting at position 387 of SEQ ID NO: 1884983
ugauuaucuugaggucuuu

SEQ ID NO: 2307031 - RNA, 19 nt, Artificial Sequence
  Description of Artificial Sequence: Synthetic oligonucleotide
  Antisense strand to SEQ ID NO: 2307030
aaagaccucaagauaauca

SEQ ID NO: 2307032 - RNA, 19 nt, Artificial Sequence
  Description of Artificial Sequence: Synthetic oligonucleotide
  Sense strand starting at position 452 of SEQ ID NO: 1884983
auugaacaggcuugaagau

SEQ ID NO: 2307033 - RNA, 19 nt, Artificial Sequence
  Description of Artificial Sequence: Synthetic oligonucleotide
  Antisense strand to SEQ ID NO: 2307032
aucuucaagccuguucaau

SEQ ID NO: 2307034 - RNA, 19 nt, Artificial Sequence
  Description of Artificial Sequence: Synthetic oligonucleotide
  Sense strand starting at position 461 of SEQ ID NO: 1884983
gcuugaagauucucgucuu

SEQ ID NO: 2307035 - RNA, 19 nt, Artificial Sequence
  Description of Artificial Sequence: Synthetic oligonucleotide
  Antisense strand to SEQ ID NO: 2307034
aagacgagaaucuucaagc

SEQ ID NO: 2307036 - RNA, 19 nt, Artificial Sequence
  Description of Artificial Sequence: Synthetic oligonucleotide
  Sense strand starting at position 462 of SEQ ID NO: 1884983
cuugaagauucucgucuuu

SEQ ID NO: 2307037 - RNA, 19 nt, Artificial Sequence
  Description of Artificial Sequence: Synthetic oligonucleotide
  Antisense strand to SEQ ID NO: 2307036
aaagacgagaaucuucaag

SEQ ID NO: 2307038 - RNA, 19 nt, Artificial Sequence
  Description of Artificial Sequence: Synthetic oligonucleotide
  Sense strand starting at position 507 of SEQ ID NO: 1884983
gggauuccaugggaaggaa

SEQ ID NO: 2307039 - RNA, 19 nt, Artificial Sequence
  Description of Artificial Sequence: Synthetic oligonucleotide
  Antisense strand to SEQ ID NO: 2307038
uuccuucccauggaauccc

SEQ ID NO: 2307040 - RNA, 19 nt, Artificial Sequence
  Description of Artificial Sequence: Synthetic oligonucleotide
  Sense strand starting at position 550 of SEQ ID NO: 1884983
gugcuaugauuccuaacug

SEQ ID NO: 2307041 - RNA, 19 nt, Artificial Sequence
  Description of Artificial Sequence: Synthetic oligonucleotide
  Antisense strand to SEQ ID NO: 2307040
caguuaggaaucauagcac

SEQ ID NO: 2307042 - RNA, 19 nt, Artificial Sequence
  Description of Artificial Sequence: Synthetic oligonucleotide
  Sense strand starting at position 572 of SEQ ID NO: 1884983
auacauauguaacaggaaa

SEQ ID NO: 2307043 - RNA, 19 nt, Artificial Sequence
  Description of Artificial Sequence: Synthetic oligonucleotide
  Antisense strand to SEQ ID NO: 2307042
uuuccuguuacauauguau

SEQ ID NO: 2307044 - RNA, 19 nt, Artificial Sequence
  Description of Artificial Sequence: Synthetic oligonucleotide
  Sense strand starting at position 649 of SEQ ID NO: 1884983
gcuuuaguuacuugugucu

SEQ ID NO: 2307045 - RNA, 19 nt, Artificial Sequence
  Description of Artificial Sequence: Synthetic oligonucleotide
  Antisense strand to SEQ ID NO: 2307044
agacacaaguaacuaaagc

SEQ ID NO: 2307046 - RNA, 19 nt, Artificial Sequence
  Description of Artificial Sequence: Synthetic oligonucleotide
  Sense strand starting at position 651 of SEQ ID NO: 1884983
uuuaguuacuugugucuuu

SEQ ID NO: 2307047 - RNA, 19 nt, Artificial Sequence
  Description of Artificial Sequence: Synthetic oligonucleotide
  Antisense strand to SEQ ID NO: 2307046
aaagacacaaguaacuaaa

SEQ ID NO: 2307048 - RNA, 19 nt, Artificial Sequence
  Description of Artificial Sequence: Synthetic oligonucleotide
  Sense strand starting at position 807 of SEQ ID NO: 1884983
auaugacaccucggaauac

SEQ ID NO: 2307049 - RNA, 19 nt, Artificial Sequence
  Description of Artificial Sequence: Synthetic oligonucleotide
  Antisense strand to SEQ ID NO: 2307048
guauuccgaggugucauau

SEQ ID NO: 2307050 - RNA, 19 nt, Artificial Sequence
  Description of Artificial Sequence: Synthetic oligonucleotide
  Sense strand starting at position 895 of SEQ ID NO: 1884983
guuuauaaaccugggauaa

SEQ ID NO: 2307051 - RNA, 19 nt, Artificial Sequence
  Description of Artificial Sequence: Synthetic oligonucleotide
  Antisense strand to SEQ ID NO: 2307050
uuaucccagguuuauaaac

SEQ ID NO: 2307052 - RNA, 19 nt, Artificial Sequence
  Description of Artificial Sequence: Synthetic oligonucleotide
  Sense strand starting at position 897 of SEQ ID NO: 1884983
uuauaaaccugggauaagu

SEQ ID NO: 2307053 - RNA, 19 nt, Artificial Sequence
  Description of Artificial Sequence: Synthetic oligonucleotide
  Antisense strand to SEQ ID NO: 2307052
acuuaucccagguuuauaa

SEQ ID NO: 2307054 - RNA, 19 nt, Artificial Sequence
  Description of Artificial Sequence: Synthetic oligonucleotide
  Sense strand starting at position 920 of SEQ ID NO: 1884983
ugaucuuucccuuaagcag

SEQ ID NO: 2307055 - RNA, 19 nt, Artificial Sequence
  Description of Artificial Sequence: Synthetic oligonucleotide
  Antisense strand to SEQ ID NO: 2307054
cugcuuaagggaaagauca

SEQ ID NO: 2307056 - RNA, 19 nt, Artificial Sequence
  Description of Artificial Sequence: Synthetic oligonucleotide
  Sense strand starting at position 935 of SEQ ID NO: 1884983
gcaggucucucgugugaga

SEQ ID NO: 2307057 - RNA, 19 nt, Artificial Sequence
  Description of Artificial Sequence: Synthetic oligonucleotide
  Antisense strand to SEQ ID NO: 2307056
ucucacacgagagaccugc

SEQ ID NO: 2307058 - RNA, 19 nt, Artificial Sequence
  Description of Artificial Sequence: Synthetic oligonucleotide
  Sense strand starting at position 1321 of SEQ ID NO: 1884983
aaacuuaggucuugcuaag

SEQ ID NO: 2307059 - RNA, 19 nt, Artificial Sequence
  Description of Artificial Sequence: Synthetic oligonucleotide
  Antisense strand to SEQ ID NO: 2307058
cuuagcaagaccuaaguuu

SEQ ID NO: 2307060 - RNA, 19 nt, Artificial Sequence
  Description of Artificial Sequence: Synthetic oligonucleotide
  Sense strand starting at position 1345 of SEQ ID NO: 1884983
cccaguuauuaugagauca

SEQ ID NO: 2307061 - RNA, 19 nt, Artificial Sequence
  Description of Artificial Sequence: Synthetic oligonucleotide
  Antisense strand to SEQ ID NO: 2307060
ugaucucauaauaacuggg

SEQ ID NO: 2307062 - RNA, 19 nt, Artificial Sequence
  Description of Artificial Sequence: Synthetic oligonucleotide
  Sense strand starting at position 3120 of SEQ ID NO: 1884983
cccauuugguuguuuguaa

SEQ ID NO: 2307063 - RNA, 19 nt, Artificial Sequence
  Description of Artificial Sequence: Synthetic oligonucleotide
  Antisense strand to SEQ ID NO: 2307062
uuacaaacaaccaaauggg

SEQ ID NO: 2307064 - RNA, 19 nt, Artificial Sequence
  Description of Artificial Sequence: Synthetic oligonucleotide
  Sense strand starting at position 3124 of SEQ ID NO: 1884983
uuugguuguuuguaacaaa

SEQ ID NO: 2307065 - RNA, 19 nt, Artificial Sequence
  Description of Artificial Sequence: Synthetic oligonucleotide
  Antisense strand to SEQ ID NO: 2307064
uuuguuacaaacaaccaaa

SEQ ID NO: 2307066 - RNA, 19 nt, Artificial Sequence
  Description of Artificial Sequence: Synthetic oligonucleotide
  Sense strand starting at position 3127 of SEQ ID NO: 1884983
gguuguuuguaacaaaguu

SEQ ID NO: 2307067 - RNA, 19 nt, Artificial Sequence
  Description of Artificial Sequence: Synthetic oligonucleotide
  Antisense strand to SEQ ID NO: 2307066
aacuuuguuacaaacaacc

SEQ ID NO: 2307068 - RNA, 19 nt, Artificial Sequence
  Description of Artificial Sequence: Synthetic oligonucleotide
  Sense strand starting at position 3143 of SEQ ID NO: 1884983
guuauaucuuuauccaugu

SEQ ID NO: 2307069 - RNA, 19 nt, Artificial Sequence
  Description of Artificial Sequence: Synthetic oligonucleotide
  Antisense strand to SEQ ID NO: 2307068
acauggauaaagauauaac

SEQ ID NO: 2307070 - RNA, 19 nt, Artificial Sequence
  Description of Artificial Sequence: Synthetic oligonucleotide
  Sense strand starting at position 40 of SEQ ID NO: 1884984
ugggcauauacuuauggua

SEQ ID NO: 2307071 - RNA, 19 nt, Artificial Sequence
  Description of Artificial Sequence: Synthetic oligonucleotide
  Antisense strand to SEQ ID NO: 2307070
uaccauaaguauaugccca

SEQ ID NO: 2307072 - RNA, 19 nt, Artificial Sequence
  Description of Artificial Sequence: Synthetic oligonucleotide
  Sense strand starting at position 147 of SEQ ID NO: 1884984
caguguauacuauguacca

SEQ ID NO: 2307073 - RNA, 19 nt, Artificial Sequence
  Description of Artificial Sequence: Synthetic oligonucleotide
  Antisense strand to SEQ ID NO: 2307072
ugguacauaguauacacug

SEQ ID NO: 2307074 - RNA, 19 nt, Artificial Sequence
  Description of Artificial Sequence: Synthetic oligonucleotide
  Sense strand starting at position 165 of SEQ ID NO: 1884984
agguucuaagugcaaugau

SEQ ID NO: 2307075 - RNA, 19 nt, Artificial Sequence
  Description of Artificial Sequence: Synthetic oligonucleotide
  Antisense strand to SEQ ID NO: 2307074
aucauugcacuuagaaccu

SEQ ID NO: 2307076 - RNA, 19 nt, Artificial Sequence
  Description of Artificial Sequence: Synthetic oligonucleotide
  Sense strand starting at position 175 of SEQ ID NO: 1884984
ugcaaugauaccgaaaguu

SEQ ID NO: 2307077 - RNA, 19 nt, Artificial Sequence
  Description of Artificial Sequence: Synthetic oligonucleotide
  Antisense strand to SEQ ID NO: 2307076
aacuuucgguaucauugca

SEQ ID NO: 2307078 - RNA, 19 nt, Artificial Sequence
  Description of Artificial Sequence: Synthetic oligonucleotide
  Sense strand starting at position 277 of SEQ ID NO: 1884984
agauguugauaagugcuau

SEQ ID NO: 2307079 - RNA, 19 nt, Artificial Sequence
  Description of Artificial Sequence: Synthetic oligonucleotide
  Antisense strand to SEQ ID NO: 2307078
auagcacuuaucaacaucu

SEQ ID NO: 2307080 - RNA, 19 nt, Artificial Sequence
  Description of Artificial Sequence: Synthetic oligonucleotide
  Sense strand starting at position 458 of SEQ ID NO: 1884984
ggaagauacuuccaggaaa

SEQ ID NO: 2307081 - RNA, 19 nt, Artificial Sequence
  Description of Artificial Sequence: Synthetic oligonucleotide
  Antisense strand to SEQ ID NO: 2307080
uuuccuggaaguaucuucc

SEQ ID NO: 2307082 - RNA, 19 nt, Artificial Sequence
  Description of Artificial Sequence: Synthetic oligonucleotide
  Sense strand starting at position 609 of SEQ ID NO: 1884984
aaggguuucuaaguggcau

SEQ ID NO: 2307083 - RNA, 19 nt, Artificial Sequence
  Description of Artificial Sequence: Synthetic oligonucleotide
  Antisense strand to SEQ ID NO: 2307082
augccacuuagaaacccuu

SEQ ID NO: 2307084 - RNA, 19 nt, Artificial Sequence
  Description of Artificial Sequence: Synthetic oligonucleotide
  Sense strand starting at position 828 of SEQ ID NO: 1884984
guagauucuggaugcaauu

SEQ ID NO: 2307085 - RNA, 19 nt, Artificial Sequence
  Description of Artificial Sequence: Synthetic oligonucleotide
  Antisense strand to SEQ ID NO: 2307084
aauugcauccagaaucuac

SEQ ID NO: 2307086 - RNA, 19 nt, Artificial Sequence
  Description of Artificial Sequence: Synthetic oligonucleotide
  Sense strand starting at position 857 of SEQ ID NO: 1884984
aucgacuagauuugugcau

SEQ ID NO: 2307087 - RNA, 19 nt, Artificial Sequence
  Description of Artificial Sequence: Synthetic oligonucleotide
  Antisense strand to SEQ ID NO: 2307086
augcacaaaucuagucgau

SEQ ID NO: 2307088 - RNA, 19 nt, Artificial Sequence
  Description of Artificial Sequence: Synthetic oligonucleotide
  Sense strand starting at position 898 of SEQ ID NO: 1884984
gaaagaauguaguaaagaa

SEQ ID NO: 2307089 - RNA, 19 nt, Artificial Sequence
  Description of Artificial Sequence: Synthetic oligonucleotide
  Antisense strand to SEQ ID NO: 2307088
uucuuuacuacauucuuuc

SEQ ID NO: 2307090 - RNA, 19 nt, Artificial Sequence
  Description of Artificial Sequence: Synthetic oligonucleotide
  Sense strand starting at position 923 of SEQ ID NO: 1884984
aguguuucucccuagcaaa

SEQ ID NO: 2307091 - RNA, 19 nt, Artificial Sequence
  Description of Artificial Sequence: Synthetic oligonucleotide
  Antisense strand to SEQ ID NO: 2307090
uuugcuagggagaaacacu

SEQ ID NO: 2307092 - RNA, 19 nt, Artificial Sequence
  Description of Artificial Sequence: Synthetic oligonucleotide
  Sense strand starting at position 1006 of SEQ ID NO: 1884984
cgagcagauacucagucuu

SEQ ID NO: 2307093 - RNA, 19 nt, Artificial Sequence
  Description of Artificial Sequence: Synthetic oligonucleotide
  Antisense strand to SEQ ID NO: 2307092
aagacugaguaucugcucg

SEQ ID NO: 2307094 - RNA, 19 nt, Artificial Sequence
  Description of Artificial Sequence: Synthetic oligonucleotide
  Sense strand starting at position 1008 of SEQ ID NO: 1884984
agcagauacucagucuuaa

SEQ ID NO: 2307095 - RNA, 19 nt, Artificial Sequence
  Description of Artificial Sequence: Synthetic oligonucleotide
  Antisense strand to SEQ ID NO: 2307094
uuaagacugaguaucugcu

SEQ ID NO: 2307096 - RNA, 19 nt, Artificial Sequence
  Description of Artificial Sequence: Synthetic oligonucleotide
  Sense strand starting at position 1020 of SEQ ID NO: 1884984
gucuuaaacuugcugauuu

SEQ ID NO: 2307097 - RNA, 19 nt, Artificial Sequence
  Description of Artificial Sequence: Synthetic oligonucleotide
  Antisense strand to SEQ ID NO: 2307096
aaaucagcaaguuuaagac

SEQ ID NO: 2307098 - RNA, 19 nt, Artificial Sequence
  Description of Artificial Sequence: Synthetic oligonucleotide
  Sense strand starting at position 1038 of SEQ ID NO: 1884984
uugauaugccuaugagacc

SEQ ID NO: 2307099 - RNA, 19 nt, Artificial Sequence
  Description of Artificial Sequence: Synthetic oligonucleotide
  Antisense strand to SEQ ID NO: 2307098
ggucucauaggcauaucaa

SEQ ID NO: 2307100 - RNA, 19 nt, Artificial Sequence
  Description of Artificial Sequence: Synthetic oligonucleotide
  Sense strand starting at position 1080 of SEQ ID NO: 1884984
ggcaguugaauacaugagu

SEQ ID NO: 2307101 - RNA, 19 nt, Artificial Sequence
  Description of Artificial Sequence: Synthetic oligonucleotide
  Antisense strand to SEQ ID NO: 2307100
acucauguauucaacugcc

SEQ ID NO: 2307102 - RNA, 19 nt, Artificial Sequence
  Description of Artificial Sequence: Synthetic oligonucleotide
  Sense strand starting at position 1112 of SEQ ID NO: 1884984
aaagguguggaucaaaguu

SEQ ID NO: 2307103 - RNA, 19 nt, Artificial Sequence
  Description of Artificial Sequence: Synthetic oligonucleotide
  Antisense strand to SEQ ID NO: 2307102
aacuuugauccacaccuuu

SEQ ID NO: 2307104 - RNA, 19 nt, Artificial Sequence
  Description of Artificial Sequence: Synthetic oligonucleotide
  Sense strand starting at position 1218 of SEQ ID NO: 1884984
ucugcagacugagcauuau

SEQ ID NO: 2307105 - RNA, 19 nt, Artificial Sequence
  Description of Artificial Sequence: Synthetic oligonucleotide
  Antisense strand to SEQ ID NO: 2307104
auaaugcucagucugcaga

SEQ ID NO: 2307106 - RNA, 19 nt, Artificial Sequence
  Description of Artificial Sequence: Synthetic oligonucleotide
  Sense strand starting at position 1224 of SEQ ID NO: 1884984
gacugagcauuaucgucaa

SEQ ID NO: 2307107 - RNA, 19 nt, Artificial Sequence
  Description of Artificial Sequence: Synthetic oligonucleotide
  Antisense strand to SEQ ID NO: 2307106
uugacgauaaugcucaguc

SEQ ID NO: 2307108 - RNA, 19 nt, Artificial Sequence
  Description of Artificial Sequence: Synthetic oligonucleotide
  Sense strand starting at position 1227 of SEQ ID NO: 1884984
ugagcauuaucgucaagau

SEQ ID NO: 2307109 - RNA, 19 nt, Artificial Sequence
  Description of Artificial Sequence: Synthetic oligonucleotide
  Antisense strand to SEQ ID NO: 2307108
aucuugacgauaaugcuca

SEQ ID NO: 2307110 - RNA, 19 nt, Artificial Sequence
  Description of Artificial Sequence: Synthetic oligonucleotide
  Sense strand starting at position 1228 of SEQ ID NO: 1884984
gagcauuaucgucaagaug

SEQ ID NO: 2307111 - RNA, 19 nt, Artificial Sequence
  Description of Artificial Sequence: Synthetic oligonucleotide
  Antisense strand to SEQ ID NO: 2307110
caucuugacgauaaugcuc

SEQ ID NO: 2307112 - RNA, 19 nt, Artificial Sequence
  Description of Artificial Sequence: Synthetic oligonucleotide
  Sense strand starting at position 1231 of SEQ ID NO: 1884984
cauuaucgucaagaugauu

SEQ ID NO: 2307113 - RNA, 19 nt, Artificial Sequence
  Description of Artificial Sequence: Synthetic oligonucleotide
  Antisense strand to SEQ ID NO: 2307112
aaucaucuugacgauaaug

SEQ ID NO: 2307114 - RNA, 19 nt, Artificial Sequence
  Description of Artificial Sequence: Synthetic oligonucleotide
  Sense strand starting at position 1234 of SEQ ID NO: 1884984
uaucgucaagaugauuaua

SEQ ID NO: 2307115 - RNA, 19 nt, Artificial Sequence
  Description of Artificial Sequence: Synthetic oligonucleotide
  Antisense strand to SEQ ID NO: 2307114
uauaaucaucuugacgaua

SEQ ID NO: 2307116 - RNA, 19 nt, Artificial Sequence
  Description of Artificial Sequence: Synthetic oligonucleotide
  Sense strand starting at position 1237 of SEQ ID NO: 1884984
cgucaagaugauuauaggu

SEQ ID NO: 2307117 - RNA, 19 nt, Artificial Sequence
  Description of Artificial Sequence: Synthetic oligonucleotide
  Antisense strand to SEQ ID NO: 2307116
accuauaaucaucuugacg

SEQ ID NO: 2307118 - RNA, 19 nt, Artificial Sequence
  Description of Artificial Sequence: Synthetic oligonucleotide
  Sense strand starting at position 1553 of SEQ ID NO: 1884984
gaauccuguccugagguca

SEQ ID NO: 2307119 - RNA, 19 nt, Artificial Sequence
  Description of Artificial Sequence: Synthetic oligonucleotide
  Antisense strand to SEQ ID NO: 2307118
ugaccucaggacaggauuc

SEQ ID NO: 2307120 - RNA, 19 nt, Artificial Sequence
  Description of Artificial Sequence: Synthetic oligonucleotide
  Sense strand starting at position 1979 of SEQ ID NO: 1884984
acuggaaugcucggaauaa

SEQ ID NO: 2307121 - RNA, 19 nt, Artificial Sequence
  Description of Artificial Sequence: Synthetic oligonucleotide
  Antisense strand to SEQ ID NO: 2307120
uuauuccgagcauuccagu

SEQ ID NO: 2307122 - RNA, 19 nt, Artificial Sequence
  Description of Artificial Sequence: Synthetic oligonucleotide
  Sense strand starting at position 3132 of SEQ ID NO: 1884984
uugaaaguuuccuccuuug

SEQ ID NO: 2307123 - RNA, 19 nt, Artificial Sequence
  Description of Artificial Sequence: Synthetic oligonucleotide
  Antisense strand to SEQ ID NO: 2307122
caaaggaggaaacuuucaa

SEQ ID NO: 2307124 - RNA, 19 nt, Artificial Sequence
  Description of Artificial Sequence: Synthetic oligonucleotide
  Sense strand starting at position 3197 of SEQ ID NO: 1884984
agcgauacugaauguauaa

SEQ ID NO: 2307125 - RNA, 19 nt, Artificial Sequence
  Description of Artificial Sequence: Synthetic oligonucleotide
  Antisense strand to SEQ ID NO: 2307124
uuauacauucaguaucgcu

SEQ ID NO: 2307126 - RNA, 19 nt, Artificial Sequence
  Description of Artificial Sequence: Synthetic oligonucleotide
  Sense strand starting at position 3279 of SEQ ID NO: 1884984
auccacauucuugggaauu

SEQ ID NO: 2307127 - RNA, 19 nt, Artificial Sequence
  Description of Artificial Sequence: Synthetic oligonucleotide
  Antisense strand to SEQ ID NO: 2307126
aauucccaagaauguggau

SEQ ID NO: 2307128 - RNA, 19 nt, Artificial Sequence
  Description of Artificial Sequence: Synthetic oligonucleotide
  Sense strand starting at position 3294 of SEQ ID NO: 1884984
aauuaaaugucacugugag

SEQ ID NO: 2307129 - RNA, 19 nt, Artificial Sequence
  Description of Artificial Sequence: Synthetic oligonucleotide
  Antisense strand to SEQ ID NO: 2307128
cucacagugacauuuaauu

SEQ ID NO: 2307130 - RNA, 19 nt, Artificial Sequence
  Description of Artificial Sequence: Synthetic oligonucleotide
  Sense strand starting at position 3295 of SEQ ID NO: 1884984
auuaaaugucacugugaga

SEQ ID NO: 2307131 - RNA, 19 nt, Artificial Sequence
  Description of Artificial Sequence: Synthetic oligonucleotide
  Antisense strand to SEQ ID NO: 2307130
ucucacagugacauuuaau

SEQ ID NO: 2307132 - RNA, 19 nt, Artificial Sequence
  Description of Artificial Sequence: Synthetic oligonucleotide
  Sense strand starting at position 3340 of SEQ ID NO: 1884984
uaauaagggcucugagacu

SEQ ID NO: 2307133 - RNA, 19 nt, Artificial Sequence
  Description of Artificial Sequence: Synthetic oligonucleotide
  Antisense strand to SEQ ID NO: 2307132
agucucagagcccuuauua

SEQ ID NO: 2307134 - RNA, 19 nt, Artificial Sequence
  Description of Artificial Sequence: Synthetic oligonucleotide
  Sense strand starting at position 3386 of SEQ ID NO: 1884984
cuaguaaggccuugacuac

SEQ ID NO: 2307135 - RNA, 19 nt, Artificial Sequence
  Description of Artificial Sequence: Synthetic oligonucleotide
  Antisense strand to SEQ ID NO: 2307134
guagucaaggccuuacuag

SEQ ID NO: 2307136 - RNA, 19 nt, Artificial Sequence
  Description of Artificial Sequence: Synthetic oligonucleotide
  Sense strand starting at position 3387 of SEQ ID NO: 1884984
uaguaaggccuugacuaca

SEQ ID NO: 2307137 - RNA, 19 nt, Artificial Sequence
  Description of Artificial Sequence: Synthetic oligonucleotide
  Antisense strand to SEQ ID NO: 2307136
uguagucaaggccuuacua

SEQ ID NO: 2307138 - RNA, 19 nt, Artificial Sequence
  Description of Artificial Sequence: Synthetic oligonucleotide
  Sense strand starting at position 3436 of SEQ ID NO: 1884984
gucaacucauugucacaca

SEQ ID NO: 2307139 - RNA, 19 nt, Artificial Sequence
  Description of Artificial Sequence: Synthetic oligonucleotide
  Antisense strand to SEQ ID NO: 2307138
ugugugacaaugaguugac

SEQ ID NO: 2307140 - RNA, 19 nt, Artificial Sequence
  Description of Artificial Sequence: Synthetic oligonucleotide
  Sense strand starting at position 3447 of SEQ ID NO: 1884984
gucacacacuuccugagaa

SEQ ID NO: 2307141 - RNA, 19 nt, Artificial Sequence
  Description of Artificial Sequence: Synthetic oligonucleotide
  Antisense strand to SEQ ID NO: 2307140
uucucaggaagugugugac

SEQ ID NO: 2307142 - RNA, 19 nt, Artificial Sequence
  Description of Artificial Sequence: Synthetic oligonucleotide
  Sense strand starting at position 3519 of SEQ ID NO: 1884984
uuaagaguuaaacggugau

SEQ ID NO: 2307143 - RNA, 19 nt, Artificial Sequence
  Description of Artificial Sequence: Synthetic oligonucleotide
  Antisense strand to SEQ ID NO: 2307142
aucaccguuuaacucuuaa

SEQ ID NO: 2307144 - RNA, 19 nt, Artificial Sequence
  Description of Artificial Sequence: Synthetic oligonucleotide
  Sense strand starting at position 3522 of SEQ ID NO: 1884984
agaguuaaacggugauucu

SEQ ID NO: 2307145 - RNA, 19 nt, Artificial Sequence
  Description of Artificial Sequence: Synthetic oligonucleotide
  Antisense strand to SEQ ID NO: 2307144
agaaucaccguuuaacucu

SEQ ID NO: 2307146 - RNA, 19 nt, Artificial Sequence
  Description of Artificial Sequence: Synthetic oligonucleotide
  Sense strand starting at position 3523 of SEQ ID NO: 1884984
gaguuaaacggugauucua

SEQ ID NO: 2307147 - RNA, 19 nt, Artificial Sequence
  Description of Artificial Sequence: Synthetic oligonucleotide
  Antisense strand to SEQ ID NO: 2307146
uagaaucaccguuuaacuc

SEQ ID NO: 2307148 - RNA, 19 nt, Artificial Sequence
  Description of Artificial Sequence: Synthetic oligonucleotide
  Sense strand starting at position 3525 of SEQ ID NO: 1884984
guuaaacggugauucuaua

SEQ ID NO: 2307149 - RNA, 19 nt, Artificial Sequence
  Description of Artificial Sequence: Synthetic oligonucleotide
  Antisense strand to SEQ ID NO: 2307148
uauagaaucaccguuuaac

SEQ ID NO: 2307150 - RNA, 19 nt, Artificial Sequence
  Description of Artificial Sequence: Synthetic oligonucleotide
  Sense strand starting at position 145 of SEQ ID NO: 1884985
agucaauuccaauaccugu

SEQ ID NO: 2307151 - RNA, 19 nt, Artificial Sequence
  Description of Artificial Sequence: Synthetic oligonucleotide
  Antisense strand to SEQ ID NO: 2307150
acagguauuggaauugacu

SEQ ID NO: 2307152 - RNA, 19 nt, Artificial Sequence
  Description of Artificial Sequence: Synthetic oligonucleotide
  Sense strand starting at position 152 of SEQ ID NO: 1884985
uccaauaccuguucuagag

SEQ ID NO: 2307153 - RNA, 19 nt, Artificial Sequence
  Description of Artificial Sequence: Synthetic oligonucleotide
  Antisense strand to SEQ ID NO: 2307152
cucuagaacagguauugga

SEQ ID NO: 2307154 - RNA, 19 nt, Artificial Sequence
  Description of Artificial Sequence: Synthetic oligonucleotide
  Sense strand starting at position 156 of SEQ ID NO: 1884985
auaccuguucuagagaggu

SEQ ID NO: 2307155 - RNA, 19 nt, Artificial Sequence
  Description of Artificial Sequence: Synthetic oligonucleotide
  Antisense strand to SEQ ID NO: 2307154
accucucuagaacagguau

SEQ ID NO: 2307156 - RNA, 19 nt, Artificial Sequence
  Description of Artificial Sequence: Synthetic oligonucleotide
  Sense strand starting at position 160 of SEQ ID NO: 1884985
cuguucuagagagguacuu

SEQ ID NO: 2307157 - RNA, 19 nt, Artificial Sequence
  Description of Artificial Sequence: Synthetic oligonucleotide
  Antisense strand to SEQ ID NO: 2307156
aaguaccucucuagaacag

SEQ ID NO: 2307158 - RNA, 19 nt, Artificial Sequence
  Description of Artificial Sequence: Synthetic oligonucleotide
  Sense strand starting at position 162 of SEQ ID NO: 1884985
guucuagagagguacuuau

SEQ ID NO: 2307159 - RNA, 19 nt, Artificial Sequence
  Description of Artificial Sequence: Synthetic oligonucleotide
  Antisense strand to SEQ ID NO: 2307158
auaaguaccucucuagaac

SEQ ID NO: 2307160 - RNA, 19 nt, Artificial Sequence
  Description of Artificial Sequence: Synthetic oligonucleotide
  Sense strand starting at position 196 of SEQ ID NO: 1884985
ggcaaugaauuguauuaca

SEQ ID NO: 2307161 - RNA, 19 nt, Artificial Sequence
  Description of Artificial Sequence: Synthetic oligonucleotide
  Antisense strand to SEQ ID NO: 2307160
uguaauacaauucauugcc

SEQ ID NO: 2307162 - RNA, 19 nt, Artificial Sequence
  Description of Artificial Sequence: Synthetic oligonucleotide
  Sense strand starting at position 201 of SEQ ID NO: 1884985
ugaauuguauuacaaggua

SEQ ID NO: 2307163 - RNA, 19 nt, Artificial Sequence
  Description of Artificial Sequence: Synthetic oligonucleotide
  Antisense strand to SEQ ID NO: 2307162
uaccuuguaauacaauuca

SEQ ID NO: 2307164 - RNA, 19 nt, Artificial Sequence
  Description of Artificial Sequence: Synthetic oligonucleotide
  Sense strand starting at position 238 of SEQ ID NO: 1884985
acgccuaugugguauccua

SEQ ID NO: 2307165 - RNA, 19 nt, Artificial Sequence
  Description of Artificial Sequence: Synthetic oligonucleotide
  Antisense strand to SEQ ID NO: 2307164
uaggauaccacauaggcgu

SEQ ID NO: 2307166 - RNA, 19 nt, Artificial Sequence
  Description of Artificial Sequence: Synthetic oligonucleotide
  Sense strand starting at position 251 of SEQ ID NO: 1884985
auccuauuccauggagaua

SEQ ID NO: 2307167 - RNA, 19 nt, Artificial Sequence
  Description of Artificial Sequence: Synthetic oligonucleotide
  Antisense strand to SEQ ID NO: 2307166
uaucuccauggaauaggau

SEQ ID NO: 2307168 - RNA, 19 nt, Artificial Sequence
  Description of Artificial Sequence: Synthetic oligonucleotide
  Sense strand starting at position 375 of SEQ ID NO: 1884985
gcagacaagaagugauuau

SEQ ID NO: 2307169 - RNA, 19 nt, Artificial Sequence
  Description of Artificial Sequence: Synthetic oligonucleotide
  Antisense strand to SEQ ID NO: 2307168
auaaucacuucuugucugc

SEQ ID NO: 2307170 - RNA, 19 nt, Artificial Sequence
  Description of Artificial Sequence: Synthetic oligonucleotide
  Sense strand starting at position 384 of SEQ ID NO: 1884985
aagugauuaucuugagguc

SEQ ID NO: 2307171 - RNA, 19 nt, Artificial Sequence
  Description of Artificial Sequence: Synthetic oligonucleotide
  Antisense strand to SEQ ID NO: 2307170
gaccucaagauaaucacuu

SEQ ID NO: 2307172 - RNA, 19 nt, Artificial Sequence
  Description of Artificial Sequence: Synthetic oligonucleotide
  Sense strand starting at position 387 of SEQ ID NO: 1884985
ugauuaucuugaggucuuu

SEQ ID NO: 2307173 - RNA, 19 nt, Artificial Sequence
  Description of Artificial Sequence: Synthetic oligonucleotide
  Antisense strand to SEQ ID NO: 2307172
aaagaccucaagauaauca

SEQ ID NO: 2307174 - RNA, 19 nt, Artificial Sequence
  Description of Artificial Sequence: Synthetic oligonucleotide
  Sense strand starting at position 452 of SEQ ID NO: 1884985
auugaacaggcuugaagau

SEQ ID NO: 2307175 - RNA, 19 nt, Artificial Sequence
  Description of Artificial Sequence: Synthetic oligonucleotide
  Antisense strand to SEQ ID NO: 2307174
aucuucaagccuguucaau

SEQ ID NO: 2307176 - RNA, 19 nt, Artificial Sequence
  Description of Artificial Sequence: Synthetic oligonucleotide
  Sense strand starting at position 461 of SEQ ID NO: 1884985
gcuugaagauucucgucuu

SEQ ID NO: 2307177 - RNA, 19 nt, Artificial Sequence
  Description of Artificial Sequence: Synthetic oligonucleotide
  Antisense strand to SEQ ID NO: 2307176
aagacgagaaucuucaagc

SEQ ID NO: 2307178 - RNA, 19 nt, Artificial Sequence
  Description of Artificial Sequence: Synthetic oligonucleotide
  Sense strand starting at position 462 of SEQ ID NO: 1884985
cuugaagauucucgucuuu

SEQ ID NO: 2307179 - RNA, 19 nt, Artificial Sequence
  Description of Artificial Sequence: Synthetic oligonucleotide
  Antisense strand to SEQ ID NO: 2307178
aaagacgagaaucuucaag

SEQ ID NO: 2307180 - RNA, 19 nt, Artificial Sequence
  Description of Artificial Sequence: Synthetic oligonucleotide
  Sense strand starting at position 507 of SEQ ID NO: 1884985
gggauuccaugggaaggaa

SEQ ID NO: 2307181 - RNA, 19 nt, Artificial Sequence
  Description of Artificial Sequence: Synthetic oligonucleotide
  Antisense strand to SEQ ID NO: 2307180
uuccuucccauggaauccc

SEQ ID NO: 2307182 - RNA, 19 nt, Artificial Sequence
  Description of Artificial Sequence: Synthetic oligonucleotide
  Sense strand starting at position 550 of SEQ ID NO: 1884985
gugcuaugauuccuaacug

SEQ ID NO: 2307183 - RNA, 19 nt, Artificial Sequence
  Description of Artificial Sequence: Synthetic oligonucleotide
  Antisense strand to SEQ ID NO: 2307182
caguuaggaaucauagcac

SEQ ID NO: 2307184 - RNA, 19 nt, Artificial Sequence
  Description of Artificial Sequence: Synthetic oligonucleotide
  Sense strand starting at position 572 of SEQ ID NO: 1884985
auacauauguaacaggaaa

SEQ ID NO: 2307185 - RNA, 19 nt, Artificial Sequence
  Description of Artificial Sequence: Synthetic oligonucleotide
  Antisense strand to SEQ ID NO: 2307184
uuuccuguuacauauguau

SEQ ID NO: 2307186 - RNA, 19 nt, Artificial Sequence
  Description of Artificial Sequence: Synthetic oligonucleotide
  Sense strand starting at position 649 of SEQ ID NO: 1884985
gcuuuaguuacuugugucu

SEQ ID NO: 2307187 - RNA, 19 nt, Artificial Sequence
  Description of Artificial Sequence: Synthetic oligonucleotide
  Antisense strand to SEQ ID NO: 2307186
agacacaaguaacuaaagc

SEQ ID NO: 2307188 - RNA, 19 nt, Artificial Sequence
  Description of Artificial Sequence: Synthetic oligonucleotide
  Sense strand starting at position 651 of SEQ ID NO: 1884985
uuuaguuacuugugucuuu

SEQ ID NO: 2307189 - RNA, 19 nt, Artificial Sequence
  Description of Artificial Sequence: Synthetic oligonucleotide
  Antisense strand to SEQ ID NO: 2307188
aaagacacaaguaacuaaa

SEQ ID NO: 2307190 - RNA, 19 nt, Artificial Sequence
  Description of Artificial Sequence: Synthetic oligonucleotide
  Sense strand starting at position 807 of SEQ ID NO: 1884985
auaugacaccucggaauac

SEQ ID NO: 2307191 - RNA, 19 nt, Artificial Sequence
  Description of Artificial Sequence: Synthetic oligonucleotide
  Antisense strand to SEQ ID NO: 2307190
guauuccgaggugucauau

SEQ ID NO: 2307192 - RNA, 19 nt, Artificial Sequence
  Description of Artificial Sequence: Synthetic oligonucleotide
  Sense strand starting at position 895 of SEQ ID NO: 1884985
guuuauaaaccugggauaa

SEQ ID NO: 2307193 - RNA, 19 nt, Artificial Sequence
  Description of Artificial Sequence: Synthetic oligonucleotide
  Antisense strand to SEQ ID NO: 2307192
uuaucccagguuuauaaac

SEQ ID NO: 2307194 - RNA, 19 nt, Artificial Sequence
  Description of Artificial Sequence: Synthetic oligonucleotide
  Sense strand starting at position 897 of SEQ ID NO: 1884985
uuauaaaccugggauaagu

SEQ ID NO: 2307195 - RNA, 19 nt, Artificial Sequence
  Description of Artificial Sequence: Synthetic oligonucleotide
  Antisense strand to SEQ ID NO: 2307194
acuuaucccagguuuauaa

SEQ ID NO: 2307196 - RNA, 19 nt, Artificial Sequence
  Description of Artificial Sequence: Synthetic oligonucleotide
  Sense strand starting at position 920 of SEQ ID NO: 1884985
ugaucuuucccuuaagcag

SEQ ID NO: 2307197 - RNA, 19 nt, Artificial Sequence
  Description of Artificial Sequence: Synthetic oligonucleotide
  Antisense strand to SEQ ID NO: 2307196
cugcuuaagggaaagauca

SEQ ID NO: 2307198 - RNA, 19 nt, Artificial Sequence
  Description of Artificial Sequence: Synthetic oligonucleotide
  Sense strand starting at position 935 of SEQ ID NO: 1884985
gcaggucucucgugugaga

SEQ ID NO: 2307199 - RNA, 19 nt, Artificial Sequence
  Description of Artificial Sequence: Synthetic oligonucleotide
  Antisense strand to SEQ ID NO: 2307198
ucucacacgagagaccugc

SEQ ID NO: 2307200 - RNA, 19 nt, Artificial Sequence
  Description of Artificial Sequence: Synthetic oligonucleotide
  Sense strand starting at position 1321 of SEQ ID NO: 1884985
aaacuuaggucuugcuaag

SEQ ID NO: 2307201 - RNA, 19 nt, Artificial Sequence
  Description of Artificial Sequence: Synthetic oligonucleotide
  Antisense strand to SEQ ID NO: 2307200
cuuagcaagaccuaaguuu

SEQ ID NO: 2307202 - RNA, 19 nt, Artificial Sequence
  Description of Artificial Sequence: Synthetic oligonucleotide
  Sense strand starting at position 1345 of SEQ ID NO: 1884985
cccaguuauuaugagauca

SEQ ID NO: 2307203 - RNA, 19 nt, Artificial Sequence
  Description of Artificial Sequence: Synthetic oligonucleotide
  Antisense strand to SEQ ID NO: 2307202
ugaucucauaauaacuggg

SEQ ID NO: 2307204 - RNA, 19 nt, Artificial Sequence
  Description of Artificial Sequence: Synthetic oligonucleotide
  Sense strand starting at position 3120 of SEQ ID NO: 1884985
cccauuugguuguuuguaa

SEQ ID NO: 2307205 - RNA, 19 nt, Artificial Sequence
  Description of Artificial Sequence: Synthetic oligonucleotide
  Antisense strand to SEQ ID NO: 2307204
uuacaaacaaccaaauggg

SEQ ID NO: 2307206 - RNA, 19 nt, Artificial Sequence
  Description of Artificial Sequence: Synthetic oligonucleotide
  Sense strand starting at position 3124 of SEQ ID NO: 1884985
uuugguuguuuguaacaaa

SEQ ID NO: 2307207 - RNA, 19 nt, Artificial Sequence
  Description of Artificial Sequence: Synthetic oligonucleotide
  Antisense strand to SEQ ID NO: 2307206
uuuguuacaaacaaccaaa

SEQ ID NO: 2307208 - RNA, 19 nt, Artificial Sequence
  Description of Artificial Sequence: Synthetic oligonucleotide
  Sense strand starting at position 3127 of SEQ ID NO: 1884985
gguuguuuguaacaaaguu

SEQ ID NO: 2307209 - RNA, 19 nt, Artificial Sequence
  Description of Artificial Sequence: Synthetic oligonucleotide
  Antisense strand to SEQ ID NO: 2307208
aacuuuguuacaaacaacc

SEQ ID NO: 2307210 - RNA, 19 nt, Artificial Sequence
  Description of Artificial Sequence: Synthetic oligonucleotide
  Sense strand starting at position 3143 of SEQ ID NO: 1884985
guuauaucuuuauccaugu

SEQ ID NO: 2307211 - RNA, 19 nt, Artificial Sequence
  Description of Artificial Sequence: Synthetic oligonucleotide
  Antisense strand to SEQ ID NO: 2307210
acauggauaaagauauaac

SEQ ID NO: 2307212 - RNA, 19 nt, Artificial Sequence
  Description of Artificial Sequence: Synthetic oligonucleotide
  Sense strand starting at position 40 of SEQ ID NO: 1884986
ugggcauauacuuauggua

SEQ ID NO: 2307213 - RNA, 19 nt, Artificial Sequence
  Description of Artificial Sequence: Synthetic oligonucleotide
  Antisense strand to SEQ ID NO: 2307212
uaccauaaguauaugccca

SEQ ID NO: 2307214 - RNA, 19 nt, Artificial Sequence
  Description of Artificial Sequence: Synthetic oligonucleotide
  Sense strand starting at position 147 of SEQ ID NO: 1884986
caguguauacuauguacca

SEQ ID NO: 2307215 - RNA, 19 nt, Artificial Sequence
  Description of Artificial Sequence: Synthetic oligonucleotide
  Antisense strand to SEQ ID NO: 2307214
ugguacauaguauacacug

SEQ ID NO: 2307216 - RNA, 19 nt, Artificial Sequence
  Description of Artificial Sequence: Synthetic oligonucleotide
  Sense strand starting at position 165 of SEQ ID NO: 1884986
agguucuaagugcaaugau

SEQ ID NO: 2307217 - RNA, 19 nt, Artificial Sequence
  Description of Artificial Sequence: Synthetic oligonucleotide
  Antisense strand to SEQ ID NO: 2307216
aucauugcacuuagaaccu

SEQ ID NO: 2307218 - RNA, 19 nt, Artificial Sequence
  Description of Artificial Sequence: Synthetic oligonucleotide
  Sense strand starting at position 175 of SEQ ID NO: 1884986
ugcaaugauaccgaaaguu

SEQ ID NO: 2307219 - RNA, 19 nt, Artificial Sequence
  Description of Artificial Sequence: Synthetic oligonucleotide
  Antisense strand to SEQ ID NO: 2307218
aacuuucgguaucauugca

SEQ ID NO: 2307220 - RNA, 19 nt, Artificial Sequence
  Description of Artificial Sequence: Synthetic oligonucleotide
  Sense strand starting at position 277 of SEQ ID NO: 1884986
agauguugauaagugcuau

SEQ ID NO: 2307221 - RNA, 19 nt, Artificial Sequence
  Description of Artificial Sequence: Synthetic oligonucleotide
  Antisense strand to SEQ ID NO: 2307220
auagcacuuaucaacaucu

SEQ ID NO: 2307222 - RNA, 19 nt, Artificial Sequence
  Description of Artificial Sequence: Synthetic oligonucleotide
  Sense strand starting at position 458 of SEQ ID NO: 1884986
ggaagauacuuccaggaaa

SEQ ID NO: 2307223 - RNA, 19 nt, Artificial Sequence
  Description of Artificial Sequence: Synthetic oligonucleotide
  Antisense strand to SEQ ID NO: 2307222
uuuccuggaaguaucuucc

SEQ ID NO: 2307224 - RNA, 19 nt, Artificial Sequence
  Description of Artificial Sequence: Synthetic oligonucleotide
  Sense strand starting at position 609 of SEQ ID NO: 1884986
aaggguuucuaaguggcau

SEQ ID NO: 2307225 - RNA, 19 nt, Artificial Sequence
  Description of Artificial Sequence: Synthetic oligonucleotide
  Antisense strand to SEQ ID NO: 2307224
augccacuuagaaacccuu

SEQ ID NO: 2307226 - RNA, 19 nt, Artificial Sequence
  Description of Artificial Sequence: Synthetic oligonucleotide
  Sense strand starting at position 828 of SEQ ID NO: 1884986
guagauucuggaugcaauu

SEQ ID NO: 2307227 - RNA, 19 nt, Artificial Sequence
  Description of Artificial Sequence: Synthetic oligonucleotide
  Antisense strand to SEQ ID NO: 2307226
aauugcauccagaaucuac

SEQ ID NO: 2307228 - RNA, 19 nt, Artificial Sequence
  Description of Artificial Sequence: Synthetic oligonucleotide
  Sense strand starting at position 857 of SEQ ID NO: 1884986
aucgacuagauuugugcau

SEQ ID NO: 2307229 - RNA, 19 nt, Artificial Sequence
  Description of Artificial Sequence: Synthetic oligonucleotide
  Antisense strand to SEQ ID NO: 2307228
augcacaaaucuagucgau

SEQ ID NO: 2307230 - RNA, 19 nt, Artificial Sequence
  Description of Artificial Sequence: Synthetic oligonucleotide
  Sense strand starting at position 898 of SEQ ID NO: 1884986
gaaagaauguaguaaagaa

SEQ ID NO: 2307231 - RNA, 19 nt, Artificial Sequence
  Description of Artificial Sequence: Synthetic oligonucleotide
  Antisense strand to SEQ ID NO: 2307230
uucuuuacuacauucuuuc

SEQ ID NO: 2307232 - RNA, 19 nt, Artificial Sequence
  Description of Artificial Sequence: Synthetic oligonucleotide
  Sense strand starting at position 923 of SEQ ID NO: 1884986
aguguuucucccuagcaaa

SEQ ID NO: 2307233 - RNA, 19 nt, Artificial Sequence
  Description of Artificial Sequence: Synthetic oligonucleotide
  Antisense strand to SEQ ID NO: 2307232
uuugcuagggagaaacacu

SEQ ID NO: 2307234 - RNA, 19 nt, Artificial Sequence
  Description of Artificial Sequence: Synthetic oligonucleotide
  Sense strand starting at position 1006 of SEQ ID NO: 1884986
cgagcagauacucagucuu

SEQ ID NO: 2307235 - RNA, 19 nt, Artificial Sequence
  Description of Artificial Sequence: Synthetic oligonucleotide
  Antisense strand to SEQ ID NO: 2307234
aagacugaguaucugcucg

SEQ ID NO: 2307236 - RNA, 19 nt, Artificial Sequence
  Description of Artificial Sequence: Synthetic oligonucleotide
  Sense strand starting at position 1008 of SEQ ID NO: 1884986
agcagauacucagucuuaa

SEQ ID NO: 2307237 - RNA, 19 nt, Artificial Sequence
  Description of Artificial Sequence: Synthetic oligonucleotide
  Antisense strand to SEQ ID NO: 2307236
uuaagacugaguaucugcu

SEQ ID NO: 2307238 - RNA, 19 nt, Artificial Sequence
  Description of Artificial Sequence: Synthetic oligonucleotide
  Sense strand starting at position 1020 of SEQ ID NO: 1884986
gucuuaaacuugcugauuu

SEQ ID NO: 2307239 - RNA, 19 nt, Artificial Sequence
  Description of Artificial Sequence: Synthetic oligonucleotide
  Antisense strand to SEQ ID NO: 2307238
aaaucagcaaguuuaagac

SEQ ID NO: 2307240 - RNA, 19 nt, Artificial Sequence
  Description of Artificial Sequence: Synthetic oligonucleotide
  Sense strand starting at position 1038 of SEQ ID NO: 1884986
uugauaugccuaugagacc

SEQ ID NO: 2307241 - RNA, 19 nt, Artificial Sequence
  Description of Artificial Sequence: Synthetic oligonucleotide
  Antisense strand to SEQ ID NO: 2307240
ggucucauaggcauaucaa

SEQ ID NO: 2307242 - RNA, 19 nt, Artificial Sequence
  Description of Artificial Sequence: Synthetic oligonucleotide
  Sense strand starting at position 1080 of SEQ ID NO: 1884986
ggcaguugaauacaugagu

SEQ ID NO: 2307243 - RNA, 19 nt, Artificial Sequence
  Description of Artificial Sequence: Synthetic oligonucleotide
  Antisense strand to SEQ ID NO: 2307242
acucauguauucaacugcc

SEQ ID NO: 2307244 - RNA, 19 nt, Artificial Sequence
  Description of Artificial Sequence: Synthetic oligonucleotide
  Sense strand starting at position 1112 of SEQ ID NO: 1884986
aaagguguggaucaaaguu

SEQ ID NO: 2307245 - RNA, 19 nt, Artificial Sequence
  Description of Artificial Sequence: Synthetic oligonucleotide
  Antisense strand to SEQ ID NO: 2307244
aacuuugauccacaccuuu

SEQ ID NO: 2307246 - RNA, 19 nt, Artificial Sequence
  Description of Artificial Sequence: Synthetic oligonucleotide
  Sense strand starting at position 1218 of SEQ ID NO: 1884986
ucugcagacugagcauuau

SEQ ID NO: 2307247 - RNA, 19 nt, Artificial Sequence
  Description of Artificial Sequence: Synthetic oligonucleotide
  Antisense strand to SEQ ID NO: 2307246
auaaugcucagucugcaga

SEQ ID NO: 2307248 - RNA, 19 nt, Artificial Sequence
  Description of Artificial Sequence: Synthetic oligonucleotide
  Sense strand starting at position 1224 of SEQ ID NO: 1884986
gacugagcauuaucgucaa

SEQ ID NO: 2307249 - RNA, 19 nt, Artificial Sequence
  Description of Artificial Sequence: Synthetic oligonucleotide
  Antisense strand to SEQ ID NO: 2307248
uugacgauaaugcucaguc

SEQ ID NO: 2307250 - RNA, 19 nt, Artificial Sequence
  Description of Artificial Sequence: Synthetic oligonucleotide
  Sense strand starting at position 1227 of SEQ ID NO: 1884986
ugagcauuaucgucaagau

SEQ ID NO: 2307251 - RNA, 19 nt, Artificial Sequence
  Description of Artificial Sequence: Synthetic oligonucleotide
  Antisense strand to SEQ ID NO: 2307250
aucuugacgauaaugcuca

SEQ ID NO: 2307252 - RNA, 19 nt, Artificial Sequence
  Description of Artificial Sequence: Synthetic oligonucleotide
  Sense strand starting at position 1228 of SEQ ID NO: 1884986
gagcauuaucgucaagaug

SEQ ID NO: 2307253 - RNA, 19 nt, Artificial Sequence
  Description of Artificial Sequence: Synthetic oligonucleotide
  Antisense strand to SEQ ID NO: 2307252
caucuugacgauaaugcuc

SEQ ID NO: 2307254 - RNA, 19 nt, Artificial Sequence
  Description of Artificial Sequence: Synthetic oligonucleotide
  Sense strand starting at position 1231 of SEQ ID NO: 1884986
cauuaucgucaagaugauu

SEQ ID NO: 2307255 - RNA, 19 nt, Artificial Sequence
  Description of Artificial Sequence: Synthetic oligonucleotide
  Antisense strand to SEQ ID NO: 2307254
aaucaucuugacgauaaug

SEQ ID NO: 2307256 - RNA, 19 nt, Artificial Sequence
  Description of Artificial Sequence: Synthetic oligonucleotide
  Sense strand starting at position 1234 of SEQ ID NO: 1884986
uaucgucaagaugauuaua

SEQ ID NO: 2307257 - RNA, 19 nt, Artificial Sequence
  Description of Artificial Sequence: Synthetic oligonucleotide
  Antisense strand to SEQ ID NO: 2307256
uauaaucaucuugacgaua

SEQ ID NO: 2307258 - RNA, 19 nt, Artificial Sequence
  Description of Artificial Sequence: Synthetic oligonucleotide
  Sense strand starting at position 1237 of SEQ ID NO: 1884986
cgucaagaugauuauaggu

SEQ ID NO: 2307259 - RNA, 19 nt, Artificial Sequence
  Description of Artificial Sequence: Synthetic oligonucleotide
  Antisense strand to SEQ ID NO: 2307258
accuauaaucaucuugacg

SEQ ID NO: 2307260 - RNA, 19 nt, Artificial Sequence
  Description of Artificial Sequence: Synthetic oligonucleotide
  Sense strand starting at position 1553 of SEQ ID NO: 1884986
gaauccuguccugagguca

SEQ ID NO: 2307261 - RNA, 19 nt, Artificial Sequence
  Description of Artificial Sequence: Synthetic oligonucleotide
  Antisense strand to SEQ ID NO: 2307260
ugaccucaggacaggauuc

SEQ ID NO: 2307262 - RNA, 19 nt, Artificial Sequence
  Description of Artificial Sequence: Synthetic oligonucleotide
  Sense strand starting at position 1979 of SEQ ID NO: 1884986
acuggaaugcucggaauaa

SEQ ID NO: 2307263 - RNA, 19 nt, Artificial Sequence
  Description of Artificial Sequence: Synthetic oligonucleotide
  Antisense strand to SEQ ID NO: 2307262
uuauuccgagcauuccagu

SEQ ID NO: 2307264 - RNA, 19 nt, Artificial Sequence
  Description of Artificial Sequence: Synthetic oligonucleotide
  Sense strand starting at position 3132 of SEQ ID NO: 1884986
uugaaaguuuccuccuuug

SEQ ID NO: 2307265 - RNA, 19 nt, Artificial Sequence
  Description of Artificial Sequence: Synthetic oligonucleotide
  Antisense strand to SEQ ID NO: 2307264
caaaggaggaaacuuucaa

SEQ ID NO: 2307266 - RNA, 19 nt, Artificial Sequence
  Description of Artificial Sequence: Synthetic oligonucleotide
  Sense strand starting at position 3197 of SEQ ID NO: 1884986
agcgauacugaauguauaa

SEQ ID NO: 2307267 - RNA, 19 nt, Artificial Sequence
  Description of Artificial Sequence: Synthetic oligonucleotide
  Antisense strand to SEQ ID NO: 2307266
uuauacauucaguaucgcu

SEQ ID NO: 2307268 - RNA, 19 nt, Artificial Sequence
  Description of Artificial Sequence: Synthetic oligonucleotide
  Sense strand starting at position 3279 of SEQ ID NO: 1884986
auccacauucuugggaauu

SEQ ID NO: 2307269 - RNA, 19 nt, Artificial Sequence
  Description of Artificial Sequence: Synthetic oligonucleotide
  Antisense strand to SEQ ID NO: 2307268
aauucccaagaauguggau

SEQ ID NO: 2307270 - RNA, 19 nt, Artificial Sequence
  Description of Artificial Sequence: Synthetic oligonucleotide
  Sense strand starting at position 3294 of SEQ ID NO: 1884986
aauuaaaugucacugugag

SEQ ID NO: 2307271 - RNA, 19 nt, Artificial Sequence
  Description of Artificial Sequence: Synthetic oligonucleotide
  Antisense strand to SEQ ID NO: 2307270
cucacagugacauuuaauu

SEQ ID NO: 2307272 - RNA, 19 nt, Artificial Sequence
  Description of Artificial Sequence: Synthetic oligonucleotide
  Sense strand starting at position 3295 of SEQ ID NO: 1884986
auuaaaugucacugugaga

SEQ ID NO: 2307273 - RNA, 19 nt, Artificial Sequence
  Description of Artificial Sequence: Synthetic oligonucleotide
  Antisense strand to SEQ ID NO: 2307272
ucucacagugacauuuaau

SEQ ID NO: 2307274 - RNA, 19 nt, Artificial Sequence
  Description of Artificial Sequence: Synthetic oligonucleotide
  Sense strand starting at position 3340 of SEQ ID NO: 1884986
uaauaagggcucugagacu

SEQ ID NO: 2307275 - RNA, 19 nt, Artificial Sequence
  Description of Artificial Sequence: Synthetic oligonucleotide
  Antisense strand to SEQ ID NO: 2307274
agucucagagcccuuauua

SEQ ID NO: 2307276 - RNA, 19 nt, Artificial Sequence
  Description of Artificial Sequence: Synthetic oligonucleotide
  Sense strand starting at position 3386 of SEQ ID NO: 1884986
cuaguaaggccuugacuac

SEQ ID NO: 2307277 - RNA, 19 nt, Artificial Sequence
  Description of Artificial Sequence: Synthetic oligonucleotide
  Antisense strand to SEQ ID NO: 2307276
guagucaaggccuuacuag

SEQ ID NO: 2307278 - RNA, 19 nt, Artificial Sequence
  Description of Artificial Sequence: Synthetic oligonucleotide
  Sense strand starting at position 3387 of SEQ ID NO: 1884986
uaguaaggccuugacuaca

SEQ ID NO: 2307279 - RNA, 19 nt, Artificial Sequence
  Description of Artificial Sequence: Synthetic oligonucleotide
  Antisense strand to SEQ ID NO: 2307278
uguagucaaggccuuacua

SEQ ID NO: 2307280 - RNA, 19 nt, Artificial Sequence
  Description of Artificial Sequence: Synthetic oligonucleotide
  Sense strand starting at position 3436 of SEQ ID NO: 1884986
gucaacucauugucacaca

SEQ ID NO: 2307281 - RNA, 19 nt, Artificial Sequence
  Description of Artificial Sequence: Synthetic oligonucleotide
  Antisense strand to SEQ ID NO: 2307280
ugugugacaaugaguugac

SEQ ID NO: 2307282 - RNA, 19 nt, Artificial Sequence
  Description of Artificial Sequence: Synthetic oligonucleotide
  Sense strand starting at position 3447 of SEQ ID NO: 1884986
gucacacacuuccugagaa

SEQ ID NO: 2307283 - RNA, 19 nt, Artificial Sequence
  Description of Artificial Sequence: Synthetic oligonucleotide
  Antisense strand to SEQ ID NO: 2307282
uucucaggaagugugugac

SEQ ID NO: 2307284 - RNA, 19 nt, Artificial Sequence
  Description of Artificial Sequence: Synthetic oligonucleotide
  Sense strand starting at position 3519 of SEQ ID NO: 1884986
uuaagaguuaaacggugau

SEQ ID NO: 2307285 - RNA, 19 nt, Artificial Sequence
  Description of Artificial Sequence: Synthetic oligonucleotide
  Antisense strand to SEQ ID NO: 2307284
aucaccguuuaacucuuaa

SEQ ID NO: 2307286 - RNA, 19 nt, Artificial Sequence
  Description of Artificial Sequence: Synthetic oligonucleotide
  Sense strand starting at position 3522 of SEQ ID NO: 1884986
agaguuaaacggugauucu

SEQ ID NO: 2307287 - RNA, 19 nt, Artificial Sequence
  Description of Artificial Sequence: Synthetic oligonucleotide
  Antisense strand to SEQ ID NO: 2307286
agaaucaccguuuaacucu

SEQ ID NO: 2307288 - RNA, 19 nt, Artificial Sequence
  Description of Artificial Sequence: Synthetic oligonucleotide
  Sense strand starting at position 3523 of SEQ ID NO: 1884986
gaguuaaacggugauucua

SEQ ID NO: 2307289 - RNA, 19 nt, Artificial Sequence
  Description of Artificial Sequence: Synthetic oligonucleotide
  Antisense strand to SEQ ID NO: 2307288
uagaaucaccguuuaacuc

SEQ ID NO: 2307290 - RNA, 19 nt, Artificial Sequence
  Description of Artificial Sequence: Synthetic oligonucleotide
  Sense strand starting at position 3525 of SEQ ID NO: 1884986
guuaaacggugauucuaua

SEQ ID NO: 2307291 - RNA, 19 nt, Artificial Sequence
  Description of Artificial Sequence: Synthetic oligonucleotide
  Antisense strand to SEQ ID NO: 2307290
uauagaaucaccguuuaac

SEQ ID NO: 2307292 - RNA, 19 nt, Artificial Sequence
  Description of Artificial Sequence: Synthetic oligonucleotide
  Sense strand starting at position 145 of SEQ ID NO: 1884987
agucaauuccaauaccugu

SEQ ID NO: 2307293 - RNA, 19 nt, Artificial Sequence
  Description of Artificial Sequence: Synthetic oligonucleotide
  Antisense strand to SEQ ID NO: 2307292
acagguauuggaauugacu

SEQ ID NO: 2307294 - RNA, 19 nt, Artificial Sequence
  Description of Artificial Sequence: Synthetic oligonucleotide
  Sense strand starting at position 152 of SEQ ID NO: 1884987
uccaauaccuguucuagag

SEQ ID NO: 2307295 - RNA, 19 nt, Artificial Sequence
  Description of Artificial Sequence: Synthetic oligonucleotide
  Antisense strand to SEQ ID NO: 2307294
cucuagaacagguauugga

SEQ ID NO: 2307296 - RNA, 19 nt, Artificial Sequence
  Description of Artificial Sequence: Synthetic oligonucleotide
  Sense strand starting at position 156 of SEQ ID NO: 1884987
auaccuguucuagagaggu

SEQ ID NO: 2307297 - RNA, 19 nt, Artificial Sequence
  Description of Artificial Sequence: Synthetic oligonucleotide
  Antisense strand to SEQ ID NO: 2307296
accucucuagaacagguau

SEQ ID NO: 2307298 - RNA, 19 nt, Artificial Sequence
  Description of Artificial Sequence: Synthetic oligonucleotide
  Sense strand starting at position 160 of SEQ ID NO: 1884987
cuguucuagagagguacuu

SEQ ID NO: 2307299 - RNA, 19 nt, Artificial Sequence
  Description of Artificial Sequence: Synthetic oligonucleotide
  Antisense strand to SEQ ID NO: 2307298
aaguaccucucuagaacag

SEQ ID NO: 2307300 - RNA, 19 nt, Artificial Sequence
  Description of Artificial Sequence: Synthetic oligonucleotide
  Sense strand starting at position 162 of SEQ ID NO: 1884987
guucuagagagguacuuau

SEQ ID NO: 2307301 - RNA, 19 nt, Artificial Sequence
  Description of Artificial Sequence: Synthetic oligonucleotide
  Antisense strand to SEQ ID NO: 2307300
auaaguaccucucuagaac

SEQ ID NO: 2307302 - RNA, 19 nt, Artificial Sequence
  Description of Artificial Sequence: Synthetic oligonucleotide
  Sense strand starting at position 196 of SEQ ID NO: 1884987
ggcaaugaauuguauuaca

SEQ ID NO: 2307303 - RNA, 19 nt, Artificial Sequence
  Description of Artificial Sequence: Synthetic oligonucleotide
  Antisense strand to SEQ ID NO: 2307302
uguaauacaauucauugcc

SEQ ID NO: 2307304 - RNA, 19 nt, Artificial Sequence
  Description of Artificial Sequence: Synthetic oligonucleotide
  Sense strand starting at position 201 of SEQ ID NO: 1884987
ugaauuguauuacaaggua

SEQ ID NO: 2307305 - RNA, 19 nt, Artificial Sequence
  Description of Artificial Sequence: Synthetic oligonucleotide
  Antisense strand to SEQ ID NO: 2307304
uaccuuguaauacaauuca

SEQ ID NO: 2307306 - RNA, 19 nt, Artificial Sequence
  Description of Artificial Sequence: Synthetic oligonucleotide
  Sense strand starting at position 238 of SEQ ID NO: 1884987
acgccuaugugguauccua

SEQ ID NO: 2307307 - RNA, 19 nt, Artificial Sequence
  Description of Artificial Sequence: Synthetic oligonucleotide
  Antisense strand to SEQ ID NO: 2307306
uaggauaccacauaggcgu

SEQ ID NO: 2307308 - RNA, 19 nt, Artificial Sequence
  Description of Artificial Sequence: Synthetic oligonucleotide
  Sense strand starting at position 251 of SEQ ID NO: 1884987
auccuauuccauggagaua

SEQ ID NO: 2307309 - RNA, 19 nt, Artificial Sequence
  Description of Artificial Sequence: Synthetic oligonucleotide
  Antisense strand to SEQ ID NO: 2307308
uaucuccauggaauaggau

SEQ ID NO: 2307310 - RNA, 19 nt, Artificial Sequence
  Description of Artificial Sequence: Synthetic oligonucleotide
  Sense strand starting at position 375 of SEQ ID NO: 1884987
gcagacaagaagugauuau

SEQ ID NO: 2307311 - RNA, 19 nt, Artificial Sequence
  Description of Artificial Sequence: Synthetic oligonucleotide
  Antisense strand to SEQ ID NO: 2307310
auaaucacuucuugucugc

SEQ ID NO: 2307312 - RNA, 19 nt, Artificial Sequence
  Description of Artificial Sequence: Synthetic oligonucleotide
  Sense strand starting at position 384 of SEQ ID NO: 1884987
aagugauuaucuugagguc

SEQ ID NO: 2307313 - RNA, 19 nt, Artificial Sequence
  Description of Artificial Sequence: Synthetic oligonucleotide
  Antisense strand to SEQ ID NO: 2307312
gaccucaagauaaucacuu

SEQ ID NO: 2307314 - RNA, 19 nt, Artificial Sequence
  Description of Artificial Sequence: Synthetic oligonucleotide
  Sense strand starting at position 387 of SEQ ID NO: 1884987
ugauuaucuugaggucuuu

SEQ ID NO: 2307315 - RNA, 19 nt, Artificial Sequence
  Description of Artificial Sequence: Synthetic oligonucleotide
  Antisense strand to SEQ ID NO: 2307314
aaagaccucaagauaauca

SEQ ID NO: 2307316 - RNA, 19 nt, Artificial Sequence
  Description of Artificial Sequence: Synthetic oligonucleotide
  Sense strand starting at position 452 of SEQ ID NO: 1884987
auugaacaggcuugaagau

SEQ ID NO: 2307317 - RNA, 19 nt, Artificial Sequence
  Description of Artificial Sequence: Synthetic oligonucleotide
  Antisense strand to SEQ ID NO: 2307316
aucuucaagccuguucaau

SEQ ID NO: 2307318 - RNA, 19 nt, Artificial Sequence
  Description of Artificial Sequence: Synthetic oligonucleotide
  Sense strand starting at position 461 of SEQ ID NO: 1884987
gcuugaagauucucgucuu

SEQ ID NO: 2307319 - RNA, 19 nt, Artificial Sequence
  Description of Artificial Sequence: Synthetic oligonucleotide
  Antisense strand to SEQ ID NO: 2307318
aagacgagaaucuucaagc

SEQ ID NO: 2307320 - RNA, 19 nt, Artificial Sequence
  Description of Artificial Sequence: Synthetic oligonucleotide
  Sense strand starting at position 462 of SEQ ID NO: 1884987
cuugaagauucucgucuuu

SEQ ID NO: 2307321 - RNA, 19 nt, Artificial Sequence
  Description of Artificial Sequence: Synthetic oligonucleotide
  Antisense strand to SEQ ID NO: 2307320
aaagacgagaaucuucaag

SEQ ID NO: 2307322 - RNA, 19 nt, Artificial Sequence
  Description of Artificial Sequence: Synthetic oligonucleotide
  Sense strand starting at position 507 of SEQ ID NO: 1884987
gggauuccaugggaaggaa

SEQ ID NO: 2307323 - RNA, 19 nt, Artificial Sequence
  Description of Artificial Sequence: Synthetic oligonucleotide
  Antisense strand to SEQ ID NO: 2307322
uuccuucccauggaauccc

SEQ ID NO: 2307324 - RNA, 19 nt, Artificial Sequence
  Description of Artificial Sequence: Synthetic oligonucleotide
  Sense strand starting at position 550 of SEQ ID NO: 1884987
gugcuaugauuccuaacug

SEQ ID NO: 2307325 - RNA, 19 nt, Artificial Sequence
  Description of Artificial Sequence: Synthetic oligonucleotide
  Antisense strand to SEQ ID NO: 2307324
caguuaggaaucauagcac

SEQ ID NO: 2307326 - RNA, 19 nt, Artificial Sequence
  Description of Artificial Sequence: Synthetic oligonucleotide
  Sense strand starting at position 572 of SEQ ID NO: 1884987
auacauauguaacaggaaa

SEQ ID NO: 2307327 - RNA, 19 nt, Artificial Sequence
  Description of Artificial Sequence: Synthetic oligonucleotide
  Antisense strand to SEQ ID NO: 2307326
uuuccuguuacauauguau

SEQ ID NO: 2307328 - RNA, 19 nt, Artificial Sequence
  Description of Artificial Sequence: Synthetic oligonucleotide
  Sense strand starting at position 649 of SEQ ID NO: 1884987
gcuuuaguuacuugugucu

SEQ ID NO: 2307329 - RNA, 19 nt, Artificial Sequence
  Description of Artificial Sequence: Synthetic oligonucleotide
  Antisense strand to SEQ ID NO: 2307328
agacacaaguaacuaaagc

SEQ ID NO: 2307330 - RNA, 19 nt, Artificial Sequence
  Description of Artificial Sequence: Synthetic oligonucleotide
  Sense strand starting at position 651 of SEQ ID NO: 1884987
uuuaguuacuugugucuuu

SEQ ID NO: 2307331 - RNA, 19 nt, Artificial Sequence
  Description of Artificial Sequence: Synthetic oligonucleotide
  Antisense strand to SEQ ID NO: 2307330
aaagacacaaguaacuaaa

SEQ ID NO: 2307332 - RNA, 19 nt, Artificial Sequence
  Description of Artificial Sequence: Synthetic oligonucleotide
  Sense strand starting at position 807 of SEQ ID NO: 1884987
auaugacaccucggaauac

SEQ ID NO: 2307333 - RNA, 19 nt, Artificial Sequence
  Description of Artificial Sequence: Synthetic oligonucleotide
  Antisense strand to SEQ ID NO: 2307332
guauuccgaggugucauau

SEQ ID NO: 2307334 - RNA, 19 nt, Artificial Sequence
  Description of Artificial Sequence: Synthetic oligonucleotide
  Sense strand starting at position 895 of SEQ ID NO: 1884987
guuuauaaaccugggauaa

SEQ ID NO: 2307335 - RNA, 19 nt, Artificial Sequence
  Description of Artificial Sequence: Synthetic oligonucleotide
  Antisense strand to SEQ ID NO: 2307334
uuaucccagguuuauaaac

SEQ ID NO: 2307336 - RNA, 19 nt, Artificial Sequence
  Description of Artificial Sequence: Synthetic oligonucleotide
  Sense strand starting at position 897 of SEQ ID NO: 1884987
uuauaaaccugggauaagu

SEQ ID NO: 2307337 - RNA, 19 nt, Artificial Sequence
  Description of Artificial Sequence: Synthetic oligonucleotide
  Antisense strand to SEQ ID NO: 2307336
acuuaucccagguuuauaa

SEQ ID NO: 2307338 - RNA, 19 nt, Artificial Sequence
  Description of Artificial Sequence: Synthetic oligonucleotide
  Sense strand starting at position 920 of SEQ ID NO: 1884987
ugaucuuucccuuaagcag

SEQ ID NO: 2307339 - RNA, 19 nt, Artificial Sequence
  Description of Artificial Sequence: Synthetic oligonucleotide
  Antisense strand to SEQ ID NO: 2307338
cugcuuaagggaaagauca

SEQ ID NO: 2307340 - RNA, 19 nt, Artificial Sequence
  Description of Artificial Sequence: Synthetic oligonucleotide
  Sense strand starting at position 935 of SEQ ID NO: 1884987
gcaggucucucgugugaga

SEQ ID NO: 2307341 - RNA, 19 nt, Artificial Sequence
  Description of Artificial Sequence: Synthetic oligonucleotide
  Antisense strand to SEQ ID NO: 2307340
ucucacacgagagaccugc

SEQ ID NO: 2307342 - RNA, 19 nt, Artificial Sequence
  Description of Artificial Sequence: Synthetic oligonucleotide
  Sense strand starting at position 1321 of SEQ ID NO: 1884987
aaacuuaggucuugcuaag

SEQ ID NO: 2307343 - RNA, 19 nt, Artificial Sequence
  Description of Artificial Sequence: Synthetic oligonucleotide
  Antisense strand to SEQ ID NO: 2307342
cuuagcaagaccuaaguuu

SEQ ID NO: 2307344 - RNA, 19 nt, Artificial Sequence
  Description of Artificial Sequence: Synthetic oligonucleotide
  Sense strand starting at position 1345 of SEQ ID NO: 1884987
cccaguuauuaugagauca

SEQ ID NO: 2307345 - RNA, 19 nt, Artificial Sequence
  Description of Artificial Sequence: Synthetic oligonucleotide
  Antisense strand to SEQ ID NO: 2307344
ugaucucauaauaacuggg

SEQ ID NO: 2307346 - RNA, 19 nt, Artificial Sequence
  Description of Artificial Sequence: Synthetic oligonucleotide
  Sense strand starting at position 3120 of SEQ ID NO: 1884987
cccauuugguuguuuguaa

SEQ ID NO: 2307347 - RNA, 19 nt, Artificial Sequence
  Description of Artificial Sequence: Synthetic oligonucleotide
  Antisense strand to SEQ ID NO: 2307346
uuacaaacaaccaaauggg

SEQ ID NO: 2307348 - RNA, 19 nt, Artificial Sequence
  Description of Artificial Sequence: Synthetic oligonucleotide
  Sense strand starting at position 3124 of SEQ ID NO: 1884987
uuugguuguuuguaacaaa

SEQ ID NO: 2307349 - RNA, 19 nt, Artificial Sequence
  Description of Artificial Sequence: Synthetic oligonucleotide
  Antisense strand to SEQ ID NO: 2307348
uuuguuacaaacaaccaaa

SEQ ID NO: 2307350 - RNA, 19 nt, Artificial Sequence
  Description of Artificial Sequence: Synthetic oligonucleotide
  Sense strand starting at position 3127 of SEQ ID NO: 1884987
gguuguuuguaacaaaguu

SEQ ID NO: 2307351 - RNA, 19 nt, Artificial Sequence
  Description of Artificial Sequence: Synthetic oligonucleotide
  Antisense strand to SEQ ID NO: 2307350
aacuuuguuacaaacaacc

SEQ ID NO: 2307352 - RNA, 19 nt, Artificial Sequence
  Description of Artificial Sequence: Synthetic oligonucleotide
  Sense strand starting at position 3143 of SEQ ID NO: 1884987
guuauaucuuuauccaugu

SEQ ID NO: 2307353 - RNA, 19 nt, Artificial Sequence
  Description of Artificial Sequence: Synthetic oligonucleotide
  Antisense strand to SEQ ID NO: 2307352
acauggauaaagauauaac

SEQ ID NO: 2307354 - RNA, 19 nt, Artificial Sequence
  Description of Artificial Sequence: Synthetic oligonucleotide
  Sense strand starting at position 40 of SEQ ID NO: 1884988
ugggcauauacuuauggua

SEQ ID NO: 2307355 - RNA, 19 nt, Artificial Sequence
  Description of Artificial Sequence: Synthetic oligonucleotide
  Antisense strand to SEQ ID NO: 2307354
uaccauaaguauaugccca

SEQ ID NO: 2307356 - RNA, 19 nt, Artificial Sequence
  Description of Artificial Sequence: Synthetic oligonucleotide
  Sense strand starting at position 147 of SEQ ID NO: 1884988
caguguauacuauguacca

SEQ ID NO: 2307357 - RNA, 19 nt, Artificial Sequence
  Description of Artificial Sequence: Synthetic oligonucleotide
  Antisense strand to SEQ ID NO: 2307356
ugguacauaguauacacug

SEQ ID NO: 2307358 - RNA, 19 nt, Artificial Sequence
  Description of Artificial Sequence: Synthetic oligonucleotide
  Sense strand starting at position 165 of SEQ ID NO: 1884988
agguucuaagugcaaugau

SEQ ID NO: 2307359 - RNA, 19 nt, Artificial Sequence
  Description of Artificial Sequence: Synthetic oligonucleotide
  Antisense strand to SEQ ID NO: 2307358
aucauugcacuuagaaccu

SEQ ID NO: 2307360 - RNA, 19 nt, Artificial Sequence
  Description of Artificial Sequence: Synthetic oligonucleotide
  Sense strand starting at position 175 of SEQ ID NO: 1884988
ugcaaugauaccgaaaguu

SEQ ID NO: 2307361 - RNA, 19 nt, Artificial Sequence
  Description of Artificial Sequence: Synthetic oligonucleotide
  Antisense strand to SEQ ID NO: 2307360
aacuuucgguaucauugca

SEQ ID NO: 2307362 - RNA, 19 nt, Artificial Sequence
  Description of Artificial Sequence: Synthetic oligonucleotide
  Sense strand starting at position 277 of SEQ ID NO: 1884988
agauguugauaagugcuau

SEQ ID NO: 2307363 - RNA, 19 nt, Artificial Sequence
  Description of Artificial Sequence: Synthetic oligonucleotide
  Antisense strand to SEQ ID NO: 2307362
auagcacuuaucaacaucu

SEQ ID NO: 2307364 - RNA, 19 nt, Artificial Sequence
  Description of Artificial Sequence: Synthetic oligonucleotide
  Sense strand starting at position 458 of SEQ ID NO: 1884988
ggaagauacuuccaggaaa

SEQ ID NO: 2307365 - RNA, 19 nt, Artificial Sequence
  Description of Artificial Sequence: Synthetic oligonucleotide
  Antisense strand to SEQ ID NO: 2307364
uuuccuggaaguaucuucc

SEQ ID NO: 2307366 - RNA, 19 nt, Artificial Sequence
  Description of Artificial Sequence: Synthetic oligonucleotide
  Sense strand starting at position 609 of SEQ ID NO: 1884988
aaggguuucuaaguggcau

SEQ ID NO: 2307367 - RNA, 19 nt, Artificial Sequence
  Description of Artificial Sequence: Synthetic oligonucleotide
  Antisense strand to SEQ ID NO: 2307366
augccacuuagaaacccuu

SEQ ID NO: 2307368 - RNA, 19 nt, Artificial Sequence
  Description of Artificial Sequence: Synthetic oligonucleotide
  Sense strand starting at position 828 of SEQ ID NO: 1884988
guagauucuggaugcaauu

SEQ ID NO: 2307369 - RNA, 19 nt, Artificial Sequence
  Description of Artificial Sequence: Synthetic oligonucleotide
  Antisense strand to SEQ ID NO: 2307368
aauugcauccagaaucuac

SEQ ID NO: 2307370 - RNA, 19 nt, Artificial Sequence
  Description of Artificial Sequence: Synthetic oligonucleotide
  Sense strand starting at position 857 of SEQ ID NO: 1884988
aucgacuagauuugugcau

SEQ ID NO: 2307371 - RNA, 19 nt, Artificial Sequence
  Description of Artificial Sequence: Synthetic oligonucleotide
  Antisense strand to SEQ ID NO: 2307370
augcacaaaucuagucgau

SEQ ID NO: 2307372 - RNA, 19 nt, Artificial Sequence
  Description of Artificial Sequence: Synthetic oligonucleotide
  Sense strand starting at position 898 of SEQ ID NO: 1884988
gaaagaauguaguaaagaa

SEQ ID NO: 2307373 - RNA, 19 nt, Artificial Sequence
  Description of Artificial Sequence: Synthetic oligonucleotide
  Antisense strand to SEQ ID NO: 2307372
uucuuuacuacauucuuuc

SEQ ID NO: 2307374 - RNA, 19 nt, Artificial Sequence
  Description of Artificial Sequence: Synthetic oligonucleotide
  Sense strand starting at position 923 of SEQ ID NO: 1884988
aguguuucucccuagcaaa

SEQ ID NO: 2307375 - RNA, 19 nt, Artificial Sequence
  Description of Artificial Sequence: Synthetic oligonucleotide
  Antisense strand to SEQ ID NO: 2307374
uuugcuagggagaaacacu

SEQ ID NO: 2307376 - RNA, 19 nt, Artificial Sequence
  Description of Artificial Sequence: Synthetic oligonucleotide
  Sense strand starting at position 1006 of SEQ ID NO: 1884988
cgagcagauacucagucuu

SEQ ID NO: 2307377 - RNA, 19 nt, Artificial Sequence
  Description of Artificial Sequence: Synthetic oligonucleotide
  Antisense strand to SEQ ID NO: 2307376
aagacugaguaucugcucg

SEQ ID NO: 2307378 - RNA, 19 nt, Artificial Sequence
  Description of Artificial Sequence: Synthetic oligonucleotide
  Sense strand starting at position 1008 of SEQ ID NO: 1884988
agcagauacucagucuuaa

SEQ ID NO: 2307379 - RNA, 19 nt, Artificial Sequence
  Description of Artificial Sequence: Synthetic oligonucleotide
  Antisense strand to SEQ ID NO: 2307378
uuaagacugaguaucugcu

SEQ ID NO: 2307380 - RNA, 19 nt, Artificial Sequence
  Description of Artificial Sequence: Synthetic oligonucleotide
  Sense strand starting at position 1020 of SEQ ID NO: 1884988
gucuuaaacuugcugauuu

SEQ ID NO: 2307381 - RNA, 19 nt, Artificial Sequence
  Description of Artificial Sequence: Synthetic oligonucleotide
  Antisense strand to SEQ ID NO: 2307380
aaaucagcaaguuuaagac

SEQ ID NO: 2307382 - RNA, 19 nt, Artificial Sequence
  Description of Artificial Sequence: Synthetic oligonucleotide
  Sense strand starting at position 1038 of SEQ ID NO: 1884988
uugauaugccuaugagacc

SEQ ID NO: 2307383 - RNA, 19 nt, Artificial Sequence
  Description of Artificial Sequence: Synthetic oligonucleotide
  Antisense strand to SEQ ID NO: 2307382
ggucucauaggcauaucaa

SEQ ID NO: 2307384 - RNA, 19 nt, Artificial Sequence
  Description of Artificial Sequence: Synthetic oligonucleotide
  Sense strand starting at position 1080 of SEQ ID NO: 1884988
ggcaguugaauacaugagu

SEQ ID NO: 2307385 - RNA, 19 nt, Artificial Sequence
  Description of Artificial Sequence: Synthetic oligonucleotide
  Antisense strand to SEQ ID NO: 2307384
acucauguauucaacugcc

SEQ ID NO: 2307386 - RNA, 19 nt, Artificial Sequence
  Description of Artificial Sequence: Synthetic oligonucleotide
  Sense strand starting at position 1112 of SEQ ID NO: 1884988
aaagguguggaucaaaguu

SEQ ID NO: 2307387 - RNA, 19 nt, Artificial Sequence
  Description of Artificial Sequence: Synthetic oligonucleotide
  Antisense strand to SEQ ID NO: 2307386
aacuuugauccacaccuuu

SEQ ID NO: 2307388 - RNA, 19 nt, Artificial Sequence
  Description of Artificial Sequence: Synthetic oligonucleotide
  Sense strand starting at position 1218 of SEQ ID NO: 1884988
ucugcagacugagcauuau

SEQ ID NO: 2307389 - RNA, 19 nt, Artificial Sequence
  Description of Artificial Sequence: Synthetic oligonucleotide
  Antisense strand to SEQ ID NO: 2307388
auaaugcucagucugcaga

SEQ ID NO: 2307390 - RNA, 19 nt, Artificial Sequence
  Description of Artificial Sequence: Synthetic oligonucleotide
  Sense strand starting at position 1224 of SEQ ID NO: 1884988
gacugagcauuaucgucaa

SEQ ID NO: 2307391 - RNA, 19 nt, Artificial Sequence
  Description of Artificial Sequence: Synthetic oligonucleotide
  Antisense strand to SEQ ID NO: 2307390
uugacgauaaugcucaguc

SEQ ID NO: 2307392 - RNA, 19 nt, Artificial Sequence
  Description of Artificial Sequence: Synthetic oligonucleotide
  Sense strand starting at position 1227 of SEQ ID NO: 1884988
ugagcauuaucgucaagau

SEQ ID NO: 2307393 - RNA, 19 nt, Artificial Sequence
  Description of Artificial Sequence: Synthetic oligonucleotide
  Antisense strand to SEQ ID NO: 2307392
aucuugacgauaaugcuca

SEQ ID NO: 2307394 - RNA, 19 nt, Artificial Sequence
  Description of Artificial Sequence: Synthetic oligonucleotide
  Sense strand starting at position 1228 of SEQ ID NO: 1884988
gagcauuaucgucaagaug

SEQ ID NO: 2307395 - RNA, 19 nt, Artificial Sequence
  Description of Artificial Sequence: Synthetic oligonucleotide
  Antisense strand to SEQ ID NO: 2307394
caucuugacgauaaugcuc

SEQ ID NO: 2307396 - RNA, 19 nt, Artificial Sequence
  Description of Artificial Sequence: Synthetic oligonucleotide
  Sense strand starting at position 1231 of SEQ ID NO: 1884988
cauuaucgucaagaugauu

SEQ ID NO: 2307397 - RNA, 19 nt, Artificial Sequence
  Description of Artificial Sequence: Synthetic oligonucleotide
  Antisense strand to SEQ ID NO: 2307396
aaucaucuugacgauaaug

SEQ ID NO: 2307398 - RNA, 19 nt, Artificial Sequence
  Description of Artificial Sequence: Synthetic oligonucleotide
  Sense strand starting at position 1234 of SEQ ID NO: 1884988
uaucgucaagaugauuaua

SEQ ID NO: 2307399 - RNA, 19 nt, Artificial Sequence
  Description of Artificial Sequence: Synthetic oligonucleotide
  Antisense strand to SEQ ID NO: 2307398
uauaaucaucuugacgaua

SEQ ID NO: 2307400 - RNA, 19 nt, Artificial Sequence
  Description of Artificial Sequence: Synthetic oligonucleotide
  Sense strand starting at position 1237 of SEQ ID NO: 1884988
cgucaagaugauuauaggu

SEQ ID NO: 2307401 - RNA, 19 nt, Artificial Sequence
  Description of Artificial Sequence: Synthetic oligonucleotide
  Antisense strand to SEQ ID NO: 2307400
accuauaaucaucuugacg

SEQ ID NO: 2307402 - RNA, 19 nt, Artificial Sequence
  Description of Artificial Sequence: Synthetic oligonucleotide
  Sense strand starting at position 1553 of SEQ ID NO: 1884988
gaauccuguccugagguca

SEQ ID NO: 2307403 - RNA, 19 nt, Artificial Sequence
  Description of Artificial Sequence: Synthetic oligonucleotide
  Antisense strand to SEQ ID NO: 2307402
ugaccucaggacaggauuc

SEQ ID NO: 2307404 - RNA, 19 nt, Artificial Sequence
  Description of Artificial Sequence: Synthetic oligonucleotide
  Sense strand starting at position 1979 of SEQ ID NO: 1884988
acuggaaugcucggaauaa

SEQ ID NO: 2307405 - RNA, 19 nt, Artificial Sequence
  Description of Artificial Sequence: Synthetic oligonucleotide
  Antisense strand to SEQ ID NO: 2307404
uuauuccgagcauuccagu

SEQ ID NO: 2307406 - RNA, 19 nt, Artificial Sequence
  Description of Artificial Sequence: Synthetic oligonucleotide
  Sense strand starting at position 3132 of SEQ ID NO: 1884988
uugaaaguuuccuccuuug

SEQ ID NO: 2307407 - RNA, 19 nt, Artificial Sequence
  Description of Artificial Sequence: Synthetic oligonucleotide
  Antisense strand to SEQ ID NO: 2307406
caaaggaggaaacuuucaa

SEQ ID NO: 2307408 - RNA, 19 nt, Artificial Sequence
  Description of Artificial Sequence: Synthetic oligonucleotide
  Sense strand starting at position 3197 of SEQ ID NO: 1884988
agcgauacugaauguauaa

SEQ ID NO: 2307409 - RNA, 19 nt, Artificial Sequence
  Description of Artificial Sequence: Synthetic oligonucleotide
  Antisense strand to SEQ ID NO: 2307408
uuauacauucaguaucgcu

SEQ ID NO: 2307410 - RNA, 19 nt, Artificial Sequence
  Description of Artificial Sequence: Synthetic oligonucleotide
  Sense strand starting at position 3279 of SEQ ID NO: 1884988
auccacauucuugggaauu

SEQ ID NO: 2307411 - RNA, 19 nt, Artificial Sequence
  Description of Artificial Sequence: Synthetic oligonucleotide
  Antisense strand to SEQ ID NO: 2307410
aauucccaagaauguggau

SEQ ID NO: 2307412 - RNA, 19 nt, Artificial Sequence
  Description of Artificial Sequence: Synthetic oligonucleotide
  Sense strand starting at position 3294 of SEQ ID NO: 1884988
aauuaaaugucacugugag

SEQ ID NO: 2307413 - RNA, 19 nt, Artificial Sequence
  Description of Artificial Sequence: Synthetic oligonucleotide
  Antisense strand to SEQ ID NO: 2307412
cucacagugacauuuaauu

SEQ ID NO: 2307414 - RNA, 19 nt, Artificial Sequence
  Description of Artificial Sequence: Synthetic oligonucleotide
  Sense strand starting at position 3295 of SEQ ID NO: 1884988
auuaaaugucacugugaga

SEQ ID NO: 2307415 - RNA, 19 nt, Artificial Sequence
  Description of Artificial Sequence: Synthetic oligonucleotide
  Antisense strand to SEQ ID NO: 2307414
ucucacagugacauuuaau

SEQ ID NO: 2307416 - RNA, 19 nt, Artificial Sequence
  Description of Artificial Sequence: Synthetic oligonucleotide
  Sense strand starting at position 3340 of SEQ ID NO: 1884988
uaauaagggcucugagacu

SEQ ID NO: 2307417 - RNA, 19 nt, Artificial Sequence
  Description of Artificial Sequence: Synthetic oligonucleotide
  Antisense strand to SEQ ID NO: 2307416
agucucagagcccuuauua

SEQ ID NO: 2307418 - RNA, 19 nt, Artificial Sequence
  Description of Artificial Sequence: Synthetic oligonucleotide
  Sense strand starting at position 3386 of SEQ ID NO: 1884988
cuaguaaggccuugacuac

SEQ ID NO: 2307419 - RNA, 19 nt, Artificial Sequence
  Description of Artificial Sequence: Synthetic oligonucleotide
  Antisense strand to SEQ ID NO: 2307418
guagucaaggccuuacuag

SEQ ID NO: 2307420 - RNA, 19 nt, Artificial Sequence
  Description of Artificial Sequence: Synthetic oligonucleotide
  Sense strand starting at position 3387 of SEQ ID NO: 1884988
uaguaaggccuugacuaca

SEQ ID NO: 2307421 - RNA, 19 nt, Artificial Sequence
  Description of Artificial Sequence: Synthetic oligonucleotide
  Antisense strand to SEQ ID NO: 2307420
uguagucaaggccuuacua

SEQ ID NO: 2307422 - RNA, 19 nt, Artificial Sequence
  Description of Artificial Sequence: Synthetic oligonucleotide
  Sense strand starting at position 3436 of SEQ ID NO: 1884988
gucaacucauugucacaca

SEQ ID NO: 2307423 - RNA, 19 nt, Artificial Sequence
  Description of Artificial Sequence: Synthetic oligonucleotide
  Antisense strand to SEQ ID NO: 2307422
ugugugacaaugaguugac

SEQ ID NO: 2307424 - RNA, 19 nt, Artificial Sequence
  Description of Artificial Sequence: Synthetic oligonucleotide
  Sense strand starting at position 3447 of SEQ ID NO: 1884988
gucacacacuuccugagaa

SEQ ID NO: 2307425 - RNA, 19 nt, Artificial Sequence
  Description of Artificial Sequence: Synthetic oligonucleotide
  Antisense strand to SEQ ID NO: 2307424
uucucaggaagugugugac

SEQ ID NO: 2307426 - RNA, 19 nt, Artificial Sequence
  Description of Artificial Sequence: Synthetic oligonucleotide
  Sense strand starting at position 3519 of SEQ ID NO: 1884988
uuaagaguuaaacggugau

SEQ ID NO: 2307427 - RNA, 19 nt, Artificial Sequence
  Description of Artificial Sequence: Synthetic oligonucleotide
  Antisense strand to SEQ ID NO: 2307426
aucaccguuuaacucuuaa

SEQ ID NO: 2307428 - RNA, 19 nt, Artificial Sequence
  Description of Artificial Sequence: Synthetic oligonucleotide
  Sense strand starting at position 3522 of SEQ ID NO: 1884988
agaguuaaacggugauucu

SEQ ID NO: 2307429 - RNA, 19 nt, Artificial Sequence
  Description of Artificial Sequence: Synthetic oligonucleotide
  Antisense strand to SEQ ID NO: 2307428
agaaucaccguuuaacucu

SEQ ID NO: 2307430 - RNA, 19 nt, Artificial Sequence
  Description of Artificial Sequence: Synthetic oligonucleotide
  Sense strand starting at position 3523 of SEQ ID NO: 1884988
gaguuaaacggugauucua

SEQ ID NO: 2307431 - RNA, 19 nt, Artificial Sequence
  Description of Artificial Sequence: Synthetic oligonucleotide
  Antisense strand to SEQ ID NO: 2307430
uagaaucaccguuuaacuc

SEQ ID NO: 2307432 - RNA, 19 nt, Artificial Sequence
  Description of Artificial Sequence: Synthetic oligonucleotide
  Sense strand starting at position 3525 of SEQ ID NO: 1884988
guuaaacggugauucuaua

SEQ ID NO: 2307433 - RNA, 19 nt, Artificial Sequence
  Description of Artificial Sequence: Synthetic oligonucleotide
  Antisense strand to SEQ ID NO: 2307432
uauagaaucaccguuuaac

SEQ ID NO: 2307434 - RNA, 19 nt, Artificial Sequence
  Description of Artificial Sequence: Synthetic oligonucleotide
  Sense strand starting at position 29 of SEQ ID NO: 1884989
uggaaugcuaaguaaugca

SEQ ID NO: 2307435 - RNA, 19 nt, Artificial Sequence
  Description of Artificial Sequence: Synthetic oligonucleotide
  Antisense strand to SEQ ID NO: 2307434
ugcauuacuuagcauucca

SEQ ID NO: 2307436 - RNA, 19 nt, Artificial Sequence
  Description of Artificial Sequence: Synthetic oligonucleotide
  Sense strand starting at position 146 of SEQ ID NO: 1884989
agcacaaauuagcuggaaa

SEQ ID NO: 2307437 - RNA, 19 nt, Artificial Sequence
  Description of Artificial Sequence: Synthetic oligonucleotide
  Antisense strand to SEQ ID NO: 2307436
uuuccagcuaauuugugcu

SEQ ID NO: 2307438 - RNA, 19 nt, Artificial Sequence
  Description of Artificial Sequence: Synthetic oligonucleotide
  Sense strand starting at position 196 of SEQ ID NO: 1884989
ugggcucauauuuguaagu

SEQ ID NO: 2307439 - RNA, 19 nt, Artificial Sequence
  Description of Artificial Sequence: Synthetic oligonucleotide
  Antisense strand to SEQ ID NO: 2307438
acuuacaaauaugagccca

SEQ ID NO: 2307440 - RNA, 19 nt, Artificial Sequence
  Description of Artificial Sequence: Synthetic oligonucleotide
  Sense strand starting at position 217 of SEQ ID NO: 1884989
gauugugauuauguagaua

SEQ ID NO: 2307441 - RNA, 19 nt, Artificial Sequence
  Description of Artificial Sequence: Synthetic oligonucleotide
  Antisense strand to SEQ ID NO: 2307440
uaucuacauaaucacaauc

SEQ ID NO: 2307442 - RNA, 19 nt, Artificial Sequence
  Description of Artificial Sequence: Synthetic oligonucleotide
  Sense strand starting at position 321 of SEQ ID NO: 1884989
guauuccacguggaaauca

SEQ ID NO: 2307443 - RNA, 19 nt, Artificial Sequence
  Description of Artificial Sequence: Synthetic oligonucleotide
  Antisense strand to SEQ ID NO: 2307442
ugauuuccacguggaauac

SEQ ID NO: 2307444 - RNA, 19 nt, Artificial Sequence
  Description of Artificial Sequence: Synthetic oligonucleotide
  Sense strand starting at position 577 of SEQ ID NO: 1884989
ugucauauuucugcaggca

SEQ ID NO: 2307445 - RNA, 19 nt, Artificial Sequence
  Description of Artificial Sequence: Synthetic oligonucleotide
  Antisense strand to SEQ ID NO: 2307444
ugccugcagaaauaugaca

SEQ ID NO: 2307446 - RNA, 19 nt, Artificial Sequence
  Description of Artificial Sequence: Synthetic oligonucleotide
  Sense strand starting at position 616 of SEQ ID NO: 1884989
ccuacucaccuuuggaaga

SEQ ID NO: 2307447 - RNA, 19 nt, Artificial Sequence
  Description of Artificial Sequence: Synthetic oligonucleotide
  Antisense strand to SEQ ID NO: 2307446
ucuuccaaaggugaguagg

SEQ ID NO: 2307448 - RNA, 19 nt, Artificial Sequence
  Description of Artificial Sequence: Synthetic oligonucleotide
  Sense strand starting at position 772 of SEQ ID NO: 1884989
augaauuaagcauacguua

SEQ ID NO: 2307449 - RNA, 19 nt, Artificial Sequence
  Description of Artificial Sequence: Synthetic oligonucleotide
  Antisense strand to SEQ ID NO: 2307448
uaacguaugcuuaauucau

SEQ ID NO: 2307450 - RNA, 19 nt, Artificial Sequence
  Description of Artificial Sequence: Synthetic oligonucleotide
  Sense strand starting at position 777 of SEQ ID NO: 1884989
uuaagcauacguuauuaag

SEQ ID NO: 2307451 - RNA, 19 nt, Artificial Sequence
  Description of Artificial Sequence: Synthetic oligonucleotide
  Antisense strand to SEQ ID NO: 2307450
cuuaauaacguaugcuuaa

SEQ ID NO: 2307452 - RNA, 19 nt, Artificial Sequence
  Description of Artificial Sequence: Synthetic oligonucleotide
  Sense strand starting at position 814 of SEQ ID NO: 1884989
agcaaugugguuuguauuu

SEQ ID NO: 2307453 - RNA, 19 nt, Artificial Sequence
  Description of Artificial Sequence: Synthetic oligonucleotide
  Antisense strand to SEQ ID NO: 2307452
aaauacaaaccacauugcu

SEQ ID NO: 2307454 - RNA, 19 nt, Artificial Sequence
  Description of Artificial Sequence: Synthetic oligonucleotide
  Sense strand starting at position 871 of SEQ ID NO: 1884989
auuacuacuguuuaaaggu

SEQ ID NO: 2307455 - RNA, 19 nt, Artificial Sequence
  Description of Artificial Sequence: Synthetic oligonucleotide
  Antisense strand to SEQ ID NO: 2307454
accuuuaaacaguaguaau

SEQ ID NO: 2307456 - RNA, 19 nt, Artificial Sequence
  Description of Artificial Sequence: Synthetic oligonucleotide
  Sense strand starting at position 878 of SEQ ID NO: 1884989
cuguuuaaaggugauguga

SEQ ID NO: 2307457 - RNA, 19 nt, Artificial Sequence
  Description of Artificial Sequence: Synthetic oligonucleotide
  Antisense strand to SEQ ID NO: 2307456
ucacaucaccuuuaaacag

SEQ ID NO: 2307458 - RNA, 19 nt, Artificial Sequence
  Description of Artificial Sequence: Synthetic oligonucleotide
  Sense strand starting at position 996 of SEQ ID NO: 1884989
aaugguaaagccuaucuga

SEQ ID NO: 2307459 - RNA, 19 nt, Artificial Sequence
  Description of Artificial Sequence: Synthetic oligonucleotide
  Antisense strand to SEQ ID NO: 2307458
ucagauaggcuuuaccauu

SEQ ID NO: 2307460 - RNA, 19 nt, Artificial Sequence
  Description of Artificial Sequence: Synthetic oligonucleotide
  Sense strand starting at position 1122 of SEQ ID NO: 1884989
aagggaguaaacuggguau

SEQ ID NO: 2307461 - RNA, 19 nt, Artificial Sequence
  Description of Artificial Sequence: Synthetic oligonucleotide
  Antisense strand to SEQ ID NO: 2307460
auacccaguuuacucccuu

SEQ ID NO: 2307462 - RNA, 19 nt, Artificial Sequence
  Description of Artificial Sequence: Synthetic oligonucleotide
  Sense strand starting at position 1124 of SEQ ID NO: 1884989
gggaguaaacuggguauau

SEQ ID NO: 2307463 - RNA, 19 nt, Artificial Sequence
  Description of Artificial Sequence: Synthetic oligonucleotide
  Antisense strand to SEQ ID NO: 2307462
auauacccaguuuacuccc

SEQ ID NO: 2307464 - RNA, 19 nt, Artificial Sequence
  Description of Artificial Sequence: Synthetic oligonucleotide
  Sense strand starting at position 1125 of SEQ ID NO: 1884989
ggaguaaacuggguauauc

SEQ ID NO: 2307465 - RNA, 19 nt, Artificial Sequence
  Description of Artificial Sequence: Synthetic oligonucleotide
  Antisense strand to SEQ ID NO: 2307464
gauauacccaguuuacucc

SEQ ID NO: 2307466 - RNA, 19 nt, Artificial Sequence
  Description of Artificial Sequence: Synthetic oligonucleotide
  Sense strand starting at position 1603 of SEQ ID NO: 1884989
gugacaggaccauguuaca

SEQ ID NO: 2307467 - RNA, 19 nt, Artificial Sequence
  Description of Artificial Sequence: Synthetic oligonucleotide
  Antisense strand to SEQ ID NO: 2307466
uguaacaugguccugucac

SEQ ID NO: 2307468 - RNA, 19 nt, Artificial Sequence
  Description of Artificial Sequence: Synthetic oligonucleotide
  Sense strand starting at position 2176 of SEQ ID NO: 1884989
augagaagaugcuuacacu

SEQ ID NO: 2307469 - RNA, 19 nt, Artificial Sequence
  Description of Artificial Sequence: Synthetic oligonucleotide
  Antisense strand to SEQ ID NO: 2307468
aguguaagcaucuucucau

SEQ ID NO: 2307470 - RNA, 19 nt, Artificial Sequence
  Description of Artificial Sequence: Synthetic oligonucleotide
  Sense strand starting at position 2201 of SEQ ID NO: 1884989
agaugaugcauauggguau

SEQ ID NO: 2307471 - RNA, 19 nt, Artificial Sequence
  Description of Artificial Sequence: Synthetic oligonucleotide
  Antisense strand to SEQ ID NO: 2307470
auacccauaugcaucaucu

SEQ ID NO: 2307472 - RNA, 19 nt, Artificial Sequence
  Description of Artificial Sequence: Synthetic oligonucleotide
  Sense strand starting at position 2205 of SEQ ID NO: 1884989
gaugcauauggguaucgaa

SEQ ID NO: 2307473 - RNA, 19 nt, Artificial Sequence
  Description of Artificial Sequence: Synthetic oligonucleotide
  Antisense strand to SEQ ID NO: 2307472
uucgauacccauaugcauc

SEQ ID NO: 2307474 - RNA, 19 nt, Artificial Sequence
  Description of Artificial Sequence: Synthetic oligonucleotide
  Sense strand starting at position 2388 of SEQ ID NO: 1884989
agaugauugugaucacaca

SEQ ID NO: 2307475 - RNA, 19 nt, Artificial Sequence
  Description of Artificial Sequence: Synthetic oligonucleotide
  Antisense strand to SEQ ID NO: 2307474
ugugugaucacaaucaucu

SEQ ID NO: 2307476 - RNA, 19 nt, Artificial Sequence
  Description of Artificial Sequence: Synthetic oligonucleotide
  Sense strand starting at position 2531 of SEQ ID NO: 1884989
ucgacucaucuggaauguu

SEQ ID NO: 2307477 - RNA, 19 nt, Artificial Sequence
  Description of Artificial Sequence: Synthetic oligonucleotide
  Antisense strand to SEQ ID NO: 2307476
aacauuccagaugagucga

SEQ ID NO: 2307478 - RNA, 19 nt, Artificial Sequence
  Description of Artificial Sequence: Synthetic oligonucleotide
  Sense strand starting at position 2714 of SEQ ID NO: 1884989
accaaauugcuuuggagga

SEQ ID NO: 2307479 - RNA, 19 nt, Artificial Sequence
  Description of Artificial Sequence: Synthetic oligonucleotide
  Antisense strand to SEQ ID NO: 2307478
uccuccaaagcaauuuggu

SEQ ID NO: 2307480 - RNA, 19 nt, Artificial Sequence
  Description of Artificial Sequence: Synthetic oligonucleotide
  Sense strand starting at position 2718 of SEQ ID NO: 1884989
aauugcuuuggaggaauaa

SEQ ID NO: 2307481 - RNA, 19 nt, Artificial Sequence
  Description of Artificial Sequence: Synthetic oligonucleotide
  Antisense strand to SEQ ID NO: 2307480
uuauuccuccaaagcaauu

SEQ ID NO: 2307482 - RNA, 19 nt, Artificial Sequence
  Description of Artificial Sequence: Synthetic oligonucleotide
  Sense strand starting at position 2809 of SEQ ID NO: 1884989
gaagcaaagguuuaacugu

SEQ ID NO: 2307483 - RNA, 19 nt, Artificial Sequence
  Description of Artificial Sequence: Synthetic oligonucleotide
  Antisense strand to SEQ ID NO: 2307482
acaguuaaaccuuugcuuc

SEQ ID NO: 2307484 - RNA, 19 nt, Artificial Sequence
  Description of Artificial Sequence: Synthetic oligonucleotide
  Sense strand starting at position 2839 of SEQ ID NO: 1884989
ucagaacuguuaucuauga

SEQ ID NO: 2307485 - RNA, 19 nt, Artificial Sequence
  Description of Artificial Sequence: Synthetic oligonucleotide
  Antisense strand to SEQ ID NO: 2307484
ucauagauaacaguucuga

SEQ ID NO: 2307486 - RNA, 19 nt, Artificial Sequence
  Description of Artificial Sequence: Synthetic oligonucleotide
  Sense strand starting at position 3028 of SEQ ID NO: 1884989
uuugauaguugugcaauuu

SEQ ID NO: 2307487 - RNA, 19 nt, Artificial Sequence
  Description of Artificial Sequence: Synthetic oligonucleotide
  Antisense strand to SEQ ID NO: 2307486
aaauugcacaacuaucaaa

SEQ ID NO: 2307488 - RNA, 19 nt, Artificial Sequence
  Description of Artificial Sequence: Synthetic oligonucleotide
  Sense strand starting at position 3102 of SEQ ID NO: 1884989
acaacaucuggcugauuag

SEQ ID NO: 2307489 - RNA, 19 nt, Artificial Sequence
  Description of Artificial Sequence: Synthetic oligonucleotide
  Antisense strand to SEQ ID NO: 2307488
cuaaucagccagauguugu

SEQ ID NO: 2307490 - RNA, 19 nt, Artificial Sequence
  Description of Artificial Sequence: Synthetic oligonucleotide
  Sense strand starting at position 3103 of SEQ ID NO: 1884989
caacaucuggcugauuagu

SEQ ID NO: 2307491 - RNA, 19 nt, Artificial Sequence
  Description of Artificial Sequence: Synthetic oligonucleotide
  Antisense strand to SEQ ID NO: 2307490
acuaaucagccagauguug

SEQ ID NO: 2307492 - RNA, 19 nt, Artificial Sequence
  Description of Artificial Sequence: Synthetic oligonucleotide
  Sense strand starting at position 3230 of SEQ ID NO: 1884989
auaugaaagcccugagaau

SEQ ID NO: 2307493 - RNA, 19 nt, Artificial Sequence
  Description of Artificial Sequence: Synthetic oligonucleotide
  Antisense strand to SEQ ID NO: 2307492
auucucagggcuuucauau

SEQ ID NO: 2307494 - RNA, 19 nt, Artificial Sequence
  Description of Artificial Sequence: Synthetic oligonucleotide
  Sense strand starting at position 3239 of SEQ ID NO: 1884989
cccugagaaugucuaaaua

SEQ ID NO: 2307495 - RNA, 19 nt, Artificial Sequence
  Description of Artificial Sequence: Synthetic oligonucleotide
  Antisense strand to SEQ ID NO: 2307494
uauuuagacauucucaggg

SEQ ID NO: 2307496 - RNA, 19 nt, Artificial Sequence
  Description of Artificial Sequence: Synthetic oligonucleotide
  Sense strand starting at position 3317 of SEQ ID NO: 1884989
ggaggugguggugaugaua

SEQ ID NO: 2307497 - RNA, 19 nt, Artificial Sequence
  Description of Artificial Sequence: Synthetic oligonucleotide
  Antisense strand to SEQ ID NO: 2307496
uaucaucaccaccaccucc

SEQ ID NO: 2307498 - RNA, 19 nt, Artificial Sequence
  Description of Artificial Sequence: Synthetic oligonucleotide
  Sense strand starting at position 3388 of SEQ ID NO: 1884989
aaaugcuuuguguauagaa

SEQ ID NO: 2307499 - RNA, 19 nt, Artificial Sequence
  Description of Artificial Sequence: Synthetic oligonucleotide
  Antisense strand to SEQ ID NO: 2307498
uucuauacacaaagcauuu

SEQ ID NO: 2307500 - RNA, 19 nt, Artificial Sequence
  Description of Artificial Sequence: Synthetic oligonucleotide
  Sense strand starting at position 3507 of SEQ ID NO: 1884989
aucccauaguuaguaaaug

SEQ ID NO: 2307501 - RNA, 19 nt, Artificial Sequence
  Description of Artificial Sequence: Synthetic oligonucleotide
  Antisense strand to SEQ ID NO: 2307500
cauuuacuaacuaugggau

SEQ ID NO: 2307502 - RNA, 19 nt, Artificial Sequence
  Description of Artificial Sequence: Synthetic oligonucleotide
  Sense strand starting at position 3536 of SEQ ID NO: 1884989
auuugaaucugugcagucu

SEQ ID NO: 2307503 - RNA, 19 nt, Artificial Sequence
  Description of Artificial Sequence: Synthetic oligonucleotide
  Antisense strand to SEQ ID NO: 2307502
agacugcacagauucaaau

SEQ ID NO: 2307504 - RNA, 19 nt, Artificial Sequence
  Description of Artificial Sequence: Synthetic oligonucleotide
  Sense strand starting at position 3609 of SEQ ID NO: 1884989
uugaaacuggcauaucauu

SEQ ID NO: 2307505 - RNA, 19 nt, Artificial Sequence
  Description of Artificial Sequence: Synthetic oligonucleotide
  Antisense strand to SEQ ID NO: 2307504
aaugauaugccaguuucaa

SEQ ID NO: 2307506 - RNA, 19 nt, Artificial Sequence
  Description of Artificial Sequence: Synthetic oligonucleotide
  Sense strand starting at position 3677 of SEQ ID NO: 1884989
cuuccuauaugaguggaau

SEQ ID NO: 2307507 - RNA, 19 nt, Artificial Sequence
  Description of Artificial Sequence: Synthetic oligonucleotide
  Antisense strand to SEQ ID NO: 2307506
auuccacucauauaggaag

SEQ ID NO: 2307508 - RNA, 19 nt, Artificial Sequence
  Description of Artificial Sequence: Synthetic oligonucleotide
  Sense strand starting at position 3678 of SEQ ID NO: 1884989
uuccuauaugaguggaauu

SEQ ID NO: 2307509 - RNA, 19 nt, Artificial Sequence
  Description of Artificial Sequence: Synthetic oligonucleotide
  Antisense strand to SEQ ID NO: 2307508
aauuccacucauauaggaa

SEQ ID NO: 2307510 - RNA, 19 nt, Artificial Sequence
  Description of Artificial Sequence: Synthetic oligonucleotide
  Sense strand starting at position 3694 of SEQ ID NO: 1884989
auuaacaugccuggaacua

SEQ ID NO: 2307511 - RNA, 19 nt, Artificial Sequence
  Description of Artificial Sequence: Synthetic oligonucleotide
  Antisense strand to SEQ ID NO: 2307510
uaguuccaggcauguuaau

SEQ ID NO: 2307512 - RNA, 19 nt, Artificial Sequence
  Description of Artificial Sequence: Synthetic oligonucleotide
  Sense strand starting at position 3948 of SEQ ID NO: 1884989
aggucaaauccugaugcua

SEQ ID NO: 2307513 - RNA, 19 nt, Artificial Sequence
  Description of Artificial Sequence: Synthetic oligonucleotide
  Antisense strand to SEQ ID NO: 2307512
uagcaucaggauuugaccu

SEQ ID NO: 2307514 - RNA, 19 nt, Artificial Sequence
  Description of Artificial Sequence: Synthetic oligonucleotide
  Sense strand starting at position 155 of SEQ ID NO: 1884990
uuaggucuacuuugaaagu

SEQ ID NO: 2307515 - RNA, 19 nt, Artificial Sequence
  Description of Artificial Sequence: Synthetic oligonucleotide
  Antisense strand to SEQ ID NO: 2307514
acuuucaaaguagaccuaa

SEQ ID NO: 2307516 - RNA, 19 nt, Artificial Sequence
  Description of Artificial Sequence: Synthetic oligonucleotide
  Sense strand starting at position 236 of SEQ ID NO: 1884990
aucugcuuuguuuaaagga

SEQ ID NO: 2307517 - RNA, 19 nt, Artificial Sequence
  Description of Artificial Sequence: Synthetic oligonucleotide
  Antisense strand to SEQ ID NO: 2307516
uccuuuaaacaaagcagau

SEQ ID NO: 2307518 - RNA, 19 nt, Artificial Sequence
  Description of Artificial Sequence: Synthetic oligonucleotide
  Sense strand starting at position 314 of SEQ ID NO: 1884990
cuugguauuaaacgagaga

SEQ ID NO: 2307519 - RNA, 19 nt, Artificial Sequence
  Description of Artificial Sequence: Synthetic oligonucleotide
  Antisense strand to SEQ ID NO: 2307518
ucucucguuuaauaccaag

SEQ ID NO: 2307520 - RNA, 19 nt, Artificial Sequence
  Description of Artificial Sequence: Synthetic oligonucleotide
  Sense strand starting at position 518 of SEQ ID NO: 1884990
gugugcaaugcccuucuau

SEQ ID NO: 2307521 - RNA, 19 nt, Artificial Sequence
  Description of Artificial Sequence: Synthetic oligonucleotide
  Antisense strand to SEQ ID NO: 2307520
auagaagggcauugcacac

SEQ ID NO: 2307522 - RNA, 19 nt, Artificial Sequence
  Description of Artificial Sequence: Synthetic oligonucleotide
  Sense strand starting at position 552 of SEQ ID NO: 1884990
cugcuuuagaaugguggaa

SEQ ID NO: 2307523 - RNA, 19 nt, Artificial Sequence
  Description of Artificial Sequence: Synthetic oligonucleotide
  Antisense strand to SEQ ID NO: 2307522
uuccaccauucuaaagcag

SEQ ID NO: 2307524 - RNA, 19 nt, Artificial Sequence
  Description of Artificial Sequence: Synthetic oligonucleotide
  Sense strand starting at position 565 of SEQ ID NO: 1884990
guggaagacuacucucuac

SEQ ID NO: 2307525 - RNA, 19 nt, Artificial Sequence
  Description of Artificial Sequence: Synthetic oligonucleotide
  Antisense strand to SEQ ID NO: 2307524
guagagaguagucuuccac

SEQ ID NO: 2307526 - RNA, 19 nt, Artificial Sequence
  Description of Artificial Sequence: Synthetic oligonucleotide
  Sense strand starting at position 666 of SEQ ID NO: 1884990
cuccuugucagaggacaga

SEQ ID NO: 2307527 - RNA, 19 nt, Artificial Sequence
  Description of Artificial Sequence: Synthetic oligonucleotide
  Antisense strand to SEQ ID NO: 2307526
ucuguccucugacaaggag

SEQ ID NO: 2307528 - RNA, 19 nt, Artificial Sequence
  Description of Artificial Sequence: Synthetic oligonucleotide
  Sense strand starting at position 791 of SEQ ID NO: 1884990
gagaguggguugaagagua

SEQ ID NO: 2307529 - RNA, 19 nt, Artificial Sequence
  Description of Artificial Sequence: Synthetic oligonucleotide
  Antisense strand to SEQ ID NO: 2307528
uacucuucaacccacucuc

SEQ ID NO: 2307530 - RNA, 19 nt, Artificial Sequence
  Description of Artificial Sequence: Synthetic oligonucleotide
  Sense strand starting at position 867 of SEQ ID NO: 1884990
agguauaagaugcagcaau

SEQ ID NO: 2307531 - RNA, 19 nt, Artificial Sequence
  Description of Artificial Sequence: Synthetic oligonucleotide
  Antisense strand to SEQ ID NO: 2307530
auugcugcaucuuauaccu

SEQ ID NO: 2307532 - RNA, 19 nt, Artificial Sequence
  Description of Artificial Sequence: Synthetic oligonucleotide
  Sense strand starting at position 1289 of SEQ ID NO: 1884990
agucaaguugcagaaggau

SEQ ID NO: 2307533 - RNA, 19 nt, Artificial Sequence
  Description of Artificial Sequence: Synthetic oligonucleotide
  Antisense strand to SEQ ID NO: 2307532
auccuucugcaacuugacu

SEQ ID NO: 2307534 - RNA, 19 nt, Artificial Sequence
  Description of Artificial Sequence: Synthetic oligonucleotide
  Sense strand starting at position 1292 of SEQ ID NO: 1884990
caaguugcagaaggauaua

SEQ ID NO: 2307535 - RNA, 19 nt, Artificial Sequence
  Description of Artificial Sequence: Synthetic oligonucleotide
  Antisense strand to SEQ ID NO: 2307534
uauauccuucugcaacuug

SEQ ID NO: 2307536 - RNA, 19 nt, Artificial Sequence
  Description of Artificial Sequence: Synthetic oligonucleotide
  Sense strand starting at position 1360 of SEQ ID NO: 1884990
gugccauuuauauggcuga

SEQ ID NO: 2307537 - RNA, 19 nt, Artificial Sequence
  Description of Artificial Sequence: Synthetic oligonucleotide
  Antisense strand to SEQ ID NO: 2307536
ucagccauauaaauggcac

SEQ ID NO: 2307538 - RNA, 19 nt, Artificial Sequence
  Description of Artificial Sequence: Synthetic oligonucleotide
  Sense strand starting at position 1474 of SEQ ID NO: 1884990
aacaguuaccucugaggag

SEQ ID NO: 2307539 - RNA, 19 nt, Artificial Sequence
  Description of Artificial Sequence: Synthetic oligonucleotide
  Antisense strand to SEQ ID NO: 2307538
cuccucagagguaacuguu

SEQ ID NO: 2307540 - RNA, 19 nt, Artificial Sequence
  Description of Artificial Sequence: Synthetic oligonucleotide
  Sense strand starting at position 1560 of SEQ ID NO: 1884990
uagugugauagguacaaga

SEQ ID NO: 2307541 - RNA, 19 nt, Artificial Sequence
  Description of Artificial Sequence: Synthetic oligonucleotide
  Antisense strand to SEQ ID NO: 2307540
ucuuguaccuaucacacua

SEQ ID NO: 2307542 - RNA, 19 nt, Artificial Sequence
  Description of Artificial Sequence: Synthetic oligonucleotide
  Sense strand starting at position 1562 of SEQ ID NO: 1884990
gugugauagguacaagagu

SEQ ID NO: 2307543 - RNA, 19 nt, Artificial Sequence
  Description of Artificial Sequence: Synthetic oligonucleotide
  Antisense strand to SEQ ID NO: 2307542
acucuuguaccuaucacac

SEQ ID NO: 2307544 - RNA, 19 nt, Artificial Sequence
  Description of Artificial Sequence: Synthetic oligonucleotide
  Sense strand starting at position 1736 of SEQ ID NO: 1884990
acuggagaagucuaugcuu

SEQ ID NO: 2307545 - RNA, 19 nt, Artificial Sequence
  Description of Artificial Sequence: Synthetic oligonucleotide
  Antisense strand to SEQ ID NO: 2307544
aagcauagacuucuccagu

SEQ ID NO: 2307546 - RNA, 19 nt, Artificial Sequence
  Description of Artificial Sequence: Synthetic oligonucleotide
  Sense strand starting at position 1738 of SEQ ID NO: 1884990
uggagaagucuaugcuuag

SEQ ID NO: 2307547 - RNA, 19 nt, Artificial Sequence
  Description of Artificial Sequence: Synthetic oligonucleotide
  Antisense strand to SEQ ID NO: 2307546
cuaagcauagacuucucca

SEQ ID NO: 2307548 - RNA, 19 nt, Artificial Sequence
  Description of Artificial Sequence: Synthetic oligonucleotide
  Sense strand starting at position 1739 of SEQ ID NO: 1884990
ggagaagucuaugcuuaga

SEQ ID NO: 2307549 - RNA, 19 nt, Artificial Sequence
  Description of Artificial Sequence: Synthetic oligonucleotide
  Antisense strand to SEQ ID NO: 2307548
ucuaagcauagacuucucc

SEQ ID NO: 2307550 - RNA, 19 nt, Artificial Sequence
  Description of Artificial Sequence: Synthetic oligonucleotide
  Sense strand starting at position 1741 of SEQ ID NO: 1884990
agaagucuaugcuuagaaa

SEQ ID NO: 2307551 - RNA, 19 nt, Artificial Sequence
  Description of Artificial Sequence: Synthetic oligonucleotide
  Antisense strand to SEQ ID NO: 2307550
uuucuaagcauagacuucu

SEQ ID NO: 2307552 - RNA, 19 nt, Artificial Sequence
  Description of Artificial Sequence: Synthetic oligonucleotide
  Sense strand starting at position 1742 of SEQ ID NO: 1884990
gaagucuaugcuuagaaau

SEQ ID NO: 2307553 - RNA, 19 nt, Artificial Sequence
  Description of Artificial Sequence: Synthetic oligonucleotide
  Antisense strand to SEQ ID NO: 2307552
auuucuaagcauagacuuc

SEQ ID NO: 2307554 - RNA, 19 nt, Artificial Sequence
  Description of Artificial Sequence: Synthetic oligonucleotide
  Sense strand starting at position 1798 of SEQ ID NO: 1884990
acccucagauccuuuguua

SEQ ID NO: 2307555 - RNA, 19 nt, Artificial Sequence
  Description of Artificial Sequence: Synthetic oligonucleotide
  Antisense strand to SEQ ID NO: 2307554
uaacaaaggaucugagggu

SEQ ID NO: 2307556 - RNA, 19 nt, Artificial Sequence
  Description of Artificial Sequence: Synthetic oligonucleotide
  Sense strand starting at position 1854 of SEQ ID NO: 1884990
ugagcuuaccacuaugacu

SEQ ID NO: 2307557 - RNA, 19 nt, Artificial Sequence
  Description of Artificial Sequence: Synthetic oligonucleotide
  Antisense strand to SEQ ID NO: 2307556
agucauagugguaagcuca

SEQ ID NO: 2307558 - RNA, 19 nt, Artificial Sequence
  Description of Artificial Sequence: Synthetic oligonucleotide
  Sense strand starting at position 2045 of SEQ ID NO: 1884990
ugugaugggaaaugugagu

SEQ ID NO: 2307559 - RNA, 19 nt, Artificial Sequence
  Description of Artificial Sequence: Synthetic oligonucleotide
  Antisense strand to SEQ ID NO: 2307558
acucacauuucccaucaca

SEQ ID NO: 2307560 - RNA, 19 nt, Artificial Sequence
  Description of Artificial Sequence: Synthetic oligonucleotide
  Sense strand starting at position 2151 of SEQ ID NO: 1884990
aaguaagacucagugguca

SEQ ID NO: 2307561 - RNA, 19 nt, Artificial Sequence
  Description of Artificial Sequence: Synthetic oligonucleotide
  Antisense strand to SEQ ID NO: 2307560
ugaccacugagucuuacuu

SEQ ID NO: 2307562 - RNA, 19 nt, Artificial Sequence
  Description of Artificial Sequence: Synthetic oligonucleotide
  Sense strand starting at position 2155 of SEQ ID NO: 1884990
aagacucaguggucaauua

SEQ ID NO: 2307563 - RNA, 19 nt, Artificial Sequence
  Description of Artificial Sequence: Synthetic oligonucleotide
  Antisense strand to SEQ ID NO: 2307562
uaauugaccacugagucuu

SEQ ID NO: 2307564 - RNA, 19 nt, Artificial Sequence
  Description of Artificial Sequence: Synthetic oligonucleotide
  Sense strand starting at position 2165 of SEQ ID NO: 1884990
ggucaauuagugggaugug

SEQ ID NO: 2307565 - RNA, 19 nt, Artificial Sequence
  Description of Artificial Sequence: Synthetic oligonucleotide
  Antisense strand to SEQ ID NO: 2307564
cacaucccacuaauugacc

SEQ ID NO: 2307566 - RNA, 19 nt, Artificial Sequence
  Description of Artificial Sequence: Synthetic oligonucleotide
  Sense strand starting at position 2168 of SEQ ID NO: 1884990
caauuagugggauguguaa

SEQ ID NO: 2307567 - RNA, 19 nt, Artificial Sequence
  Description of Artificial Sequence: Synthetic oligonucleotide
  Antisense strand to SEQ ID NO: 2307566
uuacacaucccacuaauug

SEQ ID NO: 2307568 - RNA, 19 nt, Artificial Sequence
  Description of Artificial Sequence: Synthetic oligonucleotide
  Sense strand starting at position 2231 of SEQ ID NO: 1884990
gguacuacccucuaucagu

SEQ ID NO: 2307569 - RNA, 19 nt, Artificial Sequence
  Description of Artificial Sequence: Synthetic oligonucleotide
  Antisense strand to SEQ ID NO: 2307568
acugauagaggguaguacc

SEQ ID NO: 2307570 - RNA, 19 nt, Artificial Sequence
  Description of Artificial Sequence: Synthetic oligonucleotide
  Sense strand starting at position 2269 of SEQ ID NO: 1884990
acaguauaaucaccugagu

SEQ ID NO: 2307571 - RNA, 19 nt, Artificial Sequence
  Description of Artificial Sequence: Synthetic oligonucleotide
  Antisense strand to SEQ ID NO: 2307570
acucaggugauuauacugu

SEQ ID NO: 2307572 - RNA, 19 nt, Artificial Sequence
  Description of Artificial Sequence: Synthetic oligonucleotide
  Sense strand starting at position 2569 of SEQ ID NO: 1884990
uugucucucuacucagaca

SEQ ID NO: 2307573 - RNA, 19 nt, Artificial Sequence
  Description of Artificial Sequence: Synthetic oligonucleotide
  Antisense strand to SEQ ID NO: 2307572
ugucugaguagagagacaa

SEQ ID NO: 2307574 - RNA, 19 nt, Artificial Sequence
  Description of Artificial Sequence: Synthetic oligonucleotide
  Sense strand starting at position 2610 of SEQ ID NO: 1884990
cucucugcuggagaauauu

SEQ ID NO: 2307575 - RNA, 19 nt, Artificial Sequence
  Description of Artificial Sequence: Synthetic oligonucleotide
  Antisense strand to SEQ ID NO: 2307574
aauauucuccagcagagag

SEQ ID NO: 2307576 - RNA, 19 nt, Artificial Sequence
  Description of Artificial Sequence: Synthetic oligonucleotide
  Sense strand starting at position 2796 of SEQ ID NO: 1884990
gacuuacauguugguuaaa

SEQ ID NO: 2307577 - RNA, 19 nt, Artificial Sequence
  Description of Artificial Sequence: Synthetic oligonucleotide
  Antisense strand to SEQ ID NO: 2307576
uuuaaccaacauguaaguc

SEQ ID NO: 2307578 - RNA, 19 nt, Artificial Sequence
  Description of Artificial Sequence: Synthetic oligonucleotide
  Sense strand starting at position 3172 of SEQ ID NO: 1884990
guacauguucuauauacaa

SEQ ID NO: 2307579 - RNA, 19 nt, Artificial Sequence
  Description of Artificial Sequence: Synthetic oligonucleotide
  Antisense strand to SEQ ID NO: 2307578
uuguauauagaacauguac

SEQ ID NO: 2307580 - RNA, 19 nt, Artificial Sequence
  Description of Artificial Sequence: Synthetic oligonucleotide
  Sense strand starting at position 3253 of SEQ ID NO: 1884990
agggaguaacgguagagua

SEQ ID NO: 2307581 - RNA, 19 nt, Artificial Sequence
  Description of Artificial Sequence: Synthetic oligonucleotide
  Antisense strand to SEQ ID NO: 2307580
uacucuaccguuacucccu

SEQ ID NO: 2307582 - RNA, 19 nt, Artificial Sequence
  Description of Artificial Sequence: Synthetic oligonucleotide
  Sense strand starting at position 3348 of SEQ ID NO: 1884990
ccaucuuaggcccacagaa

SEQ ID NO: 2307583 - RNA, 19 nt, Artificial Sequence
  Description of Artificial Sequence: Synthetic oligonucleotide
  Antisense strand to SEQ ID NO: 2307582
uucugugggccuaagaugg

SEQ ID NO: 2307584 - RNA, 19 nt, Artificial Sequence
  Description of Artificial Sequence: Synthetic oligonucleotide
  Sense strand starting at position 3433 of SEQ ID NO: 1884990
agagguucuccagguugaa

SEQ ID NO: 2307585 - RNA, 19 nt, Artificial Sequence
  Description of Artificial Sequence: Synthetic oligonucleotide
  Antisense strand to SEQ ID NO: 2307584
uucaaccuggagaaccucu

SEQ ID NO: 2307586 - RNA, 19 nt, Artificial Sequence
  Description of Artificial Sequence: Synthetic oligonucleotide
  Sense strand starting at position 3540 of SEQ ID NO: 1884990
uuauuacugcuggagcaua

SEQ ID NO: 2307587 - RNA, 19 nt, Artificial Sequence
  Description of Artificial Sequence: Synthetic oligonucleotide
  Antisense strand to SEQ ID NO: 2307586
uaugcuccagcaguaauaa

SEQ ID NO: 2307588 - RNA, 19 nt, Artificial Sequence
  Description of Artificial Sequence: Synthetic oligonucleotide
  Sense strand starting at position 3797 of SEQ ID NO: 1884990
uguugucaucaguagagaa

SEQ ID NO: 2307589 - RNA, 19 nt, Artificial Sequence
  Description of Artificial Sequence: Synthetic oligonucleotide
  Antisense strand to SEQ ID NO: 2307588
uucucuacugaugacaaca

SEQ ID NO: 2307590 - RNA, 19 nt, Artificial Sequence
  Description of Artificial Sequence: Synthetic oligonucleotide
  Sense strand starting at position 3799 of SEQ ID NO: 1884990
uugucaucaguagagaagu

SEQ ID NO: 2307591 - RNA, 19 nt, Artificial Sequence
  Description of Artificial Sequence: Synthetic oligonucleotide
  Antisense strand to SEQ ID NO: 2307590
acuucucuacugaugacaa

SEQ ID NO: 2307592 - RNA, 19 nt, Artificial Sequence
  Description of Artificial Sequence: Synthetic oligonucleotide
  Sense strand starting at position 3954 of SEQ ID NO: 1884990
auuguaugcaauuggauga

SEQ ID NO: 2307593 - RNA, 19 nt, Artificial Sequence
  Description of Artificial Sequence: Synthetic oligonucleotide
  Antisense strand to SEQ ID NO: 2307592
ucauccaauugcauacaau

SEQ ID NO: 2307594 - RNA, 19 nt, Artificial Sequence
  Description of Artificial Sequence: Synthetic oligonucleotide
  Sense strand starting at position 3132 of SEQ ID NO: 1884991
uugauaagacuuugcaguu

SEQ ID NO: 2307595 - RNA, 19 nt, Artificial Sequence
  Description of Artificial Sequence: Synthetic oligonucleotide
  Antisense strand to SEQ ID NO: 2307594
aacugcaaagucuuaucaa

SEQ ID NO: 2307596 - RNA, 19 nt, Artificial Sequence
  Description of Artificial Sequence: Synthetic oligonucleotide
  Sense strand starting at position 3133 of SEQ ID NO: 1884991
ugauaagacuuugcaguuu

SEQ ID NO: 2307597 - RNA, 19 nt, Artificial Sequence
  Description of Artificial Sequence: Synthetic oligonucleotide
  Antisense strand to SEQ ID NO: 2307596
aaacugcaaagucuuauca

SEQ ID NO: 2307598 - RNA, 19 nt, Artificial Sequence
  Description of Artificial Sequence: Synthetic oligonucleotide
  Sense strand starting at position 3167 of SEQ ID NO: 1884991
uuuguuauuugguaaccau

SEQ ID NO: 2307599 - RNA, 19 nt, Artificial Sequence
  Description of Artificial Sequence: Synthetic oligonucleotide
  Antisense strand to SEQ ID NO: 2307598
augguuaccaaauaacaaa

SEQ ID NO: 2307600 - RNA, 19 nt, Artificial Sequence
  Description of Artificial Sequence: Synthetic oligonucleotide
  Sense strand starting at position 3174 of SEQ ID NO: 1884991
uuugguaaccauuguguau

SEQ ID NO: 2307601 - RNA, 19 nt, Artificial Sequence
  Description of Artificial Sequence: Synthetic oligonucleotide
  Antisense strand to SEQ ID NO: 2307600
auacacaaugguuaccaaa

SEQ ID NO: 2307602 - RNA, 19 nt, Artificial Sequence
  Description of Artificial Sequence: Synthetic oligonucleotide
  Sense strand starting at position 3178 of SEQ ID NO: 1884991
guaaccauuguguaugguu

SEQ ID NO: 2307603 - RNA, 19 nt, Artificial Sequence
  Description of Artificial Sequence: Synthetic oligonucleotide
  Antisense strand to SEQ ID NO: 2307602
aaccauacacaaugguuac

SEQ ID NO: 2307604 - RNA, 19 nt, Artificial Sequence
  Description of Artificial Sequence: Synthetic oligonucleotide
  Sense strand starting at position 3203 of SEQ ID NO: 1884991
aguuaauguuuauuggcaa

SEQ ID NO: 2307605 - RNA, 19 nt, Artificial Sequence
  Description of Artificial Sequence: Synthetic oligonucleotide
  Antisense strand to SEQ ID NO: 2307604
uugccaauaaacauuaacu

SEQ ID NO: 2307606 - RNA, 19 nt, Artificial Sequence
  Description of Artificial Sequence: Synthetic oligonucleotide
  Sense strand starting at position 3207 of SEQ ID NO: 1884991
aauguuuauuggcaauaug

SEQ ID NO: 2307607 - RNA, 19 nt, Artificial Sequence
  Description of Artificial Sequence: Synthetic oligonucleotide
  Antisense strand to SEQ ID NO: 2307606
cauauugccaauaaacauu

SEQ ID NO: 2307608 - RNA, 19 nt, Artificial Sequence
  Description of Artificial Sequence: Synthetic oligonucleotide
  Sense strand starting at position 3217 of SEQ ID NO: 1884991
ggcaauaugcaguauagca

SEQ ID NO: 2307609 - RNA, 19 nt, Artificial Sequence
  Description of Artificial Sequence: Synthetic oligonucleotide
  Antisense strand to SEQ ID NO: 2307608
ugcuauacugcauauugcc

SEQ ID NO: 2307610 - RNA, 19 nt, Artificial Sequence
  Description of Artificial Sequence: Synthetic oligonucleotide
  Sense strand starting at position 3222 of SEQ ID NO: 1884991
uaugcaguauagcagaaau

SEQ ID NO: 2307611 - RNA, 19 nt, Artificial Sequence
  Description of Artificial Sequence: Synthetic oligonucleotide
  Antisense strand to SEQ ID NO: 2307610
auuucugcuauacugcaua

SEQ ID NO: 2307612 - RNA, 19 nt, Artificial Sequence
  Description of Artificial Sequence: Synthetic oligonucleotide
  Sense strand starting at position 3224 of SEQ ID NO: 1884991
ugcaguauagcagaaauug

SEQ ID NO: 2307613 - RNA, 19 nt, Artificial Sequence
  Description of Artificial Sequence: Synthetic oligonucleotide
  Antisense strand to SEQ ID NO: 2307612
caauuucugcuauacugca

SEQ ID NO: 2307614 - RNA, 19 nt, Artificial Sequence
  Description of Artificial Sequence: Synthetic oligonucleotide
  Sense strand starting at position 3234 of SEQ ID NO: 1884991
cagaaauuggacuguuguc

SEQ ID NO: 2307615 - RNA, 19 nt, Artificial Sequence
  Description of Artificial Sequence: Synthetic oligonucleotide
  Antisense strand to SEQ ID NO: 2307614
gacaacaguccaauuucug

SEQ ID NO: 2307616 - RNA, 19 nt, Artificial Sequence
  Description of Artificial Sequence: Synthetic oligonucleotide
  Sense strand starting at position 3239 of SEQ ID NO: 1884991
auuggacuguugucuguau

SEQ ID NO: 2307617 - RNA, 19 nt, Artificial Sequence
  Description of Artificial Sequence: Synthetic oligonucleotide
  Antisense strand to SEQ ID NO: 2307616
auacagacaacaguccaau

SEQ ID NO: 2307618 - RNA, 19 nt, Artificial Sequence
  Description of Artificial Sequence: Synthetic oligonucleotide
  Sense strand starting at position 3240 of SEQ ID NO: 1884991
uuggacuguugucuguauu

SEQ ID NO: 2307619 - RNA, 19 nt, Artificial Sequence
  Description of Artificial Sequence: Synthetic oligonucleotide
  Antisense strand to SEQ ID NO: 2307618
aauacagacaacaguccaa

SEQ ID NO: 2307620 - RNA, 19 nt, Artificial Sequence
  Description of Artificial Sequence: Synthetic oligonucleotide
  Sense strand starting at position 3243 of SEQ ID NO: 1884991
gacuguugucuguauucua

SEQ ID NO: 2307621 - RNA, 19 nt, Artificial Sequence
  Description of Artificial Sequence: Synthetic oligonucleotide
  Antisense strand to SEQ ID NO: 2307620
uagaauacagacaacaguc

SEQ ID NO: 2307622 - RNA, 19 nt, Artificial Sequence
  Description of Artificial Sequence: Synthetic oligonucleotide
  Sense strand starting at position 3261 of SEQ ID NO: 1884991
aucuuuaagccagauagug

SEQ ID NO: 2307623 - RNA, 19 nt, Artificial Sequence
  Description of Artificial Sequence: Synthetic oligonucleotide
  Antisense strand to SEQ ID NO: 2307622
cacuaucuggcuuaaagau

SEQ ID NO: 2307624 - RNA, 19 nt, Artificial Sequence
  Description of Artificial Sequence: Synthetic oligonucleotide
  Sense strand starting at position 3309 of SEQ ID NO: 1884991
gcucuuuaaagcgacugau

SEQ ID NO: 2307625 - RNA, 19 nt, Artificial Sequence
  Description of Artificial Sequence: Synthetic oligonucleotide
  Antisense strand to SEQ ID NO: 2307624
aucagucgcuuuaaagagc

SEQ ID NO: 2307626 - RNA, 19 nt, Artificial Sequence
  Description of Artificial Sequence: Synthetic oligonucleotide
  Sense strand starting at position 3312 of SEQ ID NO: 1884991
cuuuaaagcgacugauaau

SEQ ID NO: 2307627 - RNA, 19 nt, Artificial Sequence
  Description of Artificial Sequence: Synthetic oligonucleotide
  Antisense strand to SEQ ID NO: 2307626
auuaucagucgcuuuaaag

SEQ ID NO: 2307628 - RNA, 19 nt, Artificial Sequence
  Description of Artificial Sequence: Synthetic oligonucleotide
  Sense strand starting at position 3319 of SEQ ID NO: 1884991
gcgacugauaauugggcua

SEQ ID NO: 2307629 - RNA, 19 nt, Artificial Sequence
  Description of Artificial Sequence: Synthetic oligonucleotide
  Antisense strand to SEQ ID NO: 2307628
uagcccaauuaucagucgc

SEQ ID NO: 2307630 - RNA, 19 nt, Artificial Sequence
  Description of Artificial Sequence: Synthetic oligonucleotide
  Sense strand starting at position 3321 of SEQ ID NO: 1884991
gacugauaauugggcuaaa

SEQ ID NO: 2307631 - RNA, 19 nt, Artificial Sequence
  Description of Artificial Sequence: Synthetic oligonucleotide
  Antisense strand to SEQ ID NO: 2307630
uuuagcccaauuaucaguc

SEQ ID NO: 2307632 - RNA, 19 nt, Artificial Sequence
  Description of Artificial Sequence: Synthetic oligonucleotide
  Sense strand starting at position 3402 of SEQ ID NO: 1884991
gaaagcauuugucuaguuu

SEQ ID NO: 2307633 - RNA, 19 nt, Artificial Sequence
  Description of Artificial Sequence: Synthetic oligonucleotide
  Antisense strand to SEQ ID NO: 2307632
aaacuagacaaaugcuuuc

SEQ ID NO: 2307634 - RNA, 19 nt, Artificial Sequence
  Description of Artificial Sequence: Synthetic oligonucleotide
  Sense strand starting at position 3478 of SEQ ID NO: 1884991
acugguuagcuuggaaaca

SEQ ID NO: 2307635 - RNA, 19 nt, Artificial Sequence
  Description of Artificial Sequence: Synthetic oligonucleotide
  Antisense strand to SEQ ID NO: 2307634
uguuuccaagcuaaccagu

SEQ ID NO: 2307636 - RNA, 19 nt, Artificial Sequence
  Description of Artificial Sequence: Synthetic oligonucleotide
  Sense strand starting at position 3479 of SEQ ID NO: 1884991
cugguuagcuuggaaacau

SEQ ID NO: 2307637 - RNA, 19 nt, Artificial Sequence
  Description of Artificial Sequence: Synthetic oligonucleotide
  Antisense strand to SEQ ID NO: 2307636
auguuuccaagcuaaccag

SEQ ID NO: 2307638 - RNA, 19 nt, Artificial Sequence
  Description of Artificial Sequence: Synthetic oligonucleotide
  Sense strand starting at position 3545 of SEQ ID NO: 1884991
aguagauauuucugugcca

SEQ ID NO: 2307639 - RNA, 19 nt, Artificial Sequence
  Description of Artificial Sequence: Synthetic oligonucleotide
  Antisense strand to SEQ ID NO: 2307638
uggcacagaaauaucuacu

SEQ ID NO: 2307640 - RNA, 19 nt, Artificial Sequence
  Description of Artificial Sequence: Synthetic oligonucleotide
  Sense strand starting at position 3546 of SEQ ID NO: 1884991
guagauauuucugugccag

SEQ ID NO: 2307641 - RNA, 19 nt, Artificial Sequence
  Description of Artificial Sequence: Synthetic oligonucleotide
  Antisense strand to SEQ ID NO: 2307640
cuggcacagaaauaucuac

SEQ ID NO: 2307642 - RNA, 19 nt, Artificial Sequence
  Description of Artificial Sequence: Synthetic oligonucleotide
  Sense strand starting at position 3548 of SEQ ID NO: 1884991
agauauuucugugccaggu

SEQ ID NO: 2307643 - RNA, 19 nt, Artificial Sequence
  Description of Artificial Sequence: Synthetic oligonucleotide
  Antisense strand to SEQ ID NO: 2307642
accuggcacagaaauaucu

SEQ ID NO: 2307644 - RNA, 19 nt, Artificial Sequence
  Description of Artificial Sequence: Synthetic oligonucleotide
  Sense strand starting at position 3550 of SEQ ID NO: 1884991
auauuucugugccagguau

SEQ ID NO: 2307645 - RNA, 19 nt, Artificial Sequence
  Description of Artificial Sequence: Synthetic oligonucleotide
  Antisense strand to SEQ ID NO: 2307644
auaccuggcacagaaauau

SEQ ID NO: 2307646 - RNA, 19 nt, Artificial Sequence
  Description of Artificial Sequence: Synthetic oligonucleotide
  Sense strand starting at position 3552 of SEQ ID NO: 1884991
auuucugugccagguauua

SEQ ID NO: 2307647 - RNA, 19 nt, Artificial Sequence
  Description of Artificial Sequence: Synthetic oligonucleotide
  Antisense strand to SEQ ID NO: 2307646
uaauaccuggcacagaaau

SEQ ID NO: 2307648 - RNA, 19 nt, Artificial Sequence
  Description of Artificial Sequence: Synthetic oligonucleotide
  Sense strand starting at position 3615 of SEQ ID NO: 1884991
agguaacaguucuaaacaa

SEQ ID NO: 2307649 - RNA, 19 nt, Artificial Sequence
  Description of Artificial Sequence: Synthetic oligonucleotide
  Antisense strand to SEQ ID NO: 2307648
uuguuuagaacuguuaccu

SEQ ID NO: 2307650 - RNA, 19 nt, Artificial Sequence
  Description of Artificial Sequence: Synthetic oligonucleotide
  Sense strand starting at position 3712 of SEQ ID NO: 1884991
uuuguuagauuuccuguua

SEQ ID NO: 2307651 - RNA, 19 nt, Artificial Sequence
  Description of Artificial Sequence: Synthetic oligonucleotide
  Antisense strand to SEQ ID NO: 2307650
uaacaggaaaucuaacaaa

SEQ ID NO: 2307652 - RNA, 19 nt, Artificial Sequence
  Description of Artificial Sequence: Synthetic oligonucleotide
  Sense strand starting at position 3713 of SEQ ID NO: 1884991
uuguuagauuuccuguuac

SEQ ID NO: 2307653 - RNA, 19 nt, Artificial Sequence
  Description of Artificial Sequence: Synthetic oligonucleotide
  Antisense strand to SEQ ID NO: 2307652
guaacaggaaaucuaacaa

SEQ ID NO: 2307654 - RNA, 19 nt, Artificial Sequence
  Description of Artificial Sequence: Synthetic oligonucleotide
  Sense strand starting at position 3724 of SEQ ID NO: 1884991
ccuguuacuguuuguugua

SEQ ID NO: 2307655 - RNA, 19 nt, Artificial Sequence
  Description of Artificial Sequence: Synthetic oligonucleotide
  Antisense strand to SEQ ID NO: 2307654
uacaacaaacaguaacagg

SEQ ID NO: 2307656 - RNA, 19 nt, Artificial Sequence
  Description of Artificial Sequence: Synthetic oligonucleotide
  Sense strand starting at position 3725 of SEQ ID NO: 1884991
cuguuacuguuuguuguau

SEQ ID NO: 2307657 - RNA, 19 nt, Artificial Sequence
  Description of Artificial Sequence: Synthetic oligonucleotide
  Antisense strand to SEQ ID NO: 2307656
auacaacaaacaguaacag

SEQ ID NO: 2307658 - RNA, 19 nt, Artificial Sequence
  Description of Artificial Sequence: Synthetic oligonucleotide
  Sense strand starting at position 3736 of SEQ ID NO: 1884991
uguuguauguuuccauuga

SEQ ID NO: 2307659 - RNA, 19 nt, Artificial Sequence
  Description of Artificial Sequence: Synthetic oligonucleotide
  Antisense strand to SEQ ID NO: 2307658
ucaauggaaacauacaaca

SEQ ID NO: 2307660 - RNA, 19 nt, Artificial Sequence
  Description of Artificial Sequence: Synthetic oligonucleotide
  Sense strand starting at position 3740 of SEQ ID NO: 1884991
guauguuuccauugaucaa

SEQ ID NO: 2307661 - RNA, 19 nt, Artificial Sequence
  Description of Artificial Sequence: Synthetic oligonucleotide
  Antisense strand to SEQ ID NO: 2307660
uugaucaauggaaacauac

SEQ ID NO: 2307662 - RNA, 19 nt, Artificial Sequence
  Description of Artificial Sequence: Synthetic oligonucleotide
  Sense strand starting at position 3760 of SEQ ID NO: 1884991
cccuauuuguguugaauua

SEQ ID NO: 2307663 - RNA, 19 nt, Artificial Sequence
  Description of Artificial Sequence: Synthetic oligonucleotide
  Antisense strand to SEQ ID NO: 2307662
uaauucaacacaaauaggg

SEQ ID NO: 2307664 - RNA, 19 nt, Artificial Sequence
  Description of Artificial Sequence: Synthetic oligonucleotide
  Sense strand starting at position 3767 of SEQ ID NO: 1884991
uguguugaauuaguugaga

SEQ ID NO: 2307665 - RNA, 19 nt, Artificial Sequence
  Description of Artificial Sequence: Synthetic oligonucleotide
  Antisense strand to SEQ ID NO: 2307664
ucucaacuaauucaacaca

SEQ ID NO: 2307666 - RNA, 19 nt, Artificial Sequence
  Description of Artificial Sequence: Synthetic oligonucleotide
  Sense strand starting at position 3769 of SEQ ID NO: 1884991
uguugaauuaguugagacu

SEQ ID NO: 2307667 - RNA, 19 nt, Artificial Sequence
  Description of Artificial Sequence: Synthetic oligonucleotide
  Antisense strand to SEQ ID NO: 2307666
agucucaacuaauucaaca

SEQ ID NO: 2307668 - RNA, 19 nt, Artificial Sequence
  Description of Artificial Sequence: Synthetic oligonucleotide
  Sense strand starting at position 3823 of SEQ ID NO: 1884991
agaagaucauuaggaauau

SEQ ID NO: 2307669 - RNA, 19 nt, Artificial Sequence
  Description of Artificial Sequence: Synthetic oligonucleotide
  Antisense strand to SEQ ID NO: 2307668
auauuccuaaugaucuucu

SEQ ID NO: 2307670 - RNA, 19 nt, Artificial Sequence
  Description of Artificial Sequence: Synthetic oligonucleotide
  Sense strand starting at position 3881 of SEQ ID NO: 1884991
gaccuaauuuagugaaaga

SEQ ID NO: 2307671 - RNA, 19 nt, Artificial Sequence
  Description of Artificial Sequence: Synthetic oligonucleotide
  Antisense strand to SEQ ID NO: 2307670
ucuuucacuaaauuagguc

SEQ ID NO: 2307672 - RNA, 19 nt, Artificial Sequence
  Description of Artificial Sequence: Synthetic oligonucleotide
  Sense strand starting at position 3939 of SEQ ID NO: 1884991
uucccagucuuccuaguuu

SEQ ID NO: 2307673 - RNA, 19 nt, Artificial Sequence
  Description of Artificial Sequence: Synthetic oligonucleotide
  Antisense strand to SEQ ID NO: 2307672
aaacuaggaagacugggaa

SEQ ID NO: 2307674 - RNA, 19 nt, Artificial Sequence
  Description of Artificial Sequence: Synthetic oligonucleotide
  Sense strand starting at position 145 of SEQ ID NO: 1884992
gaauguaaaugcuuaaagu

SEQ ID NO: 2307675 - RNA, 19 nt, Artificial Sequence
  Description of Artificial Sequence: Synthetic oligonucleotide
  Antisense strand to SEQ ID NO: 2307674
acuuuaagcauuuacauuc

SEQ ID NO: 2307676 - RNA, 19 nt, Artificial Sequence
  Description of Artificial Sequence: Synthetic oligonucleotide
  Sense strand starting at position 161 of SEQ ID NO: 1884992
aguuaagaugaugguauaa

SEQ ID NO: 2307677 - RNA, 19 nt, Artificial Sequence
  Description of Artificial Sequence: Synthetic oligonucleotide
  Antisense strand to SEQ ID NO: 2307676
uuauaccaucaucuuaacu

SEQ ID NO: 2307678 - RNA, 19 nt, Artificial Sequence
  Description of Artificial Sequence: Synthetic oligonucleotide
  Sense strand starting at position 171 of SEQ ID NO: 1884992
augguauaacuguaagcca

SEQ ID NO: 2307679 - RNA, 19 nt, Artificial Sequence
  Description of Artificial Sequence: Synthetic oligonucleotide
  Antisense strand to SEQ ID NO: 2307678
uggcuuacaguuauaccau

SEQ ID NO: 2307680 - RNA, 19 nt, Artificial Sequence
  Description of Artificial Sequence: Synthetic oligonucleotide
  Sense strand starting at position 238 of SEQ ID NO: 1884992
gucauaaugcaguauagaa

SEQ ID NO: 2307681 - RNA, 19 nt, Artificial Sequence
  Description of Artificial Sequence: Synthetic oligonucleotide
  Antisense strand to SEQ ID NO: 2307680
uucuauacugcauuaugac

SEQ ID NO: 2307682 - RNA, 19 nt, Artificial Sequence
  Description of Artificial Sequence: Synthetic oligonucleotide
  Sense strand starting at position 382 of SEQ ID NO: 1884992
ggcccaauuucucuauguu

SEQ ID NO: 2307683 - RNA, 19 nt, Artificial Sequence
  Description of Artificial Sequence: Synthetic oligonucleotide
  Antisense strand to SEQ ID NO: 2307682
aacauagagaaauugggcc

SEQ ID NO: 2307684 - RNA, 19 nt, Artificial Sequence
  Description of Artificial Sequence: Synthetic oligonucleotide
  Sense strand starting at position 423 of SEQ ID NO: 1884992
agaauucugagaugguauu

SEQ ID NO: 2307685 - RNA, 19 nt, Artificial Sequence
  Description of Artificial Sequence: Synthetic oligonucleotide
  Antisense strand to SEQ ID NO: 2307684
aauaccaucucagaauucu

SEQ ID NO: 2307686 - RNA, 19 nt, Artificial Sequence
  Description of Artificial Sequence: Synthetic oligonucleotide
  Sense strand starting at position 424 of SEQ ID NO: 1884992
gaauucugagaugguauua

SEQ ID NO: 2307687 - RNA, 19 nt, Artificial Sequence
  Description of Artificial Sequence: Synthetic oligonucleotide
  Antisense strand to SEQ ID NO: 2307686
uaauaccaucucagaauuc

SEQ ID NO: 2307688 - RNA, 19 nt, Artificial Sequence
  Description of Artificial Sequence: Synthetic oligonucleotide
  Sense strand starting at position 600 of SEQ ID NO: 1884992
cagagauggcauuggcauu

SEQ ID NO: 2307689 - RNA, 19 nt, Artificial Sequence
  Description of Artificial Sequence: Synthetic oligonucleotide
  Antisense strand to SEQ ID NO: 2307688
aaugccaaugccaucucug

SEQ ID NO: 2307690 - RNA, 19 nt, Artificial Sequence
  Description of Artificial Sequence: Synthetic oligonucleotide
  Sense strand starting at position 601 of SEQ ID NO: 1884992
agagauggcauuggcauua

SEQ ID NO: 2307691 - RNA, 19 nt, Artificial Sequence
  Description of Artificial Sequence: Synthetic oligonucleotide
  Antisense strand to SEQ ID NO: 2307690
uaaugccaaugccaucucu

SEQ ID NO: 2307692 - RNA, 19 nt, Artificial Sequence
  Description of Artificial Sequence: Synthetic oligonucleotide
  Sense strand starting at position 610 of SEQ ID NO: 1884992
auuggcauuaaucgugaga

SEQ ID NO: 2307693 - RNA, 19 nt, Artificial Sequence
  Description of Artificial Sequence: Synthetic oligonucleotide
  Antisense strand to SEQ ID NO: 2307692
ucucacgauuaaugccaau

SEQ ID NO: 2307694 - RNA, 19 nt, Artificial Sequence
  Description of Artificial Sequence: Synthetic oligonucleotide
  Sense strand starting at position 613 of SEQ ID NO: 1884992
ggcauuaaucgugagaaau

SEQ ID NO: 2307695 - RNA, 19 nt, Artificial Sequence
  Description of Artificial Sequence: Synthetic oligonucleotide
  Antisense strand to SEQ ID NO: 2307694
auuucucacgauuaaugcc

SEQ ID NO: 2307696 - RNA, 19 nt, Artificial Sequence
  Description of Artificial Sequence: Synthetic oligonucleotide
  Sense strand starting at position 771 of SEQ ID NO: 1884992
uacuucuugggauggaagu

SEQ ID NO: 2307697 - RNA, 19 nt, Artificial Sequence
  Description of Artificial Sequence: Synthetic oligonucleotide
  Antisense strand to SEQ ID NO: 2307696
acuuccaucccaagaagua

SEQ ID NO: 2307698 - RNA, 19 nt, Artificial Sequence
  Description of Artificial Sequence: Synthetic oligonucleotide
  Sense strand starting at position 772 of SEQ ID NO: 1884992
acuucuugggauggaagua

SEQ ID NO: 2307699 - RNA, 19 nt, Artificial Sequence
  Description of Artificial Sequence: Synthetic oligonucleotide
  Antisense strand to SEQ ID NO: 2307698
uacuuccaucccaagaagu

SEQ ID NO: 2307700 - RNA, 19 nt, Artificial Sequence
  Description of Artificial Sequence: Synthetic oligonucleotide
  Sense strand starting at position 881 of SEQ ID NO: 1884992
ucaggugacuguuugauau

SEQ ID NO: 2307701 - RNA, 19 nt, Artificial Sequence
  Description of Artificial Sequence: Synthetic oligonucleotide
  Antisense strand to SEQ ID NO: 2307700
auaucaaacagucaccuga

SEQ ID NO: 2307702 - RNA, 19 nt, Artificial Sequence
  Description of Artificial Sequence: Synthetic oligonucleotide
  Sense strand starting at position 1079 of SEQ ID NO: 1884992
guuaaagacugcccaauua

SEQ ID NO: 2307703 - RNA, 19 nt, Artificial Sequence
  Description of Artificial Sequence: Synthetic oligonucleotide
  Antisense strand to SEQ ID NO: 2307702
uaauugggcagucuuuaac

SEQ ID NO: 2307704 - RNA, 19 nt, Artificial Sequence
  Description of Artificial Sequence: Synthetic oligonucleotide
  Sense strand starting at position 1146 of SEQ ID NO: 1884992
cgauauuagggccaucagu

SEQ ID NO: 2307705 - RNA, 19 nt, Artificial Sequence
  Description of Artificial Sequence: Synthetic oligonucleotide
  Antisense strand to SEQ ID NO: 2307704
acugauggcccuaauaucg

SEQ ID NO: 2307706 - RNA, 19 nt, Artificial Sequence
  Description of Artificial Sequence: Synthetic oligonucleotide
  Sense strand starting at position 1303 of SEQ ID NO: 1884992
gggauuaucucucuuucuc

SEQ ID NO: 2307707 - RNA, 19 nt, Artificial Sequence
  Description of Artificial Sequence: Synthetic oligonucleotide
  Antisense strand to SEQ ID NO: 2307706
gagaaagagagauaauccc

SEQ ID NO: 2307708 - RNA, 19 nt, Artificial Sequence
  Description of Artificial Sequence: Synthetic oligonucleotide
  Sense strand starting at position 1554 of SEQ ID NO: 1884992
gccaauccacucugagaca

SEQ ID NO: 2307709 - RNA, 19 nt, Artificial Sequence
  Description of Artificial Sequence: Synthetic oligonucleotide
  Antisense strand to SEQ ID NO: 2307708
ugucucagaguggauuggc

SEQ ID NO: 2307710 - RNA, 19 nt, Artificial Sequence
  Description of Artificial Sequence: Synthetic oligonucleotide
  Sense strand starting at position 1596 of SEQ ID NO: 1884992
uuucgagaucccugggauc

SEQ ID NO: 2307711 - RNA, 19 nt, Artificial Sequence
  Description of Artificial Sequence: Synthetic oligonucleotide
  Antisense strand to SEQ ID NO: 2307710
gaucccagggaucucgaaa

SEQ ID NO: 2307712 - RNA, 19 nt, Artificial Sequence
  Description of Artificial Sequence: Synthetic oligonucleotide
  Sense strand starting at position 1689 of SEQ ID NO: 1884992
uguggucugaaguaugaau

SEQ ID NO: 2307713 - RNA, 19 nt, Artificial Sequence
  Description of Artificial Sequence: Synthetic oligonucleotide
  Antisense strand to SEQ ID NO: 2307712
auucauacuucagaccaca

SEQ ID NO: 2307714 - RNA, 19 nt, Artificial Sequence
  Description of Artificial Sequence: Synthetic oligonucleotide
  Sense strand starting at position 1700 of SEQ ID NO: 1884992
guaugaaucugacuuauca

SEQ ID NO: 2307715 - RNA, 19 nt, Artificial Sequence
  Description of Artificial Sequence: Synthetic oligonucleotide
  Antisense strand to SEQ ID NO: 2307714
ugauaagucagauucauac

SEQ ID NO: 2307716 - RNA, 19 nt, Artificial Sequence
  Description of Artificial Sequence: Synthetic oligonucleotide
  Sense strand starting at position 1793 of SEQ ID NO: 1884992
auccuagucccuuggaaga

SEQ ID NO: 2307717 - RNA, 19 nt, Artificial Sequence
  Description of Artificial Sequence: Synthetic oligonucleotide
  Antisense strand to SEQ ID NO: 2307716
ucuuccaagggacuaggau

SEQ ID NO: 2307718 - RNA, 19 nt, Artificial Sequence
  Description of Artificial Sequence: Synthetic oligonucleotide
  Sense strand starting at position 2041 of SEQ ID NO: 1884992
guccuucuacaaugagaac

SEQ ID NO: 2307719 - RNA, 19 nt, Artificial Sequence
  Description of Artificial Sequence: Synthetic oligonucleotide
  Antisense strand to SEQ ID NO: 2307718
guucucauuguagaaggac

SEQ ID NO: 2307720 - RNA, 19 nt, Artificial Sequence
  Description of Artificial Sequence: Synthetic oligonucleotide
  Sense strand starting at position 2100 of SEQ ID NO: 1884992
cuagauuccuugucucaag

SEQ ID NO: 2307721 - RNA, 19 nt, Artificial Sequence
  Description of Artificial Sequence: Synthetic oligonucleotide
  Antisense strand to SEQ ID NO: 2307720
cuugagacaaggaaucuag

SEQ ID NO: 2307722 - RNA, 19 nt, Artificial Sequence
  Description of Artificial Sequence: Synthetic oligonucleotide
  Sense strand starting at position 2137 of SEQ ID NO: 1884992
uauguccuacucugggaua

SEQ ID NO: 2307723 - RNA, 19 nt, Artificial Sequence
  Description of Artificial Sequence: Synthetic oligonucleotide
  Antisense strand to SEQ ID NO: 2307722
uaucccagaguaggacaua

SEQ ID NO: 2307724 - RNA, 19 nt, Artificial Sequence
  Description of Artificial Sequence: Synthetic oligonucleotide
  Sense strand starting at position 2139 of SEQ ID NO: 1884992
uguccuacucugggauaug

SEQ ID NO: 2307725 - RNA, 19 nt, Artificial Sequence
  Description of Artificial Sequence: Synthetic oligonucleotide
  Antisense strand to SEQ ID NO: 2307724
cauaucccagaguaggaca

SEQ ID NO: 2307726 - RNA, 19 nt, Artificial Sequence
  Description of Artificial Sequence: Synthetic oligonucleotide
  Sense strand starting at position 2262 of SEQ ID NO: 1884992
gguauucaauaagugagag

SEQ ID NO: 2307727 - RNA, 19 nt, Artificial Sequence
  Description of Artificial Sequence: Synthetic oligonucleotide
  Antisense strand to SEQ ID NO: 2307726
cucucacuuauugaauacc

SEQ ID NO: 2307728 - RNA, 19 nt, Artificial Sequence
  Description of Artificial Sequence: Synthetic oligonucleotide
  Sense strand starting at position 2460 of SEQ ID NO: 1884992
aggguuagugaaggaucaa

SEQ ID NO: 2307729 - RNA, 19 nt, Artificial Sequence
  Description of Artificial Sequence: Synthetic oligonucleotide
  Antisense strand to SEQ ID NO: 2307728
uugauccuucacuaacccu

SEQ ID NO: 2307730 - RNA, 19 nt, Artificial Sequence
  Description of Artificial Sequence: Synthetic oligonucleotide
  Sense strand starting at position 3118 of SEQ ID NO: 1884992
aggagagaguuacuguuua

SEQ ID NO: 2307731 - RNA, 19 nt, Artificial Sequence
  Description of Artificial Sequence: Synthetic oligonucleotide
  Antisense strand to SEQ ID NO: 2307730
uaaacaguaacucucuccu

SEQ ID NO: 2307732 - RNA, 19 nt, Artificial Sequence
  Description of Artificial Sequence: Synthetic oligonucleotide
  Sense strand starting at position 3190 of SEQ ID NO: 1884992
gugauagcuguacaacaug

SEQ ID NO: 2307733 - RNA, 19 nt, Artificial Sequence
  Description of Artificial Sequence: Synthetic oligonucleotide
  Antisense strand to SEQ ID NO: 2307732
cauguuguacagcuaucac

SEQ ID NO: 2307734 - RNA, 19 nt, Artificial Sequence
  Description of Artificial Sequence: Synthetic oligonucleotide
  Sense strand starting at position 3196 of SEQ ID NO: 1884992
gcuguacaacaugguaaau

SEQ ID NO: 2307735 - RNA, 19 nt, Artificial Sequence
  Description of Artificial Sequence: Synthetic oligonucleotide
  Antisense strand to SEQ ID NO: 2307734
auuuaccauguuguacagc

SEQ ID NO: 2307736 - RNA, 19 nt, Artificial Sequence
  Description of Artificial Sequence: Synthetic oligonucleotide
  Sense strand starting at position 3473 of SEQ ID NO: 1884992
ugaggcuaccuguaaugaa

SEQ ID NO: 2307737 - RNA, 19 nt, Artificial Sequence
  Description of Artificial Sequence: Synthetic oligonucleotide
  Antisense strand to SEQ ID NO: 2307736
uucauuacagguagccuca

SEQ ID NO: 2307738 - RNA, 19 nt, Artificial Sequence
  Description of Artificial Sequence: Synthetic oligonucleotide
  Sense strand starting at position 3523 of SEQ ID NO: 1884992
ugaacaaugcuacguuaaa

SEQ ID NO: 2307739 - RNA, 19 nt, Artificial Sequence
  Description of Artificial Sequence: Synthetic oligonucleotide
  Antisense strand to SEQ ID NO: 2307738
uuuaacguagcauuguuca

SEQ ID NO: 2307740 - RNA, 19 nt, Artificial Sequence
  Description of Artificial Sequence: Synthetic oligonucleotide
  Sense strand starting at position 3541 of SEQ ID NO: 1884992
aauuaaauauugcugggua

SEQ ID NO: 2307741 - RNA, 19 nt, Artificial Sequence
  Description of Artificial Sequence: Synthetic oligonucleotide
  Antisense strand to SEQ ID NO: 2307740
uacccagcaauauuuaauu

SEQ ID NO: 2307742 - RNA, 19 nt, Artificial Sequence
  Description of Artificial Sequence: Synthetic oligonucleotide
  Sense strand starting at position 3545 of SEQ ID NO: 1884992
aaauauugcuggguaauac

SEQ ID NO: 2307743 - RNA, 19 nt, Artificial Sequence
  Description of Artificial Sequence: Synthetic oligonucleotide
  Antisense strand to SEQ ID NO: 2307742
guauuacccagcaauauuu

SEQ ID NO: 2307744 - RNA, 19 nt, Artificial Sequence
  Description of Artificial Sequence: Synthetic oligonucleotide
  Sense strand starting at position 3546 of SEQ ID NO: 1884992
aauauugcuggguaauaca

SEQ ID NO: 2307745 - RNA, 19 nt, Artificial Sequence
  Description of Artificial Sequence: Synthetic oligonucleotide
  Antisense strand to SEQ ID NO: 2307744
uguauuacccagcaauauu

SEQ ID NO: 2307746 - RNA, 19 nt, Artificial Sequence
  Description of Artificial Sequence: Synthetic oligonucleotide
  Sense strand starting at position 3560 of SEQ ID NO: 1884992
auacaagauugccugauua

SEQ ID NO: 2307747 - RNA, 19 nt, Artificial Sequence
  Description of Artificial Sequence: Synthetic oligonucleotide
  Antisense strand to SEQ ID NO: 2307746
uaaucaggcaaucuuguau

SEQ ID NO: 2307748 - RNA, 19 nt, Artificial Sequence
  Description of Artificial Sequence: Synthetic oligonucleotide
  Sense strand starting at position 3673 of SEQ ID NO: 1884992
ucugaauggcuaggaaaua

SEQ ID NO: 2307749 - RNA, 19 nt, Artificial Sequence
  Description of Artificial Sequence: Synthetic oligonucleotide
  Antisense strand to SEQ ID NO: 2307748
uauuuccuagccauucaga

SEQ ID NO: 2307750 - RNA, 19 nt, Artificial Sequence
  Description of Artificial Sequence: Synthetic oligonucleotide
  Sense strand starting at position 3961 of SEQ ID NO: 1884992
ccuugaucucccgaccagu

SEQ ID NO: 2307751 - RNA, 19 nt, Artificial Sequence
  Description of Artificial Sequence: Synthetic oligonucleotide
  Antisense strand to SEQ ID NO: 2307750
acuggucgggagaucaagg

SEQ ID NO: 2307752 - RNA, 19 nt, Artificial Sequence
  Description of Artificial Sequence: Synthetic oligonucleotide
  Sense strand starting at position 3976 of SEQ ID NO: 1884992
cagugauuggcccaccuca

SEQ ID NO: 2307753 - RNA, 19 nt, Artificial Sequence
  Description of Artificial Sequence: Synthetic oligonucleotide
  Antisense strand to SEQ ID NO: 2307752
ugaggugggccaaucacug

SEQ ID NO: 2307754 - RNA, 19 nt, Artificial Sequence
  Description of Artificial Sequence: Synthetic oligonucleotide
  Sense strand starting at position 78 of SEQ ID NO: 1884993
gagcuaaagugauccucau

SEQ ID NO: 2307755 - RNA, 19 nt, Artificial Sequence
  Description of Artificial Sequence: Synthetic oligonucleotide
  Antisense strand to SEQ ID NO: 2307754
augaggaucacuuuagcuc

SEQ ID NO: 2307756 - RNA, 19 nt, Artificial Sequence
  Description of Artificial Sequence: Synthetic oligonucleotide
  Sense strand starting at position 385 of SEQ ID NO: 1884993
gaguuuaagugaucugcug

SEQ ID NO: 2307757 - RNA, 19 nt, Artificial Sequence
  Description of Artificial Sequence: Synthetic oligonucleotide
  Antisense strand to SEQ ID NO: 2307756
cagcagaucacuuaaacuc

SEQ ID NO: 2307758 - RNA, 19 nt, Artificial Sequence
  Description of Artificial Sequence: Synthetic oligonucleotide
  Sense strand starting at position 682 of SEQ ID NO: 1884993
cgagaaucgccucaaccca

SEQ ID NO: 2307759 - RNA, 19 nt, Artificial Sequence
  Description of Artificial Sequence: Synthetic oligonucleotide
  Antisense strand to SEQ ID NO: 2307758
uggguugaggcgauucucg

SEQ ID NO: 2307760 - RNA, 19 nt, Artificial Sequence
  Description of Artificial Sequence: Synthetic oligonucleotide
  Sense strand starting at position 829 of SEQ ID NO: 1884993
ucaacucuaucagaagaag

SEQ ID NO: 2307761 - RNA, 19 nt, Artificial Sequence
  Description of Artificial Sequence: Synthetic oligonucleotide
  Antisense strand to SEQ ID NO: 2307760
cuucuucugauagaguuga

SEQ ID NO: 2307762 - RNA, 19 nt, Artificial Sequence
  Description of Artificial Sequence: Synthetic oligonucleotide
  Sense strand starting at position 885 of SEQ ID NO: 1884993
ccagucaucugcucugaua

SEQ ID NO: 2307763 - RNA, 19 nt, Artificial Sequence
  Description of Artificial Sequence: Synthetic oligonucleotide
  Antisense strand to SEQ ID NO: 2307762
uaucagagcagaugacugg

SEQ ID NO: 2307764 - RNA, 19 nt, Artificial Sequence
  Description of Artificial Sequence: Synthetic oligonucleotide
  Sense strand starting at position 887 of SEQ ID NO: 1884993
agucaucugcucugauaua

SEQ ID NO: 2307765 - RNA, 19 nt, Artificial Sequence
  Description of Artificial Sequence: Synthetic oligonucleotide
  Antisense strand to SEQ ID NO: 2307764
uauaucagagcagaugacu

SEQ ID NO: 2307766 - RNA, 19 nt, Artificial Sequence
  Description of Artificial Sequence: Synthetic oligonucleotide
  Sense strand starting at position 955 of SEQ ID NO: 1884993
gcagaaagucuaggcuuua

SEQ ID NO: 2307767 - RNA, 19 nt, Artificial Sequence
  Description of Artificial Sequence: Synthetic oligonucleotide
  Antisense strand to SEQ ID NO: 2307766
uaaagccuagacuuucugc

SEQ ID NO: 2307768 - RNA, 19 nt, Artificial Sequence
  Description of Artificial Sequence: Synthetic oligonucleotide
  Sense strand starting at position 956 of SEQ ID NO: 1884993
cagaaagucuaggcuuuaa

SEQ ID NO: 2307769 - RNA, 19 nt, Artificial Sequence
  Description of Artificial Sequence: Synthetic oligonucleotide
  Antisense strand to SEQ ID NO: 2307768
uuaaagccuagacuuucug

SEQ ID NO: 2307770 - RNA, 19 nt, Artificial Sequence
  Description of Artificial Sequence: Synthetic oligonucleotide
  Sense strand starting at position 989 of SEQ ID NO: 1884993
gcuuauuaacugugaucuc

SEQ ID NO: 2307771 - RNA, 19 nt, Artificial Sequence
  Description of Artificial Sequence: Synthetic oligonucleotide
  Antisense strand to SEQ ID NO: 2307770
gagaucacaguuaauaagc

SEQ ID NO: 2307772 - RNA, 19 nt, Artificial Sequence
  Description of Artificial Sequence: Synthetic oligonucleotide
  Sense strand starting at position 996 of SEQ ID NO: 1884993
aacugugaucucuggcaag

SEQ ID NO: 2307773 - RNA, 19 nt, Artificial Sequence
  Description of Artificial Sequence: Synthetic oligonucleotide
  Antisense strand to SEQ ID NO: 2307772
cuugccagagaucacaguu

SEQ ID NO: 2307774 - RNA, 19 nt, Artificial Sequence
  Description of Artificial Sequence: Synthetic oligonucleotide
  Sense strand starting at position 1014 of SEQ ID NO: 1884993
gugacuuaaucucucuaag

SEQ ID NO: 2307775 - RNA, 19 nt, Artificial Sequence
  Description of Artificial Sequence: Synthetic oligonucleotide
  Antisense strand to SEQ ID NO: 2307774
cuuagagagauuaagucac

SEQ ID NO: 2307776 - RNA, 19 nt, Artificial Sequence
  Description of Artificial Sequence: Synthetic oligonucleotide
  Sense strand starting at position 1072 of SEQ ID NO: 1884993
ucaggauugccaggaagau

SEQ ID NO: 2307777 - RNA, 19 nt, Artificial Sequence
  Description of Artificial Sequence: Synthetic oligonucleotide
  Antisense strand to SEQ ID NO: 2307776
aucuuccuggcaauccuga

SEQ ID NO: 2307778 - RNA, 19 nt, Artificial Sequence
  Description of Artificial Sequence: Synthetic oligonucleotide
  Sense strand starting at position 1088 of SEQ ID NO: 1884993
gauuaaauguaaucaugug

SEQ ID NO: 2307779 - RNA, 19 nt, Artificial Sequence
  Description of Artificial Sequence: Synthetic oligonucleotide
  Antisense strand to SEQ ID NO: 2307778
cacaugauuacauuuaauc

SEQ ID NO: 2307780 - RNA, 19 nt, Artificial Sequence
  Description of Artificial Sequence: Synthetic oligonucleotide
  Sense strand starting at position 1208 of SEQ ID NO: 1884993
cagccaaaugguugagaga

SEQ ID NO: 2307781 - RNA, 19 nt, Artificial Sequence
  Description of Artificial Sequence: Synthetic oligonucleotide
  Antisense strand to SEQ ID NO: 2307780
ucucucaaccauuuggcug

SEQ ID NO: 2307782 - RNA, 19 nt, Artificial Sequence
  Description of Artificial Sequence: Synthetic oligonucleotide
  Sense strand starting at position 1257 of SEQ ID NO: 1884993
guguaaguuauugauauug

SEQ ID NO: 2307783 - RNA, 19 nt, Artificial Sequence
  Description of Artificial Sequence: Synthetic oligonucleotide
  Antisense strand to SEQ ID NO: 2307782
caauaucaauaacuuacac

SEQ ID NO: 2307784 - RNA, 19 nt, Artificial Sequence
  Description of Artificial Sequence: Synthetic oligonucleotide
  Sense strand starting at position 1295 of SEQ ID NO: 1884993
aguauuugaugguacuaca

SEQ ID NO: 2307785 - RNA, 19 nt, Artificial Sequence
  Description of Artificial Sequence: Synthetic oligonucleotide
  Antisense strand to SEQ ID NO: 2307784
uguaguaccaucaaauacu

SEQ ID NO: 2307786 - RNA, 19 nt, Artificial Sequence
  Description of Artificial Sequence: Synthetic oligonucleotide
  Sense strand starting at position 1724 of SEQ ID NO: 1884993
guuuguaauaagcagugau

SEQ ID NO: 2307787 - RNA, 19 nt, Artificial Sequence
  Description of Artificial Sequence: Synthetic oligonucleotide
  Antisense strand to SEQ ID NO: 2307786
aucacugcuuauuacaaac

SEQ ID NO: 2307788 - RNA, 19 nt, Artificial Sequence
  Description of Artificial Sequence: Synthetic oligonucleotide
  Sense strand starting at position 1727 of SEQ ID NO: 1884993
uguaauaagcagugauuag

SEQ ID NO: 2307789 - RNA, 19 nt, Artificial Sequence
  Description of Artificial Sequence: Synthetic oligonucleotide
  Antisense strand to SEQ ID NO: 2307788
cuaaucacugcuuauuaca

SEQ ID NO: 2307790 - RNA, 19 nt, Artificial Sequence
  Description of Artificial Sequence: Synthetic oligonucleotide
  Sense strand starting at position 1728 of SEQ ID NO: 1884993
guaauaagcagugauuagu

SEQ ID NO: 2307791 - RNA, 19 nt, Artificial Sequence
  Description of Artificial Sequence: Synthetic oligonucleotide
  Antisense strand to SEQ ID NO: 2307790
acuaaucacugcuuauuac

SEQ ID NO: 2307792 - RNA, 19 nt, Artificial Sequence
  Description of Artificial Sequence: Synthetic oligonucleotide
  Sense strand starting at position 1731 of SEQ ID NO: 1884993
auaagcagugauuaguuua

SEQ ID NO: 2307793 - RNA, 19 nt, Artificial Sequence
  Description of Artificial Sequence: Synthetic oligonucleotide
  Antisense strand to SEQ ID NO: 2307792
uaaacuaaucacugcuuau

SEQ ID NO: 2307794 - RNA, 19 nt, Artificial Sequence
  Description of Artificial Sequence: Synthetic oligonucleotide
  Sense strand starting at position 1734 of SEQ ID NO: 1884993
agcagugauuaguuuaauc

SEQ ID NO: 2307795 - RNA, 19 nt, Artificial Sequence
  Description of Artificial Sequence: Synthetic oligonucleotide
  Antisense strand to SEQ ID NO: 2307794
gauuaaacuaaucacugcu

SEQ ID NO: 2307796 - RNA, 19 nt, Artificial Sequence
  Description of Artificial Sequence: Synthetic oligonucleotide
  Sense strand starting at position 1736 of SEQ ID NO: 1884993
cagugauuaguuuaaucag

SEQ ID NO: 2307797 - RNA, 19 nt, Artificial Sequence
  Description of Artificial Sequence: Synthetic oligonucleotide
  Antisense strand to SEQ ID NO: 2307796
cugauuaaacuaaucacug

SEQ ID NO: 2307798 - RNA, 19 nt, Artificial Sequence
  Description of Artificial Sequence: Synthetic oligonucleotide
  Sense strand starting at position 1739 of SEQ ID NO: 1884993
ugauuaguuuaaucagcau

SEQ ID NO: 2307799 - RNA, 19 nt, Artificial Sequence
  Description of Artificial Sequence: Synthetic oligonucleotide
  Antisense strand to SEQ ID NO: 2307798
augcugauuaaacuaauca

SEQ ID NO: 2307800 - RNA, 19 nt, Artificial Sequence
  Description of Artificial Sequence: Synthetic oligonucleotide
  Sense strand starting at position 1786 of SEQ ID NO: 1884993
acagcuauaguugaugaca

SEQ ID NO: 2307801 - RNA, 19 nt, Artificial Sequence
  Description of Artificial Sequence: Synthetic oligonucleotide
  Antisense strand to SEQ ID NO: 2307800
ugucaucaacuauagcugu

SEQ ID NO: 2307802 - RNA, 19 nt, Artificial Sequence
  Description of Artificial Sequence: Synthetic oligonucleotide
  Sense strand starting at position 1789 of SEQ ID NO: 1884993
gcuauaguugaugacaucu

SEQ ID NO: 2307803 - RNA, 19 nt, Artificial Sequence
  Description of Artificial Sequence: Synthetic oligonucleotide
  Antisense strand to SEQ ID NO: 2307802
agaugucaucaacuauagc

SEQ ID NO: 2307804 - RNA, 19 nt, Artificial Sequence
  Description of Artificial Sequence: Synthetic oligonucleotide
  Sense strand starting at position 1934 of SEQ ID NO: 1884993
gacuaagugguccggagau

SEQ ID NO: 2307805 - RNA, 19 nt, Artificial Sequence
  Description of Artificial Sequence: Synthetic oligonucleotide
  Antisense strand to SEQ ID NO: 2307804
aucuccggaccacuuaguc

SEQ ID NO: 2307806 - RNA, 19 nt, Artificial Sequence
  Description of Artificial Sequence: Synthetic oligonucleotide
  Sense strand starting at position 2231 of SEQ ID NO: 1884993
aagagauacgccugcuuug

SEQ ID NO: 2307807 - RNA, 19 nt, Artificial Sequence
  Description of Artificial Sequence: Synthetic oligonucleotide
  Antisense strand to SEQ ID NO: 2307806
caaagcaggcguaucucuu

SEQ ID NO: 2307808 - RNA, 19 nt, Artificial Sequence
  Description of Artificial Sequence: Synthetic oligonucleotide
  Sense strand starting at position 2332 of SEQ ID NO: 1884993
ugagucaugcauugaaguc

SEQ ID NO: 2307809 - RNA, 19 nt, Artificial Sequence
  Description of Artificial Sequence: Synthetic oligonucleotide
  Antisense strand to SEQ ID NO: 2307808
gacuucaaugcaugacuca

SEQ ID NO: 2307810 - RNA, 19 nt, Artificial Sequence
  Description of Artificial Sequence: Synthetic oligonucleotide
  Sense strand starting at position 2361 of SEQ ID NO: 1884993
cguggagaaucaccauuau

SEQ ID NO: 2307811 - RNA, 19 nt, Artificial Sequence
  Description of Artificial Sequence: Synthetic oligonucleotide
  Antisense strand to SEQ ID NO: 2307810
auaauggugauucuccacg

SEQ ID NO: 2307812 - RNA, 19 nt, Artificial Sequence
  Description of Artificial Sequence: Synthetic oligonucleotide
  Sense strand starting at position 2436 of SEQ ID NO: 1884993
cuguccucugccuaaaggu

SEQ ID NO: 2307813 - RNA, 19 nt, Artificial Sequence
  Description of Artificial Sequence: Synthetic oligonucleotide
  Antisense strand to SEQ ID NO: 2307812
accuuuaggcagaggacag

SEQ ID NO: 2307814 - RNA, 19 nt, Artificial Sequence
  Description of Artificial Sequence: Synthetic oligonucleotide
  Sense strand starting at position 2781 of SEQ ID NO: 1884993
agaguaagacccuguagcu

SEQ ID NO: 2307815 - RNA, 19 nt, Artificial Sequence
  Description of Artificial Sequence: Synthetic oligonucleotide
  Antisense strand to SEQ ID NO: 2307814
agcuacagggucuuacucu

SEQ ID NO: 2307816 - RNA, 19 nt, Artificial Sequence
  Description of Artificial Sequence: Synthetic oligonucleotide
  Sense strand starting at position 2831 of SEQ ID NO: 1884993
cuaccucagccuugcaaga

SEQ ID NO: 2307817 - RNA, 19 nt, Artificial Sequence
  Description of Artificial Sequence: Synthetic oligonucleotide
  Antisense strand to SEQ ID NO: 2307816
ucuugcaaggcugagguag

SEQ ID NO: 2307818 - RNA, 19 nt, Artificial Sequence
  Description of Artificial Sequence: Synthetic oligonucleotide
  Sense strand starting at position 2844 of SEQ ID NO: 1884993
gcaagaagcugggucuaaa

SEQ ID NO: 2307819 - RNA, 19 nt, Artificial Sequence
  Description of Artificial Sequence: Synthetic oligonucleotide
  Antisense strand to SEQ ID NO: 2307818
uuuagacccagcuucuugc

SEQ ID NO: 2307820 - RNA, 19 nt, Artificial Sequence
  Description of Artificial Sequence: Synthetic oligonucleotide
  Sense strand starting at position 3024 of SEQ ID NO: 1884993
gaaagaguauuacauaaag

SEQ ID NO: 2307821 - RNA, 19 nt, Artificial Sequence
  Description of Artificial Sequence: Synthetic oligonucleotide
  Antisense strand to SEQ ID NO: 2307820
cuuuauguaauacucuuuc

SEQ ID NO: 2307822 - RNA, 19 nt, Artificial Sequence
  Description of Artificial Sequence: Synthetic oligonucleotide
  Sense strand starting at position 3104 of SEQ ID NO: 1884993
ucuccuaggcuggaguaua

SEQ ID NO: 2307823 - RNA, 19 nt, Artificial Sequence
  Description of Artificial Sequence: Synthetic oligonucleotide
  Antisense strand to SEQ ID NO: 2307822
uauacuccagccuaggaga

SEQ ID NO: 2307824 - RNA, 19 nt, Artificial Sequence
  Description of Artificial Sequence: Synthetic oligonucleotide
  Sense strand starting at position 3415 of SEQ ID NO: 1884993
aguacugcucugcaauuga

SEQ ID NO: 2307825 - RNA, 19 nt, Artificial Sequence
  Description of Artificial Sequence: Synthetic oligonucleotide
  Antisense strand to SEQ ID NO: 2307824
ucaauugcagagcaguacu

SEQ ID NO: 2307826 - RNA, 19 nt, Artificial Sequence
  Description of Artificial Sequence: Synthetic oligonucleotide
  Sense strand starting at position 3423 of SEQ ID NO: 1884993
ucugcaauugagcagaacu

SEQ ID NO: 2307827 - RNA, 19 nt, Artificial Sequence
  Description of Artificial Sequence: Synthetic oligonucleotide
  Antisense strand to SEQ ID NO: 2307826
aguucugcucaauugcaga

SEQ ID NO: 2307828 - RNA, 19 nt, Artificial Sequence
  Description of Artificial Sequence: Synthetic oligonucleotide
  Sense strand starting at position 3480 of SEQ ID NO: 1884993
uggcacuucguugaccaua

SEQ ID NO: 2307829 - RNA, 19 nt, Artificial Sequence
  Description of Artificial Sequence: Synthetic oligonucleotide
  Antisense strand to SEQ ID NO: 2307828
uauggucaacgaagugcca

SEQ ID NO: 2307830 - RNA, 19 nt, Artificial Sequence
  Description of Artificial Sequence: Synthetic oligonucleotide
  Sense strand starting at position 3503 of SEQ ID NO: 1884993
ggaagaaagugggauuaga

SEQ ID NO: 2307831 - RNA, 19 nt, Artificial Sequence
  Description of Artificial Sequence: Synthetic oligonucleotide
  Antisense strand to SEQ ID NO: 2307830
ucuaaucccacuuucuucc

SEQ ID NO: 2307832 - RNA, 19 nt, Artificial Sequence
  Description of Artificial Sequence: Synthetic oligonucleotide
  Sense strand starting at position 3817 of SEQ ID NO: 1884993
gugguaggcaccugaaauu

SEQ ID NO: 2307833 - RNA, 19 nt, Artificial Sequence
  Description of Artificial Sequence: Synthetic oligonucleotide
  Antisense strand to SEQ ID NO: 2307832
aauuucaggugccuaccac

SEQ ID NO: 2307834 - RNA, 19 nt, Artificial Sequence
  Description of Artificial Sequence: Synthetic oligonucleotide
  Sense strand starting at position 15 of SEQ ID NO: 1884994
cagcaauuucuugguuugu

SEQ ID NO: 2307835 - RNA, 19 nt, Artificial Sequence
  Description of Artificial Sequence: Synthetic oligonucleotide
  Antisense strand to SEQ ID NO: 2307834
acaaaccaagaaauugcug

SEQ ID NO: 2307836 - RNA, 19 nt, Artificial Sequence
  Description of Artificial Sequence: Synthetic oligonucleotide
  Sense strand starting at position 16 of SEQ ID NO: 1884994
agcaauuucuugguuugua

SEQ ID NO: 2307837 - RNA, 19 nt, Artificial Sequence
  Description of Artificial Sequence: Synthetic oligonucleotide
  Antisense strand to SEQ ID NO: 2307836
uacaaaccaagaaauugcu

SEQ ID NO: 2307838 - RNA, 19 nt, Artificial Sequence
  Description of Artificial Sequence: Synthetic oligonucleotide
  Sense strand starting at position 17 of SEQ ID NO: 1884994
gcaauuucuugguuuguac

SEQ ID NO: 2307839 - RNA, 19 nt, Artificial Sequence
  Description of Artificial Sequence: Synthetic oligonucleotide
  Antisense strand to SEQ ID NO: 2307838
guacaaaccaagaaauugc

SEQ ID NO: 2307840 - RNA, 19 nt, Artificial Sequence
  Description of Artificial Sequence: Synthetic oligonucleotide
  Sense strand starting at position 28 of SEQ ID NO: 1884994
guuuguacugucuacagau

SEQ ID NO: 2307841 - RNA, 19 nt, Artificial Sequence
  Description of Artificial Sequence: Synthetic oligonucleotide
  Antisense strand to SEQ ID NO: 2307840
aucuguagacaguacaaac

SEQ ID NO: 2307842 - RNA, 19 nt, Artificial Sequence
  Description of Artificial Sequence: Synthetic oligonucleotide
  Sense strand starting at position 44 of SEQ ID NO: 1884994
gauguauugugacccauug

SEQ ID NO: 2307843 - RNA, 19 nt, Artificial Sequence
  Description of Artificial Sequence: Synthetic oligonucleotide
  Antisense strand to SEQ ID NO: 2307842
caaugggucacaauacauc

SEQ ID NO: 2307844 - RNA, 19 nt, Artificial Sequence
  Description of Artificial Sequence: Synthetic oligonucleotide
  Sense strand starting at position 46 of SEQ ID NO: 1884994
uguauugugacccauugga

SEQ ID NO: 2307845 - RNA, 19 nt, Artificial Sequence
  Description of Artificial Sequence: Synthetic oligonucleotide
  Antisense strand to SEQ ID NO: 2307844
uccaaugggucacaauaca

SEQ ID NO: 2307846 - RNA, 19 nt, Artificial Sequence
  Description of Artificial Sequence: Synthetic oligonucleotide
  Sense strand starting at position 65 of SEQ ID NO: 1884994
ugguauuuacuuuggcuua

SEQ ID NO: 2307847 - RNA, 19 nt, Artificial Sequence
  Description of Artificial Sequence: Synthetic oligonucleotide
  Antisense strand to SEQ ID NO: 2307846
uaagccaaaguaaauacca

SEQ ID NO: 2307848 - RNA, 19 nt, Artificial Sequence
  Description of Artificial Sequence: Synthetic oligonucleotide
  Sense strand starting at position 67 of SEQ ID NO: 1884994
guauuuacuuuggcuuaua

SEQ ID NO: 2307849 - RNA, 19 nt, Artificial Sequence
  Description of Artificial Sequence: Synthetic oligonucleotide
  Antisense strand to SEQ ID NO: 2307848
uauaagccaaaguaaauac

SEQ ID NO: 2307850 - RNA, 19 nt, Artificial Sequence
  Description of Artificial Sequence: Synthetic oligonucleotide
  Sense strand starting at position 162 of SEQ ID NO: 1884994
gacucagacuucucuugga

SEQ ID NO: 2307851 - RNA, 19 nt, Artificial Sequence
  Description of Artificial Sequence: Synthetic oligonucleotide
  Antisense strand to SEQ ID NO: 2307850
uccaagagaagucugaguc

SEQ ID NO: 2307852 - RNA, 19 nt, Artificial Sequence
  Description of Artificial Sequence: Synthetic oligonucleotide
  Sense strand starting at position 224 of SEQ ID NO: 1884994
uggagugaucuuuggaacc

SEQ ID NO: 2307853 - RNA, 19 nt, Artificial Sequence
  Description of Artificial Sequence: Synthetic oligonucleotide
  Antisense strand to SEQ ID NO: 2307852
gguuccaaagaucacucca

SEQ ID NO: 2307854 - RNA, 19 nt, Artificial Sequence
  Description of Artificial Sequence: Synthetic oligonucleotide
  Sense strand starting at position 281 of SEQ ID NO: 1884994
auccuugcacuugggauaa

SEQ ID NO: 2307855 - RNA, 19 nt, Artificial Sequence
  Description of Artificial Sequence: Synthetic oligonucleotide
  Antisense strand to SEQ ID NO: 2307854
uuaucccaagugcaaggau

SEQ ID NO: 2307856 - RNA, 19 nt, Artificial Sequence
  Description of Artificial Sequence: Synthetic oligonucleotide
  Sense strand starting at position 321 of SEQ ID NO: 1884994
cuacaaggccuacaugauu

SEQ ID NO: 2307857 - RNA, 19 nt, Artificial Sequence
  Description of Artificial Sequence: Synthetic oligonucleotide
  Antisense strand to SEQ ID NO: 2307856
aaucauguaggccuuguag

SEQ ID NO: 2307858 - RNA, 19 nt, Artificial Sequence
  Description of Artificial Sequence: Synthetic oligonucleotide
  Sense strand starting at position 445 of SEQ ID NO: 1884994
uugcgucuucugcuuugaa

SEQ ID NO: 2307859 - RNA, 19 nt, Artificial Sequence
  Description of Artificial Sequence: Synthetic oligonucleotide
  Antisense strand to SEQ ID NO: 2307858
uucaaagcagaagacgcaa

SEQ ID NO: 2307860 - RNA, 19 nt, Artificial Sequence
  Description of Artificial Sequence: Synthetic oligonucleotide
  Sense strand starting at position 447 of SEQ ID NO: 1884994
gcgucuucugcuuugaaug

SEQ ID NO: 2307861 - RNA, 19 nt, Artificial Sequence
  Description of Artificial Sequence: Synthetic oligonucleotide
  Antisense strand to SEQ ID NO: 2307860
cauucaaagcagaagacgc

SEQ ID NO: 2307862 - RNA, 19 nt, Artificial Sequence
  Description of Artificial Sequence: Synthetic oligonucleotide
  Sense strand starting at position 580 of SEQ ID NO: 1884994
cccauuaucuagguuuaua

SEQ ID NO: 2307863 - RNA, 19 nt, Artificial Sequence
  Description of Artificial Sequence: Synthetic oligonucleotide
  Antisense strand to SEQ ID NO: 2307862
uauaaaccuagauaauggg

SEQ ID NO: 2307864 - RNA, 19 nt, Artificial Sequence
  Description of Artificial Sequence: Synthetic oligonucleotide
  Sense strand starting at position 645 of SEQ ID NO: 1884994
ugacuuguuuauuugccau

SEQ ID NO: 2307865 - RNA, 19 nt, Artificial Sequence
  Description of Artificial Sequence: Synthetic oligonucleotide
  Antisense strand to SEQ ID NO: 2307864
auggcaaauaaacaaguca

SEQ ID NO: 2307866 - RNA, 19 nt, Artificial Sequence
  Description of Artificial Sequence: Synthetic oligonucleotide
  Sense strand starting at position 658 of SEQ ID NO: 1884994
ugccauuuaucugucucuu

SEQ ID NO: 2307867 - RNA, 19 nt, Artificial Sequence
  Description of Artificial Sequence: Synthetic oligonucleotide
  Antisense strand to SEQ ID NO: 2307866
aagagacagauaaauggca

SEQ ID NO: 2307868 - RNA, 19 nt, Artificial Sequence
  Description of Artificial Sequence: Synthetic oligonucleotide
  Sense strand starting at position 660 of SEQ ID NO: 1884994
ccauuuaucugucucuugu

SEQ ID NO: 2307869 - RNA, 19 nt, Artificial Sequence
  Description of Artificial Sequence: Synthetic oligonucleotide
  Antisense strand to SEQ ID NO: 2307868
acaagagacagauaaaugg

SEQ ID NO: 2307870 - RNA, 19 nt, Artificial Sequence
  Description of Artificial Sequence: Synthetic oligonucleotide
  Sense strand starting at position 750 of SEQ ID NO: 1884994
gcaguuaggauuugcccaa

SEQ ID NO: 2307871 - RNA, 19 nt, Artificial Sequence
  Description of Artificial Sequence: Synthetic oligonucleotide
  Antisense strand to SEQ ID NO: 2307870
uugggcaaauccuaacugc

SEQ ID NO: 2307872 - RNA, 19 nt, Artificial Sequence
  Description of Artificial Sequence: Synthetic oligonucleotide
  Sense strand starting at position 880 of SEQ ID NO: 1884994
ucagccugucaauaagauu

SEQ ID NO: 2307873 - RNA, 19 nt, Artificial Sequence
  Description of Artificial Sequence: Synthetic oligonucleotide
  Antisense strand to SEQ ID NO: 2307872
aaucuuauugacaggcuga

SEQ ID NO: 2307874 - RNA, 19 nt, Artificial Sequence
  Description of Artificial Sequence: Synthetic oligonucleotide
  Sense strand starting at position 1183 of SEQ ID NO: 1884994
gaggucuucuuagugauua

SEQ ID NO: 2307875 - RNA, 19 nt, Artificial Sequence
  Description of Artificial Sequence: Synthetic oligonucleotide
  Antisense strand to SEQ ID NO: 2307874
uaaucacuaagaagaccuc

SEQ ID NO: 2307876 - RNA, 19 nt, Artificial Sequence
  Description of Artificial Sequence: Synthetic oligonucleotide
  Sense strand starting at position 1521 of SEQ ID NO: 1884994
gagagauucuguuuacuug

SEQ ID NO: 2307877 - RNA, 19 nt, Artificial Sequence
  Description of Artificial Sequence: Synthetic oligonucleotide
  Antisense strand to SEQ ID NO: 2307876
caaguaaacagaaucucuc

SEQ ID NO: 2307878 - RNA, 19 nt, Artificial Sequence
  Description of Artificial Sequence: Synthetic oligonucleotide
  Sense strand starting at position 1524 of SEQ ID NO: 1884994
agauucuguuuacuugaaa

SEQ ID NO: 2307879 - RNA, 19 nt, Artificial Sequence
  Description of Artificial Sequence: Synthetic oligonucleotide
  Antisense strand to SEQ ID NO: 2307878
uuucaaguaaacagaaucu

SEQ ID NO: 2307880 - RNA, 19 nt, Artificial Sequence
  Description of Artificial Sequence: Synthetic oligonucleotide
  Sense strand starting at position 1555 of SEQ ID NO: 1884994
ccaugaagcucucuuagau

SEQ ID NO: 2307881 - RNA, 19 nt, Artificial Sequence
  Description of Artificial Sequence: Synthetic oligonucleotide
  Antisense strand to SEQ ID NO: 2307880
aucuaagagagcuucaugg

SEQ ID NO: 2307882 - RNA, 19 nt, Artificial Sequence
  Description of Artificial Sequence: Synthetic oligonucleotide
  Sense strand starting at position 1654 of SEQ ID NO: 1884994
cccauagggcucuaguuaa

SEQ ID NO: 2307883 - RNA, 19 nt, Artificial Sequence
  Description of Artificial Sequence: Synthetic oligonucleotide
  Antisense strand to SEQ ID NO: 2307882
uuaacuagagcccuauggg

SEQ ID NO: 2307884 - RNA, 19 nt, Artificial Sequence
  Description of Artificial Sequence: Synthetic oligonucleotide
  Sense strand starting at position 1671 of SEQ ID NO: 1884994
aaaugugugagugacgauu

SEQ ID NO: 2307885 - RNA, 19 nt, Artificial Sequence
  Description of Artificial Sequence: Synthetic oligonucleotide
  Antisense strand to SEQ ID NO: 2307884
aaucgucacucacacauuu

SEQ ID NO: 2307886 - RNA, 19 nt, Artificial Sequence
  Description of Artificial Sequence: Synthetic oligonucleotide
  Sense strand starting at position 1677 of SEQ ID NO: 1884994
gugagugacgauuaaguga

SEQ ID NO: 2307887 - RNA, 19 nt, Artificial Sequence
  Description of Artificial Sequence: Synthetic oligonucleotide
  Antisense strand to SEQ ID NO: 2307886
ucacuuaaucgucacucac

SEQ ID NO: 2307888 - RNA, 19 nt, Artificial Sequence
  Description of Artificial Sequence: Synthetic oligonucleotide
  Sense strand starting at position 1928 of SEQ ID NO: 1884994
uauuguaugggauauucuu

SEQ ID NO: 2307889 - RNA, 19 nt, Artificial Sequence
  Description of Artificial Sequence: Synthetic oligonucleotide
  Antisense strand to SEQ ID NO: 2307888
aagaauaucccauacaaua

SEQ ID NO: 2307890 - RNA, 19 nt, Artificial Sequence
  Description of Artificial Sequence: Synthetic oligonucleotide
  Sense strand starting at position 2060 of SEQ ID NO: 1884994
gacuuaagauaacugguau

SEQ ID NO: 2307891 - RNA, 19 nt, Artificial Sequence
  Description of Artificial Sequence: Synthetic oligonucleotide
  Antisense strand to SEQ ID NO: 2307890
auaccaguuaucuuaaguc

SEQ ID NO: 2307892 - RNA, 19 nt, Artificial Sequence
  Description of Artificial Sequence: Synthetic oligonucleotide
  Sense strand starting at position 2115 of SEQ ID NO: 1884994
ugggauggcucaccaaaca

SEQ ID NO: 2307893 - RNA, 19 nt, Artificial Sequence
  Description of Artificial Sequence: Synthetic oligonucleotide
  Antisense strand to SEQ ID NO: 2307892
uguuuggugagccauccca

SEQ ID NO: 2307894 - RNA, 19 nt, Artificial Sequence
  Description of Artificial Sequence: Synthetic oligonucleotide
  Sense strand starting at position 2245 of SEQ ID NO: 1884994
gaggguauugccuaucuaa

SEQ ID NO: 2307895 - RNA, 19 nt, Artificial Sequence
  Description of Artificial Sequence: Synthetic oligonucleotide
  Antisense strand to SEQ ID NO: 2307894
uuagauaggcaauacccuc

SEQ ID NO: 2307896 - RNA, 19 nt, Artificial Sequence
  Description of Artificial Sequence: Synthetic oligonucleotide
  Sense strand starting at position 2301 of SEQ ID NO: 1884994
gaggaagugcuauagcuca

SEQ ID NO: 2307897 - RNA, 19 nt, Artificial Sequence
  Description of Artificial Sequence: Synthetic oligonucleotide
  Antisense strand to SEQ ID NO: 2307896
ugagcuauagcacuuccuc

SEQ ID NO: 2307898 - RNA, 19 nt, Artificial Sequence
  Description of Artificial Sequence: Synthetic oligonucleotide
  Sense strand starting at position 2309 of SEQ ID NO: 1884994
gcuauagcucacugggaaa

SEQ ID NO: 2307899 - RNA, 19 nt, Artificial Sequence
  Description of Artificial Sequence: Synthetic oligonucleotide
  Antisense strand to SEQ ID NO: 2307898
uuucccagugagcuauagc

SEQ ID NO: 2307900 - RNA, 19 nt, Artificial Sequence
  Description of Artificial Sequence: Synthetic oligonucleotide
  Sense strand starting at position 2484 of SEQ ID NO: 1884994
uauggaguccuagagguua

SEQ ID NO: 2307901 - RNA, 19 nt, Artificial Sequence
  Description of Artificial Sequence: Synthetic oligonucleotide
  Antisense strand to SEQ ID NO: 2307900
uaaccucuaggacuccaua

SEQ ID NO: 2307902 - RNA, 19 nt, Artificial Sequence
  Description of Artificial Sequence: Synthetic oligonucleotide
  Sense strand starting at position 2498 of SEQ ID NO: 1884994
gguuaagagauuggcccaa

SEQ ID NO: 2307903 - RNA, 19 nt, Artificial Sequence
  Description of Artificial Sequence: Synthetic oligonucleotide
  Antisense strand to SEQ ID NO: 2307902
uugggccaaucucuuaacc

SEQ ID NO: 2307904 - RNA, 19 nt, Artificial Sequence
  Description of Artificial Sequence: Synthetic oligonucleotide
  Sense strand starting at position 2604 of SEQ ID NO: 1884994
guguuacaucucuauccca

SEQ ID NO: 2307905 - RNA, 19 nt, Artificial Sequence
  Description of Artificial Sequence: Synthetic oligonucleotide
  Antisense strand to SEQ ID NO: 2307904
ugggauagagauguaacac

SEQ ID NO: 2307906 - RNA, 19 nt, Artificial Sequence
  Description of Artificial Sequence: Synthetic oligonucleotide
  Sense strand starting at position 2757 of SEQ ID NO: 1884994
cuaucaucugagcagugua

SEQ ID NO: 2307907 - RNA, 19 nt, Artificial Sequence
  Description of Artificial Sequence: Synthetic oligonucleotide
  Antisense strand to SEQ ID NO: 2307906
uacacugcucagaugauag

SEQ ID NO: 2307908 - RNA, 19 nt, Artificial Sequence
  Description of Artificial Sequence: Synthetic oligonucleotide
  Sense strand starting at position 3301 of SEQ ID NO: 1884994
ggccauacauaaguaagaa

SEQ ID NO: 2307909 - RNA, 19 nt, Artificial Sequence
  Description of Artificial Sequence: Synthetic oligonucleotide
  Antisense strand to SEQ ID NO: 2307908
uucuuacuuauguauggcc

SEQ ID NO: 2307910 - RNA, 19 nt, Artificial Sequence
  Description of Artificial Sequence: Synthetic oligonucleotide
  Sense strand starting at position 3380 of SEQ ID NO: 1884994
gguugugugccuucucauc

SEQ ID NO: 2307911 - RNA, 19 nt, Artificial Sequence
  Description of Artificial Sequence: Synthetic oligonucleotide
  Antisense strand to SEQ ID NO: 2307910
gaugagaaggcacacaacc

SEQ ID NO: 2307912 - RNA, 19 nt, Artificial Sequence
  Description of Artificial Sequence: Synthetic oligonucleotide
  Sense strand starting at position 3923 of SEQ ID NO: 1884994
gccacuucuggucaggauu

SEQ ID NO: 2307913 - RNA, 19 nt, Artificial Sequence
  Description of Artificial Sequence: Synthetic oligonucleotide
  Antisense strand to SEQ ID NO: 2307912
aauccugaccagaaguggc

SEQ ID NO: 2307914 - RNA, 19 nt, Artificial Sequence
  Description of Artificial Sequence: Synthetic oligonucleotide
  Sense strand starting at position 306 of SEQ ID NO: 1884995
cccuacuaucagggauauu

SEQ ID NO: 2307915 - RNA, 19 nt, Artificial Sequence
  Description of Artificial Sequence: Synthetic oligonucleotide
  Antisense strand to SEQ ID NO: 2307914
aauaucccugauaguaggg

SEQ ID NO: 2307916 - RNA, 19 nt, Artificial Sequence
  Description of Artificial Sequence: Synthetic oligonucleotide
  Sense strand starting at position 509 of SEQ ID NO: 1884995
ugacaauuauuccuaggcu

SEQ ID NO: 2307917 - RNA, 19 nt, Artificial Sequence
  Description of Artificial Sequence: Synthetic oligonucleotide
  Antisense strand to SEQ ID NO: 2307916
agccuaggaauaauuguca

SEQ ID NO: 2307918 - RNA, 19 nt, Artificial Sequence
  Description of Artificial Sequence: Synthetic oligonucleotide
  Sense strand starting at position 517 of SEQ ID NO: 1884995
auuccuaggcuuuagugau

SEQ ID NO: 2307919 - RNA, 19 nt, Artificial Sequence
  Description of Artificial Sequence: Synthetic oligonucleotide
  Antisense strand to SEQ ID NO: 2307918
aucacuaaagccuaggaau

SEQ ID NO: 2307920 - RNA, 19 nt, Artificial Sequence
  Description of Artificial Sequence: Synthetic oligonucleotide
  Sense strand starting at position 521 of SEQ ID NO: 1884995
cuaggcuuuagugauaaag

SEQ ID NO: 2307921 - RNA, 19 nt, Artificial Sequence
  Description of Artificial Sequence: Synthetic oligonucleotide
  Antisense strand to SEQ ID NO: 2307920
cuuuaucacuaaagccuag

SEQ ID NO: 2307922 - RNA, 19 nt, Artificial Sequence
  Description of Artificial Sequence: Synthetic oligonucleotide
  Sense strand starting at position 680 of SEQ ID NO: 1884995
aacagugggugguucuuaa

SEQ ID NO: 2307923 - RNA, 19 nt, Artificial Sequence
  Description of Artificial Sequence: Synthetic oligonucleotide
  Antisense strand to SEQ ID NO: 2307922
uuaagaaccacccacuguu

SEQ ID NO: 2307924 - RNA, 19 nt, Artificial Sequence
  Description of Artificial Sequence: Synthetic oligonucleotide
  Sense strand starting at position 901 of SEQ ID NO: 1884995
aagugaauguaaguccaua

SEQ ID NO: 2307925 - RNA, 19 nt, Artificial Sequence
  Description of Artificial Sequence: Synthetic oligonucleotide
  Antisense strand to SEQ ID NO: 2307924
uauggacuuacauucacuu

SEQ ID NO: 2307926 - RNA, 19 nt, Artificial Sequence
  Description of Artificial Sequence: Synthetic oligonucleotide
  Sense strand starting at position 1185 of SEQ ID NO: 1884995
uuaaauacuuuguuaggca

SEQ ID NO: 2307927 - RNA, 19 nt, Artificial Sequence
  Description of Artificial Sequence: Synthetic oligonucleotide
  Antisense strand to SEQ ID NO: 2307926
ugccuaacaaaguauuuaa

SEQ ID NO: 2307928 - RNA, 19 nt, Artificial Sequence
  Description of Artificial Sequence: Synthetic oligonucleotide
  Sense strand starting at position 1287 of SEQ ID NO: 1884995
gcucauagaguuuauauca

SEQ ID NO: 2307929 - RNA, 19 nt, Artificial Sequence
  Description of Artificial Sequence: Synthetic oligonucleotide
  Antisense strand to SEQ ID NO: 2307928
ugauauaaacucuaugagc

SEQ ID NO: 2307930 - RNA, 19 nt, Artificial Sequence
  Description of Artificial Sequence: Synthetic oligonucleotide
  Sense strand starting at position 1423 of SEQ ID NO: 1884995
aaacaacucuuggcggauu

SEQ ID NO: 2307931 - RNA, 19 nt, Artificial Sequence
  Description of Artificial Sequence: Synthetic oligonucleotide
  Antisense strand to SEQ ID NO: 2307930
aauccgccaagaguuguuu

SEQ ID NO: 2307932 - RNA, 19 nt, Artificial Sequence
  Description of Artificial Sequence: Synthetic oligonucleotide
  Sense strand starting at position 1459 of SEQ ID NO: 1884995
guugaucuagcccauccaa

SEQ ID NO: 2307933 - RNA, 19 nt, Artificial Sequence
  Description of Artificial Sequence: Synthetic oligonucleotide
  Antisense strand to SEQ ID NO: 2307932
uuggaugggcuagaucaac

SEQ ID NO: 2307934 - RNA, 19 nt, Artificial Sequence
  Description of Artificial Sequence: Synthetic oligonucleotide
  Sense strand starting at position 1532 of SEQ ID NO: 1884995
gggcaagucugauuugucu

SEQ ID NO: 2307935 - RNA, 19 nt, Artificial Sequence
  Description of Artificial Sequence: Synthetic oligonucleotide
  Antisense strand to SEQ ID NO: 2307934
agacaaaucagacuugccc

SEQ ID NO: 2307936 - RNA, 19 nt, Artificial Sequence
  Description of Artificial Sequence: Synthetic oligonucleotide
  Sense strand starting at position 1547 of SEQ ID NO: 1884995
gucuauuucuucuuuguuu

SEQ ID NO: 2307937 - RNA, 19 nt, Artificial Sequence
  Description of Artificial Sequence: Synthetic oligonucleotide
  Antisense strand to SEQ ID NO: 2307936
aaacaaagaagaaauagac

SEQ ID NO: 2307938 - RNA, 19 nt, Artificial Sequence
  Description of Artificial Sequence: Synthetic oligonucleotide
  Sense strand starting at position 1654 of SEQ ID NO: 1884995
agagcauguucuuuaauag

SEQ ID NO: 2307939 - RNA, 19 nt, Artificial Sequence
  Description of Artificial Sequence: Synthetic oligonucleotide
  Antisense strand to SEQ ID NO: 2307938
cuauuaaagaacaugcucu

SEQ ID NO: 2307940 - RNA, 19 nt, Artificial Sequence
  Description of Artificial Sequence: Synthetic oligonucleotide
  Sense strand starting at position 1655 of SEQ ID NO: 1884995
gagcauguucuuuaauaga

SEQ ID NO: 2307941 - RNA, 19 nt, Artificial Sequence
  Description of Artificial Sequence: Synthetic oligonucleotide
  Antisense strand to SEQ ID NO: 2307940
ucuauuaaagaacaugcuc

SEQ ID NO: 2307942 - RNA, 19 nt, Artificial Sequence
  Description of Artificial Sequence: Synthetic oligonucleotide
  Sense strand starting at position 1725 of SEQ ID NO: 1884995
guuaaucaaugauuacgaa

SEQ ID NO: 2307943 - RNA, 19 nt, Artificial Sequence
  Description of Artificial Sequence: Synthetic oligonucleotide
  Antisense strand to SEQ ID NO: 2307942
uucguaaucauugauuaac

SEQ ID NO: 2307944 - RNA, 19 nt, Artificial Sequence
  Description of Artificial Sequence: Synthetic oligonucleotide
  Sense strand starting at position 1755 of SEQ ID NO: 1884995
cuagauuucucagcuguca

SEQ ID NO: 2307945 - RNA, 19 nt, Artificial Sequence
  Description of Artificial Sequence: Synthetic oligonucleotide
  Antisense strand to SEQ ID NO: 2307944
ugacagcugagaaaucuag

SEQ ID NO: 2307946 - RNA, 19 nt, Artificial Sequence
  Description of Artificial Sequence: Synthetic oligonucleotide
  Sense strand starting at position 1812 of SEQ ID NO: 1884995
guagcagagcuauacacua

SEQ ID NO: 2307947 - RNA, 19 nt, Artificial Sequence
  Description of Artificial Sequence: Synthetic oligonucleotide
  Antisense strand to SEQ ID NO: 2307946
uaguguauagcucugcuac

SEQ ID NO: 2307948 - RNA, 19 nt, Artificial Sequence
  Description of Artificial Sequence: Synthetic oligonucleotide
  Sense strand starting at position 1888 of SEQ ID NO: 1884995
cccuucuuaguugaugauu

SEQ ID NO: 2307949 - RNA, 19 nt, Artificial Sequence
  Description of Artificial Sequence: Synthetic oligonucleotide
  Antisense strand to SEQ ID NO: 2307948
aaucaucaacuaagaaggg

SEQ ID NO: 2307950 - RNA, 19 nt, Artificial Sequence
  Description of Artificial Sequence: Synthetic oligonucleotide
  Sense strand starting at position 2125 of SEQ ID NO: 1884995
uugugacaucacgaauuaa

SEQ ID NO: 2307951 - RNA, 19 nt, Artificial Sequence
  Description of Artificial Sequence: Synthetic oligonucleotide
  Antisense strand to SEQ ID NO: 2307950
uuaauucgugaugucacaa

SEQ ID NO: 2307952 - RNA, 19 nt, Artificial Sequence
  Description of Artificial Sequence: Synthetic oligonucleotide
  Sense strand starting at position 2161 of SEQ ID NO: 1884995
acgacauucuuagcuacaa

SEQ ID NO: 2307953 - RNA, 19 nt, Artificial Sequence
  Description of Artificial Sequence: Synthetic oligonucleotide
  Antisense strand to SEQ ID NO: 2307952
uuguagcuaagaaugucgu

SEQ ID NO: 2307954 - RNA, 19 nt, Artificial Sequence
  Description of Artificial Sequence: Synthetic oligonucleotide
  Sense strand starting at position 2162 of SEQ ID NO: 1884995
cgacauucuuagcuacaag

SEQ ID NO: 2307955 - RNA, 19 nt, Artificial Sequence
  Description of Artificial Sequence: Synthetic oligonucleotide
  Antisense strand to SEQ ID NO: 2307954
cuuguagcuaagaaugucg

SEQ ID NO: 2307956 - RNA, 19 nt, Artificial Sequence
  Description of Artificial Sequence: Synthetic oligonucleotide
  Sense strand starting at position 2241 of SEQ ID NO: 1884995
aaaggacacugggaagaau

SEQ ID NO: 2307957 - RNA, 19 nt, Artificial Sequence
  Description of Artificial Sequence: Synthetic oligonucleotide
  Antisense strand to SEQ ID NO: 2307956
auucuucccaguguccuuu

SEQ ID NO: 2307958 - RNA, 19 nt, Artificial Sequence
  Description of Artificial Sequence: Synthetic oligonucleotide
  Sense strand starting at position 2634 of SEQ ID NO: 1884995
ugaaaucucucagugaucu

SEQ ID NO: 2307959 - RNA, 19 nt, Artificial Sequence
  Description of Artificial Sequence: Synthetic oligonucleotide
  Antisense strand to SEQ ID NO: 2307958
agaucacugagagauuuca

SEQ ID NO: 2307960 - RNA, 19 nt, Artificial Sequence
  Description of Artificial Sequence: Synthetic oligonucleotide
  Sense strand starting at position 2937 of SEQ ID NO: 1884995
uugaguuccuccuuaggag

SEQ ID NO: 2307961 - RNA, 19 nt, Artificial Sequence
  Description of Artificial Sequence: Synthetic oligonucleotide
  Antisense strand to SEQ ID NO: 2307960
cuccuaaggaggaacucaa

SEQ ID NO: 2307962 - RNA, 19 nt, Artificial Sequence
  Description of Artificial Sequence: Synthetic oligonucleotide
  Sense strand starting at position 2938 of SEQ ID NO: 1884995
ugaguuccuccuuaggagu

SEQ ID NO: 2307963 - RNA, 19 nt, Artificial Sequence
  Description of Artificial Sequence: Synthetic oligonucleotide
  Antisense strand to SEQ ID NO: 2307962
acuccuaaggaggaacuca

SEQ ID NO: 2307964 - RNA, 19 nt, Artificial Sequence
  Description of Artificial Sequence: Synthetic oligonucleotide
  Sense strand starting at position 2985 of SEQ ID NO: 1884995
aggugacuaccaugacauc

SEQ ID NO: 2307965 - RNA, 19 nt, Artificial Sequence
  Description of Artificial Sequence: Synthetic oligonucleotide
  Antisense strand to SEQ ID NO: 2307964
gaugucaugguagucaccu

SEQ ID NO: 2307966 - RNA, 19 nt, Artificial Sequence
  Description of Artificial Sequence: Synthetic oligonucleotide
  Sense strand starting at position 2994 of SEQ ID NO: 1884995
ccaugacaucuugguuuau

SEQ ID NO: 2307967 - RNA, 19 nt, Artificial Sequence
  Description of Artificial Sequence: Synthetic oligonucleotide
  Antisense strand to SEQ ID NO: 2307966
auaaaccaagaugucaugg

SEQ ID NO: 2307968 - RNA, 19 nt, Artificial Sequence
  Description of Artificial Sequence: Synthetic oligonucleotide
  Sense strand starting at position 2995 of SEQ ID NO: 1884995
caugacaucuugguuuaug

SEQ ID NO: 2307969 - RNA, 19 nt, Artificial Sequence
  Description of Artificial Sequence: Synthetic oligonucleotide
  Antisense strand to SEQ ID NO: 2307968
cauaaaccaagaugucaug

SEQ ID NO: 2307970 - RNA, 19 nt, Artificial Sequence
  Description of Artificial Sequence: Synthetic oligonucleotide
  Sense strand starting at position 3097 of SEQ ID NO: 1884995
ugauuuaagcacugcaucu

SEQ ID NO: 2307971 - RNA, 19 nt, Artificial Sequence
  Description of Artificial Sequence: Synthetic oligonucleotide
  Antisense strand to SEQ ID NO: 2307970
agaugcagugcuuaaauca

SEQ ID NO: 2307972 - RNA, 19 nt, Artificial Sequence
  Description of Artificial Sequence: Synthetic oligonucleotide
  Sense strand starting at position 3172 of SEQ ID NO: 1884995
gcuaauuggguccagauua

SEQ ID NO: 2307973 - RNA, 19 nt, Artificial Sequence
  Description of Artificial Sequence: Synthetic oligonucleotide
  Antisense strand to SEQ ID NO: 2307972
uaaucuggacccaauuagc

SEQ ID NO: 2307974 - RNA, 19 nt, Artificial Sequence
  Description of Artificial Sequence: Synthetic oligonucleotide
  Sense strand starting at position 3577 of SEQ ID NO: 1884995
ccuugcauuugcucaggua

SEQ ID NO: 2307975 - RNA, 19 nt, Artificial Sequence
  Description of Artificial Sequence: Synthetic oligonucleotide
  Antisense strand to SEQ ID NO: 2307974
uaccugagcaaaugcaagg

SEQ ID NO: 2307976 - RNA, 19 nt, Artificial Sequence
  Description of Artificial Sequence: Synthetic oligonucleotide
  Sense strand starting at position 3598 of SEQ ID NO: 1884995
ggguucuuucuacaaguuu

SEQ ID NO: 2307977 - RNA, 19 nt, Artificial Sequence
  Description of Artificial Sequence: Synthetic oligonucleotide
  Antisense strand to SEQ ID NO: 2307976
aaacuuguagaaagaaccc

SEQ ID NO: 2307978 - RNA, 19 nt, Artificial Sequence
  Description of Artificial Sequence: Synthetic oligonucleotide
  Sense strand starting at position 3617 of SEQ ID NO: 1884995
ggaccugcauccuuuggau

SEQ ID NO: 2307979 - RNA, 19 nt, Artificial Sequence
  Description of Artificial Sequence: Synthetic oligonucleotide
  Antisense strand to SEQ ID NO: 2307978
auccaaaggaugcaggucc

SEQ ID NO: 2307980 - RNA, 19 nt, Artificial Sequence
  Description of Artificial Sequence: Synthetic oligonucleotide
  Sense strand starting at position 3626 of SEQ ID NO: 1884995
uccuuuggaucaguacuga

SEQ ID NO: 2307981 - RNA, 19 nt, Artificial Sequence
  Description of Artificial Sequence: Synthetic oligonucleotide
  Antisense strand to SEQ ID NO: 2307980
ucaguacugauccaaagga

SEQ ID NO: 2307982 - RNA, 19 nt, Artificial Sequence
  Description of Artificial Sequence: Synthetic oligonucleotide
  Sense strand starting at position 3684 of SEQ ID NO: 1884995
gccaacauugcugaagguu

SEQ ID NO: 2307983 - RNA, 19 nt, Artificial Sequence
  Description of Artificial Sequence: Synthetic oligonucleotide
  Antisense strand to SEQ ID NO: 2307982
aaccuucagcaauguuggc

SEQ ID NO: 2307984 - RNA, 19 nt, Artificial Sequence
  Description of Artificial Sequence: Synthetic oligonucleotide
  Sense strand starting at position 3717 of SEQ ID NO: 1884995
gugacuguuaugugggaaa

SEQ ID NO: 2307985 - RNA, 19 nt, Artificial Sequence
  Description of Artificial Sequence: Synthetic oligonucleotide
  Antisense strand to SEQ ID NO: 2307984
uuucccacauaacagucac

SEQ ID NO: 2307986 - RNA, 19 nt, Artificial Sequence
  Description of Artificial Sequence: Synthetic oligonucleotide
  Sense strand starting at position 3719 of SEQ ID NO: 1884995
gacuguuaugugggaaacu

SEQ ID NO: 2307987 - RNA, 19 nt, Artificial Sequence
  Description of Artificial Sequence: Synthetic oligonucleotide
  Antisense strand to SEQ ID NO: 2307986
aguuucccacauaacaguc

SEQ ID NO: 2307988 - RNA, 19 nt, Artificial Sequence
  Description of Artificial Sequence: Synthetic oligonucleotide
  Sense strand starting at position 3972 of SEQ ID NO: 1884995
gggagaaucuuaucuugug

SEQ ID NO: 2307989 - RNA, 19 nt, Artificial Sequence
  Description of Artificial Sequence: Synthetic oligonucleotide
  Antisense strand to SEQ ID NO: 2307988
cacaagauaagauucuccc

SEQ ID NO: 2307990 - RNA, 19 nt, Artificial Sequence
  Description of Artificial Sequence: Synthetic oligonucleotide
  Sense strand starting at position 3973 of SEQ ID NO: 1884995
ggagaaucuuaucuuguga

SEQ ID NO: 2307991 - RNA, 19 nt, Artificial Sequence
  Description of Artificial Sequence: Synthetic oligonucleotide
  Antisense strand to SEQ ID NO: 2307990
ucacaagauaagauucucc

SEQ ID NO: 2307992 - RNA, 19 nt, Artificial Sequence
  Description of Artificial Sequence: Synthetic oligonucleotide
  Sense strand starting at position 3981 of SEQ ID NO: 1884995
uuaucuugugaggagugaa

SEQ ID NO: 2307993 - RNA, 19 nt, Artificial Sequence
  Description of Artificial Sequence: Synthetic oligonucleotide
  Antisense strand to SEQ ID NO: 2307992
uucacuccucacaagauaa

SEQ ID NO: 2307994 - RNA, 19 nt, Artificial Sequence
  Description of Artificial Sequence: Synthetic oligonucleotide
  Sense strand starting at position 41 of SEQ ID NO: 1884996
gagauuccuggcugucaac

SEQ ID NO: 2307995 - RNA, 19 nt, Artificial Sequence
  Description of Artificial Sequence: Synthetic oligonucleotide
  Antisense strand to SEQ ID NO: 2307994
guugacagccaggaaucuc

SEQ ID NO: 2307996 - RNA, 19 nt, Artificial Sequence
  Description of Artificial Sequence: Synthetic oligonucleotide
  Sense strand starting at position 50 of SEQ ID NO: 1884996
ggcugucaacccuguuuau

SEQ ID NO: 2307997 - RNA, 19 nt, Artificial Sequence
  Description of Artificial Sequence: Synthetic oligonucleotide
  Antisense strand to SEQ ID NO: 2307996
auaaacaggguugacagcc

SEQ ID NO: 2307998 - RNA, 19 nt, Artificial Sequence
  Description of Artificial Sequence: Synthetic oligonucleotide
  Sense strand starting at position 53 of SEQ ID NO: 1884996
ugucaacccuguuuaucuu

SEQ ID NO: 2307999 - RNA, 19 nt, Artificial Sequence
  Description of Artificial Sequence: Synthetic oligonucleotide
  Antisense strand to SEQ ID NO: 2307998
aagauaaacaggguugaca

SEQ ID NO: 2308000 - RNA, 19 nt, Artificial Sequence
  Description of Artificial Sequence: Synthetic oligonucleotide
  Sense strand starting at position 110 of SEQ ID NO: 1884996
gccugaagcugucaauuaa

SEQ ID NO: 2308001 - RNA, 19 nt, Artificial Sequence
  Description of Artificial Sequence: Synthetic oligonucleotide
  Antisense strand to SEQ ID NO: 2308000
uuaauugacagcuucaggc

SEQ ID NO: 2308002 - RNA, 19 nt, Artificial Sequence
  Description of Artificial Sequence: Synthetic oligonucleotide
  Sense strand starting at position 390 of SEQ ID NO: 1884996
agccucaucaaggguaaga

SEQ ID NO: 2308003 - RNA, 19 nt, Artificial Sequence
  Description of Artificial Sequence: Synthetic oligonucleotide
  Antisense strand to SEQ ID NO: 2308002
ucuuacccuugaugaggcu

SEQ ID NO: 2308004 - RNA, 19 nt, Artificial Sequence
  Description of Artificial Sequence: Synthetic oligonucleotide
  Sense strand starting at position 449 of SEQ ID NO: 1884996
ggaucugcuucuccaguuu

SEQ ID NO: 2308005 - RNA, 19 nt, Artificial Sequence
  Description of Artificial Sequence: Synthetic oligonucleotide
  Antisense strand to SEQ ID NO: 2308004
aaacuggagaagcagaucc

SEQ ID NO: 2308006 - RNA, 19 nt, Artificial Sequence
  Description of Artificial Sequence: Synthetic oligonucleotide
  Sense strand starting at position 508 of SEQ ID NO: 1884996
cccaguaucaugcgauggu

SEQ ID NO: 2308007 - RNA, 19 nt, Artificial Sequence
  Description of Artificial Sequence: Synthetic oligonucleotide
  Antisense strand to SEQ ID NO: 2308006
accaucgcaugauacuggg

SEQ ID NO: 2308008 - RNA, 19 nt, Artificial Sequence
  Description of Artificial Sequence: Synthetic oligonucleotide
  Sense strand starting at position 634 of SEQ ID NO: 1884996
gacagugcgugauuucuca

SEQ ID NO: 2308009 - RNA, 19 nt, Artificial Sequence
  Description of Artificial Sequence: Synthetic oligonucleotide
  Antisense strand to SEQ ID NO: 2308008
ugagaaaucacgcacuguc

SEQ ID NO: 2308010 - RNA, 19 nt, Artificial Sequence
  Description of Artificial Sequence: Synthetic oligonucleotide
  Sense strand starting at position 638 of SEQ ID NO: 1884996
gugcgugauuucucaguga

SEQ ID NO: 2308011 - RNA, 19 nt, Artificial Sequence
  Description of Artificial Sequence: Synthetic oligonucleotide
  Antisense strand to SEQ ID NO: 2308010
ucacugagaaaucacgcac

SEQ ID NO: 2308012 - RNA, 19 nt, Artificial Sequence
  Description of Artificial Sequence: Synthetic oligonucleotide
  Sense strand starting at position 1009 of SEQ ID NO: 1884996
uggcuuugcugagccagau

SEQ ID NO: 2308013 - RNA, 19 nt, Artificial Sequence
  Description of Artificial Sequence: Synthetic oligonucleotide
  Antisense strand to SEQ ID NO: 2308012
aucuggcucagcaaagcca

SEQ ID NO: 2308014 - RNA, 19 nt, Artificial Sequence
  Description of Artificial Sequence: Synthetic oligonucleotide
  Sense strand starting at position 1013 of SEQ ID NO: 1884996
uuugcugagccagauuaaa

SEQ ID NO: 2308015 - RNA, 19 nt, Artificial Sequence
  Description of Artificial Sequence: Synthetic oligonucleotide
  Antisense strand to SEQ ID NO: 2308014
uuuaaucuggcucagcaaa

SEQ ID NO: 2308016 - RNA, 19 nt, Artificial Sequence
  Description of Artificial Sequence: Synthetic oligonucleotide
  Sense strand starting at position 1113 of SEQ ID NO: 1884996
gcacuucugugcccagaag

SEQ ID NO: 2308017 - RNA, 19 nt, Artificial Sequence
  Description of Artificial Sequence: Synthetic oligonucleotide
  Antisense strand to SEQ ID NO: 2308016
cuucugggcacagaagugc

SEQ ID NO: 2308018 - RNA, 19 nt, Artificial Sequence
  Description of Artificial Sequence: Synthetic oligonucleotide
  Sense strand starting at position 1444 of SEQ ID NO: 1884996
ugcaaaguauguccaggaa

SEQ ID NO: 2308019 - RNA, 19 nt, Artificial Sequence
  Description of Artificial Sequence: Synthetic oligonucleotide
  Antisense strand to SEQ ID NO: 2308018
uuccuggacauacuuugca

SEQ ID NO: 2308020 - RNA, 19 nt, Artificial Sequence
  Description of Artificial Sequence: Synthetic oligonucleotide
  Sense strand starting at position 1507 of SEQ ID NO: 1884996
cuggguuaaucugcuucga

SEQ ID NO: 2308021 - RNA, 19 nt, Artificial Sequence
  Description of Artificial Sequence: Synthetic oligonucleotide
  Antisense strand to SEQ ID NO: 2308020
ucgaagcagauuaacccag

SEQ ID NO: 2308022 - RNA, 19 nt, Artificial Sequence
  Description of Artificial Sequence: Synthetic oligonucleotide
  Sense strand starting at position 1509 of SEQ ID NO: 1884996
ggguuaaucugcuucgauu

SEQ ID NO: 2308023 - RNA, 19 nt, Artificial Sequence
  Description of Artificial Sequence: Synthetic oligonucleotide
  Antisense strand to SEQ ID NO: 2308022
aaucgaagcagauuaaccc

SEQ ID NO: 2308024 - RNA, 19 nt, Artificial Sequence
  Description of Artificial Sequence: Synthetic oligonucleotide
  Sense strand starting at position 1552 of SEQ ID NO: 1884996
gguugaguaucaugaaaga

SEQ ID NO: 2308025 - RNA, 19 nt, Artificial Sequence
  Description of Artificial Sequence: Synthetic oligonucleotide
  Antisense strand to SEQ ID NO: 2308024
ucuuucaugauacucaacc

SEQ ID NO: 2308026 - RNA, 19 nt, Artificial Sequence
  Description of Artificial Sequence: Synthetic oligonucleotide
  Sense strand starting at position 1644 of SEQ ID NO: 1884996
ggucaagugacuuggauca

SEQ ID NO: 2308027 - RNA, 19 nt, Artificial Sequence
  Description of Artificial Sequence: Synthetic oligonucleotide
  Antisense strand to SEQ ID NO: 2308026
ugauccaagucacuugacc

SEQ ID NO: 2308028 - RNA, 19 nt, Artificial Sequence
  Description of Artificial Sequence: Synthetic oligonucleotide
  Sense strand starting at position 1646 of SEQ ID NO: 1884996
ucaagugacuuggaucagu

SEQ ID NO: 2308029 - RNA, 19 nt, Artificial Sequence
  Description of Artificial Sequence: Synthetic oligonucleotide
  Antisense strand to SEQ ID NO: 2308028
acugauccaagucacuuga

SEQ ID NO: 2308030 - RNA, 19 nt, Artificial Sequence
  Description of Artificial Sequence: Synthetic oligonucleotide
  Sense strand starting at position 1655 of SEQ ID NO: 1884996
uuggaucagucuuccucau

SEQ ID NO: 2308031 - RNA, 19 nt, Artificial Sequence
  Description of Artificial Sequence: Synthetic oligonucleotide
  Antisense strand to SEQ ID NO: 2308030
augaggaagacugauccaa

SEQ ID NO: 2308032 - RNA, 19 nt, Artificial Sequence
  Description of Artificial Sequence: Synthetic oligonucleotide
  Sense strand starting at position 1657 of SEQ ID NO: 1884996
ggaucagucuuccucaugu

SEQ ID NO: 2308033 - RNA, 19 nt, Artificial Sequence
  Description of Artificial Sequence: Synthetic oligonucleotide
  Antisense strand to SEQ ID NO: 2308032
acaugaggaagacugaucc

SEQ ID NO: 2308034 - RNA, 19 nt, Artificial Sequence
  Description of Artificial Sequence: Synthetic oligonucleotide
  Sense strand starting at position 1846 of SEQ ID NO: 1884996
agagguuguuggucaguag

SEQ ID NO: 2308035 - RNA, 19 nt, Artificial Sequence
  Description of Artificial Sequence: Synthetic oligonucleotide
  Antisense strand to SEQ ID NO: 2308034
cuacugaccaacaaccucu

SEQ ID NO: 2308036 - RNA, 19 nt, Artificial Sequence
  Description of Artificial Sequence: Synthetic oligonucleotide
  Sense strand starting at position 1847 of SEQ ID NO: 1884996
gagguuguuggucaguagu

SEQ ID NO: 2308037 - RNA, 19 nt, Artificial Sequence
  Description of Artificial Sequence: Synthetic oligonucleotide
  Antisense strand to SEQ ID NO: 2308036
acuacugaccaacaaccuc

SEQ ID NO: 2308038 - RNA, 19 nt, Artificial Sequence
  Description of Artificial Sequence: Synthetic oligonucleotide
  Sense strand starting at position 1890 of SEQ ID NO: 1884996
gaagguuacugccgagaga

SEQ ID NO: 2308039 - RNA, 19 nt, Artificial Sequence
  Description of Artificial Sequence: Synthetic oligonucleotide
  Antisense strand to SEQ ID NO: 2308038
ucucucggcaguaaccuuc

SEQ ID NO: 2308040 - RNA, 19 nt, Artificial Sequence
  Description of Artificial Sequence: Synthetic oligonucleotide
  Sense strand starting at position 1891 of SEQ ID NO: 1884996
aagguuacugccgagagaa

SEQ ID NO: 2308041 - RNA, 19 nt, Artificial Sequence
  Description of Artificial Sequence: Synthetic oligonucleotide
  Antisense strand to SEQ ID NO: 2308040
uucucucggcaguaaccuu

SEQ ID NO: 2308042 - RNA, 19 nt, Artificial Sequence
  Description of Artificial Sequence: Synthetic oligonucleotide
  Sense strand starting at position 2059 of SEQ ID NO: 1884996
ggugaggucucuugagagg

SEQ ID NO: 2308043 - RNA, 19 nt, Artificial Sequence
  Description of Artificial Sequence: Synthetic oligonucleotide
  Antisense strand to SEQ ID NO: 2308042
ccucucaagagaccucacc

SEQ ID NO: 2308044 - RNA, 19 nt, Artificial Sequence
  Description of Artificial Sequence: Synthetic oligonucleotide
  Sense strand starting at position 2164 of SEQ ID NO: 1884996
gcccauugugucccuuagu

SEQ ID NO: 2308045 - RNA, 19 nt, Artificial Sequence
  Description of Artificial Sequence: Synthetic oligonucleotide
  Antisense strand to SEQ ID NO: 2308044
acuaagggacacaaugggc

SEQ ID NO: 2308046 - RNA, 19 nt, Artificial Sequence
  Description of Artificial Sequence: Synthetic oligonucleotide
  Sense strand starting at position 2303 of SEQ ID NO: 1884996
gauggauguugcugacaca

SEQ ID NO: 2308047 - RNA, 19 nt, Artificial Sequence
  Description of Artificial Sequence: Synthetic oligonucleotide
  Antisense strand to SEQ ID NO: 2308046
ugugucagcaacauccauc

SEQ ID NO: 2308048 - RNA, 19 nt, Artificial Sequence
  Description of Artificial Sequence: Synthetic oligonucleotide
  Sense strand starting at position 3203 of SEQ ID NO: 1884996
cagagagaucccugagguc

SEQ ID NO: 2308049 - RNA, 19 nt, Artificial Sequence
  Description of Artificial Sequence: Synthetic oligonucleotide
  Antisense strand to SEQ ID NO: 2308048
gaccucagggaucucucug

SEQ ID NO: 2308050 - RNA, 19 nt, Artificial Sequence
  Description of Artificial Sequence: Synthetic oligonucleotide
  Sense strand starting at position 3353 of SEQ ID NO: 1884996
gugucgcuagugugaaguu

SEQ ID NO: 2308051 - RNA, 19 nt, Artificial Sequence
  Description of Artificial Sequence: Synthetic oligonucleotide
  Antisense strand to SEQ ID NO: 2308050
aacuucacacuagcgacac

SEQ ID NO: 2308052 - RNA, 19 nt, Artificial Sequence
  Description of Artificial Sequence: Synthetic oligonucleotide
  Sense strand starting at position 3675 of SEQ ID NO: 1884996
gagcuauuggguugcucaa

SEQ ID NO: 2308053 - RNA, 19 nt, Artificial Sequence
  Description of Artificial Sequence: Synthetic oligonucleotide
  Antisense strand to SEQ ID NO: 2308052
uugagcaacccaauagcuc

SEQ ID NO: 2308054 - RNA, 19 nt, Artificial Sequence
  Description of Artificial Sequence: Synthetic oligonucleotide
  Sense strand starting at position 3719 of SEQ ID NO: 1884996
uuuguuugcuuccuucuua

SEQ ID NO: 2308055 - RNA, 19 nt, Artificial Sequence
  Description of Artificial Sequence: Synthetic oligonucleotide
  Antisense strand to SEQ ID NO: 2308054
uaagaaggaagcaaacaaa

SEQ ID NO: 2308056 - RNA, 19 nt, Artificial Sequence
  Description of Artificial Sequence: Synthetic oligonucleotide
  Sense strand starting at position 3735 of SEQ ID NO: 1884996
uuaauacccgccugcaauu

SEQ ID NO: 2308057 - RNA, 19 nt, Artificial Sequence
  Description of Artificial Sequence: Synthetic oligonucleotide
  Antisense strand to SEQ ID NO: 2308056
aauugcaggcggguauuaa

SEQ ID NO: 2308058 - RNA, 19 nt, Artificial Sequence
  Description of Artificial Sequence: Synthetic oligonucleotide
  Sense strand starting at position 3752 of SEQ ID NO: 1884996
uuauuugaugcuugugauc

SEQ ID NO: 2308059 - RNA, 19 nt, Artificial Sequence
  Description of Artificial Sequence: Synthetic oligonucleotide
  Antisense strand to SEQ ID NO: 2308058
gaucacaagcaucaaauaa

SEQ ID NO: 2308060 - RNA, 19 nt, Artificial Sequence
  Description of Artificial Sequence: Synthetic oligonucleotide
  Sense strand starting at position 3757 of SEQ ID NO: 1884996
ugaugcuugugaucgguuu

SEQ ID NO: 2308061 - RNA, 19 nt, Artificial Sequence
  Description of Artificial Sequence: Synthetic oligonucleotide
  Antisense strand to SEQ ID NO: 2308060
aaaccgaucacaagcauca

SEQ ID NO: 2308062 - RNA, 19 nt, Artificial Sequence
  Description of Artificial Sequence: Synthetic oligonucleotide
  Sense strand starting at position 3759 of SEQ ID NO: 1884996
augcuugugaucgguuugu

SEQ ID NO: 2308063 - RNA, 19 nt, Artificial Sequence
  Description of Artificial Sequence: Synthetic oligonucleotide
  Antisense strand to SEQ ID NO: 2308062
acaaaccgaucacaagcau

SEQ ID NO: 2308064 - RNA, 19 nt, Artificial Sequence
  Description of Artificial Sequence: Synthetic oligonucleotide
  Sense strand starting at position 3761 of SEQ ID NO: 1884996
gcuugugaucgguuuguga

SEQ ID NO: 2308065 - RNA, 19 nt, Artificial Sequence
  Description of Artificial Sequence: Synthetic oligonucleotide
  Antisense strand to SEQ ID NO: 2308064
ucacaaaccgaucacaagc

SEQ ID NO: 2308066 - RNA, 19 nt, Artificial Sequence
  Description of Artificial Sequence: Synthetic oligonucleotide
  Sense strand starting at position 3763 of SEQ ID NO: 1884996
uugugaucgguuugugaau

SEQ ID NO: 2308067 - RNA, 19 nt, Artificial Sequence
  Description of Artificial Sequence: Synthetic oligonucleotide
  Antisense strand to SEQ ID NO: 2308066
auucacaaaccgaucacaa

SEQ ID NO: 2308068 - RNA, 19 nt, Artificial Sequence
  Description of Artificial Sequence: Synthetic oligonucleotide
  Sense strand starting at position 3764 of SEQ ID NO: 1884996
ugugaucgguuugugaauc

SEQ ID NO: 2308069 - RNA, 19 nt, Artificial Sequence
  Description of Artificial Sequence: Synthetic oligonucleotide
  Antisense strand to SEQ ID NO: 2308068
gauucacaaaccgaucaca

SEQ ID NO: 2308070 - RNA, 19 nt, Artificial Sequence
  Description of Artificial Sequence: Synthetic oligonucleotide
  Sense strand starting at position 3933 of SEQ ID NO: 1884996
ccagcacuuccugagggau

SEQ ID NO: 2308071 - RNA, 19 nt, Artificial Sequence
  Description of Artificial Sequence: Synthetic oligonucleotide
  Antisense strand to SEQ ID NO: 2308070
aucccucaggaagugcugg

SEQ ID NO: 2308072 - RNA, 19 nt, Artificial Sequence
  Description of Artificial Sequence: Synthetic oligonucleotide
  Sense strand starting at position 3935 of SEQ ID NO: 1884996
agcacuuccugagggauga

SEQ ID NO: 2308073 - RNA, 19 nt, Artificial Sequence
  Description of Artificial Sequence: Synthetic oligonucleotide
  Antisense strand to SEQ ID NO: 2308072
ucaucccucaggaagugcu

SEQ ID NO: 2308074 - RNA, 19 nt, Artificial Sequence
  Description of Artificial Sequence: Synthetic oligonucleotide
  Sense strand starting at position 110 of SEQ ID NO: 1884997
aucccuugugcugagacaa

SEQ ID NO: 2308075 - RNA, 19 nt, Artificial Sequence
  Description of Artificial Sequence: Synthetic oligonucleotide
  Antisense strand to SEQ ID NO: 2308074
uugucucagcacaagggau

SEQ ID NO: 2308076 - RNA, 19 nt, Artificial Sequence
  Description of Artificial Sequence: Synthetic oligonucleotide
  Sense strand starting at position 199 of SEQ ID NO: 1884997
aaaguauguguuugacaga

SEQ ID NO: 2308077 - RNA, 19 nt, Artificial Sequence
  Description of Artificial Sequence: Synthetic oligonucleotide
  Antisense strand to SEQ ID NO: 2308076
ucugucaaacacauacuuu

SEQ ID NO: 2308078 - RNA, 19 nt, Artificial Sequence
  Description of Artificial Sequence: Synthetic oligonucleotide
  Sense strand starting at position 303 of SEQ ID NO: 1884997
ggagguuuaugguuccaug

SEQ ID NO: 2308079 - RNA, 19 nt, Artificial Sequence
  Description of Artificial Sequence: Synthetic oligonucleotide
  Antisense strand to SEQ ID NO: 2308078
cauggaaccauaaaccucc

SEQ ID NO: 2308080 - RNA, 19 nt, Artificial Sequence
  Description of Artificial Sequence: Synthetic oligonucleotide
  Sense strand starting at position 356 of SEQ ID NO: 1884997
ggcaguucagaauggaagu

SEQ ID NO: 2308081 - RNA, 19 nt, Artificial Sequence
  Description of Artificial Sequence: Synthetic oligonucleotide
  Antisense strand to SEQ ID NO: 2308080
acuuccauucugaacugcc

SEQ ID NO: 2308082 - RNA, 19 nt, Artificial Sequence
  Description of Artificial Sequence: Synthetic oligonucleotide
  Sense strand starting at position 426 of SEQ ID NO: 1884997
cuacuugaauucuugagga

SEQ ID NO: 2308083 - RNA, 19 nt, Artificial Sequence
  Description of Artificial Sequence: Synthetic oligonucleotide
  Antisense strand to SEQ ID NO: 2308082
uccucaagaauucaaguag

SEQ ID NO: 2308084 - RNA, 19 nt, Artificial Sequence
  Description of Artificial Sequence: Synthetic oligonucleotide
  Sense strand starting at position 434 of SEQ ID NO: 1884997
auucuugaggacugcaauu

SEQ ID NO: 2308085 - RNA, 19 nt, Artificial Sequence
  Description of Artificial Sequence: Synthetic oligonucleotide
  Antisense strand to SEQ ID NO: 2308084
aauugcaguccucaagaau

SEQ ID NO: 2308086 - RNA, 19 nt, Artificial Sequence
  Description of Artificial Sequence: Synthetic oligonucleotide
  Sense strand starting at position 513 of SEQ ID NO: 1884997
cucaauauuuggugaauaa

SEQ ID NO: 2308087 - RNA, 19 nt, Artificial Sequence
  Description of Artificial Sequence: Synthetic oligonucleotide
  Antisense strand to SEQ ID NO: 2308086
uuauucaccaaauauugag

SEQ ID NO: 2308088 - RNA, 19 nt, Artificial Sequence
  Description of Artificial Sequence: Synthetic oligonucleotide
  Sense strand starting at position 578 of SEQ ID NO: 1884997
gcaguaugcaucuaaggga

SEQ ID NO: 2308089 - RNA, 19 nt, Artificial Sequence
  Description of Artificial Sequence: Synthetic oligonucleotide
  Antisense strand to SEQ ID NO: 2308088
ucccuuagaugcauacugc

SEQ ID NO: 2308090 - RNA, 19 nt, Artificial Sequence
  Description of Artificial Sequence: Synthetic oligonucleotide
  Sense strand starting at position 641 of SEQ ID NO: 1884997
ggccacuuugggugauauu

SEQ ID NO: 2308091 - RNA, 19 nt, Artificial Sequence
  Description of Artificial Sequence: Synthetic oligonucleotide
  Antisense strand to SEQ ID NO: 2308090
aauaucacccaaaguggcc

SEQ ID NO: 2308092 - RNA, 19 nt, Artificial Sequence
  Description of Artificial Sequence: Synthetic oligonucleotide
  Sense strand starting at position 642 of SEQ ID NO: 1884997
gccacuuugggugauauua

SEQ ID NO: 2308093 - RNA, 19 nt, Artificial Sequence
  Description of Artificial Sequence: Synthetic oligonucleotide
  Antisense strand to SEQ ID NO: 2308092
uaauaucacccaaaguggc

SEQ ID NO: 2308094 - RNA, 19 nt, Artificial Sequence
  Description of Artificial Sequence: Synthetic oligonucleotide
  Sense strand starting at position 701 of SEQ ID NO: 1884997
auguccauccuguauauau

SEQ ID NO: 2308095 - RNA, 19 nt, Artificial Sequence
  Description of Artificial Sequence: Synthetic oligonucleotide
  Antisense strand to SEQ ID NO: 2308094
auauauacaggauggacau

SEQ ID NO: 2308096 - RNA, 19 nt, Artificial Sequence
  Description of Artificial Sequence: Synthetic oligonucleotide
  Sense strand starting at position 731 of SEQ ID NO: 1884997
auaaacaaggcaugaguaa

SEQ ID NO: 2308097 - RNA, 19 nt, Artificial Sequence
  Description of Artificial Sequence: Synthetic oligonucleotide
  Antisense strand to SEQ ID NO: 2308096
uuacucaugccuuguuuau

SEQ ID NO: 2308098 - RNA, 19 nt, Artificial Sequence
  Description of Artificial Sequence: Synthetic oligonucleotide
  Sense strand starting at position 787 of SEQ ID NO: 1884997
agggaaguccucuagaguc

SEQ ID NO: 2308099 - RNA, 19 nt, Artificial Sequence
  Description of Artificial Sequence: Synthetic oligonucleotide
  Antisense strand to SEQ ID NO: 2308098
gacucuagaggacuucccu

SEQ ID NO: 2308100 - RNA, 19 nt, Artificial Sequence
  Description of Artificial Sequence: Synthetic oligonucleotide
  Sense strand starting at position 789 of SEQ ID NO: 1884997
ggaaguccucuagagucua

SEQ ID NO: 2308101 - RNA, 19 nt, Artificial Sequence
  Description of Artificial Sequence: Synthetic oligonucleotide
  Antisense strand to SEQ ID NO: 2308100
uagacucuagaggacuucc

SEQ ID NO: 2308102 - RNA, 19 nt, Artificial Sequence
  Description of Artificial Sequence: Synthetic oligonucleotide
  Sense strand starting at position 797 of SEQ ID NO: 1884997
ucuagagucuagucuuaaa

SEQ ID NO: 2308103 - RNA, 19 nt, Artificial Sequence
  Description of Artificial Sequence: Synthetic oligonucleotide
  Antisense strand to SEQ ID NO: 2308102
uuuaagacuagacucuaga

SEQ ID NO: 2308104 - RNA, 19 nt, Artificial Sequence
  Description of Artificial Sequence: Synthetic oligonucleotide
  Sense strand starting at position 857 of SEQ ID NO: 1884997
acagaaagaucuuccugua

SEQ ID NO: 2308105 - RNA, 19 nt, Artificial Sequence
  Description of Artificial Sequence: Synthetic oligonucleotide
  Antisense strand to SEQ ID NO: 2308104
uacaggaagaucuuucugu

SEQ ID NO: 2308106 - RNA, 19 nt, Artificial Sequence
  Description of Artificial Sequence: Synthetic oligonucleotide
  Sense strand starting at position 881 of SEQ ID NO: 1884997
ggcucaguucuauaacaac

SEQ ID NO: 2308107 - RNA, 19 nt, Artificial Sequence
  Description of Artificial Sequence: Synthetic oligonucleotide
  Antisense strand to SEQ ID NO: 2308106
guuguuauagaacugagcc

SEQ ID NO: 2308108 - RNA, 19 nt, Artificial Sequence
  Description of Artificial Sequence: Synthetic oligonucleotide
  Sense strand starting at position 1017 of SEQ ID NO: 1884997
ggaaaucuuuggcucuguu

SEQ ID NO: 2308109 - RNA, 19 nt, Artificial Sequence
  Description of Artificial Sequence: Synthetic oligonucleotide
  Antisense strand to SEQ ID NO: 2308108
aacagagccaaagauuucc

SEQ ID NO: 2308110 - RNA, 19 nt, Artificial Sequence
  Description of Artificial Sequence: Synthetic oligonucleotide
  Sense strand starting at position 1061 of SEQ ID NO: 1884997
uagagagcugcccauuagu

SEQ ID NO: 2308111 - RNA, 19 nt, Artificial Sequence
  Description of Artificial Sequence: Synthetic oligonucleotide
  Antisense strand to SEQ ID NO: 2308110
acuaaugggcagcucucua

SEQ ID NO: 2308112 - RNA, 19 nt, Artificial Sequence
  Description of Artificial Sequence: Synthetic oligonucleotide
  Sense strand starting at position 1064 of SEQ ID NO: 1884997
agagcugcccauuaguuua

SEQ ID NO: 2308113 - RNA, 19 nt, Artificial Sequence
  Description of Artificial Sequence: Synthetic oligonucleotide
  Antisense strand to SEQ ID NO: 2308112
uaaacuaaugggcagcucu

SEQ ID NO: 2308114 - RNA, 19 nt, Artificial Sequence
  Description of Artificial Sequence: Synthetic oligonucleotide
  Sense strand starting at position 1077 of SEQ ID NO: 1884997
aguuuaagcugggcauuaa

SEQ ID NO: 2308115 - RNA, 19 nt, Artificial Sequence
  Description of Artificial Sequence: Synthetic oligonucleotide
  Antisense strand to SEQ ID NO: 2308114
uuaaugcccagcuuaaacu

SEQ ID NO: 2308116 - RNA, 19 nt, Artificial Sequence
  Description of Artificial Sequence: Synthetic oligonucleotide
  Sense strand starting at position 1086 of SEQ ID NO: 1884997
ugggcauuaaccuggcaua

SEQ ID NO: 2308117 - RNA, 19 nt, Artificial Sequence
  Description of Artificial Sequence: Synthetic oligonucleotide
  Antisense strand to SEQ ID NO: 2308116
uaugccagguuaaugccca

SEQ ID NO: 2308118 - RNA, 19 nt, Artificial Sequence
  Description of Artificial Sequence: Synthetic oligonucleotide
  Sense strand starting at position 1255 of SEQ ID NO: 1884997
gagaacauaucccuggguu

SEQ ID NO: 2308119 - RNA, 19 nt, Artificial Sequence
  Description of Artificial Sequence: Synthetic oligonucleotide
  Antisense strand to SEQ ID NO: 2308118
aacccagggauauguucuc

SEQ ID NO: 2308120 - RNA, 19 nt, Artificial Sequence
  Description of Artificial Sequence: Synthetic oligonucleotide
  Sense strand starting at position 1257 of SEQ ID NO: 1884997
gaacauaucccuggguucu

SEQ ID NO: 2308121 - RNA, 19 nt, Artificial Sequence
  Description of Artificial Sequence: Synthetic oligonucleotide
  Antisense strand to SEQ ID NO: 2308120
agaacccagggauauguuc

SEQ ID NO: 2308122 - RNA, 19 nt, Artificial Sequence
  Description of Artificial Sequence: Synthetic oligonucleotide
  Sense strand starting at position 1303 of SEQ ID NO: 1884997
agaagacauuaucaaagaa

SEQ ID NO: 2308123 - RNA, 19 nt, Artificial Sequence
  Description of Artificial Sequence: Synthetic oligonucleotide
  Antisense strand to SEQ ID NO: 2308122
uucuuugauaaugucuucu

SEQ ID NO: 2308124 - RNA, 19 nt, Artificial Sequence
  Description of Artificial Sequence: Synthetic oligonucleotide
  Sense strand starting at position 1782 of SEQ ID NO: 1884997
uaggcuugaccuuguaaca

SEQ ID NO: 2308125 - RNA, 19 nt, Artificial Sequence
  Description of Artificial Sequence: Synthetic oligonucleotide
  Antisense strand to SEQ ID NO: 2308124
uguuacaaggucaagccua

SEQ ID NO: 2308126 - RNA, 19 nt, Artificial Sequence
  Description of Artificial Sequence: Synthetic oligonucleotide
  Sense strand starting at position 1800 of SEQ ID NO: 1884997
acauuaaaugcugacuguu

SEQ ID NO: 2308127 - RNA, 19 nt, Artificial Sequence
  Description of Artificial Sequence: Synthetic oligonucleotide
  Antisense strand to SEQ ID NO: 2308126
aacagucagcauuuaaugu

SEQ ID NO: 2308128 - RNA, 19 nt, Artificial Sequence
  Description of Artificial Sequence: Synthetic oligonucleotide
  Sense strand starting at position 1995 of SEQ ID NO: 1884997
gugcuuggaaaugauguau

SEQ ID NO: 2308129 - RNA, 19 nt, Artificial Sequence
  Description of Artificial Sequence: Synthetic oligonucleotide
  Antisense strand to SEQ ID NO: 2308128
auacaucauuuccaagcac

SEQ ID NO: 2308130 - RNA, 19 nt, Artificial Sequence
  Description of Artificial Sequence: Synthetic oligonucleotide
  Sense strand starting at position 2004 of SEQ ID NO: 1884997
aaugauguauaggcagauu

SEQ ID NO: 2308131 - RNA, 19 nt, Artificial Sequence
  Description of Artificial Sequence: Synthetic oligonucleotide
  Antisense strand to SEQ ID NO: 2308130
aaucugccuauacaucauu

SEQ ID NO: 2308132 - RNA, 19 nt, Artificial Sequence
  Description of Artificial Sequence: Synthetic oligonucleotide
  Sense strand starting at position 2007 of SEQ ID NO: 1884997
gauguauaggcagauuguu

SEQ ID NO: 2308133 - RNA, 19 nt, Artificial Sequence
  Description of Artificial Sequence: Synthetic oligonucleotide
  Antisense strand to SEQ ID NO: 2308132
aacaaucugccuauacauc

SEQ ID NO: 2308134 - RNA, 19 nt, Artificial Sequence
  Description of Artificial Sequence: Synthetic oligonucleotide
  Sense strand starting at position 2091 of SEQ ID NO: 1884997
gaaugcuguccucaagaca

SEQ ID NO: 2308135 - RNA, 19 nt, Artificial Sequence
  Description of Artificial Sequence: Synthetic oligonucleotide
  Antisense strand to SEQ ID NO: 2308134
ugucuugaggacagcauuc

SEQ ID NO: 2308136 - RNA, 19 nt, Artificial Sequence
  Description of Artificial Sequence: Synthetic oligonucleotide
  Sense strand starting at position 2098 of SEQ ID NO: 1884997
guccucaagacaggugaaa

SEQ ID NO: 2308137 - RNA, 19 nt, Artificial Sequence
  Description of Artificial Sequence: Synthetic oligonucleotide
  Antisense strand to SEQ ID NO: 2308136
uuucaccugucuugaggac

SEQ ID NO: 2308138 - RNA, 19 nt, Artificial Sequence
  Description of Artificial Sequence: Synthetic oligonucleotide
  Sense strand starting at position 2487 of SEQ ID NO: 1884997
cuucuaaagccuggugaaa

SEQ ID NO: 2308139 - RNA, 19 nt, Artificial Sequence
  Description of Artificial Sequence: Synthetic oligonucleotide
  Antisense strand to SEQ ID NO: 2308138
uuucaccaggcuuuagaag

SEQ ID NO: 2308140 - RNA, 19 nt, Artificial Sequence
  Description of Artificial Sequence: Synthetic oligonucleotide
  Sense strand starting at position 2972 of SEQ ID NO: 1884997
ugucuuguaggacaaacua

SEQ ID NO: 2308141 - RNA, 19 nt, Artificial Sequence
  Description of Artificial Sequence: Synthetic oligonucleotide
  Antisense strand to SEQ ID NO: 2308140
uaguuuguccuacaagaca

SEQ ID NO: 2308142 - RNA, 19 nt, Artificial Sequence
  Description of Artificial Sequence: Synthetic oligonucleotide
  Sense strand starting at position 3081 of SEQ ID NO: 1884997
ccagaagacugggagaaua

SEQ ID NO: 2308143 - RNA, 19 nt, Artificial Sequence
  Description of Artificial Sequence: Synthetic oligonucleotide
  Antisense strand to SEQ ID NO: 2308142
uauucucccagucuucugg

SEQ ID NO: 2308144 - RNA, 19 nt, Artificial Sequence
  Description of Artificial Sequence: Synthetic oligonucleotide
  Sense strand starting at position 3116 of SEQ ID NO: 1884997
agaggauacuuggaaacua

SEQ ID NO: 2308145 - RNA, 19 nt, Artificial Sequence
  Description of Artificial Sequence: Synthetic oligonucleotide
  Antisense strand to SEQ ID NO: 2308144
uaguuuccaaguauccucu

SEQ ID NO: 2308146 - RNA, 19 nt, Artificial Sequence
  Description of Artificial Sequence: Synthetic oligonucleotide
  Sense strand starting at position 3175 of SEQ ID NO: 1884997
gccucuauggagggaauua

SEQ ID NO: 2308147 - RNA, 19 nt, Artificial Sequence
  Description of Artificial Sequence: Synthetic oligonucleotide
  Antisense strand to SEQ ID NO: 2308146
uaauucccuccauagaggc

SEQ ID NO: 2308148 - RNA, 19 nt, Artificial Sequence
  Description of Artificial Sequence: Synthetic oligonucleotide
  Sense strand starting at position 3347 of SEQ ID NO: 1884997
cugucucugcaagaacuua

SEQ ID NO: 2308149 - RNA, 19 nt, Artificial Sequence
  Description of Artificial Sequence: Synthetic oligonucleotide
  Antisense strand to SEQ ID NO: 2308148
uaaguucuugcagagacag

SEQ ID NO: 2308150 - RNA, 19 nt, Artificial Sequence
  Description of Artificial Sequence: Synthetic oligonucleotide
  Sense strand starting at position 3859 of SEQ ID NO: 1884997
augggucuuggugaauuaa

SEQ ID NO: 2308151 - RNA, 19 nt, Artificial Sequence
  Description of Artificial Sequence: Synthetic oligonucleotide
  Antisense strand to SEQ ID NO: 2308150
uuaauucaccaagacccau

SEQ ID NO: 2308152 - RNA, 19 nt, Artificial Sequence
  Description of Artificial Sequence: Synthetic oligonucleotide
  Sense strand starting at position 3945 of SEQ ID NO: 1884997
aggagaaauuccuagauac

SEQ ID NO: 2308153 - RNA, 19 nt, Artificial Sequence
  Description of Artificial Sequence: Synthetic oligonucleotide
  Antisense strand to SEQ ID NO: 2308152
guaucuaggaauuucuccu

SEQ ID NO: 2308154 - RNA, 19 nt, Artificial Sequence
  Description of Artificial Sequence: Synthetic oligonucleotide
  Sense strand starting at position 214 of SEQ ID NO: 1884998
caguucugguauuuaugua

SEQ ID NO: 2308155 - RNA, 19 nt, Artificial Sequence
  Description of Artificial Sequence: Synthetic oligonucleotide
  Antisense strand to SEQ ID NO: 2308154
uacauaaauaccagaacug

SEQ ID NO: 2308156 - RNA, 19 nt, Artificial Sequence
  Description of Artificial Sequence: Synthetic oligonucleotide
  Sense strand starting at position 236 of SEQ ID NO: 1884998
gggucuuaaugauauuuga

SEQ ID NO: 2308157 - RNA, 19 nt, Artificial Sequence
  Description of Artificial Sequence: Synthetic oligonucleotide
  Antisense strand to SEQ ID NO: 2308156
ucaaauaucauuaagaccc

SEQ ID NO: 2308158 - RNA, 19 nt, Artificial Sequence
  Description of Artificial Sequence: Synthetic oligonucleotide
  Sense strand starting at position 251 of SEQ ID NO: 1884998
uugauuggguguuuaccua

SEQ ID NO: 2308159 - RNA, 19 nt, Artificial Sequence
  Description of Artificial Sequence: Synthetic oligonucleotide
  Antisense strand to SEQ ID NO: 2308158
uagguaaacacccaaucaa

SEQ ID NO: 2308160 - RNA, 19 nt, Artificial Sequence
  Description of Artificial Sequence: Synthetic oligonucleotide
  Sense strand starting at position 342 of SEQ ID NO: 1884998
cuagguagucgugacuaau

SEQ ID NO: 2308161 - RNA, 19 nt, Artificial Sequence
  Description of Artificial Sequence: Synthetic oligonucleotide
  Antisense strand to SEQ ID NO: 2308160
auuagucacgacuaccuag

SEQ ID NO: 2308162 - RNA, 19 nt, Artificial Sequence
  Description of Artificial Sequence: Synthetic oligonucleotide
  Sense strand starting at position 345 of SEQ ID NO: 1884998
gguagucgugacuaauuag

SEQ ID NO: 2308163 - RNA, 19 nt, Artificial Sequence
  Description of Artificial Sequence: Synthetic oligonucleotide
  Antisense strand to SEQ ID NO: 2308162
cuaauuagucacgacuacc

SEQ ID NO: 2308164 - RNA, 19 nt, Artificial Sequence
  Description of Artificial Sequence: Synthetic oligonucleotide
  Sense strand starting at position 355 of SEQ ID NO: 1884998
acuaauuaguggcuucuaa

SEQ ID NO: 2308165 - RNA, 19 nt, Artificial Sequence
  Description of Artificial Sequence: Synthetic oligonucleotide
  Antisense strand to SEQ ID NO: 2308164
uuagaagccacuaauuagu

SEQ ID NO: 2308166 - RNA, 19 nt, Artificial Sequence
  Description of Artificial Sequence: Synthetic oligonucleotide
  Sense strand starting at position 373 of SEQ ID NO: 1884998
acuaguguucugugaaaua

SEQ ID NO: 2308167 - RNA, 19 nt, Artificial Sequence
  Description of Artificial Sequence: Synthetic oligonucleotide
  Antisense strand to SEQ ID NO: 2308166
uauuucacagaacacuagu

SEQ ID NO: 2308168 - RNA, 19 nt, Artificial Sequence
  Description of Artificial Sequence: Synthetic oligonucleotide
  Sense strand starting at position 383 of SEQ ID NO: 1884998
ugugaaauacucugccuaa

SEQ ID NO: 2308169 - RNA, 19 nt, Artificial Sequence
  Description of Artificial Sequence: Synthetic oligonucleotide
  Antisense strand to SEQ ID NO: 2308168
uuaggcagaguauuucaca

SEQ ID NO: 2308170 - RNA, 19 nt, Artificial Sequence
  Description of Artificial Sequence: Synthetic oligonucleotide
  Sense strand starting at position 384 of SEQ ID NO: 1884998
gugaaauacucugccuaaa

SEQ ID NO: 2308171 - RNA, 19 nt, Artificial Sequence
  Description of Artificial Sequence: Synthetic oligonucleotide
  Antisense strand to SEQ ID NO: 2308170
uuuaggcagaguauuucac

SEQ ID NO: 2308172 - RNA, 19 nt, Artificial Sequence
  Description of Artificial Sequence: Synthetic oligonucleotide
  Sense strand starting at position 414 of SEQ ID NO: 1884998
aguaaacauccugagcacu

SEQ ID NO: 2308173 - RNA, 19 nt, Artificial Sequence
  Description of Artificial Sequence: Synthetic oligonucleotide
  Antisense strand to SEQ ID NO: 2308172
agugcucaggauguuuacu

SEQ ID NO: 2308174 - RNA, 19 nt, Artificial Sequence
  Description of Artificial Sequence: Synthetic oligonucleotide
  Sense strand starting at position 480 of SEQ ID NO: 1884998
gggagacuguggcuuucau

SEQ ID NO: 2308175 - RNA, 19 nt, Artificial Sequence
  Description of Artificial Sequence: Synthetic oligonucleotide
  Antisense strand to SEQ ID NO: 2308174
augaaagccacagucuccc

SEQ ID NO: 2308176 - RNA, 19 nt, Artificial Sequence
  Description of Artificial Sequence: Synthetic oligonucleotide
  Sense strand starting at position 540 of SEQ ID NO: 1884998
cccucagucggcuagagau

SEQ ID NO: 2308177 - RNA, 19 nt, Artificial Sequence
  Description of Artificial Sequence: Synthetic oligonucleotide
  Antisense strand to SEQ ID NO: 2308176
aucucuagccgacugaggg

SEQ ID NO: 2308178 - RNA, 19 nt, Artificial Sequence
  Description of Artificial Sequence: Synthetic oligonucleotide
  Sense strand starting at position 577 of SEQ ID NO: 1884998
cugaucuagucuuugagca

SEQ ID NO: 2308179 - RNA, 19 nt, Artificial Sequence
  Description of Artificial Sequence: Synthetic oligonucleotide
  Antisense strand to SEQ ID NO: 2308178
ugcucaaagacuagaucag

SEQ ID NO: 2308180 - RNA, 19 nt, Artificial Sequence
  Description of Artificial Sequence: Synthetic oligonucleotide
  Sense strand starting at position 808 of SEQ ID NO: 1884998
uguuguuaagguuacaaau

SEQ ID NO: 2308181 - RNA, 19 nt, Artificial Sequence
  Description of Artificial Sequence: Synthetic oligonucleotide
  Antisense strand to SEQ ID NO: 2308180
auuuguaaccuuaacaaca

SEQ ID NO: 2308182 - RNA, 19 nt, Artificial Sequence
  Description of Artificial Sequence: Synthetic oligonucleotide
  Sense strand starting at position 844 of SEQ ID NO: 1884998
cugccugacugauuguaag

SEQ ID NO: 2308183 - RNA, 19 nt, Artificial Sequence
  Description of Artificial Sequence: Synthetic oligonucleotide
  Antisense strand to SEQ ID NO: 2308182
cuuacaaucagucaggcag

SEQ ID NO: 2308184 - RNA, 19 nt, Artificial Sequence
  Description of Artificial Sequence: Synthetic oligonucleotide
  Sense strand starting at position 1123 of SEQ ID NO: 1884998
ccacucaggccugguagaa

SEQ ID NO: 2308185 - RNA, 19 nt, Artificial Sequence
  Description of Artificial Sequence: Synthetic oligonucleotide
  Antisense strand to SEQ ID NO: 2308184
uucuaccaggccugagugg

SEQ ID NO: 2308186 - RNA, 19 nt, Artificial Sequence
  Description of Artificial Sequence: Synthetic oligonucleotide
  Sense strand starting at position 1135 of SEQ ID NO: 1884998
gguagaaagaguuaucugu

SEQ ID NO: 2308187 - RNA, 19 nt, Artificial Sequence
  Description of Artificial Sequence: Synthetic oligonucleotide
  Antisense strand to SEQ ID NO: 2308186
acagauaacucuuucuacc

SEQ ID NO: 2308188 - RNA, 19 nt, Artificial Sequence
  Description of Artificial Sequence: Synthetic oligonucleotide
  Sense strand starting at position 1137 of SEQ ID NO: 1884998
uagaaagaguuaucuguga

SEQ ID NO: 2308189 - RNA, 19 nt, Artificial Sequence
  Description of Artificial Sequence: Synthetic oligonucleotide
  Antisense strand to SEQ ID NO: 2308188
ucacagauaacucuuucua

SEQ ID NO: 2308190 - RNA, 19 nt, Artificial Sequence
  Description of Artificial Sequence: Synthetic oligonucleotide
  Sense strand starting at position 1139 of SEQ ID NO: 1884998
gaaagaguuaucugugagc

SEQ ID NO: 2308191 - RNA, 19 nt, Artificial Sequence
  Description of Artificial Sequence: Synthetic oligonucleotide
  Antisense strand to SEQ ID NO: 2308190
gcucacagauaacucuuuc

SEQ ID NO: 2308192 - RNA, 19 nt, Artificial Sequence
  Description of Artificial Sequence: Synthetic oligonucleotide
  Sense strand starting at position 1141 of SEQ ID NO: 1884998
aagaguuaucugugagcac

SEQ ID NO: 2308193 - RNA, 19 nt, Artificial Sequence
  Description of Artificial Sequence: Synthetic oligonucleotide
  Antisense strand to SEQ ID NO: 2308192
gugcucacagauaacucuu

SEQ ID NO: 2308194 - RNA, 19 nt, Artificial Sequence
  Description of Artificial Sequence: Synthetic oligonucleotide
  Sense strand starting at position 1200 of SEQ ID NO: 1884998
ggacucuaaagucgugaca

SEQ ID NO: 2308195 - RNA, 19 nt, Artificial Sequence
  Description of Artificial Sequence: Synthetic oligonucleotide
  Antisense strand to SEQ ID NO: 2308194
ugucacgacuuuagagucc

SEQ ID NO: 2308196 - RNA, 19 nt, Artificial Sequence
  Description of Artificial Sequence: Synthetic oligonucleotide
  Sense strand starting at position 1279 of SEQ ID NO: 1884998
cacagauguuuggugaauu

SEQ ID NO: 2308197 - RNA, 19 nt, Artificial Sequence
  Description of Artificial Sequence: Synthetic oligonucleotide
  Antisense strand to SEQ ID NO: 2308196
aauucaccaaacaucugug

SEQ ID NO: 2308198 - RNA, 19 nt, Artificial Sequence
  Description of Artificial Sequence: Synthetic oligonucleotide
  Sense strand starting at position 1298 of SEQ ID NO: 1884998
gggagaaguuguuccuguc

SEQ ID NO: 2308199 - RNA, 19 nt, Artificial Sequence
  Description of Artificial Sequence: Synthetic oligonucleotide
  Antisense strand to SEQ ID NO: 2308198
gacaggaacaacuucuccc

SEQ ID NO: 2308200 - RNA, 19 nt, Artificial Sequence
  Description of Artificial Sequence: Synthetic oligonucleotide
  Sense strand starting at position 1320 of SEQ ID NO: 1884998
gagccauaacgugguauuu

SEQ ID NO: 2308201 - RNA, 19 nt, Artificial Sequence
  Description of Artificial Sequence: Synthetic oligonucleotide
  Antisense strand to SEQ ID NO: 2308200
aaauaccacguuauggcuc

SEQ ID NO: 2308202 - RNA, 19 nt, Artificial Sequence
  Description of Artificial Sequence: Synthetic oligonucleotide
  Sense strand starting at position 1684 of SEQ ID NO: 1884998
uggaaaucacugcagucau

SEQ ID NO: 2308203 - RNA, 19 nt, Artificial Sequence
  Description of Artificial Sequence: Synthetic oligonucleotide
  Antisense strand to SEQ ID NO: 2308202
augacugcagugauuucca

SEQ ID NO: 2308204 - RNA, 19 nt, Artificial Sequence
  Description of Artificial Sequence: Synthetic oligonucleotide
  Sense strand starting at position 2245 of SEQ ID NO: 1884998
uacuguauuucuuugugua

SEQ ID NO: 2308205 - RNA, 19 nt, Artificial Sequence
  Description of Artificial Sequence: Synthetic oligonucleotide
  Antisense strand to SEQ ID NO: 2308204
uacacaaagaaauacagua

SEQ ID NO: 2308206 - RNA, 19 nt, Artificial Sequence
  Description of Artificial Sequence: Synthetic oligonucleotide
  Sense strand starting at position 2246 of SEQ ID NO: 1884998
acuguauuucuuuguguac

SEQ ID NO: 2308207 - RNA, 19 nt, Artificial Sequence
  Description of Artificial Sequence: Synthetic oligonucleotide
  Antisense strand to SEQ ID NO: 2308206
guacacaaagaaauacagu

SEQ ID NO: 2308208 - RNA, 19 nt, Artificial Sequence
  Description of Artificial Sequence: Synthetic oligonucleotide
  Sense strand starting at position 2249 of SEQ ID NO: 1884998
guauuucuuuguguacuca

SEQ ID NO: 2308209 - RNA, 19 nt, Artificial Sequence
  Description of Artificial Sequence: Synthetic oligonucleotide
  Antisense strand to SEQ ID NO: 2308208
ugaguacacaaagaaauac

SEQ ID NO: 2308210 - RNA, 19 nt, Artificial Sequence
  Description of Artificial Sequence: Synthetic oligonucleotide
  Sense strand starting at position 2378 of SEQ ID NO: 1884998
ccagcaucgacuugaggaa

SEQ ID NO: 2308211 - RNA, 19 nt, Artificial Sequence
  Description of Artificial Sequence: Synthetic oligonucleotide
  Antisense strand to SEQ ID NO: 2308210
uuccucaagucgaugcugg

SEQ ID NO: 2308212 - RNA, 19 nt, Artificial Sequence
  Description of Artificial Sequence: Synthetic oligonucleotide
  Sense strand starting at position 3065 of SEQ ID NO: 1884998
cuugaaguuggcgagacua

SEQ ID NO: 2308213 - RNA, 19 nt, Artificial Sequence
  Description of Artificial Sequence: Synthetic oligonucleotide
  Antisense strand to SEQ ID NO: 2308212
uagucucgccaacuucaag

SEQ ID NO: 2308214 - RNA, 19 nt, Artificial Sequence
  Description of Artificial Sequence: Synthetic oligonucleotide
  Sense strand starting at position 3119 of SEQ ID NO: 1884998
gaaggauguuaccuucgga

SEQ ID NO: 2308215 - RNA, 19 nt, Artificial Sequence
  Description of Artificial Sequence: Synthetic oligonucleotide
  Antisense strand to SEQ ID NO: 2308214
uccgaagguaacauccuuc

SEQ ID NO: 2308216 - RNA, 19 nt, Artificial Sequence
  Description of Artificial Sequence: Synthetic oligonucleotide
  Sense strand starting at position 3122 of SEQ ID NO: 1884998
ggauguuaccuucggacac

SEQ ID NO: 2308217 - RNA, 19 nt, Artificial Sequence
  Description of Artificial Sequence: Synthetic oligonucleotide
  Antisense strand to SEQ ID NO: 2308216
guguccgaagguaacaucc

SEQ ID NO: 2308218 - RNA, 19 nt, Artificial Sequence
  Description of Artificial Sequence: Synthetic oligonucleotide
  Sense strand starting at position 3178 of SEQ ID NO: 1884998
auaauacaccuuuguaugu

SEQ ID NO: 2308219 - RNA, 19 nt, Artificial Sequence
  Description of Artificial Sequence: Synthetic oligonucleotide
  Antisense strand to SEQ ID NO: 2308218
acauacaaagguguauuau

SEQ ID NO: 2308220 - RNA, 19 nt, Artificial Sequence
  Description of Artificial Sequence: Synthetic oligonucleotide
  Sense strand starting at position 3204 of SEQ ID NO: 1884998
uacugucaguauguacaua

SEQ ID NO: 2308221 - RNA, 19 nt, Artificial Sequence
  Description of Artificial Sequence: Synthetic oligonucleotide
  Antisense strand to SEQ ID NO: 2308220
uauguacauacugacagua

SEQ ID NO: 2308222 - RNA, 19 nt, Artificial Sequence
  Description of Artificial Sequence: Synthetic oligonucleotide
  Sense strand starting at position 3737 of SEQ ID NO: 1884998
gccaaagggaaauguaagu

SEQ ID NO: 2308223 - RNA, 19 nt, Artificial Sequence
  Description of Artificial Sequence: Synthetic oligonucleotide
  Antisense strand to SEQ ID NO: 2308222
acuuacauuucccuuuggc

SEQ ID NO: 2308224 - RNA, 19 nt, Artificial Sequence
  Description of Artificial Sequence: Synthetic oligonucleotide
  Sense strand starting at position 3957 of SEQ ID NO: 1884998
guucuacaacaagaguauu

SEQ ID NO: 2308225 - RNA, 19 nt, Artificial Sequence
  Description of Artificial Sequence: Synthetic oligonucleotide
  Antisense strand to SEQ ID NO: 2308224
aauacucuuguuguagaac

SEQ ID NO: 2308226 - RNA, 19 nt, Artificial Sequence
  Description of Artificial Sequence: Synthetic oligonucleotide
  Sense strand starting at position 3965 of SEQ ID NO: 1884998
acaagaguauuguuucuua

SEQ ID NO: 2308227 - RNA, 19 nt, Artificial Sequence
  Description of Artificial Sequence: Synthetic oligonucleotide
  Antisense strand to SEQ ID NO: 2308226
uaagaaacaauacucuugu

SEQ ID NO: 2308228 - RNA, 19 nt, Artificial Sequence
  Description of Artificial Sequence: Synthetic oligonucleotide
  Sense strand starting at position 3968 of SEQ ID NO: 1884998
agaguauuguuucuuagau

SEQ ID NO: 2308229 - RNA, 19 nt, Artificial Sequence
  Description of Artificial Sequence: Synthetic oligonucleotide
  Antisense strand to SEQ ID NO: 2308228
aucuaagaaacaauacucu

SEQ ID NO: 2308230 - RNA, 19 nt, Artificial Sequence
  Description of Artificial Sequence: Synthetic oligonucleotide
  Sense strand starting at position 3969 of SEQ ID NO: 1884998
gaguauuguuucuuagaug

SEQ ID NO: 2308231 - RNA, 19 nt, Artificial Sequence
  Description of Artificial Sequence: Synthetic oligonucleotide
  Antisense strand to SEQ ID NO: 2308230
caucuaagaaacaauacuc

SEQ ID NO: 2308232 - RNA, 19 nt, Artificial Sequence
  Description of Artificial Sequence: Synthetic oligonucleotide
  Sense strand starting at position 3980 of SEQ ID NO: 1884998
cuuagauguuugguuuauu

SEQ ID NO: 2308233 - RNA, 19 nt, Artificial Sequence
  Description of Artificial Sequence: Synthetic oligonucleotide
  Antisense strand to SEQ ID NO: 2308232
aauaaaccaaacaucuaag

SEQ ID NO: 2308234 - RNA, 19 nt, Artificial Sequence
  Description of Artificial Sequence: Synthetic oligonucleotide
  Sense strand starting at position 14 of SEQ ID NO: 1884999
ucgccuuagccaugaucca

SEQ ID NO: 2308235 - RNA, 19 nt, Artificial Sequence
  Description of Artificial Sequence: Synthetic oligonucleotide
  Antisense strand to SEQ ID NO: 2308234
uggaucauggcuaaggcga

SEQ ID NO: 2308236 - RNA, 19 nt, Artificial Sequence
  Description of Artificial Sequence: Synthetic oligonucleotide
  Sense strand starting at position 75 of SEQ ID NO: 1884999
ucaccuuggcccuaugaga

SEQ ID NO: 2308237 - RNA, 19 nt, Artificial Sequence
  Description of Artificial Sequence: Synthetic oligonucleotide
  Antisense strand to SEQ ID NO: 2308236
ucucauagggccaagguga

SEQ ID NO: 2308238 - RNA, 19 nt, Artificial Sequence
  Description of Artificial Sequence: Synthetic oligonucleotide
  Sense strand starting at position 211 of SEQ ID NO: 1884999
agaagucguucauuaguga

SEQ ID NO: 2308239 - RNA, 19 nt, Artificial Sequence
  Description of Artificial Sequence: Synthetic oligonucleotide
  Antisense strand to SEQ ID NO: 2308238
ucacuaaugaacgacuucu

SEQ ID NO: 2308240 - RNA, 19 nt, Artificial Sequence
  Description of Artificial Sequence: Synthetic oligonucleotide
  Sense strand starting at position 224 of SEQ ID NO: 1884999
uagugaauuucggcccauc

SEQ ID NO: 2308241 - RNA, 19 nt, Artificial Sequence
  Description of Artificial Sequence: Synthetic oligonucleotide
  Antisense strand to SEQ ID NO: 2308240
gaugggccgaaauucacua

SEQ ID NO: 2308242 - RNA, 19 nt, Artificial Sequence
  Description of Artificial Sequence: Synthetic oligonucleotide
  Sense strand starting at position 398 of SEQ ID NO: 1884999
uggccugacucucuggaaa

SEQ ID NO: 2308243 - RNA, 19 nt, Artificial Sequence
  Description of Artificial Sequence: Synthetic oligonucleotide
  Antisense strand to SEQ ID NO: 2308242
uuuccagagagucaggcca

SEQ ID NO: 2308244 - RNA, 19 nt, Artificial Sequence
  Description of Artificial Sequence: Synthetic oligonucleotide
  Sense strand starting at position 434 of SEQ ID NO: 1884999
gagccauagagagguuuga

SEQ ID NO: 2308245 - RNA, 19 nt, Artificial Sequence
  Description of Artificial Sequence: Synthetic oligonucleotide
  Antisense strand to SEQ ID NO: 2308244
ucaaaccucucuauggcuc

SEQ ID NO: 2308246 - RNA, 19 nt, Artificial Sequence
  Description of Artificial Sequence: Synthetic oligonucleotide
  Sense strand starting at position 580 of SEQ ID NO: 1884999
acaaauauguucgcauaag

SEQ ID NO: 2308247 - RNA, 19 nt, Artificial Sequence
  Description of Artificial Sequence: Synthetic oligonucleotide
  Antisense strand to SEQ ID NO: 2308246
cuuaugcgaacauauuugu

SEQ ID NO: 2308248 - RNA, 19 nt, Artificial Sequence
  Description of Artificial Sequence: Synthetic oligonucleotide
  Sense strand starting at position 609 of SEQ ID NO: 1884999
aauaaauguguaugcguau

SEQ ID NO: 2308249 - RNA, 19 nt, Artificial Sequence
  Description of Artificial Sequence: Synthetic oligonucleotide
  Antisense strand to SEQ ID NO: 2308248
auacgcauacacauuuauu

SEQ ID NO: 2308250 - RNA, 19 nt, Artificial Sequence
  Description of Artificial Sequence: Synthetic oligonucleotide
  Sense strand starting at position 610 of SEQ ID NO: 1884999
auaaauguguaugcguaua

SEQ ID NO: 2308251 - RNA, 19 nt, Artificial Sequence
  Description of Artificial Sequence: Synthetic oligonucleotide
  Antisense strand to SEQ ID NO: 2308250
uauacgcauacacauuuau

SEQ ID NO: 2308252 - RNA, 19 nt, Artificial Sequence
  Description of Artificial Sequence: Synthetic oligonucleotide
  Sense strand starting at position 612 of SEQ ID NO: 1884999
aaauguguaugcguauaaa

SEQ ID NO: 2308253 - RNA, 19 nt, Artificial Sequence
  Description of Artificial Sequence: Synthetic oligonucleotide
  Antisense strand to SEQ ID NO: 2308252
uuuauacgcauacacauuu

SEQ ID NO: 2308254 - RNA, 19 nt, Artificial Sequence
  Description of Artificial Sequence: Synthetic oligonucleotide
  Sense strand starting at position 615 of SEQ ID NO: 1884999
uguguaugcguauaaauac

SEQ ID NO: 2308255 - RNA, 19 nt, Artificial Sequence
  Description of Artificial Sequence: Synthetic oligonucleotide
  Antisense strand to SEQ ID NO: 2308254
guauuuauacgcauacaca

SEQ ID NO: 2308256 - RNA, 19 nt, Artificial Sequence
  Description of Artificial Sequence: Synthetic oligonucleotide
  Sense strand starting at position 709 of SEQ ID NO: 1884999
ccagcagaugacugugaga

SEQ ID NO: 2308257 - RNA, 19 nt, Artificial Sequence
  Description of Artificial Sequence: Synthetic oligonucleotide
  Antisense strand to SEQ ID NO: 2308256
ucucacagucaucugcugg

SEQ ID NO: 2308258 - RNA, 19 nt, Artificial Sequence
  Description of Artificial Sequence: Synthetic oligonucleotide
  Sense strand starting at position 711 of SEQ ID NO: 1884999
agcagaugacugugagaau

SEQ ID NO: 2308259 - RNA, 19 nt, Artificial Sequence
  Description of Artificial Sequence: Synthetic oligonucleotide
  Antisense strand to SEQ ID NO: 2308258
auucucacagucaucugcu

SEQ ID NO: 2308260 - RNA, 19 nt, Artificial Sequence
  Description of Artificial Sequence: Synthetic oligonucleotide
  Sense strand starting at position 712 of SEQ ID NO: 1884999
gcagaugacugugagaaua

SEQ ID NO: 2308261 - RNA, 19 nt, Artificial Sequence
  Description of Artificial Sequence: Synthetic oligonucleotide
  Antisense strand to SEQ ID NO: 2308260
uauucucacagucaucugc

SEQ ID NO: 2308262 - RNA, 19 nt, Artificial Sequence
  Description of Artificial Sequence: Synthetic oligonucleotide
  Sense strand starting at position 714 of SEQ ID NO: 1884999
agaugacugugagaauaua

SEQ ID NO: 2308263 - RNA, 19 nt, Artificial Sequence
  Description of Artificial Sequence: Synthetic oligonucleotide
  Antisense strand to SEQ ID NO: 2308262
uauauucucacagucaucu

SEQ ID NO: 2308264 - RNA, 19 nt, Artificial Sequence
  Description of Artificial Sequence: Synthetic oligonucleotide
  Sense strand starting at position 777 of SEQ ID NO: 1884999
ugucuagacguuuauaaug

SEQ ID NO: 2308265 - RNA, 19 nt, Artificial Sequence
  Description of Artificial Sequence: Synthetic oligonucleotide
  Antisense strand to SEQ ID NO: 2308264
cauuauaaacgucuagaca

SEQ ID NO: 2308266 - RNA, 19 nt, Artificial Sequence
  Description of Artificial Sequence: Synthetic oligonucleotide
  Sense strand starting at position 882 of SEQ ID NO: 1884999
ggguguaucuccucagucu

SEQ ID NO: 2308267 - RNA, 19 nt, Artificial Sequence
  Description of Artificial Sequence: Synthetic oligonucleotide
  Antisense strand to SEQ ID NO: 2308266
agacugaggagauacaccc

SEQ ID NO: 2308268 - RNA, 19 nt, Artificial Sequence
  Description of Artificial Sequence: Synthetic oligonucleotide
  Sense strand starting at position 968 of SEQ ID NO: 1884999
uugagaacuuucucuguag

SEQ ID NO: 2308269 - RNA, 19 nt, Artificial Sequence
  Description of Artificial Sequence: Synthetic oligonucleotide
  Antisense strand to SEQ ID NO: 2308268
cuacagagaaaguucucaa

SEQ ID NO: 2308270 - RNA, 19 nt, Artificial Sequence
  Description of Artificial Sequence: Synthetic oligonucleotide
  Sense strand starting at position 970 of SEQ ID NO: 1884999
gagaacuuucucuguagca

SEQ ID NO: 2308271 - RNA, 19 nt, Artificial Sequence
  Description of Artificial Sequence: Synthetic oligonucleotide
  Antisense strand to SEQ ID NO: 2308270
ugcuacagagaaaguucuc

SEQ ID NO: 2308272 - RNA, 19 nt, Artificial Sequence
  Description of Artificial Sequence: Synthetic oligonucleotide
  Sense strand starting at position 971 of SEQ ID NO: 1884999
agaacuuucucuguagcaa

SEQ ID NO: 2308273 - RNA, 19 nt, Artificial Sequence
  Description of Artificial Sequence: Synthetic oligonucleotide
  Antisense strand to SEQ ID NO: 2308272
uugcuacagagaaaguucu

SEQ ID NO: 2308274 - RNA, 19 nt, Artificial Sequence
  Description of Artificial Sequence: Synthetic oligonucleotide
  Sense strand starting at position 1027 of SEQ ID NO: 1884999
agaggaagcuuugcaaagu

SEQ ID NO: 2308275 - RNA, 19 nt, Artificial Sequence
  Description of Artificial Sequence: Synthetic oligonucleotide
  Antisense strand to SEQ ID NO: 2308274
acuuugcaaagcuuccucu

SEQ ID NO: 2308276 - RNA, 19 nt, Artificial Sequence
  Description of Artificial Sequence: Synthetic oligonucleotide
  Sense strand starting at position 1273 of SEQ ID NO: 1884999
ugauguuucccaguugcgu

SEQ ID NO: 2308277 - RNA, 19 nt, Artificial Sequence
  Description of Artificial Sequence: Synthetic oligonucleotide
  Antisense strand to SEQ ID NO: 2308276
acgcaacugggaaacauca

SEQ ID NO: 2308278 - RNA, 19 nt, Artificial Sequence
  Description of Artificial Sequence: Synthetic oligonucleotide
  Sense strand starting at position 1324 of SEQ ID NO: 1884999
uuugauggcuuuccucuaa

SEQ ID NO: 2308279 - RNA, 19 nt, Artificial Sequence
  Description of Artificial Sequence: Synthetic oligonucleotide
  Antisense strand to SEQ ID NO: 2308278
uuagaggaaagccaucaaa

SEQ ID NO: 2308280 - RNA, 19 nt, Artificial Sequence
  Description of Artificial Sequence: Synthetic oligonucleotide
  Sense strand starting at position 1523 of SEQ ID NO: 1884999
cagagaccgucuucucuuu

SEQ ID NO: 2308281 - RNA, 19 nt, Artificial Sequence
  Description of Artificial Sequence: Synthetic oligonucleotide
  Antisense strand to SEQ ID NO: 2308280
aaagagaagacggucucug

SEQ ID NO: 2308282 - RNA, 19 nt, Artificial Sequence
  Description of Artificial Sequence: Synthetic oligonucleotide
  Sense strand starting at position 1711 of SEQ ID NO: 1884999
cucccuuaaucacagggau

SEQ ID NO: 2308283 - RNA, 19 nt, Artificial Sequence
  Description of Artificial Sequence: Synthetic oligonucleotide
  Antisense strand to SEQ ID NO: 2308282
aucccugugauuaagggag

SEQ ID NO: 2308284 - RNA, 19 nt, Artificial Sequence
  Description of Artificial Sequence: Synthetic oligonucleotide
  Sense strand starting at position 1758 of SEQ ID NO: 1884999
caggguucuccagacuugu

SEQ ID NO: 2308285 - RNA, 19 nt, Artificial Sequence
  Description of Artificial Sequence: Synthetic oligonucleotide
  Antisense strand to SEQ ID NO: 2308284
acaagucuggagaacccug

SEQ ID NO: 2308286 - RNA, 19 nt, Artificial Sequence
  Description of Artificial Sequence: Synthetic oligonucleotide
  Sense strand starting at position 2018 of SEQ ID NO: 1884999
uuugcaucuaucuggagga

SEQ ID NO: 2308287 - RNA, 19 nt, Artificial Sequence
  Description of Artificial Sequence: Synthetic oligonucleotide
  Antisense strand to SEQ ID NO: 2308286
uccuccagauagaugcaaa

SEQ ID NO: 2308288 - RNA, 19 nt, Artificial Sequence
  Description of Artificial Sequence: Synthetic oligonucleotide
  Sense strand starting at position 2162 of SEQ ID NO: 1884999
uaguuucuggucuaagcaa

SEQ ID NO: 2308289 - RNA, 19 nt, Artificial Sequence
  Description of Artificial Sequence: Synthetic oligonucleotide
  Antisense strand to SEQ ID NO: 2308288
uugcuuagaccagaaacua

SEQ ID NO: 2308290 - RNA, 19 nt, Artificial Sequence
  Description of Artificial Sequence: Synthetic oligonucleotide
  Sense strand starting at position 2292 of SEQ ID NO: 1884999
gcuggaucuuccuuccacu

SEQ ID NO: 2308291 - RNA, 19 nt, Artificial Sequence
  Description of Artificial Sequence: Synthetic oligonucleotide
  Antisense strand to SEQ ID NO: 2308290
aguggaaggaagauccagc

SEQ ID NO: 2308292 - RNA, 19 nt, Artificial Sequence
  Description of Artificial Sequence: Synthetic oligonucleotide
  Sense strand starting at position 2358 of SEQ ID NO: 1884999
cugcuagacucccucugau

SEQ ID NO: 2308293 - RNA, 19 nt, Artificial Sequence
  Description of Artificial Sequence: Synthetic oligonucleotide
  Antisense strand to SEQ ID NO: 2308292
aucagagggagucuagcag

SEQ ID NO: 2308294 - RNA, 19 nt, Artificial Sequence
  Description of Artificial Sequence: Synthetic oligonucleotide
  Sense strand starting at position 2394 of SEQ ID NO: 1884999
gguuuaggcuucucagcga

SEQ ID NO: 2308295 - RNA, 19 nt, Artificial Sequence
  Description of Artificial Sequence: Synthetic oligonucleotide
  Antisense strand to SEQ ID NO: 2308294
ucgcugagaagccuaaacc

SEQ ID NO: 2308296 - RNA, 19 nt, Artificial Sequence
  Description of Artificial Sequence: Synthetic oligonucleotide
  Sense strand starting at position 2397 of SEQ ID NO: 1884999
uuaggcuucucagcgaaug

SEQ ID NO: 2308297 - RNA, 19 nt, Artificial Sequence
  Description of Artificial Sequence: Synthetic oligonucleotide
  Antisense strand to SEQ ID NO: 2308296
cauucgcugagaagccuaa

SEQ ID NO: 2308298 - RNA, 19 nt, Artificial Sequence
  Description of Artificial Sequence: Synthetic oligonucleotide
  Sense strand starting at position 2398 of SEQ ID NO: 1884999
uaggcuucucagcgaaugu

SEQ ID NO: 2308299 - RNA, 19 nt, Artificial Sequence
  Description of Artificial Sequence: Synthetic oligonucleotide
  Antisense strand to SEQ ID NO: 2308298
acauucgcugagaagccua

SEQ ID NO: 2308300 - RNA, 19 nt, Artificial Sequence
  Description of Artificial Sequence: Synthetic oligonucleotide
  Sense strand starting at position 2425 of SEQ ID NO: 1884999
gaaucauagcccugugcuc

SEQ ID NO: 2308301 - RNA, 19 nt, Artificial Sequence
  Description of Artificial Sequence: Synthetic oligonucleotide
  Antisense strand to SEQ ID NO: 2308300
gagcacagggcuaugauuc

SEQ ID NO: 2308302 - RNA, 19 nt, Artificial Sequence
  Description of Artificial Sequence: Synthetic oligonucleotide
  Sense strand starting at position 3014 of SEQ ID NO: 1884999
cgguuaaguuuauuccuuu

SEQ ID NO: 2308303 - RNA, 19 nt, Artificial Sequence
  Description of Artificial Sequence: Synthetic oligonucleotide
  Antisense strand to SEQ ID NO: 2308302
aaaggaauaaacuuaaccg

SEQ ID NO: 2308304 - RNA, 19 nt, Artificial Sequence
  Description of Artificial Sequence: Synthetic oligonucleotide
  Sense strand starting at position 3112 of SEQ ID NO: 1884999
uccgucugcuccucaagau

SEQ ID NO: 2308305 - RNA, 19 nt, Artificial Sequence
  Description of Artificial Sequence: Synthetic oligonucleotide
  Antisense strand to SEQ ID NO: 2308304
aucuugaggagcagacgga

SEQ ID NO: 2308306 - RNA, 19 nt, Artificial Sequence
  Description of Artificial Sequence: Synthetic oligonucleotide
  Sense strand starting at position 3113 of SEQ ID NO: 1884999
ccgucugcuccucaagauu

SEQ ID NO: 2308307 - RNA, 19 nt, Artificial Sequence
  Description of Artificial Sequence: Synthetic oligonucleotide
  Antisense strand to SEQ ID NO: 2308306
aaucuugaggagcagacgg

SEQ ID NO: 2308308 - RNA, 19 nt, Artificial Sequence
  Description of Artificial Sequence: Synthetic oligonucleotide
  Sense strand starting at position 3273 of SEQ ID NO: 1884999
gacuuauuguggucaccug

SEQ ID NO: 2308309 - RNA, 19 nt, Artificial Sequence
  Description of Artificial Sequence: Synthetic oligonucleotide
  Antisense strand to SEQ ID NO: 2308308
caggugaccacaauaaguc

SEQ ID NO: 2308310 - RNA, 19 nt, Artificial Sequence
  Description of Artificial Sequence: Synthetic oligonucleotide
  Sense strand starting at position 3358 of SEQ ID NO: 1884999
ggcucuaggagaugaguca

SEQ ID NO: 2308311 - RNA, 19 nt, Artificial Sequence
  Description of Artificial Sequence: Synthetic oligonucleotide
  Antisense strand to SEQ ID NO: 2308310
ugacucaucuccuagagcc

SEQ ID NO: 2308312 - RNA, 19 nt, Artificial Sequence
  Description of Artificial Sequence: Synthetic oligonucleotide
  Sense strand starting at position 3453 of SEQ ID NO: 1884999
ccauccauuugaggauuau

SEQ ID NO: 2308313 - RNA, 19 nt, Artificial Sequence
  Description of Artificial Sequence: Synthetic oligonucleotide
  Antisense strand to SEQ ID NO: 2308312
auaauccucaaauggaugg

SEQ ID NO: 2308314 - RNA, 19 nt, Artificial Sequence
  Description of Artificial Sequence: Synthetic oligonucleotide
  Sense strand starting at position 51 of SEQ ID NO: 1885000
ggaucugcuucuccaguuu

SEQ ID NO: 2308315 - RNA, 19 nt, Artificial Sequence
  Description of Artificial Sequence: Synthetic oligonucleotide
  Antisense strand to SEQ ID NO: 2308314
aaacuggagaagcagaucc

SEQ ID NO: 2308316 - RNA, 19 nt, Artificial Sequence
  Description of Artificial Sequence: Synthetic oligonucleotide
  Sense strand starting at position 110 of SEQ ID NO: 1885000
cccaguaucaugcgauggu

SEQ ID NO: 2308317 - RNA, 19 nt, Artificial Sequence
  Description of Artificial Sequence: Synthetic oligonucleotide
  Antisense strand to SEQ ID NO: 2308316
accaucgcaugauacuggg

SEQ ID NO: 2308318 - RNA, 19 nt, Artificial Sequence
  Description of Artificial Sequence: Synthetic oligonucleotide
  Sense strand starting at position 236 of SEQ ID NO: 1885000
gacagugcgugauuucuca

SEQ ID NO: 2308319 - RNA, 19 nt, Artificial Sequence
  Description of Artificial Sequence: Synthetic oligonucleotide
  Antisense strand to SEQ ID NO: 2308318
ugagaaaucacgcacuguc

SEQ ID NO: 2308320 - RNA, 19 nt, Artificial Sequence
  Description of Artificial Sequence: Synthetic oligonucleotide
  Sense strand starting at position 240 of SEQ ID NO: 1885000
gugcgugauuucucaguga

SEQ ID NO: 2308321 - RNA, 19 nt, Artificial Sequence
  Description of Artificial Sequence: Synthetic oligonucleotide
  Antisense strand to SEQ ID NO: 2308320
ucacugagaaaucacgcac

SEQ ID NO: 2308322 - RNA, 19 nt, Artificial Sequence
  Description of Artificial Sequence: Synthetic oligonucleotide
  Sense strand starting at position 611 of SEQ ID NO: 1885000
uggcuuugcugagccagau

SEQ ID NO: 2308323 - RNA, 19 nt, Artificial Sequence
  Description of Artificial Sequence: Synthetic oligonucleotide
  Antisense strand to SEQ ID NO: 2308322
aucuggcucagcaaagcca

SEQ ID NO: 2308324 - RNA, 19 nt, Artificial Sequence
  Description of Artificial Sequence: Synthetic oligonucleotide
  Sense strand starting at position 615 of SEQ ID NO: 1885000
uuugcugagccagauuaaa

SEQ ID NO: 2308325 - RNA, 19 nt, Artificial Sequence
  Description of Artificial Sequence: Synthetic oligonucleotide
  Antisense strand to SEQ ID NO: 2308324
uuuaaucuggcucagcaaa

SEQ ID NO: 2308326 - RNA, 19 nt, Artificial Sequence
  Description of Artificial Sequence: Synthetic oligonucleotide
  Sense strand starting at position 715 of SEQ ID NO: 1885000
gcacuucugugcccagaag

SEQ ID NO: 2308327 - RNA, 19 nt, Artificial Sequence
  Description of Artificial Sequence: Synthetic oligonucleotide
  Antisense strand to SEQ ID NO: 2308326
cuucugggcacagaagugc

SEQ ID NO: 2308328 - RNA, 19 nt, Artificial Sequence
  Description of Artificial Sequence: Synthetic oligonucleotide
  Sense strand starting at position 1046 of SEQ ID NO: 1885000
ugcaaaguauguccaggaa

SEQ ID NO: 2308329 - RNA, 19 nt, Artificial Sequence
  Description of Artificial Sequence: Synthetic oligonucleotide
  Antisense strand to SEQ ID NO: 2308328
uuccuggacauacuuugca

SEQ ID NO: 2308330 - RNA, 19 nt, Artificial Sequence
  Description of Artificial Sequence: Synthetic oligonucleotide
  Sense strand starting at position 1109 of SEQ ID NO: 1885000
cuggguuaaucugcuucga

SEQ ID NO: 2308331 - RNA, 19 nt, Artificial Sequence
  Description of Artificial Sequence: Synthetic oligonucleotide
  Antisense strand to SEQ ID NO: 2308330
ucgaagcagauuaacccag

SEQ ID NO: 2308332 - RNA, 19 nt, Artificial Sequence
  Description of Artificial Sequence: Synthetic oligonucleotide
  Sense strand starting at position 1111 of SEQ ID NO: 1885000
ggguuaaucugcuucgauu

SEQ ID NO: 2308333 - RNA, 19 nt, Artificial Sequence
  Description of Artificial Sequence: Synthetic oligonucleotide
  Antisense strand to SEQ ID NO: 2308332
aaucgaagcagauuaaccc

SEQ ID NO: 2308334 - RNA, 19 nt, Artificial Sequence
  Description of Artificial Sequence: Synthetic oligonucleotide
  Sense strand starting at position 1154 of SEQ ID NO: 1885000
gguugaguaucaugaaaga

SEQ ID NO: 2308335 - RNA, 19 nt, Artificial Sequence
  Description of Artificial Sequence: Synthetic oligonucleotide
  Antisense strand to SEQ ID NO: 2308334
ucuuucaugauacucaacc

SEQ ID NO: 2308336 - RNA, 19 nt, Artificial Sequence
  Description of Artificial Sequence: Synthetic oligonucleotide
  Sense strand starting at position 1246 of SEQ ID NO: 1885000
ggucaagugacuuggauca

SEQ ID NO: 2308337 - RNA, 19 nt, Artificial Sequence
  Description of Artificial Sequence: Synthetic oligonucleotide
  Antisense strand to SEQ ID NO: 2308336
ugauccaagucacuugacc

SEQ ID NO: 2308338 - RNA, 19 nt, Artificial Sequence
  Description of Artificial Sequence: Synthetic oligonucleotide
  Sense strand starting at position 1248 of SEQ ID NO: 1885000
ucaagugacuuggaucagu

SEQ ID NO: 2308339 - RNA, 19 nt, Artificial Sequence
  Description of Artificial Sequence: Synthetic oligonucleotide
  Antisense strand to SEQ ID NO: 2308338
acugauccaagucacuuga

SEQ ID NO: 2308340 - RNA, 19 nt, Artificial Sequence
  Description of Artificial Sequence: Synthetic oligonucleotide
  Sense strand starting at position 1257 of SEQ ID NO: 1885000
uuggaucagucuuccucau

SEQ ID NO: 2308341 - RNA, 19 nt, Artificial Sequence
  Description of Artificial Sequence: Synthetic oligonucleotide
  Antisense strand to SEQ ID NO: 2308340
augaggaagacugauccaa

SEQ ID NO: 2308342 - RNA, 19 nt, Artificial Sequence
  Description of Artificial Sequence: Synthetic oligonucleotide
  Sense strand starting at position 1259 of SEQ ID NO: 1885000
ggaucagucuuccucaugu

SEQ ID NO: 2308343 - RNA, 19 nt, Artificial Sequence
  Description of Artificial Sequence: Synthetic oligonucleotide
  Antisense strand to SEQ ID NO: 2308342
acaugaggaagacugaucc

SEQ ID NO: 2308344 - RNA, 19 nt, Artificial Sequence
  Description of Artificial Sequence: Synthetic oligonucleotide
  Sense strand starting at position 1448 of SEQ ID NO: 1885000
agagguuguuggucaguag

SEQ ID NO: 2308345 - RNA, 19 nt, Artificial Sequence
  Description of Artificial Sequence: Synthetic oligonucleotide
  Antisense strand to SEQ ID NO: 2308344
cuacugaccaacaaccucu

SEQ ID NO: 2308346 - RNA, 19 nt, Artificial Sequence
  Description of Artificial Sequence: Synthetic oligonucleotide
  Sense strand starting at position 1449 of SEQ ID NO: 1885000
gagguuguuggucaguagu

SEQ ID NO: 2308347 - RNA, 19 nt, Artificial Sequence
  Description of Artificial Sequence: Synthetic oligonucleotide
  Antisense strand to SEQ ID NO: 2308346
acuacugaccaacaaccuc

SEQ ID NO: 2308348 - RNA, 19 nt, Artificial Sequence
  Description of Artificial Sequence: Synthetic oligonucleotide
  Sense strand starting at position 1492 of SEQ ID NO: 1885000
gaagguuacugccgagaga

SEQ ID NO: 2308349 - RNA, 19 nt, Artificial Sequence
  Description of Artificial Sequence: Synthetic oligonucleotide
  Antisense strand to SEQ ID NO: 2308348
ucucucggcaguaaccuuc

SEQ ID NO: 2308350 - RNA, 19 nt, Artificial Sequence
  Description of Artificial Sequence: Synthetic oligonucleotide
  Sense strand starting at position 1493 of SEQ ID NO: 1885000
aagguuacugccgagagaa

SEQ ID NO: 2308351 - RNA, 19 nt, Artificial Sequence
  Description of Artificial Sequence: Synthetic oligonucleotide
  Antisense strand to SEQ ID NO: 2308350
uucucucggcaguaaccuu

SEQ ID NO: 2308352 - RNA, 19 nt, Artificial Sequence
  Description of Artificial Sequence: Synthetic oligonucleotide
  Sense strand starting at position 1661 of SEQ ID NO: 1885000
ggugaggucucuugagagg

SEQ ID NO: 2308353 - RNA, 19 nt, Artificial Sequence
  Description of Artificial Sequence: Synthetic oligonucleotide
  Antisense strand to SEQ ID NO: 2308352
ccucucaagagaccucacc

SEQ ID NO: 2308354 - RNA, 19 nt, Artificial Sequence
  Description of Artificial Sequence: Synthetic oligonucleotide
  Sense strand starting at position 1766 of SEQ ID NO: 1885000
gcccauugugucccuuagu

SEQ ID NO: 2308355 - RNA, 19 nt, Artificial Sequence
  Description of Artificial Sequence: Synthetic oligonucleotide
  Antisense strand to SEQ ID NO: 2308354
acuaagggacacaaugggc

SEQ ID NO: 2308356 - RNA, 19 nt, Artificial Sequence
  Description of Artificial Sequence: Synthetic oligonucleotide
  Sense strand starting at position 1905 of SEQ ID NO: 1885000
gauggauguugcugacaca

SEQ ID NO: 2308357 - RNA, 19 nt, Artificial Sequence
  Description of Artificial Sequence: Synthetic oligonucleotide
  Antisense strand to SEQ ID NO: 2308356
ugugucagcaacauccauc

SEQ ID NO: 2308358 - RNA, 19 nt, Artificial Sequence
  Description of Artificial Sequence: Synthetic oligonucleotide
  Sense strand starting at position 2805 of SEQ ID NO: 1885000
cagagagaucccugagguc

SEQ ID NO: 2308359 - RNA, 19 nt, Artificial Sequence
  Description of Artificial Sequence: Synthetic oligonucleotide
  Antisense strand to SEQ ID NO: 2308358
gaccucagggaucucucug

SEQ ID NO: 2308360 - RNA, 19 nt, Artificial Sequence
  Description of Artificial Sequence: Synthetic oligonucleotide
  Sense strand starting at position 2955 of SEQ ID NO: 1885000
gugucgcuagugugaaguu

SEQ ID NO: 2308361 - RNA, 19 nt, Artificial Sequence
  Description of Artificial Sequence: Synthetic oligonucleotide
  Antisense strand to SEQ ID NO: 2308360
aacuucacacuagcgacac

SEQ ID NO: 2308362 - RNA, 19 nt, Artificial Sequence
  Description of Artificial Sequence: Synthetic oligonucleotide
  Sense strand starting at position 3181 of SEQ ID NO: 1885000
agcugcggcuuguauagaa

SEQ ID NO: 2308363 - RNA, 19 nt, Artificial Sequence
  Description of Artificial Sequence: Synthetic oligonucleotide
  Antisense strand to SEQ ID NO: 2308362
uucuauacaagccgcagcu

SEQ ID NO: 2308364 - RNA, 19 nt, Artificial Sequence
  Description of Artificial Sequence: Synthetic oligonucleotide
  Sense strand starting at position 3277 of SEQ ID NO: 1885000
gagcuauuggguugcucaa

SEQ ID NO: 2308365 - RNA, 19 nt, Artificial Sequence
  Description of Artificial Sequence: Synthetic oligonucleotide
  Antisense strand to SEQ ID NO: 2308364
uugagcaacccaauagcuc

SEQ ID NO: 2308366 - RNA, 19 nt, Artificial Sequence
  Description of Artificial Sequence: Synthetic oligonucleotide
  Sense strand starting at position 3321 of SEQ ID NO: 1885000
uuuguuugcuuccuucuua

SEQ ID NO: 2308367 - RNA, 19 nt, Artificial Sequence
  Description of Artificial Sequence: Synthetic oligonucleotide
  Antisense strand to SEQ ID NO: 2308366
uaagaaggaagcaaacaaa

SEQ ID NO: 2308368 - RNA, 19 nt, Artificial Sequence
  Description of Artificial Sequence: Synthetic oligonucleotide
  Sense strand starting at position 3337 of SEQ ID NO: 1885000
uuaauacccgccugcaauu

SEQ ID NO: 2308369 - RNA, 19 nt, Artificial Sequence
  Description of Artificial Sequence: Synthetic oligonucleotide
  Antisense strand to SEQ ID NO: 2308368
aauugcaggcggguauuaa

SEQ ID NO: 2308370 - RNA, 19 nt, Artificial Sequence
  Description of Artificial Sequence: Synthetic oligonucleotide
  Sense strand starting at position 3354 of SEQ ID NO: 1885000
uuauuugaugcuugugauc

SEQ ID NO: 2308371 - RNA, 19 nt, Artificial Sequence
  Description of Artificial Sequence: Synthetic oligonucleotide
  Antisense strand to SEQ ID NO: 2308370
gaucacaagcaucaaauaa

SEQ ID NO: 2308372 - RNA, 19 nt, Artificial Sequence
  Description of Artificial Sequence: Synthetic oligonucleotide
  Sense strand starting at position 3359 of SEQ ID NO: 1885000
ugaugcuugugaucgguuu

SEQ ID NO: 2308373 - RNA, 19 nt, Artificial Sequence
  Description of Artificial Sequence: Synthetic oligonucleotide
  Antisense strand to SEQ ID NO: 2308372
aaaccgaucacaagcauca

SEQ ID NO: 2308374 - RNA, 19 nt, Artificial Sequence
  Description of Artificial Sequence: Synthetic oligonucleotide
  Sense strand starting at position 3361 of SEQ ID NO: 1885000
augcuugugaucgguuugu

SEQ ID NO: 2308375 - RNA, 19 nt, Artificial Sequence
  Description of Artificial Sequence: Synthetic oligonucleotide
  Antisense strand to SEQ ID NO: 2308374
acaaaccgaucacaagcau

SEQ ID NO: 2308376 - RNA, 19 nt, Artificial Sequence
  Description of Artificial Sequence: Synthetic oligonucleotide
  Sense strand starting at position 3363 of SEQ ID NO: 1885000
gcuugugaucgguuuguga

SEQ ID NO: 2308377 - RNA, 19 nt, Artificial Sequence
  Description of Artificial Sequence: Synthetic oligonucleotide
  Antisense strand to SEQ ID NO: 2308376
ucacaaaccgaucacaagc

SEQ ID NO: 2308378 - RNA, 19 nt, Artificial Sequence
  Description of Artificial Sequence: Synthetic oligonucleotide
  Sense strand starting at position 3365 of SEQ ID NO: 1885000
uugugaucgguuugugaau

SEQ ID NO: 2308379 - RNA, 19 nt, Artificial Sequence
  Description of Artificial Sequence: Synthetic oligonucleotide
  Antisense strand to SEQ ID NO: 2308378
auucacaaaccgaucacaa

SEQ ID NO: 2308380 - RNA, 19 nt, Artificial Sequence
  Description of Artificial Sequence: Synthetic oligonucleotide
  Sense strand starting at position 3366 of SEQ ID NO: 1885000
ugugaucgguuugugaauc

SEQ ID NO: 2308381 - RNA, 19 nt, Artificial Sequence
  Description of Artificial Sequence: Synthetic oligonucleotide
  Antisense strand to SEQ ID NO: 2308380
gauucacaaaccgaucaca

SEQ ID NO: 2308382 - RNA, 19 nt, Artificial Sequence
  Description of Artificial Sequence: Synthetic oligonucleotide
  Sense strand starting at position 3367 of SEQ ID NO: 1885000
gugaucgguuugugaaucu

SEQ ID NO: 2308383 - RNA, 19 nt, Artificial Sequence
  Description of Artificial Sequence: Synthetic oligonucleotide
  Antisense strand to SEQ ID NO: 2308382
agauucacaaaccgaucac

SEQ ID NO: 2308384 - RNA, 19 nt, Artificial Sequence
  Description of Artificial Sequence: Synthetic oligonucleotide
  Sense strand starting at position 3535 of SEQ ID NO: 1885000
ccagcacuuccugagggau

SEQ ID NO: 2308385 - RNA, 19 nt, Artificial Sequence
  Description of Artificial Sequence: Synthetic oligonucleotide
  Antisense strand to SEQ ID NO: 2308384
aucccucaggaagugcugg

SEQ ID NO: 2308386 - RNA, 19 nt, Artificial Sequence
  Description of Artificial Sequence: Synthetic oligonucleotide
  Sense strand starting at position 3537 of SEQ ID NO: 1885000
agcacuuccugagggauga

SEQ ID NO: 2308387 - RNA, 19 nt, Artificial Sequence
  Description of Artificial Sequence: Synthetic oligonucleotide
  Antisense strand to SEQ ID NO: 2308386
ucaucccucaggaagugcu

SEQ ID NO: 2308388 - RNA, 19 nt, Artificial Sequence
  Description of Artificial Sequence: Synthetic oligonucleotide
  Sense strand starting at position 3803 of SEQ ID NO: 1885000
cugcgcuuccggcuguuaa

SEQ ID NO: 2308389 - RNA, 19 nt, Artificial Sequence
  Description of Artificial Sequence: Synthetic oligonucleotide
  Antisense strand to SEQ ID NO: 2308388
uuaacagccggaagcgcag

SEQ ID NO: 2308390 - RNA, 19 nt, Artificial Sequence
  Description of Artificial Sequence: Synthetic oligonucleotide
  Sense strand starting at position 3806 of SEQ ID NO: 1885000
cgcuuccggcuguuaacua

SEQ ID NO: 2308391 - RNA, 19 nt, Artificial Sequence
  Description of Artificial Sequence: Synthetic oligonucleotide
  Antisense strand to SEQ ID NO: 2308390
uaguuaacagccggaagcg

SEQ ID NO: 2308392 - RNA, 19 nt, Artificial Sequence
  Description of Artificial Sequence: Synthetic oligonucleotide
  Sense strand starting at position 3817 of SEQ ID NO: 1885000
guuaacuacucuucuuagu

SEQ ID NO: 2308393 - RNA, 19 nt, Artificial Sequence
  Description of Artificial Sequence: Synthetic oligonucleotide
  Antisense strand to SEQ ID NO: 2308392
acuaagaagaguaguuaac

SEQ ID NO: 2308394 - RNA, 19 nt, Artificial Sequence
  Description of Artificial Sequence: Synthetic oligonucleotide
  Sense strand starting at position 69 of SEQ ID NO: 1885001
gacuguaacuuugucagaa

SEQ ID NO: 2308395 - RNA, 19 nt, Artificial Sequence
  Description of Artificial Sequence: Synthetic oligonucleotide
  Antisense strand to SEQ ID NO: 2308394
uucugacaaaguuacaguc

SEQ ID NO: 2308396 - RNA, 19 nt, Artificial Sequence
  Description of Artificial Sequence: Synthetic oligonucleotide
  Sense strand starting at position 70 of SEQ ID NO: 1885001
acuguaacuuugucagaaa

SEQ ID NO: 2308397 - RNA, 19 nt, Artificial Sequence
  Description of Artificial Sequence: Synthetic oligonucleotide
  Antisense strand to SEQ ID NO: 2308396
uuucugacaaaguuacagu

SEQ ID NO: 2308398 - RNA, 19 nt, Artificial Sequence
  Description of Artificial Sequence: Synthetic oligonucleotide
  Sense strand starting at position 99 of SEQ ID NO: 1885001
ccaacacucuguguuuaga

SEQ ID NO: 2308399 - RNA, 19 nt, Artificial Sequence
  Description of Artificial Sequence: Synthetic oligonucleotide
  Antisense strand to SEQ ID NO: 2308398
ucuaaacacagaguguugg

SEQ ID NO: 2308400 - RNA, 19 nt, Artificial Sequence
  Description of Artificial Sequence: Synthetic oligonucleotide
  Sense strand starting at position 102 of SEQ ID NO: 1885001
acacucuguguuuagaaag

SEQ ID NO: 2308401 - RNA, 19 nt, Artificial Sequence
  Description of Artificial Sequence: Synthetic oligonucleotide
  Antisense strand to SEQ ID NO: 2308400
cuuucuaaacacagagugu

SEQ ID NO: 2308402 - RNA, 19 nt, Artificial Sequence
  Description of Artificial Sequence: Synthetic oligonucleotide
  Sense strand starting at position 146 of SEQ ID NO: 1885001
acggaaaucaguuaucugu

SEQ ID NO: 2308403 - RNA, 19 nt, Artificial Sequence
  Description of Artificial Sequence: Synthetic oligonucleotide
  Antisense strand to SEQ ID NO: 2308402
acagauaacugauuuccgu

SEQ ID NO: 2308404 - RNA, 19 nt, Artificial Sequence
  Description of Artificial Sequence: Synthetic oligonucleotide
  Sense strand starting at position 333 of SEQ ID NO: 1885001
acuggaugcuggucuggaa

SEQ ID NO: 2308405 - RNA, 19 nt, Artificial Sequence
  Description of Artificial Sequence: Synthetic oligonucleotide
  Antisense strand to SEQ ID NO: 2308404
uuccagaccagcauccagu

SEQ ID NO: 2308406 - RNA, 19 nt, Artificial Sequence
  Description of Artificial Sequence: Synthetic oligonucleotide
  Sense strand starting at position 348 of SEQ ID NO: 1885001
ggaaacaaguucucaucuu

SEQ ID NO: 2308407 - RNA, 19 nt, Artificial Sequence
  Description of Artificial Sequence: Synthetic oligonucleotide
  Antisense strand to SEQ ID NO: 2308406
aagaugagaacuuguuucc

SEQ ID NO: 2308408 - RNA, 19 nt, Artificial Sequence
  Description of Artificial Sequence: Synthetic oligonucleotide
  Sense strand starting at position 724 of SEQ ID NO: 1885001
ggguaucauuggucuggca

SEQ ID NO: 2308409 - RNA, 19 nt, Artificial Sequence
  Description of Artificial Sequence: Synthetic oligonucleotide
  Antisense strand to SEQ ID NO: 2308408
ugccagaccaaugauaccc

SEQ ID NO: 2308410 - RNA, 19 nt, Artificial Sequence
  Description of Artificial Sequence: Synthetic oligonucleotide
  Sense strand starting at position 957 of SEQ ID NO: 1885001
cgcucagcuccucaaagau

SEQ ID NO: 2308411 - RNA, 19 nt, Artificial Sequence
  Description of Artificial Sequence: Synthetic oligonucleotide
  Antisense strand to SEQ ID NO: 2308410
aucuuugaggagcugagcg

SEQ ID NO: 2308412 - RNA, 19 nt, Artificial Sequence
  Description of Artificial Sequence: Synthetic oligonucleotide
  Sense strand starting at position 1129 of SEQ ID NO: 1885001
gguguacuucucuggugga

SEQ ID NO: 2308413 - RNA, 19 nt, Artificial Sequence
  Description of Artificial Sequence: Synthetic oligonucleotide
  Antisense strand to SEQ ID NO: 2308412
uccaccagagaaguacacc

SEQ ID NO: 2308414 - RNA, 19 nt, Artificial Sequence
  Description of Artificial Sequence: Synthetic oligonucleotide
  Sense strand starting at position 1245 of SEQ ID NO: 1885001
cgaguuguccaggaugagg

SEQ ID NO: 2308415 - RNA, 19 nt, Artificial Sequence
  Description of Artificial Sequence: Synthetic oligonucleotide
  Antisense strand to SEQ ID NO: 2308414
ccucauccuggacaacucg

SEQ ID NO: 2308416 - RNA, 19 nt, Artificial Sequence
  Description of Artificial Sequence: Synthetic oligonucleotide
  Sense strand starting at position 1256 of SEQ ID NO: 1885001
ggaugagggucuuucucag

SEQ ID NO: 2308417 - RNA, 19 nt, Artificial Sequence
  Description of Artificial Sequence: Synthetic oligonucleotide
  Antisense strand to SEQ ID NO: 2308416
cugagaaagacccucaucc

SEQ ID NO: 2308418 - RNA, 19 nt, Artificial Sequence
  Description of Artificial Sequence: Synthetic oligonucleotide
  Sense strand starting at position 1405 of SEQ ID NO: 1885001
gagagaagaugccuuaguu

SEQ ID NO: 2308419 - RNA, 19 nt, Artificial Sequence
  Description of Artificial Sequence: Synthetic oligonucleotide
  Antisense strand to SEQ ID NO: 2308418
aacuaaggcaucuucucuc

SEQ ID NO: 2308420 - RNA, 19 nt, Artificial Sequence
  Description of Artificial Sequence: Synthetic oligonucleotide
  Sense strand starting at position 1409 of SEQ ID NO: 1885001
gaagaugccuuaguuugga

SEQ ID NO: 2308421 - RNA, 19 nt, Artificial Sequence
  Description of Artificial Sequence: Synthetic oligonucleotide
  Antisense strand to SEQ ID NO: 2308420
uccaaacuaaggcaucuuc

SEQ ID NO: 2308422 - RNA, 19 nt, Artificial Sequence
  Description of Artificial Sequence: Synthetic oligonucleotide
  Sense strand starting at position 1654 of SEQ ID NO: 1885001
gaggcaucccugugaugaa

SEQ ID NO: 2308423 - RNA, 19 nt, Artificial Sequence
  Description of Artificial Sequence: Synthetic oligonucleotide
  Antisense strand to SEQ ID NO: 2308422
uucaucacagggaugccuc

SEQ ID NO: 2308424 - RNA, 19 nt, Artificial Sequence
  Description of Artificial Sequence: Synthetic oligonucleotide
  Sense strand starting at position 1815 of SEQ ID NO: 1885001
ccaggcuuccaauggauca

SEQ ID NO: 2308425 - RNA, 19 nt, Artificial Sequence
  Description of Artificial Sequence: Synthetic oligonucleotide
  Antisense strand to SEQ ID NO: 2308424
ugauccauuggaagccugg

SEQ ID NO: 2308426 - RNA, 19 nt, Artificial Sequence
  Description of Artificial Sequence: Synthetic oligonucleotide
  Sense strand starting at position 2038 of SEQ ID NO: 1885001
gucuguccaggucaugauu

SEQ ID NO: 2308427 - RNA, 19 nt, Artificial Sequence
  Description of Artificial Sequence: Synthetic oligonucleotide
  Antisense strand to SEQ ID NO: 2308426
aaucaugaccuggacagac

SEQ ID NO: 2308428 - RNA, 19 nt, Artificial Sequence
  Description of Artificial Sequence: Synthetic oligonucleotide
  Sense strand starting at position 2047 of SEQ ID NO: 1885001
ggucaugauuagguaauga

SEQ ID NO: 2308429 - RNA, 19 nt, Artificial Sequence
  Description of Artificial Sequence: Synthetic oligonucleotide
  Antisense strand to SEQ ID NO: 2308428
ucauuaccuaaucaugacc

SEQ ID NO: 2308430 - RNA, 19 nt, Artificial Sequence
  Description of Artificial Sequence: Synthetic oligonucleotide
  Sense strand starting at position 2480 of SEQ ID NO: 1885001
ugcauuacucccgagcuca

SEQ ID NO: 2308431 - RNA, 19 nt, Artificial Sequence
  Description of Artificial Sequence: Synthetic oligonucleotide
  Antisense strand to SEQ ID NO: 2308430
ugagcucgggaguaaugca

SEQ ID NO: 2308432 - RNA, 19 nt, Artificial Sequence
  Description of Artificial Sequence: Synthetic oligonucleotide
  Sense strand starting at position 2579 of SEQ ID NO: 1885001
gcaggaacccucuguucua

SEQ ID NO: 2308433 - RNA, 19 nt, Artificial Sequence
  Description of Artificial Sequence: Synthetic oligonucleotide
  Antisense strand to SEQ ID NO: 2308432
uagaacagaggguuccugc

SEQ ID NO: 2308434 - RNA, 19 nt, Artificial Sequence
  Description of Artificial Sequence: Synthetic oligonucleotide
  Sense strand starting at position 2779 of SEQ ID NO: 1885001
caguguauaucuguuugaa

SEQ ID NO: 2308435 - RNA, 19 nt, Artificial Sequence
  Description of Artificial Sequence: Synthetic oligonucleotide
  Antisense strand to SEQ ID NO: 2308434
uucaaacagauauacacug

SEQ ID NO: 2308436 - RNA, 19 nt, Artificial Sequence
  Description of Artificial Sequence: Synthetic oligonucleotide
  Sense strand starting at position 2931 of SEQ ID NO: 1885001
agcugaguaaauggucuuu

SEQ ID NO: 2308437 - RNA, 19 nt, Artificial Sequence
  Description of Artificial Sequence: Synthetic oligonucleotide
  Antisense strand to SEQ ID NO: 2308436
aaagaccauuuacucagcu

SEQ ID NO: 2308438 - RNA, 19 nt, Artificial Sequence
  Description of Artificial Sequence: Synthetic oligonucleotide
  Sense strand starting at position 2957 of SEQ ID NO: 1885001
agugucacaugauccuuaa

SEQ ID NO: 2308439 - RNA, 19 nt, Artificial Sequence
  Description of Artificial Sequence: Synthetic oligonucleotide
  Antisense strand to SEQ ID NO: 2308438
uuaaggaucaugugacacu

SEQ ID NO: 2308440 - RNA, 19 nt, Artificial Sequence
  Description of Artificial Sequence: Synthetic oligonucleotide
  Sense strand starting at position 3001 of SEQ ID NO: 1885001
ggagccuggucuguuuaga

SEQ ID NO: 2308441 - RNA, 19 nt, Artificial Sequence
  Description of Artificial Sequence: Synthetic oligonucleotide
  Antisense strand to SEQ ID NO: 2308440
ucuaaacagaccaggcucc

SEQ ID NO: 2308442 - RNA, 19 nt, Artificial Sequence
  Description of Artificial Sequence: Synthetic oligonucleotide
  Sense strand starting at position 3006 of SEQ ID NO: 1885001
cuggucuguuuagauuuga

SEQ ID NO: 2308443 - RNA, 19 nt, Artificial Sequence
  Description of Artificial Sequence: Synthetic oligonucleotide
  Antisense strand to SEQ ID NO: 2308442
ucaaaucuaaacagaccag

SEQ ID NO: 2308444 - RNA, 19 nt, Artificial Sequence
  Description of Artificial Sequence: Synthetic oligonucleotide
  Sense strand starting at position 3014 of SEQ ID NO: 1885001
uuuagauuugagugcucuu

SEQ ID NO: 2308445 - RNA, 19 nt, Artificial Sequence
  Description of Artificial Sequence: Synthetic oligonucleotide
  Antisense strand to SEQ ID NO: 2308444
aagagcacucaaaucuaaa

SEQ ID NO: 2308446 - RNA, 19 nt, Artificial Sequence
  Description of Artificial Sequence: Synthetic oligonucleotide
  Sense strand starting at position 3021 of SEQ ID NO: 1885001
uugagugcucuuuacauug

SEQ ID NO: 2308447 - RNA, 19 nt, Artificial Sequence
  Description of Artificial Sequence: Synthetic oligonucleotide
  Antisense strand to SEQ ID NO: 2308446
caauguaaagagcacucaa

SEQ ID NO: 2308448 - RNA, 19 nt, Artificial Sequence
  Description of Artificial Sequence: Synthetic oligonucleotide
  Sense strand starting at position 3026 of SEQ ID NO: 1885001
ugcucuuuacauugacaga

SEQ ID NO: 2308449 - RNA, 19 nt, Artificial Sequence
  Description of Artificial Sequence: Synthetic oligonucleotide
  Antisense strand to SEQ ID NO: 2308448
ucugucaauguaaagagca

SEQ ID NO: 2308450 - RNA, 19 nt, Artificial Sequence
  Description of Artificial Sequence: Synthetic oligonucleotide
  Sense strand starting at position 3142 of SEQ ID NO: 1885001
ggaagaaagucacuagcua

SEQ ID NO: 2308451 - RNA, 19 nt, Artificial Sequence
  Description of Artificial Sequence: Synthetic oligonucleotide
  Antisense strand to SEQ ID NO: 2308450
uagcuagugacuuucuucc

SEQ ID NO: 2308452 - RNA, 19 nt, Artificial Sequence
  Description of Artificial Sequence: Synthetic oligonucleotide
  Sense strand starting at position 3253 of SEQ ID NO: 1885001
agagauaccugguuaaggu

SEQ ID NO: 2308453 - RNA, 19 nt, Artificial Sequence
  Description of Artificial Sequence: Synthetic oligonucleotide
  Antisense strand to SEQ ID NO: 2308452
accuuaaccagguaucucu

SEQ ID NO: 2308454 - RNA, 19 nt, Artificial Sequence
  Description of Artificial Sequence: Synthetic oligonucleotide
  Sense strand starting at position 3262 of SEQ ID NO: 1885001
ugguuaagguaucuuaaca

SEQ ID NO: 2308455 - RNA, 19 nt, Artificial Sequence
  Description of Artificial Sequence: Synthetic oligonucleotide
  Antisense strand to SEQ ID NO: 2308454
uguuaagauaccuuaacca

SEQ ID NO: 2308456 - RNA, 19 nt, Artificial Sequence
  Description of Artificial Sequence: Synthetic oligonucleotide
  Sense strand starting at position 3269 of SEQ ID NO: 1885001
gguaucuuaacagguauag

SEQ ID NO: 2308457 - RNA, 19 nt, Artificial Sequence
  Description of Artificial Sequence: Synthetic oligonucleotide
  Antisense strand to SEQ ID NO: 2308456
cuauaccuguuaagauacc

SEQ ID NO: 2308458 - RNA, 19 nt, Artificial Sequence
  Description of Artificial Sequence: Synthetic oligonucleotide
  Sense strand starting at position 3286 of SEQ ID NO: 1885001
agauaccuuucuuaaggaa

SEQ ID NO: 2308459 - RNA, 19 nt, Artificial Sequence
  Description of Artificial Sequence: Synthetic oligonucleotide
  Antisense strand to SEQ ID NO: 2308458
uuccuuaagaaagguaucu

SEQ ID NO: 2308460 - RNA, 19 nt, Artificial Sequence
  Description of Artificial Sequence: Synthetic oligonucleotide
  Sense strand starting at position 3357 of SEQ ID NO: 1885001
guuaacaaacgauagcuau

SEQ ID NO: 2308461 - RNA, 19 nt, Artificial Sequence
  Description of Artificial Sequence: Synthetic oligonucleotide
  Antisense strand to SEQ ID NO: 2308460
auagcuaucguuuguuaac

SEQ ID NO: 2308462 - RNA, 19 nt, Artificial Sequence
  Description of Artificial Sequence: Synthetic oligonucleotide
  Sense strand starting at position 3487 of SEQ ID NO: 1885001
gaaagccuugagugaaaga

SEQ ID NO: 2308463 - RNA, 19 nt, Artificial Sequence
  Description of Artificial Sequence: Synthetic oligonucleotide
  Antisense strand to SEQ ID NO: 2308462
ucuuucacucaaggcuuuc

SEQ ID NO: 2308464 - RNA, 19 nt, Artificial Sequence
  Description of Artificial Sequence: Synthetic oligonucleotide
  Sense strand starting at position 3497 of SEQ ID NO: 1885001
agugaaagauaccaauaaa

SEQ ID NO: 2308465 - RNA, 19 nt, Artificial Sequence
  Description of Artificial Sequence: Synthetic oligonucleotide
  Antisense strand to SEQ ID NO: 2308464
uuuauugguaucuuucacu

SEQ ID NO: 2308466 - RNA, 19 nt, Artificial Sequence
  Description of Artificial Sequence: Synthetic oligonucleotide
  Sense strand starting at position 3686 of SEQ ID NO: 1885001
cuaugaagucagcauuguu

SEQ ID NO: 2308467 - RNA, 19 nt, Artificial Sequence
  Description of Artificial Sequence: Synthetic oligonucleotide
  Antisense strand to SEQ ID NO: 2308466
aacaaugcugacuucauag

SEQ ID NO: 2308468 - RNA, 19 nt, Artificial Sequence
  Description of Artificial Sequence: Synthetic oligonucleotide
  Sense strand starting at position 3689 of SEQ ID NO: 1885001
ugaagucagcauuguugau

SEQ ID NO: 2308469 - RNA, 19 nt, Artificial Sequence
  Description of Artificial Sequence: Synthetic oligonucleotide
  Antisense strand to SEQ ID NO: 2308468
aucaacaaugcugacuuca

SEQ ID NO: 2308470 - RNA, 19 nt, Artificial Sequence
  Description of Artificial Sequence: Synthetic oligonucleotide
  Sense strand starting at position 3698 of SEQ ID NO: 1885001
cauuguugauuggcuggaa

SEQ ID NO: 2308471 - RNA, 19 nt, Artificial Sequence
  Description of Artificial Sequence: Synthetic oligonucleotide
  Antisense strand to SEQ ID NO: 2308470
uuccagccaaucaacaaug

SEQ ID NO: 2308472 - RNA, 19 nt, Artificial Sequence
  Description of Artificial Sequence: Synthetic oligonucleotide
  Sense strand starting at position 3914 of SEQ ID NO: 1885001
aauucuaccugggcugaga

SEQ ID NO: 2308473 - RNA, 19 nt, Artificial Sequence
  Description of Artificial Sequence: Synthetic oligonucleotide
  Antisense strand to SEQ ID NO: 2308472
ucucagcccagguagaauu

SEQ ID NO: 2308474 - RNA, 19 nt, Artificial Sequence
  Description of Artificial Sequence: Synthetic oligonucleotide
  Sense strand starting at position 259 of SEQ ID NO: 1885002
cucugaagcucuuuaauga

SEQ ID NO: 2308475 - RNA, 19 nt, Artificial Sequence
  Description of Artificial Sequence: Synthetic oligonucleotide
  Antisense strand to SEQ ID NO: 2308474
ucauuaaagagcuucagag

SEQ ID NO: 2308476 - RNA, 19 nt, Artificial Sequence
  Description of Artificial Sequence: Synthetic oligonucleotide
  Sense strand starting at position 260 of SEQ ID NO: 1885002
ucugaagcucuuuaaugaa

SEQ ID NO: 2308477 - RNA, 19 nt, Artificial Sequence
  Description of Artificial Sequence: Synthetic oligonucleotide
  Antisense strand to SEQ ID NO: 2308476
uucauuaaagagcuucaga

SEQ ID NO: 2308478 - RNA, 19 nt, Artificial Sequence
  Description of Artificial Sequence: Synthetic oligonucleotide
  Sense strand starting at position 320 of SEQ ID NO: 1885002
agcacacugaggcaagauu

SEQ ID NO: 2308479 - RNA, 19 nt, Artificial Sequence
  Description of Artificial Sequence: Synthetic oligonucleotide
  Antisense strand to SEQ ID NO: 2308478
aaucuugccucagugugcu

SEQ ID NO: 2308480 - RNA, 19 nt, Artificial Sequence
  Description of Artificial Sequence: Synthetic oligonucleotide
  Sense strand starting at position 331 of SEQ ID NO: 1885002
gcaagauuccugggaggag

SEQ ID NO: 2308481 - RNA, 19 nt, Artificial Sequence
  Description of Artificial Sequence: Synthetic oligonucleotide
  Antisense strand to SEQ ID NO: 2308480
cuccucccaggaaucuugc

SEQ ID NO: 2308482 - RNA, 19 nt, Artificial Sequence
  Description of Artificial Sequence: Synthetic oligonucleotide
  Sense strand starting at position 343 of SEQ ID NO: 1885002
ggaggagagcuaugagcaa

SEQ ID NO: 2308483 - RNA, 19 nt, Artificial Sequence
  Description of Artificial Sequence: Synthetic oligonucleotide
  Antisense strand to SEQ ID NO: 2308482
uugcucauagcucuccucc

SEQ ID NO: 2308484 - RNA, 19 nt, Artificial Sequence
  Description of Artificial Sequence: Synthetic oligonucleotide
  Sense strand starting at position 503 of SEQ ID NO: 1885002
gugacaugauguuuagaga

SEQ ID NO: 2308485 - RNA, 19 nt, Artificial Sequence
  Description of Artificial Sequence: Synthetic oligonucleotide
  Antisense strand to SEQ ID NO: 2308484
ucucuaaacaucaugucac

SEQ ID NO: 2308486 - RNA, 19 nt, Artificial Sequence
  Description of Artificial Sequence: Synthetic oligonucleotide
  Sense strand starting at position 563 of SEQ ID NO: 1885002
gcuuccaugguaggaaaua

SEQ ID NO: 2308487 - RNA, 19 nt, Artificial Sequence
  Description of Artificial Sequence: Synthetic oligonucleotide
  Antisense strand to SEQ ID NO: 2308486
uauuuccuaccauggaagc

SEQ ID NO: 2308488 - RNA, 19 nt, Artificial Sequence
  Description of Artificial Sequence: Synthetic oligonucleotide
  Sense strand starting at position 640 of SEQ ID NO: 1885002
uuaugaggucauggaccau

SEQ ID NO: 2308489 - RNA, 19 nt, Artificial Sequence
  Description of Artificial Sequence: Synthetic oligonucleotide
  Antisense strand to SEQ ID NO: 2308488
augguccaugaccucauaa

SEQ ID NO: 2308490 - RNA, 19 nt, Artificial Sequence
  Description of Artificial Sequence: Synthetic oligonucleotide
  Sense strand starting at position 748 of SEQ ID NO: 1885002
gggagaauugcagguaaga

SEQ ID NO: 2308491 - RNA, 19 nt, Artificial Sequence
  Description of Artificial Sequence: Synthetic oligonucleotide
  Antisense strand to SEQ ID NO: 2308490
ucuuaccugcaauucuccc

SEQ ID NO: 2308492 - RNA, 19 nt, Artificial Sequence
  Description of Artificial Sequence: Synthetic oligonucleotide
  Sense strand starting at position 757 of SEQ ID NO: 1885002
gcagguaagagaugguaga

SEQ ID NO: 2308493 - RNA, 19 nt, Artificial Sequence
  Description of Artificial Sequence: Synthetic oligonucleotide
  Antisense strand to SEQ ID NO: 2308492
ucuaccaucucuuaccugc

SEQ ID NO: 2308494 - RNA, 19 nt, Artificial Sequence
  Description of Artificial Sequence: Synthetic oligonucleotide
  Sense strand starting at position 814 of SEQ ID NO: 1885002
gaggauaucuggguuuggu

SEQ ID NO: 2308495 - RNA, 19 nt, Artificial Sequence
  Description of Artificial Sequence: Synthetic oligonucleotide
  Antisense strand to SEQ ID NO: 2308494
accaaacccagauauccuc

SEQ ID NO: 2308496 - RNA, 19 nt, Artificial Sequence
  Description of Artificial Sequence: Synthetic oligonucleotide
  Sense strand starting at position 994 of SEQ ID NO: 1885002
agccuuccauccucagaga

SEQ ID NO: 2308497 - RNA, 19 nt, Artificial Sequence
  Description of Artificial Sequence: Synthetic oligonucleotide
  Antisense strand to SEQ ID NO: 2308496
ucucugaggauggaaggcu

SEQ ID NO: 2308498 - RNA, 19 nt, Artificial Sequence
  Description of Artificial Sequence: Synthetic oligonucleotide
  Sense strand starting at position 995 of SEQ ID NO: 1885002
gccuuccauccucagagaa

SEQ ID NO: 2308499 - RNA, 19 nt, Artificial Sequence
  Description of Artificial Sequence: Synthetic oligonucleotide
  Antisense strand to SEQ ID NO: 2308498
uucucugaggauggaaggc

SEQ ID NO: 2308500 - RNA, 19 nt, Artificial Sequence
  Description of Artificial Sequence: Synthetic oligonucleotide
  Sense strand starting at position 1007 of SEQ ID NO: 1885002
cagagaaguuucuuuggua

SEQ ID NO: 2308501 - RNA, 19 nt, Artificial Sequence
  Description of Artificial Sequence: Synthetic oligonucleotide
  Antisense strand to SEQ ID NO: 2308500
uaccaaagaaacuucucug

SEQ ID NO: 2308502 - RNA, 19 nt, Artificial Sequence
  Description of Artificial Sequence: Synthetic oligonucleotide
  Sense strand starting at position 1008 of SEQ ID NO: 1885002
agagaaguuucuuugguau

SEQ ID NO: 2308503 - RNA, 19 nt, Artificial Sequence
  Description of Artificial Sequence: Synthetic oligonucleotide
  Antisense strand to SEQ ID NO: 2308502
auaccaaagaaacuucucu

SEQ ID NO: 2308504 - RNA, 19 nt, Artificial Sequence
  Description of Artificial Sequence: Synthetic oligonucleotide
  Sense strand starting at position 1099 of SEQ ID NO: 1885002
auuugcuugaugugguauu

SEQ ID NO: 2308505 - RNA, 19 nt, Artificial Sequence
  Description of Artificial Sequence: Synthetic oligonucleotide
  Antisense strand to SEQ ID NO: 2308504
aauaccacaucaagcaaau

SEQ ID NO: 2308506 - RNA, 19 nt, Artificial Sequence
  Description of Artificial Sequence: Synthetic oligonucleotide
  Sense strand starting at position 1112 of SEQ ID NO: 1885002
gguauuccauaaguucuaa

SEQ ID NO: 2308507 - RNA, 19 nt, Artificial Sequence
  Description of Artificial Sequence: Synthetic oligonucleotide
  Antisense strand to SEQ ID NO: 2308506
uuagaacuuauggaauacc

SEQ ID NO: 2308508 - RNA, 19 nt, Artificial Sequence
  Description of Artificial Sequence: Synthetic oligonucleotide
  Sense strand starting at position 1125 of SEQ ID NO: 1885002
uucuaauagccaugagaug

SEQ ID NO: 2308509 - RNA, 19 nt, Artificial Sequence
  Description of Artificial Sequence: Synthetic oligonucleotide
  Antisense strand to SEQ ID NO: 2308508
caucucauggcuauuagaa

SEQ ID NO: 2308510 - RNA, 19 nt, Artificial Sequence
  Description of Artificial Sequence: Synthetic oligonucleotide
  Sense strand starting at position 1269 of SEQ ID NO: 1885002
caggauacgcauuaucuua

SEQ ID NO: 2308511 - RNA, 19 nt, Artificial Sequence
  Description of Artificial Sequence: Synthetic oligonucleotide
  Antisense strand to SEQ ID NO: 2308510
uaagauaaugcguauccug

SEQ ID NO: 2308512 - RNA, 19 nt, Artificial Sequence
  Description of Artificial Sequence: Synthetic oligonucleotide
  Sense strand starting at position 1307 of SEQ ID NO: 1885002
accugugguuauuugcaga

SEQ ID NO: 2308513 - RNA, 19 nt, Artificial Sequence
  Description of Artificial Sequence: Synthetic oligonucleotide
  Antisense strand to SEQ ID NO: 2308512
ucugcaaauaaccacaggu

SEQ ID NO: 2308514 - RNA, 19 nt, Artificial Sequence
  Description of Artificial Sequence: Synthetic oligonucleotide
  Sense strand starting at position 1429 of SEQ ID NO: 1885002
gcauaagacccagaucuuu

SEQ ID NO: 2308515 - RNA, 19 nt, Artificial Sequence
  Description of Artificial Sequence: Synthetic oligonucleotide
  Antisense strand to SEQ ID NO: 2308514
aaagaucugggucuuaugc

SEQ ID NO: 2308516 - RNA, 19 nt, Artificial Sequence
  Description of Artificial Sequence: Synthetic oligonucleotide
  Sense strand starting at position 1545 of SEQ ID NO: 1885002
gagaaugaggucugcauca

SEQ ID NO: 2308517 - RNA, 19 nt, Artificial Sequence
  Description of Artificial Sequence: Synthetic oligonucleotide
  Antisense strand to SEQ ID NO: 2308516
ugaugcagaccucauucuc

SEQ ID NO: 2308518 - RNA, 19 nt, Artificial Sequence
  Description of Artificial Sequence: Synthetic oligonucleotide
  Sense strand starting at position 1760 of SEQ ID NO: 1885002
ucagaaaucuggcuacaaa

SEQ ID NO: 2308519 - RNA, 19 nt, Artificial Sequence
  Description of Artificial Sequence: Synthetic oligonucleotide
  Antisense strand to SEQ ID NO: 2308518
uuuguagccagauuucuga

SEQ ID NO: 2308520 - RNA, 19 nt, Artificial Sequence
  Description of Artificial Sequence: Synthetic oligonucleotide
  Sense strand starting at position 1771 of SEQ ID NO: 1885002
gcuacaaagugauuuguuu

SEQ ID NO: 2308521 - RNA, 19 nt, Artificial Sequence
  Description of Artificial Sequence: Synthetic oligonucleotide
  Antisense strand to SEQ ID NO: 2308520
aaacaaaucacuuuguagc

SEQ ID NO: 2308522 - RNA, 19 nt, Artificial Sequence
  Description of Artificial Sequence: Synthetic oligonucleotide
  Sense strand starting at position 1775 of SEQ ID NO: 1885002
caaagugauuuguuugcua

SEQ ID NO: 2308523 - RNA, 19 nt, Artificial Sequence
  Description of Artificial Sequence: Synthetic oligonucleotide
  Antisense strand to SEQ ID NO: 2308522
uagcaaacaaaucacuuug

SEQ ID NO: 2308524 - RNA, 19 nt, Artificial Sequence
  Description of Artificial Sequence: Synthetic oligonucleotide
  Sense strand starting at position 1777 of SEQ ID NO: 1885002
aagugauuuguuugcuauu

SEQ ID NO: 2308525 - RNA, 19 nt, Artificial Sequence
  Description of Artificial Sequence: Synthetic oligonucleotide
  Antisense strand to SEQ ID NO: 2308524
aauagcaaacaaaucacuu

SEQ ID NO: 2308526 - RNA, 19 nt, Artificial Sequence
  Description of Artificial Sequence: Synthetic oligonucleotide
  Sense strand starting at position 2181 of SEQ ID NO: 1885002
uagaaauaguguccaaagu

SEQ ID NO: 2308527 - RNA, 19 nt, Artificial Sequence
  Description of Artificial Sequence: Synthetic oligonucleotide
  Antisense strand to SEQ ID NO: 2308526
acuuuggacacuauuucua

SEQ ID NO: 2308528 - RNA, 19 nt, Artificial Sequence
  Description of Artificial Sequence: Synthetic oligonucleotide
  Sense strand starting at position 2182 of SEQ ID NO: 1885002
agaaauaguguccaaaguu

SEQ ID NO: 2308529 - RNA, 19 nt, Artificial Sequence
  Description of Artificial Sequence: Synthetic oligonucleotide
  Antisense strand to SEQ ID NO: 2308528
aacuuuggacacuauuucu

SEQ ID NO: 2308530 - RNA, 19 nt, Artificial Sequence
  Description of Artificial Sequence: Synthetic oligonucleotide
  Sense strand starting at position 2263 of SEQ ID NO: 1885002
agauguugaauacggugaa

SEQ ID NO: 2308531 - RNA, 19 nt, Artificial Sequence
  Description of Artificial Sequence: Synthetic oligonucleotide
  Antisense strand to SEQ ID NO: 2308530
uucaccguauucaacaucu

SEQ ID NO: 2308532 - RNA, 19 nt, Artificial Sequence
  Description of Artificial Sequence: Synthetic oligonucleotide
  Sense strand starting at position 2882 of SEQ ID NO: 1885002
cuuaaacucuggcucaaga

SEQ ID NO: 2308533 - RNA, 19 nt, Artificial Sequence
  Description of Artificial Sequence: Synthetic oligonucleotide
  Antisense strand to SEQ ID NO: 2308532
ucuugagccagaguuuaag

SEQ ID NO: 2308534 - RNA, 19 nt, Artificial Sequence
  Description of Artificial Sequence: Synthetic oligonucleotide
  Sense strand starting at position 2971 of SEQ ID NO: 1885002
gagguaggucaguauuauu

SEQ ID NO: 2308535 - RNA, 19 nt, Artificial Sequence
  Description of Artificial Sequence: Synthetic oligonucleotide
  Antisense strand to SEQ ID NO: 2308534
aauaauacugaccuaccuc

SEQ ID NO: 2308536 - RNA, 19 nt, Artificial Sequence
  Description of Artificial Sequence: Synthetic oligonucleotide
  Sense strand starting at position 3052 of SEQ ID NO: 1885002
uuaucaaucaguugaggag

SEQ ID NO: 2308537 - RNA, 19 nt, Artificial Sequence
  Description of Artificial Sequence: Synthetic oligonucleotide
  Antisense strand to SEQ ID NO: 2308536
cuccucaacugauugauaa

SEQ ID NO: 2308538 - RNA, 19 nt, Artificial Sequence
  Description of Artificial Sequence: Synthetic oligonucleotide
  Sense strand starting at position 3095 of SEQ ID NO: 1885002
cucgauucuuguuccauuu

SEQ ID NO: 2308539 - RNA, 19 nt, Artificial Sequence
  Description of Artificial Sequence: Synthetic oligonucleotide
  Antisense strand to SEQ ID NO: 2308538
aaauggaacaagaaucgag

SEQ ID NO: 2308540 - RNA, 19 nt, Artificial Sequence
  Description of Artificial Sequence: Synthetic oligonucleotide
  Sense strand starting at position 3197 of SEQ ID NO: 1885002
ucaauaacugaaggguauu

SEQ ID NO: 2308541 - RNA, 19 nt, Artificial Sequence
  Description of Artificial Sequence: Synthetic oligonucleotide
  Antisense strand to SEQ ID NO: 2308540
aauacccuucaguuauuga

SEQ ID NO: 2308542 - RNA, 19 nt, Artificial Sequence
  Description of Artificial Sequence: Synthetic oligonucleotide
  Sense strand starting at position 3236 of SEQ ID NO: 1885002
ucuaguauaaugugaggaa

SEQ ID NO: 2308543 - RNA, 19 nt, Artificial Sequence
  Description of Artificial Sequence: Synthetic oligonucleotide
  Antisense strand to SEQ ID NO: 2308542
uuccucacauuauacuaga

SEQ ID NO: 2308544 - RNA, 19 nt, Artificial Sequence
  Description of Artificial Sequence: Synthetic oligonucleotide
  Sense strand starting at position 3281 of SEQ ID NO: 1885002
agucauguuauagauguuu

SEQ ID NO: 2308545 - RNA, 19 nt, Artificial Sequence
  Description of Artificial Sequence: Synthetic oligonucleotide
  Antisense strand to SEQ ID NO: 2308544
aaacaucuauaacaugacu

SEQ ID NO: 2308546 - RNA, 19 nt, Artificial Sequence
  Description of Artificial Sequence: Synthetic oligonucleotide
  Sense strand starting at position 3766 of SEQ ID NO: 1885002
ccuccugugagagauguaa

SEQ ID NO: 2308547 - RNA, 19 nt, Artificial Sequence
  Description of Artificial Sequence: Synthetic oligonucleotide
  Antisense strand to SEQ ID NO: 2308546
uuacaucucucacaggagg

SEQ ID NO: 2308548 - RNA, 19 nt, Artificial Sequence
  Description of Artificial Sequence: Synthetic oligonucleotide
  Sense strand starting at position 3768 of SEQ ID NO: 1885002
uccugugagagauguaacu

SEQ ID NO: 2308549 - RNA, 19 nt, Artificial Sequence
  Description of Artificial Sequence: Synthetic oligonucleotide
  Antisense strand to SEQ ID NO: 2308548
aguuacaucucucacagga

SEQ ID NO: 2308550 - RNA, 19 nt, Artificial Sequence
  Description of Artificial Sequence: Synthetic oligonucleotide
  Sense strand starting at position 3770 of SEQ ID NO: 1885002
cugugagagauguaacucu

SEQ ID NO: 2308551 - RNA, 19 nt, Artificial Sequence
  Description of Artificial Sequence: Synthetic oligonucleotide
  Antisense strand to SEQ ID NO: 2308550
agaguuacaucucucacag

SEQ ID NO: 2308552 - RNA, 19 nt, Artificial Sequence
  Description of Artificial Sequence: Synthetic oligonucleotide
  Sense strand starting at position 3858 of SEQ ID NO: 1885002
gguagaaaucauuaugucu

SEQ ID NO: 2308553 - RNA, 19 nt, Artificial Sequence
  Description of Artificial Sequence: Synthetic oligonucleotide
  Antisense strand to SEQ ID NO: 2308552
agacauaaugauuucuacc

SEQ ID NO: 2308554 - RNA, 19 nt, Artificial Sequence
  Description of Artificial Sequence: Synthetic oligonucleotide
  Sense strand starting at position 325 of SEQ ID NO: 1885003
caccaaugugacuggacuu

SEQ ID NO: 2308555 - RNA, 19 nt, Artificial Sequence
  Description of Artificial Sequence: Synthetic oligonucleotide
  Antisense strand to SEQ ID NO: 2308554
aaguccagucacauuggug

SEQ ID NO: 2308556 - RNA, 19 nt, Artificial Sequence
  Description of Artificial Sequence: Synthetic oligonucleotide
  Sense strand starting at position 431 of SEQ ID NO: 1885003
aagagaguacuuugcccau

SEQ ID NO: 2308557 - RNA, 19 nt, Artificial Sequence
  Description of Artificial Sequence: Synthetic oligonucleotide
  Antisense strand to SEQ ID NO: 2308556
augggcaaaguacucucuu

SEQ ID NO: 2308558 - RNA, 19 nt, Artificial Sequence
  Description of Artificial Sequence: Synthetic oligonucleotide
  Sense strand starting at position 482 of SEQ ID NO: 1885003
uaggguaggaaauguacua

SEQ ID NO: 2308559 - RNA, 19 nt, Artificial Sequence
  Description of Artificial Sequence: Synthetic oligonucleotide
  Antisense strand to SEQ ID NO: 2308558
uaguacauuuccuacccua

SEQ ID NO: 2308560 - RNA, 19 nt, Artificial Sequence
  Description of Artificial Sequence: Synthetic oligonucleotide
  Sense strand starting at position 599 of SEQ ID NO: 1885003
ucaacuaagugucuggauu

SEQ ID NO: 2308561 - RNA, 19 nt, Artificial Sequence
  Description of Artificial Sequence: Synthetic oligonucleotide
  Antisense strand to SEQ ID NO: 2308560
aauccagacacuuaguuga

SEQ ID NO: 2308562 - RNA, 19 nt, Artificial Sequence
  Description of Artificial Sequence: Synthetic oligonucleotide
  Sense strand starting at position 600 of SEQ ID NO: 1885003
caacuaagugucuggauug

SEQ ID NO: 2308563 - RNA, 19 nt, Artificial Sequence
  Description of Artificial Sequence: Synthetic oligonucleotide
  Antisense strand to SEQ ID NO: 2308562
caauccagacacuuaguug

SEQ ID NO: 2308564 - RNA, 19 nt, Artificial Sequence
  Description of Artificial Sequence: Synthetic oligonucleotide
  Sense strand starting at position 606 of SEQ ID NO: 1885003
agugucuggauugaaugua

SEQ ID NO: 2308565 - RNA, 19 nt, Artificial Sequence
  Description of Artificial Sequence: Synthetic oligonucleotide
  Antisense strand to SEQ ID NO: 2308564
uacauucaauccagacacu

SEQ ID NO: 2308566 - RNA, 19 nt, Artificial Sequence
  Description of Artificial Sequence: Synthetic oligonucleotide
  Sense strand starting at position 784 of SEQ ID NO: 1885003
aagcuaugucaagaagucu

SEQ ID NO: 2308567 - RNA, 19 nt, Artificial Sequence
  Description of Artificial Sequence: Synthetic oligonucleotide
  Antisense strand to SEQ ID NO: 2308566
agacuucuugacauagcuu

SEQ ID NO: 2308568 - RNA, 19 nt, Artificial Sequence
  Description of Artificial Sequence: Synthetic oligonucleotide
  Sense strand starting at position 797 of SEQ ID NO: 1885003
aagucuaugggaugaagca

SEQ ID NO: 2308569 - RNA, 19 nt, Artificial Sequence
  Description of Artificial Sequence: Synthetic oligonucleotide
  Antisense strand to SEQ ID NO: 2308568
ugcuucaucccauagacuu

SEQ ID NO: 2308570 - RNA, 19 nt, Artificial Sequence
  Description of Artificial Sequence: Synthetic oligonucleotide
  Sense strand starting at position 818 of SEQ ID NO: 1885003
ucuguugugauggauauag

SEQ ID NO: 2308571 - RNA, 19 nt, Artificial Sequence
  Description of Artificial Sequence: Synthetic oligonucleotide
  Antisense strand to SEQ ID NO: 2308570
cuauauccaucacaacaga

SEQ ID NO: 2308572 - RNA, 19 nt, Artificial Sequence
  Description of Artificial Sequence: Synthetic oligonucleotide
  Sense strand starting at position 820 of SEQ ID NO: 1885003
uguugugauggauauagua

SEQ ID NO: 2308573 - RNA, 19 nt, Artificial Sequence
  Description of Artificial Sequence: Synthetic oligonucleotide
  Antisense strand to SEQ ID NO: 2308572
uacuauauccaucacaaca

SEQ ID NO: 2308574 - RNA, 19 nt, Artificial Sequence
  Description of Artificial Sequence: Synthetic oligonucleotide
  Sense strand starting at position 854 of SEQ ID NO: 1885003
ggcugaguucuucagagug

SEQ ID NO: 2308575 - RNA, 19 nt, Artificial Sequence
  Description of Artificial Sequence: Synthetic oligonucleotide
  Antisense strand to SEQ ID NO: 2308574
cacucugaagaacucagcc

SEQ ID NO: 2308576 - RNA, 19 nt, Artificial Sequence
  Description of Artificial Sequence: Synthetic oligonucleotide
  Sense strand starting at position 918 of SEQ ID NO: 1885003
acccaauuugcugguguua

SEQ ID NO: 2308577 - RNA, 19 nt, Artificial Sequence
  Description of Artificial Sequence: Synthetic oligonucleotide
  Antisense strand to SEQ ID NO: 2308576
uaacaccagcaaauugggu

SEQ ID NO: 2308578 - RNA, 19 nt, Artificial Sequence
  Description of Artificial Sequence: Synthetic oligonucleotide
  Sense strand starting at position 932 of SEQ ID NO: 1885003
uguuauaagcuuggaggaa

SEQ ID NO: 2308579 - RNA, 19 nt, Artificial Sequence
  Description of Artificial Sequence: Synthetic oligonucleotide
  Antisense strand to SEQ ID NO: 2308578
uuccuccaagcuuauaaca

SEQ ID NO: 2308580 - RNA, 19 nt, Artificial Sequence
  Description of Artificial Sequence: Synthetic oligonucleotide
  Sense strand starting at position 980 of SEQ ID NO: 1885003
ggaguuucugauuagucug

SEQ ID NO: 2308581 - RNA, 19 nt, Artificial Sequence
  Description of Artificial Sequence: Synthetic oligonucleotide
  Antisense strand to SEQ ID NO: 2308580
cagacuaaucagaaacucc

SEQ ID NO: 2308582 - RNA, 19 nt, Artificial Sequence
  Description of Artificial Sequence: Synthetic oligonucleotide
  Sense strand starting at position 1147 of SEQ ID NO: 1885003
ugugaauauagcgaugcaa

SEQ ID NO: 2308583 - RNA, 19 nt, Artificial Sequence
  Description of Artificial Sequence: Synthetic oligonucleotide
  Antisense strand to SEQ ID NO: 2308582
uugcaucgcuauauucaca

SEQ ID NO: 2308584 - RNA, 19 nt, Artificial Sequence
  Description of Artificial Sequence: Synthetic oligonucleotide
  Sense strand starting at position 1311 of SEQ ID NO: 1885003
ugugucauucuagcuuguu

SEQ ID NO: 2308585 - RNA, 19 nt, Artificial Sequence
  Description of Artificial Sequence: Synthetic oligonucleotide
  Antisense strand to SEQ ID NO: 2308584
aacaagcuagaaugacaca

SEQ ID NO: 2308586 - RNA, 19 nt, Artificial Sequence
  Description of Artificial Sequence: Synthetic oligonucleotide
  Sense strand starting at position 1499 of SEQ ID NO: 1885003
guuacaugagacugacaua

SEQ ID NO: 2308587 - RNA, 19 nt, Artificial Sequence
  Description of Artificial Sequence: Synthetic oligonucleotide
  Antisense strand to SEQ ID NO: 2308586
uaugucagucucauguaac

SEQ ID NO: 2308588 - RNA, 19 nt, Artificial Sequence
  Description of Artificial Sequence: Synthetic oligonucleotide
  Sense strand starting at position 1510 of SEQ ID NO: 1885003
cugacauaacagugucaag

SEQ ID NO: 2308589 - RNA, 19 nt, Artificial Sequence
  Description of Artificial Sequence: Synthetic oligonucleotide
  Antisense strand to SEQ ID NO: 2308588
cuugacacuguuaugucag

SEQ ID NO: 2308590 - RNA, 19 nt, Artificial Sequence
  Description of Artificial Sequence: Synthetic oligonucleotide
  Sense strand starting at position 1571 of SEQ ID NO: 1885003
agaguuuaauuuggaggaa

SEQ ID NO: 2308591 - RNA, 19 nt, Artificial Sequence
  Description of Artificial Sequence: Synthetic oligonucleotide
  Antisense strand to SEQ ID NO: 2308590
uuccuccaaauuaaacucu

SEQ ID NO: 2308592 - RNA, 19 nt, Artificial Sequence
  Description of Artificial Sequence: Synthetic oligonucleotide
  Sense strand starting at position 1572 of SEQ ID NO: 1885003
gaguuuaauuuggaggaag

SEQ ID NO: 2308593 - RNA, 19 nt, Artificial Sequence
  Description of Artificial Sequence: Synthetic oligonucleotide
  Antisense strand to SEQ ID NO: 2308592
cuuccuccaaauuaaacuc

SEQ ID NO: 2308594 - RNA, 19 nt, Artificial Sequence
  Description of Artificial Sequence: Synthetic oligonucleotide
  Sense strand starting at position 1676 of SEQ ID NO: 1885003
gcaauaauaucuguaugga

SEQ ID NO: 2308595 - RNA, 19 nt, Artificial Sequence
  Description of Artificial Sequence: Synthetic oligonucleotide
  Antisense strand to SEQ ID NO: 2308594
uccauacagauauuauugc

SEQ ID NO: 2308596 - RNA, 19 nt, Artificial Sequence
  Description of Artificial Sequence: Synthetic oligonucleotide
  Sense strand starting at position 1696 of SEQ ID NO: 1885003
uuucuauugcgagaaauua

SEQ ID NO: 2308597 - RNA, 19 nt, Artificial Sequence
  Description of Artificial Sequence: Synthetic oligonucleotide
  Antisense strand to SEQ ID NO: 2308596
uaauuucucgcaauagaaa

SEQ ID NO: 2308598 - RNA, 19 nt, Artificial Sequence
  Description of Artificial Sequence: Synthetic oligonucleotide
  Sense strand starting at position 1822 of SEQ ID NO: 1885003
augugaaucuuggugaaua

SEQ ID NO: 2308599 - RNA, 19 nt, Artificial Sequence
  Description of Artificial Sequence: Synthetic oligonucleotide
  Antisense strand to SEQ ID NO: 2308598
uauucaccaagauucacau

SEQ ID NO: 2308600 - RNA, 19 nt, Artificial Sequence
  Description of Artificial Sequence: Synthetic oligonucleotide
  Sense strand starting at position 1884 of SEQ ID NO: 1885003
cuugauguuccaggaauga

SEQ ID NO: 2308601 - RNA, 19 nt, Artificial Sequence
  Description of Artificial Sequence: Synthetic oligonucleotide
  Antisense strand to SEQ ID NO: 2308600
ucauuccuggaacaucaag

SEQ ID NO: 2308602 - RNA, 19 nt, Artificial Sequence
  Description of Artificial Sequence: Synthetic oligonucleotide
  Sense strand starting at position 1992 of SEQ ID NO: 1885003
aaccaaacuccuugggagu

SEQ ID NO: 2308603 - RNA, 19 nt, Artificial Sequence
  Description of Artificial Sequence: Synthetic oligonucleotide
  Antisense strand to SEQ ID NO: 2308602
acucccaaggaguuugguu

SEQ ID NO: 2308604 - RNA, 19 nt, Artificial Sequence
  Description of Artificial Sequence: Synthetic oligonucleotide
  Sense strand starting at position 2186 of SEQ ID NO: 1885003
gguaacagauuggugcaau

SEQ ID NO: 2308605 - RNA, 19 nt, Artificial Sequence
  Description of Artificial Sequence: Synthetic oligonucleotide
  Antisense strand to SEQ ID NO: 2308604
auugcaccaaucuguuacc

SEQ ID NO: 2308606 - RNA, 19 nt, Artificial Sequence
  Description of Artificial Sequence: Synthetic oligonucleotide
  Sense strand starting at position 2275 of SEQ ID NO: 1885003
aaggauaugcuuuguuuag

SEQ ID NO: 2308607 - RNA, 19 nt, Artificial Sequence
  Description of Artificial Sequence: Synthetic oligonucleotide
  Antisense strand to SEQ ID NO: 2308606
cuaaacaaagcauauccuu

SEQ ID NO: 2308608 - RNA, 19 nt, Artificial Sequence
  Description of Artificial Sequence: Synthetic oligonucleotide
  Sense strand starting at position 2277 of SEQ ID NO: 1885003
ggauaugcuuuguuuagga

SEQ ID NO: 2308609 - RNA, 19 nt, Artificial Sequence
  Description of Artificial Sequence: Synthetic oligonucleotide
  Antisense strand to SEQ ID NO: 2308608
uccuaaacaaagcauaucc

SEQ ID NO: 2308610 - RNA, 19 nt, Artificial Sequence
  Description of Artificial Sequence: Synthetic oligonucleotide
  Sense strand starting at position 2279 of SEQ ID NO: 1885003
auaugcuuuguuuaggaua

SEQ ID NO: 2308611 - RNA, 19 nt, Artificial Sequence
  Description of Artificial Sequence: Synthetic oligonucleotide
  Antisense strand to SEQ ID NO: 2308610
uauccuaaacaaagcauau

SEQ ID NO: 2308612 - RNA, 19 nt, Artificial Sequence
  Description of Artificial Sequence: Synthetic oligonucleotide
  Sense strand starting at position 2369 of SEQ ID NO: 1885003
guagcuaagcuuuaggaaa

SEQ ID NO: 2308613 - RNA, 19 nt, Artificial Sequence
  Description of Artificial Sequence: Synthetic oligonucleotide
  Antisense strand to SEQ ID NO: 2308612
uuuccuaaagcuuagcuac

SEQ ID NO: 2308614 - RNA, 19 nt, Artificial Sequence
  Description of Artificial Sequence: Synthetic oligonucleotide
  Sense strand starting at position 2449 of SEQ ID NO: 1885003
ggauauaaauaggagagga

SEQ ID NO: 2308615 - RNA, 19 nt, Artificial Sequence
  Description of Artificial Sequence: Synthetic oligonucleotide
  Antisense strand to SEQ ID NO: 2308614
uccucuccuauuuauaucc

SEQ ID NO: 2308616 - RNA, 19 nt, Artificial Sequence
  Description of Artificial Sequence: Synthetic oligonucleotide
  Sense strand starting at position 2552 of SEQ ID NO: 1885003
guacuauugcaauaauaug

SEQ ID NO: 2308617 - RNA, 19 nt, Artificial Sequence
  Description of Artificial Sequence: Synthetic oligonucleotide
  Antisense strand to SEQ ID NO: 2308616
cauauuauugcaauaguac

SEQ ID NO: 2308618 - RNA, 19 nt, Artificial Sequence
  Description of Artificial Sequence: Synthetic oligonucleotide
  Sense strand starting at position 3372 of SEQ ID NO: 1885003
augugugaauccuugaauc

SEQ ID NO: 2308619 - RNA, 19 nt, Artificial Sequence
  Description of Artificial Sequence: Synthetic oligonucleotide
  Antisense strand to SEQ ID NO: 2308618
gauucaaggauucacacau

SEQ ID NO: 2308620 - RNA, 19 nt, Artificial Sequence
  Description of Artificial Sequence: Synthetic oligonucleotide
  Sense strand starting at position 3374 of SEQ ID NO: 1885003
gugugaauccuugaaucaa

SEQ ID NO: 2308621 - RNA, 19 nt, Artificial Sequence
  Description of Artificial Sequence: Synthetic oligonucleotide
  Antisense strand to SEQ ID NO: 2308620
uugauucaaggauucacac

SEQ ID NO: 2308622 - RNA, 19 nt, Artificial Sequence
  Description of Artificial Sequence: Synthetic oligonucleotide
  Sense strand starting at position 3687 of SEQ ID NO: 1885003
cuagaauuauaggcaggua

SEQ ID NO: 2308623 - RNA, 19 nt, Artificial Sequence
  Description of Artificial Sequence: Synthetic oligonucleotide
  Antisense strand to SEQ ID NO: 2308622
uaccugccuauaauucuag

SEQ ID NO: 2308624 - RNA, 19 nt, Artificial Sequence
  Description of Artificial Sequence: Synthetic oligonucleotide
  Sense strand starting at position 3690 of SEQ ID NO: 1885003
gaauuauaggcagguacca

SEQ ID NO: 2308625 - RNA, 19 nt, Artificial Sequence
  Description of Artificial Sequence: Synthetic oligonucleotide
  Antisense strand to SEQ ID NO: 2308624
ugguaccugccuauaauuc

SEQ ID NO: 2308626 - RNA, 19 nt, Artificial Sequence
  Description of Artificial Sequence: Synthetic oligonucleotide
  Sense strand starting at position 3897 of SEQ ID NO: 1885003
uuccauuagcauggauaac

SEQ ID NO: 2308627 - RNA, 19 nt, Artificial Sequence
  Description of Artificial Sequence: Synthetic oligonucleotide
  Antisense strand to SEQ ID NO: 2308626
guuauccaugcuaauggaa

SEQ ID NO: 2308628 - RNA, 19 nt, Artificial Sequence
  Description of Artificial Sequence: Synthetic oligonucleotide
  Sense strand starting at position 3924 of SEQ ID NO: 1885003
gacuaugaggcauggucau

SEQ ID NO: 2308629 - RNA, 19 nt, Artificial Sequence
  Description of Artificial Sequence: Synthetic oligonucleotide
  Antisense strand to SEQ ID NO: 2308628
augaccaugccucauaguc

SEQ ID NO: 2308630 - RNA, 19 nt, Artificial Sequence
  Description of Artificial Sequence: Synthetic oligonucleotide
  Sense strand starting at position 3959 of SEQ ID NO: 1885003
uuugacaguuacuuuguaa

SEQ ID NO: 2308631 - RNA, 19 nt, Artificial Sequence
  Description of Artificial Sequence: Synthetic oligonucleotide
  Antisense strand to SEQ ID NO: 2308630
uuacaaaguaacugucaaa

SEQ ID NO: 2308632 - RNA, 19 nt, Artificial Sequence
  Description of Artificial Sequence: Synthetic oligonucleotide
  Sense strand starting at position 3962 of SEQ ID NO: 1885003
gacaguuacuuuguaauga

SEQ ID NO: 2308633 - RNA, 19 nt, Artificial Sequence
  Description of Artificial Sequence: Synthetic oligonucleotide
  Antisense strand to SEQ ID NO: 2308632
ucauuacaaaguaacuguc

SEQ ID NO: 2308634 - RNA, 19 nt, Artificial Sequence
  Description of Artificial Sequence: Synthetic oligonucleotide
  Sense strand starting at position 104 of SEQ ID NO: 1885004
ucauucuugcaagaugcau

SEQ ID NO: 2308635 - RNA, 19 nt, Artificial Sequence
  Description of Artificial Sequence: Synthetic oligonucleotide
  Antisense strand to SEQ ID NO: 2308634
augcaucuugcaagaauga

SEQ ID NO: 2308636 - RNA, 19 nt, Artificial Sequence
  Description of Artificial Sequence: Synthetic oligonucleotide
  Sense strand starting at position 134 of SEQ ID NO: 1885004
uuauguguugaauauccca

SEQ ID NO: 2308637 - RNA, 19 nt, Artificial Sequence
  Description of Artificial Sequence: Synthetic oligonucleotide
  Antisense strand to SEQ ID NO: 2308636
ugggauauucaacacauaa

SEQ ID NO: 2308638 - RNA, 19 nt, Artificial Sequence
  Description of Artificial Sequence: Synthetic oligonucleotide
  Sense strand starting at position 137 of SEQ ID NO: 1885004
uguguugaauaucccauua

SEQ ID NO: 2308639 - RNA, 19 nt, Artificial Sequence
  Description of Artificial Sequence: Synthetic oligonucleotide
  Antisense strand to SEQ ID NO: 2308638
uaaugggauauucaacaca

SEQ ID NO: 2308640 - RNA, 19 nt, Artificial Sequence
  Description of Artificial Sequence: Synthetic oligonucleotide
  Sense strand starting at position 352 of SEQ ID NO: 1885004
acuggucucugaucacuga

SEQ ID NO: 2308641 - RNA, 19 nt, Artificial Sequence
  Description of Artificial Sequence: Synthetic oligonucleotide
  Antisense strand to SEQ ID NO: 2308640
ucagugaucagagaccagu

SEQ ID NO: 2308642 - RNA, 19 nt, Artificial Sequence
  Description of Artificial Sequence: Synthetic oligonucleotide
  Sense strand starting at position 359 of SEQ ID NO: 1885004
ucugaucacugagcagaau

SEQ ID NO: 2308643 - RNA, 19 nt, Artificial Sequence
  Description of Artificial Sequence: Synthetic oligonucleotide
  Antisense strand to SEQ ID NO: 2308642
auucugcucagugaucaga

SEQ ID NO: 2308644 - RNA, 19 nt, Artificial Sequence
  Description of Artificial Sequence: Synthetic oligonucleotide
  Sense strand starting at position 493 of SEQ ID NO: 1885004
agucuaagaagucggguaa

SEQ ID NO: 2308645 - RNA, 19 nt, Artificial Sequence
  Description of Artificial Sequence: Synthetic oligonucleotide
  Antisense strand to SEQ ID NO: 2308644
uuacccgacuucuuagacu

SEQ ID NO: 2308646 - RNA, 19 nt, Artificial Sequence
  Description of Artificial Sequence: Synthetic oligonucleotide
  Sense strand starting at position 714 of SEQ ID NO: 1885004
ggucuuagugaauagcuau

SEQ ID NO: 2308647 - RNA, 19 nt, Artificial Sequence
  Description of Artificial Sequence: Synthetic oligonucleotide
  Antisense strand to SEQ ID NO: 2308646
auagcuauucacuaagacc

SEQ ID NO: 2308648 - RNA, 19 nt, Artificial Sequence
  Description of Artificial Sequence: Synthetic oligonucleotide
  Sense strand starting at position 720 of SEQ ID NO: 1885004
agugaauagcuauagcuau

SEQ ID NO: 2308649 - RNA, 19 nt, Artificial Sequence
  Description of Artificial Sequence: Synthetic oligonucleotide
  Antisense strand to SEQ ID NO: 2308648
auagcuauagcuauucacu

SEQ ID NO: 2308650 - RNA, 19 nt, Artificial Sequence
  Description of Artificial Sequence: Synthetic oligonucleotide
  Sense strand starting at position 1132 of SEQ ID NO: 1885004
aagcauugguuccucagau

SEQ ID NO: 2308651 - RNA, 19 nt, Artificial Sequence
  Description of Artificial Sequence: Synthetic oligonucleotide
  Antisense strand to SEQ ID NO: 2308650
aucugaggaaccaaugcuu

SEQ ID NO: 2308652 - RNA, 19 nt, Artificial Sequence
  Description of Artificial Sequence: Synthetic oligonucleotide
  Sense strand starting at position 1133 of SEQ ID NO: 1885004
agcauugguuccucagaua

SEQ ID NO: 2308653 - RNA, 19 nt, Artificial Sequence
  Description of Artificial Sequence: Synthetic oligonucleotide
  Antisense strand to SEQ ID NO: 2308652
uaucugaggaaccaaugcu

SEQ ID NO: 2308654 - RNA, 19 nt, Artificial Sequence
  Description of Artificial Sequence: Synthetic oligonucleotide
  Sense strand starting at position 1213 of SEQ ID NO: 1885004
guguucuaaacgucuuugu

SEQ ID NO: 2308655 - RNA, 19 nt, Artificial Sequence
  Description of Artificial Sequence: Synthetic oligonucleotide
  Antisense strand to SEQ ID NO: 2308654
acaaagacguuuagaacac

SEQ ID NO: 2308656 - RNA, 19 nt, Artificial Sequence
  Description of Artificial Sequence: Synthetic oligonucleotide
  Sense strand starting at position 1711 of SEQ ID NO: 1885004
ugcugugugagucacugaa

SEQ ID NO: 2308657 - RNA, 19 nt, Artificial Sequence
  Description of Artificial Sequence: Synthetic oligonucleotide
  Antisense strand to SEQ ID NO: 2308656
uucagugacucacacagca

SEQ ID NO: 2308658 - RNA, 19 nt, Artificial Sequence
  Description of Artificial Sequence: Synthetic oligonucleotide
  Sense strand starting at position 2106 of SEQ ID NO: 1885004
cggaaauauucugcaccaa

SEQ ID NO: 2308659 - RNA, 19 nt, Artificial Sequence
  Description of Artificial Sequence: Synthetic oligonucleotide
  Antisense strand to SEQ ID NO: 2308658
uuggugcagaauauuuccg

SEQ ID NO: 2308660 - RNA, 19 nt, Artificial Sequence
  Description of Artificial Sequence: Synthetic oligonucleotide
  Sense strand starting at position 2121 of SEQ ID NO: 1885004
ccaaaugaaauccgaguga

SEQ ID NO: 2308661 - RNA, 19 nt, Artificial Sequence
  Description of Artificial Sequence: Synthetic oligonucleotide
  Antisense strand to SEQ ID NO: 2308660
ucacucggauuucauuugg

SEQ ID NO: 2308662 - RNA, 19 nt, Artificial Sequence
  Description of Artificial Sequence: Synthetic oligonucleotide
  Sense strand starting at position 2125 of SEQ ID NO: 1885004
augaaauccgagugagguc

SEQ ID NO: 2308663 - RNA, 19 nt, Artificial Sequence
  Description of Artificial Sequence: Synthetic oligonucleotide
  Antisense strand to SEQ ID NO: 2308662
gaccucacucggauuucau

SEQ ID NO: 2308664 - RNA, 19 nt, Artificial Sequence
  Description of Artificial Sequence: Synthetic oligonucleotide
  Sense strand starting at position 2137 of SEQ ID NO: 1885004
ugaggucauuaauuaugaa

SEQ ID NO: 2308665 - RNA, 19 nt, Artificial Sequence
  Description of Artificial Sequence: Synthetic oligonucleotide
  Antisense strand to SEQ ID NO: 2308664
uucauaauuaaugaccuca

SEQ ID NO: 2308666 - RNA, 19 nt, Artificial Sequence
  Description of Artificial Sequence: Synthetic oligonucleotide
  Sense strand starting at position 2279 of SEQ ID NO: 1885004
agagacgaugcgggaaaua

SEQ ID NO: 2308667 - RNA, 19 nt, Artificial Sequence
  Description of Artificial Sequence: Synthetic oligonucleotide
  Antisense strand to SEQ ID NO: 2308666
uauuucccgcaucgucucu

SEQ ID NO: 2308668 - RNA, 19 nt, Artificial Sequence
  Description of Artificial Sequence: Synthetic oligonucleotide
  Sense strand starting at position 2288 of SEQ ID NO: 1885004
gcgggaaauauaugcucca

SEQ ID NO: 2308669 - RNA, 19 nt, Artificial Sequence
  Description of Artificial Sequence: Synthetic oligonucleotide
  Antisense strand to SEQ ID NO: 2308668
uggagcauauauuucccgc

SEQ ID NO: 2308670 - RNA, 19 nt, Artificial Sequence
  Description of Artificial Sequence: Synthetic oligonucleotide
  Sense strand starting at position 2291 of SEQ ID NO: 1885004
ggaaauauaugcuccaguu

SEQ ID NO: 2308671 - RNA, 19 nt, Artificial Sequence
  Description of Artificial Sequence: Synthetic oligonucleotide
  Antisense strand to SEQ ID NO: 2308670
aacuggagcauauauuucc

SEQ ID NO: 2308672 - RNA, 19 nt, Artificial Sequence
  Description of Artificial Sequence: Synthetic oligonucleotide
  Sense strand starting at position 2428 of SEQ ID NO: 1885004
ggcuccacuccugagaagu

SEQ ID NO: 2308673 - RNA, 19 nt, Artificial Sequence
  Description of Artificial Sequence: Synthetic oligonucleotide
  Antisense strand to SEQ ID NO: 2308672
acuucucaggaguggagcc

SEQ ID NO: 2308674 - RNA, 19 nt, Artificial Sequence
  Description of Artificial Sequence: Synthetic oligonucleotide
  Sense strand starting at position 2608 of SEQ ID NO: 1885004
cuuugaaauucuguaagga

SEQ ID NO: 2308675 - RNA, 19 nt, Artificial Sequence
  Description of Artificial Sequence: Synthetic oligonucleotide
  Antisense strand to SEQ ID NO: 2308674
uccuuacagaauuucaaag

SEQ ID NO: 2308676 - RNA, 19 nt, Artificial Sequence
  Description of Artificial Sequence: Synthetic oligonucleotide
  Sense strand starting at position 2784 of SEQ ID NO: 1885004
uuaaguaccuuacuaaguu

SEQ ID NO: 2308677 - RNA, 19 nt, Artificial Sequence
  Description of Artificial Sequence: Synthetic oligonucleotide
  Antisense strand to SEQ ID NO: 2308676
aacuuaguaagguacuuaa

SEQ ID NO: 2308678 - RNA, 19 nt, Artificial Sequence
  Description of Artificial Sequence: Synthetic oligonucleotide
  Sense strand starting at position 2792 of SEQ ID NO: 1885004
cuuacuaaguuugugaaca

SEQ ID NO: 2308679 - RNA, 19 nt, Artificial Sequence
  Description of Artificial Sequence: Synthetic oligonucleotide
  Antisense strand to SEQ ID NO: 2308678
uguucacaaacuuaguaag

SEQ ID NO: 2308680 - RNA, 19 nt, Artificial Sequence
  Description of Artificial Sequence: Synthetic oligonucleotide
  Sense strand starting at position 2812 of SEQ ID NO: 1885004
gcagcaauuucugcaauga

SEQ ID NO: 2308681 - RNA, 19 nt, Artificial Sequence
  Description of Artificial Sequence: Synthetic oligonucleotide
  Antisense strand to SEQ ID NO: 2308680
ucauugcagaaauugcugc

SEQ ID NO: 2308682 - RNA, 19 nt, Artificial Sequence
  Description of Artificial Sequence: Synthetic oligonucleotide
  Sense strand starting at position 2882 of SEQ ID NO: 1885004
gaguuuauacuguggagag

SEQ ID NO: 2308683 - RNA, 19 nt, Artificial Sequence
  Description of Artificial Sequence: Synthetic oligonucleotide
  Antisense strand to SEQ ID NO: 2308682
cucuccacaguauaaacuc

SEQ ID NO: 2308684 - RNA, 19 nt, Artificial Sequence
  Description of Artificial Sequence: Synthetic oligonucleotide
  Sense strand starting at position 2884 of SEQ ID NO: 1885004
guuuauacuguggagaggu

SEQ ID NO: 2308685 - RNA, 19 nt, Artificial Sequence
  Description of Artificial Sequence: Synthetic oligonucleotide
  Antisense strand to SEQ ID NO: 2308684
accucuccacaguauaaac

SEQ ID NO: 2308686 - RNA, 19 nt, Artificial Sequence
  Description of Artificial Sequence: Synthetic oligonucleotide
  Sense strand starting at position 3108 of SEQ ID NO: 1885004
gugcucgugcuugcauaua

SEQ ID NO: 2308687 - RNA, 19 nt, Artificial Sequence
  Description of Artificial Sequence: Synthetic oligonucleotide
  Antisense strand to SEQ ID NO: 2308686
uauaugcaagcacgagcac

SEQ ID NO: 2308688 - RNA, 19 nt, Artificial Sequence
  Description of Artificial Sequence: Synthetic oligonucleotide
  Sense strand starting at position 3183 of SEQ ID NO: 1885004
ugaaaugugcucuauuagg

SEQ ID NO: 2308689 - RNA, 19 nt, Artificial Sequence
  Description of Artificial Sequence: Synthetic oligonucleotide
  Antisense strand to SEQ ID NO: 2308688
ccuaauagagcacauuuca

SEQ ID NO: 2308690 - RNA, 19 nt, Artificial Sequence
  Description of Artificial Sequence: Synthetic oligonucleotide
  Sense strand starting at position 3214 of SEQ ID NO: 1885004
augcuauucuguuuaugaa

SEQ ID NO: 2308691 - RNA, 19 nt, Artificial Sequence
  Description of Artificial Sequence: Synthetic oligonucleotide
  Antisense strand to SEQ ID NO: 2308690
uucauaaacagaauagcau

SEQ ID NO: 2308692 - RNA, 19 nt, Artificial Sequence
  Description of Artificial Sequence: Synthetic oligonucleotide
  Sense strand starting at position 3215 of SEQ ID NO: 1885004
ugcuauucuguuuaugaaa

SEQ ID NO: 2308693 - RNA, 19 nt, Artificial Sequence
  Description of Artificial Sequence: Synthetic oligonucleotide
  Antisense strand to SEQ ID NO: 2308692
uuucauaaacagaauagca

SEQ ID NO: 2308694 - RNA, 19 nt, Artificial Sequence
  Description of Artificial Sequence: Synthetic oligonucleotide
  Sense strand starting at position 3274 of SEQ ID NO: 1885004
ugugucaugauccacaguu

SEQ ID NO: 2308695 - RNA, 19 nt, Artificial Sequence
  Description of Artificial Sequence: Synthetic oligonucleotide
  Antisense strand to SEQ ID NO: 2308694
aacuguggaucaugacaca

SEQ ID NO: 2308696 - RNA, 19 nt, Artificial Sequence
  Description of Artificial Sequence: Synthetic oligonucleotide
  Sense strand starting at position 3276 of SEQ ID NO: 1885004
ugucaugauccacaguucu

SEQ ID NO: 2308697 - RNA, 19 nt, Artificial Sequence
  Description of Artificial Sequence: Synthetic oligonucleotide
  Antisense strand to SEQ ID NO: 2308696
agaacuguggaucaugaca

SEQ ID NO: 2308698 - RNA, 19 nt, Artificial Sequence
  Description of Artificial Sequence: Synthetic oligonucleotide
  Sense strand starting at position 3290 of SEQ ID NO: 1885004
guucuuauuguacacuuaa

SEQ ID NO: 2308699 - RNA, 19 nt, Artificial Sequence
  Description of Artificial Sequence: Synthetic oligonucleotide
  Antisense strand to SEQ ID NO: 2308698
uuaaguguacaauaagaac

SEQ ID NO: 2308700 - RNA, 19 nt, Artificial Sequence
  Description of Artificial Sequence: Synthetic oligonucleotide
  Sense strand starting at position 3368 of SEQ ID NO: 1885004
ugaaguaccucaucuagga

SEQ ID NO: 2308701 - RNA, 19 nt, Artificial Sequence
  Description of Artificial Sequence: Synthetic oligonucleotide
  Antisense strand to SEQ ID NO: 2308700
uccuagaugagguacuuca

SEQ ID NO: 2308702 - RNA, 19 nt, Artificial Sequence
  Description of Artificial Sequence: Synthetic oligonucleotide
  Sense strand starting at position 3486 of SEQ ID NO: 1885004
augaauaccucaucuaggu

SEQ ID NO: 2308703 - RNA, 19 nt, Artificial Sequence
  Description of Artificial Sequence: Synthetic oligonucleotide
  Antisense strand to SEQ ID NO: 2308702
accuagaugagguauucau

SEQ ID NO: 2308704 - RNA, 19 nt, Artificial Sequence
  Description of Artificial Sequence: Synthetic oligonucleotide
  Sense strand starting at position 3490 of SEQ ID NO: 1885004
auaccucaucuagguacua

SEQ ID NO: 2308705 - RNA, 19 nt, Artificial Sequence
  Description of Artificial Sequence: Synthetic oligonucleotide
  Antisense strand to SEQ ID NO: 2308704
uaguaccuagaugagguau

SEQ ID NO: 2308706 - RNA, 19 nt, Artificial Sequence
  Description of Artificial Sequence: Synthetic oligonucleotide
  Sense strand starting at position 3704 of SEQ ID NO: 1885004
uugggcagggauugucaaa

SEQ ID NO: 2308707 - RNA, 19 nt, Artificial Sequence
  Description of Artificial Sequence: Synthetic oligonucleotide
  Antisense strand to SEQ ID NO: 2308706
uuugacaaucccugcccaa

SEQ ID NO: 2308708 - RNA, 19 nt, Artificial Sequence
  Description of Artificial Sequence: Synthetic oligonucleotide
  Sense strand starting at position 3826 of SEQ ID NO: 1885004
cauucuguuugaccacgau

SEQ ID NO: 2308709 - RNA, 19 nt, Artificial Sequence
  Description of Artificial Sequence: Synthetic oligonucleotide
  Antisense strand to SEQ ID NO: 2308708
aucguggucaaacagaaug

SEQ ID NO: 2308710 - RNA, 19 nt, Artificial Sequence
  Description of Artificial Sequence: Synthetic oligonucleotide
  Sense strand starting at position 3830 of SEQ ID NO: 1885004
cuguuugaccacgauucuu

SEQ ID NO: 2308711 - RNA, 19 nt, Artificial Sequence
  Description of Artificial Sequence: Synthetic oligonucleotide
  Antisense strand to SEQ ID NO: 2308710
aagaaucguggucaaacag

SEQ ID NO: 2308712 - RNA, 19 nt, Artificial Sequence
  Description of Artificial Sequence: Synthetic oligonucleotide
  Sense strand starting at position 3977 of SEQ ID NO: 1885004
ggaauugauuacguaguga

SEQ ID NO: 2308713 - RNA, 19 nt, Artificial Sequence
  Description of Artificial Sequence: Synthetic oligonucleotide
  Antisense strand to SEQ ID NO: 2308712
ucacuacguaaucaauucc

SEQ ID NO: 2308714 - RNA, 19 nt, Artificial Sequence
  Description of Artificial Sequence: Synthetic oligonucleotide
  Sense strand starting at position 169 of SEQ ID NO: 1885005
acagguaacugagaggaua

SEQ ID NO: 2308715 - RNA, 19 nt, Artificial Sequence
  Description of Artificial Sequence: Synthetic oligonucleotide
  Antisense strand to SEQ ID NO: 2308714
uauccucucaguuaccugu

SEQ ID NO: 2308716 - RNA, 19 nt, Artificial Sequence
  Description of Artificial Sequence: Synthetic oligonucleotide
  Sense strand starting at position 236 of SEQ ID NO: 1885005
uuuagaauuuaguagaguc

SEQ ID NO: 2308717 - RNA, 19 nt, Artificial Sequence
  Description of Artificial Sequence: Synthetic oligonucleotide
  Antisense strand to SEQ ID NO: 2308716
gacucuacuaaauucuaaa

SEQ ID NO: 2308718 - RNA, 19 nt, Artificial Sequence
  Description of Artificial Sequence: Synthetic oligonucleotide
  Sense strand starting at position 272 of SEQ ID NO: 1885005
ccagacauucucuggagau

SEQ ID NO: 2308719 - RNA, 19 nt, Artificial Sequence
  Description of Artificial Sequence: Synthetic oligonucleotide
  Antisense strand to SEQ ID NO: 2308718
aucuccagagaaugucugg

SEQ ID NO: 2308720 - RNA, 19 nt, Artificial Sequence
  Description of Artificial Sequence: Synthetic oligonucleotide
  Sense strand starting at position 303 of SEQ ID NO: 1885005
gaggguucuguguguccca

SEQ ID NO: 2308721 - RNA, 19 nt, Artificial Sequence
  Description of Artificial Sequence: Synthetic oligonucleotide
  Antisense strand to SEQ ID NO: 2308720
ugggacacacagaacccuc

SEQ ID NO: 2308722 - RNA, 19 nt, Artificial Sequence
  Description of Artificial Sequence: Synthetic oligonucleotide
  Sense strand starting at position 332 of SEQ ID NO: 1885005
agggauuaaucagccucua

SEQ ID NO: 2308723 - RNA, 19 nt, Artificial Sequence
  Description of Artificial Sequence: Synthetic oligonucleotide
  Antisense strand to SEQ ID NO: 2308722
uagaggcugauuaaucccu

SEQ ID NO: 2308724 - RNA, 19 nt, Artificial Sequence
  Description of Artificial Sequence: Synthetic oligonucleotide
  Sense strand starting at position 416 of SEQ ID NO: 1885005
caggcaguuuccucagcaa

SEQ ID NO: 2308725 - RNA, 19 nt, Artificial Sequence
  Description of Artificial Sequence: Synthetic oligonucleotide
  Antisense strand to SEQ ID NO: 2308724
uugcugaggaaacugccug

SEQ ID NO: 2308726 - RNA, 19 nt, Artificial Sequence
  Description of Artificial Sequence: Synthetic oligonucleotide
  Sense strand starting at position 419 of SEQ ID NO: 1885005
gcaguuuccucagcaauaa

SEQ ID NO: 2308727 - RNA, 19 nt, Artificial Sequence
  Description of Artificial Sequence: Synthetic oligonucleotide
  Antisense strand to SEQ ID NO: 2308726
uuauugcugaggaaacugc

SEQ ID NO: 2308728 - RNA, 19 nt, Artificial Sequence
  Description of Artificial Sequence: Synthetic oligonucleotide
  Sense strand starting at position 686 of SEQ ID NO: 1885005
ugguauaucuuacauagau

SEQ ID NO: 2308729 - RNA, 19 nt, Artificial Sequence
  Description of Artificial Sequence: Synthetic oligonucleotide
  Antisense strand to SEQ ID NO: 2308728
aucuauguaagauauacca

SEQ ID NO: 2308730 - RNA, 19 nt, Artificial Sequence
  Description of Artificial Sequence: Synthetic oligonucleotide
  Sense strand starting at position 720 of SEQ ID NO: 1885005
agauauagcuugcuuauau

SEQ ID NO: 2308731 - RNA, 19 nt, Artificial Sequence
  Description of Artificial Sequence: Synthetic oligonucleotide
  Antisense strand to SEQ ID NO: 2308730
auauaagcaagcuauaucu

SEQ ID NO: 2308732 - RNA, 19 nt, Artificial Sequence
  Description of Artificial Sequence: Synthetic oligonucleotide
  Sense strand starting at position 730 of SEQ ID NO: 1885005
ugcuuauaucauggcaaga

SEQ ID NO: 2308733 - RNA, 19 nt, Artificial Sequence
  Description of Artificial Sequence: Synthetic oligonucleotide
  Antisense strand to SEQ ID NO: 2308732
ucuugccaugauauaagca

SEQ ID NO: 2308734 - RNA, 19 nt, Artificial Sequence
  Description of Artificial Sequence: Synthetic oligonucleotide
  Sense strand starting at position 732 of SEQ ID NO: 1885005
cuuauaucauggcaagauc

SEQ ID NO: 2308735 - RNA, 19 nt, Artificial Sequence
  Description of Artificial Sequence: Synthetic oligonucleotide
  Antisense strand to SEQ ID NO: 2308734
gaucuugccaugauauaag

SEQ ID NO: 2308736 - RNA, 19 nt, Artificial Sequence
  Description of Artificial Sequence: Synthetic oligonucleotide
  Sense strand starting at position 787 of SEQ ID NO: 1885005
auguaagcucuugggaauc

SEQ ID NO: 2308737 - RNA, 19 nt, Artificial Sequence
  Description of Artificial Sequence: Synthetic oligonucleotide
  Antisense strand to SEQ ID NO: 2308736
gauucccaagagcuuacau

SEQ ID NO: 2308738 - RNA, 19 nt, Artificial Sequence
  Description of Artificial Sequence: Synthetic oligonucleotide
  Sense strand starting at position 798 of SEQ ID NO: 1885005
ugggaaucaucucaacuga

SEQ ID NO: 2308739 - RNA, 19 nt, Artificial Sequence
  Description of Artificial Sequence: Synthetic oligonucleotide
  Antisense strand to SEQ ID NO: 2308738
ucaguugagaugauuccca

SEQ ID NO: 2308740 - RNA, 19 nt, Artificial Sequence
  Description of Artificial Sequence: Synthetic oligonucleotide
  Sense strand starting at position 844 of SEQ ID NO: 1885005
ccuugaugaucuggauuug

SEQ ID NO: 2308741 - RNA, 19 nt, Artificial Sequence
  Description of Artificial Sequence: Synthetic oligonucleotide
  Antisense strand to SEQ ID NO: 2308740
caaauccagaucaucaagg

SEQ ID NO: 2308742 - RNA, 19 nt, Artificial Sequence
  Description of Artificial Sequence: Synthetic oligonucleotide
  Sense strand starting at position 853 of SEQ ID NO: 1885005
ucuggauuuguuuggucuu

SEQ ID NO: 2308743 - RNA, 19 nt, Artificial Sequence
  Description of Artificial Sequence: Synthetic oligonucleotide
  Antisense strand to SEQ ID NO: 2308742
aagaccaaacaaauccaga

SEQ ID NO: 2308744 - RNA, 19 nt, Artificial Sequence
  Description of Artificial Sequence: Synthetic oligonucleotide
  Sense strand starting at position 1579 of SEQ ID NO: 1885005
acagaaggucugugacagu

SEQ ID NO: 2308745 - RNA, 19 nt, Artificial Sequence
  Description of Artificial Sequence: Synthetic oligonucleotide
  Antisense strand to SEQ ID NO: 2308744
acugucacagaccuucugu

SEQ ID NO: 2308746 - RNA, 19 nt, Artificial Sequence
  Description of Artificial Sequence: Synthetic oligonucleotide
  Sense strand starting at position 1598 of SEQ ID NO: 1885005
ggagaagauucccaggauc

SEQ ID NO: 2308747 - RNA, 19 nt, Artificial Sequence
  Description of Artificial Sequence: Synthetic oligonucleotide
  Antisense strand to SEQ ID NO: 2308746
gauccugggaaucuucucc

SEQ ID NO: 2308748 - RNA, 19 nt, Artificial Sequence
  Description of Artificial Sequence: Synthetic oligonucleotide
  Sense strand starting at position 1641 of SEQ ID NO: 1885005
uucugagggccacaugauu

SEQ ID NO: 2308749 - RNA, 19 nt, Artificial Sequence
  Description of Artificial Sequence: Synthetic oligonucleotide
  Antisense strand to SEQ ID NO: 2308748
aaucauguggcccucagaa

SEQ ID NO: 2308750 - RNA, 19 nt, Artificial Sequence
  Description of Artificial Sequence: Synthetic oligonucleotide
  Sense strand starting at position 1693 of SEQ ID NO: 1885005
guccuugauuucugggaca

SEQ ID NO: 2308751 - RNA, 19 nt, Artificial Sequence
  Description of Artificial Sequence: Synthetic oligonucleotide
  Antisense strand to SEQ ID NO: 2308750
ugucccagaaaucaaggac

SEQ ID NO: 2308752 - RNA, 19 nt, Artificial Sequence
  Description of Artificial Sequence: Synthetic oligonucleotide
  Sense strand starting at position 1696 of SEQ ID NO: 1885005
cuugauuucugggacacaa

SEQ ID NO: 2308753 - RNA, 19 nt, Artificial Sequence
  Description of Artificial Sequence: Synthetic oligonucleotide
  Antisense strand to SEQ ID NO: 2308752
uugugucccagaaaucaag

SEQ ID NO: 2308754 - RNA, 19 nt, Artificial Sequence
  Description of Artificial Sequence: Synthetic oligonucleotide
  Sense strand starting at position 1724 of SEQ ID NO: 1885005
uuaggcuuuccugaauaac

SEQ ID NO: 2308755 - RNA, 19 nt, Artificial Sequence
  Description of Artificial Sequence: Synthetic oligonucleotide
  Antisense strand to SEQ ID NO: 2308754
guuauucaggaaagccuaa

SEQ ID NO: 2308756 - RNA, 19 nt, Artificial Sequence
  Description of Artificial Sequence: Synthetic oligonucleotide
  Sense strand starting at position 1843 of SEQ ID NO: 1885005
gggaacauucuguaugagu

SEQ ID NO: 2308757 - RNA, 19 nt, Artificial Sequence
  Description of Artificial Sequence: Synthetic oligonucleotide
  Antisense strand to SEQ ID NO: 2308756
acucauacagaauguuccc

SEQ ID NO: 2308758 - RNA, 19 nt, Artificial Sequence
  Description of Artificial Sequence: Synthetic oligonucleotide
  Sense strand starting at position 1845 of SEQ ID NO: 1885005
gaacauucuguaugaguga

SEQ ID NO: 2308759 - RNA, 19 nt, Artificial Sequence
  Description of Artificial Sequence: Synthetic oligonucleotide
  Antisense strand to SEQ ID NO: 2308758
ucacucauacagaauguuc

SEQ ID NO: 2308760 - RNA, 19 nt, Artificial Sequence
  Description of Artificial Sequence: Synthetic oligonucleotide
  Sense strand starting at position 1848 of SEQ ID NO: 1885005
cauucuguaugagugacuu

SEQ ID NO: 2308761 - RNA, 19 nt, Artificial Sequence
  Description of Artificial Sequence: Synthetic oligonucleotide
  Antisense strand to SEQ ID NO: 2308760
aagucacucauacagaaug

SEQ ID NO: 2308762 - RNA, 19 nt, Artificial Sequence
  Description of Artificial Sequence: Synthetic oligonucleotide
  Sense strand starting at position 1859 of SEQ ID NO: 1885005
agugacuucuggcugggaa

SEQ ID NO: 2308763 - RNA, 19 nt, Artificial Sequence
  Description of Artificial Sequence: Synthetic oligonucleotide
  Antisense strand to SEQ ID NO: 2308762
uucccagccagaagucacu

SEQ ID NO: 2308764 - RNA, 19 nt, Artificial Sequence
  Description of Artificial Sequence: Synthetic oligonucleotide
  Sense strand starting at position 1860 of SEQ ID NO: 1885005
gugacuucuggcugggaag

SEQ ID NO: 2308765 - RNA, 19 nt, Artificial Sequence
  Description of Artificial Sequence: Synthetic oligonucleotide
  Antisense strand to SEQ ID NO: 2308764
cuucccagccagaagucac

SEQ ID NO: 2308766 - RNA, 19 nt, Artificial Sequence
  Description of Artificial Sequence: Synthetic oligonucleotide
  Sense strand starting at position 1942 of SEQ ID NO: 1885005
cacucaggucccuguguuu

SEQ ID NO: 2308767 - RNA, 19 nt, Artificial Sequence
  Description of Artificial Sequence: Synthetic oligonucleotide
  Antisense strand to SEQ ID NO: 2308766
aaacacagggaccugagug

SEQ ID NO: 2308768 - RNA, 19 nt, Artificial Sequence
  Description of Artificial Sequence: Synthetic oligonucleotide
  Sense strand starting at position 1948 of SEQ ID NO: 1885005
ggucccuguguuugcuaga

SEQ ID NO: 2308769 - RNA, 19 nt, Artificial Sequence
  Description of Artificial Sequence: Synthetic oligonucleotide
  Antisense strand to SEQ ID NO: 2308768
ucuagcaaacacagggacc

SEQ ID NO: 2308770 - RNA, 19 nt, Artificial Sequence
  Description of Artificial Sequence: Synthetic oligonucleotide
  Sense strand starting at position 1949 of SEQ ID NO: 1885005
gucccuguguuugcuagaa

SEQ ID NO: 2308771 - RNA, 19 nt, Artificial Sequence
  Description of Artificial Sequence: Synthetic oligonucleotide
  Antisense strand to SEQ ID NO: 2308770
uucuagcaaacacagggac

SEQ ID NO: 2308772 - RNA, 19 nt, Artificial Sequence
  Description of Artificial Sequence: Synthetic oligonucleotide
  Sense strand starting at position 1953 of SEQ ID NO: 1885005
cuguguuugcuagaaacac

SEQ ID NO: 2308773 - RNA, 19 nt, Artificial Sequence
  Description of Artificial Sequence: Synthetic oligonucleotide
  Antisense strand to SEQ ID NO: 2308772
guguuucuagcaaacacag

SEQ ID NO: 2308774 - RNA, 19 nt, Artificial Sequence
  Description of Artificial Sequence: Synthetic oligonucleotide
  Sense strand starting at position 2078 of SEQ ID NO: 1885005
gggaguauugaguaacugu

SEQ ID NO: 2308775 - RNA, 19 nt, Artificial Sequence
  Description of Artificial Sequence: Synthetic oligonucleotide
  Antisense strand to SEQ ID NO: 2308774
acaguuacucaauacuccc

SEQ ID NO: 2308776 - RNA, 19 nt, Artificial Sequence
  Description of Artificial Sequence: Synthetic oligonucleotide
  Sense strand starting at position 2085 of SEQ ID NO: 1885005
uugaguaacugugucguca

SEQ ID NO: 2308777 - RNA, 19 nt, Artificial Sequence
  Description of Artificial Sequence: Synthetic oligonucleotide
  Antisense strand to SEQ ID NO: 2308776
ugacgacacaguuacucaa

SEQ ID NO: 2308778 - RNA, 19 nt, Artificial Sequence
  Description of Artificial Sequence: Synthetic oligonucleotide
  Sense strand starting at position 2089 of SEQ ID NO: 1885005
guaacugugucgucagcaa

SEQ ID NO: 2308779 - RNA, 19 nt, Artificial Sequence
  Description of Artificial Sequence: Synthetic oligonucleotide
  Antisense strand to SEQ ID NO: 2308778
uugcugacgacacaguuac

SEQ ID NO: 2308780 - RNA, 19 nt, Artificial Sequence
  Description of Artificial Sequence: Synthetic oligonucleotide
  Sense strand starting at position 2228 of SEQ ID NO: 1885005
gggaaauuguuuggaaauc

SEQ ID NO: 2308781 - RNA, 19 nt, Artificial Sequence
  Description of Artificial Sequence: Synthetic oligonucleotide
  Antisense strand to SEQ ID NO: 2308780
gauuuccaaacaauuuccc

SEQ ID NO: 2308782 - RNA, 19 nt, Artificial Sequence
  Description of Artificial Sequence: Synthetic oligonucleotide
  Sense strand starting at position 2229 of SEQ ID NO: 1885005
ggaaauuguuuggaaauca

SEQ ID NO: 2308783 - RNA, 19 nt, Artificial Sequence
  Description of Artificial Sequence: Synthetic oligonucleotide
  Antisense strand to SEQ ID NO: 2308782
ugauuuccaaacaauuucc

SEQ ID NO: 2308784 - RNA, 19 nt, Artificial Sequence
  Description of Artificial Sequence: Synthetic oligonucleotide
  Sense strand starting at position 2323 of SEQ ID NO: 1885005
aaaguuauauaaucagggu

SEQ ID NO: 2308785 - RNA, 19 nt, Artificial Sequence
  Description of Artificial Sequence: Synthetic oligonucleotide
  Antisense strand to SEQ ID NO: 2308784
acccugauuauauaacuuu

SEQ ID NO: 2308786 - RNA, 19 nt, Artificial Sequence
  Description of Artificial Sequence: Synthetic oligonucleotide
  Sense strand starting at position 2465 of SEQ ID NO: 1885005
ucuagaagauuccaugaaa

SEQ ID NO: 2308787 - RNA, 19 nt, Artificial Sequence
  Description of Artificial Sequence: Synthetic oligonucleotide
  Antisense strand to SEQ ID NO: 2308786
uuucauggaaucuucuaga

SEQ ID NO: 2308788 - RNA, 19 nt, Artificial Sequence
  Description of Artificial Sequence: Synthetic oligonucleotide
  Sense strand starting at position 2491 of SEQ ID NO: 1885005
guuauagagcuuuaaauga

SEQ ID NO: 2308789 - RNA, 19 nt, Artificial Sequence
  Description of Artificial Sequence: Synthetic oligonucleotide
  Antisense strand to SEQ ID NO: 2308788
ucauuuaaagcucuauaac

SEQ ID NO: 2308790 - RNA, 19 nt, Artificial Sequence
  Description of Artificial Sequence: Synthetic oligonucleotide
  Sense strand starting at position 3669 of SEQ ID NO: 1885005
gagcgagucacacgugcau

SEQ ID NO: 2308791 - RNA, 19 nt, Artificial Sequence
  Description of Artificial Sequence: Synthetic oligonucleotide
  Antisense strand to SEQ ID NO: 2308790
augcacgugugacucgcuc

SEQ ID NO: 2308792 - RNA, 19 nt, Artificial Sequence
  Description of Artificial Sequence: Synthetic oligonucleotide
  Sense strand starting at position 3747 of SEQ ID NO: 1885005
ugcagagcuggcuaaagaa

SEQ ID NO: 2308793 - RNA, 19 nt, Artificial Sequence
  Description of Artificial Sequence: Synthetic oligonucleotide
  Antisense strand to SEQ ID NO: 2308792
uucuuuagccagcucugca

SEQ ID NO: 2308794 - RNA, 19 nt, Artificial Sequence
  Description of Artificial Sequence: Synthetic oligonucleotide
  Sense strand starting at position 155 of SEQ ID NO: 1885006
gaaaucaguuagguaagca

SEQ ID NO: 2308795 - RNA, 19 nt, Artificial Sequence
  Description of Artificial Sequence: Synthetic oligonucleotide
  Antisense strand to SEQ ID NO: 2308794
ugcuuaccuaacugauuuc

SEQ ID NO: 2308796 - RNA, 19 nt, Artificial Sequence
  Description of Artificial Sequence: Synthetic oligonucleotide
  Sense strand starting at position 159 of SEQ ID NO: 1885006
ucaguuagguaagcaaaua

SEQ ID NO: 2308797 - RNA, 19 nt, Artificial Sequence
  Description of Artificial Sequence: Synthetic oligonucleotide
  Antisense strand to SEQ ID NO: 2308796
uauuugcuuaccuaacuga

SEQ ID NO: 2308798 - RNA, 19 nt, Artificial Sequence
  Description of Artificial Sequence: Synthetic oligonucleotide
  Sense strand starting at position 314 of SEQ ID NO: 1885006
guaggcuaccuuuaacauu

SEQ ID NO: 2308799 - RNA, 19 nt, Artificial Sequence
  Description of Artificial Sequence: Synthetic oligonucleotide
  Antisense strand to SEQ ID NO: 2308798
aauguuaaagguagccuac

SEQ ID NO: 2308800 - RNA, 19 nt, Artificial Sequence
  Description of Artificial Sequence: Synthetic oligonucleotide
  Sense strand starting at position 335 of SEQ ID NO: 1885006
acuggaaauacucgguucu

SEQ ID NO: 2308801 - RNA, 19 nt, Artificial Sequence
  Description of Artificial Sequence: Synthetic oligonucleotide
  Antisense strand to SEQ ID NO: 2308800
agaaccgaguauuuccagu

SEQ ID NO: 2308802 - RNA, 19 nt, Artificial Sequence
  Description of Artificial Sequence: Synthetic oligonucleotide
  Sense strand starting at position 337 of SEQ ID NO: 1885006
uggaaauacucgguucuua

SEQ ID NO: 2308803 - RNA, 19 nt, Artificial Sequence
  Description of Artificial Sequence: Synthetic oligonucleotide
  Antisense strand to SEQ ID NO: 2308802
uaagaaccgaguauuucca

SEQ ID NO: 2308804 - RNA, 19 nt, Artificial Sequence
  Description of Artificial Sequence: Synthetic oligonucleotide
  Sense strand starting at position 517 of SEQ ID NO: 1885006
gguguacacaguuaaugaa

SEQ ID NO: 2308805 - RNA, 19 nt, Artificial Sequence
  Description of Artificial Sequence: Synthetic oligonucleotide
  Antisense strand to SEQ ID NO: 2308804
uucauuaacuguguacacc

SEQ ID NO: 2308806 - RNA, 19 nt, Artificial Sequence
  Description of Artificial Sequence: Synthetic oligonucleotide
  Sense strand starting at position 586 of SEQ ID NO: 1885006
gcuaguauucugcaauaua

SEQ ID NO: 2308807 - RNA, 19 nt, Artificial Sequence
  Description of Artificial Sequence: Synthetic oligonucleotide
  Antisense strand to SEQ ID NO: 2308806
uauauugcagaauacuagc

SEQ ID NO: 2308808 - RNA, 19 nt, Artificial Sequence
  Description of Artificial Sequence: Synthetic oligonucleotide
  Sense strand starting at position 589 of SEQ ID NO: 1885006
aguauucugcaauauaguu

SEQ ID NO: 2308809 - RNA, 19 nt, Artificial Sequence
  Description of Artificial Sequence: Synthetic oligonucleotide
  Antisense strand to SEQ ID NO: 2308808
aacuauauugcagaauacu

SEQ ID NO: 2308810 - RNA, 19 nt, Artificial Sequence
  Description of Artificial Sequence: Synthetic oligonucleotide
  Sense strand starting at position 630 of SEQ ID NO: 1885006
ucaucacuccuagggacaa

SEQ ID NO: 2308811 - RNA, 19 nt, Artificial Sequence
  Description of Artificial Sequence: Synthetic oligonucleotide
  Antisense strand to SEQ ID NO: 2308810
uugucccuaggagugauga

SEQ ID NO: 2308812 - RNA, 19 nt, Artificial Sequence
  Description of Artificial Sequence: Synthetic oligonucleotide
  Sense strand starting at position 646 of SEQ ID NO: 1885006
caaguuaggagguauguau

SEQ ID NO: 2308813 - RNA, 19 nt, Artificial Sequence
  Description of Artificial Sequence: Synthetic oligonucleotide
  Antisense strand to SEQ ID NO: 2308812
auacauaccuccuaacuug

SEQ ID NO: 2308814 - RNA, 19 nt, Artificial Sequence
  Description of Artificial Sequence: Synthetic oligonucleotide
  Sense strand starting at position 653 of SEQ ID NO: 1885006
ggagguauguaugcacaca

SEQ ID NO: 2308815 - RNA, 19 nt, Artificial Sequence
  Description of Artificial Sequence: Synthetic oligonucleotide
  Antisense strand to SEQ ID NO: 2308814
ugugugcauacauaccucc

SEQ ID NO: 2308816 - RNA, 19 nt, Artificial Sequence
  Description of Artificial Sequence: Synthetic oligonucleotide
  Sense strand starting at position 685 of SEQ ID NO: 1885006
uuaaauacaggguguuaga

SEQ ID NO: 2308817 - RNA, 19 nt, Artificial Sequence
  Description of Artificial Sequence: Synthetic oligonucleotide
  Antisense strand to SEQ ID NO: 2308816
ucuaacacccuguauuuaa

SEQ ID NO: 2308818 - RNA, 19 nt, Artificial Sequence
  Description of Artificial Sequence: Synthetic oligonucleotide
  Sense strand starting at position 733 of SEQ ID NO: 1885006
auaagaagugaccguaacu

SEQ ID NO: 2308819 - RNA, 19 nt, Artificial Sequence
  Description of Artificial Sequence: Synthetic oligonucleotide
  Antisense strand to SEQ ID NO: 2308818
aguuacggucacuucuuau

SEQ ID NO: 2308820 - RNA, 19 nt, Artificial Sequence
  Description of Artificial Sequence: Synthetic oligonucleotide
  Sense strand starting at position 1087 of SEQ ID NO: 1885006
ugcugaagucuccaguaga

SEQ ID NO: 2308821 - RNA, 19 nt, Artificial Sequence
  Description of Artificial Sequence: Synthetic oligonucleotide
  Antisense strand to SEQ ID NO: 2308820
ucuacuggagacuucagca

SEQ ID NO: 2308822 - RNA, 19 nt, Artificial Sequence
  Description of Artificial Sequence: Synthetic oligonucleotide
  Sense strand starting at position 1164 of SEQ ID NO: 1885006
uaacguuaagcagacugau

SEQ ID NO: 2308823 - RNA, 19 nt, Artificial Sequence
  Description of Artificial Sequence: Synthetic oligonucleotide
  Antisense strand to SEQ ID NO: 2308822
aucagucugcuuaacguua

SEQ ID NO: 2308824 - RNA, 19 nt, Artificial Sequence
  Description of Artificial Sequence: Synthetic oligonucleotide
  Sense strand starting at position 1621 of SEQ ID NO: 1885006
gagaccuccgggcgagaua

SEQ ID NO: 2308825 - RNA, 19 nt, Artificial Sequence
  Description of Artificial Sequence: Synthetic oligonucleotide
  Antisense strand to SEQ ID NO: 2308824
uaucucgcccggaggucuc

SEQ ID NO: 2308826 - RNA, 19 nt, Artificial Sequence
  Description of Artificial Sequence: Synthetic oligonucleotide
  Sense strand starting at position 1640 of SEQ ID NO: 1885006
cuauuagaucuguagggca

SEQ ID NO: 2308827 - RNA, 19 nt, Artificial Sequence
  Description of Artificial Sequence: Synthetic oligonucleotide
  Antisense strand to SEQ ID NO: 2308826
ugcccuacagaucuaauag

SEQ ID NO: 2308828 - RNA, 19 nt, Artificial Sequence
  Description of Artificial Sequence: Synthetic oligonucleotide
  Sense strand starting at position 1653 of SEQ ID NO: 1885006
agggcaguuagaugauguu

SEQ ID NO: 2308829 - RNA, 19 nt, Artificial Sequence
  Description of Artificial Sequence: Synthetic oligonucleotide
  Antisense strand to SEQ ID NO: 2308828
aacaucaucuaacugcccu

SEQ ID NO: 2308830 - RNA, 19 nt, Artificial Sequence
  Description of Artificial Sequence: Synthetic oligonucleotide
  Sense strand starting at position 1723 of SEQ ID NO: 1885006
cccucuuucgaggaauggu

SEQ ID NO: 2308831 - RNA, 19 nt, Artificial Sequence
  Description of Artificial Sequence: Synthetic oligonucleotide
  Antisense strand to SEQ ID NO: 2308830
accauuccucgaaagaggg

SEQ ID NO: 2308832 - RNA, 19 nt, Artificial Sequence
  Description of Artificial Sequence: Synthetic oligonucleotide
  Sense strand starting at position 2286 of SEQ ID NO: 1885006
ggccuuggccucuaaggga

SEQ ID NO: 2308833 - RNA, 19 nt, Artificial Sequence
  Description of Artificial Sequence: Synthetic oligonucleotide
  Antisense strand to SEQ ID NO: 2308832
ucccuuagaggccaaggcc

SEQ ID NO: 2308834 - RNA, 19 nt, Artificial Sequence
  Description of Artificial Sequence: Synthetic oligonucleotide
  Sense strand starting at position 2312 of SEQ ID NO: 1885006
caaugaauguaagcagaga

SEQ ID NO: 2308835 - RNA, 19 nt, Artificial Sequence
  Description of Artificial Sequence: Synthetic oligonucleotide
  Antisense strand to SEQ ID NO: 2308834
ucucugcuuacauucauug

SEQ ID NO: 2308836 - RNA, 19 nt, Artificial Sequence
  Description of Artificial Sequence: Synthetic oligonucleotide
  Sense strand starting at position 2456 of SEQ ID NO: 1885006
gguuucguuggaagugauu

SEQ ID NO: 2308837 - RNA, 19 nt, Artificial Sequence
  Description of Artificial Sequence: Synthetic oligonucleotide
  Antisense strand to SEQ ID NO: 2308836
aaucacuuccaacgaaacc

SEQ ID NO: 2308838 - RNA, 19 nt, Artificial Sequence
  Description of Artificial Sequence: Synthetic oligonucleotide
  Sense strand starting at position 2467 of SEQ ID NO: 1885006
aagugauuccagcacgacu

SEQ ID NO: 2308839 - RNA, 19 nt, Artificial Sequence
  Description of Artificial Sequence: Synthetic oligonucleotide
  Antisense strand to SEQ ID NO: 2308838
agucgugcuggaaucacuu

SEQ ID NO: 2308840 - RNA, 19 nt, Artificial Sequence
  Description of Artificial Sequence: Synthetic oligonucleotide
  Sense strand starting at position 2666 of SEQ ID NO: 1885006
agucuuuggucucugagga

SEQ ID NO: 2308841 - RNA, 19 nt, Artificial Sequence
  Description of Artificial Sequence: Synthetic oligonucleotide
  Antisense strand to SEQ ID NO: 2308840
uccucagagaccaaagacu

SEQ ID NO: 2308842 - RNA, 19 nt, Artificial Sequence
  Description of Artificial Sequence: Synthetic oligonucleotide
  Sense strand starting at position 2768 of SEQ ID NO: 1885006
ucucguucugauuacagua

SEQ ID NO: 2308843 - RNA, 19 nt, Artificial Sequence
  Description of Artificial Sequence: Synthetic oligonucleotide
  Antisense strand to SEQ ID NO: 2308842
uacuguaaucagaacgaga

SEQ ID NO: 2308844 - RNA, 19 nt, Artificial Sequence
  Description of Artificial Sequence: Synthetic oligonucleotide
  Sense strand starting at position 2787 of SEQ ID NO: 1885006
gagauaugugccuauucca

SEQ ID NO: 2308845 - RNA, 19 nt, Artificial Sequence
  Description of Artificial Sequence: Synthetic oligonucleotide
  Antisense strand to SEQ ID NO: 2308844
uggaauaggcacauaucuc

SEQ ID NO: 2308846 - RNA, 19 nt, Artificial Sequence
  Description of Artificial Sequence: Synthetic oligonucleotide
  Sense strand starting at position 2805 of SEQ ID NO: 1885006
aggagucuccauuguacac

SEQ ID NO: 2308847 - RNA, 19 nt, Artificial Sequence
  Description of Artificial Sequence: Synthetic oligonucleotide
  Antisense strand to SEQ ID NO: 2308846
guguacaauggagacuccu

SEQ ID NO: 2308848 - RNA, 19 nt, Artificial Sequence
  Description of Artificial Sequence: Synthetic oligonucleotide
  Sense strand starting at position 3019 of SEQ ID NO: 1885006
ccuuaucugguuuacagaa

SEQ ID NO: 2308849 - RNA, 19 nt, Artificial Sequence
  Description of Artificial Sequence: Synthetic oligonucleotide
  Antisense strand to SEQ ID NO: 2308848
uucuguaaaccagauaagg

SEQ ID NO: 2308850 - RNA, 19 nt, Artificial Sequence
  Description of Artificial Sequence: Synthetic oligonucleotide
  Sense strand starting at position 3140 of SEQ ID NO: 1885006
guagaacccuuucugugaa

SEQ ID NO: 2308851 - RNA, 19 nt, Artificial Sequence
  Description of Artificial Sequence: Synthetic oligonucleotide
  Antisense strand to SEQ ID NO: 2308850
uucacagaaaggguucuac

SEQ ID NO: 2308852 - RNA, 19 nt, Artificial Sequence
  Description of Artificial Sequence: Synthetic oligonucleotide
  Sense strand starting at position 3229 of SEQ ID NO: 1885006
ggaggaugcaccugcagau

SEQ ID NO: 2308853 - RNA, 19 nt, Artificial Sequence
  Description of Artificial Sequence: Synthetic oligonucleotide
  Antisense strand to SEQ ID NO: 2308852
aucugcaggugcauccucc

SEQ ID NO: 2308854 - RNA, 19 nt, Artificial Sequence
  Description of Artificial Sequence: Synthetic oligonucleotide
  Sense strand starting at position 3307 of SEQ ID NO: 1885006
auagaaauacccugucugu

SEQ ID NO: 2308855 - RNA, 19 nt, Artificial Sequence
  Description of Artificial Sequence: Synthetic oligonucleotide
  Antisense strand to SEQ ID NO: 2308854
acagacaggguauuucuau

SEQ ID NO: 2308856 - RNA, 19 nt, Artificial Sequence
  Description of Artificial Sequence: Synthetic oligonucleotide
  Sense strand starting at position 3322 of SEQ ID NO: 1885006
cugugcucagaaggacaua

SEQ ID NO: 2308857 - RNA, 19 nt, Artificial Sequence
  Description of Artificial Sequence: Synthetic oligonucleotide
  Antisense strand to SEQ ID NO: 2308856
uauguccuucugagcacag

SEQ ID NO: 2308858 - RNA, 19 nt, Artificial Sequence
  Description of Artificial Sequence: Synthetic oligonucleotide
  Sense strand starting at position 3366 of SEQ ID NO: 1885006
agggaagucccucaugcua

SEQ ID NO: 2308859 - RNA, 19 nt, Artificial Sequence
  Description of Artificial Sequence: Synthetic oligonucleotide
  Antisense strand to SEQ ID NO: 2308858
uagcaugagggacuucccu

SEQ ID NO: 2308860 - RNA, 19 nt, Artificial Sequence
  Description of Artificial Sequence: Synthetic oligonucleotide
  Sense strand starting at position 3536 of SEQ ID NO: 1885006
guccgaauuccugaagaca

SEQ ID NO: 2308861 - RNA, 19 nt, Artificial Sequence
  Description of Artificial Sequence: Synthetic oligonucleotide
  Antisense strand to SEQ ID NO: 2308860
ugucuucaggaauucggac

SEQ ID NO: 2308862 - RNA, 19 nt, Artificial Sequence
  Description of Artificial Sequence: Synthetic oligonucleotide
  Sense strand starting at position 3597 of SEQ ID NO: 1885006
guauuuagugugcggaucu

SEQ ID NO: 2308863 - RNA, 19 nt, Artificial Sequence
  Description of Artificial Sequence: Synthetic oligonucleotide
  Antisense strand to SEQ ID NO: 2308862
agauccgcacacuaaauac

SEQ ID NO: 2308864 - RNA, 19 nt, Artificial Sequence
  Description of Artificial Sequence: Synthetic oligonucleotide
  Sense strand starting at position 3645 of SEQ ID NO: 1885006
gguggugccuuauuuacau

SEQ ID NO: 2308865 - RNA, 19 nt, Artificial Sequence
  Description of Artificial Sequence: Synthetic oligonucleotide
  Antisense strand to SEQ ID NO: 2308864
auguaaauaaggcaccacc

SEQ ID NO: 2308866 - RNA, 19 nt, Artificial Sequence
  Description of Artificial Sequence: Synthetic oligonucleotide
  Sense strand starting at position 3684 of SEQ ID NO: 1885006
uguuauuaguaagcaaaga

SEQ ID NO: 2308867 - RNA, 19 nt, Artificial Sequence
  Description of Artificial Sequence: Synthetic oligonucleotide
  Antisense strand to SEQ ID NO: 2308866
ucuuugcuuacuaauaaca

SEQ ID NO: 2308868 - RNA, 19 nt, Artificial Sequence
  Description of Artificial Sequence: Synthetic oligonucleotide
  Sense strand starting at position 3685 of SEQ ID NO: 1885006
guuauuaguaagcaaagag

SEQ ID NO: 2308869 - RNA, 19 nt, Artificial Sequence
  Description of Artificial Sequence: Synthetic oligonucleotide
  Antisense strand to SEQ ID NO: 2308868
cucuuugcuuacuaauaac

SEQ ID NO: 2308870 - RNA, 19 nt, Artificial Sequence
  Description of Artificial Sequence: Synthetic oligonucleotide
  Sense strand starting at position 3759 of SEQ ID NO: 1885006
agcauacuagagugugaau

SEQ ID NO: 2308871 - RNA, 19 nt, Artificial Sequence
  Description of Artificial Sequence: Synthetic oligonucleotide
  Antisense strand to SEQ ID NO: 2308870
auucacacucuaguaugcu

SEQ ID NO: 2308872 - RNA, 19 nt, Artificial Sequence
  Description of Artificial Sequence: Synthetic oligonucleotide
  Sense strand starting at position 3761 of SEQ ID NO: 1885006
cauacuagagugugaauua

SEQ ID NO: 2308873 - RNA, 19 nt, Artificial Sequence
  Description of Artificial Sequence: Synthetic oligonucleotide
  Antisense strand to SEQ ID NO: 2308872
uaauucacacucuaguaug

SEQ ID NO: 2308874 - RNA, 19 nt, Artificial Sequence
  Description of Artificial Sequence: Synthetic oligonucleotide
  Sense strand starting at position 363 of SEQ ID NO: 1885007
agcacaucaugagcuguaa

SEQ ID NO: 2308875 - RNA, 19 nt, Artificial Sequence
  Description of Artificial Sequence: Synthetic oligonucleotide
  Antisense strand to SEQ ID NO: 2308874
uuacagcucaugaugugcu

SEQ ID NO: 2308876 - RNA, 19 nt, Artificial Sequence
  Description of Artificial Sequence: Synthetic oligonucleotide
  Sense strand starting at position 367 of SEQ ID NO: 1885007
caucaugagcuguaaugag

SEQ ID NO: 2308877 - RNA, 19 nt, Artificial Sequence
  Description of Artificial Sequence: Synthetic oligonucleotide
  Antisense strand to SEQ ID NO: 2308876
cucauuacagcucaugaug

SEQ ID NO: 2308878 - RNA, 19 nt, Artificial Sequence
  Description of Artificial Sequence: Synthetic oligonucleotide
  Sense strand starting at position 374 of SEQ ID NO: 1885007
agcuguaaugagcacuaaa

SEQ ID NO: 2308879 - RNA, 19 nt, Artificial Sequence
  Description of Artificial Sequence: Synthetic oligonucleotide
  Antisense strand to SEQ ID NO: 2308878
uuuagugcucauuacagcu

SEQ ID NO: 2308880 - RNA, 19 nt, Artificial Sequence
  Description of Artificial Sequence: Synthetic oligonucleotide
  Sense strand starting at position 377 of SEQ ID NO: 1885007
uguaaugagcacuaaauua

SEQ ID NO: 2308881 - RNA, 19 nt, Artificial Sequence
  Description of Artificial Sequence: Synthetic oligonucleotide
  Antisense strand to SEQ ID NO: 2308880
uaauuuagugcucauuaca

SEQ ID NO: 2308882 - RNA, 19 nt, Artificial Sequence
  Description of Artificial Sequence: Synthetic oligonucleotide
  Sense strand starting at position 547 of SEQ ID NO: 1885007
agaguaucuuaacugucua

SEQ ID NO: 2308883 - RNA, 19 nt, Artificial Sequence
  Description of Artificial Sequence: Synthetic oligonucleotide
  Antisense strand to SEQ ID NO: 2308882
uagacaguuaagauacucu

SEQ ID NO: 2308884 - RNA, 19 nt, Artificial Sequence
  Description of Artificial Sequence: Synthetic oligonucleotide
  Sense strand starting at position 560 of SEQ ID NO: 1885007
ugucuauacucacuggaac

SEQ ID NO: 2308885 - RNA, 19 nt, Artificial Sequence
  Description of Artificial Sequence: Synthetic oligonucleotide
  Antisense strand to SEQ ID NO: 2308884
guuccagugaguauagaca

SEQ ID NO: 2308886 - RNA, 19 nt, Artificial Sequence
  Description of Artificial Sequence: Synthetic oligonucleotide
  Sense strand starting at position 613 of SEQ ID NO: 1885007
gaacuuuaaugaguuuguu

SEQ ID NO: 2308887 - RNA, 19 nt, Artificial Sequence
  Description of Artificial Sequence: Synthetic oligonucleotide
  Antisense strand to SEQ ID NO: 2308886
aacaaacucauuaaaguuc

SEQ ID NO: 2308888 - RNA, 19 nt, Artificial Sequence
  Description of Artificial Sequence: Synthetic oligonucleotide
  Sense strand starting at position 621 of SEQ ID NO: 1885007
augaguuuguuauuggaac

SEQ ID NO: 2308889 - RNA, 19 nt, Artificial Sequence
  Description of Artificial Sequence: Synthetic oligonucleotide
  Antisense strand to SEQ ID NO: 2308888
guuccaauaacaaacucau

SEQ ID NO: 2308890 - RNA, 19 nt, Artificial Sequence
  Description of Artificial Sequence: Synthetic oligonucleotide
  Sense strand starting at position 628 of SEQ ID NO: 1885007
uguuauuggaacuaguagu

SEQ ID NO: 2308891 - RNA, 19 nt, Artificial Sequence
  Description of Artificial Sequence: Synthetic oligonucleotide
  Antisense strand to SEQ ID NO: 2308890
acuacuaguuccaauaaca

SEQ ID NO: 2308892 - RNA, 19 nt, Artificial Sequence
  Description of Artificial Sequence: Synthetic oligonucleotide
  Sense strand starting at position 645 of SEQ ID NO: 1885007
guggaacugacguaugaau

SEQ ID NO: 2308893 - RNA, 19 nt, Artificial Sequence
  Description of Artificial Sequence: Synthetic oligonucleotide
  Antisense strand to SEQ ID NO: 2308892
auucauacgucaguuccac

SEQ ID NO: 2308894 - RNA, 19 nt, Artificial Sequence
  Description of Artificial Sequence: Synthetic oligonucleotide
  Sense strand starting at position 647 of SEQ ID NO: 1885007
ggaacugacguaugaauuc

SEQ ID NO: 2308895 - RNA, 19 nt, Artificial Sequence
  Description of Artificial Sequence: Synthetic oligonucleotide
  Antisense strand to SEQ ID NO: 2308894
gaauucauacgucaguucc

SEQ ID NO: 2308896 - RNA, 19 nt, Artificial Sequence
  Description of Artificial Sequence: Synthetic oligonucleotide
  Sense strand starting at position 678 of SEQ ID NO: 1885007
aguauuuacugugaaacaa

SEQ ID NO: 2308897 - RNA, 19 nt, Artificial Sequence
  Description of Artificial Sequence: Synthetic oligonucleotide
  Antisense strand to SEQ ID NO: 2308896
uuguuucacaguaaauacu

SEQ ID NO: 2308898 - RNA, 19 nt, Artificial Sequence
  Description of Artificial Sequence: Synthetic oligonucleotide
  Sense strand starting at position 710 of SEQ ID NO: 1885007
ugaugauauuuggaugcag

SEQ ID NO: 2308899 - RNA, 19 nt, Artificial Sequence
  Description of Artificial Sequence: Synthetic oligonucleotide
  Antisense strand to SEQ ID NO: 2308898
cugcauccaaauaucauca

SEQ ID NO: 2308900 - RNA, 19 nt, Artificial Sequence
  Description of Artificial Sequence: Synthetic oligonucleotide
  Sense strand starting at position 728 of SEQ ID NO: 1885007
ggguucucacucugagaaa

SEQ ID NO: 2308901 - RNA, 19 nt, Artificial Sequence
  Description of Artificial Sequence: Synthetic oligonucleotide
  Antisense strand to SEQ ID NO: 2308900
uuucucagagugagaaccc

SEQ ID NO: 2308902 - RNA, 19 nt, Artificial Sequence
  Description of Artificial Sequence: Synthetic oligonucleotide
  Sense strand starting at position 812 of SEQ ID NO: 1885007
aaaugcuggcuugaaagua

SEQ ID NO: 2308903 - RNA, 19 nt, Artificial Sequence
  Description of Artificial Sequence: Synthetic oligonucleotide
  Antisense strand to SEQ ID NO: 2308902
uacuuucaagccagcauuu

SEQ ID NO: 2308904 - RNA, 19 nt, Artificial Sequence
  Description of Artificial Sequence: Synthetic oligonucleotide
  Sense strand starting at position 1069 of SEQ ID NO: 1885007
guuguagugauugcgccau

SEQ ID NO: 2308905 - RNA, 19 nt, Artificial Sequence
  Description of Artificial Sequence: Synthetic oligonucleotide
  Antisense strand to SEQ ID NO: 2308904
auggcgcaaucacuacaac

SEQ ID NO: 2308906 - RNA, 19 nt, Artificial Sequence
  Description of Artificial Sequence: Synthetic oligonucleotide
  Sense strand starting at position 1204 of SEQ ID NO: 1885007
ucuaguucucgucauagaa

SEQ ID NO: 2308907 - RNA, 19 nt, Artificial Sequence
  Description of Artificial Sequence: Synthetic oligonucleotide
  Antisense strand to SEQ ID NO: 2308906
uucuaugacgagaacuaga

SEQ ID NO: 2308908 - RNA, 19 nt, Artificial Sequence
  Description of Artificial Sequence: Synthetic oligonucleotide
  Sense strand starting at position 1528 of SEQ ID NO: 1885007
gugauacucagauagcgau

SEQ ID NO: 2308909 - RNA, 19 nt, Artificial Sequence
  Description of Artificial Sequence: Synthetic oligonucleotide
  Antisense strand to SEQ ID NO: 2308908
aucgcuaucugaguaucac

SEQ ID NO: 2308910 - RNA, 19 nt, Artificial Sequence
  Description of Artificial Sequence: Synthetic oligonucleotide
  Sense strand starting at position 1631 of SEQ ID NO: 1885007
guaugaauggguugggaca

SEQ ID NO: 2308911 - RNA, 19 nt, Artificial Sequence
  Description of Artificial Sequence: Synthetic oligonucleotide
  Antisense strand to SEQ ID NO: 2308910
ugucccaacccauucauac

SEQ ID NO: 2308912 - RNA, 19 nt, Artificial Sequence
  Description of Artificial Sequence: Synthetic oligonucleotide
  Sense strand starting at position 1632 of SEQ ID NO: 1885007
uaugaauggguugggacau

SEQ ID NO: 2308913 - RNA, 19 nt, Artificial Sequence
  Description of Artificial Sequence: Synthetic oligonucleotide
  Antisense strand to SEQ ID NO: 2308912
augucccaacccauucaua

SEQ ID NO: 2308914 - RNA, 19 nt, Artificial Sequence
  Description of Artificial Sequence: Synthetic oligonucleotide
  Sense strand starting at position 1718 of SEQ ID NO: 1885007
gggacacgucaauguaaua

SEQ ID NO: 2308915 - RNA, 19 nt, Artificial Sequence
  Description of Artificial Sequence: Synthetic oligonucleotide
  Antisense strand to SEQ ID NO: 2308914
uauuacauugacguguccc

SEQ ID NO: 2308916 - RNA, 19 nt, Artificial Sequence
  Description of Artificial Sequence: Synthetic oligonucleotide
  Sense strand starting at position 1875 of SEQ ID NO: 1885007
ucugguagauauguccuua

SEQ ID NO: 2308917 - RNA, 19 nt, Artificial Sequence
  Description of Artificial Sequence: Synthetic oligonucleotide
  Antisense strand to SEQ ID NO: 2308916
uaaggacauaucuaccaga

SEQ ID NO: 2308918 - RNA, 19 nt, Artificial Sequence
  Description of Artificial Sequence: Synthetic oligonucleotide
  Sense strand starting at position 1879 of SEQ ID NO: 1885007
guagauauguccuuaauca

SEQ ID NO: 2308919 - RNA, 19 nt, Artificial Sequence
  Description of Artificial Sequence: Synthetic oligonucleotide
  Antisense strand to SEQ ID NO: 2308918
ugauuaaggacauaucuac

SEQ ID NO: 2308920 - RNA, 19 nt, Artificial Sequence
  Description of Artificial Sequence: Synthetic oligonucleotide
  Sense strand starting at position 1943 of SEQ ID NO: 1885007
ucacauuagugucccauua

SEQ ID NO: 2308921 - RNA, 19 nt, Artificial Sequence
  Description of Artificial Sequence: Synthetic oligonucleotide
  Antisense strand to SEQ ID NO: 2308920
uaaugggacacuaauguga

SEQ ID NO: 2308922 - RNA, 19 nt, Artificial Sequence
  Description of Artificial Sequence: Synthetic oligonucleotide
  Sense strand starting at position 1983 of SEQ ID NO: 1885007
auuuaauuaugggacacaa

SEQ ID NO: 2308923 - RNA, 19 nt, Artificial Sequence
  Description of Artificial Sequence: Synthetic oligonucleotide
  Antisense strand to SEQ ID NO: 2308922
uugugucccauaauuaaau

SEQ ID NO: 2308924 - RNA, 19 nt, Artificial Sequence
  Description of Artificial Sequence: Synthetic oligonucleotide
  Sense strand starting at position 2036 of SEQ ID NO: 1885007
aggacaacaugucuauauu

SEQ ID NO: 2308925 - RNA, 19 nt, Artificial Sequence
  Description of Artificial Sequence: Synthetic oligonucleotide
  Antisense strand to SEQ ID NO: 2308924
aauauagacauguuguccu

SEQ ID NO: 2308926 - RNA, 19 nt, Artificial Sequence
  Description of Artificial Sequence: Synthetic oligonucleotide
  Sense strand starting at position 2092 of SEQ ID NO: 1885007
cagcuaaauccagauugug

SEQ ID NO: 2308927 - RNA, 19 nt, Artificial Sequence
  Description of Artificial Sequence: Synthetic oligonucleotide
  Antisense strand to SEQ ID NO: 2308926
cacaaucuggauuuagcug

SEQ ID NO: 2308928 - RNA, 19 nt, Artificial Sequence
  Description of Artificial Sequence: Synthetic oligonucleotide
  Sense strand starting at position 2171 of SEQ ID NO: 1885007
ggaagcguucuagauuaaa

SEQ ID NO: 2308929 - RNA, 19 nt, Artificial Sequence
  Description of Artificial Sequence: Synthetic oligonucleotide
  Antisense strand to SEQ ID NO: 2308928
uuuaaucuagaacgcuucc

SEQ ID NO: 2308930 - RNA, 19 nt, Artificial Sequence
  Description of Artificial Sequence: Synthetic oligonucleotide
  Sense strand starting at position 2174 of SEQ ID NO: 1885007
agcguucuagauuaaagaa

SEQ ID NO: 2308931 - RNA, 19 nt, Artificial Sequence
  Description of Artificial Sequence: Synthetic oligonucleotide
  Antisense strand to SEQ ID NO: 2308930
uucuuuaaucuagaacgcu

SEQ ID NO: 2308932 - RNA, 19 nt, Artificial Sequence
  Description of Artificial Sequence: Synthetic oligonucleotide
  Sense strand starting at position 2804 of SEQ ID NO: 1885007
gguaaagaucuuuaugggu

SEQ ID NO: 2308933 - RNA, 19 nt, Artificial Sequence
  Description of Artificial Sequence: Synthetic oligonucleotide
  Antisense strand to SEQ ID NO: 2308932
acccauaaagaucuuuacc

SEQ ID NO: 2308934 - RNA, 19 nt, Artificial Sequence
  Description of Artificial Sequence: Synthetic oligonucleotide
  Sense strand starting at position 2809 of SEQ ID NO: 1885007
agaucuuuaugggugucau

SEQ ID NO: 2308935 - RNA, 19 nt, Artificial Sequence
  Description of Artificial Sequence: Synthetic oligonucleotide
  Antisense strand to SEQ ID NO: 2308934
augacacccauaaagaucu

SEQ ID NO: 2308936 - RNA, 19 nt, Artificial Sequence
  Description of Artificial Sequence: Synthetic oligonucleotide
  Sense strand starting at position 2810 of SEQ ID NO: 1885007
gaucuuuaugggugucaua

SEQ ID NO: 2308937 - RNA, 19 nt, Artificial Sequence
  Description of Artificial Sequence: Synthetic oligonucleotide
  Antisense strand to SEQ ID NO: 2308936
uaugacacccauaaagauc

SEQ ID NO: 2308938 - RNA, 19 nt, Artificial Sequence
  Description of Artificial Sequence: Synthetic oligonucleotide
  Sense strand starting at position 3359 of SEQ ID NO: 1885007
cggguuugcgacgcauuca

SEQ ID NO: 2308939 - RNA, 19 nt, Artificial Sequence
  Description of Artificial Sequence: Synthetic oligonucleotide
  Antisense strand to SEQ ID NO: 2308938
ugaaugcgucgcaaacccg

SEQ ID NO: 2308940 - RNA, 19 nt, Artificial Sequence
  Description of Artificial Sequence: Synthetic oligonucleotide
  Sense strand starting at position 3399 of SEQ ID NO: 1885007
uggagaagcuuggcauaua

SEQ ID NO: 2308941 - RNA, 19 nt, Artificial Sequence
  Description of Artificial Sequence: Synthetic oligonucleotide
  Antisense strand to SEQ ID NO: 2308940
uauaugccaagcuucucca

SEQ ID NO: 2308942 - RNA, 19 nt, Artificial Sequence
  Description of Artificial Sequence: Synthetic oligonucleotide
  Sense strand starting at position 3462 of SEQ ID NO: 1885007
guagcauguggucagauug

SEQ ID NO: 2308943 - RNA, 19 nt, Artificial Sequence
  Description of Artificial Sequence: Synthetic oligonucleotide
  Antisense strand to SEQ ID NO: 2308942
caaucugaccacaugcuac

SEQ ID NO: 2308944 - RNA, 19 nt, Artificial Sequence
  Description of Artificial Sequence: Synthetic oligonucleotide
  Sense strand starting at position 3504 of SEQ ID NO: 1885007
cuguuauuaccaugaugau

SEQ ID NO: 2308945 - RNA, 19 nt, Artificial Sequence
  Description of Artificial Sequence: Synthetic oligonucleotide
  Antisense strand to SEQ ID NO: 2308944
aucaucaugguaauaacag

SEQ ID NO: 2308946 - RNA, 19 nt, Artificial Sequence
  Description of Artificial Sequence: Synthetic oligonucleotide
  Sense strand starting at position 3603 of SEQ ID NO: 1885007
cccaaaggauaacagaaau

SEQ ID NO: 2308947 - RNA, 19 nt, Artificial Sequence
  Description of Artificial Sequence: Synthetic oligonucleotide
  Antisense strand to SEQ ID NO: 2308946
auuucuguuauccuuuggg

SEQ ID NO: 2308948 - RNA, 19 nt, Artificial Sequence
  Description of Artificial Sequence: Synthetic oligonucleotide
  Sense strand starting at position 3894 of SEQ ID NO: 1885007
ucugucacuucccugaaga

SEQ ID NO: 2308949 - RNA, 19 nt, Artificial Sequence
  Description of Artificial Sequence: Synthetic oligonucleotide
  Antisense strand to SEQ ID NO: 2308948
ucuucagggaagugacaga

SEQ ID NO: 2308950 - RNA, 19 nt, Artificial Sequence
  Description of Artificial Sequence: Synthetic oligonucleotide
  Sense strand starting at position 3895 of SEQ ID NO: 1885007
cugucacuucccugaagaa

SEQ ID NO: 2308951 - RNA, 19 nt, Artificial Sequence
  Description of Artificial Sequence: Synthetic oligonucleotide
  Antisense strand to SEQ ID NO: 2308950
uucuucagggaagugacag

SEQ ID NO: 2308952 - RNA, 19 nt, Artificial Sequence
  Description of Artificial Sequence: Synthetic oligonucleotide
  Sense strand starting at position 3954 of SEQ ID NO: 1885007
ccaaauuccuaggcaugga

SEQ ID NO: 2308953 - RNA, 19 nt, Artificial Sequence
  Description of Artificial Sequence: Synthetic oligonucleotide
  Antisense strand to SEQ ID NO: 2308952
uccaugccuaggaauuugg

SEQ ID NO: 2308954 - RNA, 19 nt, Artificial Sequence
  Description of Artificial Sequence: Synthetic oligonucleotide
  Sense strand starting at position 140 of SEQ ID NO: 1885008
uaccgucuccuagagauua

SEQ ID NO: 2308955 - RNA, 19 nt, Artificial Sequence
  Description of Artificial Sequence: Synthetic oligonucleotide
  Antisense strand to SEQ ID NO: 2308954
uaaucucuaggagacggua

SEQ ID NO: 2308956 - RNA, 19 nt, Artificial Sequence
  Description of Artificial Sequence: Synthetic oligonucleotide
  Sense strand starting at position 148 of SEQ ID NO: 1885008
ccuagagauuagcuguaaa

SEQ ID NO: 2308957 - RNA, 19 nt, Artificial Sequence
  Description of Artificial Sequence: Synthetic oligonucleotide
  Antisense strand to SEQ ID NO: 2308956
uuuacagcuaaucucuagg

SEQ ID NO: 2308958 - RNA, 19 nt, Artificial Sequence
  Description of Artificial Sequence: Synthetic oligonucleotide
  Sense strand starting at position 332 of SEQ ID NO: 1885008
ggaauauauuucuaggaac

SEQ ID NO: 2308959 - RNA, 19 nt, Artificial Sequence
  Description of Artificial Sequence: Synthetic oligonucleotide
  Antisense strand to SEQ ID NO: 2308958
guuccuagaaauauauucc

SEQ ID NO: 2308960 - RNA, 19 nt, Artificial Sequence
  Description of Artificial Sequence: Synthetic oligonucleotide
  Sense strand starting at position 335 of SEQ ID NO: 1885008
auauauuucuaggaacaug

SEQ ID NO: 2308961 - RNA, 19 nt, Artificial Sequence
  Description of Artificial Sequence: Synthetic oligonucleotide
  Antisense strand to SEQ ID NO: 2308960
cauguuccuagaaauauau

SEQ ID NO: 2308962 - RNA, 19 nt, Artificial Sequence
  Description of Artificial Sequence: Synthetic oligonucleotide
  Sense strand starting at position 369 of SEQ ID NO: 1885008
auguguauaccaugaacau

SEQ ID NO: 2308963 - RNA, 19 nt, Artificial Sequence
  Description of Artificial Sequence: Synthetic oligonucleotide
  Antisense strand to SEQ ID NO: 2308962
auguucaugguauacacau

SEQ ID NO: 2308964 - RNA, 19 nt, Artificial Sequence
  Description of Artificial Sequence: Synthetic oligonucleotide
  Sense strand starting at position 370 of SEQ ID NO: 1885008
uguguauaccaugaacauu

SEQ ID NO: 2308965 - RNA, 19 nt, Artificial Sequence
  Description of Artificial Sequence: Synthetic oligonucleotide
  Antisense strand to SEQ ID NO: 2308964
aauguucaugguauacaca

SEQ ID NO: 2308966 - RNA, 19 nt, Artificial Sequence
  Description of Artificial Sequence: Synthetic oligonucleotide
  Sense strand starting at position 570 of SEQ ID NO: 1885008
acuacuauaugggauauuu

SEQ ID NO: 2308967 - RNA, 19 nt, Artificial Sequence
  Description of Artificial Sequence: Synthetic oligonucleotide
  Antisense strand to SEQ ID NO: 2308966
aaauaucccauauaguagu

SEQ ID NO: 2308968 - RNA, 19 nt, Artificial Sequence
  Description of Artificial Sequence: Synthetic oligonucleotide
  Sense strand starting at position 579 of SEQ ID NO: 1885008
ugggauauuuccuacucaa

SEQ ID NO: 2308969 - RNA, 19 nt, Artificial Sequence
  Description of Artificial Sequence: Synthetic oligonucleotide
  Antisense strand to SEQ ID NO: 2308968
uugaguaggaaauauccca

SEQ ID NO: 2308970 - RNA, 19 nt, Artificial Sequence
  Description of Artificial Sequence: Synthetic oligonucleotide
  Sense strand starting at position 810 of SEQ ID NO: 1885008
uggaguucccaugaauguu

SEQ ID NO: 2308971 - RNA, 19 nt, Artificial Sequence
  Description of Artificial Sequence: Synthetic oligonucleotide
  Antisense strand to SEQ ID NO: 2308970
aacauucaugggaacucca

SEQ ID NO: 2308972 - RNA, 19 nt, Artificial Sequence
  Description of Artificial Sequence: Synthetic oligonucleotide
  Sense strand starting at position 818 of SEQ ID NO: 1885008
ccaugaauguuccuaagag

SEQ ID NO: 2308973 - RNA, 19 nt, Artificial Sequence
  Description of Artificial Sequence: Synthetic oligonucleotide
  Antisense strand to SEQ ID NO: 2308972
cucuuaggaacauucaugg

SEQ ID NO: 2308974 - RNA, 19 nt, Artificial Sequence
  Description of Artificial Sequence: Synthetic oligonucleotide
  Sense strand starting at position 827 of SEQ ID NO: 1885008
uuccuaagaguguagguaa

SEQ ID NO: 2308975 - RNA, 19 nt, Artificial Sequence
  Description of Artificial Sequence: Synthetic oligonucleotide
  Antisense strand to SEQ ID NO: 2308974
uuaccuacacucuuaggaa

SEQ ID NO: 2308976 - RNA, 19 nt, Artificial Sequence
  Description of Artificial Sequence: Synthetic oligonucleotide
  Sense strand starting at position 839 of SEQ ID NO: 1885008
uagguaagccuagaaaggu

SEQ ID NO: 2308977 - RNA, 19 nt, Artificial Sequence
  Description of Artificial Sequence: Synthetic oligonucleotide
  Antisense strand to SEQ ID NO: 2308976
accuuucuaggcuuaccua

SEQ ID NO: 2308978 - RNA, 19 nt, Artificial Sequence
  Description of Artificial Sequence: Synthetic oligonucleotide
  Sense strand starting at position 949 of SEQ ID NO: 1885008
gagguuauauaagucaaua

SEQ ID NO: 2308979 - RNA, 19 nt, Artificial Sequence
  Description of Artificial Sequence: Synthetic oligonucleotide
  Antisense strand to SEQ ID NO: 2308978
uauugacuuauauaaccuc

SEQ ID NO: 2308980 - RNA, 19 nt, Artificial Sequence
  Description of Artificial Sequence: Synthetic oligonucleotide
  Sense strand starting at position 971 of SEQ ID NO: 1885008
auaacaugcccagaaugua

SEQ ID NO: 2308981 - RNA, 19 nt, Artificial Sequence
  Description of Artificial Sequence: Synthetic oligonucleotide
  Antisense strand to SEQ ID NO: 2308980
uacauucugggcauguuau

SEQ ID NO: 2308982 - RNA, 19 nt, Artificial Sequence
  Description of Artificial Sequence: Synthetic oligonucleotide
  Sense strand starting at position 996 of SEQ ID NO: 1885008
ggcuaacaaucacugggaa

SEQ ID NO: 2308983 - RNA, 19 nt, Artificial Sequence
  Description of Artificial Sequence: Synthetic oligonucleotide
  Antisense strand to SEQ ID NO: 2308982
uucccagugauuguuagcc

SEQ ID NO: 2308984 - RNA, 19 nt, Artificial Sequence
  Description of Artificial Sequence: Synthetic oligonucleotide
  Sense strand starting at position 997 of SEQ ID NO: 1885008
gcuaacaaucacugggaau

SEQ ID NO: 2308985 - RNA, 19 nt, Artificial Sequence
  Description of Artificial Sequence: Synthetic oligonucleotide
  Antisense strand to SEQ ID NO: 2308984
auucccagugauuguuagc

SEQ ID NO: 2308986 - RNA, 19 nt, Artificial Sequence
  Description of Artificial Sequence: Synthetic oligonucleotide
  Sense strand starting at position 1116 of SEQ ID NO: 1885008
auggcuuucccagacaacu

SEQ ID NO: 2308987 - RNA, 19 nt, Artificial Sequence
  Description of Artificial Sequence: Synthetic oligonucleotide
  Antisense strand to SEQ ID NO: 2308986
aguugucugggaaagccau

SEQ ID NO: 2308988 - RNA, 19 nt, Artificial Sequence
  Description of Artificial Sequence: Synthetic oligonucleotide
  Sense strand starting at position 1294 of SEQ ID NO: 1885008
auuagagacuucuuaagcu

SEQ ID NO: 2308989 - RNA, 19 nt, Artificial Sequence
  Description of Artificial Sequence: Synthetic oligonucleotide
  Antisense strand to SEQ ID NO: 2308988
agcuuaagaagucucuaau

SEQ ID NO: 2308990 - RNA, 19 nt, Artificial Sequence
  Description of Artificial Sequence: Synthetic oligonucleotide
  Sense strand starting at position 1828 of SEQ ID NO: 1885008
caccaaugugacuggacuu

SEQ ID NO: 2308991 - RNA, 19 nt, Artificial Sequence
  Description of Artificial Sequence: Synthetic oligonucleotide
  Antisense strand to SEQ ID NO: 2308990
aaguccagucacauuggug

SEQ ID NO: 2308992 - RNA, 19 nt, Artificial Sequence
  Description of Artificial Sequence: Synthetic oligonucleotide
  Sense strand starting at position 1985 of SEQ ID NO: 1885008
uaggguaggaaauguacua

SEQ ID NO: 2308993 - RNA, 19 nt, Artificial Sequence
  Description of Artificial Sequence: Synthetic oligonucleotide
  Antisense strand to SEQ ID NO: 2308992
uaguacauuuccuacccua

SEQ ID NO: 2308994 - RNA, 19 nt, Artificial Sequence
  Description of Artificial Sequence: Synthetic oligonucleotide
  Sense strand starting at position 2109 of SEQ ID NO: 1885008
agugucuggauugaaugua

SEQ ID NO: 2308995 - RNA, 19 nt, Artificial Sequence
  Description of Artificial Sequence: Synthetic oligonucleotide
  Antisense strand to SEQ ID NO: 2308994
uacauucaauccagacacu

SEQ ID NO: 2308996 - RNA, 19 nt, Artificial Sequence
  Description of Artificial Sequence: Synthetic oligonucleotide
  Sense strand starting at position 2287 of SEQ ID NO: 1885008
aagcuaugucaagaagucu

SEQ ID NO: 2308997 - RNA, 19 nt, Artificial Sequence
  Description of Artificial Sequence: Synthetic oligonucleotide
  Antisense strand to SEQ ID NO: 2308996
agacuucuugacauagcuu

SEQ ID NO: 2308998 - RNA, 19 nt, Artificial Sequence
  Description of Artificial Sequence: Synthetic oligonucleotide
  Sense strand starting at position 2300 of SEQ ID NO: 1885008
aagucuaugggaugaagca

SEQ ID NO: 2308999 - RNA, 19 nt, Artificial Sequence
  Description of Artificial Sequence: Synthetic oligonucleotide
  Antisense strand to SEQ ID NO: 2308998
ugcuucaucccauagacuu

SEQ ID NO: 2309000 - RNA, 19 nt, Artificial Sequence
  Description of Artificial Sequence: Synthetic oligonucleotide
  Sense strand starting at position 2321 of SEQ ID NO: 1885008
ucuguugugauggauauag

SEQ ID NO: 2309001 - RNA, 19 nt, Artificial Sequence
  Description of Artificial Sequence: Synthetic oligonucleotide
  Antisense strand to SEQ ID NO: 2309000
cuauauccaucacaacaga

SEQ ID NO: 2309002 - RNA, 19 nt, Artificial Sequence
  Description of Artificial Sequence: Synthetic oligonucleotide
  Sense strand starting at position 2323 of SEQ ID NO: 1885008
uguugugauggauauagua

SEQ ID NO: 2309003 - RNA, 19 nt, Artificial Sequence
  Description of Artificial Sequence: Synthetic oligonucleotide
  Antisense strand to SEQ ID NO: 2309002
uacuauauccaucacaaca

SEQ ID NO: 2309004 - RNA, 19 nt, Artificial Sequence
  Description of Artificial Sequence: Synthetic oligonucleotide
  Sense strand starting at position 2421 of SEQ ID NO: 1885008
acccaauuugcugguguua

SEQ ID NO: 2309005 - RNA, 19 nt, Artificial Sequence
  Description of Artificial Sequence: Synthetic oligonucleotide
  Antisense strand to SEQ ID NO: 2309004
uaacaccagcaaauugggu

SEQ ID NO: 2309006 - RNA, 19 nt, Artificial Sequence
  Description of Artificial Sequence: Synthetic oligonucleotide
  Sense strand starting at position 2435 of SEQ ID NO: 1885008
uguuauaagcuuggaggaa

SEQ ID NO: 2309007 - RNA, 19 nt, Artificial Sequence
  Description of Artificial Sequence: Synthetic oligonucleotide
  Antisense strand to SEQ ID NO: 2309006
uuccuccaagcuuauaaca

SEQ ID NO: 2309008 - RNA, 19 nt, Artificial Sequence
  Description of Artificial Sequence: Synthetic oligonucleotide
  Sense strand starting at position 2483 of SEQ ID NO: 1885008
ggaguuucugauuagucug

SEQ ID NO: 2309009 - RNA, 19 nt, Artificial Sequence
  Description of Artificial Sequence: Synthetic oligonucleotide
  Antisense strand to SEQ ID NO: 2309008
cagacuaaucagaaacucc

SEQ ID NO: 2309010 - RNA, 19 nt, Artificial Sequence
  Description of Artificial Sequence: Synthetic oligonucleotide
  Sense strand starting at position 2814 of SEQ ID NO: 1885008
ugugucauucuagcuuguu

SEQ ID NO: 2309011 - RNA, 19 nt, Artificial Sequence
  Description of Artificial Sequence: Synthetic oligonucleotide
  Antisense strand to SEQ ID NO: 2309010
aacaagcuagaaugacaca

SEQ ID NO: 2309012 - RNA, 19 nt, Artificial Sequence
  Description of Artificial Sequence: Synthetic oligonucleotide
  Sense strand starting at position 3002 of SEQ ID NO: 1885008
guuacaugagacugacaua

SEQ ID NO: 2309013 - RNA, 19 nt, Artificial Sequence
  Description of Artificial Sequence: Synthetic oligonucleotide
  Antisense strand to SEQ ID NO: 2309012
uaugucagucucauguaac

SEQ ID NO: 2309014 - RNA, 19 nt, Artificial Sequence
  Description of Artificial Sequence: Synthetic oligonucleotide
  Sense strand starting at position 3013 of SEQ ID NO: 1885008
cugacauaacagugucaag

SEQ ID NO: 2309015 - RNA, 19 nt, Artificial Sequence
  Description of Artificial Sequence: Synthetic oligonucleotide
  Antisense strand to SEQ ID NO: 2309014
cuugacacuguuaugucag

SEQ ID NO: 2309016 - RNA, 19 nt, Artificial Sequence
  Description of Artificial Sequence: Synthetic oligonucleotide
  Sense strand starting at position 3075 of SEQ ID NO: 1885008
gaguuuaauuuggaggaag

SEQ ID NO: 2309017 - RNA, 19 nt, Artificial Sequence
  Description of Artificial Sequence: Synthetic oligonucleotide
  Antisense strand to SEQ ID NO: 2309016
cuuccuccaaauuaaacuc

SEQ ID NO: 2309018 - RNA, 19 nt, Artificial Sequence
  Description of Artificial Sequence: Synthetic oligonucleotide
  Sense strand starting at position 3179 of SEQ ID NO: 1885008
gcaauaauaucuguaugga

SEQ ID NO: 2309019 - RNA, 19 nt, Artificial Sequence
  Description of Artificial Sequence: Synthetic oligonucleotide
  Antisense strand to SEQ ID NO: 2309018
uccauacagauauuauugc

SEQ ID NO: 2309020 - RNA, 19 nt, Artificial Sequence
  Description of Artificial Sequence: Synthetic oligonucleotide
  Sense strand starting at position 3199 of SEQ ID NO: 1885008
uuucuauugcgagaaauua

SEQ ID NO: 2309021 - RNA, 19 nt, Artificial Sequence
  Description of Artificial Sequence: Synthetic oligonucleotide
  Antisense strand to SEQ ID NO: 2309020
uaauuucucgcaauagaaa

SEQ ID NO: 2309022 - RNA, 19 nt, Artificial Sequence
  Description of Artificial Sequence: Synthetic oligonucleotide
  Sense strand starting at position 3325 of SEQ ID NO: 1885008
augugaaucuuggugaaua

SEQ ID NO: 2309023 - RNA, 19 nt, Artificial Sequence
  Description of Artificial Sequence: Synthetic oligonucleotide
  Antisense strand to SEQ ID NO: 2309022
uauucaccaagauucacau

SEQ ID NO: 2309024 - RNA, 19 nt, Artificial Sequence
  Description of Artificial Sequence: Synthetic oligonucleotide
  Sense strand starting at position 3387 of SEQ ID NO: 1885008
cuugauguuccaggaauga

SEQ ID NO: 2309025 - RNA, 19 nt, Artificial Sequence
  Description of Artificial Sequence: Synthetic oligonucleotide
  Antisense strand to SEQ ID NO: 2309024
ucauuccuggaacaucaag

SEQ ID NO: 2309026 - RNA, 19 nt, Artificial Sequence
  Description of Artificial Sequence: Synthetic oligonucleotide
  Sense strand starting at position 3495 of SEQ ID NO: 1885008
aaccaaacuccuugggagu

SEQ ID NO: 2309027 - RNA, 19 nt, Artificial Sequence
  Description of Artificial Sequence: Synthetic oligonucleotide
  Antisense strand to SEQ ID NO: 2309026
acucccaaggaguuugguu

SEQ ID NO: 2309028 - RNA, 19 nt, Artificial Sequence
  Description of Artificial Sequence: Synthetic oligonucleotide
  Sense strand starting at position 3782 of SEQ ID NO: 1885008
auaugcuuuguuuaggaua

SEQ ID NO: 2309029 - RNA, 19 nt, Artificial Sequence
  Description of Artificial Sequence: Synthetic oligonucleotide
  Antisense strand to SEQ ID NO: 2309028
uauccuaaacaaagcauau

SEQ ID NO: 2309030 - RNA, 19 nt, Artificial Sequence
  Description of Artificial Sequence: Synthetic oligonucleotide
  Sense strand starting at position 3872 of SEQ ID NO: 1885008
guagcuaagcuuuaggaaa

SEQ ID NO: 2309031 - RNA, 19 nt, Artificial Sequence
  Description of Artificial Sequence: Synthetic oligonucleotide
  Antisense strand to SEQ ID NO: 2309030
uuuccuaaagcuuagcuac

SEQ ID NO: 2309032 - RNA, 19 nt, Artificial Sequence
  Description of Artificial Sequence: Synthetic oligonucleotide
  Sense strand starting at position 3952 of SEQ ID NO: 1885008
ggauauaaauaggagagga

SEQ ID NO: 2309033 - RNA, 19 nt, Artificial Sequence
  Description of Artificial Sequence: Synthetic oligonucleotide
  Antisense strand to SEQ ID NO: 2309032
uccucuccuauuuauaucc

SEQ ID NO: 2309034 - RNA, 19 nt, Artificial Sequence
  Description of Artificial Sequence: Synthetic oligonucleotide
  Sense strand starting at position 353 of SEQ ID NO: 1885009
ggugaaccuuuguaucuac

SEQ ID NO: 2309035 - RNA, 19 nt, Artificial Sequence
  Description of Artificial Sequence: Synthetic oligonucleotide
  Antisense strand to SEQ ID NO: 2309034
guagauacaaagguucacc

SEQ ID NO: 2309036 - RNA, 19 nt, Artificial Sequence
  Description of Artificial Sequence: Synthetic oligonucleotide
  Sense strand starting at position 565 of SEQ ID NO: 1885009
gcaauaauaugucagcuuc

SEQ ID NO: 2309037 - RNA, 19 nt, Artificial Sequence
  Description of Artificial Sequence: Synthetic oligonucleotide
  Antisense strand to SEQ ID NO: 2309036
gaagcugacauauuauugc

SEQ ID NO: 2309038 - RNA, 19 nt, Artificial Sequence
  Description of Artificial Sequence: Synthetic oligonucleotide
  Sense strand starting at position 607 of SEQ ID NO: 1885009
gaagguuuagagugcuuag

SEQ ID NO: 2309039 - RNA, 19 nt, Artificial Sequence
  Description of Artificial Sequence: Synthetic oligonucleotide
  Antisense strand to SEQ ID NO: 2309038
cuaagcacucuaaaccuuc

SEQ ID NO: 2309040 - RNA, 19 nt, Artificial Sequence
  Description of Artificial Sequence: Synthetic oligonucleotide
  Sense strand starting at position 610 of SEQ ID NO: 1885009
gguuuagagugcuuagcac

SEQ ID NO: 2309041 - RNA, 19 nt, Artificial Sequence
  Description of Artificial Sequence: Synthetic oligonucleotide
  Antisense strand to SEQ ID NO: 2309040
gugcuaagcacucuaaacc

SEQ ID NO: 2309042 - RNA, 19 nt, Artificial Sequence
  Description of Artificial Sequence: Synthetic oligonucleotide
  Sense strand starting at position 616 of SEQ ID NO: 1885009
gagugcuuagcacguguaa

SEQ ID NO: 2309043 - RNA, 19 nt, Artificial Sequence
  Description of Artificial Sequence: Synthetic oligonucleotide
  Antisense strand to SEQ ID NO: 2309042
uuacacgugcuaagcacuc

SEQ ID NO: 2309044 - RNA, 19 nt, Artificial Sequence
  Description of Artificial Sequence: Synthetic oligonucleotide
  Sense strand starting at position 644 of SEQ ID NO: 1885009
augagaagguuauggcaca

SEQ ID NO: 2309045 - RNA, 19 nt, Artificial Sequence
  Description of Artificial Sequence: Synthetic oligonucleotide
  Antisense strand to SEQ ID NO: 2309044
ugugccauaaccuucucau

SEQ ID NO: 2309046 - RNA, 19 nt, Artificial Sequence
  Description of Artificial Sequence: Synthetic oligonucleotide
  Sense strand starting at position 807 of SEQ ID NO: 1885009
ggcagaaguucugaaacuu

SEQ ID NO: 2309047 - RNA, 19 nt, Artificial Sequence
  Description of Artificial Sequence: Synthetic oligonucleotide
  Antisense strand to SEQ ID NO: 2309046
aaguuucagaacuucugcc

SEQ ID NO: 2309048 - RNA, 19 nt, Artificial Sequence
  Description of Artificial Sequence: Synthetic oligonucleotide
  Sense strand starting at position 1172 of SEQ ID NO: 1885009
gcguaagccacugugucua

SEQ ID NO: 2309049 - RNA, 19 nt, Artificial Sequence
  Description of Artificial Sequence: Synthetic oligonucleotide
  Antisense strand to SEQ ID NO: 2309048
uagacacaguggcuuacgc

SEQ ID NO: 2309050 - RNA, 19 nt, Artificial Sequence
  Description of Artificial Sequence: Synthetic oligonucleotide
  Sense strand starting at position 1184 of SEQ ID NO: 1885009
gugucuagccuugaaagag

SEQ ID NO: 2309051 - RNA, 19 nt, Artificial Sequence
  Description of Artificial Sequence: Synthetic oligonucleotide
  Antisense strand to SEQ ID NO: 2309050
cucuuucaaggcuagacac

SEQ ID NO: 2309052 - RNA, 19 nt, Artificial Sequence
  Description of Artificial Sequence: Synthetic oligonucleotide
  Sense strand starting at position 1205 of SEQ ID NO: 1885009
uuuguuaggugaguuauau

SEQ ID NO: 2309053 - RNA, 19 nt, Artificial Sequence
  Description of Artificial Sequence: Synthetic oligonucleotide
  Antisense strand to SEQ ID NO: 2309052
auauaacucaccuaacaaa

SEQ ID NO: 2309054 - RNA, 19 nt, Artificial Sequence
  Description of Artificial Sequence: Synthetic oligonucleotide
  Sense strand starting at position 1214 of SEQ ID NO: 1885009
ugaguuauaucugcucaua

SEQ ID NO: 2309055 - RNA, 19 nt, Artificial Sequence
  Description of Artificial Sequence: Synthetic oligonucleotide
  Antisense strand to SEQ ID NO: 2309054
uaugagcagauauaacuca

SEQ ID NO: 2309056 - RNA, 19 nt, Artificial Sequence
  Description of Artificial Sequence: Synthetic oligonucleotide
  Sense strand starting at position 1216 of SEQ ID NO: 1885009
aguuauaucugcucauauc

SEQ ID NO: 2309057 - RNA, 19 nt, Artificial Sequence
  Description of Artificial Sequence: Synthetic oligonucleotide
  Antisense strand to SEQ ID NO: 2309056
gauaugagcagauauaacu

SEQ ID NO: 2309058 - RNA, 19 nt, Artificial Sequence
  Description of Artificial Sequence: Synthetic oligonucleotide
  Sense strand starting at position 1217 of SEQ ID NO: 1885009
guuauaucugcucauaucu

SEQ ID NO: 2309059 - RNA, 19 nt, Artificial Sequence
  Description of Artificial Sequence: Synthetic oligonucleotide
  Antisense strand to SEQ ID NO: 2309058
agauaugagcagauauaac

SEQ ID NO: 2309060 - RNA, 19 nt, Artificial Sequence
  Description of Artificial Sequence: Synthetic oligonucleotide
  Sense strand starting at position 2026 of SEQ ID NO: 1885009
ggauccucccacuggagua

SEQ ID NO: 2309061 - RNA, 19 nt, Artificial Sequence
  Description of Artificial Sequence: Synthetic oligonucleotide
  Antisense strand to SEQ ID NO: 2309060
uacuccagugggaggaucc

SEQ ID NO: 2309062 - RNA, 19 nt, Artificial Sequence
  Description of Artificial Sequence: Synthetic oligonucleotide
  Sense strand starting at position 2062 of SEQ ID NO: 1885009
acgccaccgugcuagauaa

SEQ ID NO: 2309063 - RNA, 19 nt, Artificial Sequence
  Description of Artificial Sequence: Synthetic oligonucleotide
  Antisense strand to SEQ ID NO: 2309062
uuaucuagcacgguggcgu

SEQ ID NO: 2309064 - RNA, 19 nt, Artificial Sequence
  Description of Artificial Sequence: Synthetic oligonucleotide
  Sense strand starting at position 2066 of SEQ ID NO: 1885009
caccgugcuagauaacgua

SEQ ID NO: 2309065 - RNA, 19 nt, Artificial Sequence
  Description of Artificial Sequence: Synthetic oligonucleotide
  Antisense strand to SEQ ID NO: 2309064
uacguuaucuagcacggug

SEQ ID NO: 2309066 - RNA, 19 nt, Artificial Sequence
  Description of Artificial Sequence: Synthetic oligonucleotide
  Sense strand starting at position 2069 of SEQ ID NO: 1885009
cgugcuagauaacguauga

SEQ ID NO: 2309067 - RNA, 19 nt, Artificial Sequence
  Description of Artificial Sequence: Synthetic oligonucleotide
  Antisense strand to SEQ ID NO: 2309066
ucauacguuaucuagcacg

SEQ ID NO: 2309068 - RNA, 19 nt, Artificial Sequence
  Description of Artificial Sequence: Synthetic oligonucleotide
  Sense strand starting at position 2073 of SEQ ID NO: 1885009
cuagauaacguaugaguuu

SEQ ID NO: 2309069 - RNA, 19 nt, Artificial Sequence
  Description of Artificial Sequence: Synthetic oligonucleotide
  Antisense strand to SEQ ID NO: 2309068
aaacucauacguuaucuag

SEQ ID NO: 2309070 - RNA, 19 nt, Artificial Sequence
  Description of Artificial Sequence: Synthetic oligonucleotide
  Sense strand starting at position 2238 of SEQ ID NO: 1885009
ccaccagagucggguaauu

SEQ ID NO: 2309071 - RNA, 19 nt, Artificial Sequence
  Description of Artificial Sequence: Synthetic oligonucleotide
  Antisense strand to SEQ ID NO: 2309070
aauuacccgacucuggugg

SEQ ID NO: 2309072 - RNA, 19 nt, Artificial Sequence
  Description of Artificial Sequence: Synthetic oligonucleotide
  Sense strand starting at position 2711 of SEQ ID NO: 1885009
cacuguggccaggaguauu

SEQ ID NO: 2309073 - RNA, 19 nt, Artificial Sequence
  Description of Artificial Sequence: Synthetic oligonucleotide
  Antisense strand to SEQ ID NO: 2309072
aauacuccuggccacagug

SEQ ID NO: 2309074 - RNA, 19 nt, Artificial Sequence
  Description of Artificial Sequence: Synthetic oligonucleotide
  Sense strand starting at position 3589 of SEQ ID NO: 1885009
gugcgcuuuauggcuacaa

SEQ ID NO: 2309075 - RNA, 19 nt, Artificial Sequence
  Description of Artificial Sequence: Synthetic oligonucleotide
  Antisense strand to SEQ ID NO: 2309074
uuguagccauaaagcgcac

SEQ ID NO: 2309076 - RNA, 19 nt, Artificial Sequence
  Description of Artificial Sequence: Synthetic oligonucleotide
  Sense strand starting at position 3636 of SEQ ID NO: 1885009
ccaagaucugacgguggaa

SEQ ID NO: 2309077 - RNA, 19 nt, Artificial Sequence
  Description of Artificial Sequence: Synthetic oligonucleotide
  Antisense strand to SEQ ID NO: 2309076
uuccaccgucagaucuugg

SEQ ID NO: 2309078 - RNA, 19 nt, Artificial Sequence
  Description of Artificial Sequence: Synthetic oligonucleotide
  Sense strand starting at position 3682 of SEQ ID NO: 1885009
ucaggaugcuaagagcaau

SEQ ID NO: 2309079 - RNA, 19 nt, Artificial Sequence
  Description of Artificial Sequence: Synthetic oligonucleotide
  Antisense strand to SEQ ID NO: 2309078
auugcucuuagcauccuga

SEQ ID NO: 2309080 - RNA, 19 nt, Artificial Sequence
  Description of Artificial Sequence: Synthetic oligonucleotide
  Sense strand starting at position 3917 of SEQ ID NO: 1885009
ugugaaguggcguucaugu

SEQ ID NO: 2309081 - RNA, 19 nt, Artificial Sequence
  Description of Artificial Sequence: Synthetic oligonucleotide
  Antisense strand to SEQ ID NO: 2309080
acaugaacgccacuucaca

SEQ ID NO: 2309082 - RNA, 19 nt, Artificial Sequence
  Description of Artificial Sequence: Synthetic oligonucleotide
  Sense strand starting at position 277 of SEQ ID NO: 1885010
gguaaaccagcacauugau

SEQ ID NO: 2309083 - RNA, 19 nt, Artificial Sequence
  Description of Artificial Sequence: Synthetic oligonucleotide
  Antisense strand to SEQ ID NO: 2309082
aucaaugugcugguuuacc

SEQ ID NO: 2309084 - RNA, 19 nt, Artificial Sequence
  Description of Artificial Sequence: Synthetic oligonucleotide
  Sense strand starting at position 392 of SEQ ID NO: 1885010
cauauagucugggucuaga

SEQ ID NO: 2309085 - RNA, 19 nt, Artificial Sequence
  Description of Artificial Sequence: Synthetic oligonucleotide
  Antisense strand to SEQ ID NO: 2309084
ucuagacccagacuauaug

SEQ ID NO: 2309086 - RNA, 19 nt, Artificial Sequence
  Description of Artificial Sequence: Synthetic oligonucleotide
  Sense strand starting at position 403 of SEQ ID NO: 1885010
ggucuagaagcugaguguu

SEQ ID NO: 2309087 - RNA, 19 nt, Artificial Sequence
  Description of Artificial Sequence: Synthetic oligonucleotide
  Antisense strand to SEQ ID NO: 2309086
aacacucagcuucuagacc

SEQ ID NO: 2309088 - RNA, 19 nt, Artificial Sequence
  Description of Artificial Sequence: Synthetic oligonucleotide
  Sense strand starting at position 405 of SEQ ID NO: 1885010
ucuagaagcugaguguuua

SEQ ID NO: 2309089 - RNA, 19 nt, Artificial Sequence
  Description of Artificial Sequence: Synthetic oligonucleotide
  Antisense strand to SEQ ID NO: 2309088
uaaacacucagcuucuaga

SEQ ID NO: 2309090 - RNA, 19 nt, Artificial Sequence
  Description of Artificial Sequence: Synthetic oligonucleotide
  Sense strand starting at position 777 of SEQ ID NO: 1885010
cucauuccagaaugcgauu

SEQ ID NO: 2309091 - RNA, 19 nt, Artificial Sequence
  Description of Artificial Sequence: Synthetic oligonucleotide
  Antisense strand to SEQ ID NO: 2309090
aaucgcauucuggaaugag

SEQ ID NO: 2309092 - RNA, 19 nt, Artificial Sequence
  Description of Artificial Sequence: Synthetic oligonucleotide
  Sense strand starting at position 797 of SEQ ID NO: 1885010
gggaucugccuaggaaagu

SEQ ID NO: 2309093 - RNA, 19 nt, Artificial Sequence
  Description of Artificial Sequence: Synthetic oligonucleotide
  Antisense strand to SEQ ID NO: 2309092
acuuuccuaggcagauccc

SEQ ID NO: 2309094 - RNA, 19 nt, Artificial Sequence
  Description of Artificial Sequence: Synthetic oligonucleotide
  Sense strand starting at position 909 of SEQ ID NO: 1885010
ucauguuggaccugaggaa

SEQ ID NO: 2309095 - RNA, 19 nt, Artificial Sequence
  Description of Artificial Sequence: Synthetic oligonucleotide
  Antisense strand to SEQ ID NO: 2309094
uuccucagguccaacauga

SEQ ID NO: 2309096 - RNA, 19 nt, Artificial Sequence
  Description of Artificial Sequence: Synthetic oligonucleotide
  Sense strand starting at position 1046 of SEQ ID NO: 1885010
cguauugugacagaguaaa

SEQ ID NO: 2309097 - RNA, 19 nt, Artificial Sequence
  Description of Artificial Sequence: Synthetic oligonucleotide
  Antisense strand to SEQ ID NO: 2309096
uuuacucugucacaauacg

SEQ ID NO: 2309098 - RNA, 19 nt, Artificial Sequence
  Description of Artificial Sequence: Synthetic oligonucleotide
  Sense strand starting at position 1057 of SEQ ID NO: 1885010
agaguaaauauguaugggu

SEQ ID NO: 2309099 - RNA, 19 nt, Artificial Sequence
  Description of Artificial Sequence: Synthetic oligonucleotide
  Antisense strand to SEQ ID NO: 2309098
acccauacauauuuacucu

SEQ ID NO: 2309100 - RNA, 19 nt, Artificial Sequence
  Description of Artificial Sequence: Synthetic oligonucleotide
  Sense strand starting at position 1059 of SEQ ID NO: 1885010
aguaaauauguauggguau

SEQ ID NO: 2309101 - RNA, 19 nt, Artificial Sequence
  Description of Artificial Sequence: Synthetic oligonucleotide
  Antisense strand to SEQ ID NO: 2309100
auacccauacauauuuacu

SEQ ID NO: 2309102 - RNA, 19 nt, Artificial Sequence
  Description of Artificial Sequence: Synthetic oligonucleotide
  Sense strand starting at position 1071 of SEQ ID NO: 1885010
uggguaugcccauggauuc

SEQ ID NO: 2309103 - RNA, 19 nt, Artificial Sequence
  Description of Artificial Sequence: Synthetic oligonucleotide
  Antisense strand to SEQ ID NO: 2309102
gaauccaugggcauaccca

SEQ ID NO: 2309104 - RNA, 19 nt, Artificial Sequence
  Description of Artificial Sequence: Synthetic oligonucleotide
  Sense strand starting at position 1785 of SEQ ID NO: 1885010
aggagcuuaagcgaucagu

SEQ ID NO: 2309105 - RNA, 19 nt, Artificial Sequence
  Description of Artificial Sequence: Synthetic oligonucleotide
  Antisense strand to SEQ ID NO: 2309104
acugaucgcuuaagcuccu

SEQ ID NO: 2309106 - RNA, 19 nt, Artificial Sequence
  Description of Artificial Sequence: Synthetic oligonucleotide
  Sense strand starting at position 1788 of SEQ ID NO: 1885010
agcuuaagcgaucaguuag

SEQ ID NO: 2309107 - RNA, 19 nt, Artificial Sequence
  Description of Artificial Sequence: Synthetic oligonucleotide
  Antisense strand to SEQ ID NO: 2309106
cuaacugaucgcuuaagcu

SEQ ID NO: 2309108 - RNA, 19 nt, Artificial Sequence
  Description of Artificial Sequence: Synthetic oligonucleotide
  Sense strand starting at position 1824 of SEQ ID NO: 1885010
gguaucaguagaugacaga

SEQ ID NO: 2309109 - RNA, 19 nt, Artificial Sequence
  Description of Artificial Sequence: Synthetic oligonucleotide
  Antisense strand to SEQ ID NO: 2309108
ucugucaucuacugauacc

SEQ ID NO: 2309110 - RNA, 19 nt, Artificial Sequence
  Description of Artificial Sequence: Synthetic oligonucleotide
  Sense strand starting at position 1866 of SEQ ID NO: 1885010
uuagacauccgucaacuua

SEQ ID NO: 2309111 - RNA, 19 nt, Artificial Sequence
  Description of Artificial Sequence: Synthetic oligonucleotide
  Antisense strand to SEQ ID NO: 2309110
uaaguugacggaugucuaa

SEQ ID NO: 2309112 - RNA, 19 nt, Artificial Sequence
  Description of Artificial Sequence: Synthetic oligonucleotide
  Sense strand starting at position 1875 of SEQ ID NO: 1885010
cgucaacuuagagaaagua

SEQ ID NO: 2309113 - RNA, 19 nt, Artificial Sequence
  Description of Artificial Sequence: Synthetic oligonucleotide
  Antisense strand to SEQ ID NO: 2309112
uacuuucucuaaguugacg

SEQ ID NO: 2309114 - RNA, 19 nt, Artificial Sequence
  Description of Artificial Sequence: Synthetic oligonucleotide
  Sense strand starting at position 2003 of SEQ ID NO: 1885010
acuaauaagucgucucuac

SEQ ID NO: 2309115 - RNA, 19 nt, Artificial Sequence
  Description of Artificial Sequence: Synthetic oligonucleotide
  Antisense strand to SEQ ID NO: 2309114
guagagacgacuuauuagu

SEQ ID NO: 2309116 - RNA, 19 nt, Artificial Sequence
  Description of Artificial Sequence: Synthetic oligonucleotide
  Sense strand starting at position 2007 of SEQ ID NO: 1885010
auaagucgucucuacuauu

SEQ ID NO: 2309117 - RNA, 19 nt, Artificial Sequence
  Description of Artificial Sequence: Synthetic oligonucleotide
  Antisense strand to SEQ ID NO: 2309116
aauaguagagacgacuuau

SEQ ID NO: 2309118 - RNA, 19 nt, Artificial Sequence
  Description of Artificial Sequence: Synthetic oligonucleotide
  Sense strand starting at position 2014 of SEQ ID NO: 1885010
gucucuacuauuggaggaa

SEQ ID NO: 2309119 - RNA, 19 nt, Artificial Sequence
  Description of Artificial Sequence: Synthetic oligonucleotide
  Antisense strand to SEQ ID NO: 2309118
uuccuccaauaguagagac

SEQ ID NO: 2309120 - RNA, 19 nt, Artificial Sequence
  Description of Artificial Sequence: Synthetic oligonucleotide
  Sense strand starting at position 2184 of SEQ ID NO: 1885010
aaggaagucuucuucugua

SEQ ID NO: 2309121 - RNA, 19 nt, Artificial Sequence
  Description of Artificial Sequence: Synthetic oligonucleotide
  Antisense strand to SEQ ID NO: 2309120
uacagaagaagacuuccuu

SEQ ID NO: 2309122 - RNA, 19 nt, Artificial Sequence
  Description of Artificial Sequence: Synthetic oligonucleotide
  Sense strand starting at position 2198 of SEQ ID NO: 1885010
cuguaauacucaguaaaua

SEQ ID NO: 2309123 - RNA, 19 nt, Artificial Sequence
  Description of Artificial Sequence: Synthetic oligonucleotide
  Antisense strand to SEQ ID NO: 2309122
uauuuacugaguauuacag

SEQ ID NO: 2309124 - RNA, 19 nt, Artificial Sequence
  Description of Artificial Sequence: Synthetic oligonucleotide
  Sense strand starting at position 2235 of SEQ ID NO: 1885010
gcaauaauauuaucuggga

SEQ ID NO: 2309125 - RNA, 19 nt, Artificial Sequence
  Description of Artificial Sequence: Synthetic oligonucleotide
  Antisense strand to SEQ ID NO: 2309124
ucccagauaauauuauugc

SEQ ID NO: 2309126 - RNA, 19 nt, Artificial Sequence
  Description of Artificial Sequence: Synthetic oligonucleotide
  Sense strand starting at position 2248 of SEQ ID NO: 1885010
cugggaauaugauaguaaa

SEQ ID NO: 2309127 - RNA, 19 nt, Artificial Sequence
  Description of Artificial Sequence: Synthetic oligonucleotide
  Antisense strand to SEQ ID NO: 2309126
uuuacuaucauauucccag

SEQ ID NO: 2309128 - RNA, 19 nt, Artificial Sequence
  Description of Artificial Sequence: Synthetic oligonucleotide
  Sense strand starting at position 2251 of SEQ ID NO: 1885010
ggaauaugauaguaaauag

SEQ ID NO: 2309129 - RNA, 19 nt, Artificial Sequence
  Description of Artificial Sequence: Synthetic oligonucleotide
  Antisense strand to SEQ ID NO: 2309128
cuauuuacuaucauauucc

SEQ ID NO: 2309130 - RNA, 19 nt, Artificial Sequence
  Description of Artificial Sequence: Synthetic oligonucleotide
  Sense strand starting at position 2319 of SEQ ID NO: 1885010
aguggugaggcagauaaau

SEQ ID NO: 2309131 - RNA, 19 nt, Artificial Sequence
  Description of Artificial Sequence: Synthetic oligonucleotide
  Antisense strand to SEQ ID NO: 2309130
auuuaucugccucaccacu

SEQ ID NO: 2309132 - RNA, 19 nt, Artificial Sequence
  Description of Artificial Sequence: Synthetic oligonucleotide
  Sense strand starting at position 2364 of SEQ ID NO: 1885010
acuuuaaacuguguacaug

SEQ ID NO: 2309133 - RNA, 19 nt, Artificial Sequence
  Description of Artificial Sequence: Synthetic oligonucleotide
  Antisense strand to SEQ ID NO: 2309132
cauguacacaguuuaaagu

SEQ ID NO: 2309134 - RNA, 19 nt, Artificial Sequence
  Description of Artificial Sequence: Synthetic oligonucleotide
  Sense strand starting at position 2365 of SEQ ID NO: 1885010
cuuuaaacuguguacaugu

SEQ ID NO: 2309135 - RNA, 19 nt, Artificial Sequence
  Description of Artificial Sequence: Synthetic oligonucleotide
  Antisense strand to SEQ ID NO: 2309134
acauguacacaguuuaaag

SEQ ID NO: 2309136 - RNA, 19 nt, Artificial Sequence
  Description of Artificial Sequence: Synthetic oligonucleotide
  Sense strand starting at position 2376 of SEQ ID NO: 1885010
guacaugugugacuuuaau

SEQ ID NO: 2309137 - RNA, 19 nt, Artificial Sequence
  Description of Artificial Sequence: Synthetic oligonucleotide
  Antisense strand to SEQ ID NO: 2309136
auuaaagucacacauguac

SEQ ID NO: 2309138 - RNA, 19 nt, Artificial Sequence
  Description of Artificial Sequence: Synthetic oligonucleotide
  Sense strand starting at position 2384 of SEQ ID NO: 1885010
gugacuuuaauagaagugu

SEQ ID NO: 2309139 - RNA, 19 nt, Artificial Sequence
  Description of Artificial Sequence: Synthetic oligonucleotide
  Antisense strand to SEQ ID NO: 2309138
acacuucuauuaaagucac

SEQ ID NO: 2309140 - RNA, 19 nt, Artificial Sequence
  Description of Artificial Sequence: Synthetic oligonucleotide
  Sense strand starting at position 3175 of SEQ ID NO: 1885010
uuuagucucgcuguacgua

SEQ ID NO: 2309141 - RNA, 19 nt, Artificial Sequence
  Description of Artificial Sequence: Synthetic oligonucleotide
  Antisense strand to SEQ ID NO: 2309140
uacguacagcgagacuaaa

SEQ ID NO: 2309142 - RNA, 19 nt, Artificial Sequence
  Description of Artificial Sequence: Synthetic oligonucleotide
  Sense strand starting at position 3203 of SEQ ID NO: 1885010
cucgcugguguauaauuua

SEQ ID NO: 2309143 - RNA, 19 nt, Artificial Sequence
  Description of Artificial Sequence: Synthetic oligonucleotide
  Antisense strand to SEQ ID NO: 2309142
uaaauuauacaccagcgag

SEQ ID NO: 2309144 - RNA, 19 nt, Artificial Sequence
  Description of Artificial Sequence: Synthetic oligonucleotide
  Sense strand starting at position 3285 of SEQ ID NO: 1885010
cuuaaaugcuuucuccgau

SEQ ID NO: 2309145 - RNA, 19 nt, Artificial Sequence
  Description of Artificial Sequence: Synthetic oligonucleotide
  Antisense strand to SEQ ID NO: 2309144
aucggagaaagcauuuaag

SEQ ID NO: 2309146 - RNA, 19 nt, Artificial Sequence
  Description of Artificial Sequence: Synthetic oligonucleotide
  Sense strand starting at position 3291 of SEQ ID NO: 1885010
ugcuuucuccgaugaugga

SEQ ID NO: 2309147 - RNA, 19 nt, Artificial Sequence
  Description of Artificial Sequence: Synthetic oligonucleotide
  Antisense strand to SEQ ID NO: 2309146
uccaucaucggagaaagca

SEQ ID NO: 2309148 - RNA, 19 nt, Artificial Sequence
  Description of Artificial Sequence: Synthetic oligonucleotide
  Sense strand starting at position 3292 of SEQ ID NO: 1885010
gcuuucuccgaugauggaa

SEQ ID NO: 2309149 - RNA, 19 nt, Artificial Sequence
  Description of Artificial Sequence: Synthetic oligonucleotide
  Antisense strand to SEQ ID NO: 2309148
uuccaucaucggagaaagc

SEQ ID NO: 2309150 - RNA, 19 nt, Artificial Sequence
  Description of Artificial Sequence: Synthetic oligonucleotide
  Sense strand starting at position 3398 of SEQ ID NO: 1885010
guuagaguauugguacuua

SEQ ID NO: 2309151 - RNA, 19 nt, Artificial Sequence
  Description of Artificial Sequence: Synthetic oligonucleotide
  Antisense strand to SEQ ID NO: 2309150
uaaguaccaauacucuaac

SEQ ID NO: 2309152 - RNA, 19 nt, Artificial Sequence
  Description of Artificial Sequence: Synthetic oligonucleotide
  Sense strand starting at position 3402 of SEQ ID NO: 1885010
gaguauugguacuuaaacg

SEQ ID NO: 2309153 - RNA, 19 nt, Artificial Sequence
  Description of Artificial Sequence: Synthetic oligonucleotide
  Antisense strand to SEQ ID NO: 2309152
cguuuaaguaccaauacuc

SEQ ID NO: 2309154 - RNA, 19 nt, Artificial Sequence
  Description of Artificial Sequence: Synthetic oligonucleotide
  Sense strand starting at position 3520 of SEQ ID NO: 1885010
ugguaagccuuguucuaag

SEQ ID NO: 2309155 - RNA, 19 nt, Artificial Sequence
  Description of Artificial Sequence: Synthetic oligonucleotide
  Antisense strand to SEQ ID NO: 2309154
cuuagaacaaggcuuacca

SEQ ID NO: 2309156 - RNA, 19 nt, Artificial Sequence
  Description of Artificial Sequence: Synthetic oligonucleotide
  Sense strand starting at position 3877 of SEQ ID NO: 1885010
guacuugaagacuguaaag

SEQ ID NO: 2309157 - RNA, 19 nt, Artificial Sequence
  Description of Artificial Sequence: Synthetic oligonucleotide
  Antisense strand to SEQ ID NO: 2309156
cuuuacagucuucaaguac

SEQ ID NO: 2309158 - RNA, 19 nt, Artificial Sequence
  Description of Artificial Sequence: Synthetic oligonucleotide
  Sense strand starting at position 3888 of SEQ ID NO: 1885010
cuguaaaguugauucugau

SEQ ID NO: 2309159 - RNA, 19 nt, Artificial Sequence
  Description of Artificial Sequence: Synthetic oligonucleotide
  Antisense strand to SEQ ID NO: 2309158
aucagaaucaacuuuacag

SEQ ID NO: 2309160 - RNA, 19 nt, Artificial Sequence
  Description of Artificial Sequence: Synthetic oligonucleotide
  Sense strand starting at position 3902 of SEQ ID NO: 1885010
cugauaaucuccuugguuu

SEQ ID NO: 2309161 - RNA, 19 nt, Artificial Sequence
  Description of Artificial Sequence: Synthetic oligonucleotide
  Antisense strand to SEQ ID NO: 2309160
aaaccaaggagauuaucag

SEQ ID NO: 2309162 - RNA, 19 nt, Artificial Sequence
  Description of Artificial Sequence: Synthetic oligonucleotide
  Sense strand starting at position 473 of SEQ ID NO: 1885011
aggcauuccguuuaaguac

SEQ ID NO: 2309163 - RNA, 19 nt, Artificial Sequence
  Description of Artificial Sequence: Synthetic oligonucleotide
  Antisense strand to SEQ ID NO: 2309162
guacuuaaacggaaugccu

SEQ ID NO: 2309164 - RNA, 19 nt, Artificial Sequence
  Description of Artificial Sequence: Synthetic oligonucleotide
  Sense strand starting at position 518 of SEQ ID NO: 1885011
gccuuccacuagucuuaca

SEQ ID NO: 2309165 - RNA, 19 nt, Artificial Sequence
  Description of Artificial Sequence: Synthetic oligonucleotide
  Antisense strand to SEQ ID NO: 2309164
uguaagacuaguggaaggc

SEQ ID NO: 2309166 - RNA, 19 nt, Artificial Sequence
  Description of Artificial Sequence: Synthetic oligonucleotide
  Sense strand starting at position 587 of SEQ ID NO: 1885011
aagcuuccaucaucggaga

SEQ ID NO: 2309167 - RNA, 19 nt, Artificial Sequence
  Description of Artificial Sequence: Synthetic oligonucleotide
  Antisense strand to SEQ ID NO: 2309166
ucuccgaugauggaagcuu

SEQ ID NO: 2309168 - RNA, 19 nt, Artificial Sequence
  Description of Artificial Sequence: Synthetic oligonucleotide
  Sense strand starting at position 588 of SEQ ID NO: 1885011
agcuuccaucaucggagaa

SEQ ID NO: 2309169 - RNA, 19 nt, Artificial Sequence
  Description of Artificial Sequence: Synthetic oligonucleotide
  Antisense strand to SEQ ID NO: 2309168
uucuccgaugauggaagcu

SEQ ID NO: 2309170 - RNA, 19 nt, Artificial Sequence
  Description of Artificial Sequence: Synthetic oligonucleotide
  Sense strand starting at position 589 of SEQ ID NO: 1885011
gcuuccaucaucggagaaa

SEQ ID NO: 2309171 - RNA, 19 nt, Artificial Sequence
  Description of Artificial Sequence: Synthetic oligonucleotide
  Antisense strand to SEQ ID NO: 2309170
uuucuccgaugauggaagc

SEQ ID NO: 2309172 - RNA, 19 nt, Artificial Sequence
  Description of Artificial Sequence: Synthetic oligonucleotide
  Sense strand starting at position 590 of SEQ ID NO: 1885011
cuuccaucaucggagaaag

SEQ ID NO: 2309173 - RNA, 19 nt, Artificial Sequence
  Description of Artificial Sequence: Synthetic oligonucleotide
  Antisense strand to SEQ ID NO: 2309172
cuuucuccgaugauggaag

SEQ ID NO: 2309174 - RNA, 19 nt, Artificial Sequence
  Description of Artificial Sequence: Synthetic oligonucleotide
  Sense strand starting at position 683 of SEQ ID NO: 1885011
auuauacaccagcgagauu

SEQ ID NO: 2309175 - RNA, 19 nt, Artificial Sequence
  Description of Artificial Sequence: Synthetic oligonucleotide
  Antisense strand to SEQ ID NO: 2309174
aaucucgcugguguauaau

SEQ ID NO: 2309176 - RNA, 19 nt, Artificial Sequence
  Description of Artificial Sequence: Synthetic oligonucleotide
  Sense strand starting at position 696 of SEQ ID NO: 1885011
gagauugacaguuacguac

SEQ ID NO: 2309177 - RNA, 19 nt, Artificial Sequence
  Description of Artificial Sequence: Synthetic oligonucleotide
  Antisense strand to SEQ ID NO: 2309176
guacguaacugucaaucuc

SEQ ID NO: 2309178 - RNA, 19 nt, Artificial Sequence
  Description of Artificial Sequence: Synthetic oligonucleotide
  Sense strand starting at position 1441 of SEQ ID NO: 1885011
uugccauagaaauggaguu

SEQ ID NO: 2309179 - RNA, 19 nt, Artificial Sequence
  Description of Artificial Sequence: Synthetic oligonucleotide
  Antisense strand to SEQ ID NO: 2309178
aacuccauuucuauggcaa

SEQ ID NO: 2309180 - RNA, 19 nt, Artificial Sequence
  Description of Artificial Sequence: Synthetic oligonucleotide
  Sense strand starting at position 1453 of SEQ ID NO: 1885011
uggaguucuugcucacacu

SEQ ID NO: 2309181 - RNA, 19 nt, Artificial Sequence
  Description of Artificial Sequence: Synthetic oligonucleotide
  Antisense strand to SEQ ID NO: 2309180
agugugagcaagaacucca

SEQ ID NO: 2309182 - RNA, 19 nt, Artificial Sequence
  Description of Artificial Sequence: Synthetic oligonucleotide
  Sense strand starting at position 1454 of SEQ ID NO: 1885011
ggaguucuugcucacacuu

SEQ ID NO: 2309183 - RNA, 19 nt, Artificial Sequence
  Description of Artificial Sequence: Synthetic oligonucleotide
  Antisense strand to SEQ ID NO: 2309182
aagugugagcaagaacucc

SEQ ID NO: 2309184 - RNA, 19 nt, Artificial Sequence
  Description of Artificial Sequence: Synthetic oligonucleotide
  Sense strand starting at position 1580 of SEQ ID NO: 1885011
acuuccugucuccaggaaa

SEQ ID NO: 2309185 - RNA, 19 nt, Artificial Sequence
  Description of Artificial Sequence: Synthetic oligonucleotide
  Antisense strand to SEQ ID NO: 2309184
uuuccuggagacaggaagu

SEQ ID NO: 2309186 - RNA, 19 nt, Artificial Sequence
  Description of Artificial Sequence: Synthetic oligonucleotide
  Sense strand starting at position 1687 of SEQ ID NO: 1885011
uuuacugaguauuacagaa

SEQ ID NO: 2309187 - RNA, 19 nt, Artificial Sequence
  Description of Artificial Sequence: Synthetic oligonucleotide
  Antisense strand to SEQ ID NO: 2309186
uucuguaauacucaguaaa

SEQ ID NO: 2309188 - RNA, 19 nt, Artificial Sequence
  Description of Artificial Sequence: Synthetic oligonucleotide
  Sense strand starting at position 1689 of SEQ ID NO: 1885011
uacugaguauuacagaaga

SEQ ID NO: 2309189 - RNA, 19 nt, Artificial Sequence
  Description of Artificial Sequence: Synthetic oligonucleotide
  Antisense strand to SEQ ID NO: 2309188
ucuucuguaauacucagua

SEQ ID NO: 2309190 - RNA, 19 nt, Artificial Sequence
  Description of Artificial Sequence: Synthetic oligonucleotide
  Sense strand starting at position 1740 of SEQ ID NO: 1885011
guuauuucuaacuggacgu

SEQ ID NO: 2309191 - RNA, 19 nt, Artificial Sequence
  Description of Artificial Sequence: Synthetic oligonucleotide
  Antisense strand to SEQ ID NO: 2309190
acguccaguuagaaauaac

SEQ ID NO: 2309192 - RNA, 19 nt, Artificial Sequence
  Description of Artificial Sequence: Synthetic oligonucleotide
  Sense strand starting at position 1775 of SEQ ID NO: 1885011
ggucuugugaacugagaga

SEQ ID NO: 2309193 - RNA, 19 nt, Artificial Sequence
  Description of Artificial Sequence: Synthetic oligonucleotide
  Antisense strand to SEQ ID NO: 2309192
ucucucaguucacaagacc

SEQ ID NO: 2309194 - RNA, 19 nt, Artificial Sequence
  Description of Artificial Sequence: Synthetic oligonucleotide
  Sense strand starting at position 1790 of SEQ ID NO: 1885011
gagagacauuuauaguauu

SEQ ID NO: 2309195 - RNA, 19 nt, Artificial Sequence
  Description of Artificial Sequence: Synthetic oligonucleotide
  Antisense strand to SEQ ID NO: 2309194
aauacuauaaaugucucuc

SEQ ID NO: 2309196 - RNA, 19 nt, Artificial Sequence
  Description of Artificial Sequence: Synthetic oligonucleotide
  Sense strand starting at position 1886 of SEQ ID NO: 1885011
acgacuuauuagucuuugu

SEQ ID NO: 2309197 - RNA, 19 nt, Artificial Sequence
  Description of Artificial Sequence: Synthetic oligonucleotide
  Antisense strand to SEQ ID NO: 2309196
acaaagacuaauaagucgu

SEQ ID NO: 2309198 - RNA, 19 nt, Artificial Sequence
  Description of Artificial Sequence: Synthetic oligonucleotide
  Sense strand starting at position 2017 of SEQ ID NO: 1885011
uaaguugacggaugucuaa

SEQ ID NO: 2309199 - RNA, 19 nt, Artificial Sequence
  Description of Artificial Sequence: Synthetic oligonucleotide
  Antisense strand to SEQ ID NO: 2309198
uuagacauccgucaacuua

SEQ ID NO: 2309200 - RNA, 19 nt, Artificial Sequence
  Description of Artificial Sequence: Synthetic oligonucleotide
  Sense strand starting at position 2091 of SEQ ID NO: 1885011
uugacuaacugaucgcuua

SEQ ID NO: 2309201 - RNA, 19 nt, Artificial Sequence
  Description of Artificial Sequence: Synthetic oligonucleotide
  Antisense strand to SEQ ID NO: 2309200
uaagcgaucaguuagucaa

SEQ ID NO: 2309202 - RNA, 19 nt, Artificial Sequence
  Description of Artificial Sequence: Synthetic oligonucleotide
  Sense strand starting at position 2092 of SEQ ID NO: 1885011
ugacuaacugaucgcuuaa

SEQ ID NO: 2309203 - RNA, 19 nt, Artificial Sequence
  Description of Artificial Sequence: Synthetic oligonucleotide
  Antisense strand to SEQ ID NO: 2309202
uuaagcgaucaguuaguca

SEQ ID NO: 2309204 - RNA, 19 nt, Artificial Sequence
  Description of Artificial Sequence: Synthetic oligonucleotide
  Sense strand starting at position 2618 of SEQ ID NO: 1885011
uccucuaaguggguugauu

SEQ ID NO: 2309205 - RNA, 19 nt, Artificial Sequence
  Description of Artificial Sequence: Synthetic oligonucleotide
  Antisense strand to SEQ ID NO: 2309204
aaucaacccacuuagagga

SEQ ID NO: 2309206 - RNA, 19 nt, Artificial Sequence
  Description of Artificial Sequence: Synthetic oligonucleotide
  Sense strand starting at position 2808 of SEQ ID NO: 1885011
auuggaauccaugggcaua

SEQ ID NO: 2309207 - RNA, 19 nt, Artificial Sequence
  Description of Artificial Sequence: Synthetic oligonucleotide
  Antisense strand to SEQ ID NO: 2309206
uaugcccauggauuccaau

SEQ ID NO: 2309208 - RNA, 19 nt, Artificial Sequence
  Description of Artificial Sequence: Synthetic oligonucleotide
  Sense strand starting at position 2819 of SEQ ID NO: 1885011
ugggcauacccauacauau

SEQ ID NO: 2309209 - RNA, 19 nt, Artificial Sequence
  Description of Artificial Sequence: Synthetic oligonucleotide
  Antisense strand to SEQ ID NO: 2309208
auauguauggguaugccca

SEQ ID NO: 2309210 - RNA, 19 nt, Artificial Sequence
  Description of Artificial Sequence: Synthetic oligonucleotide
  Sense strand starting at position 2845 of SEQ ID NO: 1885011
gucacaauacgauagcaga

SEQ ID NO: 2309211 - RNA, 19 nt, Artificial Sequence
  Description of Artificial Sequence: Synthetic oligonucleotide
  Antisense strand to SEQ ID NO: 2309210
ucugcuaucguauugugac

SEQ ID NO: 2309212 - RNA, 19 nt, Artificial Sequence
  Description of Artificial Sequence: Synthetic oligonucleotide
  Sense strand starting at position 2863 of SEQ ID NO: 1885011
aguuauguggcagaguuga

SEQ ID NO: 2309213 - RNA, 19 nt, Artificial Sequence
  Description of Artificial Sequence: Synthetic oligonucleotide
  Antisense strand to SEQ ID NO: 2309212
ucaacucugccacauaacu

SEQ ID NO: 2309214 - RNA, 19 nt, Artificial Sequence
  Description of Artificial Sequence: Synthetic oligonucleotide
  Sense strand starting at position 2878 of SEQ ID NO: 1885011
uugaguagucaugacaggu

SEQ ID NO: 2309215 - RNA, 19 nt, Artificial Sequence
  Description of Artificial Sequence: Synthetic oligonucleotide
  Antisense strand to SEQ ID NO: 2309214
accugucaugacuacucaa

SEQ ID NO: 2309216 - RNA, 19 nt, Artificial Sequence
  Description of Artificial Sequence: Synthetic oligonucleotide
  Sense strand starting at position 2882 of SEQ ID NO: 1885011
guagucaugacagguugaa

SEQ ID NO: 2309217 - RNA, 19 nt, Artificial Sequence
  Description of Artificial Sequence: Synthetic oligonucleotide
  Antisense strand to SEQ ID NO: 2309216
uucaaccugucaugacuac

SEQ ID NO: 2309218 - RNA, 19 nt, Artificial Sequence
  Description of Artificial Sequence: Synthetic oligonucleotide
  Sense strand starting at position 2997 of SEQ ID NO: 1885011
gggaguucaggcuggacaa

SEQ ID NO: 2309219 - RNA, 19 nt, Artificial Sequence
  Description of Artificial Sequence: Synthetic oligonucleotide
  Antisense strand to SEQ ID NO: 2309218
uuguccagccugaacuccc

SEQ ID NO: 2309220 - RNA, 19 nt, Artificial Sequence
  Description of Artificial Sequence: Synthetic oligonucleotide
  Sense strand starting at position 2998 of SEQ ID NO: 1885011
ggaguucaggcuggacaaa

SEQ ID NO: 2309221 - RNA, 19 nt, Artificial Sequence
  Description of Artificial Sequence: Synthetic oligonucleotide
  Antisense strand to SEQ ID NO: 2309220
uuuguccagccugaacucc

SEQ ID NO: 2309222 - RNA, 19 nt, Artificial Sequence
  Description of Artificial Sequence: Synthetic oligonucleotide
  Sense strand starting at position 3083 of SEQ ID NO: 1885011
uguacuuuccuaggcagau

SEQ ID NO: 2309223 - RNA, 19 nt, Artificial Sequence
  Description of Artificial Sequence: Synthetic oligonucleotide
  Antisense strand to SEQ ID NO: 2309222
aucugccuaggaaaguaca

SEQ ID NO: 2309224 - RNA, 19 nt, Artificial Sequence
  Description of Artificial Sequence: Synthetic oligonucleotide
  Sense strand starting at position 3084 of SEQ ID NO: 1885011
guacuuuccuaggcagauc

SEQ ID NO: 2309225 - RNA, 19 nt, Artificial Sequence
  Description of Artificial Sequence: Synthetic oligonucleotide
  Antisense strand to SEQ ID NO: 2309224
gaucugccuaggaaaguac

SEQ ID NO: 2309226 - RNA, 19 nt, Artificial Sequence
  Description of Artificial Sequence: Synthetic oligonucleotide
  Sense strand starting at position 3109 of SEQ ID NO: 1885011
cgcauucuggaaugagaag

SEQ ID NO: 2309227 - RNA, 19 nt, Artificial Sequence
  Description of Artificial Sequence: Synthetic oligonucleotide
  Antisense strand to SEQ ID NO: 2309226
cuucucauuccagaaugcg

SEQ ID NO: 2309228 - RNA, 19 nt, Artificial Sequence
  Description of Artificial Sequence: Synthetic oligonucleotide
  Sense strand starting at position 3143 of SEQ ID NO: 1885011
cuaagaugccugcacaaua

SEQ ID NO: 2309229 - RNA, 19 nt, Artificial Sequence
  Description of Artificial Sequence: Synthetic oligonucleotide
  Antisense strand to SEQ ID NO: 2309228
uauugugcaggcaucuuag

SEQ ID NO: 2309230 - RNA, 19 nt, Artificial Sequence
  Description of Artificial Sequence: Synthetic oligonucleotide
  Sense strand starting at position 3210 of SEQ ID NO: 1885011
uuuauuauguccucuggua

SEQ ID NO: 2309231 - RNA, 19 nt, Artificial Sequence
  Description of Artificial Sequence: Synthetic oligonucleotide
  Antisense strand to SEQ ID NO: 2309230
uaccagaggacauaauaaa

SEQ ID NO: 2309232 - RNA, 19 nt, Artificial Sequence
  Description of Artificial Sequence: Synthetic oligonucleotide
  Sense strand starting at position 3388 of SEQ ID NO: 1885011
uuggaaauguguccuuucu

SEQ ID NO: 2309233 - RNA, 19 nt, Artificial Sequence
  Description of Artificial Sequence: Synthetic oligonucleotide
  Antisense strand to SEQ ID NO: 2309232
agaaaggacacauuuccaa

SEQ ID NO: 2309234 - RNA, 19 nt, Artificial Sequence
  Description of Artificial Sequence: Synthetic oligonucleotide
  Sense strand starting at position 3499 of SEQ ID NO: 1885011
cagacuauaugaguuugaa

SEQ ID NO: 2309235 - RNA, 19 nt, Artificial Sequence
  Description of Artificial Sequence: Synthetic oligonucleotide
  Antisense strand to SEQ ID NO: 2309234
uucaaacucauauagucug

SEQ ID NO: 2309236 - RNA, 19 nt, Artificial Sequence
  Description of Artificial Sequence: Synthetic oligonucleotide
  Sense strand starting at position 3503 of SEQ ID NO: 1885011
cuauaugaguuugaauuuc

SEQ ID NO: 2309237 - RNA, 19 nt, Artificial Sequence
  Description of Artificial Sequence: Synthetic oligonucleotide
  Antisense strand to SEQ ID NO: 2309236
gaaauucaaacucauauag

SEQ ID NO: 2309238 - RNA, 19 nt, Artificial Sequence
  Description of Artificial Sequence: Synthetic oligonucleotide
  Sense strand starting at position 3595 of SEQ ID NO: 1885011
uucagagcgugaucaaugu

SEQ ID NO: 2309239 - RNA, 19 nt, Artificial Sequence
  Description of Artificial Sequence: Synthetic oligonucleotide
  Antisense strand to SEQ ID NO: 2309238
acauugaucacgcucugaa

SEQ ID NO: 2309240 - RNA, 19 nt, Artificial Sequence
  Description of Artificial Sequence: Synthetic oligonucleotide
  Sense strand starting at position 3605 of SEQ ID NO: 1885011
gaucaaugugcugguuuac

SEQ ID NO: 2309241 - RNA, 19 nt, Artificial Sequence
  Description of Artificial Sequence: Synthetic oligonucleotide
  Antisense strand to SEQ ID NO: 2309240
guaaaccagcacauugauc

SEQ ID NO: 2309242 - RNA, 19 nt, Artificial Sequence
  Description of Artificial Sequence: Synthetic oligonucleotide
  Sense strand starting at position 20 of SEQ ID NO: 1885012
cuuacagauguuugggacu

SEQ ID NO: 2309243 - RNA, 19 nt, Artificial Sequence
  Description of Artificial Sequence: Synthetic oligonucleotide
  Antisense strand to SEQ ID NO: 2309242
agucccaaacaucuguaag

SEQ ID NO: 2309244 - RNA, 19 nt, Artificial Sequence
  Description of Artificial Sequence: Synthetic oligonucleotide
  Sense strand starting at position 26 of SEQ ID NO: 1885012
gauguuugggacugauaga

SEQ ID NO: 2309245 - RNA, 19 nt, Artificial Sequence
  Description of Artificial Sequence: Synthetic oligonucleotide
  Antisense strand to SEQ ID NO: 2309244
ucuaucagucccaaacauc

SEQ ID NO: 2309246 - RNA, 19 nt, Artificial Sequence
  Description of Artificial Sequence: Synthetic oligonucleotide
  Sense strand starting at position 64 of SEQ ID NO: 1885012
cccaaauguugacccgaua

SEQ ID NO: 2309247 - RNA, 19 nt, Artificial Sequence
  Description of Artificial Sequence: Synthetic oligonucleotide
  Antisense strand to SEQ ID NO: 2309246
uaucgggucaacauuuggg

SEQ ID NO: 2309248 - RNA, 19 nt, Artificial Sequence
  Description of Artificial Sequence: Synthetic oligonucleotide
  Sense strand starting at position 343 of SEQ ID NO: 1885012
gaagaauacugagggauuu

SEQ ID NO: 2309249 - RNA, 19 nt, Artificial Sequence
  Description of Artificial Sequence: Synthetic oligonucleotide
  Antisense strand to SEQ ID NO: 2309248
aaaucccucaguauucuuc

SEQ ID NO: 2309250 - RNA, 19 nt, Artificial Sequence
  Description of Artificial Sequence: Synthetic oligonucleotide
  Sense strand starting at position 470 of SEQ ID NO: 1885012
guagaaggugguuguagaa

SEQ ID NO: 2309251 - RNA, 19 nt, Artificial Sequence
  Description of Artificial Sequence: Synthetic oligonucleotide
  Antisense strand to SEQ ID NO: 2309250
uucuacaaccaccuucuac

SEQ ID NO: 2309252 - RNA, 19 nt, Artificial Sequence
  Description of Artificial Sequence: Synthetic oligonucleotide
  Sense strand starting at position 495 of SEQ ID NO: 1885012
ugaauuaaacuuggcauau

SEQ ID NO: 2309253 - RNA, 19 nt, Artificial Sequence
  Description of Artificial Sequence: Synthetic oligonucleotide
  Antisense strand to SEQ ID NO: 2309252
auaugccaaguuuaauuca

SEQ ID NO: 2309254 - RNA, 19 nt, Artificial Sequence
  Description of Artificial Sequence: Synthetic oligonucleotide
  Sense strand starting at position 533 of SEQ ID NO: 1885012
cuaagaauuacgugaaugu

SEQ ID NO: 2309255 - RNA, 19 nt, Artificial Sequence
  Description of Artificial Sequence: Synthetic oligonucleotide
  Antisense strand to SEQ ID NO: 2309254
acauucacguaauucuuag

SEQ ID NO: 2309256 - RNA, 19 nt, Artificial Sequence
  Description of Artificial Sequence: Synthetic oligonucleotide
  Sense strand starting at position 534 of SEQ ID NO: 1885012
uaagaauuacgugaaugug

SEQ ID NO: 2309257 - RNA, 19 nt, Artificial Sequence
  Description of Artificial Sequence: Synthetic oligonucleotide
  Antisense strand to SEQ ID NO: 2309256
cacauucacguaauucuua

SEQ ID NO: 2309258 - RNA, 19 nt, Artificial Sequence
  Description of Artificial Sequence: Synthetic oligonucleotide
  Sense strand starting at position 553 of SEQ ID NO: 1885012
cuugguauagcuugggaaa

SEQ ID NO: 2309259 - RNA, 19 nt, Artificial Sequence
  Description of Artificial Sequence: Synthetic oligonucleotide
  Antisense strand to SEQ ID NO: 2309258
uuucccaagcuauaccaag

SEQ ID NO: 2309260 - RNA, 19 nt, Artificial Sequence
  Description of Artificial Sequence: Synthetic oligonucleotide
  Sense strand starting at position 584 of SEQ ID NO: 1885012
auccaagagccgugagauu

SEQ ID NO: 2309261 - RNA, 19 nt, Artificial Sequence
  Description of Artificial Sequence: Synthetic oligonucleotide
  Antisense strand to SEQ ID NO: 2309260
aaucucacggcucuuggau

SEQ ID NO: 2309262 - RNA, 19 nt, Artificial Sequence
  Description of Artificial Sequence: Synthetic oligonucleotide
  Sense strand starting at position 757 of SEQ ID NO: 1885012
agagaauucuggcccaucu

SEQ ID NO: 2309263 - RNA, 19 nt, Artificial Sequence
  Description of Artificial Sequence: Synthetic oligonucleotide
  Antisense strand to SEQ ID NO: 2309262
agaugggccagaauucucu

SEQ ID NO: 2309264 - RNA, 19 nt, Artificial Sequence
  Description of Artificial Sequence: Synthetic oligonucleotide
  Sense strand starting at position 767 of SEQ ID NO: 1885012
ggcccaucugcagaaacau

SEQ ID NO: 2309265 - RNA, 19 nt, Artificial Sequence
  Description of Artificial Sequence: Synthetic oligonucleotide
  Antisense strand to SEQ ID NO: 2309264
auguuucugcagaugggcc

SEQ ID NO: 2309266 - RNA, 19 nt, Artificial Sequence
  Description of Artificial Sequence: Synthetic oligonucleotide
  Sense strand starting at position 812 of SEQ ID NO: 1885012
aguauaagaucccugucca

SEQ ID NO: 2309267 - RNA, 19 nt, Artificial Sequence
  Description of Artificial Sequence: Synthetic oligonucleotide
  Antisense strand to SEQ ID NO: 2309266
uggacagggaucuuauacu

SEQ ID NO: 2309268 - RNA, 19 nt, Artificial Sequence
  Description of Artificial Sequence: Synthetic oligonucleotide
  Sense strand starting at position 813 of SEQ ID NO: 1885012
guauaagaucccuguccaa

SEQ ID NO: 2309269 - RNA, 19 nt, Artificial Sequence
  Description of Artificial Sequence: Synthetic oligonucleotide
  Antisense strand to SEQ ID NO: 2309268
uuggacagggaucuuauac

SEQ ID NO: 2309270 - RNA, 19 nt, Artificial Sequence
  Description of Artificial Sequence: Synthetic oligonucleotide
  Sense strand starting at position 940 of SEQ ID NO: 1885012
gaaugaaucuacgugguua

SEQ ID NO: 2309271 - RNA, 19 nt, Artificial Sequence
  Description of Artificial Sequence: Synthetic oligonucleotide
  Antisense strand to SEQ ID NO: 2309270
uaaccacguagauucauuc

SEQ ID NO: 2309272 - RNA, 19 nt, Artificial Sequence
  Description of Artificial Sequence: Synthetic oligonucleotide
  Sense strand starting at position 944 of SEQ ID NO: 1885012
gaaucuacgugguuaggga

SEQ ID NO: 2309273 - RNA, 19 nt, Artificial Sequence
  Description of Artificial Sequence: Synthetic oligonucleotide
  Antisense strand to SEQ ID NO: 2309272
ucccuaaccacguagauuc

SEQ ID NO: 2309274 - RNA, 19 nt, Artificial Sequence
  Description of Artificial Sequence: Synthetic oligonucleotide
  Sense strand starting at position 976 of SEQ ID NO: 1885012
acugauucugacugagcaa

SEQ ID NO: 2309275 - RNA, 19 nt, Artificial Sequence
  Description of Artificial Sequence: Synthetic oligonucleotide
  Antisense strand to SEQ ID NO: 2309274
uugcucagucagaaucagu

SEQ ID NO: 2309276 - RNA, 19 nt, Artificial Sequence
  Description of Artificial Sequence: Synthetic oligonucleotide
  Sense strand starting at position 1210 of SEQ ID NO: 1885012
gcaagaagggacugucuau

SEQ ID NO: 2309277 - RNA, 19 nt, Artificial Sequence
  Description of Artificial Sequence: Synthetic oligonucleotide
  Antisense strand to SEQ ID NO: 2309276
auagacagucccuucuugc

SEQ ID NO: 2309278 - RNA, 19 nt, Artificial Sequence
  Description of Artificial Sequence: Synthetic oligonucleotide
  Sense strand starting at position 1547 of SEQ ID NO: 1885012
ggaggugccagguauuaaa

SEQ ID NO: 2309279 - RNA, 19 nt, Artificial Sequence
  Description of Artificial Sequence: Synthetic oligonucleotide
  Antisense strand to SEQ ID NO: 2309278
uuuaauaccuggcaccucc

SEQ ID NO: 2309280 - RNA, 19 nt, Artificial Sequence
  Description of Artificial Sequence: Synthetic oligonucleotide
  Sense strand starting at position 1628 of SEQ ID NO: 1885012
aggugaucuguccaaggac

SEQ ID NO: 2309281 - RNA, 19 nt, Artificial Sequence
  Description of Artificial Sequence: Synthetic oligonucleotide
  Antisense strand to SEQ ID NO: 2309280
guccuuggacagaucaccu

SEQ ID NO: 2309282 - RNA, 19 nt, Artificial Sequence
  Description of Artificial Sequence: Synthetic oligonucleotide
  Sense strand starting at position 1631 of SEQ ID NO: 1885012
ugaucuguccaaggacaca

SEQ ID NO: 2309283 - RNA, 19 nt, Artificial Sequence
  Description of Artificial Sequence: Synthetic oligonucleotide
  Antisense strand to SEQ ID NO: 2309282
uguguccuuggacagauca

SEQ ID NO: 2309284 - RNA, 19 nt, Artificial Sequence
  Description of Artificial Sequence: Synthetic oligonucleotide
  Sense strand starting at position 1655 of SEQ ID NO: 1885012
ggcuauaggccgaguugca

SEQ ID NO: 2309285 - RNA, 19 nt, Artificial Sequence
  Description of Artificial Sequence: Synthetic oligonucleotide
  Antisense strand to SEQ ID NO: 2309284
ugcaacucggccuauagcc

SEQ ID NO: 2309286 - RNA, 19 nt, Artificial Sequence
  Description of Artificial Sequence: Synthetic oligonucleotide
  Sense strand starting at position 1784 of SEQ ID NO: 1885012
uccuuacuaugugugacaa

SEQ ID NO: 2309287 - RNA, 19 nt, Artificial Sequence
  Description of Artificial Sequence: Synthetic oligonucleotide
  Antisense strand to SEQ ID NO: 2309286
uugucacacauaguaagga

SEQ ID NO: 2309288 - RNA, 19 nt, Artificial Sequence
  Description of Artificial Sequence: Synthetic oligonucleotide
  Sense strand starting at position 1785 of SEQ ID NO: 1885012
ccuuacuaugugugacaaa

SEQ ID NO: 2309289 - RNA, 19 nt, Artificial Sequence
  Description of Artificial Sequence: Synthetic oligonucleotide
  Antisense strand to SEQ ID NO: 2309288
uuugucacacauaguaagg

SEQ ID NO: 2309290 - RNA, 19 nt, Artificial Sequence
  Description of Artificial Sequence: Synthetic oligonucleotide
  Sense strand starting at position 2007 of SEQ ID NO: 1885012
guucaauuugagggugcuu

SEQ ID NO: 2309291 - RNA, 19 nt, Artificial Sequence
  Description of Artificial Sequence: Synthetic oligonucleotide
  Antisense strand to SEQ ID NO: 2309290
aagcacccucaaauugaac

SEQ ID NO: 2309292 - RNA, 19 nt, Artificial Sequence
  Description of Artificial Sequence: Synthetic oligonucleotide
  Sense strand starting at position 2019 of SEQ ID NO: 1885012
ggugcuuaugaauggaaua

SEQ ID NO: 2309293 - RNA, 19 nt, Artificial Sequence
  Description of Artificial Sequence: Synthetic oligonucleotide
  Antisense strand to SEQ ID NO: 2309292
uauuccauucauaagcacc

SEQ ID NO: 2309294 - RNA, 19 nt, Artificial Sequence
  Description of Artificial Sequence: Synthetic oligonucleotide
  Sense strand starting at position 2020 of SEQ ID NO: 1885012
gugcuuaugaauggaauau

SEQ ID NO: 2309295 - RNA, 19 nt, Artificial Sequence
  Description of Artificial Sequence: Synthetic oligonucleotide
  Antisense strand to SEQ ID NO: 2309294
auauuccauucauaagcac

SEQ ID NO: 2309296 - RNA, 19 nt, Artificial Sequence
  Description of Artificial Sequence: Synthetic oligonucleotide
  Sense strand starting at position 2140 of SEQ ID NO: 1885012
accaaacagugaggaauuu

SEQ ID NO: 2309297 - RNA, 19 nt, Artificial Sequence
  Description of Artificial Sequence: Synthetic oligonucleotide
  Antisense strand to SEQ ID NO: 2309296
aaauuccucacuguuuggu

SEQ ID NO: 2309298 - RNA, 19 nt, Artificial Sequence
  Description of Artificial Sequence: Synthetic oligonucleotide
  Sense strand starting at position 2321 of SEQ ID NO: 1885012
cggccagaauaaucuucua

SEQ ID NO: 2309299 - RNA, 19 nt, Artificial Sequence
  Description of Artificial Sequence: Synthetic oligonucleotide
  Antisense strand to SEQ ID NO: 2309298
uagaagauuauucuggccg

SEQ ID NO: 2309300 - RNA, 19 nt, Artificial Sequence
  Description of Artificial Sequence: Synthetic oligonucleotide
  Sense strand starting at position 2468 of SEQ ID NO: 1885012
ccaccauacuggucaucuu

SEQ ID NO: 2309301 - RNA, 19 nt, Artificial Sequence
  Description of Artificial Sequence: Synthetic oligonucleotide
  Antisense strand to SEQ ID NO: 2309300
aagaugaccaguauggugg

SEQ ID NO: 2309302 - RNA, 19 nt, Artificial Sequence
  Description of Artificial Sequence: Synthetic oligonucleotide
  Sense strand starting at position 2622 of SEQ ID NO: 1885012
gagagagcuucccuggaca

SEQ ID NO: 2309303 - RNA, 19 nt, Artificial Sequence
  Description of Artificial Sequence: Synthetic oligonucleotide
  Antisense strand to SEQ ID NO: 2309302
uguccagggaagcucucuc

SEQ ID NO: 2309304 - RNA, 19 nt, Artificial Sequence
  Description of Artificial Sequence: Synthetic oligonucleotide
  Sense strand starting at position 2624 of SEQ ID NO: 1885012
gagagcuucccuggacaca

SEQ ID NO: 2309305 - RNA, 19 nt, Artificial Sequence
  Description of Artificial Sequence: Synthetic oligonucleotide
  Antisense strand to SEQ ID NO: 2309304
uguguccagggaagcucuc

SEQ ID NO: 2309306 - RNA, 19 nt, Artificial Sequence
  Description of Artificial Sequence: Synthetic oligonucleotide
  Sense strand starting at position 3125 of SEQ ID NO: 1885012
acaauauccucgguuccua

SEQ ID NO: 2309307 - RNA, 19 nt, Artificial Sequence
  Description of Artificial Sequence: Synthetic oligonucleotide
  Antisense strand to SEQ ID NO: 2309306
uaggaaccgaggauauugu

SEQ ID NO: 2309308 - RNA, 19 nt, Artificial Sequence
  Description of Artificial Sequence: Synthetic oligonucleotide
  Sense strand starting at position 3242 of SEQ ID NO: 1885012
aguccaaggucuucuaaac

SEQ ID NO: 2309309 - RNA, 19 nt, Artificial Sequence
  Description of Artificial Sequence: Synthetic oligonucleotide
  Antisense strand to SEQ ID NO: 2309308
guuuagaagaccuuggacu

SEQ ID NO: 2309310 - RNA, 19 nt, Artificial Sequence
  Description of Artificial Sequence: Synthetic oligonucleotide
  Sense strand starting at position 3264 of SEQ ID NO: 1885012
ccugauaagagucauccga

SEQ ID NO: 2309311 - RNA, 19 nt, Artificial Sequence
  Description of Artificial Sequence: Synthetic oligonucleotide
  Antisense strand to SEQ ID NO: 2309310
ucggaugacucuuaucagg

SEQ ID NO: 2309312 - RNA, 19 nt, Artificial Sequence
  Description of Artificial Sequence: Synthetic oligonucleotide
  Sense strand starting at position 3268 of SEQ ID NO: 1885012
auaagagucauccgaggua

SEQ ID NO: 2309313 - RNA, 19 nt, Artificial Sequence
  Description of Artificial Sequence: Synthetic oligonucleotide
  Antisense strand to SEQ ID NO: 2309312
uaccucggaugacucuuau

SEQ ID NO: 2309314 - RNA, 19 nt, Artificial Sequence
  Description of Artificial Sequence: Synthetic oligonucleotide
  Sense strand starting at position 3271 of SEQ ID NO: 1885012
agagucauccgagguacuu

SEQ ID NO: 2309315 - RNA, 19 nt, Artificial Sequence
  Description of Artificial Sequence: Synthetic oligonucleotide
  Antisense strand to SEQ ID NO: 2309314
aaguaccucggaugacucu

SEQ ID NO: 2309316 - RNA, 19 nt, Artificial Sequence
  Description of Artificial Sequence: Synthetic oligonucleotide
  Sense strand starting at position 3273 of SEQ ID NO: 1885012
agucauccgagguacuuau

SEQ ID NO: 2309317 - RNA, 19 nt, Artificial Sequence
  Description of Artificial Sequence: Synthetic oligonucleotide
  Antisense strand to SEQ ID NO: 2309316
auaaguaccucggaugacu

SEQ ID NO: 2309318 - RNA, 19 nt, Artificial Sequence
  Description of Artificial Sequence: Synthetic oligonucleotide
  Sense strand starting at position 3380 of SEQ ID NO: 1885012
auuuguaucuuggaagagu

SEQ ID NO: 2309319 - RNA, 19 nt, Artificial Sequence
  Description of Artificial Sequence: Synthetic oligonucleotide
  Antisense strand to SEQ ID NO: 2309318
acucuuccaagauacaaau

SEQ ID NO: 2309320 - RNA, 19 nt, Artificial Sequence
  Description of Artificial Sequence: Synthetic oligonucleotide
  Sense strand starting at position 3481 of SEQ ID NO: 1885012
gggagaaacugugccagau

SEQ ID NO: 2309321 - RNA, 19 nt, Artificial Sequence
  Description of Artificial Sequence: Synthetic oligonucleotide
  Antisense strand to SEQ ID NO: 2309320
aucuggcacaguuucuccc

SEQ ID NO: 2309322 - RNA, 19 nt, Artificial Sequence
  Description of Artificial Sequence: Synthetic oligonucleotide
  Sense strand starting at position 589 of SEQ ID NO: 1885013
augggaugaucuuuaaagc

SEQ ID NO: 2309323 - RNA, 19 nt, Artificial Sequence
  Description of Artificial Sequence: Synthetic oligonucleotide
  Antisense strand to SEQ ID NO: 2309322
gcuuuaaagaucaucccau

SEQ ID NO: 2309324 - RNA, 19 nt, Artificial Sequence
  Description of Artificial Sequence: Synthetic oligonucleotide
  Sense strand starting at position 939 of SEQ ID NO: 1885013
accugauacccuugaguaa

SEQ ID NO: 2309325 - RNA, 19 nt, Artificial Sequence
  Description of Artificial Sequence: Synthetic oligonucleotide
  Antisense strand to SEQ ID NO: 2309324
uuacucaaggguaucaggu

SEQ ID NO: 2309326 - RNA, 19 nt, Artificial Sequence
  Description of Artificial Sequence: Synthetic oligonucleotide
  Sense strand starting at position 940 of SEQ ID NO: 1885013
ccugauacccuugaguaau

SEQ ID NO: 2309327 - RNA, 19 nt, Artificial Sequence
  Description of Artificial Sequence: Synthetic oligonucleotide
  Antisense strand to SEQ ID NO: 2309326
auuacucaaggguaucagg

SEQ ID NO: 2309328 - RNA, 19 nt, Artificial Sequence
  Description of Artificial Sequence: Synthetic oligonucleotide
  Sense strand starting at position 964 of SEQ ID NO: 1885013
ccaaucuuuggucaaaugu

SEQ ID NO: 2309329 - RNA, 19 nt, Artificial Sequence
  Description of Artificial Sequence: Synthetic oligonucleotide
  Antisense strand to SEQ ID NO: 2309328
acauuugaccaaagauugg

SEQ ID NO: 2309330 - RNA, 19 nt, Artificial Sequence
  Description of Artificial Sequence: Synthetic oligonucleotide
  Sense strand starting at position 989 of SEQ ID NO: 1885013
cucaaagaguccuucuaag

SEQ ID NO: 2309331 - RNA, 19 nt, Artificial Sequence
  Description of Artificial Sequence: Synthetic oligonucleotide
  Antisense strand to SEQ ID NO: 2309330
cuuagaaggacucuuugag

SEQ ID NO: 2309332 - RNA, 19 nt, Artificial Sequence
  Description of Artificial Sequence: Synthetic oligonucleotide
  Sense strand starting at position 1101 of SEQ ID NO: 1885013
aguuucuaucauuaguauc

SEQ ID NO: 2309333 - RNA, 19 nt, Artificial Sequence
  Description of Artificial Sequence: Synthetic oligonucleotide
  Antisense strand to SEQ ID NO: 2309332
gauacuaaugauagaaacu

SEQ ID NO: 2309334 - RNA, 19 nt, Artificial Sequence
  Description of Artificial Sequence: Synthetic oligonucleotide
  Sense strand starting at position 1389 of SEQ ID NO: 1885013
auuagugacuuguuaaaga

SEQ ID NO: 2309335 - RNA, 19 nt, Artificial Sequence
  Description of Artificial Sequence: Synthetic oligonucleotide
  Antisense strand to SEQ ID NO: 2309334
ucuuuaacaagucacuaau

SEQ ID NO: 2309336 - RNA, 19 nt, Artificial Sequence
  Description of Artificial Sequence: Synthetic oligonucleotide
  Sense strand starting at position 1400 of SEQ ID NO: 1885013
guuaaagauuccuugcaag

SEQ ID NO: 2309337 - RNA, 19 nt, Artificial Sequence
  Description of Artificial Sequence: Synthetic oligonucleotide
  Antisense strand to SEQ ID NO: 2309336
cuugcaaggaaucuuuaac

SEQ ID NO: 2309338 - RNA, 19 nt, Artificial Sequence
  Description of Artificial Sequence: Synthetic oligonucleotide
  Sense strand starting at position 1536 of SEQ ID NO: 1885013
agcagaugauauguaauac

SEQ ID NO: 2309339 - RNA, 19 nt, Artificial Sequence
  Description of Artificial Sequence: Synthetic oligonucleotide
  Antisense strand to SEQ ID NO: 2309338
guauuacauaucaucugcu

SEQ ID NO: 2309340 - RNA, 19 nt, Artificial Sequence
  Description of Artificial Sequence: Synthetic oligonucleotide
  Sense strand starting at position 1588 of SEQ ID NO: 1885013
acaacauagucugaauuug

SEQ ID NO: 2309341 - RNA, 19 nt, Artificial Sequence
  Description of Artificial Sequence: Synthetic oligonucleotide
  Antisense strand to SEQ ID NO: 2309340
caaauucagacuauguugu

SEQ ID NO: 2309342 - RNA, 19 nt, Artificial Sequence
  Description of Artificial Sequence: Synthetic oligonucleotide
  Sense strand starting at position 1637 of SEQ ID NO: 1885013
uuacaauugguccaucaug

SEQ ID NO: 2309343 - RNA, 19 nt, Artificial Sequence
  Description of Artificial Sequence: Synthetic oligonucleotide
  Antisense strand to SEQ ID NO: 2309342
caugauggaccaauuguaa

SEQ ID NO: 2309344 - RNA, 19 nt, Artificial Sequence
  Description of Artificial Sequence: Synthetic oligonucleotide
  Sense strand starting at position 1675 of SEQ ID NO: 1885013
cuaggauauuagcugagaa

SEQ ID NO: 2309345 - RNA, 19 nt, Artificial Sequence
  Description of Artificial Sequence: Synthetic oligonucleotide
  Antisense strand to SEQ ID NO: 2309344
uucucagcuaauauccuag

SEQ ID NO: 2309346 - RNA, 19 nt, Artificial Sequence
  Description of Artificial Sequence: Synthetic oligonucleotide
  Sense strand starting at position 1711 of SEQ ID NO: 1885013
ucaggaagcuacucuaacu

SEQ ID NO: 2309347 - RNA, 19 nt, Artificial Sequence
  Description of Artificial Sequence: Synthetic oligonucleotide
  Antisense strand to SEQ ID NO: 2309346
aguuagaguagcuuccuga

SEQ ID NO: 2309348 - RNA, 19 nt, Artificial Sequence
  Description of Artificial Sequence: Synthetic oligonucleotide
  Sense strand starting at position 1723 of SEQ ID NO: 1885013
ucuaacuuacgagauguau

SEQ ID NO: 2309349 - RNA, 19 nt, Artificial Sequence
  Description of Artificial Sequence: Synthetic oligonucleotide
  Antisense strand to SEQ ID NO: 2309348
auacaucucguaaguuaga

SEQ ID NO: 2309350 - RNA, 19 nt, Artificial Sequence
  Description of Artificial Sequence: Synthetic oligonucleotide
  Sense strand starting at position 1792 of SEQ ID NO: 1885013
ugcaaagugaaauggauaa

SEQ ID NO: 2309351 - RNA, 19 nt, Artificial Sequence
  Description of Artificial Sequence: Synthetic oligonucleotide
  Antisense strand to SEQ ID NO: 2309350
uuauccauuucacuuugca

SEQ ID NO: 2309352 - RNA, 19 nt, Artificial Sequence
  Description of Artificial Sequence: Synthetic oligonucleotide
  Sense strand starting at position 2129 of SEQ ID NO: 1885013
agcuuaauuccaggauuac

SEQ ID NO: 2309353 - RNA, 19 nt, Artificial Sequence
  Description of Artificial Sequence: Synthetic oligonucleotide
  Antisense strand to SEQ ID NO: 2309352
guaauccuggaauuaagcu

SEQ ID NO: 2309354 - RNA, 19 nt, Artificial Sequence
  Description of Artificial Sequence: Synthetic oligonucleotide
  Sense strand starting at position 2130 of SEQ ID NO: 1885013
gcuuaauuccaggauuacu

SEQ ID NO: 2309355 - RNA, 19 nt, Artificial Sequence
  Description of Artificial Sequence: Synthetic oligonucleotide
  Antisense strand to SEQ ID NO: 2309354
aguaauccuggaauuaagc

SEQ ID NO: 2309356 - RNA, 19 nt, Artificial Sequence
  Description of Artificial Sequence: Synthetic oligonucleotide
  Sense strand starting at position 2244 of SEQ ID NO: 1885013
ggauuauaauuagugacua

SEQ ID NO: 2309357 - RNA, 19 nt, Artificial Sequence
  Description of Artificial Sequence: Synthetic oligonucleotide
  Antisense strand to SEQ ID NO: 2309356
uagucacuaauuauaaucc

SEQ ID NO: 2309358 - RNA, 19 nt, Artificial Sequence
  Description of Artificial Sequence: Synthetic oligonucleotide
  Sense strand starting at position 2318 of SEQ ID NO: 1885013
caagguuaugaaugccaua

SEQ ID NO: 2309359 - RNA, 19 nt, Artificial Sequence
  Description of Artificial Sequence: Synthetic oligonucleotide
  Antisense strand to SEQ ID NO: 2309358
uauggcauucauaaccuug

SEQ ID NO: 2309360 - RNA, 19 nt, Artificial Sequence
  Description of Artificial Sequence: Synthetic oligonucleotide
  Sense strand starting at position 2323 of SEQ ID NO: 1885013
uuaugaaugccauauuagu

SEQ ID NO: 2309361 - RNA, 19 nt, Artificial Sequence
  Description of Artificial Sequence: Synthetic oligonucleotide
  Antisense strand to SEQ ID NO: 2309360
acuaauauggcauucauaa

SEQ ID NO: 2309362 - RNA, 19 nt, Artificial Sequence
  Description of Artificial Sequence: Synthetic oligonucleotide
  Sense strand starting at position 2358 of SEQ ID NO: 1885013
uacugcuguggacagaauu

SEQ ID NO: 2309363 - RNA, 19 nt, Artificial Sequence
  Description of Artificial Sequence: Synthetic oligonucleotide
  Antisense strand to SEQ ID NO: 2309362
aauucuguccacagcagua

SEQ ID NO: 2309364 - RNA, 19 nt, Artificial Sequence
  Description of Artificial Sequence: Synthetic oligonucleotide
  Sense strand starting at position 2394 of SEQ ID NO: 1885013
ggcaguggucacuaacaua

SEQ ID NO: 2309365 - RNA, 19 nt, Artificial Sequence
  Description of Artificial Sequence: Synthetic oligonucleotide
  Antisense strand to SEQ ID NO: 2309364
uauguuagugaccacugcc

SEQ ID NO: 2309366 - RNA, 19 nt, Artificial Sequence
  Description of Artificial Sequence: Synthetic oligonucleotide
  Sense strand starting at position 2518 of SEQ ID NO: 1885013
aagugaaaugguugguaau

SEQ ID NO: 2309367 - RNA, 19 nt, Artificial Sequence
  Description of Artificial Sequence: Synthetic oligonucleotide
  Antisense strand to SEQ ID NO: 2309366
auuaccaaccauuucacuu

SEQ ID NO: 2309368 - RNA, 19 nt, Artificial Sequence
  Description of Artificial Sequence: Synthetic oligonucleotide
  Sense strand starting at position 2519 of SEQ ID NO: 1885013
agugaaaugguugguaaua

SEQ ID NO: 2309369 - RNA, 19 nt, Artificial Sequence
  Description of Artificial Sequence: Synthetic oligonucleotide
  Antisense strand to SEQ ID NO: 2309368
uauuaccaaccauuucacu

SEQ ID NO: 2309370 - RNA, 19 nt, Artificial Sequence
  Description of Artificial Sequence: Synthetic oligonucleotide
  Sense strand starting at position 2520 of SEQ ID NO: 1885013
gugaaaugguugguaauau

SEQ ID NO: 2309371 - RNA, 19 nt, Artificial Sequence
  Description of Artificial Sequence: Synthetic oligonucleotide
  Antisense strand to SEQ ID NO: 2309370
auauuaccaaccauuucac

SEQ ID NO: 2309372 - RNA, 19 nt, Artificial Sequence
  Description of Artificial Sequence: Synthetic oligonucleotide
  Sense strand starting at position 2595 of SEQ ID NO: 1885013
guugcaacacaguaauuaa

SEQ ID NO: 2309373 - RNA, 19 nt, Artificial Sequence
  Description of Artificial Sequence: Synthetic oligonucleotide
  Antisense strand to SEQ ID NO: 2309372
uuaauuacuguguugcaac

SEQ ID NO: 2309374 - RNA, 19 nt, Artificial Sequence
  Description of Artificial Sequence: Synthetic oligonucleotide
  Sense strand starting at position 2598 of SEQ ID NO: 1885013
gcaacacaguaauuaagaa

SEQ ID NO: 2309375 - RNA, 19 nt, Artificial Sequence
  Description of Artificial Sequence: Synthetic oligonucleotide
  Antisense strand to SEQ ID NO: 2309374
uucuuaauuacuguguugc

SEQ ID NO: 2309376 - RNA, 19 nt, Artificial Sequence
  Description of Artificial Sequence: Synthetic oligonucleotide
  Sense strand starting at position 2610 of SEQ ID NO: 1885013
uuaagaauuugucagggaa

SEQ ID NO: 2309377 - RNA, 19 nt, Artificial Sequence
  Description of Artificial Sequence: Synthetic oligonucleotide
  Antisense strand to SEQ ID NO: 2309376
uucccugacaaauucuuaa

SEQ ID NO: 2309378 - RNA, 19 nt, Artificial Sequence
  Description of Artificial Sequence: Synthetic oligonucleotide
  Sense strand starting at position 2612 of SEQ ID NO: 1885013
aagaauuugucagggaaau

SEQ ID NO: 2309379 - RNA, 19 nt, Artificial Sequence
  Description of Artificial Sequence: Synthetic oligonucleotide
  Antisense strand to SEQ ID NO: 2309378
auuucccugacaaauucuu

SEQ ID NO: 2309380 - RNA, 19 nt, Artificial Sequence
  Description of Artificial Sequence: Synthetic oligonucleotide
  Sense strand starting at position 2643 of SEQ ID NO: 1885013
gguagaaauuacuuuguaa

SEQ ID NO: 2309381 - RNA, 19 nt, Artificial Sequence
  Description of Artificial Sequence: Synthetic oligonucleotide
  Antisense strand to SEQ ID NO: 2309380
uuacaaaguaauuucuacc

SEQ ID NO: 2309382 - RNA, 19 nt, Artificial Sequence
  Description of Artificial Sequence: Synthetic oligonucleotide
  Sense strand starting at position 2737 of SEQ ID NO: 1885013
cagugacugcaguauaaua

SEQ ID NO: 2309383 - RNA, 19 nt, Artificial Sequence
  Description of Artificial Sequence: Synthetic oligonucleotide
  Antisense strand to SEQ ID NO: 2309382
uauuauacugcagucacug

SEQ ID NO: 2309384 - RNA, 19 nt, Artificial Sequence
  Description of Artificial Sequence: Synthetic oligonucleotide
  Sense strand starting at position 2739 of SEQ ID NO: 1885013
gugacugcaguauaauauu

SEQ ID NO: 2309385 - RNA, 19 nt, Artificial Sequence
  Description of Artificial Sequence: Synthetic oligonucleotide
  Antisense strand to SEQ ID NO: 2309384
aauauuauacugcagucac

SEQ ID NO: 2309386 - RNA, 19 nt, Artificial Sequence
  Description of Artificial Sequence: Synthetic oligonucleotide
  Sense strand starting at position 2803 of SEQ ID NO: 1885013
uuccaaaucuccgugagaa

SEQ ID NO: 2309387 - RNA, 19 nt, Artificial Sequence
  Description of Artificial Sequence: Synthetic oligonucleotide
  Antisense strand to SEQ ID NO: 2309386
uucucacggagauuuggaa

SEQ ID NO: 2309388 - RNA, 19 nt, Artificial Sequence
  Description of Artificial Sequence: Synthetic oligonucleotide
  Sense strand starting at position 2804 of SEQ ID NO: 1885013
uccaaaucuccgugagaaa

SEQ ID NO: 2309389 - RNA, 19 nt, Artificial Sequence
  Description of Artificial Sequence: Synthetic oligonucleotide
  Antisense strand to SEQ ID NO: 2309388
uuucucacggagauuugga

SEQ ID NO: 2309390 - RNA, 19 nt, Artificial Sequence
  Description of Artificial Sequence: Synthetic oligonucleotide
  Sense strand starting at position 2993 of SEQ ID NO: 1885013
gauaaugugucuuuaugag

SEQ ID NO: 2309391 - RNA, 19 nt, Artificial Sequence
  Description of Artificial Sequence: Synthetic oligonucleotide
  Antisense strand to SEQ ID NO: 2309390
cucauaaagacacauuauc

SEQ ID NO: 2309392 - RNA, 19 nt, Artificial Sequence
  Description of Artificial Sequence: Synthetic oligonucleotide
  Sense strand starting at position 3018 of SEQ ID NO: 1885013
ccauuaauguuauugagua

SEQ ID NO: 2309393 - RNA, 19 nt, Artificial Sequence
  Description of Artificial Sequence: Synthetic oligonucleotide
  Antisense strand to SEQ ID NO: 2309392
uacucaauaacauuaaugg

SEQ ID NO: 2309394 - RNA, 19 nt, Artificial Sequence
  Description of Artificial Sequence: Synthetic oligonucleotide
  Sense strand starting at position 3096 of SEQ ID NO: 1885013
gagcuaagugcuuaaauga

SEQ ID NO: 2309395 - RNA, 19 nt, Artificial Sequence
  Description of Artificial Sequence: Synthetic oligonucleotide
  Antisense strand to SEQ ID NO: 2309394
ucauuuaagcacuuagcuc

SEQ ID NO: 2309396 - RNA, 19 nt, Artificial Sequence
  Description of Artificial Sequence: Synthetic oligonucleotide
  Sense strand starting at position 3105 of SEQ ID NO: 1885013
gcuuaaaugaaauggguga

SEQ ID NO: 2309397 - RNA, 19 nt, Artificial Sequence
  Description of Artificial Sequence: Synthetic oligonucleotide
  Antisense strand to SEQ ID NO: 2309396
ucacccauuucauuuaagc

SEQ ID NO: 2309398 - RNA, 19 nt, Artificial Sequence
  Description of Artificial Sequence: Synthetic oligonucleotide
  Sense strand starting at position 3612 of SEQ ID NO: 1885013
aguuaaacugaaugugaau

SEQ ID NO: 2309399 - RNA, 19 nt, Artificial Sequence
  Description of Artificial Sequence: Synthetic oligonucleotide
  Antisense strand to SEQ ID NO: 2309398
auucacauucaguuuaacu

SEQ ID NO: 2309400 - RNA, 19 nt, Artificial Sequence
  Description of Artificial Sequence: Synthetic oligonucleotide
  Sense strand starting at position 3959 of SEQ ID NO: 1885013
aacucauuggugggcugaa

SEQ ID NO: 2309401 - RNA, 19 nt, Artificial Sequence
  Description of Artificial Sequence: Synthetic oligonucleotide
  Antisense strand to SEQ ID NO: 2309400
uucagcccaccaaugaguu

SEQ ID NO: 2309402 - RNA, 19 nt, Artificial Sequence
  Description of Artificial Sequence: Synthetic oligonucleotide
  Sense strand starting at position 257 of SEQ ID NO: 1885014
guuguaugugaguaauauc

SEQ ID NO: 2309403 - RNA, 19 nt, Artificial Sequence
  Description of Artificial Sequence: Synthetic oligonucleotide
  Antisense strand to SEQ ID NO: 2309402
gauauuacucacauacaac

SEQ ID NO: 2309404 - RNA, 19 nt, Artificial Sequence
  Description of Artificial Sequence: Synthetic oligonucleotide
  Sense strand starting at position 410 of SEQ ID NO: 1885014
auguguaaaguauaugcau

SEQ ID NO: 2309405 - RNA, 19 nt, Artificial Sequence
  Description of Artificial Sequence: Synthetic oligonucleotide
  Antisense strand to SEQ ID NO: 2309404
augcauauacuuuacacau

SEQ ID NO: 2309406 - RNA, 19 nt, Artificial Sequence
  Description of Artificial Sequence: Synthetic oligonucleotide
  Sense strand starting at position 413 of SEQ ID NO: 1885014
uguaaaguauaugcauaga

SEQ ID NO: 2309407 - RNA, 19 nt, Artificial Sequence
  Description of Artificial Sequence: Synthetic oligonucleotide
  Antisense strand to SEQ ID NO: 2309406
ucuaugcauauacuuuaca

SEQ ID NO: 2309408 - RNA, 19 nt, Artificial Sequence
  Description of Artificial Sequence: Synthetic oligonucleotide
  Sense strand starting at position 416 of SEQ ID NO: 1885014
aaaguauaugcauagaagu

SEQ ID NO: 2309409 - RNA, 19 nt, Artificial Sequence
  Description of Artificial Sequence: Synthetic oligonucleotide
  Antisense strand to SEQ ID NO: 2309408
acuucuaugcauauacuuu

SEQ ID NO: 2309410 - RNA, 19 nt, Artificial Sequence
  Description of Artificial Sequence: Synthetic oligonucleotide
  Sense strand starting at position 507 of SEQ ID NO: 1885014
uuaccauagugaguaggaa

SEQ ID NO: 2309411 - RNA, 19 nt, Artificial Sequence
  Description of Artificial Sequence: Synthetic oligonucleotide
  Antisense strand to SEQ ID NO: 2309410
uuccuacucacuaugguaa

SEQ ID NO: 2309412 - RNA, 19 nt, Artificial Sequence
  Description of Artificial Sequence: Synthetic oligonucleotide
  Sense strand starting at position 767 of SEQ ID NO: 1885014
uaacuuauuggaugguuga

SEQ ID NO: 2309413 - RNA, 19 nt, Artificial Sequence
  Description of Artificial Sequence: Synthetic oligonucleotide
  Antisense strand to SEQ ID NO: 2309412
ucaaccauccaauaaguua

SEQ ID NO: 2309414 - RNA, 19 nt, Artificial Sequence
  Description of Artificial Sequence: Synthetic oligonucleotide
  Sense strand starting at position 1050 of SEQ ID NO: 1885014
aucaaauaaucugagagac

SEQ ID NO: 2309415 - RNA, 19 nt, Artificial Sequence
  Description of Artificial Sequence: Synthetic oligonucleotide
  Antisense strand to SEQ ID NO: 2309414
gucucucagauuauuugau

SEQ ID NO: 2309416 - RNA, 19 nt, Artificial Sequence
  Description of Artificial Sequence: Synthetic oligonucleotide
  Sense strand starting at position 1096 of SEQ ID NO: 1885014
ugguaacaauagcuaauau

SEQ ID NO: 2309417 - RNA, 19 nt, Artificial Sequence
  Description of Artificial Sequence: Synthetic oligonucleotide
  Antisense strand to SEQ ID NO: 2309416
auauuagcuauuguuacca

SEQ ID NO: 2309418 - RNA, 19 nt, Artificial Sequence
  Description of Artificial Sequence: Synthetic oligonucleotide
  Sense strand starting at position 1615 of SEQ ID NO: 1885014
gauccagguuugucugacu

SEQ ID NO: 2309419 - RNA, 19 nt, Artificial Sequence
  Description of Artificial Sequence: Synthetic oligonucleotide
  Antisense strand to SEQ ID NO: 2309418
agucagacaaaccuggauc

SEQ ID NO: 2309420 - RNA, 19 nt, Artificial Sequence
  Description of Artificial Sequence: Synthetic oligonucleotide
  Sense strand starting at position 1792 of SEQ ID NO: 1885014
guuagagaaguugaugagu

SEQ ID NO: 2309421 - RNA, 19 nt, Artificial Sequence
  Description of Artificial Sequence: Synthetic oligonucleotide
  Antisense strand to SEQ ID NO: 2309420
acucaucaacuucucuaac

SEQ ID NO: 2309422 - RNA, 19 nt, Artificial Sequence
  Description of Artificial Sequence: Synthetic oligonucleotide
  Sense strand starting at position 1797 of SEQ ID NO: 1885014
agaaguugaugaguuauaa

SEQ ID NO: 2309423 - RNA, 19 nt, Artificial Sequence
  Description of Artificial Sequence: Synthetic oligonucleotide
  Antisense strand to SEQ ID NO: 2309422
uuauaacucaucaacuucu

SEQ ID NO: 2309424 - RNA, 19 nt, Artificial Sequence
  Description of Artificial Sequence: Synthetic oligonucleotide
  Sense strand starting at position 1807 of SEQ ID NO: 1885014
gaguuauaaugaguuacaa

SEQ ID NO: 2309425 - RNA, 19 nt, Artificial Sequence
  Description of Artificial Sequence: Synthetic oligonucleotide
  Antisense strand to SEQ ID NO: 2309424
uuguaacucauuauaacuc

SEQ ID NO: 2309426 - RNA, 19 nt, Artificial Sequence
  Description of Artificial Sequence: Synthetic oligonucleotide
  Sense strand starting at position 2133 of SEQ ID NO: 1885014
uuuccuuggugacuaaauu

SEQ ID NO: 2309427 - RNA, 19 nt, Artificial Sequence
  Description of Artificial Sequence: Synthetic oligonucleotide
  Antisense strand to SEQ ID NO: 2309426
aauuuagucaccaaggaaa

SEQ ID NO: 2309428 - RNA, 19 nt, Artificial Sequence
  Description of Artificial Sequence: Synthetic oligonucleotide
  Sense strand starting at position 2182 of SEQ ID NO: 1885014
cuggccuuauaugcuaaua

SEQ ID NO: 2309429 - RNA, 19 nt, Artificial Sequence
  Description of Artificial Sequence: Synthetic oligonucleotide
  Antisense strand to SEQ ID NO: 2309428
uauuagcauauaaggccag

SEQ ID NO: 2309430 - RNA, 19 nt, Artificial Sequence
  Description of Artificial Sequence: Synthetic oligonucleotide
  Sense strand starting at position 2206 of SEQ ID NO: 1885014
gauaaaugaugccucagua

SEQ ID NO: 2309431 - RNA, 19 nt, Artificial Sequence
  Description of Artificial Sequence: Synthetic oligonucleotide
  Antisense strand to SEQ ID NO: 2309430
uacugaggcaucauuuauc

SEQ ID NO: 2309432 - RNA, 19 nt, Artificial Sequence
  Description of Artificial Sequence: Synthetic oligonucleotide
  Sense strand starting at position 2210 of SEQ ID NO: 1885014
aaugaugccucaguagacu

SEQ ID NO: 2309433 - RNA, 19 nt, Artificial Sequence
  Description of Artificial Sequence: Synthetic oligonucleotide
  Antisense strand to SEQ ID NO: 2309432
agucuacugaggcaucauu

SEQ ID NO: 2309434 - RNA, 19 nt, Artificial Sequence
  Description of Artificial Sequence: Synthetic oligonucleotide
  Sense strand starting at position 2232 of SEQ ID NO: 1885014
aacucuggucccuauggau

SEQ ID NO: 2309435 - RNA, 19 nt, Artificial Sequence
  Description of Artificial Sequence: Synthetic oligonucleotide
  Antisense strand to SEQ ID NO: 2309434
auccauagggaccagaguu

SEQ ID NO: 2309436 - RNA, 19 nt, Artificial Sequence
  Description of Artificial Sequence: Synthetic oligonucleotide
  Sense strand starting at position 2406 of SEQ ID NO: 1885014
gggcacucaucggcauaaa

SEQ ID NO: 2309437 - RNA, 19 nt, Artificial Sequence
  Description of Artificial Sequence: Synthetic oligonucleotide
  Antisense strand to SEQ ID NO: 2309436
uuuaugccgaugagugccc

SEQ ID NO: 2309438 - RNA, 19 nt, Artificial Sequence
  Description of Artificial Sequence: Synthetic oligonucleotide
  Sense strand starting at position 2407 of SEQ ID NO: 1885014
ggcacucaucggcauaaau

SEQ ID NO: 2309439 - RNA, 19 nt, Artificial Sequence
  Description of Artificial Sequence: Synthetic oligonucleotide
  Antisense strand to SEQ ID NO: 2309438
auuuaugccgaugagugcc

SEQ ID NO: 2309440 - RNA, 19 nt, Artificial Sequence
  Description of Artificial Sequence: Synthetic oligonucleotide
  Sense strand starting at position 2464 of SEQ ID NO: 1885014
ggugggaguccagggauau

SEQ ID NO: 2309441 - RNA, 19 nt, Artificial Sequence
  Description of Artificial Sequence: Synthetic oligonucleotide
  Antisense strand to SEQ ID NO: 2309440
auaucccuggacucccacc

SEQ ID NO: 2309442 - RNA, 19 nt, Artificial Sequence
  Description of Artificial Sequence: Synthetic oligonucleotide
  Sense strand starting at position 2465 of SEQ ID NO: 1885014
gugggaguccagggauauc

SEQ ID NO: 2309443 - RNA, 19 nt, Artificial Sequence
  Description of Artificial Sequence: Synthetic oligonucleotide
  Antisense strand to SEQ ID NO: 2309442
gauaucccuggacucccac

SEQ ID NO: 2309444 - RNA, 19 nt, Artificial Sequence
  Description of Artificial Sequence: Synthetic oligonucleotide
  Sense strand starting at position 2668 of SEQ ID NO: 1885014
aagugauuguaaccagcga

SEQ ID NO: 2309445 - RNA, 19 nt, Artificial Sequence
  Description of Artificial Sequence: Synthetic oligonucleotide
  Antisense strand to SEQ ID NO: 2309444
ucgcugguuacaaucacuu

SEQ ID NO: 2309446 - RNA, 19 nt, Artificial Sequence
  Description of Artificial Sequence: Synthetic oligonucleotide
  Sense strand starting at position 2669 of SEQ ID NO: 1885014
agugauuguaaccagcgaa

SEQ ID NO: 2309447 - RNA, 19 nt, Artificial Sequence
  Description of Artificial Sequence: Synthetic oligonucleotide
  Antisense strand to SEQ ID NO: 2309446
uucgcugguuacaaucacu

SEQ ID NO: 2309448 - RNA, 19 nt, Artificial Sequence
  Description of Artificial Sequence: Synthetic oligonucleotide
  Sense strand starting at position 2712 of SEQ ID NO: 1885014
guguuuguugaagaagaag

SEQ ID NO: 2309449 - RNA, 19 nt, Artificial Sequence
  Description of Artificial Sequence: Synthetic oligonucleotide
  Antisense strand to SEQ ID NO: 2309448
cuucuucuucaacaaacac

SEQ ID NO: 2309450 - RNA, 19 nt, Artificial Sequence
  Description of Artificial Sequence: Synthetic oligonucleotide
  Sense strand starting at position 2845 of SEQ ID NO: 1885014
ugcugaaauucuguuauug

SEQ ID NO: 2309451 - RNA, 19 nt, Artificial Sequence
  Description of Artificial Sequence: Synthetic oligonucleotide
  Antisense strand to SEQ ID NO: 2309450
caauaacagaauuucagca

SEQ ID NO: 2309452 - RNA, 19 nt, Artificial Sequence
  Description of Artificial Sequence: Synthetic oligonucleotide
  Sense strand starting at position 2893 of SEQ ID NO: 1885014
cccuuucggcuggauuauu

SEQ ID NO: 2309453 - RNA, 19 nt, Artificial Sequence
  Description of Artificial Sequence: Synthetic oligonucleotide
  Antisense strand to SEQ ID NO: 2309452
aauaauccagccgaaaggg

SEQ ID NO: 2309454 - RNA, 19 nt, Artificial Sequence
  Description of Artificial Sequence: Synthetic oligonucleotide
  Sense strand starting at position 3352 of SEQ ID NO: 1885014
cagucuaauggaggugaaa

SEQ ID NO: 2309455 - RNA, 19 nt, Artificial Sequence
  Description of Artificial Sequence: Synthetic oligonucleotide
  Antisense strand to SEQ ID NO: 2309454
uuucaccuccauuagacug

SEQ ID NO: 2309456 - RNA, 19 nt, Artificial Sequence
  Description of Artificial Sequence: Synthetic oligonucleotide
  Sense strand starting at position 3354 of SEQ ID NO: 1885014
gucuaauggaggugaaauu

SEQ ID NO: 2309457 - RNA, 19 nt, Artificial Sequence
  Description of Artificial Sequence: Synthetic oligonucleotide
  Antisense strand to SEQ ID NO: 2309456
aauuucaccuccauuagac

SEQ ID NO: 2309458 - RNA, 19 nt, Artificial Sequence
  Description of Artificial Sequence: Synthetic oligonucleotide
  Sense strand starting at position 3557 of SEQ ID NO: 1885014
gguaaagggucuuccaaau

SEQ ID NO: 2309459 - RNA, 19 nt, Artificial Sequence
  Description of Artificial Sequence: Synthetic oligonucleotide
  Antisense strand to SEQ ID NO: 2309458
auuuggaagacccuuuacc

SEQ ID NO: 2309460 - RNA, 19 nt, Artificial Sequence
  Description of Artificial Sequence: Synthetic oligonucleotide
  Sense strand starting at position 3648 of SEQ ID NO: 1885014
agaaacugauuuggauaga

SEQ ID NO: 2309461 - RNA, 19 nt, Artificial Sequence
  Description of Artificial Sequence: Synthetic oligonucleotide
  Antisense strand to SEQ ID NO: 2309460
ucuauccaaaucaguuucu

SEQ ID NO: 2309462 - RNA, 19 nt, Artificial Sequence
  Description of Artificial Sequence: Synthetic oligonucleotide
  Sense strand starting at position 3713 of SEQ ID NO: 1885014
augaaaucagccugcaaua

SEQ ID NO: 2309463 - RNA, 19 nt, Artificial Sequence
  Description of Artificial Sequence: Synthetic oligonucleotide
  Antisense strand to SEQ ID NO: 2309462
uauugcaggcugauuucau

SEQ ID NO: 2309464 - RNA, 19 nt, Artificial Sequence
  Description of Artificial Sequence: Synthetic oligonucleotide
  Sense strand starting at position 3776 of SEQ ID NO: 1885014
gaguaaguggcccaucaag

SEQ ID NO: 2309465 - RNA, 19 nt, Artificial Sequence
  Description of Artificial Sequence: Synthetic oligonucleotide
  Antisense strand to SEQ ID NO: 2309464
cuugaugggccacuuacuc

SEQ ID NO: 2309466 - RNA, 19 nt, Artificial Sequence
  Description of Artificial Sequence: Synthetic oligonucleotide
  Sense strand starting at position 3795 of SEQ ID NO: 1885014
ccaacauuugcuugagcca

SEQ ID NO: 2309467 - RNA, 19 nt, Artificial Sequence
  Description of Artificial Sequence: Synthetic oligonucleotide
  Antisense strand to SEQ ID NO: 2309466
uggcucaagcaaauguugg

SEQ ID NO: 2309468 - RNA, 19 nt, Artificial Sequence
  Description of Artificial Sequence: Synthetic oligonucleotide
  Sense strand starting at position 3813 of SEQ ID NO: 1885014
agaggacuugcucaccgaa

SEQ ID NO: 2309469 - RNA, 19 nt, Artificial Sequence
  Description of Artificial Sequence: Synthetic oligonucleotide
  Antisense strand to SEQ ID NO: 2309468
uucggugagcaaguccucu

SEQ ID NO: 2309470 - RNA, 19 nt, Artificial Sequence
  Description of Artificial Sequence: Synthetic oligonucleotide
  Sense strand starting at position 3815 of SEQ ID NO: 1885014
aggacuugcucaccgaaga

SEQ ID NO: 2309471 - RNA, 19 nt, Artificial Sequence
  Description of Artificial Sequence: Synthetic oligonucleotide
  Antisense strand to SEQ ID NO: 2309470
ucuucggugagcaaguccu

SEQ ID NO: 2309472 - RNA, 19 nt, Artificial Sequence
  Description of Artificial Sequence: Synthetic oligonucleotide
  Sense strand starting at position 3844 of SEQ ID NO: 1885014
uuucuuaucugacuaguca

SEQ ID NO: 2309473 - RNA, 19 nt, Artificial Sequence
  Description of Artificial Sequence: Synthetic oligonucleotide
  Antisense strand to SEQ ID NO: 2309472
ugacuagucagauaagaaa

SEQ ID NO: 2309474 - RNA, 19 nt, Artificial Sequence
  Description of Artificial Sequence: Synthetic oligonucleotide
  Sense strand starting at position 3848 of SEQ ID NO: 1885014
uuaucugacuagucaguca

SEQ ID NO: 2309475 - RNA, 19 nt, Artificial Sequence
  Description of Artificial Sequence: Synthetic oligonucleotide
  Antisense strand to SEQ ID NO: 2309474
ugacugacuagucagauaa

SEQ ID NO: 2309476 - RNA, 19 nt, Artificial Sequence
  Description of Artificial Sequence: Synthetic oligonucleotide
  Sense strand starting at position 3851 of SEQ ID NO: 1885014
ucugacuagucagucaaga

SEQ ID NO: 2309477 - RNA, 19 nt, Artificial Sequence
  Description of Artificial Sequence: Synthetic oligonucleotide
  Antisense strand to SEQ ID NO: 2309476
ucuugacugacuagucaga

SEQ ID NO: 2309478 - RNA, 19 nt, Artificial Sequence
  Description of Artificial Sequence: Synthetic oligonucleotide
  Sense strand starting at position 3932 of SEQ ID NO: 1885014
ugcugugugaaauauagua

SEQ ID NO: 2309479 - RNA, 19 nt, Artificial Sequence
  Description of Artificial Sequence: Synthetic oligonucleotide
  Antisense strand to SEQ ID NO: 2309478
uacuauauuucacacagca

SEQ ID NO: 2309480 - RNA, 19 nt, Artificial Sequence
  Description of Artificial Sequence: Synthetic oligonucleotide
  Sense strand starting at position 3934 of SEQ ID NO: 1885014
cugugugaaauauaguacu

SEQ ID NO: 2309481 - RNA, 19 nt, Artificial Sequence
  Description of Artificial Sequence: Synthetic oligonucleotide
  Antisense strand to SEQ ID NO: 2309480
aguacuauauuucacacag

SEQ ID NO: 2309482 - RNA, 19 nt, Artificial Sequence
  Description of Artificial Sequence: Synthetic oligonucleotide
  Sense strand starting at position 76 of SEQ ID NO: 1885015
aggcuagaacuuggagagu

SEQ ID NO: 2309483 - RNA, 19 nt, Artificial Sequence
  Description of Artificial Sequence: Synthetic oligonucleotide
  Antisense strand to SEQ ID NO: 2309482
acucuccaaguucuagccu

SEQ ID NO: 2309484 - RNA, 19 nt, Artificial Sequence
  Description of Artificial Sequence: Synthetic oligonucleotide
  Sense strand starting at position 99 of SEQ ID NO: 1885015
gaaacuaccuugguaaggu

SEQ ID NO: 2309485 - RNA, 19 nt, Artificial Sequence
  Description of Artificial Sequence: Synthetic oligonucleotide
  Antisense strand to SEQ ID NO: 2309484
accuuaccaagguaguuuc

SEQ ID NO: 2309486 - RNA, 19 nt, Artificial Sequence
  Description of Artificial Sequence: Synthetic oligonucleotide
  Sense strand starting at position 108 of SEQ ID NO: 1885015
uugguaagguauucucaaa

SEQ ID NO: 2309487 - RNA, 19 nt, Artificial Sequence
  Description of Artificial Sequence: Synthetic oligonucleotide
  Antisense strand to SEQ ID NO: 2309486
uuugagaauaccuuaccaa

SEQ ID NO: 2309488 - RNA, 19 nt, Artificial Sequence
  Description of Artificial Sequence: Synthetic oligonucleotide
  Sense strand starting at position 324 of SEQ ID NO: 1885015
guuaguuagcuugagaaca

SEQ ID NO: 2309489 - RNA, 19 nt, Artificial Sequence
  Description of Artificial Sequence: Synthetic oligonucleotide
  Antisense strand to SEQ ID NO: 2309488
uguucucaagcuaacuaac

SEQ ID NO: 2309490 - RNA, 19 nt, Artificial Sequence
  Description of Artificial Sequence: Synthetic oligonucleotide
  Sense strand starting at position 348 of SEQ ID NO: 1885015
ugauuaucauaguuaucag

SEQ ID NO: 2309491 - RNA, 19 nt, Artificial Sequence
  Description of Artificial Sequence: Synthetic oligonucleotide
  Antisense strand to SEQ ID NO: 2309490
cugauaacuaugauaauca

SEQ ID NO: 2309492 - RNA, 19 nt, Artificial Sequence
  Description of Artificial Sequence: Synthetic oligonucleotide
  Sense strand starting at position 402 of SEQ ID NO: 1885015
agaaaucugucacuauagu

SEQ ID NO: 2309493 - RNA, 19 nt, Artificial Sequence
  Description of Artificial Sequence: Synthetic oligonucleotide
  Antisense strand to SEQ ID NO: 2309492
acuauagugacagauuucu

SEQ ID NO: 2309494 - RNA, 19 nt, Artificial Sequence
  Description of Artificial Sequence: Synthetic oligonucleotide
  Sense strand starting at position 403 of SEQ ID NO: 1885015
gaaaucugucacuauagug

SEQ ID NO: 2309495 - RNA, 19 nt, Artificial Sequence
  Description of Artificial Sequence: Synthetic oligonucleotide
  Antisense strand to SEQ ID NO: 2309494
cacuauagugacagauuuc

SEQ ID NO: 2309496 - RNA, 19 nt, Artificial Sequence
  Description of Artificial Sequence: Synthetic oligonucleotide
  Sense strand starting at position 556 of SEQ ID NO: 1885015
auacuaaagaugugauggu

SEQ ID NO: 2309497 - RNA, 19 nt, Artificial Sequence
  Description of Artificial Sequence: Synthetic oligonucleotide
  Antisense strand to SEQ ID NO: 2309496
accaucacaucuuuaguau

SEQ ID NO: 2309498 - RNA, 19 nt, Artificial Sequence
  Description of Artificial Sequence: Synthetic oligonucleotide
  Sense strand starting at position 560 of SEQ ID NO: 1885015
uaaagaugugaugguaugu

SEQ ID NO: 2309499 - RNA, 19 nt, Artificial Sequence
  Description of Artificial Sequence: Synthetic oligonucleotide
  Antisense strand to SEQ ID NO: 2309498
acauaccaucacaucuuua

SEQ ID NO: 2309500 - RNA, 19 nt, Artificial Sequence
  Description of Artificial Sequence: Synthetic oligonucleotide
  Sense strand starting at position 692 of SEQ ID NO: 1885015
agagguuucugugugaaga

SEQ ID NO: 2309501 - RNA, 19 nt, Artificial Sequence
  Description of Artificial Sequence: Synthetic oligonucleotide
  Antisense strand to SEQ ID NO: 2309500
ucuucacacagaaaccucu

SEQ ID NO: 2309502 - RNA, 19 nt, Artificial Sequence
  Description of Artificial Sequence: Synthetic oligonucleotide
  Sense strand starting at position 693 of SEQ ID NO: 1885015
gagguuucugugugaagaa

SEQ ID NO: 2309503 - RNA, 19 nt, Artificial Sequence
  Description of Artificial Sequence: Synthetic oligonucleotide
  Antisense strand to SEQ ID NO: 2309502
uucuucacacagaaaccuc

SEQ ID NO: 2309504 - RNA, 19 nt, Artificial Sequence
  Description of Artificial Sequence: Synthetic oligonucleotide
  Sense strand starting at position 952 of SEQ ID NO: 1885015
agagauagauaacaauaca

SEQ ID NO: 2309505 - RNA, 19 nt, Artificial Sequence
  Description of Artificial Sequence: Synthetic oligonucleotide
  Antisense strand to SEQ ID NO: 2309504
uguauuguuaucuaucucu

SEQ ID NO: 2309506 - RNA, 19 nt, Artificial Sequence
  Description of Artificial Sequence: Synthetic oligonucleotide
  Sense strand starting at position 978 of SEQ ID NO: 1885015
agugacaacuccuauuuga

SEQ ID NO: 2309507 - RNA, 19 nt, Artificial Sequence
  Description of Artificial Sequence: Synthetic oligonucleotide
  Antisense strand to SEQ ID NO: 2309506
ucaaauaggaguugucacu

SEQ ID NO: 2309508 - RNA, 19 nt, Artificial Sequence
  Description of Artificial Sequence: Synthetic oligonucleotide
  Sense strand starting at position 1020 of SEQ ID NO: 1885015
cucuuaaccuauguaagua

SEQ ID NO: 2309509 - RNA, 19 nt, Artificial Sequence
  Description of Artificial Sequence: Synthetic oligonucleotide
  Antisense strand to SEQ ID NO: 2309508
uacuuacauagguuaagag

SEQ ID NO: 2309510 - RNA, 19 nt, Artificial Sequence
  Description of Artificial Sequence: Synthetic oligonucleotide
  Sense strand starting at position 1201 of SEQ ID NO: 1885015
aggcauuaccucugacuuu

SEQ ID NO: 2309511 - RNA, 19 nt, Artificial Sequence
  Description of Artificial Sequence: Synthetic oligonucleotide
  Antisense strand to SEQ ID NO: 2309510
aaagucagagguaaugccu

SEQ ID NO: 2309512 - RNA, 19 nt, Artificial Sequence
  Description of Artificial Sequence: Synthetic oligonucleotide
  Sense strand starting at position 1242 of SEQ ID NO: 1885015
cauggaaaguacuccaguu

SEQ ID NO: 2309513 - RNA, 19 nt, Artificial Sequence
  Description of Artificial Sequence: Synthetic oligonucleotide
  Antisense strand to SEQ ID NO: 2309512
aacuggaguacuuuccaug

SEQ ID NO: 2309514 - RNA, 19 nt, Artificial Sequence
  Description of Artificial Sequence: Synthetic oligonucleotide
  Sense strand starting at position 1272 of SEQ ID NO: 1885015
ggaucacuugcucauccua

SEQ ID NO: 2309515 - RNA, 19 nt, Artificial Sequence
  Description of Artificial Sequence: Synthetic oligonucleotide
  Antisense strand to SEQ ID NO: 2309514
uaggaugagcaagugaucc

SEQ ID NO: 2309516 - RNA, 19 nt, Artificial Sequence
  Description of Artificial Sequence: Synthetic oligonucleotide
  Sense strand starting at position 1351 of SEQ ID NO: 1885015
gcauuauuagggugaggaa

SEQ ID NO: 2309517 - RNA, 19 nt, Artificial Sequence
  Description of Artificial Sequence: Synthetic oligonucleotide
  Antisense strand to SEQ ID NO: 2309516
uuccucacccuaauaaugc

SEQ ID NO: 2309518 - RNA, 19 nt, Artificial Sequence
  Description of Artificial Sequence: Synthetic oligonucleotide
  Sense strand starting at position 1398 of SEQ ID NO: 1885015
ugggcaguuuccuuggaag

SEQ ID NO: 2309519 - RNA, 19 nt, Artificial Sequence
  Description of Artificial Sequence: Synthetic oligonucleotide
  Antisense strand to SEQ ID NO: 2309518
cuuccaaggaaacugccca

SEQ ID NO: 2309520 - RNA, 19 nt, Artificial Sequence
  Description of Artificial Sequence: Synthetic oligonucleotide
  Sense strand starting at position 1400 of SEQ ID NO: 1885015
ggcaguuuccuuggaagag

SEQ ID NO: 2309521 - RNA, 19 nt, Artificial Sequence
  Description of Artificial Sequence: Synthetic oligonucleotide
  Antisense strand to SEQ ID NO: 2309520
cucuuccaaggaaacugcc

SEQ ID NO: 2309522 - RNA, 19 nt, Artificial Sequence
  Description of Artificial Sequence: Synthetic oligonucleotide
  Sense strand starting at position 1820 of SEQ ID NO: 1885015
ugauaaaugccagagccua

SEQ ID NO: 2309523 - RNA, 19 nt, Artificial Sequence
  Description of Artificial Sequence: Synthetic oligonucleotide
  Antisense strand to SEQ ID NO: 2309522
uaggcucuggcauuuauca

SEQ ID NO: 2309524 - RNA, 19 nt, Artificial Sequence
  Description of Artificial Sequence: Synthetic oligonucleotide
  Sense strand starting at position 1851 of SEQ ID NO: 1885015
gucugucugcugccaaagu

SEQ ID NO: 2309525 - RNA, 19 nt, Artificial Sequence
  Description of Artificial Sequence: Synthetic oligonucleotide
  Antisense strand to SEQ ID NO: 2309524
acuuuggcagcagacagac

SEQ ID NO: 2309526 - RNA, 19 nt, Artificial Sequence
  Description of Artificial Sequence: Synthetic oligonucleotide
  Sense strand starting at position 2202 of SEQ ID NO: 1885015
ggugguucucagaggcagu

SEQ ID NO: 2309527 - RNA, 19 nt, Artificial Sequence
  Description of Artificial Sequence: Synthetic oligonucleotide
  Antisense strand to SEQ ID NO: 2309526
acugccucugagaaccacc

SEQ ID NO: 2309528 - RNA, 19 nt, Artificial Sequence
  Description of Artificial Sequence: Synthetic oligonucleotide
  Sense strand starting at position 2228 of SEQ ID NO: 1885015
aaagaaagcccaugugacu

SEQ ID NO: 2309529 - RNA, 19 nt, Artificial Sequence
  Description of Artificial Sequence: Synthetic oligonucleotide
  Antisense strand to SEQ ID NO: 2309528
agucacaugggcuuucuuu

SEQ ID NO: 2309530 - RNA, 19 nt, Artificial Sequence
  Description of Artificial Sequence: Synthetic oligonucleotide
  Sense strand starting at position 2460 of SEQ ID NO: 1885015
ggugauugugaagaccgaa

SEQ ID NO: 2309531 - RNA, 19 nt, Artificial Sequence
  Description of Artificial Sequence: Synthetic oligonucleotide
  Antisense strand to SEQ ID NO: 2309530
uucggucuucacaaucacc

SEQ ID NO: 2309532 - RNA, 19 nt, Artificial Sequence
  Description of Artificial Sequence: Synthetic oligonucleotide
  Sense strand starting at position 2463 of SEQ ID NO: 1885015
gauugugaagaccgaauga

SEQ ID NO: 2309533 - RNA, 19 nt, Artificial Sequence
  Description of Artificial Sequence: Synthetic oligonucleotide
  Antisense strand to SEQ ID NO: 2309532
ucauucggucuucacaauc

SEQ ID NO: 2309534 - RNA, 19 nt, Artificial Sequence
  Description of Artificial Sequence: Synthetic oligonucleotide
  Sense strand starting at position 2558 of SEQ ID NO: 1885015
gaaauuugaucccauguug

SEQ ID NO: 2309535 - RNA, 19 nt, Artificial Sequence
  Description of Artificial Sequence: Synthetic oligonucleotide
  Antisense strand to SEQ ID NO: 2309534
caacaugggaucaaauuuc

SEQ ID NO: 2309536 - RNA, 19 nt, Artificial Sequence
  Description of Artificial Sequence: Synthetic oligonucleotide
  Sense strand starting at position 2659 of SEQ ID NO: 1885015
gaauucccagucuaugagu

SEQ ID NO: 2309537 - RNA, 19 nt, Artificial Sequence
  Description of Artificial Sequence: Synthetic oligonucleotide
  Antisense strand to SEQ ID NO: 2309536
acucauagacugggaauuc

SEQ ID NO: 2309538 - RNA, 19 nt, Artificial Sequence
  Description of Artificial Sequence: Synthetic oligonucleotide
  Sense strand starting at position 3263 of SEQ ID NO: 1885015
cuaauugacucaguggcua

SEQ ID NO: 2309539 - RNA, 19 nt, Artificial Sequence
  Description of Artificial Sequence: Synthetic oligonucleotide
  Antisense strand to SEQ ID NO: 2309538
uagccacugagucaauuag

SEQ ID NO: 2309540 - RNA, 19 nt, Artificial Sequence
  Description of Artificial Sequence: Synthetic oligonucleotide
  Sense strand starting at position 3268 of SEQ ID NO: 1885015
ugacucaguggcuauaaga

SEQ ID NO: 2309541 - RNA, 19 nt, Artificial Sequence
  Description of Artificial Sequence: Synthetic oligonucleotide
  Antisense strand to SEQ ID NO: 2309540
ucuuauagccacugaguca

SEQ ID NO: 2309542 - RNA, 19 nt, Artificial Sequence
  Description of Artificial Sequence: Synthetic oligonucleotide
  Sense strand starting at position 3346 of SEQ ID NO: 1885015
gguguaaggaguuaguuau

SEQ ID NO: 2309543 - RNA, 19 nt, Artificial Sequence
  Description of Artificial Sequence: Synthetic oligonucleotide
  Antisense strand to SEQ ID NO: 2309542
auaacuaacuccuuacacc

SEQ ID NO: 2309544 - RNA, 19 nt, Artificial Sequence
  Description of Artificial Sequence: Synthetic oligonucleotide
  Sense strand starting at position 3372 of SEQ ID NO: 1885015
acucucaucugggcaacua

SEQ ID NO: 2309545 - RNA, 19 nt, Artificial Sequence
  Description of Artificial Sequence: Synthetic oligonucleotide
  Antisense strand to SEQ ID NO: 2309544
uaguugcccagaugagagu

SEQ ID NO: 2309546 - RNA, 19 nt, Artificial Sequence
  Description of Artificial Sequence: Synthetic oligonucleotide
  Sense strand starting at position 3373 of SEQ ID NO: 1885015
cucucaucugggcaacuau

SEQ ID NO: 2309547 - RNA, 19 nt, Artificial Sequence
  Description of Artificial Sequence: Synthetic oligonucleotide
  Antisense strand to SEQ ID NO: 2309546
auaguugcccagaugagag

SEQ ID NO: 2309548 - RNA, 19 nt, Artificial Sequence
  Description of Artificial Sequence: Synthetic oligonucleotide
  Sense strand starting at position 3547 of SEQ ID NO: 1885015
auccuuucccuugagagca

SEQ ID NO: 2309549 - RNA, 19 nt, Artificial Sequence
  Description of Artificial Sequence: Synthetic oligonucleotide
  Antisense strand to SEQ ID NO: 2309548
ugcucucaagggaaaggau

SEQ ID NO: 2309550 - RNA, 19 nt, Artificial Sequence
  Description of Artificial Sequence: Synthetic oligonucleotide
  Sense strand starting at position 3561 of SEQ ID NO: 1885015
gagcaugaacuucgaaaua

SEQ ID NO: 2309551 - RNA, 19 nt, Artificial Sequence
  Description of Artificial Sequence: Synthetic oligonucleotide
  Antisense strand to SEQ ID NO: 2309550
uauuucgaaguucaugcuc

SEQ ID NO: 2309552 - RNA, 19 nt, Artificial Sequence
  Description of Artificial Sequence: Synthetic oligonucleotide
  Sense strand starting at position 3681 of SEQ ID NO: 1885015
cccuguguuagcuuuguca

SEQ ID NO: 2309553 - RNA, 19 nt, Artificial Sequence
  Description of Artificial Sequence: Synthetic oligonucleotide
  Antisense strand to SEQ ID NO: 2309552
ugacaaagcuaacacaggg

SEQ ID NO: 2309554 - RNA, 19 nt, Artificial Sequence
  Description of Artificial Sequence: Synthetic oligonucleotide
  Sense strand starting at position 3725 of SEQ ID NO: 1885015
agguacuuucuccaagugu

SEQ ID NO: 2309555 - RNA, 19 nt, Artificial Sequence
  Description of Artificial Sequence: Synthetic oligonucleotide
  Antisense strand to SEQ ID NO: 2309554
acacuuggagaaaguaccu

SEQ ID NO: 2309556 - RNA, 19 nt, Artificial Sequence
  Description of Artificial Sequence: Synthetic oligonucleotide
  Sense strand starting at position 3858 of SEQ ID NO: 1885015
auaaacaauggcugucauu

SEQ ID NO: 2309557 - RNA, 19 nt, Artificial Sequence
  Description of Artificial Sequence: Synthetic oligonucleotide
  Antisense strand to SEQ ID NO: 2309556
aaugacagccauuguuuau

SEQ ID NO: 2309558 - RNA, 19 nt, Artificial Sequence
  Description of Artificial Sequence: Synthetic oligonucleotide
  Sense strand starting at position 3942 of SEQ ID NO: 1885015
cuaugagaaugccuaggaa

SEQ ID NO: 2309559 - RNA, 19 nt, Artificial Sequence
  Description of Artificial Sequence: Synthetic oligonucleotide
  Antisense strand to SEQ ID NO: 2309558
uuccuaggcauucucauag

SEQ ID NO: 2309560 - RNA, 19 nt, Artificial Sequence
  Description of Artificial Sequence: Synthetic oligonucleotide
  Sense strand starting at position 3945 of SEQ ID NO: 1885015
ugagaaugccuaggaagcu

SEQ ID NO: 2309561 - RNA, 19 nt, Artificial Sequence
  Description of Artificial Sequence: Synthetic oligonucleotide
  Antisense strand to SEQ ID NO: 2309560
agcuuccuaggcauucuca

SEQ ID NO: 2309562 - RNA, 19 nt, Artificial Sequence
  Description of Artificial Sequence: Synthetic oligonucleotide
  Sense strand starting at position 77 of SEQ ID NO: 1885016
cacgucuucgcuucuccaa

SEQ ID NO: 2309563 - RNA, 19 nt, Artificial Sequence
  Description of Artificial Sequence: Synthetic oligonucleotide
  Antisense strand to SEQ ID NO: 2309562
uuggagaagcgaagacgug

SEQ ID NO: 2309564 - RNA, 19 nt, Artificial Sequence
  Description of Artificial Sequence: Synthetic oligonucleotide
  Sense strand starting at position 85 of SEQ ID NO: 1885016
cgcuucuccaaguggaaga

SEQ ID NO: 2309565 - RNA, 19 nt, Artificial Sequence
  Description of Artificial Sequence: Synthetic oligonucleotide
  Antisense strand to SEQ ID NO: 2309564
ucuuccacuuggagaagcg

SEQ ID NO: 2309566 - RNA, 19 nt, Artificial Sequence
  Description of Artificial Sequence: Synthetic oligonucleotide
  Sense strand starting at position 121 of SEQ ID NO: 1885016
aauccuuucggguacacau

SEQ ID NO: 2309567 - RNA, 19 nt, Artificial Sequence
  Description of Artificial Sequence: Synthetic oligonucleotide
  Antisense strand to SEQ ID NO: 2309566
auguguacccgaaaggauu

SEQ ID NO: 2309568 - RNA, 19 nt, Artificial Sequence
  Description of Artificial Sequence: Synthetic oligonucleotide
  Sense strand starting at position 173 of SEQ ID NO: 1885016
gaacauggcugucuaguga

SEQ ID NO: 2309569 - RNA, 19 nt, Artificial Sequence
  Description of Artificial Sequence: Synthetic oligonucleotide
  Antisense strand to SEQ ID NO: 2309568
ucacuagacagccauguuc

SEQ ID NO: 2309570 - RNA, 19 nt, Artificial Sequence
  Description of Artificial Sequence: Synthetic oligonucleotide
  Sense strand starting at position 303 of SEQ ID NO: 1885016
gcauaaguggagugacaau

SEQ ID NO: 2309571 - RNA, 19 nt, Artificial Sequence
  Description of Artificial Sequence: Synthetic oligonucleotide
  Antisense strand to SEQ ID NO: 2309570
auugucacuccacuuaugc

SEQ ID NO: 2309572 - RNA, 19 nt, Artificial Sequence
  Description of Artificial Sequence: Synthetic oligonucleotide
  Sense strand starting at position 326 of SEQ ID NO: 1885016
acccucauggguuaucgua

SEQ ID NO: 2309573 - RNA, 19 nt, Artificial Sequence
  Description of Artificial Sequence: Synthetic oligonucleotide
  Antisense strand to SEQ ID NO: 2309572
uacgauaacccaugagggu

SEQ ID NO: 2309574 - RNA, 19 nt, Artificial Sequence
  Description of Artificial Sequence: Synthetic oligonucleotide
  Sense strand starting at position 477 of SEQ ID NO: 1885016
gaaccagcucuuggaauga

SEQ ID NO: 2309575 - RNA, 19 nt, Artificial Sequence
  Description of Artificial Sequence: Synthetic oligonucleotide
  Antisense strand to SEQ ID NO: 2309574
ucauuccaagagcugguuc

SEQ ID NO: 2309576 - RNA, 19 nt, Artificial Sequence
  Description of Artificial Sequence: Synthetic oligonucleotide
  Sense strand starting at position 637 of SEQ ID NO: 1885016
ccacuaugaugucugagac

SEQ ID NO: 2309577 - RNA, 19 nt, Artificial Sequence
  Description of Artificial Sequence: Synthetic oligonucleotide
  Antisense strand to SEQ ID NO: 2309576
gucucagacaucauagugg

SEQ ID NO: 2309578 - RNA, 19 nt, Artificial Sequence
  Description of Artificial Sequence: Synthetic oligonucleotide
  Sense strand starting at position 638 of SEQ ID NO: 1885016
cacuaugaugucugagaca

SEQ ID NO: 2309579 - RNA, 19 nt, Artificial Sequence
  Description of Artificial Sequence: Synthetic oligonucleotide
  Antisense strand to SEQ ID NO: 2309578
ugucucagacaucauagug

SEQ ID NO: 2309580 - RNA, 19 nt, Artificial Sequence
  Description of Artificial Sequence: Synthetic oligonucleotide
  Sense strand starting at position 812 of SEQ ID NO: 1885016
gugggcuacucuuuaucaa

SEQ ID NO: 2309581 - RNA, 19 nt, Artificial Sequence
  Description of Artificial Sequence: Synthetic oligonucleotide
  Antisense strand to SEQ ID NO: 2309580
uugauaaagaguagcccac

SEQ ID NO: 2309582 - RNA, 19 nt, Artificial Sequence
  Description of Artificial Sequence: Synthetic oligonucleotide
  Sense strand starting at position 813 of SEQ ID NO: 1885016
ugggcuacucuuuaucaaa

SEQ ID NO: 2309583 - RNA, 19 nt, Artificial Sequence
  Description of Artificial Sequence: Synthetic oligonucleotide
  Antisense strand to SEQ ID NO: 2309582
uuugauaaagaguagccca

SEQ ID NO: 2309584 - RNA, 19 nt, Artificial Sequence
  Description of Artificial Sequence: Synthetic oligonucleotide
  Sense strand starting at position 815 of SEQ ID NO: 1885016
ggcuacucuuuaucaaaug

SEQ ID NO: 2309585 - RNA, 19 nt, Artificial Sequence
  Description of Artificial Sequence: Synthetic oligonucleotide
  Antisense strand to SEQ ID NO: 2309584
cauuugauaaagaguagcc

SEQ ID NO: 2309586 - RNA, 19 nt, Artificial Sequence
  Description of Artificial Sequence: Synthetic oligonucleotide
  Sense strand starting at position 832 of SEQ ID NO: 1885016
ugcgaacuaggucaggaau

SEQ ID NO: 2309587 - RNA, 19 nt, Artificial Sequence
  Description of Artificial Sequence: Synthetic oligonucleotide
  Antisense strand to SEQ ID NO: 2309586
auuccugaccuaguucgca

SEQ ID NO: 2309588 - RNA, 19 nt, Artificial Sequence
  Description of Artificial Sequence: Synthetic oligonucleotide
  Sense strand starting at position 1319 of SEQ ID NO: 1885016
ggcacagggucuuugacaa

SEQ ID NO: 2309589 - RNA, 19 nt, Artificial Sequence
  Description of Artificial Sequence: Synthetic oligonucleotide
  Antisense strand to SEQ ID NO: 2309588
uugucaaagacccugugcc

SEQ ID NO: 2309590 - RNA, 19 nt, Artificial Sequence
  Description of Artificial Sequence: Synthetic oligonucleotide
  Sense strand starting at position 1332 of SEQ ID NO: 1885016
ugacaaugucgaugaaguc

SEQ ID NO: 2309591 - RNA, 19 nt, Artificial Sequence
  Description of Artificial Sequence: Synthetic oligonucleotide
  Antisense strand to SEQ ID NO: 2309590
gacuucaucgacauuguca

SEQ ID NO: 2309592 - RNA, 19 nt, Artificial Sequence
  Description of Artificial Sequence: Synthetic oligonucleotide
  Sense strand starting at position 1341 of SEQ ID NO: 1885016
cgaugaagucuguggguaa

SEQ ID NO: 2309593 - RNA, 19 nt, Artificial Sequence
  Description of Artificial Sequence: Synthetic oligonucleotide
  Antisense strand to SEQ ID NO: 2309592
uuacccacagacuucaucg

SEQ ID NO: 2309594 - RNA, 19 nt, Artificial Sequence
  Description of Artificial Sequence: Synthetic oligonucleotide
  Sense strand starting at position 1353 of SEQ ID NO: 1885016
uggguaaacccuuagagug

SEQ ID NO: 2309595 - RNA, 19 nt, Artificial Sequence
  Description of Artificial Sequence: Synthetic oligonucleotide
  Antisense strand to SEQ ID NO: 2309594
cacucuaaggguuuaccca

SEQ ID NO: 2309596 - RNA, 19 nt, Artificial Sequence
  Description of Artificial Sequence: Synthetic oligonucleotide
  Sense strand starting at position 1845 of SEQ ID NO: 1885016
guggaaucaagaggucaag

SEQ ID NO: 2309597 - RNA, 19 nt, Artificial Sequence
  Description of Artificial Sequence: Synthetic oligonucleotide
  Antisense strand to SEQ ID NO: 2309596
cuugaccucuugauuccac

SEQ ID NO: 2309598 - RNA, 19 nt, Artificial Sequence
  Description of Artificial Sequence: Synthetic oligonucleotide
  Sense strand starting at position 1925 of SEQ ID NO: 1885016
gggugucugcgugaggaga

SEQ ID NO: 2309599 - RNA, 19 nt, Artificial Sequence
  Description of Artificial Sequence: Synthetic oligonucleotide
  Antisense strand to SEQ ID NO: 2309598
ucuccucacgcagacaccc

SEQ ID NO: 2309600 - RNA, 19 nt, Artificial Sequence
  Description of Artificial Sequence: Synthetic oligonucleotide
  Sense strand starting at position 1926 of SEQ ID NO: 1885016
ggugucugcgugaggagaa

SEQ ID NO: 2309601 - RNA, 19 nt, Artificial Sequence
  Description of Artificial Sequence: Synthetic oligonucleotide
  Antisense strand to SEQ ID NO: 2309600
uucuccucacgcagacacc

SEQ ID NO: 2309602 - RNA, 19 nt, Artificial Sequence
  Description of Artificial Sequence: Synthetic oligonucleotide
  Sense strand starting at position 1950 of SEQ ID NO: 1885016
gcagcagucacagagcaau

SEQ ID NO: 2309603 - RNA, 19 nt, Artificial Sequence
  Description of Artificial Sequence: Synthetic oligonucleotide
  Antisense strand to SEQ ID NO: 2309602
auugcucugugacugcugc

SEQ ID NO: 2309604 - RNA, 19 nt, Artificial Sequence
  Description of Artificial Sequence: Synthetic oligonucleotide
  Sense strand starting at position 2388 of SEQ ID NO: 1885016
ggcacucacugggugagaa

SEQ ID NO: 2309605 - RNA, 19 nt, Artificial Sequence
  Description of Artificial Sequence: Synthetic oligonucleotide
  Antisense strand to SEQ ID NO: 2309604
uucucacccagugagugcc

SEQ ID NO: 2309606 - RNA, 19 nt, Artificial Sequence
  Description of Artificial Sequence: Synthetic oligonucleotide
  Sense strand starting at position 2389 of SEQ ID NO: 1885016
gcacucacugggugagaaa

SEQ ID NO: 2309607 - RNA, 19 nt, Artificial Sequence
  Description of Artificial Sequence: Synthetic oligonucleotide
  Antisense strand to SEQ ID NO: 2309606
uuucucacccagugagugc

SEQ ID NO: 2309608 - RNA, 19 nt, Artificial Sequence
  Description of Artificial Sequence: Synthetic oligonucleotide
  Sense strand starting at position 2421 of SEQ ID NO: 1885016
ggguuuguggcucacagaa

SEQ ID NO: 2309609 - RNA, 19 nt, Artificial Sequence
  Description of Artificial Sequence: Synthetic oligonucleotide
  Antisense strand to SEQ ID NO: 2309608
uucugugagccacaaaccc

SEQ ID NO: 2309610 - RNA, 19 nt, Artificial Sequence
  Description of Artificial Sequence: Synthetic oligonucleotide
  Sense strand starting at position 2610 of SEQ ID NO: 1885016
gcacucuuccuggagcaga

SEQ ID NO: 2309611 - RNA, 19 nt, Artificial Sequence
  Description of Artificial Sequence: Synthetic oligonucleotide
  Antisense strand to SEQ ID NO: 2309610
ucugcuccaggaagagugc

SEQ ID NO: 2309612 - RNA, 19 nt, Artificial Sequence
  Description of Artificial Sequence: Synthetic oligonucleotide
  Sense strand starting at position 2663 of SEQ ID NO: 1885016
cugcaugggaaaugucaca

SEQ ID NO: 2309613 - RNA, 19 nt, Artificial Sequence
  Description of Artificial Sequence: Synthetic oligonucleotide
  Antisense strand to SEQ ID NO: 2309612
ugugacauuucccaugcag

SEQ ID NO: 2309614 - RNA, 19 nt, Artificial Sequence
  Description of Artificial Sequence: Synthetic oligonucleotide
  Sense strand starting at position 2820 of SEQ ID NO: 1885016
augugaucuuaucuagaga

SEQ ID NO: 2309615 - RNA, 19 nt, Artificial Sequence
  Description of Artificial Sequence: Synthetic oligonucleotide
  Antisense strand to SEQ ID NO: 2309614
ucucuagauaagaucacau

SEQ ID NO: 2309616 - RNA, 19 nt, Artificial Sequence
  Description of Artificial Sequence: Synthetic oligonucleotide
  Sense strand starting at position 2876 of SEQ ID NO: 1885016
ccauuaagguggguccuaa

SEQ ID NO: 2309617 - RNA, 19 nt, Artificial Sequence
  Description of Artificial Sequence: Synthetic oligonucleotide
  Antisense strand to SEQ ID NO: 2309616
uuaggacccaccuuaaugg

SEQ ID NO: 2309618 - RNA, 19 nt, Artificial Sequence
  Description of Artificial Sequence: Synthetic oligonucleotide
  Sense strand starting at position 2888 of SEQ ID NO: 1885016
guccuaacccaguaugacu

SEQ ID NO: 2309619 - RNA, 19 nt, Artificial Sequence
  Description of Artificial Sequence: Synthetic oligonucleotide
  Antisense strand to SEQ ID NO: 2309618
agucauacuggguuaggac

SEQ ID NO: 2309620 - RNA, 19 nt, Artificial Sequence
  Description of Artificial Sequence: Synthetic oligonucleotide
  Sense strand starting at position 3121 of SEQ ID NO: 1885016
agagaauaacuguguguug

SEQ ID NO: 2309621 - RNA, 19 nt, Artificial Sequence
  Description of Artificial Sequence: Synthetic oligonucleotide
  Antisense strand to SEQ ID NO: 2309620
caacacacaguuauucucu

SEQ ID NO: 2309622 - RNA, 19 nt, Artificial Sequence
  Description of Artificial Sequence: Synthetic oligonucleotide
  Sense strand starting at position 3152 of SEQ ID NO: 1885016
augcuaugacgcuuuguuu

SEQ ID NO: 2309623 - RNA, 19 nt, Artificial Sequence
  Description of Artificial Sequence: Synthetic oligonucleotide
  Antisense strand to SEQ ID NO: 2309622
aaacaaagcgucauagcau

SEQ ID NO: 2309624 - RNA, 19 nt, Artificial Sequence
  Description of Artificial Sequence: Synthetic oligonucleotide
  Sense strand starting at position 3158 of SEQ ID NO: 1885016
ugacgcuuuguuucgcaga

SEQ ID NO: 2309625 - RNA, 19 nt, Artificial Sequence
  Description of Artificial Sequence: Synthetic oligonucleotide
  Antisense strand to SEQ ID NO: 2309624
ucugcgaaacaaagcguca

SEQ ID NO: 2309626 - RNA, 19 nt, Artificial Sequence
  Description of Artificial Sequence: Synthetic oligonucleotide
  Sense strand starting at position 3383 of SEQ ID NO: 1885016
uuuaauugguugcuaacau

SEQ ID NO: 2309627 - RNA, 19 nt, Artificial Sequence
  Description of Artificial Sequence: Synthetic oligonucleotide
  Antisense strand to SEQ ID NO: 2309626
auguuagcaaccaauuaaa

SEQ ID NO: 2309628 - RNA, 19 nt, Artificial Sequence
  Description of Artificial Sequence: Synthetic oligonucleotide
  Sense strand starting at position 3397 of SEQ ID NO: 1885016
aacauuuaguauugggaga

SEQ ID NO: 2309629 - RNA, 19 nt, Artificial Sequence
  Description of Artificial Sequence: Synthetic oligonucleotide
  Antisense strand to SEQ ID NO: 2309628
ucucccaauacuaaauguu

SEQ ID NO: 2309630 - RNA, 19 nt, Artificial Sequence
  Description of Artificial Sequence: Synthetic oligonucleotide
  Sense strand starting at position 3411 of SEQ ID NO: 1885016
ggagauuucucaugaacau

SEQ ID NO: 2309631 - RNA, 19 nt, Artificial Sequence
  Description of Artificial Sequence: Synthetic oligonucleotide
  Antisense strand to SEQ ID NO: 2309630
auguucaugagaaaucucc

SEQ ID NO: 2309632 - RNA, 19 nt, Artificial Sequence
  Description of Artificial Sequence: Synthetic oligonucleotide
  Sense strand starting at position 3434 of SEQ ID NO: 1885016
aucacuggcuucucuugaa

SEQ ID NO: 2309633 - RNA, 19 nt, Artificial Sequence
  Description of Artificial Sequence: Synthetic oligonucleotide
  Antisense strand to SEQ ID NO: 2309632
uucaagagaagccagugau

SEQ ID NO: 2309634 - RNA, 19 nt, Artificial Sequence
  Description of Artificial Sequence: Synthetic oligonucleotide
  Sense strand starting at position 3566 of SEQ ID NO: 1885016
ugugcauggcugucagcua

SEQ ID NO: 2309635 - RNA, 19 nt, Artificial Sequence
  Description of Artificial Sequence: Synthetic oligonucleotide
  Antisense strand to SEQ ID NO: 2309634
uagcugacagccaugcaca

SEQ ID NO: 2309636 - RNA, 19 nt, Artificial Sequence
  Description of Artificial Sequence: Synthetic oligonucleotide
  Sense strand starting at position 3571 of SEQ ID NO: 1885016
auggcugucagcuagagau

SEQ ID NO: 2309637 - RNA, 19 nt, Artificial Sequence
  Description of Artificial Sequence: Synthetic oligonucleotide
  Antisense strand to SEQ ID NO: 2309636
aucucuagcugacagccau

SEQ ID NO: 2309638 - RNA, 19 nt, Artificial Sequence
  Description of Artificial Sequence: Synthetic oligonucleotide
  Sense strand starting at position 3575 of SEQ ID NO: 1885016
cugucagcuagagauggau

SEQ ID NO: 2309639 - RNA, 19 nt, Artificial Sequence
  Description of Artificial Sequence: Synthetic oligonucleotide
  Antisense strand to SEQ ID NO: 2309638
auccaucucuagcugacag

SEQ ID NO: 2309640 - RNA, 19 nt, Artificial Sequence
  Description of Artificial Sequence: Synthetic oligonucleotide
  Sense strand starting at position 3675 of SEQ ID NO: 1885016
ggacuugguguauauauca

SEQ ID NO: 2309641 - RNA, 19 nt, Artificial Sequence
  Description of Artificial Sequence: Synthetic oligonucleotide
  Antisense strand to SEQ ID NO: 2309640
ugauauauacaccaagucc

SEQ ID NO: 2309642 - RNA, 19 nt, Artificial Sequence
  Description of Artificial Sequence: Synthetic oligonucleotide
  Sense strand starting at position 9 of SEQ ID NO: 1885017
auagcugagcagugacaga

SEQ ID NO: 2309643 - RNA, 19 nt, Artificial Sequence
  Description of Artificial Sequence: Synthetic oligonucleotide
  Antisense strand to SEQ ID NO: 2309642
ucugucacugcucagcuau

SEQ ID NO: 2309644 - RNA, 19 nt, Artificial Sequence
  Description of Artificial Sequence: Synthetic oligonucleotide
  Sense strand starting at position 81 of SEQ ID NO: 1885017
ucugucucucagggagaga

SEQ ID NO: 2309645 - RNA, 19 nt, Artificial Sequence
  Description of Artificial Sequence: Synthetic oligonucleotide
  Antisense strand to SEQ ID NO: 2309644
ucucucccugagagacaga

SEQ ID NO: 2309646 - RNA, 19 nt, Artificial Sequence
  Description of Artificial Sequence: Synthetic oligonucleotide
  Sense strand starting at position 459 of SEQ ID NO: 1885017
ucugauuaacaucgccaga

SEQ ID NO: 2309647 - RNA, 19 nt, Artificial Sequence
  Description of Artificial Sequence: Synthetic oligonucleotide
  Antisense strand to SEQ ID NO: 2309646
ucuggcgauguuaaucaga

SEQ ID NO: 2309648 - RNA, 19 nt, Artificial Sequence
  Description of Artificial Sequence: Synthetic oligonucleotide
  Sense strand starting at position 461 of SEQ ID NO: 1885017
ugauuaacaucgccagaca

SEQ ID NO: 2309649 - RNA, 19 nt, Artificial Sequence
  Description of Artificial Sequence: Synthetic oligonucleotide
  Antisense strand to SEQ ID NO: 2309648
ugucuggcgauguuaauca

SEQ ID NO: 2309650 - RNA, 19 nt, Artificial Sequence
  Description of Artificial Sequence: Synthetic oligonucleotide
  Sense strand starting at position 464 of SEQ ID NO: 1885017
uuaacaucgccagacaaca

SEQ ID NO: 2309651 - RNA, 19 nt, Artificial Sequence
  Description of Artificial Sequence: Synthetic oligonucleotide
  Antisense strand to SEQ ID NO: 2309650
uguugucuggcgauguuaa

SEQ ID NO: 2309652 - RNA, 19 nt, Artificial Sequence
  Description of Artificial Sequence: Synthetic oligonucleotide
  Sense strand starting at position 649 of SEQ ID NO: 1885017
gcaucucauggucaaucua

SEQ ID NO: 2309653 - RNA, 19 nt, Artificial Sequence
  Description of Artificial Sequence: Synthetic oligonucleotide
  Antisense strand to SEQ ID NO: 2309652
uagauugaccaugagaugc

SEQ ID NO: 2309654 - RNA, 19 nt, Artificial Sequence
  Description of Artificial Sequence: Synthetic oligonucleotide
  Sense strand starting at position 896 of SEQ ID NO: 1885017
cccaauacugugggaugaa

SEQ ID NO: 2309655 - RNA, 19 nt, Artificial Sequence
  Description of Artificial Sequence: Synthetic oligonucleotide
  Antisense strand to SEQ ID NO: 2309654
uucaucccacaguauuggg

SEQ ID NO: 2309656 - RNA, 19 nt, Artificial Sequence
  Description of Artificial Sequence: Synthetic oligonucleotide
  Sense strand starting at position 921 of SEQ ID NO: 1885017
ccuccagcgggauaaagau

SEQ ID NO: 2309657 - RNA, 19 nt, Artificial Sequence
  Description of Artificial Sequence: Synthetic oligonucleotide
  Antisense strand to SEQ ID NO: 2309656
aucuuuaucccgcuggagg

SEQ ID NO: 2309658 - RNA, 19 nt, Artificial Sequence
  Description of Artificial Sequence: Synthetic oligonucleotide
  Sense strand starting at position 1035 of SEQ ID NO: 1885017
gguccauuugugugaggcu

SEQ ID NO: 2309659 - RNA, 19 nt, Artificial Sequence
  Description of Artificial Sequence: Synthetic oligonucleotide
  Antisense strand to SEQ ID NO: 2309658
agccucacacaaauggacc

SEQ ID NO: 2309660 - RNA, 19 nt, Artificial Sequence
  Description of Artificial Sequence: Synthetic oligonucleotide
  Sense strand starting at position 1178 of SEQ ID NO: 1885017
gcaauuuguugugugaauc

SEQ ID NO: 2309661 - RNA, 19 nt, Artificial Sequence
  Description of Artificial Sequence: Synthetic oligonucleotide
  Antisense strand to SEQ ID NO: 2309660
gauucacacaacaaauugc

SEQ ID NO: 2309662 - RNA, 19 nt, Artificial Sequence
  Description of Artificial Sequence: Synthetic oligonucleotide
  Sense strand starting at position 1293 of SEQ ID NO: 1885017
ugcgccaucacugagaaca

SEQ ID NO: 2309663 - RNA, 19 nt, Artificial Sequence
  Description of Artificial Sequence: Synthetic oligonucleotide
  Antisense strand to SEQ ID NO: 2309662
uguucucagugauggcgca

SEQ ID NO: 2309664 - RNA, 19 nt, Artificial Sequence
  Description of Artificial Sequence: Synthetic oligonucleotide
  Sense strand starting at position 1364 of SEQ ID NO: 1885017
acuccauccuuggucaaga

SEQ ID NO: 2309665 - RNA, 19 nt, Artificial Sequence
  Description of Artificial Sequence: Synthetic oligonucleotide
  Antisense strand to SEQ ID NO: 2309664
ucuugaccaaggauggagu

SEQ ID NO: 2309666 - RNA, 19 nt, Artificial Sequence
  Description of Artificial Sequence: Synthetic oligonucleotide
  Sense strand starting at position 1365 of SEQ ID NO: 1885017
cuccauccuuggucaagaa

SEQ ID NO: 2309667 - RNA, 19 nt, Artificial Sequence
  Description of Artificial Sequence: Synthetic oligonucleotide
  Antisense strand to SEQ ID NO: 2309666
uucuugaccaaggauggag

SEQ ID NO: 2309668 - RNA, 19 nt, Artificial Sequence
  Description of Artificial Sequence: Synthetic oligonucleotide
  Sense strand starting at position 1436 of SEQ ID NO: 1885017
caggcuggcuuaucagaaa

SEQ ID NO: 2309669 - RNA, 19 nt, Artificial Sequence
  Description of Artificial Sequence: Synthetic oligonucleotide
  Antisense strand to SEQ ID NO: 2309668
uuucugauaagccagccug

SEQ ID NO: 2309670 - RNA, 19 nt, Artificial Sequence
  Description of Artificial Sequence: Synthetic oligonucleotide
  Sense strand starting at position 1443 of SEQ ID NO: 1885017
gcuuaucagaaaggauugu

SEQ ID NO: 2309671 - RNA, 19 nt, Artificial Sequence
  Description of Artificial Sequence: Synthetic oligonucleotide
  Antisense strand to SEQ ID NO: 2309670
acaauccuuucugauaagc

SEQ ID NO: 2309672 - RNA, 19 nt, Artificial Sequence
  Description of Artificial Sequence: Synthetic oligonucleotide
  Sense strand starting at position 1453 of SEQ ID NO: 1885017
aaggauugugccugggaga

SEQ ID NO: 2309673 - RNA, 19 nt, Artificial Sequence
  Description of Artificial Sequence: Synthetic oligonucleotide
  Antisense strand to SEQ ID NO: 2309672
ucucccaggcacaauccuu

SEQ ID NO: 2309674 - RNA, 19 nt, Artificial Sequence
  Description of Artificial Sequence: Synthetic oligonucleotide
  Sense strand starting at position 1454 of SEQ ID NO: 1885017
aggauugugccugggagau

SEQ ID NO: 2309675 - RNA, 19 nt, Artificial Sequence
  Description of Artificial Sequence: Synthetic oligonucleotide
  Antisense strand to SEQ ID NO: 2309674
aucucccaggcacaauccu

SEQ ID NO: 2309676 - RNA, 19 nt, Artificial Sequence
  Description of Artificial Sequence: Synthetic oligonucleotide
  Sense strand starting at position 1786 of SEQ ID NO: 1885017
uuuagauauugucuauagg

SEQ ID NO: 2309677 - RNA, 19 nt, Artificial Sequence
  Description of Artificial Sequence: Synthetic oligonucleotide
  Antisense strand to SEQ ID NO: 2309676
ccuauagacaauaucuaaa

SEQ ID NO: 2309678 - RNA, 19 nt, Artificial Sequence
  Description of Artificial Sequence: Synthetic oligonucleotide
  Sense strand starting at position 1794 of SEQ ID NO: 1885017
uugucuauaggaugagaua

SEQ ID NO: 2309679 - RNA, 19 nt, Artificial Sequence
  Description of Artificial Sequence: Synthetic oligonucleotide
  Antisense strand to SEQ ID NO: 2309678
uaucucauccuauagacaa

SEQ ID NO: 2309680 - RNA, 19 nt, Artificial Sequence
  Description of Artificial Sequence: Synthetic oligonucleotide
  Sense strand starting at position 1803 of SEQ ID NO: 1885017
ggaugagauaccugccugu

SEQ ID NO: 2309681 - RNA, 19 nt, Artificial Sequence
  Description of Artificial Sequence: Synthetic oligonucleotide
  Antisense strand to SEQ ID NO: 2309680
acaggcagguaucucaucc

SEQ ID NO: 2309682 - RNA, 19 nt, Artificial Sequence
  Description of Artificial Sequence: Synthetic oligonucleotide
  Sense strand starting at position 1813 of SEQ ID NO: 1885017
ccugccugugauuauauua

SEQ ID NO: 2309683 - RNA, 19 nt, Artificial Sequence
  Description of Artificial Sequence: Synthetic oligonucleotide
  Antisense strand to SEQ ID NO: 2309682
uaauauaaucacaggcagg

SEQ ID NO: 2309684 - RNA, 19 nt, Artificial Sequence
  Description of Artificial Sequence: Synthetic oligonucleotide
  Sense strand starting at position 2000 of SEQ ID NO: 1885017
agaaauguugcagauguca

SEQ ID NO: 2309685 - RNA, 19 nt, Artificial Sequence
  Description of Artificial Sequence: Synthetic oligonucleotide
  Antisense strand to SEQ ID NO: 2309684
ugacaucugcaacauuucu

SEQ ID NO: 2309686 - RNA, 19 nt, Artificial Sequence
  Description of Artificial Sequence: Synthetic oligonucleotide
  Sense strand starting at position 2058 of SEQ ID NO: 1885017
agauuaucugagugcaccu

SEQ ID NO: 2309687 - RNA, 19 nt, Artificial Sequence
  Description of Artificial Sequence: Synthetic oligonucleotide
  Antisense strand to SEQ ID NO: 2309686
aggugcacucagauaaucu

SEQ ID NO: 2309688 - RNA, 19 nt, Artificial Sequence
  Description of Artificial Sequence: Synthetic oligonucleotide
  Sense strand starting at position 2123 of SEQ ID NO: 1885017
gcagaagagguuugaagca

SEQ ID NO: 2309689 - RNA, 19 nt, Artificial Sequence
  Description of Artificial Sequence: Synthetic oligonucleotide
  Antisense strand to SEQ ID NO: 2309688
ugcuucaaaccucuucugc

SEQ ID NO: 2309690 - RNA, 19 nt, Artificial Sequence
  Description of Artificial Sequence: Synthetic oligonucleotide
  Sense strand starting at position 2152 of SEQ ID NO: 1885017
uggacugauuccuugcuga

SEQ ID NO: 2309691 - RNA, 19 nt, Artificial Sequence
  Description of Artificial Sequence: Synthetic oligonucleotide
  Antisense strand to SEQ ID NO: 2309690
ucagcaaggaaucagucca

SEQ ID NO: 2309692 - RNA, 19 nt, Artificial Sequence
  Description of Artificial Sequence: Synthetic oligonucleotide
  Sense strand starting at position 2348 of SEQ ID NO: 1885017
uuaccaacccucugaguga

SEQ ID NO: 2309693 - RNA, 19 nt, Artificial Sequence
  Description of Artificial Sequence: Synthetic oligonucleotide
  Antisense strand to SEQ ID NO: 2309692
ucacucagaggguugguaa

SEQ ID NO: 2309694 - RNA, 19 nt, Artificial Sequence
  Description of Artificial Sequence: Synthetic oligonucleotide
  Sense strand starting at position 2355 of SEQ ID NO: 1885017
cccucugagugauccugga

SEQ ID NO: 2309695 - RNA, 19 nt, Artificial Sequence
  Description of Artificial Sequence: Synthetic oligonucleotide
  Antisense strand to SEQ ID NO: 2309694
uccaggaucacucagaggg

SEQ ID NO: 2309696 - RNA, 19 nt, Artificial Sequence
  Description of Artificial Sequence: Synthetic oligonucleotide
  Sense strand starting at position 2518 of SEQ ID NO: 1885017
guuugaaggagccaugcuu

SEQ ID NO: 2309697 - RNA, 19 nt, Artificial Sequence
  Description of Artificial Sequence: Synthetic oligonucleotide
  Antisense strand to SEQ ID NO: 2309696
aagcauggcuccuucaaac

SEQ ID NO: 2309698 - RNA, 19 nt, Artificial Sequence
  Description of Artificial Sequence: Synthetic oligonucleotide
  Sense strand starting at position 2636 of SEQ ID NO: 1885017
cccaaagucugacuagacu

SEQ ID NO: 2309699 - RNA, 19 nt, Artificial Sequence
  Description of Artificial Sequence: Synthetic oligonucleotide
  Antisense strand to SEQ ID NO: 2309698
agucuagucagacuuuggg

SEQ ID NO: 2309700 - RNA, 19 nt, Artificial Sequence
  Description of Artificial Sequence: Synthetic oligonucleotide
  Sense strand starting at position 2648 of SEQ ID NO: 1885017
cuagacuaauuggcugaau

SEQ ID NO: 2309701 - RNA, 19 nt, Artificial Sequence
  Description of Artificial Sequence: Synthetic oligonucleotide
  Antisense strand to SEQ ID NO: 2309700
auucagccaauuagucuag

SEQ ID NO: 2309702 - RNA, 19 nt, Artificial Sequence
  Description of Artificial Sequence: Synthetic oligonucleotide
  Sense strand starting at position 2650 of SEQ ID NO: 1885017
agacuaauuggcugaauca

SEQ ID NO: 2309703 - RNA, 19 nt, Artificial Sequence
  Description of Artificial Sequence: Synthetic oligonucleotide
  Antisense strand to SEQ ID NO: 2309702
ugauucagccaauuagucu

SEQ ID NO: 2309704 - RNA, 19 nt, Artificial Sequence
  Description of Artificial Sequence: Synthetic oligonucleotide
  Sense strand starting at position 2777 of SEQ ID NO: 1885017
aagagagucuuugcugaac

SEQ ID NO: 2309705 - RNA, 19 nt, Artificial Sequence
  Description of Artificial Sequence: Synthetic oligonucleotide
  Antisense strand to SEQ ID NO: 2309704
guucagcaaagacucucuu

SEQ ID NO: 2309706 - RNA, 19 nt, Artificial Sequence
  Description of Artificial Sequence: Synthetic oligonucleotide
  Sense strand starting at position 2968 of SEQ ID NO: 1885017
ggaacuucccaaugugcau

SEQ ID NO: 2309707 - RNA, 19 nt, Artificial Sequence
  Description of Artificial Sequence: Synthetic oligonucleotide
  Antisense strand to SEQ ID NO: 2309706
augcacauugggaaguucc

SEQ ID NO: 2309708 - RNA, 19 nt, Artificial Sequence
  Description of Artificial Sequence: Synthetic oligonucleotide
  Sense strand starting at position 2974 of SEQ ID NO: 1885017
ucccaaugugcauauguga

SEQ ID NO: 2309709 - RNA, 19 nt, Artificial Sequence
  Description of Artificial Sequence: Synthetic oligonucleotide
  Antisense strand to SEQ ID NO: 2309708
ucacauaugcacauuggga

SEQ ID NO: 2309710 - RNA, 19 nt, Artificial Sequence
  Description of Artificial Sequence: Synthetic oligonucleotide
  Sense strand starting at position 3187 of SEQ ID NO: 1885017
gugaguggucaaagcgcua

SEQ ID NO: 2309711 - RNA, 19 nt, Artificial Sequence
  Description of Artificial Sequence: Synthetic oligonucleotide
  Antisense strand to SEQ ID NO: 2309710
uagcgcuuugaccacucac

SEQ ID NO: 2309712 - RNA, 19 nt, Artificial Sequence
  Description of Artificial Sequence: Synthetic oligonucleotide
  Sense strand starting at position 3238 of SEQ ID NO: 1885017
acgcaaagauuaucugaca

SEQ ID NO: 2309713 - RNA, 19 nt, Artificial Sequence
  Description of Artificial Sequence: Synthetic oligonucleotide
  Antisense strand to SEQ ID NO: 2309712
ugucagauaaucuuugcgu

SEQ ID NO: 2309714 - RNA, 19 nt, Artificial Sequence
  Description of Artificial Sequence: Synthetic oligonucleotide
  Sense strand starting at position 3351 of SEQ ID NO: 1885017
uguguuugccagagagcga

SEQ ID NO: 2309715 - RNA, 19 nt, Artificial Sequence
  Description of Artificial Sequence: Synthetic oligonucleotide
  Antisense strand to SEQ ID NO: 2309714
ucgcucucuggcaaacaca

SEQ ID NO: 2309716 - RNA, 19 nt, Artificial Sequence
  Description of Artificial Sequence: Synthetic oligonucleotide
  Sense strand starting at position 3427 of SEQ ID NO: 1885017
aggccaguuaccuggaaga

SEQ ID NO: 2309717 - RNA, 19 nt, Artificial Sequence
  Description of Artificial Sequence: Synthetic oligonucleotide
  Antisense strand to SEQ ID NO: 2309716
ucuuccagguaacuggccu

SEQ ID NO: 2309718 - RNA, 19 nt, Artificial Sequence
  Description of Artificial Sequence: Synthetic oligonucleotide
  Sense strand starting at position 3489 of SEQ ID NO: 1885017
gaaauaacccugugugggu

SEQ ID NO: 2309719 - RNA, 19 nt, Artificial Sequence
  Description of Artificial Sequence: Synthetic oligonucleotide
  Antisense strand to SEQ ID NO: 2309718
acccacacaggguuauuuc

SEQ ID NO: 2309720 - RNA, 19 nt, Artificial Sequence
  Description of Artificial Sequence: Synthetic oligonucleotide
  Sense strand starting at position 3902 of SEQ ID NO: 1885017
acaagagaugcccaguucu

SEQ ID NO: 2309721 - RNA, 19 nt, Artificial Sequence
  Description of Artificial Sequence: Synthetic oligonucleotide
  Antisense strand to SEQ ID NO: 2309720
agaacugggcaucucuugu

SEQ ID NO: 2309722 - RNA, 19 nt, Artificial Sequence
  Description of Artificial Sequence: Synthetic oligonucleotide
  Sense strand starting at position 131 of SEQ ID NO: 1885018
ugcugagacaucuggugga

SEQ ID NO: 2309723 - RNA, 19 nt, Artificial Sequence
  Description of Artificial Sequence: Synthetic oligonucleotide
  Antisense strand to SEQ ID NO: 2309722
uccaccagaugucucagca

SEQ ID NO: 2309724 - RNA, 19 nt, Artificial Sequence
  Description of Artificial Sequence: Synthetic oligonucleotide
  Sense strand starting at position 270 of SEQ ID NO: 1885018
gcauuccauuccucugagu

SEQ ID NO: 2309725 - RNA, 19 nt, Artificial Sequence
  Description of Artificial Sequence: Synthetic oligonucleotide
  Antisense strand to SEQ ID NO: 2309724
acucagaggaauggaaugc

SEQ ID NO: 2309726 - RNA, 19 nt, Artificial Sequence
  Description of Artificial Sequence: Synthetic oligonucleotide
  Sense strand starting at position 379 of SEQ ID NO: 1885018
gcgguagaugguguguuau

SEQ ID NO: 2309727 - RNA, 19 nt, Artificial Sequence
  Description of Artificial Sequence: Synthetic oligonucleotide
  Antisense strand to SEQ ID NO: 2309726
auaacacaccaucuaccgc

SEQ ID NO: 2309728 - RNA, 19 nt, Artificial Sequence
  Description of Artificial Sequence: Synthetic oligonucleotide
  Sense strand starting at position 385 of SEQ ID NO: 1885018
gaugguguguuauccugca

SEQ ID NO: 2309729 - RNA, 19 nt, Artificial Sequence
  Description of Artificial Sequence: Synthetic oligonucleotide
  Antisense strand to SEQ ID NO: 2309728
ugcaggauaacacaccauc

SEQ ID NO: 2309730 - RNA, 19 nt, Artificial Sequence
  Description of Artificial Sequence: Synthetic oligonucleotide
  Sense strand starting at position 390 of SEQ ID NO: 1885018
uguguuauccugcaaauuc

SEQ ID NO: 2309731 - RNA, 19 nt, Artificial Sequence
  Description of Artificial Sequence: Synthetic oligonucleotide
  Antisense strand to SEQ ID NO: 2309730
gaauuugcaggauaacaca

SEQ ID NO: 2309732 - RNA, 19 nt, Artificial Sequence
  Description of Artificial Sequence: Synthetic oligonucleotide
  Sense strand starting at position 424 of SEQ ID NO: 1885018
agcagaaguuucuuuaucu

SEQ ID NO: 2309733 - RNA, 19 nt, Artificial Sequence
  Description of Artificial Sequence: Synthetic oligonucleotide
  Antisense strand to SEQ ID NO: 2309732
agauaaagaaacuucugcu

SEQ ID NO: 2309734 - RNA, 19 nt, Artificial Sequence
  Description of Artificial Sequence: Synthetic oligonucleotide
  Sense strand starting at position 425 of SEQ ID NO: 1885018
gcagaaguuucuuuaucuu

SEQ ID NO: 2309735 - RNA, 19 nt, Artificial Sequence
  Description of Artificial Sequence: Synthetic oligonucleotide
  Antisense strand to SEQ ID NO: 2309734
aagauaaagaaacuucugc

SEQ ID NO: 2309736 - RNA, 19 nt, Artificial Sequence
  Description of Artificial Sequence: Synthetic oligonucleotide
  Sense strand starting at position 454 of SEQ ID NO: 1885018
ggaguuucuuuaucugcaa

SEQ ID NO: 2309737 - RNA, 19 nt, Artificial Sequence
  Description of Artificial Sequence: Synthetic oligonucleotide
  Antisense strand to SEQ ID NO: 2309736
uugcagauaaagaaacucc

SEQ ID NO: 2309738 - RNA, 19 nt, Artificial Sequence
  Description of Artificial Sequence: Synthetic oligonucleotide
  Sense strand starting at position 538 of SEQ ID NO: 1885018
gcgggaggauggcuugaaa

SEQ ID NO: 2309739 - RNA, 19 nt, Artificial Sequence
  Description of Artificial Sequence: Synthetic oligonucleotide
  Antisense strand to SEQ ID NO: 2309738
uuucaagccauccucccgc

SEQ ID NO: 2309740 - RNA, 19 nt, Artificial Sequence
  Description of Artificial Sequence: Synthetic oligonucleotide
  Sense strand starting at position 789 of SEQ ID NO: 1885018
cuguuaaggauuggugaca

SEQ ID NO: 2309741 - RNA, 19 nt, Artificial Sequence
  Description of Artificial Sequence: Synthetic oligonucleotide
  Antisense strand to SEQ ID NO: 2309740
ugucaccaauccuuaacag

SEQ ID NO: 2309742 - RNA, 19 nt, Artificial Sequence
  Description of Artificial Sequence: Synthetic oligonucleotide
  Sense strand starting at position 790 of SEQ ID NO: 1885018
uguuaaggauuggugacau

SEQ ID NO: 2309743 - RNA, 19 nt, Artificial Sequence
  Description of Artificial Sequence: Synthetic oligonucleotide
  Antisense strand to SEQ ID NO: 2309742
augucaccaauccuuaaca

SEQ ID NO: 2309744 - RNA, 19 nt, Artificial Sequence
  Description of Artificial Sequence: Synthetic oligonucleotide
  Sense strand starting at position 846 of SEQ ID NO: 1885018
accucuggucucugucaau

SEQ ID NO: 2309745 - RNA, 19 nt, Artificial Sequence
  Description of Artificial Sequence: Synthetic oligonucleotide
  Antisense strand to SEQ ID NO: 2309744
auugacagagaccagaggu

SEQ ID NO: 2309746 - RNA, 19 nt, Artificial Sequence
  Description of Artificial Sequence: Synthetic oligonucleotide
  Sense strand starting at position 857 of SEQ ID NO: 1885018
cugucaaucucuuuaugua

SEQ ID NO: 2309747 - RNA, 19 nt, Artificial Sequence
  Description of Artificial Sequence: Synthetic oligonucleotide
  Antisense strand to SEQ ID NO: 2309746
uacauaaagagauugacag

SEQ ID NO: 2309748 - RNA, 19 nt, Artificial Sequence
  Description of Artificial Sequence: Synthetic oligonucleotide
  Sense strand starting at position 858 of SEQ ID NO: 1885018
ugucaaucucuuuauguag

SEQ ID NO: 2309749 - RNA, 19 nt, Artificial Sequence
  Description of Artificial Sequence: Synthetic oligonucleotide
  Antisense strand to SEQ ID NO: 2309748
cuacauaaagagauugaca

SEQ ID NO: 2309750 - RNA, 19 nt, Artificial Sequence
  Description of Artificial Sequence: Synthetic oligonucleotide
  Sense strand starting at position 942 of SEQ ID NO: 1885018
gaguaaguaggcgauuguu

SEQ ID NO: 2309751 - RNA, 19 nt, Artificial Sequence
  Description of Artificial Sequence: Synthetic oligonucleotide
  Antisense strand to SEQ ID NO: 2309750
aacaaucgccuacuuacuc

SEQ ID NO: 2309752 - RNA, 19 nt, Artificial Sequence
  Description of Artificial Sequence: Synthetic oligonucleotide
  Sense strand starting at position 966 of SEQ ID NO: 1885018
uucugaaagucugucucua

SEQ ID NO: 2309753 - RNA, 19 nt, Artificial Sequence
  Description of Artificial Sequence: Synthetic oligonucleotide
  Antisense strand to SEQ ID NO: 2309752
uagagacagacuuucagaa

SEQ ID NO: 2309754 - RNA, 19 nt, Artificial Sequence
  Description of Artificial Sequence: Synthetic oligonucleotide
  Sense strand starting at position 970 of SEQ ID NO: 1885018
gaaagucugucucuagcua

SEQ ID NO: 2309755 - RNA, 19 nt, Artificial Sequence
  Description of Artificial Sequence: Synthetic oligonucleotide
  Antisense strand to SEQ ID NO: 2309754
uagcuagagacagacuuuc

SEQ ID NO: 2309756 - RNA, 19 nt, Artificial Sequence
  Description of Artificial Sequence: Synthetic oligonucleotide
  Sense strand starting at position 1003 of SEQ ID NO: 1885018
ccacauuucucguuagcag

SEQ ID NO: 2309757 - RNA, 19 nt, Artificial Sequence
  Description of Artificial Sequence: Synthetic oligonucleotide
  Antisense strand to SEQ ID NO: 2309756
cugcuaacgagaaaugugg

SEQ ID NO: 2309758 - RNA, 19 nt, Artificial Sequence
  Description of Artificial Sequence: Synthetic oligonucleotide
  Sense strand starting at position 1276 of SEQ ID NO: 1885018
gagugucgacggcauugaa

SEQ ID NO: 2309759 - RNA, 19 nt, Artificial Sequence
  Description of Artificial Sequence: Synthetic oligonucleotide
  Antisense strand to SEQ ID NO: 2309758
uucaaugccgucgacacuc

SEQ ID NO: 2309760 - RNA, 19 nt, Artificial Sequence
  Description of Artificial Sequence: Synthetic oligonucleotide
  Sense strand starting at position 1334 of SEQ ID NO: 1885018
cccgaauuaccugggucua

SEQ ID NO: 2309761 - RNA, 19 nt, Artificial Sequence
  Description of Artificial Sequence: Synthetic oligonucleotide
  Antisense strand to SEQ ID NO: 2309760
uagacccagguaauucggg

SEQ ID NO: 2309762 - RNA, 19 nt, Artificial Sequence
  Description of Artificial Sequence: Synthetic oligonucleotide
  Sense strand starting at position 1434 of SEQ ID NO: 1885018
gcuggaaacuaagcguaaa

SEQ ID NO: 2309763 - RNA, 19 nt, Artificial Sequence
  Description of Artificial Sequence: Synthetic oligonucleotide
  Antisense strand to SEQ ID NO: 2309762
uuuacgcuuaguuuccagc

SEQ ID NO: 2309764 - RNA, 19 nt, Artificial Sequence
  Description of Artificial Sequence: Synthetic oligonucleotide
  Sense strand starting at position 1445 of SEQ ID NO: 1885018
agcguaaacagauaagcaa

SEQ ID NO: 2309765 - RNA, 19 nt, Artificial Sequence
  Description of Artificial Sequence: Synthetic oligonucleotide
  Antisense strand to SEQ ID NO: 2309764
uugcuuaucuguuuacgcu

SEQ ID NO: 2309766 - RNA, 19 nt, Artificial Sequence
  Description of Artificial Sequence: Synthetic oligonucleotide
  Sense strand starting at position 1575 of SEQ ID NO: 1885018
gaguaaccacuugacaguu

SEQ ID NO: 2309767 - RNA, 19 nt, Artificial Sequence
  Description of Artificial Sequence: Synthetic oligonucleotide
  Antisense strand to SEQ ID NO: 2309766
aacugucaagugguuacuc

SEQ ID NO: 2309768 - RNA, 19 nt, Artificial Sequence
  Description of Artificial Sequence: Synthetic oligonucleotide
  Sense strand starting at position 2136 of SEQ ID NO: 1885018
uucuaagucacgggugaga

SEQ ID NO: 2309769 - RNA, 19 nt, Artificial Sequence
  Description of Artificial Sequence: Synthetic oligonucleotide
  Antisense strand to SEQ ID NO: 2309768
ucucacccgugacuuagaa

SEQ ID NO: 2309770 - RNA, 19 nt, Artificial Sequence
  Description of Artificial Sequence: Synthetic oligonucleotide
  Sense strand starting at position 2138 of SEQ ID NO: 1885018
cuaagucacgggugagaca

SEQ ID NO: 2309771 - RNA, 19 nt, Artificial Sequence
  Description of Artificial Sequence: Synthetic oligonucleotide
  Antisense strand to SEQ ID NO: 2309770
ugucucacccgugacuuag

SEQ ID NO: 2309772 - RNA, 19 nt, Artificial Sequence
  Description of Artificial Sequence: Synthetic oligonucleotide
  Sense strand starting at position 2325 of SEQ ID NO: 1885018
ucgggaaauuacccuaucu

SEQ ID NO: 2309773 - RNA, 19 nt, Artificial Sequence
  Description of Artificial Sequence: Synthetic oligonucleotide
  Antisense strand to SEQ ID NO: 2309772
agauaggguaauuucccga

SEQ ID NO: 2309774 - RNA, 19 nt, Artificial Sequence
  Description of Artificial Sequence: Synthetic oligonucleotide
  Sense strand starting at position 2592 of SEQ ID NO: 1885018
ggaagaucagccuguuugu

SEQ ID NO: 2309775 - RNA, 19 nt, Artificial Sequence
  Description of Artificial Sequence: Synthetic oligonucleotide
  Antisense strand to SEQ ID NO: 2309774
acaaacaggcugaucuucc

SEQ ID NO: 2309776 - RNA, 19 nt, Artificial Sequence
  Description of Artificial Sequence: Synthetic oligonucleotide
  Sense strand starting at position 2595 of SEQ ID NO: 1885018
agaucagccuguuugucua

SEQ ID NO: 2309777 - RNA, 19 nt, Artificial Sequence
  Description of Artificial Sequence: Synthetic oligonucleotide
  Antisense strand to SEQ ID NO: 2309776
uagacaaacaggcugaucu

SEQ ID NO: 2309778 - RNA, 19 nt, Artificial Sequence
  Description of Artificial Sequence: Synthetic oligonucleotide
  Sense strand starting at position 3578 of SEQ ID NO: 1885018
ugcacuauugccuuguguu

SEQ ID NO: 2309779 - RNA, 19 nt, Artificial Sequence
  Description of Artificial Sequence: Synthetic oligonucleotide
  Antisense strand to SEQ ID NO: 2309778
aacacaaggcaauagugca

SEQ ID NO: 2309780 - RNA, 19 nt, Artificial Sequence
  Description of Artificial Sequence: Synthetic oligonucleotide
  Sense strand starting at position 3588 of SEQ ID NO: 1885018
ccuuguguuagcgauacuu

SEQ ID NO: 2309781 - RNA, 19 nt, Artificial Sequence
  Description of Artificial Sequence: Synthetic oligonucleotide
  Antisense strand to SEQ ID NO: 2309780
aaguaucgcuaacacaagg

SEQ ID NO: 2309782 - RNA, 19 nt, Artificial Sequence
  Description of Artificial Sequence: Synthetic oligonucleotide
  Sense strand starting at position 3590 of SEQ ID NO: 1885018
uuguguuagcgauacuuua

SEQ ID NO: 2309783 - RNA, 19 nt, Artificial Sequence
  Description of Artificial Sequence: Synthetic oligonucleotide
  Antisense strand to SEQ ID NO: 2309782
uaaaguaucgcuaacacaa

SEQ ID NO: 2309784 - RNA, 19 nt, Artificial Sequence
  Description of Artificial Sequence: Synthetic oligonucleotide
  Sense strand starting at position 3597 of SEQ ID NO: 1885018
agcgauacuuuaguugaua

SEQ ID NO: 2309785 - RNA, 19 nt, Artificial Sequence
  Description of Artificial Sequence: Synthetic oligonucleotide
  Antisense strand to SEQ ID NO: 2309784
uaucaacuaaaguaucgcu

SEQ ID NO: 2309786 - RNA, 19 nt, Artificial Sequence
  Description of Artificial Sequence: Synthetic oligonucleotide
  Sense strand starting at position 3598 of SEQ ID NO: 1885018
gcgauacuuuaguugauaa

SEQ ID NO: 2309787 - RNA, 19 nt, Artificial Sequence
  Description of Artificial Sequence: Synthetic oligonucleotide
  Antisense strand to SEQ ID NO: 2309786
uuaucaacuaaaguaucgc

SEQ ID NO: 2309788 - RNA, 19 nt, Artificial Sequence
  Description of Artificial Sequence: Synthetic oligonucleotide
  Sense strand starting at position 3617 of SEQ ID NO: 1885018
augaaacuuucccaggguu

SEQ ID NO: 2309789 - RNA, 19 nt, Artificial Sequence
  Description of Artificial Sequence: Synthetic oligonucleotide
  Antisense strand to SEQ ID NO: 2309788
aacccugggaaaguuucau

SEQ ID NO: 2309790 - RNA, 19 nt, Artificial Sequence
  Description of Artificial Sequence: Synthetic oligonucleotide
  Sense strand starting at position 3619 of SEQ ID NO: 1885018
gaaacuuucccaggguuau

SEQ ID NO: 2309791 - RNA, 19 nt, Artificial Sequence
  Description of Artificial Sequence: Synthetic oligonucleotide
  Antisense strand to SEQ ID NO: 2309790
auaacccugggaaaguuuc

SEQ ID NO: 2309792 - RNA, 19 nt, Artificial Sequence
  Description of Artificial Sequence: Synthetic oligonucleotide
  Sense strand starting at position 3629 of SEQ ID NO: 1885018
caggguuauccuuggguua

SEQ ID NO: 2309793 - RNA, 19 nt, Artificial Sequence
  Description of Artificial Sequence: Synthetic oligonucleotide
  Antisense strand to SEQ ID NO: 2309792
uaacccaaggauaacccug

SEQ ID NO: 2309794 - RNA, 19 nt, Artificial Sequence
  Description of Artificial Sequence: Synthetic oligonucleotide
  Sense strand starting at position 3630 of SEQ ID NO: 1885018
aggguuauccuuggguuau

SEQ ID NO: 2309795 - RNA, 19 nt, Artificial Sequence
  Description of Artificial Sequence: Synthetic oligonucleotide
  Antisense strand to SEQ ID NO: 2309794
auaacccaaggauaacccu

SEQ ID NO: 2309796 - RNA, 19 nt, Artificial Sequence
  Description of Artificial Sequence: Synthetic oligonucleotide
  Sense strand starting at position 3700 of SEQ ID NO: 1885018
ugugaccucccuuauuacu

SEQ ID NO: 2309797 - RNA, 19 nt, Artificial Sequence
  Description of Artificial Sequence: Synthetic oligonucleotide
  Antisense strand to SEQ ID NO: 2309796
aguaauaagggaggucaca

SEQ ID NO: 2309798 - RNA, 19 nt, Artificial Sequence
  Description of Artificial Sequence: Synthetic oligonucleotide
  Sense strand starting at position 3708 of SEQ ID NO: 1885018
cccuuauuacuguauaugu

SEQ ID NO: 2309799 - RNA, 19 nt, Artificial Sequence
  Description of Artificial Sequence: Synthetic oligonucleotide
  Antisense strand to SEQ ID NO: 2309798
acauauacaguaauaaggg

SEQ ID NO: 2309800 - RNA, 19 nt, Artificial Sequence
  Description of Artificial Sequence: Synthetic oligonucleotide
  Sense strand starting at position 3947 of SEQ ID NO: 1885018
cucccagcuccuuguuaua

SEQ ID NO: 2309801 - RNA, 19 nt, Artificial Sequence
  Description of Artificial Sequence: Synthetic oligonucleotide
  Antisense strand to SEQ ID NO: 2309800
uauaacaaggagcugggag

SEQ ID NO: 2309802 - RNA, 19 nt, Artificial Sequence
  Description of Artificial Sequence: Synthetic oligonucleotide
  Sense strand starting at position 198 of SEQ ID NO: 1885019
uggaaucucaguggccuua

SEQ ID NO: 2309803 - RNA, 19 nt, Artificial Sequence
  Description of Artificial Sequence: Synthetic oligonucleotide
  Antisense strand to SEQ ID NO: 2309802
uaaggccacugagauucca

SEQ ID NO: 2309804 - RNA, 19 nt, Artificial Sequence
  Description of Artificial Sequence: Synthetic oligonucleotide
  Sense strand starting at position 200 of SEQ ID NO: 1885019
gaaucucaguggccuuaau

SEQ ID NO: 2309805 - RNA, 19 nt, Artificial Sequence
  Description of Artificial Sequence: Synthetic oligonucleotide
  Antisense strand to SEQ ID NO: 2309804
auuaaggccacugagauuc

SEQ ID NO: 2309806 - RNA, 19 nt, Artificial Sequence
  Description of Artificial Sequence: Synthetic oligonucleotide
  Sense strand starting at position 278 of SEQ ID NO: 1885019
gaugaaguggcucaguuau

SEQ ID NO: 2309807 - RNA, 19 nt, Artificial Sequence
  Description of Artificial Sequence: Synthetic oligonucleotide
  Antisense strand to SEQ ID NO: 2309806
auaacugagccacuucauc

SEQ ID NO: 2309808 - RNA, 19 nt, Artificial Sequence
  Description of Artificial Sequence: Synthetic oligonucleotide
  Sense strand starting at position 314 of SEQ ID NO: 1885019
cugguucugucaucucaag

SEQ ID NO: 2309809 - RNA, 19 nt, Artificial Sequence
  Description of Artificial Sequence: Synthetic oligonucleotide
  Antisense strand to SEQ ID NO: 2309808
cuugagaugacagaaccag

SEQ ID NO: 2309810 - RNA, 19 nt, Artificial Sequence
  Description of Artificial Sequence: Synthetic oligonucleotide
  Sense strand starting at position 340 of SEQ ID NO: 1885019
cuccgaaauugaccaacaa

SEQ ID NO: 2309811 - RNA, 19 nt, Artificial Sequence
  Description of Artificial Sequence: Synthetic oligonucleotide
  Antisense strand to SEQ ID NO: 2309810
uuguuggucaauuucggag

SEQ ID NO: 2309812 - RNA, 19 nt, Artificial Sequence
  Description of Artificial Sequence: Synthetic oligonucleotide
  Sense strand starting at position 398 of SEQ ID NO: 1885019
agcuuugauccugaaguga

SEQ ID NO: 2309813 - RNA, 19 nt, Artificial Sequence
  Description of Artificial Sequence: Synthetic oligonucleotide
  Antisense strand to SEQ ID NO: 2309812
ucacuucaggaucaaagcu

SEQ ID NO: 2309814 - RNA, 19 nt, Artificial Sequence
  Description of Artificial Sequence: Synthetic oligonucleotide
  Sense strand starting at position 523 of SEQ ID NO: 1885019
agagcagagcuguaagauc

SEQ ID NO: 2309815 - RNA, 19 nt, Artificial Sequence
  Description of Artificial Sequence: Synthetic oligonucleotide
  Antisense strand to SEQ ID NO: 2309814
gaucuuacagcucugcucu

SEQ ID NO: 2309816 - RNA, 19 nt, Artificial Sequence
  Description of Artificial Sequence: Synthetic oligonucleotide
  Sense strand starting at position 595 of SEQ ID NO: 1885019
ggcccaauugcacaggaau

SEQ ID NO: 2309817 - RNA, 19 nt, Artificial Sequence
  Description of Artificial Sequence: Synthetic oligonucleotide
  Antisense strand to SEQ ID NO: 2309816
auuccugugcaauugggcc

SEQ ID NO: 2309818 - RNA, 19 nt, Artificial Sequence
  Description of Artificial Sequence: Synthetic oligonucleotide
  Sense strand starting at position 645 of SEQ ID NO: 1885019
auaauacccugggauuuga

SEQ ID NO: 2309819 - RNA, 19 nt, Artificial Sequence
  Description of Artificial Sequence: Synthetic oligonucleotide
  Antisense strand to SEQ ID NO: 2309818
ucaaaucccaggguauuau

SEQ ID NO: 2309820 - RNA, 19 nt, Artificial Sequence
  Description of Artificial Sequence: Synthetic oligonucleotide
  Sense strand starting at position 685 of SEQ ID NO: 1885019
aguccauccuauccugauu

SEQ ID NO: 2309821 - RNA, 19 nt, Artificial Sequence
  Description of Artificial Sequence: Synthetic oligonucleotide
  Antisense strand to SEQ ID NO: 2309820
aaucaggauaggauggacu

SEQ ID NO: 2309822 - RNA, 19 nt, Artificial Sequence
  Description of Artificial Sequence: Synthetic oligonucleotide
  Sense strand starting at position 1352 of SEQ ID NO: 1885019
augggagaauaugaauaau

SEQ ID NO: 2309823 - RNA, 19 nt, Artificial Sequence
  Description of Artificial Sequence: Synthetic oligonucleotide
  Antisense strand to SEQ ID NO: 2309822
auuauucauauucucccau

SEQ ID NO: 2309824 - RNA, 19 nt, Artificial Sequence
  Description of Artificial Sequence: Synthetic oligonucleotide
  Sense strand starting at position 1443 of SEQ ID NO: 1885019
guggaucaauaacuugaau

SEQ ID NO: 2309825 - RNA, 19 nt, Artificial Sequence
  Description of Artificial Sequence: Synthetic oligonucleotide
  Antisense strand to SEQ ID NO: 2309824
auucaaguuauugauccac

SEQ ID NO: 2309826 - RNA, 19 nt, Artificial Sequence
  Description of Artificial Sequence: Synthetic oligonucleotide
  Sense strand starting at position 1595 of SEQ ID NO: 1885019
acuagaauaccguaaaguc

SEQ ID NO: 2309827 - RNA, 19 nt, Artificial Sequence
  Description of Artificial Sequence: Synthetic oligonucleotide
  Antisense strand to SEQ ID NO: 2309826
gacuuuacgguauucuagu

SEQ ID NO: 2309828 - RNA, 19 nt, Artificial Sequence
  Description of Artificial Sequence: Synthetic oligonucleotide
  Sense strand starting at position 2055 of SEQ ID NO: 1885019
uaaauugugcagcauggua

SEQ ID NO: 2309829 - RNA, 19 nt, Artificial Sequence
  Description of Artificial Sequence: Synthetic oligonucleotide
  Antisense strand to SEQ ID NO: 2309828
uaccaugcugcacaauuua

SEQ ID NO: 2309830 - RNA, 19 nt, Artificial Sequence
  Description of Artificial Sequence: Synthetic oligonucleotide
  Sense strand starting at position 2070 of SEQ ID NO: 1885019
gguauaaucccauggauaa

SEQ ID NO: 2309831 - RNA, 19 nt, Artificial Sequence
  Description of Artificial Sequence: Synthetic oligonucleotide
  Antisense strand to SEQ ID NO: 2309830
uuauccaugggauuauacc

SEQ ID NO: 2309832 - RNA, 19 nt, Artificial Sequence
  Description of Artificial Sequence: Synthetic oligonucleotide
  Sense strand starting at position 2107 of SEQ ID NO: 1885019
uguugaucuuacucaagag

SEQ ID NO: 2309833 - RNA, 19 nt, Artificial Sequence
  Description of Artificial Sequence: Synthetic oligonucleotide
  Antisense strand to SEQ ID NO: 2309832
cucuugaguaagaucaaca

SEQ ID NO: 2309834 - RNA, 19 nt, Artificial Sequence
  Description of Artificial Sequence: Synthetic oligonucleotide
  Sense strand starting at position 2111 of SEQ ID NO: 1885019
gaucuuacucaagagugug

SEQ ID NO: 2309835 - RNA, 19 nt, Artificial Sequence
  Description of Artificial Sequence: Synthetic oligonucleotide
  Antisense strand to SEQ ID NO: 2309834
cacacucuugaguaagauc

SEQ ID NO: 2309836 - RNA, 19 nt, Artificial Sequence
  Description of Artificial Sequence: Synthetic oligonucleotide
  Sense strand starting at position 2116 of SEQ ID NO: 1885019
uacucaagagugugggaaa

SEQ ID NO: 2309837 - RNA, 19 nt, Artificial Sequence
  Description of Artificial Sequence: Synthetic oligonucleotide
  Antisense strand to SEQ ID NO: 2309836
uuucccacacucuugagua

SEQ ID NO: 2309838 - RNA, 19 nt, Artificial Sequence
  Description of Artificial Sequence: Synthetic oligonucleotide
  Sense strand starting at position 2286 of SEQ ID NO: 1885019
gcggcaaauauauacugua

SEQ ID NO: 2309839 - RNA, 19 nt, Artificial Sequence
  Description of Artificial Sequence: Synthetic oligonucleotide
  Antisense strand to SEQ ID NO: 2309838
uacaguauauauuugccgc

SEQ ID NO: 2309840 - RNA, 19 nt, Artificial Sequence
  Description of Artificial Sequence: Synthetic oligonucleotide
  Sense strand starting at position 2304 of SEQ ID NO: 1885019
auaggaguagcaugauacu

SEQ ID NO: 2309841 - RNA, 19 nt, Artificial Sequence
  Description of Artificial Sequence: Synthetic oligonucleotide
  Antisense strand to SEQ ID NO: 2309840
aguaucaugcuacuccuau

SEQ ID NO: 2309842 - RNA, 19 nt, Artificial Sequence
  Description of Artificial Sequence: Synthetic oligonucleotide
  Sense strand starting at position 2384 of SEQ ID NO: 1885019
aaacuauaguggcucugua

SEQ ID NO: 2309843 - RNA, 19 nt, Artificial Sequence
  Description of Artificial Sequence: Synthetic oligonucleotide
  Antisense strand to SEQ ID NO: 2309842
uacagagccacuauaguuu

SEQ ID NO: 2309844 - RNA, 19 nt, Artificial Sequence
  Description of Artificial Sequence: Synthetic oligonucleotide
  Sense strand starting at position 2406 of SEQ ID NO: 1885019
ugggauauuacauagcugu

SEQ ID NO: 2309845 - RNA, 19 nt, Artificial Sequence
  Description of Artificial Sequence: Synthetic oligonucleotide
  Antisense strand to SEQ ID NO: 2309844
acagcuauguaauauccca

SEQ ID NO: 2309846 - RNA, 19 nt, Artificial Sequence
  Description of Artificial Sequence: Synthetic oligonucleotide
  Sense strand starting at position 2413 of SEQ ID NO: 1885019
uuacauagcuguuccaaag

SEQ ID NO: 2309847 - RNA, 19 nt, Artificial Sequence
  Description of Artificial Sequence: Synthetic oligonucleotide
  Antisense strand to SEQ ID NO: 2309846
cuuuggaacagcuauguaa

SEQ ID NO: 2309848 - RNA, 19 nt, Artificial Sequence
  Description of Artificial Sequence: Synthetic oligonucleotide
  Sense strand starting at position 2437 of SEQ ID NO: 1885019
augcauuucuaugucuuga

SEQ ID NO: 2309849 - RNA, 19 nt, Artificial Sequence
  Description of Artificial Sequence: Synthetic oligonucleotide
  Antisense strand to SEQ ID NO: 2309848
ucaagacauagaaaugcau

SEQ ID NO: 2309850 - RNA, 19 nt, Artificial Sequence
  Description of Artificial Sequence: Synthetic oligonucleotide
  Sense strand starting at position 2439 of SEQ ID NO: 1885019
gcauuucuaugucuugaua

SEQ ID NO: 2309851 - RNA, 19 nt, Artificial Sequence
  Description of Artificial Sequence: Synthetic oligonucleotide
  Antisense strand to SEQ ID NO: 2309850
uaucaagacauagaaaugc

SEQ ID NO: 2309852 - RNA, 19 nt, Artificial Sequence
  Description of Artificial Sequence: Synthetic oligonucleotide
  Sense strand starting at position 2442 of SEQ ID NO: 1885019
uuucuaugucuugauauga

SEQ ID NO: 2309853 - RNA, 19 nt, Artificial Sequence
  Description of Artificial Sequence: Synthetic oligonucleotide
  Antisense strand to SEQ ID NO: 2309852
ucauaucaagacauagaaa

SEQ ID NO: 2309854 - RNA, 19 nt, Artificial Sequence
  Description of Artificial Sequence: Synthetic oligonucleotide
  Sense strand starting at position 2950 of SEQ ID NO: 1885019
ccagguuuaagugguaaug

SEQ ID NO: 2309855 - RNA, 19 nt, Artificial Sequence
  Description of Artificial Sequence: Synthetic oligonucleotide
  Antisense strand to SEQ ID NO: 2309854
cauuaccacuuaaaccugg

SEQ ID NO: 2309856 - RNA, 19 nt, Artificial Sequence
  Description of Artificial Sequence: Synthetic oligonucleotide
  Sense strand starting at position 2961 of SEQ ID NO: 1885019
ugguaaugguucucuauca

SEQ ID NO: 2309857 - RNA, 19 nt, Artificial Sequence
  Description of Artificial Sequence: Synthetic oligonucleotide
  Antisense strand to SEQ ID NO: 2309856
ugauagagaaccauuacca

SEQ ID NO: 2309858 - RNA, 19 nt, Artificial Sequence
  Description of Artificial Sequence: Synthetic oligonucleotide
  Sense strand starting at position 2962 of SEQ ID NO: 1885019
gguaaugguucucuaucaa

SEQ ID NO: 2309859 - RNA, 19 nt, Artificial Sequence
  Description of Artificial Sequence: Synthetic oligonucleotide
  Antisense strand to SEQ ID NO: 2309858
uugauagagaaccauuacc

SEQ ID NO: 2309860 - RNA, 19 nt, Artificial Sequence
  Description of Artificial Sequence: Synthetic oligonucleotide
  Sense strand starting at position 3032 of SEQ ID NO: 1885019
aguagugacuaaguuggau

SEQ ID NO: 2309861 - RNA, 19 nt, Artificial Sequence
  Description of Artificial Sequence: Synthetic oligonucleotide
  Antisense strand to SEQ ID NO: 2309860
auccaacuuagucacuacu

SEQ ID NO: 2309862 - RNA, 19 nt, Artificial Sequence
  Description of Artificial Sequence: Synthetic oligonucleotide
  Sense strand starting at position 3371 of SEQ ID NO: 1885019
ccaggaaucuucucauuga

SEQ ID NO: 2309863 - RNA, 19 nt, Artificial Sequence
  Description of Artificial Sequence: Synthetic oligonucleotide
  Antisense strand to SEQ ID NO: 2309862
ucaaugagaagauuccugg

SEQ ID NO: 2309864 - RNA, 19 nt, Artificial Sequence
  Description of Artificial Sequence: Synthetic oligonucleotide
  Sense strand starting at position 3374 of SEQ ID NO: 1885019
ggaaucuucucauugaauc

SEQ ID NO: 2309865 - RNA, 19 nt, Artificial Sequence
  Description of Artificial Sequence: Synthetic oligonucleotide
  Antisense strand to SEQ ID NO: 2309864
gauucaaugagaagauucc

SEQ ID NO: 2309866 - RNA, 19 nt, Artificial Sequence
  Description of Artificial Sequence: Synthetic oligonucleotide
  Sense strand starting at position 3430 of SEQ ID NO: 1885019
ccauucuaccaacgaggaa

SEQ ID NO: 2309867 - RNA, 19 nt, Artificial Sequence
  Description of Artificial Sequence: Synthetic oligonucleotide
  Antisense strand to SEQ ID NO: 2309866
uuccucguugguagaaugg

SEQ ID NO: 2309868 - RNA, 19 nt, Artificial Sequence
  Description of Artificial Sequence: Synthetic oligonucleotide
  Sense strand starting at position 3487 of SEQ ID NO: 1885019
agacucagggcuugaguuu

SEQ ID NO: 2309869 - RNA, 19 nt, Artificial Sequence
  Description of Artificial Sequence: Synthetic oligonucleotide
  Antisense strand to SEQ ID NO: 2309868
aaacucaagcccugagucu

SEQ ID NO: 2309870 - RNA, 19 nt, Artificial Sequence
  Description of Artificial Sequence: Synthetic oligonucleotide
  Sense strand starting at position 3550 of SEQ ID NO: 1885019
auguguccucaguaaagug

SEQ ID NO: 2309871 - RNA, 19 nt, Artificial Sequence
  Description of Artificial Sequence: Synthetic oligonucleotide
  Antisense strand to SEQ ID NO: 2309870
cacuuuacugaggacacau

SEQ ID NO: 2309872 - RNA, 19 nt, Artificial Sequence
  Description of Artificial Sequence: Synthetic oligonucleotide
  Sense strand starting at position 3579 of SEQ ID NO: 1885019
aggcguuugaaccagagga

SEQ ID NO: 2309873 - RNA, 19 nt, Artificial Sequence
  Description of Artificial Sequence: Synthetic oligonucleotide
  Antisense strand to SEQ ID NO: 2309872
uccucugguucaaacgccu

SEQ ID NO: 2309874 - RNA, 19 nt, Artificial Sequence
  Description of Artificial Sequence: Synthetic oligonucleotide
  Sense strand starting at position 3581 of SEQ ID NO: 1885019
gcguuugaaccagaggacu

SEQ ID NO: 2309875 - RNA, 19 nt, Artificial Sequence
  Description of Artificial Sequence: Synthetic oligonucleotide
  Antisense strand to SEQ ID NO: 2309874
aguccucugguucaaacgc

SEQ ID NO: 2309876 - RNA, 19 nt, Artificial Sequence
  Description of Artificial Sequence: Synthetic oligonucleotide
  Sense strand starting at position 3646 of SEQ ID NO: 1885019
cugcauuaccaagagguua

SEQ ID NO: 2309877 - RNA, 19 nt, Artificial Sequence
  Description of Artificial Sequence: Synthetic oligonucleotide
  Antisense strand to SEQ ID NO: 2309876
uaaccucuugguaaugcag

SEQ ID NO: 2309878 - RNA, 19 nt, Artificial Sequence
  Description of Artificial Sequence: Synthetic oligonucleotide
  Sense strand starting at position 3648 of SEQ ID NO: 1885019
gcauuaccaagagguuaag

SEQ ID NO: 2309879 - RNA, 19 nt, Artificial Sequence
  Description of Artificial Sequence: Synthetic oligonucleotide
  Antisense strand to SEQ ID NO: 2309878
cuuaaccucuugguaaugc

SEQ ID NO: 2309880 - RNA, 19 nt, Artificial Sequence
  Description of Artificial Sequence: Synthetic oligonucleotide
  Sense strand starting at position 3920 of SEQ ID NO: 1885019
gccuacuucuuuccuggaa

SEQ ID NO: 2309881 - RNA, 19 nt, Artificial Sequence
  Description of Artificial Sequence: Synthetic oligonucleotide
  Antisense strand to SEQ ID NO: 2309880
uuccaggaaagaaguaggc

SEQ ID NO: 2309882 - RNA, 19 nt, Artificial Sequence
  Description of Artificial Sequence: Synthetic oligonucleotide
  Sense strand starting at position 2 of SEQ ID NO: 1885020
agaagugcauccucuaaua

SEQ ID NO: 2309883 - RNA, 19 nt, Artificial Sequence
  Description of Artificial Sequence: Synthetic oligonucleotide
  Antisense strand to SEQ ID NO: 2309882
uauuagaggaugcacuucu

SEQ ID NO: 2309884 - RNA, 19 nt, Artificial Sequence
  Description of Artificial Sequence: Synthetic oligonucleotide
  Sense strand starting at position 254 of SEQ ID NO: 1885020
acaccaaucuuggauuuag

SEQ ID NO: 2309885 - RNA, 19 nt, Artificial Sequence
  Description of Artificial Sequence: Synthetic oligonucleotide
  Antisense strand to SEQ ID NO: 2309884
cuaaauccaagauuggugu

SEQ ID NO: 2309886 - RNA, 19 nt, Artificial Sequence
  Description of Artificial Sequence: Synthetic oligonucleotide
  Sense strand starting at position 319 of SEQ ID NO: 1885020
aucugcaaagaucguauuu

SEQ ID NO: 2309887 - RNA, 19 nt, Artificial Sequence
  Description of Artificial Sequence: Synthetic oligonucleotide
  Antisense strand to SEQ ID NO: 2309886
aaauacgaucuuugcagau

SEQ ID NO: 2309888 - RNA, 19 nt, Artificial Sequence
  Description of Artificial Sequence: Synthetic oligonucleotide
  Sense strand starting at position 657 of SEQ ID NO: 1885020
uucuaauauuaggcaugau

SEQ ID NO: 2309889 - RNA, 19 nt, Artificial Sequence
  Description of Artificial Sequence: Synthetic oligonucleotide
  Antisense strand to SEQ ID NO: 2309888
aucaugccuaauauuagaa

SEQ ID NO: 2309890 - RNA, 19 nt, Artificial Sequence
  Description of Artificial Sequence: Synthetic oligonucleotide
  Sense strand starting at position 669 of SEQ ID NO: 1885020
gcaugauucuuuccuugga

SEQ ID NO: 2309891 - RNA, 19 nt, Artificial Sequence
  Description of Artificial Sequence: Synthetic oligonucleotide
  Antisense strand to SEQ ID NO: 2309890
uccaaggaaagaaucaugc

SEQ ID NO: 2309892 - RNA, 19 nt, Artificial Sequence
  Description of Artificial Sequence: Synthetic oligonucleotide
  Sense strand starting at position 835 of SEQ ID NO: 1885020
cagccaugugacuaugaca

SEQ ID NO: 2309893 - RNA, 19 nt, Artificial Sequence
  Description of Artificial Sequence: Synthetic oligonucleotide
  Antisense strand to SEQ ID NO: 2309892
ugucauagucacauggcug

SEQ ID NO: 2309894 - RNA, 19 nt, Artificial Sequence
  Description of Artificial Sequence: Synthetic oligonucleotide
  Sense strand starting at position 993 of SEQ ID NO: 1885020
gaagcaguugauggaguaa

SEQ ID NO: 2309895 - RNA, 19 nt, Artificial Sequence
  Description of Artificial Sequence: Synthetic oligonucleotide
  Antisense strand to SEQ ID NO: 2309894
uuacuccaucaacugcuuc

SEQ ID NO: 2309896 - RNA, 19 nt, Artificial Sequence
  Description of Artificial Sequence: Synthetic oligonucleotide
  Sense strand starting at position 1039 of SEQ ID NO: 1885020
ucacuugagguggguuuaa

SEQ ID NO: 2309897 - RNA, 19 nt, Artificial Sequence
  Description of Artificial Sequence: Synthetic oligonucleotide
  Antisense strand to SEQ ID NO: 2309896
uuaaacccaccucaaguga

SEQ ID NO: 2309898 - RNA, 19 nt, Artificial Sequence
  Description of Artificial Sequence: Synthetic oligonucleotide
  Sense strand starting at position 1289 of SEQ ID NO: 1885020
gaaguugagggcugggaaa

SEQ ID NO: 2309899 - RNA, 19 nt, Artificial Sequence
  Description of Artificial Sequence: Synthetic oligonucleotide
  Antisense strand to SEQ ID NO: 2309898
uuucccagcccucaacuuc

SEQ ID NO: 2309900 - RNA, 19 nt, Artificial Sequence
  Description of Artificial Sequence: Synthetic oligonucleotide
  Sense strand starting at position 1316 of SEQ ID NO: 1885020
gacccaagaucucucggaa

SEQ ID NO: 2309901 - RNA, 19 nt, Artificial Sequence
  Description of Artificial Sequence: Synthetic oligonucleotide
  Antisense strand to SEQ ID NO: 2309900
uuccgagagaucuuggguc

SEQ ID NO: 2309902 - RNA, 19 nt, Artificial Sequence
  Description of Artificial Sequence: Synthetic oligonucleotide
  Sense strand starting at position 1319 of SEQ ID NO: 1885020
ccaagaucucucggaauau

SEQ ID NO: 2309903 - RNA, 19 nt, Artificial Sequence
  Description of Artificial Sequence: Synthetic oligonucleotide
  Antisense strand to SEQ ID NO: 2309902
auauuccgagagaucuugg

SEQ ID NO: 2309904 - RNA, 19 nt, Artificial Sequence
  Description of Artificial Sequence: Synthetic oligonucleotide
  Sense strand starting at position 1432 of SEQ ID NO: 1885020
ccaguaauucuaggauuaa

SEQ ID NO: 2309905 - RNA, 19 nt, Artificial Sequence
  Description of Artificial Sequence: Synthetic oligonucleotide
  Antisense strand to SEQ ID NO: 2309904
uuaauccuagaauuacugg

SEQ ID NO: 2309906 - RNA, 19 nt, Artificial Sequence
  Description of Artificial Sequence: Synthetic oligonucleotide
  Sense strand starting at position 1524 of SEQ ID NO: 1885020
aaacaucaaggugguuaua

SEQ ID NO: 2309907 - RNA, 19 nt, Artificial Sequence
  Description of Artificial Sequence: Synthetic oligonucleotide
  Antisense strand to SEQ ID NO: 2309906
uauaaccaccuugauguuu

SEQ ID NO: 2309908 - RNA, 19 nt, Artificial Sequence
  Description of Artificial Sequence: Synthetic oligonucleotide
  Sense strand starting at position 1526 of SEQ ID NO: 1885020
acaucaaggugguuauaaa

SEQ ID NO: 2309909 - RNA, 19 nt, Artificial Sequence
  Description of Artificial Sequence: Synthetic oligonucleotide
  Antisense strand to SEQ ID NO: 2309908
uuuauaaccaccuugaugu

SEQ ID NO: 2309910 - RNA, 19 nt, Artificial Sequence
  Description of Artificial Sequence: Synthetic oligonucleotide
  Sense strand starting at position 1605 of SEQ ID NO: 1885020
ugcuuuauacuggaaauau

SEQ ID NO: 2309911 - RNA, 19 nt, Artificial Sequence
  Description of Artificial Sequence: Synthetic oligonucleotide
  Antisense strand to SEQ ID NO: 2309910
auauuuccaguauaaagca

SEQ ID NO: 2309912 - RNA, 19 nt, Artificial Sequence
  Description of Artificial Sequence: Synthetic oligonucleotide
  Sense strand starting at position 1658 of SEQ ID NO: 1885020
auaucauagugugucugaa

SEQ ID NO: 2309913 - RNA, 19 nt, Artificial Sequence
  Description of Artificial Sequence: Synthetic oligonucleotide
  Antisense strand to SEQ ID NO: 2309912
uucagacacacuaugauau

SEQ ID NO: 2309914 - RNA, 19 nt, Artificial Sequence
  Description of Artificial Sequence: Synthetic oligonucleotide
  Sense strand starting at position 1660 of SEQ ID NO: 1885020
aucauagugugucugaaac

SEQ ID NO: 2309915 - RNA, 19 nt, Artificial Sequence
  Description of Artificial Sequence: Synthetic oligonucleotide
  Antisense strand to SEQ ID NO: 2309914
guuucagacacacuaugau

SEQ ID NO: 2309916 - RNA, 19 nt, Artificial Sequence
  Description of Artificial Sequence: Synthetic oligonucleotide
  Sense strand starting at position 1885 of SEQ ID NO: 1885020
guauuccuggguuaucaaa

SEQ ID NO: 2309917 - RNA, 19 nt, Artificial Sequence
  Description of Artificial Sequence: Synthetic oligonucleotide
  Antisense strand to SEQ ID NO: 2309916
uuugauaacccaggaauac

SEQ ID NO: 2309918 - RNA, 19 nt, Artificial Sequence
  Description of Artificial Sequence: Synthetic oligonucleotide
  Sense strand starting at position 2132 of SEQ ID NO: 1885020
gaacccauguuuguugaca

SEQ ID NO: 2309919 - RNA, 19 nt, Artificial Sequence
  Description of Artificial Sequence: Synthetic oligonucleotide
  Antisense strand to SEQ ID NO: 2309918
ugucaacaaacauggguuc

SEQ ID NO: 2309920 - RNA, 19 nt, Artificial Sequence
  Description of Artificial Sequence: Synthetic oligonucleotide
  Sense strand starting at position 2140 of SEQ ID NO: 1885020
guuuguugacaucagucca

SEQ ID NO: 2309921 - RNA, 19 nt, Artificial Sequence
  Description of Artificial Sequence: Synthetic oligonucleotide
  Antisense strand to SEQ ID NO: 2309920
uggacugaugucaacaaac

SEQ ID NO: 2309922 - RNA, 19 nt, Artificial Sequence
  Description of Artificial Sequence: Synthetic oligonucleotide
  Sense strand starting at position 2285 of SEQ ID NO: 1885020
auguccucuccugagaagu

SEQ ID NO: 2309923 - RNA, 19 nt, Artificial Sequence
  Description of Artificial Sequence: Synthetic oligonucleotide
  Antisense strand to SEQ ID NO: 2309922
acuucucaggagaggacau

SEQ ID NO: 2309924 - RNA, 19 nt, Artificial Sequence
  Description of Artificial Sequence: Synthetic oligonucleotide
  Sense strand starting at position 2691 of SEQ ID NO: 1885020
ucacaaauucugugccaga

SEQ ID NO: 2309925 - RNA, 19 nt, Artificial Sequence
  Description of Artificial Sequence: Synthetic oligonucleotide
  Antisense strand to SEQ ID NO: 2309924
ucuggcacagaauuuguga

SEQ ID NO: 2309926 - RNA, 19 nt, Artificial Sequence
  Description of Artificial Sequence: Synthetic oligonucleotide
  Sense strand starting at position 2830 of SEQ ID NO: 1885020
gcaacuaaauguccagaau

SEQ ID NO: 2309927 - RNA, 19 nt, Artificial Sequence
  Description of Artificial Sequence: Synthetic oligonucleotide
  Antisense strand to SEQ ID NO: 2309926
auucuggacauuuaguugc

SEQ ID NO: 2309928 - RNA, 19 nt, Artificial Sequence
  Description of Artificial Sequence: Synthetic oligonucleotide
  Sense strand starting at position 2964 of SEQ ID NO: 1885020
ggucuucaugcauggagac

SEQ ID NO: 2309929 - RNA, 19 nt, Artificial Sequence
  Description of Artificial Sequence: Synthetic oligonucleotide
  Antisense strand to SEQ ID NO: 2309928
gucuccaugcaugaagacc

SEQ ID NO: 2309930 - RNA, 19 nt, Artificial Sequence
  Description of Artificial Sequence: Synthetic oligonucleotide
  Sense strand starting at position 3132 of SEQ ID NO: 1885020
ggauauaaaucuguccucu

SEQ ID NO: 2309931 - RNA, 19 nt, Artificial Sequence
  Description of Artificial Sequence: Synthetic oligonucleotide
  Antisense strand to SEQ ID NO: 2309930
agaggacagauuuauaucc

SEQ ID NO: 2309932 - RNA, 19 nt, Artificial Sequence
  Description of Artificial Sequence: Synthetic oligonucleotide
  Sense strand starting at position 3155 of SEQ ID NO: 1885020
uggugagguguccaagaau

SEQ ID NO: 2309933 - RNA, 19 nt, Artificial Sequence
  Description of Artificial Sequence: Synthetic oligonucleotide
  Antisense strand to SEQ ID NO: 2309932
auucuuggacaccucacca

SEQ ID NO: 2309934 - RNA, 19 nt, Artificial Sequence
  Description of Artificial Sequence: Synthetic oligonucleotide
  Sense strand starting at position 3199 of SEQ ID NO: 1885020
auucguauuguacauaaug

SEQ ID NO: 2309935 - RNA, 19 nt, Artificial Sequence
  Description of Artificial Sequence: Synthetic oligonucleotide
  Antisense strand to SEQ ID NO: 2309934
cauuauguacaauacgaau

SEQ ID NO: 2309936 - RNA, 19 nt, Artificial Sequence
  Description of Artificial Sequence: Synthetic oligonucleotide
  Sense strand starting at position 3240 of SEQ ID NO: 1885020
cugaacacuucuccuggaa

SEQ ID NO: 2309937 - RNA, 19 nt, Artificial Sequence
  Description of Artificial Sequence: Synthetic oligonucleotide
  Antisense strand to SEQ ID NO: 2309936
uuccaggagaaguguucag

SEQ ID NO: 2309938 - RNA, 19 nt, Artificial Sequence
  Description of Artificial Sequence: Synthetic oligonucleotide
  Sense strand starting at position 3267 of SEQ ID NO: 1885020
uuggaaaggucaucuauau

SEQ ID NO: 2309939 - RNA, 19 nt, Artificial Sequence
  Description of Artificial Sequence: Synthetic oligonucleotide
  Antisense strand to SEQ ID NO: 2309938
auauagaugaccuuuccaa

SEQ ID NO: 2309940 - RNA, 19 nt, Artificial Sequence
  Description of Artificial Sequence: Synthetic oligonucleotide
  Sense strand starting at position 3290 of SEQ ID NO: 1885020
gucaaagucacccauggua

SEQ ID NO: 2309941 - RNA, 19 nt, Artificial Sequence
  Description of Artificial Sequence: Synthetic oligonucleotide
  Antisense strand to SEQ ID NO: 2309940
uaccaugggugacuuugac

SEQ ID NO: 2309942 - RNA, 19 nt, Artificial Sequence
  Description of Artificial Sequence: Synthetic oligonucleotide
  Sense strand starting at position 3422 of SEQ ID NO: 1885020
aggaguagaggacgucuua

SEQ ID NO: 2309943 - RNA, 19 nt, Artificial Sequence
  Description of Artificial Sequence: Synthetic oligonucleotide
  Antisense strand to SEQ ID NO: 2309942
uaagacguccucuacuccu

SEQ ID NO: 2309944 - RNA, 19 nt, Artificial Sequence
  Description of Artificial Sequence: Synthetic oligonucleotide
  Sense strand starting at position 3557 of SEQ ID NO: 1885020
gcaauaggcaucuaggaua

SEQ ID NO: 2309945 - RNA, 19 nt, Artificial Sequence
  Description of Artificial Sequence: Synthetic oligonucleotide
  Antisense strand to SEQ ID NO: 2309944
uauccuagaugccuauugc

SEQ ID NO: 2309946 - RNA, 19 nt, Artificial Sequence
  Description of Artificial Sequence: Synthetic oligonucleotide
  Sense strand starting at position 3587 of SEQ ID NO: 1885020
acuucugaucccugugaca

SEQ ID NO: 2309947 - RNA, 19 nt, Artificial Sequence
  Description of Artificial Sequence: Synthetic oligonucleotide
  Antisense strand to SEQ ID NO: 2309946
ugucacagggaucagaagu

SEQ ID NO: 2309948 - RNA, 19 nt, Artificial Sequence
  Description of Artificial Sequence: Synthetic oligonucleotide
  Sense strand starting at position 3589 of SEQ ID NO: 1885020
uucugaucccugugacauu

SEQ ID NO: 2309949 - RNA, 19 nt, Artificial Sequence
  Description of Artificial Sequence: Synthetic oligonucleotide
  Antisense strand to SEQ ID NO: 2309948
aaugucacagggaucagaa

SEQ ID NO: 2309950 - RNA, 19 nt, Artificial Sequence
  Description of Artificial Sequence: Synthetic oligonucleotide
  Sense strand starting at position 3723 of SEQ ID NO: 1885020
ccgaauuauuuacaaugga

SEQ ID NO: 2309951 - RNA, 19 nt, Artificial Sequence
  Description of Artificial Sequence: Synthetic oligonucleotide
  Antisense strand to SEQ ID NO: 2309950
uccauuguaaauaauucgg

SEQ ID NO: 2309952 - RNA, 19 nt, Artificial Sequence
  Description of Artificial Sequence: Synthetic oligonucleotide
  Sense strand starting at position 3760 of SEQ ID NO: 1885020
ccaguaaagugaguaagaa

SEQ ID NO: 2309953 - RNA, 19 nt, Artificial Sequence
  Description of Artificial Sequence: Synthetic oligonucleotide
  Antisense strand to SEQ ID NO: 2309952
uucuuacucacuuuacugg

SEQ ID NO: 2309954 - RNA, 19 nt, Artificial Sequence
  Description of Artificial Sequence: Synthetic oligonucleotide
  Sense strand starting at position 3795 of SEQ ID NO: 1885020
gaggaagaguuacagaaga

SEQ ID NO: 2309955 - RNA, 19 nt, Artificial Sequence
  Description of Artificial Sequence: Synthetic oligonucleotide
  Antisense strand to SEQ ID NO: 2309954
ucuucuguaacucuuccuc

SEQ ID NO: 2309956 - RNA, 19 nt, Artificial Sequence
  Description of Artificial Sequence: Synthetic oligonucleotide
  Sense strand starting at position 3920 of SEQ ID NO: 1885020
gacagagguuuguccugga

SEQ ID NO: 2309957 - RNA, 19 nt, Artificial Sequence
  Description of Artificial Sequence: Synthetic oligonucleotide
  Antisense strand to SEQ ID NO: 2309956
uccaggacaaaccucuguc

SEQ ID NO: 2309958 - RNA, 19 nt, Artificial Sequence
  Description of Artificial Sequence: Synthetic oligonucleotide
  Sense strand starting at position 3933 of SEQ ID NO: 1885020
ccuggacuccucugauucu

SEQ ID NO: 2309959 - RNA, 19 nt, Artificial Sequence
  Description of Artificial Sequence: Synthetic oligonucleotide
  Antisense strand to SEQ ID NO: 2309958
agaaucagaggaguccagg

SEQ ID NO: 2309960 - RNA, 19 nt, Artificial Sequence
  Description of Artificial Sequence: Synthetic oligonucleotide
  Sense strand starting at position 3965 of SEQ ID NO: 1885020
uuaccauggucagcaauau

SEQ ID NO: 2309961 - RNA, 19 nt, Artificial Sequence
  Description of Artificial Sequence: Synthetic oligonucleotide
  Antisense strand to SEQ ID NO: 2309960
auauugcugaccaugguaa

SEQ ID NO: 2309962 - RNA, 19 nt, Artificial Sequence
  Description of Artificial Sequence: Synthetic oligonucleotide
  Sense strand starting at position 132 of SEQ ID NO: 1885021
guauaaagagguuauaggu

SEQ ID NO: 2309963 - RNA, 19 nt, Artificial Sequence
  Description of Artificial Sequence: Synthetic oligonucleotide
  Antisense strand to SEQ ID NO: 2309962
accuauaaccucuuuauac

SEQ ID NO: 2309964 - RNA, 19 nt, Artificial Sequence
  Description of Artificial Sequence: Synthetic oligonucleotide
  Sense strand starting at position 145 of SEQ ID NO: 1885021
auagguuguuuguuugaau

SEQ ID NO: 2309965 - RNA, 19 nt, Artificial Sequence
  Description of Artificial Sequence: Synthetic oligonucleotide
  Antisense strand to SEQ ID NO: 2309964
auucaaacaaacaaccuau

SEQ ID NO: 2309966 - RNA, 19 nt, Artificial Sequence
  Description of Artificial Sequence: Synthetic oligonucleotide
  Sense strand starting at position 146 of SEQ ID NO: 1885021
uagguuguuuguuugaaua

SEQ ID NO: 2309967 - RNA, 19 nt, Artificial Sequence
  Description of Artificial Sequence: Synthetic oligonucleotide
  Antisense strand to SEQ ID NO: 2309966
uauucaaacaaacaaccua

SEQ ID NO: 2309968 - RNA, 19 nt, Artificial Sequence
  Description of Artificial Sequence: Synthetic oligonucleotide
  Sense strand starting at position 169 of SEQ ID NO: 1885021
aucucuaguugcucaggau

SEQ ID NO: 2309969 - RNA, 19 nt, Artificial Sequence
  Description of Artificial Sequence: Synthetic oligonucleotide
  Antisense strand to SEQ ID NO: 2309968
auccugagcaacuagagau

SEQ ID NO: 2309970 - RNA, 19 nt, Artificial Sequence
  Description of Artificial Sequence: Synthetic oligonucleotide
  Sense strand starting at position 194 of SEQ ID NO: 1885021
guaagagagcuccaaguag

SEQ ID NO: 2309971 - RNA, 19 nt, Artificial Sequence
  Description of Artificial Sequence: Synthetic oligonucleotide
  Antisense strand to SEQ ID NO: 2309970
cuacuuggagcucucuuac

SEQ ID NO: 2309972 - RNA, 19 nt, Artificial Sequence
  Description of Artificial Sequence: Synthetic oligonucleotide
  Sense strand starting at position 214 of SEQ ID NO: 1885021
ggcccaaugagccauguuu

SEQ ID NO: 2309973 - RNA, 19 nt, Artificial Sequence
  Description of Artificial Sequence: Synthetic oligonucleotide
  Antisense strand to SEQ ID NO: 2309972
aaacauggcucauugggcc

SEQ ID NO: 2309974 - RNA, 19 nt, Artificial Sequence
  Description of Artificial Sequence: Synthetic oligonucleotide
  Sense strand starting at position 447 of SEQ ID NO: 1885021
agaacuggguccucuuaga

SEQ ID NO: 2309975 - RNA, 19 nt, Artificial Sequence
  Description of Artificial Sequence: Synthetic oligonucleotide
  Antisense strand to SEQ ID NO: 2309974
ucuaagaggacccaguucu

SEQ ID NO: 2309976 - RNA, 19 nt, Artificial Sequence
  Description of Artificial Sequence: Synthetic oligonucleotide
  Sense strand starting at position 680 of SEQ ID NO: 1885021
ucaugaggcaguuguaaca

SEQ ID NO: 2309977 - RNA, 19 nt, Artificial Sequence
  Description of Artificial Sequence: Synthetic oligonucleotide
  Antisense strand to SEQ ID NO: 2309976
uguuacaacugccucauga

SEQ ID NO: 2309978 - RNA, 19 nt, Artificial Sequence
  Description of Artificial Sequence: Synthetic oligonucleotide
  Sense strand starting at position 1233 of SEQ ID NO: 1885021
acaggucuugagugcuuua

SEQ ID NO: 2309979 - RNA, 19 nt, Artificial Sequence
  Description of Artificial Sequence: Synthetic oligonucleotide
  Antisense strand to SEQ ID NO: 2309978
uaaagcacucaagaccugu

SEQ ID NO: 2309980 - RNA, 19 nt, Artificial Sequence
  Description of Artificial Sequence: Synthetic oligonucleotide
  Sense strand starting at position 1236 of SEQ ID NO: 1885021
ggucuugagugcuuuauaa

SEQ ID NO: 2309981 - RNA, 19 nt, Artificial Sequence
  Description of Artificial Sequence: Synthetic oligonucleotide
  Antisense strand to SEQ ID NO: 2309980
uuauaaagcacucaagacc

SEQ ID NO: 2309982 - RNA, 19 nt, Artificial Sequence
  Description of Artificial Sequence: Synthetic oligonucleotide
  Sense strand starting at position 1238 of SEQ ID NO: 1885021
ucuugagugcuuuauaagc

SEQ ID NO: 2309983 - RNA, 19 nt, Artificial Sequence
  Description of Artificial Sequence: Synthetic oligonucleotide
  Antisense strand to SEQ ID NO: 2309982
gcuuauaaagcacucaaga

SEQ ID NO: 2309984 - RNA, 19 nt, Artificial Sequence
  Description of Artificial Sequence: Synthetic oligonucleotide
  Sense strand starting at position 1561 of SEQ ID NO: 1885021
gcucaagucucaccuugaa

SEQ ID NO: 2309985 - RNA, 19 nt, Artificial Sequence
  Description of Artificial Sequence: Synthetic oligonucleotide
  Antisense strand to SEQ ID NO: 2309984
uucaaggugagacuugagc

SEQ ID NO: 2309986 - RNA, 19 nt, Artificial Sequence
  Description of Artificial Sequence: Synthetic oligonucleotide
  Sense strand starting at position 1646 of SEQ ID NO: 1885021
aggauugcuugcuugagac

SEQ ID NO: 2309987 - RNA, 19 nt, Artificial Sequence
  Description of Artificial Sequence: Synthetic oligonucleotide
  Antisense strand to SEQ ID NO: 2309986
gucucaagcaagcaauccu

SEQ ID NO: 2309988 - RNA, 19 nt, Artificial Sequence
  Description of Artificial Sequence: Synthetic oligonucleotide
  Sense strand starting at position 1648 of SEQ ID NO: 1885021
gauugcuugcuugagacca

SEQ ID NO: 2309989 - RNA, 19 nt, Artificial Sequence
  Description of Artificial Sequence: Synthetic oligonucleotide
  Antisense strand to SEQ ID NO: 2309988
uggucucaagcaagcaauc

SEQ ID NO: 2309990 - RNA, 19 nt, Artificial Sequence
  Description of Artificial Sequence: Synthetic oligonucleotide
  Sense strand starting at position 1985 of SEQ ID NO: 1885021
auuauaugagcugauguau

SEQ ID NO: 2309991 - RNA, 19 nt, Artificial Sequence
  Description of Artificial Sequence: Synthetic oligonucleotide
  Antisense strand to SEQ ID NO: 2309990
auacaucagcucauauaau

SEQ ID NO: 2309992 - RNA, 19 nt, Artificial Sequence
  Description of Artificial Sequence: Synthetic oligonucleotide
  Sense strand starting at position 1993 of SEQ ID NO: 1885021
agcugauguaugcaaagca

SEQ ID NO: 2309993 - RNA, 19 nt, Artificial Sequence
  Description of Artificial Sequence: Synthetic oligonucleotide
  Antisense strand to SEQ ID NO: 2309992
ugcuuugcauacaucagcu

SEQ ID NO: 2309994 - RNA, 19 nt, Artificial Sequence
  Description of Artificial Sequence: Synthetic oligonucleotide
  Sense strand starting at position 2048 of SEQ ID NO: 1885021
aaacguuaagcguuugugu

SEQ ID NO: 2309995 - RNA, 19 nt, Artificial Sequence
  Description of Artificial Sequence: Synthetic oligonucleotide
  Antisense strand to SEQ ID NO: 2309994
acacaaacgcuuaacguuu

SEQ ID NO: 2309996 - RNA, 19 nt, Artificial Sequence
  Description of Artificial Sequence: Synthetic oligonucleotide
  Sense strand starting at position 2049 of SEQ ID NO: 1885021
aacguuaagcguuuguguu

SEQ ID NO: 2309997 - RNA, 19 nt, Artificial Sequence
  Description of Artificial Sequence: Synthetic oligonucleotide
  Antisense strand to SEQ ID NO: 2309996
aacacaaacgcuuaacguu

SEQ ID NO: 2309998 - RNA, 19 nt, Artificial Sequence
  Description of Artificial Sequence: Synthetic oligonucleotide
  Sense strand starting at position 2059 of SEQ ID NO: 1885021
guuuguguugugaggcuuu

SEQ ID NO: 2309999 - RNA, 19 nt, Artificial Sequence
  Description of Artificial Sequence: Synthetic oligonucleotide
  Antisense strand to SEQ ID NO: 2309998
aaagccucacaacacaaac

SEQ ID NO: 2310000 - RNA, 19 nt, Artificial Sequence
  Description of Artificial Sequence: Synthetic oligonucleotide
  Sense strand starting at position 2071 of SEQ ID NO: 1885021
aggcuuugcaggugaugaa

SEQ ID NO: 2310001 - RNA, 19 nt, Artificial Sequence
  Description of Artificial Sequence: Synthetic oligonucleotide
  Antisense strand to SEQ ID NO: 2310000
uucaucaccugcaaagccu

SEQ ID NO: 2310002 - RNA, 19 nt, Artificial Sequence
  Description of Artificial Sequence: Synthetic oligonucleotide
  Sense strand starting at position 2072 of SEQ ID NO: 1885021
ggcuuugcaggugaugaaa

SEQ ID NO: 2310003 - RNA, 19 nt, Artificial Sequence
  Description of Artificial Sequence: Synthetic oligonucleotide
  Antisense strand to SEQ ID NO: 2310002
uuucaucaccugcaaagcc

SEQ ID NO: 2310004 - RNA, 19 nt, Artificial Sequence
  Description of Artificial Sequence: Synthetic oligonucleotide
  Sense strand starting at position 2327 of SEQ ID NO: 1885021
ccgcuaaucagagagugac

SEQ ID NO: 2310005 - RNA, 19 nt, Artificial Sequence
  Description of Artificial Sequence: Synthetic oligonucleotide
  Antisense strand to SEQ ID NO: 2310004
gucacucucugauuagcgg

SEQ ID NO: 2310006 - RNA, 19 nt, Artificial Sequence
  Description of Artificial Sequence: Synthetic oligonucleotide
  Sense strand starting at position 2352 of SEQ ID NO: 1885021
gcagucuuggguguguuua

SEQ ID NO: 2310007 - RNA, 19 nt, Artificial Sequence
  Description of Artificial Sequence: Synthetic oligonucleotide
  Antisense strand to SEQ ID NO: 2310006
uaaacacacccaagacugc

SEQ ID NO: 2310008 - RNA, 19 nt, Artificial Sequence
  Description of Artificial Sequence: Synthetic oligonucleotide
  Sense strand starting at position 2354 of SEQ ID NO: 1885021
agucuuggguguguuuaga

SEQ ID NO: 2310009 - RNA, 19 nt, Artificial Sequence
  Description of Artificial Sequence: Synthetic oligonucleotide
  Antisense strand to SEQ ID NO: 2310008
ucuaaacacacccaagacu

SEQ ID NO: 2310010 - RNA, 19 nt, Artificial Sequence
  Description of Artificial Sequence: Synthetic oligonucleotide
  Sense strand starting at position 2911 of SEQ ID NO: 1885021
cuuugugcaaggcaagaua

SEQ ID NO: 2310011 - RNA, 19 nt, Artificial Sequence
  Description of Artificial Sequence: Synthetic oligonucleotide
  Antisense strand to SEQ ID NO: 2310010
uaucuugccuugcacaaag

SEQ ID NO: 2310012 - RNA, 19 nt, Artificial Sequence
  Description of Artificial Sequence: Synthetic oligonucleotide
  Sense strand starting at position 2922 of SEQ ID NO: 1885021
gcaagauaugaguaucuuu

SEQ ID NO: 2310013 - RNA, 19 nt, Artificial Sequence
  Description of Artificial Sequence: Synthetic oligonucleotide
  Antisense strand to SEQ ID NO: 2310012
aaagauacucauaucuugc

SEQ ID NO: 2310014 - RNA, 19 nt, Artificial Sequence
  Description of Artificial Sequence: Synthetic oligonucleotide
  Sense strand starting at position 2929 of SEQ ID NO: 1885021
augaguaucuuucugugca

SEQ ID NO: 2310015 - RNA, 19 nt, Artificial Sequence
  Description of Artificial Sequence: Synthetic oligonucleotide
  Antisense strand to SEQ ID NO: 2310014
ugcacagaaagauacucau

SEQ ID NO: 2310016 - RNA, 19 nt, Artificial Sequence
  Description of Artificial Sequence: Synthetic oligonucleotide
  Sense strand starting at position 3015 of SEQ ID NO: 1885021
ucuggaagugucuggguau

SEQ ID NO: 2310017 - RNA, 19 nt, Artificial Sequence
  Description of Artificial Sequence: Synthetic oligonucleotide
  Antisense strand to SEQ ID NO: 2310016
auacccagacacuuccaga

SEQ ID NO: 2310018 - RNA, 19 nt, Artificial Sequence
  Description of Artificial Sequence: Synthetic oligonucleotide
  Sense strand starting at position 3018 of SEQ ID NO: 1885021
ggaagugucuggguauucu

SEQ ID NO: 2310019 - RNA, 19 nt, Artificial Sequence
  Description of Artificial Sequence: Synthetic oligonucleotide
  Antisense strand to SEQ ID NO: 2310018
agaauacccagacacuucc

SEQ ID NO: 2310020 - RNA, 19 nt, Artificial Sequence
  Description of Artificial Sequence: Synthetic oligonucleotide
  Sense strand starting at position 3201 of SEQ ID NO: 1885021
cgcugugucauuguggcau

SEQ ID NO: 2310021 - RNA, 19 nt, Artificial Sequence
  Description of Artificial Sequence: Synthetic oligonucleotide
  Antisense strand to SEQ ID NO: 2310020
augccacaaugacacagcg

SEQ ID NO: 2310022 - RNA, 19 nt, Artificial Sequence
  Description of Artificial Sequence: Synthetic oligonucleotide
  Sense strand starting at position 3219 of SEQ ID NO: 1885021
ugauguuccaccgaauugu

SEQ ID NO: 2310023 - RNA, 19 nt, Artificial Sequence
  Description of Artificial Sequence: Synthetic oligonucleotide
  Antisense strand to SEQ ID NO: 2310022
acaauucgguggaacauca

SEQ ID NO: 2310024 - RNA, 19 nt, Artificial Sequence
  Description of Artificial Sequence: Synthetic oligonucleotide
  Sense strand starting at position 3328 of SEQ ID NO: 1885021
agugccagaguuggucaaa

SEQ ID NO: 2310025 - RNA, 19 nt, Artificial Sequence
  Description of Artificial Sequence: Synthetic oligonucleotide
  Antisense strand to SEQ ID NO: 2310024
uuugaccaacucuggcacu

SEQ ID NO: 2310026 - RNA, 19 nt, Artificial Sequence
  Description of Artificial Sequence: Synthetic oligonucleotide
  Sense strand starting at position 3329 of SEQ ID NO: 1885021
gugccagaguuggucaaau

SEQ ID NO: 2310027 - RNA, 19 nt, Artificial Sequence
  Description of Artificial Sequence: Synthetic oligonucleotide
  Antisense strand to SEQ ID NO: 2310026
auuugaccaacucuggcac

SEQ ID NO: 2310028 - RNA, 19 nt, Artificial Sequence
  Description of Artificial Sequence: Synthetic oligonucleotide
  Sense strand starting at position 3331 of SEQ ID NO: 1885021
gccagaguuggucaaauga

SEQ ID NO: 2310029 - RNA, 19 nt, Artificial Sequence
  Description of Artificial Sequence: Synthetic oligonucleotide
  Antisense strand to SEQ ID NO: 2310028
ucauuugaccaacucuggc

SEQ ID NO: 2310030 - RNA, 19 nt, Artificial Sequence
  Description of Artificial Sequence: Synthetic oligonucleotide
  Sense strand starting at position 3347 of SEQ ID NO: 1885021
ugaacaaauuuaggaugaa

SEQ ID NO: 2310031 - RNA, 19 nt, Artificial Sequence
  Description of Artificial Sequence: Synthetic oligonucleotide
  Antisense strand to SEQ ID NO: 2310030
uucauccuaaauuuguuca

SEQ ID NO: 2310032 - RNA, 19 nt, Artificial Sequence
  Description of Artificial Sequence: Synthetic oligonucleotide
  Sense strand starting at position 3380 of SEQ ID NO: 1885021
aggacuugcccuuguggua

SEQ ID NO: 2310033 - RNA, 19 nt, Artificial Sequence
  Description of Artificial Sequence: Synthetic oligonucleotide
  Antisense strand to SEQ ID NO: 2310032
uaccacaagggcaaguccu

SEQ ID NO: 2310034 - RNA, 19 nt, Artificial Sequence
  Description of Artificial Sequence: Synthetic oligonucleotide
  Sense strand starting at position 3475 of SEQ ID NO: 1885021
ugaguccugcgagaagaaa

SEQ ID NO: 2310035 - RNA, 19 nt, Artificial Sequence
  Description of Artificial Sequence: Synthetic oligonucleotide
  Antisense strand to SEQ ID NO: 2310034
uuucuucucgcaggacuca

SEQ ID NO: 2310036 - RNA, 19 nt, Artificial Sequence
  Description of Artificial Sequence: Synthetic oligonucleotide
  Sense strand starting at position 3660 of SEQ ID NO: 1885021
uccauugcugcugaaguaa

SEQ ID NO: 2310037 - RNA, 19 nt, Artificial Sequence
  Description of Artificial Sequence: Synthetic oligonucleotide
  Antisense strand to SEQ ID NO: 2310036
uuacuucagcagcaaugga

SEQ ID NO: 2310038 - RNA, 19 nt, Artificial Sequence
  Description of Artificial Sequence: Synthetic oligonucleotide
  Sense strand starting at position 3775 of SEQ ID NO: 1885021
acccaagaacagugucaga

SEQ ID NO: 2310039 - RNA, 19 nt, Artificial Sequence
  Description of Artificial Sequence: Synthetic oligonucleotide
  Antisense strand to SEQ ID NO: 2310038
ucugacacuguucuugggu

SEQ ID NO: 2310040 - RNA, 19 nt, Artificial Sequence
  Description of Artificial Sequence: Synthetic oligonucleotide
  Sense strand starting at position 3824 of SEQ ID NO: 1885021
uuaucaauguugucaccaa

SEQ ID NO: 2310041 - RNA, 19 nt, Artificial Sequence
  Description of Artificial Sequence: Synthetic oligonucleotide
  Antisense strand to SEQ ID NO: 2310040
uuggugacaacauugauaa

SEQ ID NO: 2310042 - RNA, 19 nt, Artificial Sequence
  Description of Artificial Sequence: Synthetic oligonucleotide
  Sense strand starting at position 125 of SEQ ID NO: 1885022
gucccugagucagcucaau

SEQ ID NO: 2310043 - RNA, 19 nt, Artificial Sequence
  Description of Artificial Sequence: Synthetic oligonucleotide
  Antisense strand to SEQ ID NO: 2310042
auugagcugacucagggac

SEQ ID NO: 2310044 - RNA, 19 nt, Artificial Sequence
  Description of Artificial Sequence: Synthetic oligonucleotide
  Sense strand starting at position 747 of SEQ ID NO: 1885022
ccaccuuuguuaucugaua

SEQ ID NO: 2310045 - RNA, 19 nt, Artificial Sequence
  Description of Artificial Sequence: Synthetic oligonucleotide
  Antisense strand to SEQ ID NO: 2310044
uaucagauaacaaaggugg

SEQ ID NO: 2310046 - RNA, 19 nt, Artificial Sequence
  Description of Artificial Sequence: Synthetic oligonucleotide
  Sense strand starting at position 800 of SEQ ID NO: 1885022
ccuauacucucagugcuuu

SEQ ID NO: 2310047 - RNA, 19 nt, Artificial Sequence
  Description of Artificial Sequence: Synthetic oligonucleotide
  Antisense strand to SEQ ID NO: 2310046
aaagcacugagaguauagg

SEQ ID NO: 2310048 - RNA, 19 nt, Artificial Sequence
  Description of Artificial Sequence: Synthetic oligonucleotide
  Sense strand starting at position 806 of SEQ ID NO: 1885022
cucucagugcuuugggaga

SEQ ID NO: 2310049 - RNA, 19 nt, Artificial Sequence
  Description of Artificial Sequence: Synthetic oligonucleotide
  Antisense strand to SEQ ID NO: 2310048
ucucccaaagcacugagag

SEQ ID NO: 2310050 - RNA, 19 nt, Artificial Sequence
  Description of Artificial Sequence: Synthetic oligonucleotide
  Sense strand starting at position 1253 of SEQ ID NO: 1885022
gcgucuguggucucaguua

SEQ ID NO: 2310051 - RNA, 19 nt, Artificial Sequence
  Description of Artificial Sequence: Synthetic oligonucleotide
  Antisense strand to SEQ ID NO: 2310050
uaacugagaccacagacgc

SEQ ID NO: 2310052 - RNA, 19 nt, Artificial Sequence
  Description of Artificial Sequence: Synthetic oligonucleotide
  Sense strand starting at position 1289 of SEQ ID NO: 1885022
ggaggauugcuugaacgcu

SEQ ID NO: 2310053 - RNA, 19 nt, Artificial Sequence
  Description of Artificial Sequence: Synthetic oligonucleotide
  Antisense strand to SEQ ID NO: 2310052
agcguucaagcaauccucc

SEQ ID NO: 2310054 - RNA, 19 nt, Artificial Sequence
  Description of Artificial Sequence: Synthetic oligonucleotide
  Sense strand starting at position 1421 of SEQ ID NO: 1885022
gcaggcuucgcaguaagca

SEQ ID NO: 2310055 - RNA, 19 nt, Artificial Sequence
  Description of Artificial Sequence: Synthetic oligonucleotide
  Antisense strand to SEQ ID NO: 2310054
ugcuuacugcgaagccugc

SEQ ID NO: 2310056 - RNA, 19 nt, Artificial Sequence
  Description of Artificial Sequence: Synthetic oligonucleotide
  Sense strand starting at position 1430 of SEQ ID NO: 1885022
gcaguaagcacugggugaa

SEQ ID NO: 2310057 - RNA, 19 nt, Artificial Sequence
  Description of Artificial Sequence: Synthetic oligonucleotide
  Antisense strand to SEQ ID NO: 2310056
uucacccagugcuuacugc

SEQ ID NO: 2310058 - RNA, 19 nt, Artificial Sequence
  Description of Artificial Sequence: Synthetic oligonucleotide
  Sense strand starting at position 1456 of SEQ ID NO: 1885022
gagagcagcucacauuuau

SEQ ID NO: 2310059 - RNA, 19 nt, Artificial Sequence
  Description of Artificial Sequence: Synthetic oligonucleotide
  Antisense strand to SEQ ID NO: 2310058
auaaaugugagcugcucuc

SEQ ID NO: 2310060 - RNA, 19 nt, Artificial Sequence
  Description of Artificial Sequence: Synthetic oligonucleotide
  Sense strand starting at position 1534 of SEQ ID NO: 1885022
ggaggaaauugucugcuga

SEQ ID NO: 2310061 - RNA, 19 nt, Artificial Sequence
  Description of Artificial Sequence: Synthetic oligonucleotide
  Antisense strand to SEQ ID NO: 2310060
ucagcagacaauuuccucc

SEQ ID NO: 2310062 - RNA, 19 nt, Artificial Sequence
  Description of Artificial Sequence: Synthetic oligonucleotide
  Sense strand starting at position 1535 of SEQ ID NO: 1885022
gaggaaauugucugcugaa

SEQ ID NO: 2310063 - RNA, 19 nt, Artificial Sequence
  Description of Artificial Sequence: Synthetic oligonucleotide
  Antisense strand to SEQ ID NO: 2310062
uucagcagacaauuuccuc

SEQ ID NO: 2310064 - RNA, 19 nt, Artificial Sequence
  Description of Artificial Sequence: Synthetic oligonucleotide
  Sense strand starting at position 1536 of SEQ ID NO: 1885022
aggaaauugucugcugaau

SEQ ID NO: 2310065 - RNA, 19 nt, Artificial Sequence
  Description of Artificial Sequence: Synthetic oligonucleotide
  Antisense strand to SEQ ID NO: 2310064
auucagcagacaauuuccu

SEQ ID NO: 2310066 - RNA, 19 nt, Artificial Sequence
  Description of Artificial Sequence: Synthetic oligonucleotide
  Sense strand starting at position 2383 of SEQ ID NO: 1885022
gagcaugucggagggaauu

SEQ ID NO: 2310067 - RNA, 19 nt, Artificial Sequence
  Description of Artificial Sequence: Synthetic oligonucleotide
  Antisense strand to SEQ ID NO: 2310066
aauucccuccgacaugcuc

SEQ ID NO: 2310068 - RNA, 19 nt, Artificial Sequence
  Description of Artificial Sequence: Synthetic oligonucleotide
  Sense strand starting at position 2419 of SEQ ID NO: 1885022
aaaggcuucuucuugguua

SEQ ID NO: 2310069 - RNA, 19 nt, Artificial Sequence
  Description of Artificial Sequence: Synthetic oligonucleotide
  Antisense strand to SEQ ID NO: 2310068
uaaccaagaagaagccuuu

SEQ ID NO: 2310070 - RNA, 19 nt, Artificial Sequence
  Description of Artificial Sequence: Synthetic oligonucleotide
  Sense strand starting at position 2423 of SEQ ID NO: 1885022
gcuucuucuugguuacuga

SEQ ID NO: 2310071 - RNA, 19 nt, Artificial Sequence
  Description of Artificial Sequence: Synthetic oligonucleotide
  Antisense strand to SEQ ID NO: 2310070
ucaguaaccaagaagaagc

SEQ ID NO: 2310072 - RNA, 19 nt, Artificial Sequence
  Description of Artificial Sequence: Synthetic oligonucleotide
  Sense strand starting at position 2453 of SEQ ID NO: 1885022
acggcuguuuccuccaaga

SEQ ID NO: 2310073 - RNA, 19 nt, Artificial Sequence
  Description of Artificial Sequence: Synthetic oligonucleotide
  Antisense strand to SEQ ID NO: 2310072
ucuuggaggaaacagccgu

SEQ ID NO: 2310074 - RNA, 19 nt, Artificial Sequence
  Description of Artificial Sequence: Synthetic oligonucleotide
  Sense strand starting at position 2455 of SEQ ID NO: 1885022
ggcuguuuccuccaagagg

SEQ ID NO: 2310075 - RNA, 19 nt, Artificial Sequence
  Description of Artificial Sequence: Synthetic oligonucleotide
  Antisense strand to SEQ ID NO: 2310074
ccucuuggaggaaacagcc

SEQ ID NO: 2310076 - RNA, 19 nt, Artificial Sequence
  Description of Artificial Sequence: Synthetic oligonucleotide
  Sense strand starting at position 2458 of SEQ ID NO: 1885022
uguuuccuccaagaggcau

SEQ ID NO: 2310077 - RNA, 19 nt, Artificial Sequence
  Description of Artificial Sequence: Synthetic oligonucleotide
  Antisense strand to SEQ ID NO: 2310076
augccucuuggaggaaaca

SEQ ID NO: 2310078 - RNA, 19 nt, Artificial Sequence
  Description of Artificial Sequence: Synthetic oligonucleotide
  Sense strand starting at position 2719 of SEQ ID NO: 1885022
ucuagacaauugggauuua

SEQ ID NO: 2310079 - RNA, 19 nt, Artificial Sequence
  Description of Artificial Sequence: Synthetic oligonucleotide
  Antisense strand to SEQ ID NO: 2310078
uaaaucccaauugucuaga

SEQ ID NO: 2310080 - RNA, 19 nt, Artificial Sequence
  Description of Artificial Sequence: Synthetic oligonucleotide
  Sense strand starting at position 2720 of SEQ ID NO: 1885022
cuagacaauugggauuuaa

SEQ ID NO: 2310081 - RNA, 19 nt, Artificial Sequence
  Description of Artificial Sequence: Synthetic oligonucleotide
  Antisense strand to SEQ ID NO: 2310080
uuaaaucccaauugucuag

SEQ ID NO: 2310082 - RNA, 19 nt, Artificial Sequence
  Description of Artificial Sequence: Synthetic oligonucleotide
  Sense strand starting at position 2929 of SEQ ID NO: 1885022
cugaaauguuaggcagaua

SEQ ID NO: 2310083 - RNA, 19 nt, Artificial Sequence
  Description of Artificial Sequence: Synthetic oligonucleotide
  Antisense strand to SEQ ID NO: 2310082
uaucugccuaacauuucag

SEQ ID NO: 2310084 - RNA, 19 nt, Artificial Sequence
  Description of Artificial Sequence: Synthetic oligonucleotide
  Sense strand starting at position 2957 of SEQ ID NO: 1885022
agcuuuguucugggaugcu

SEQ ID NO: 2310085 - RNA, 19 nt, Artificial Sequence
  Description of Artificial Sequence: Synthetic oligonucleotide
  Antisense strand to SEQ ID NO: 2310084
agcaucccagaacaaagcu

SEQ ID NO: 2310086 - RNA, 19 nt, Artificial Sequence
  Description of Artificial Sequence: Synthetic oligonucleotide
  Sense strand starting at position 2974 of SEQ ID NO: 1885022
cuaagaaccgcuugaggau

SEQ ID NO: 2310087 - RNA, 19 nt, Artificial Sequence
  Description of Artificial Sequence: Synthetic oligonucleotide
  Antisense strand to SEQ ID NO: 2310086
auccucaagcgguucuuag

SEQ ID NO: 2310088 - RNA, 19 nt, Artificial Sequence
  Description of Artificial Sequence: Synthetic oligonucleotide
  Sense strand starting at position 2975 of SEQ ID NO: 1885022
uaagaaccgcuugaggauu

SEQ ID NO: 2310089 - RNA, 19 nt, Artificial Sequence
  Description of Artificial Sequence: Synthetic oligonucleotide
  Antisense strand to SEQ ID NO: 2310088
aauccucaagcgguucuua

SEQ ID NO: 2310090 - RNA, 19 nt, Artificial Sequence
  Description of Artificial Sequence: Synthetic oligonucleotide
  Sense strand starting at position 3201 of SEQ ID NO: 1885022
cugucugagccuuuguguu

SEQ ID NO: 2310091 - RNA, 19 nt, Artificial Sequence
  Description of Artificial Sequence: Synthetic oligonucleotide
  Antisense strand to SEQ ID NO: 2310090
aacacaaaggcucagacag

SEQ ID NO: 2310092 - RNA, 19 nt, Artificial Sequence
  Description of Artificial Sequence: Synthetic oligonucleotide
  Sense strand starting at position 3214 of SEQ ID NO: 1885022
uguguucucuccucuguaa

SEQ ID NO: 2310093 - RNA, 19 nt, Artificial Sequence
  Description of Artificial Sequence: Synthetic oligonucleotide
  Antisense strand to SEQ ID NO: 2310092
uuacagaggagagaacaca

SEQ ID NO: 2310094 - RNA, 19 nt, Artificial Sequence
  Description of Artificial Sequence: Synthetic oligonucleotide
  Sense strand starting at position 3216 of SEQ ID NO: 1885022
uguucucuccucuguaaua

SEQ ID NO: 2310095 - RNA, 19 nt, Artificial Sequence
  Description of Artificial Sequence: Synthetic oligonucleotide
  Antisense strand to SEQ ID NO: 2310094
uauuacagaggagagaaca

SEQ ID NO: 2310096 - RNA, 19 nt, Artificial Sequence
  Description of Artificial Sequence: Synthetic oligonucleotide
  Sense strand starting at position 3217 of SEQ ID NO: 1885022
guucucuccucuguaauac

SEQ ID NO: 2310097 - RNA, 19 nt, Artificial Sequence
  Description of Artificial Sequence: Synthetic oligonucleotide
  Antisense strand to SEQ ID NO: 2310096
guauuacagaggagagaac

SEQ ID NO: 2310098 - RNA, 19 nt, Artificial Sequence
  Description of Artificial Sequence: Synthetic oligonucleotide
  Sense strand starting at position 3309 of SEQ ID NO: 1885022
guuggcugccaucaauguu

SEQ ID NO: 2310099 - RNA, 19 nt, Artificial Sequence
  Description of Artificial Sequence: Synthetic oligonucleotide
  Antisense strand to SEQ ID NO: 2310098
aacauugauggcagccaac

SEQ ID NO: 2310100 - RNA, 19 nt, Artificial Sequence
  Description of Artificial Sequence: Synthetic oligonucleotide
  Sense strand starting at position 3312 of SEQ ID NO: 1885022
ggcugccaucaauguuuaa

SEQ ID NO: 2310101 - RNA, 19 nt, Artificial Sequence
  Description of Artificial Sequence: Synthetic oligonucleotide
  Antisense strand to SEQ ID NO: 2310100
uuaaacauugauggcagcc

SEQ ID NO: 2310102 - RNA, 19 nt, Artificial Sequence
  Description of Artificial Sequence: Synthetic oligonucleotide
  Sense strand starting at position 3452 of SEQ ID NO: 1885022
ccaccuugauuggugaauu

SEQ ID NO: 2310103 - RNA, 19 nt, Artificial Sequence
  Description of Artificial Sequence: Synthetic oligonucleotide
  Antisense strand to SEQ ID NO: 2310102
aauucaccaaucaaggugg

SEQ ID NO: 2310104 - RNA, 19 nt, Artificial Sequence
  Description of Artificial Sequence: Synthetic oligonucleotide
  Sense strand starting at position 3500 of SEQ ID NO: 1885022
gcaaauggcagucauaguu

SEQ ID NO: 2310105 - RNA, 19 nt, Artificial Sequence
  Description of Artificial Sequence: Synthetic oligonucleotide
  Antisense strand to SEQ ID NO: 2310104
aacuaugacugccauuugc

SEQ ID NO: 2310106 - RNA, 19 nt, Artificial Sequence
  Description of Artificial Sequence: Synthetic oligonucleotide
  Sense strand starting at position 3522 of SEQ ID NO: 1885022
ggcgguucacuuuguaaga

SEQ ID NO: 2310107 - RNA, 19 nt, Artificial Sequence
  Description of Artificial Sequence: Synthetic oligonucleotide
  Antisense strand to SEQ ID NO: 2310106
ucuuacaaagugaaccgcc

SEQ ID NO: 2310108 - RNA, 19 nt, Artificial Sequence
  Description of Artificial Sequence: Synthetic oligonucleotide
  Sense strand starting at position 3523 of SEQ ID NO: 1885022
gcgguucacuuuguaagau

SEQ ID NO: 2310109 - RNA, 19 nt, Artificial Sequence
  Description of Artificial Sequence: Synthetic oligonucleotide
  Antisense strand to SEQ ID NO: 2310108
aucuuacaaagugaaccgc

SEQ ID NO: 2310110 - RNA, 19 nt, Artificial Sequence
  Description of Artificial Sequence: Synthetic oligonucleotide
  Sense strand starting at position 3574 of SEQ ID NO: 1885022
agggaaugguugccugaac

SEQ ID NO: 2310111 - RNA, 19 nt, Artificial Sequence
  Description of Artificial Sequence: Synthetic oligonucleotide
  Antisense strand to SEQ ID NO: 2310110
guucaggcaaccauucccu

SEQ ID NO: 2310112 - RNA, 19 nt, Artificial Sequence
  Description of Artificial Sequence: Synthetic oligonucleotide
  Sense strand starting at position 3575 of SEQ ID NO: 1885022
gggaaugguugccugaaca

SEQ ID NO: 2310113 - RNA, 19 nt, Artificial Sequence
  Description of Artificial Sequence: Synthetic oligonucleotide
  Antisense strand to SEQ ID NO: 2310112
uguucaggcaaccauuccc

SEQ ID NO: 2310114 - RNA, 19 nt, Artificial Sequence
  Description of Artificial Sequence: Synthetic oligonucleotide
  Sense strand starting at position 3760 of SEQ ID NO: 1885022
agcaaaugcucucugcaag

SEQ ID NO: 2310115 - RNA, 19 nt, Artificial Sequence
  Description of Artificial Sequence: Synthetic oligonucleotide
  Antisense strand to SEQ ID NO: 2310114
cuugcagagagcauuugcu

SEQ ID NO: 2310116 - RNA, 19 nt, Artificial Sequence
  Description of Artificial Sequence: Synthetic oligonucleotide
  Sense strand starting at position 3909 of SEQ ID NO: 1885022
ccugacuugugagcaucua

SEQ ID NO: 2310117 - RNA, 19 nt, Artificial Sequence
  Description of Artificial Sequence: Synthetic oligonucleotide
  Antisense strand to SEQ ID NO: 2310116
uagaugcucacaagucagg

SEQ ID NO: 2310118 - RNA, 19 nt, Artificial Sequence
  Description of Artificial Sequence: Synthetic oligonucleotide
  Sense strand starting at position 3943 of SEQ ID NO: 1885022
auggccgacgcuuaguaaa

SEQ ID NO: 2310119 - RNA, 19 nt, Artificial Sequence
  Description of Artificial Sequence: Synthetic oligonucleotide
  Antisense strand to SEQ ID NO: 2310118
uuuacuaagcgucggccau

SEQ ID NO: 2310120 - RNA, 19 nt, Artificial Sequence
  Description of Artificial Sequence: Synthetic oligonucleotide
  Sense strand starting at position 3959 of SEQ ID NO: 1885022
aaauguaugcuguggaaug

SEQ ID NO: 2310121 - RNA, 19 nt, Artificial Sequence
  Description of Artificial Sequence: Synthetic oligonucleotide
  Antisense strand to SEQ ID NO: 2310120
cauuccacagcauacauuu

SEQ ID NO: 2310122 - RNA, 19 nt, Artificial Sequence
  Description of Artificial Sequence: Synthetic oligonucleotide
  Sense strand starting at position 241 of SEQ ID NO: 1885023
uuaccuucccaugaguguu

SEQ ID NO: 2310123 - RNA, 19 nt, Artificial Sequence
  Description of Artificial Sequence: Synthetic oligonucleotide
  Antisense strand to SEQ ID NO: 2310122
aacacucaugggaagguaa

SEQ ID NO: 2310124 - RNA, 19 nt, Artificial Sequence
  Description of Artificial Sequence: Synthetic oligonucleotide
  Sense strand starting at position 356 of SEQ ID NO: 1885023
cugagagcuguccaaauac

SEQ ID NO: 2310125 - RNA, 19 nt, Artificial Sequence
  Description of Artificial Sequence: Synthetic oligonucleotide
  Antisense strand to SEQ ID NO: 2310124
guauuuggacagcucucag

SEQ ID NO: 2310126 - RNA, 19 nt, Artificial Sequence
  Description of Artificial Sequence: Synthetic oligonucleotide
  Sense strand starting at position 497 of SEQ ID NO: 1885023
gggagcuugccugaggcaa

SEQ ID NO: 2310127 - RNA, 19 nt, Artificial Sequence
  Description of Artificial Sequence: Synthetic oligonucleotide
  Antisense strand to SEQ ID NO: 2310126
uugccucaggcaagcuccc

SEQ ID NO: 2310128 - RNA, 19 nt, Artificial Sequence
  Description of Artificial Sequence: Synthetic oligonucleotide
  Sense strand starting at position 664 of SEQ ID NO: 1885023
agaggaaugugagugcaau

SEQ ID NO: 2310129 - RNA, 19 nt, Artificial Sequence
  Description of Artificial Sequence: Synthetic oligonucleotide
  Antisense strand to SEQ ID NO: 2310128
auugcacucacauuccucu

SEQ ID NO: 2310130 - RNA, 19 nt, Artificial Sequence
  Description of Artificial Sequence: Synthetic oligonucleotide
  Sense strand starting at position 665 of SEQ ID NO: 1885023
gaggaaugugagugcaaug

SEQ ID NO: 2310131 - RNA, 19 nt, Artificial Sequence
  Description of Artificial Sequence: Synthetic oligonucleotide
  Antisense strand to SEQ ID NO: 2310130
cauugcacucacauuccuc

SEQ ID NO: 2310132 - RNA, 19 nt, Artificial Sequence
  Description of Artificial Sequence: Synthetic oligonucleotide
  Sense strand starting at position 739 of SEQ ID NO: 1885023
gauguagaggccuguggaa

SEQ ID NO: 2310133 - RNA, 19 nt, Artificial Sequence
  Description of Artificial Sequence: Synthetic oligonucleotide
  Antisense strand to SEQ ID NO: 2310132
uuccacaggccucuacauc

SEQ ID NO: 2310134 - RNA, 19 nt, Artificial Sequence
  Description of Artificial Sequence: Synthetic oligonucleotide
  Sense strand starting at position 793 of SEQ ID NO: 1885023
cuuuccagucauggagcaa

SEQ ID NO: 2310135 - RNA, 19 nt, Artificial Sequence
  Description of Artificial Sequence: Synthetic oligonucleotide
  Antisense strand to SEQ ID NO: 2310134
uugcuccaugacuggaaag

SEQ ID NO: 2310136 - RNA, 19 nt, Artificial Sequence
  Description of Artificial Sequence: Synthetic oligonucleotide
  Sense strand starting at position 833 of SEQ ID NO: 1885023
gcugauggucuggaaugaa

SEQ ID NO: 2310137 - RNA, 19 nt, Artificial Sequence
  Description of Artificial Sequence: Synthetic oligonucleotide
  Antisense strand to SEQ ID NO: 2310136
uucauuccagaccaucagc

SEQ ID NO: 2310138 - RNA, 19 nt, Artificial Sequence
  Description of Artificial Sequence: Synthetic oligonucleotide
  Sense strand starting at position 976 of SEQ ID NO: 1885023
ggaggcaagugucuuucaa

SEQ ID NO: 2310139 - RNA, 19 nt, Artificial Sequence
  Description of Artificial Sequence: Synthetic oligonucleotide
  Antisense strand to SEQ ID NO: 2310138
uugaaagacacuugccucc

SEQ ID NO: 2310140 - RNA, 19 nt, Artificial Sequence
  Description of Artificial Sequence: Synthetic oligonucleotide
  Sense strand starting at position 1073 of SEQ ID NO: 1885023
uguuauugugcccugcaua

SEQ ID NO: 2310141 - RNA, 19 nt, Artificial Sequence
  Description of Artificial Sequence: Synthetic oligonucleotide
  Antisense strand to SEQ ID NO: 2310140
uaugcagggcacaauaaca

SEQ ID NO: 2310142 - RNA, 19 nt, Artificial Sequence
  Description of Artificial Sequence: Synthetic oligonucleotide
  Sense strand starting at position 1084 of SEQ ID NO: 1885023
ccugcauauagaugaggaa

SEQ ID NO: 2310143 - RNA, 19 nt, Artificial Sequence
  Description of Artificial Sequence: Synthetic oligonucleotide
  Antisense strand to SEQ ID NO: 2310142
uuccucaucuauaugcagg

SEQ ID NO: 2310144 - RNA, 19 nt, Artificial Sequence
  Description of Artificial Sequence: Synthetic oligonucleotide
  Sense strand starting at position 1168 of SEQ ID NO: 1885023
uaaggaacuuacuuagagu

SEQ ID NO: 2310145 - RNA, 19 nt, Artificial Sequence
  Description of Artificial Sequence: Synthetic oligonucleotide
  Antisense strand to SEQ ID NO: 2310144
acucuaaguaaguuccuua

SEQ ID NO: 2310146 - RNA, 19 nt, Artificial Sequence
  Description of Artificial Sequence: Synthetic oligonucleotide
  Sense strand starting at position 1225 of SEQ ID NO: 1885023
uggcuacaucuuggacagu

SEQ ID NO: 2310147 - RNA, 19 nt, Artificial Sequence
  Description of Artificial Sequence: Synthetic oligonucleotide
  Antisense strand to SEQ ID NO: 2310146
acuguccaagauguagcca

SEQ ID NO: 2310148 - RNA, 19 nt, Artificial Sequence
  Description of Artificial Sequence: Synthetic oligonucleotide
  Sense strand starting at position 1271 of SEQ ID NO: 1885023
gucagaggcucuucugaaa

SEQ ID NO: 2310149 - RNA, 19 nt, Artificial Sequence
  Description of Artificial Sequence: Synthetic oligonucleotide
  Antisense strand to SEQ ID NO: 2310148
uuucagaagagccucugac

SEQ ID NO: 2310150 - RNA, 19 nt, Artificial Sequence
  Description of Artificial Sequence: Synthetic oligonucleotide
  Sense strand starting at position 1489 of SEQ ID NO: 1885023
ggaggagauucugaaauaa

SEQ ID NO: 2310151 - RNA, 19 nt, Artificial Sequence
  Description of Artificial Sequence: Synthetic oligonucleotide
  Antisense strand to SEQ ID NO: 2310150
uuauuucagaaucuccucc

SEQ ID NO: 2310152 - RNA, 19 nt, Artificial Sequence
  Description of Artificial Sequence: Synthetic oligonucleotide
  Sense strand starting at position 1500 of SEQ ID NO: 1885023
ugaaauaacucgucccaaa

SEQ ID NO: 2310153 - RNA, 19 nt, Artificial Sequence
  Description of Artificial Sequence: Synthetic oligonucleotide
  Antisense strand to SEQ ID NO: 2310152
uuugggacgaguuauuuca

SEQ ID NO: 2310154 - RNA, 19 nt, Artificial Sequence
  Description of Artificial Sequence: Synthetic oligonucleotide
  Sense strand starting at position 1546 of SEQ ID NO: 1885023
aacagacaaguugguaaau

SEQ ID NO: 2310155 - RNA, 19 nt, Artificial Sequence
  Description of Artificial Sequence: Synthetic oligonucleotide
  Antisense strand to SEQ ID NO: 2310154
auuuaccaacuugucuguu

SEQ ID NO: 2310156 - RNA, 19 nt, Artificial Sequence
  Description of Artificial Sequence: Synthetic oligonucleotide
  Sense strand starting at position 1652 of SEQ ID NO: 1885023
gagauuccugucuggagca

SEQ ID NO: 2310157 - RNA, 19 nt, Artificial Sequence
  Description of Artificial Sequence: Synthetic oligonucleotide
  Antisense strand to SEQ ID NO: 2310156
ugcuccagacaggaaucuc

SEQ ID NO: 2310158 - RNA, 19 nt, Artificial Sequence
  Description of Artificial Sequence: Synthetic oligonucleotide
  Sense strand starting at position 1756 of SEQ ID NO: 1885023
gguaaaucuccaugagccu

SEQ ID NO: 2310159 - RNA, 19 nt, Artificial Sequence
  Description of Artificial Sequence: Synthetic oligonucleotide
  Antisense strand to SEQ ID NO: 2310158
aggcucauggagauuuacc

SEQ ID NO: 2310160 - RNA, 19 nt, Artificial Sequence
  Description of Artificial Sequence: Synthetic oligonucleotide
  Sense strand starting at position 1904 of SEQ ID NO: 1885023
caggucuaggcccaucauu

SEQ ID NO: 2310161 - RNA, 19 nt, Artificial Sequence
  Description of Artificial Sequence: Synthetic oligonucleotide
  Antisense strand to SEQ ID NO: 2310160
aaugaugggccuagaccug

SEQ ID NO: 2310162 - RNA, 19 nt, Artificial Sequence
  Description of Artificial Sequence: Synthetic oligonucleotide
  Sense strand starting at position 2031 of SEQ ID NO: 1885023
ucaguuauuuccuaaagga

SEQ ID NO: 2310163 - RNA, 19 nt, Artificial Sequence
  Description of Artificial Sequence: Synthetic oligonucleotide
  Antisense strand to SEQ ID NO: 2310162
uccuuuaggaaauaacuga

SEQ ID NO: 2310164 - RNA, 19 nt, Artificial Sequence
  Description of Artificial Sequence: Synthetic oligonucleotide
  Sense strand starting at position 2142 of SEQ ID NO: 1885023
agagucuccgcagaagguu

SEQ ID NO: 2310165 - RNA, 19 nt, Artificial Sequence
  Description of Artificial Sequence: Synthetic oligonucleotide
  Antisense strand to SEQ ID NO: 2310164
aaccuucugcggagacucu

SEQ ID NO: 2310166 - RNA, 19 nt, Artificial Sequence
  Description of Artificial Sequence: Synthetic oligonucleotide
  Sense strand starting at position 2298 of SEQ ID NO: 1885023
gguuguacuguccaagaug

SEQ ID NO: 2310167 - RNA, 19 nt, Artificial Sequence
  Description of Artificial Sequence: Synthetic oligonucleotide
  Antisense strand to SEQ ID NO: 2310166
caucuuggacaguacaacc

SEQ ID NO: 2310168 - RNA, 19 nt, Artificial Sequence
  Description of Artificial Sequence: Synthetic oligonucleotide
  Sense strand starting at position 2301 of SEQ ID NO: 1885023
uguacuguccaagauguag

SEQ ID NO: 2310169 - RNA, 19 nt, Artificial Sequence
  Description of Artificial Sequence: Synthetic oligonucleotide
  Antisense strand to SEQ ID NO: 2310168
cuacaucuuggacaguaca

SEQ ID NO: 2310170 - RNA, 19 nt, Artificial Sequence
  Description of Artificial Sequence: Synthetic oligonucleotide
  Sense strand starting at position 2364 of SEQ ID NO: 1885023
cuaaguaaguuccuuagag

SEQ ID NO: 2310171 - RNA, 19 nt, Artificial Sequence
  Description of Artificial Sequence: Synthetic oligonucleotide
  Antisense strand to SEQ ID NO: 2310170
cucuaaggaacuuacuuag

SEQ ID NO: 2310172 - RNA, 19 nt, Artificial Sequence
  Description of Artificial Sequence: Synthetic oligonucleotide
  Sense strand starting at position 2365 of SEQ ID NO: 1885023
uaaguaaguuccuuagagu

SEQ ID NO: 2310173 - RNA, 19 nt, Artificial Sequence
  Description of Artificial Sequence: Synthetic oligonucleotide
  Antisense strand to SEQ ID NO: 2310172
acucuaaggaacuuacuua

SEQ ID NO: 2310174 - RNA, 19 nt, Artificial Sequence
  Description of Artificial Sequence: Synthetic oligonucleotide
  Sense strand starting at position 2366 of SEQ ID NO: 1885023
aaguaaguuccuuagagug

SEQ ID NO: 2310175 - RNA, 19 nt, Artificial Sequence
  Description of Artificial Sequence: Synthetic oligonucleotide
  Antisense strand to SEQ ID NO: 2310174
cacucuaaggaacuuacuu

SEQ ID NO: 2310176 - RNA, 19 nt, Artificial Sequence
  Description of Artificial Sequence: Synthetic oligonucleotide
  Sense strand starting at position 2378 of SEQ ID NO: 1885023
uagagugugaggugguaaa

SEQ ID NO: 2310177 - RNA, 19 nt, Artificial Sequence
  Description of Artificial Sequence: Synthetic oligonucleotide
  Antisense strand to SEQ ID NO: 2310176
uuuaccaccucacacucua

SEQ ID NO: 2310178 - RNA, 19 nt, Artificial Sequence
  Description of Artificial Sequence: Synthetic oligonucleotide
  Sense strand starting at position 2802 of SEQ ID NO: 1885023
guguucugauucucagaga

SEQ ID NO: 2310179 - RNA, 19 nt, Artificial Sequence
  Description of Artificial Sequence: Synthetic oligonucleotide
  Antisense strand to SEQ ID NO: 2310178
ucucugagaaucagaacac

SEQ ID NO: 2310180 - RNA, 19 nt, Artificial Sequence
  Description of Artificial Sequence: Synthetic oligonucleotide
  Sense strand starting at position 3353 of SEQ ID NO: 1885023
ggacuugaggucuggguca

SEQ ID NO: 2310181 - RNA, 19 nt, Artificial Sequence
  Description of Artificial Sequence: Synthetic oligonucleotide
  Antisense strand to SEQ ID NO: 2310180
ugacccagaccucaagucc

SEQ ID NO: 2310182 - RNA, 19 nt, Artificial Sequence
  Description of Artificial Sequence: Synthetic oligonucleotide
  Sense strand starting at position 3697 of SEQ ID NO: 1885023
uucugaaacuugcuugaaa

SEQ ID NO: 2310183 - RNA, 19 nt, Artificial Sequence
  Description of Artificial Sequence: Synthetic oligonucleotide
  Antisense strand to SEQ ID NO: 2310182
uuucaagcaaguuucagaa

SEQ ID NO: 2310184 - RNA, 19 nt, Artificial Sequence
  Description of Artificial Sequence: Synthetic oligonucleotide
  Sense strand starting at position 3698 of SEQ ID NO: 1885023
ucugaaacuugcuugaaau

SEQ ID NO: 2310185 - RNA, 19 nt, Artificial Sequence
  Description of Artificial Sequence: Synthetic oligonucleotide
  Antisense strand to SEQ ID NO: 2310184
auuucaagcaaguuucaga

SEQ ID NO: 2310186 - RNA, 19 nt, Artificial Sequence
  Description of Artificial Sequence: Synthetic oligonucleotide
  Sense strand starting at position 3699 of SEQ ID NO: 1885023
cugaaacuugcuugaaauu

SEQ ID NO: 2310187 - RNA, 19 nt, Artificial Sequence
  Description of Artificial Sequence: Synthetic oligonucleotide
  Antisense strand to SEQ ID NO: 2310186
aauuucaagcaaguuucag

SEQ ID NO: 2310188 - RNA, 19 nt, Artificial Sequence
  Description of Artificial Sequence: Synthetic oligonucleotide
  Sense strand starting at position 3700 of SEQ ID NO: 1885023
ugaaacuugcuugaaauuc

SEQ ID NO: 2310189 - RNA, 19 nt, Artificial Sequence
  Description of Artificial Sequence: Synthetic oligonucleotide
  Antisense strand to SEQ ID NO: 2310188
gaauuucaagcaaguuuca

SEQ ID NO: 2310190 - RNA, 19 nt, Artificial Sequence
  Description of Artificial Sequence: Synthetic oligonucleotide
  Sense strand starting at position 3830 of SEQ ID NO: 1885023
acuaucugagguugcauua

SEQ ID NO: 2310191 - RNA, 19 nt, Artificial Sequence
  Description of Artificial Sequence: Synthetic oligonucleotide
  Antisense strand to SEQ ID NO: 2310190
uaaugcaaccucagauagu

SEQ ID NO: 2310192 - RNA, 19 nt, Artificial Sequence
  Description of Artificial Sequence: Synthetic oligonucleotide
  Sense strand starting at position 3843 of SEQ ID NO: 1885023
gcauuaaggcuuugagaaa

SEQ ID NO: 2310193 - RNA, 19 nt, Artificial Sequence
  Description of Artificial Sequence: Synthetic oligonucleotide
  Antisense strand to SEQ ID NO: 2310192
uuucucaaagccuuaaugc

SEQ ID NO: 2310194 - RNA, 19 nt, Artificial Sequence
  Description of Artificial Sequence: Synthetic oligonucleotide
  Sense strand starting at position 3874 of SEQ ID NO: 1885023
gugagaguauagcucagaa

SEQ ID NO: 2310195 - RNA, 19 nt, Artificial Sequence
  Description of Artificial Sequence: Synthetic oligonucleotide
  Antisense strand to SEQ ID NO: 2310194
uucugagcuauacucucac

SEQ ID NO: 2310196 - RNA, 19 nt, Artificial Sequence
  Description of Artificial Sequence: Synthetic oligonucleotide
  Sense strand starting at position 3906 of SEQ ID NO: 1885023
cuaguaauuccauguccaa

SEQ ID NO: 2310197 - RNA, 19 nt, Artificial Sequence
  Description of Artificial Sequence: Synthetic oligonucleotide
  Antisense strand to SEQ ID NO: 2310196
uuggacauggaauuacuag

SEQ ID NO: 2310198 - RNA, 19 nt, Artificial Sequence
  Description of Artificial Sequence: Synthetic oligonucleotide
  Sense strand starting at position 3909 of SEQ ID NO: 1885023
guaauuccauguccaauga

SEQ ID NO: 2310199 - RNA, 19 nt, Artificial Sequence
  Description of Artificial Sequence: Synthetic oligonucleotide
  Antisense strand to SEQ ID NO: 2310198
ucauuggacauggaauuac

SEQ ID NO: 2310200 - RNA, 19 nt, Artificial Sequence
  Description of Artificial Sequence: Synthetic oligonucleotide
  Sense strand starting at position 3945 of SEQ ID NO: 1885023
gcucacacugguuaaguaa

SEQ ID NO: 2310201 - RNA, 19 nt, Artificial Sequence
  Description of Artificial Sequence: Synthetic oligonucleotide
  Antisense strand to SEQ ID NO: 2310200
uuacuuaaccagugugagc

SEQ ID NO: 2310202 - RNA, 19 nt, Artificial Sequence
  Description of Artificial Sequence: Synthetic oligonucleotide
  Sense strand starting at position 59 of SEQ ID NO: 1885024
cuaguccauguuuauuaau

SEQ ID NO: 2310203 - RNA, 19 nt, Artificial Sequence
  Description of Artificial Sequence: Synthetic oligonucleotide
  Antisense strand to SEQ ID NO: 2310202
auuaauaaacauggacuag

SEQ ID NO: 2310204 - RNA, 19 nt, Artificial Sequence
  Description of Artificial Sequence: Synthetic oligonucleotide
  Sense strand starting at position 95 of SEQ ID NO: 1885024
acaagugugagaugguaau

SEQ ID NO: 2310205 - RNA, 19 nt, Artificial Sequence
  Description of Artificial Sequence: Synthetic oligonucleotide
  Antisense strand to SEQ ID NO: 2310204
auuaccaucucacacuugu

SEQ ID NO: 2310206 - RNA, 19 nt, Artificial Sequence
  Description of Artificial Sequence: Synthetic oligonucleotide
  Sense strand starting at position 238 of SEQ ID NO: 1885024
uugaaugguguucagggau

SEQ ID NO: 2310207 - RNA, 19 nt, Artificial Sequence
  Description of Artificial Sequence: Synthetic oligonucleotide
  Antisense strand to SEQ ID NO: 2310206
aucccugaacaccauucaa

SEQ ID NO: 2310208 - RNA, 19 nt, Artificial Sequence
  Description of Artificial Sequence: Synthetic oligonucleotide
  Sense strand starting at position 276 of SEQ ID NO: 1885024
ugaggaaauaaauguaugu

SEQ ID NO: 2310209 - RNA, 19 nt, Artificial Sequence
  Description of Artificial Sequence: Synthetic oligonucleotide
  Antisense strand to SEQ ID NO: 2310208
acauacauuuauuuccuca

SEQ ID NO: 2310210 - RNA, 19 nt, Artificial Sequence
  Description of Artificial Sequence: Synthetic oligonucleotide
  Sense strand starting at position 502 of SEQ ID NO: 1885024
gcugcaucuccucagagaa

SEQ ID NO: 2310211 - RNA, 19 nt, Artificial Sequence
  Description of Artificial Sequence: Synthetic oligonucleotide
  Antisense strand to SEQ ID NO: 2310210
uucucugaggagaugcagc

SEQ ID NO: 2310212 - RNA, 19 nt, Artificial Sequence
  Description of Artificial Sequence: Synthetic oligonucleotide
  Sense strand starting at position 784 of SEQ ID NO: 1885024
ggaggcugucccuacauau

SEQ ID NO: 2310213 - RNA, 19 nt, Artificial Sequence
  Description of Artificial Sequence: Synthetic oligonucleotide
  Antisense strand to SEQ ID NO: 2310212
auauguagggacagccucc

SEQ ID NO: 2310214 - RNA, 19 nt, Artificial Sequence
  Description of Artificial Sequence: Synthetic oligonucleotide
  Sense strand starting at position 805 of SEQ ID NO: 1885024
cugguacuuugaguaaaca

SEQ ID NO: 2310215 - RNA, 19 nt, Artificial Sequence
  Description of Artificial Sequence: Synthetic oligonucleotide
  Antisense strand to SEQ ID NO: 2310214
uguuuacucaaaguaccag

SEQ ID NO: 2310216 - RNA, 19 nt, Artificial Sequence
  Description of Artificial Sequence: Synthetic oligonucleotide
  Sense strand starting at position 806 of SEQ ID NO: 1885024
ugguacuuugaguaaacau

SEQ ID NO: 2310217 - RNA, 19 nt, Artificial Sequence
  Description of Artificial Sequence: Synthetic oligonucleotide
  Antisense strand to SEQ ID NO: 2310216
auguuuacucaaaguacca

SEQ ID NO: 2310218 - RNA, 19 nt, Artificial Sequence
  Description of Artificial Sequence: Synthetic oligonucleotide
  Sense strand starting at position 1226 of SEQ ID NO: 1885024
aguccuuaacucugagaag

SEQ ID NO: 2310219 - RNA, 19 nt, Artificial Sequence
  Description of Artificial Sequence: Synthetic oligonucleotide
  Antisense strand to SEQ ID NO: 2310218
cuucucagaguuaaggacu

SEQ ID NO: 2310220 - RNA, 19 nt, Artificial Sequence
  Description of Artificial Sequence: Synthetic oligonucleotide
  Sense strand starting at position 1245 of SEQ ID NO: 1885024
caguaucguccugaaacua

SEQ ID NO: 2310221 - RNA, 19 nt, Artificial Sequence
  Description of Artificial Sequence: Synthetic oligonucleotide
  Antisense strand to SEQ ID NO: 2310220
uaguuucaggacgauacug

SEQ ID NO: 2310222 - RNA, 19 nt, Artificial Sequence
  Description of Artificial Sequence: Synthetic oligonucleotide
  Sense strand starting at position 1383 of SEQ ID NO: 1885024
acauauauggcucacagua

SEQ ID NO: 2310223 - RNA, 19 nt, Artificial Sequence
  Description of Artificial Sequence: Synthetic oligonucleotide
  Antisense strand to SEQ ID NO: 2310222
uacugugagccauauaugu

SEQ ID NO: 2310224 - RNA, 19 nt, Artificial Sequence
  Description of Artificial Sequence: Synthetic oligonucleotide
  Sense strand starting at position 1483 of SEQ ID NO: 1885024
ggacaucauugaucccuau

SEQ ID NO: 2310225 - RNA, 19 nt, Artificial Sequence
  Description of Artificial Sequence: Synthetic oligonucleotide
  Antisense strand to SEQ ID NO: 2310224
auagggaucaaugaugucc

SEQ ID NO: 2310226 - RNA, 19 nt, Artificial Sequence
  Description of Artificial Sequence: Synthetic oligonucleotide
  Sense strand starting at position 1487 of SEQ ID NO: 1885024
aucauugaucccuaugagu

SEQ ID NO: 2310227 - RNA, 19 nt, Artificial Sequence
  Description of Artificial Sequence: Synthetic oligonucleotide
  Antisense strand to SEQ ID NO: 2310226
acucauagggaucaaugau

SEQ ID NO: 2310228 - RNA, 19 nt, Artificial Sequence
  Description of Artificial Sequence: Synthetic oligonucleotide
  Sense strand starting at position 1500 of SEQ ID NO: 1885024
augaguuccagcugaggaa

SEQ ID NO: 2310229 - RNA, 19 nt, Artificial Sequence
  Description of Artificial Sequence: Synthetic oligonucleotide
  Antisense strand to SEQ ID NO: 2310228
uuccucagcuggaacucau

SEQ ID NO: 2310230 - RNA, 19 nt, Artificial Sequence
  Description of Artificial Sequence: Synthetic oligonucleotide
  Sense strand starting at position 1501 of SEQ ID NO: 1885024
ugaguuccagcugaggaau

SEQ ID NO: 2310231 - RNA, 19 nt, Artificial Sequence
  Description of Artificial Sequence: Synthetic oligonucleotide
  Antisense strand to SEQ ID NO: 2310230
auuccucagcuggaacuca

SEQ ID NO: 2310232 - RNA, 19 nt, Artificial Sequence
  Description of Artificial Sequence: Synthetic oligonucleotide
  Sense strand starting at position 1512 of SEQ ID NO: 1885024
ugaggaauuuaugacauau

SEQ ID NO: 2310233 - RNA, 19 nt, Artificial Sequence
  Description of Artificial Sequence: Synthetic oligonucleotide
  Antisense strand to SEQ ID NO: 2310232
auaugucauaaauuccuca

SEQ ID NO: 2310234 - RNA, 19 nt, Artificial Sequence
  Description of Artificial Sequence: Synthetic oligonucleotide
  Sense strand starting at position 1514 of SEQ ID NO: 1885024
aggaauuuaugacauauuc

SEQ ID NO: 2310235 - RNA, 19 nt, Artificial Sequence
  Description of Artificial Sequence: Synthetic oligonucleotide
  Antisense strand to SEQ ID NO: 2310234
gaauaugucauaaauuccu

SEQ ID NO: 2310236 - RNA, 19 nt, Artificial Sequence
  Description of Artificial Sequence: Synthetic oligonucleotide
  Sense strand starting at position 1540 of SEQ ID NO: 1885024
cccugagauuagccuuuaa

SEQ ID NO: 2310237 - RNA, 19 nt, Artificial Sequence
  Description of Artificial Sequence: Synthetic oligonucleotide
  Antisense strand to SEQ ID NO: 2310236
uuaaaggcuaaucucaggg

SEQ ID NO: 2310238 - RNA, 19 nt, Artificial Sequence
  Description of Artificial Sequence: Synthetic oligonucleotide
  Sense strand starting at position 1705 of SEQ ID NO: 1885024
ggugccaugacagagguau

SEQ ID NO: 2310239 - RNA, 19 nt, Artificial Sequence
  Description of Artificial Sequence: Synthetic oligonucleotide
  Antisense strand to SEQ ID NO: 2310238
auaccucugucauggcacc

SEQ ID NO: 2310240 - RNA, 19 nt, Artificial Sequence
  Description of Artificial Sequence: Synthetic oligonucleotide
  Sense strand starting at position 1709 of SEQ ID NO: 1885024
ccaugacagagguaugucu

SEQ ID NO: 2310241 - RNA, 19 nt, Artificial Sequence
  Description of Artificial Sequence: Synthetic oligonucleotide
  Antisense strand to SEQ ID NO: 2310240
agacauaccucugucaugg

SEQ ID NO: 2310242 - RNA, 19 nt, Artificial Sequence
  Description of Artificial Sequence: Synthetic oligonucleotide
  Sense strand starting at position 1758 of SEQ ID NO: 1885024
ggugcuuccagguaagaca

SEQ ID NO: 2310243 - RNA, 19 nt, Artificial Sequence
  Description of Artificial Sequence: Synthetic oligonucleotide
  Antisense strand to SEQ ID NO: 2310242
ugucuuaccuggaagcacc

SEQ ID NO: 2310244 - RNA, 19 nt, Artificial Sequence
  Description of Artificial Sequence: Synthetic oligonucleotide
  Sense strand starting at position 1792 of SEQ ID NO: 1885024
gcagcuauagggcaaagaa

SEQ ID NO: 2310245 - RNA, 19 nt, Artificial Sequence
  Description of Artificial Sequence: Synthetic oligonucleotide
  Antisense strand to SEQ ID NO: 2310244
uucuuugcccuauagcugc

SEQ ID NO: 2310246 - RNA, 19 nt, Artificial Sequence
  Description of Artificial Sequence: Synthetic oligonucleotide
  Sense strand starting at position 1836 of SEQ ID NO: 1885024
uagaucaggugaccaauua

SEQ ID NO: 2310247 - RNA, 19 nt, Artificial Sequence
  Description of Artificial Sequence: Synthetic oligonucleotide
  Antisense strand to SEQ ID NO: 2310246
uaauuggucaccugaucua

SEQ ID NO: 2310248 - RNA, 19 nt, Artificial Sequence
  Description of Artificial Sequence: Synthetic oligonucleotide
  Sense strand starting at position 1852 of SEQ ID NO: 1885024
uuacaauccuguucuugga

SEQ ID NO: 2310249 - RNA, 19 nt, Artificial Sequence
  Description of Artificial Sequence: Synthetic oligonucleotide
  Antisense strand to SEQ ID NO: 2310248
uccaagaacaggauuguaa

SEQ ID NO: 2310250 - RNA, 19 nt, Artificial Sequence
  Description of Artificial Sequence: Synthetic oligonucleotide
  Sense strand starting at position 2037 of SEQ ID NO: 1885024
cugccuuaugaugaagcua

SEQ ID NO: 2310251 - RNA, 19 nt, Artificial Sequence
  Description of Artificial Sequence: Synthetic oligonucleotide
  Antisense strand to SEQ ID NO: 2310250
uagcuucaucauaaggcag

SEQ ID NO: 2310252 - RNA, 19 nt, Artificial Sequence
  Description of Artificial Sequence: Synthetic oligonucleotide
  Sense strand starting at position 2119 of SEQ ID NO: 1885024
uugggaguugccugggaga

SEQ ID NO: 2310253 - RNA, 19 nt, Artificial Sequence
  Description of Artificial Sequence: Synthetic oligonucleotide
  Antisense strand to SEQ ID NO: 2310252
ucucccaggcaacucccaa

SEQ ID NO: 2310254 - RNA, 19 nt, Artificial Sequence
  Description of Artificial Sequence: Synthetic oligonucleotide
  Sense strand starting at position 2121 of SEQ ID NO: 1885024
gggaguugccugggagaug

SEQ ID NO: 2310255 - RNA, 19 nt, Artificial Sequence
  Description of Artificial Sequence: Synthetic oligonucleotide
  Antisense strand to SEQ ID NO: 2310254
caucucccaggcaacuccc

SEQ ID NO: 2310256 - RNA, 19 nt, Artificial Sequence
  Description of Artificial Sequence: Synthetic oligonucleotide
  Sense strand starting at position 2463 of SEQ ID NO: 1885024
uuccaauuuccuggugcuu

SEQ ID NO: 2310257 - RNA, 19 nt, Artificial Sequence
  Description of Artificial Sequence: Synthetic oligonucleotide
  Antisense strand to SEQ ID NO: 2310256
aagcaccaggaaauuggaa

SEQ ID NO: 2310258 - RNA, 19 nt, Artificial Sequence
  Description of Artificial Sequence: Synthetic oligonucleotide
  Sense strand starting at position 2530 of SEQ ID NO: 1885024
auggucucucccuaugaac

SEQ ID NO: 2310259 - RNA, 19 nt, Artificial Sequence
  Description of Artificial Sequence: Synthetic oligonucleotide
  Antisense strand to SEQ ID NO: 2310258
guucauagggagagaccau

SEQ ID NO: 2310260 - RNA, 19 nt, Artificial Sequence
  Description of Artificial Sequence: Synthetic oligonucleotide
  Sense strand starting at position 2564 of SEQ ID NO: 1885024
gugucagcauuucuaacuu

SEQ ID NO: 2310261 - RNA, 19 nt, Artificial Sequence
  Description of Artificial Sequence: Synthetic oligonucleotide
  Antisense strand to SEQ ID NO: 2310260
aaguuagaaaugcugacac

SEQ ID NO: 2310262 - RNA, 19 nt, Artificial Sequence
  Description of Artificial Sequence: Synthetic oligonucleotide
  Sense strand starting at position 2580 of SEQ ID NO: 1885024
cuucuuacccuggagcuau

SEQ ID NO: 2310263 - RNA, 19 nt, Artificial Sequence
  Description of Artificial Sequence: Synthetic oligonucleotide
  Antisense strand to SEQ ID NO: 2310262
auagcuccaggguaagaag

SEQ ID NO: 2310264 - RNA, 19 nt, Artificial Sequence
  Description of Artificial Sequence: Synthetic oligonucleotide
  Sense strand starting at position 2627 of SEQ ID NO: 1885024
agugcuucuggagaaggua

SEQ ID NO: 2310265 - RNA, 19 nt, Artificial Sequence
  Description of Artificial Sequence: Synthetic oligonucleotide
  Antisense strand to SEQ ID NO: 2310264
uaccuucuccagaagcacu

SEQ ID NO: 2310266 - RNA, 19 nt, Artificial Sequence
  Description of Artificial Sequence: Synthetic oligonucleotide
  Sense strand starting at position 2804 of SEQ ID NO: 1885024
agagaucuuugcuuccaag

SEQ ID NO: 2310267 - RNA, 19 nt, Artificial Sequence
  Description of Artificial Sequence: Synthetic oligonucleotide
  Antisense strand to SEQ ID NO: 2310266
cuuggaagcaaagaucucu

SEQ ID NO: 2310268 - RNA, 19 nt, Artificial Sequence
  Description of Artificial Sequence: Synthetic oligonucleotide
  Sense strand starting at position 2848 of SEQ ID NO: 1885024
ggccuaaccagucauggaa

SEQ ID NO: 2310269 - RNA, 19 nt, Artificial Sequence
  Description of Artificial Sequence: Synthetic oligonucleotide
  Antisense strand to SEQ ID NO: 2310268
uuccaugacugguuaggcc

SEQ ID NO: 2310270 - RNA, 19 nt, Artificial Sequence
  Description of Artificial Sequence: Synthetic oligonucleotide
  Sense strand starting at position 2916 of SEQ ID NO: 1885024
uguucuggccaauaggaua

SEQ ID NO: 2310271 - RNA, 19 nt, Artificial Sequence
  Description of Artificial Sequence: Synthetic oligonucleotide
  Antisense strand to SEQ ID NO: 2310270
uauccuauuggccagaaca

SEQ ID NO: 2310272 - RNA, 19 nt, Artificial Sequence
  Description of Artificial Sequence: Synthetic oligonucleotide
  Sense strand starting at position 2985 of SEQ ID NO: 1885024
guguuaauuuccuugggcu

SEQ ID NO: 2310273 - RNA, 19 nt, Artificial Sequence
  Description of Artificial Sequence: Synthetic oligonucleotide
  Antisense strand to SEQ ID NO: 2310272
agcccaaggaaauuaacac

SEQ ID NO: 2310274 - RNA, 19 nt, Artificial Sequence
  Description of Artificial Sequence: Synthetic oligonucleotide
  Sense strand starting at position 3017 of SEQ ID NO: 1885024
aucacaaacuggguagauu

SEQ ID NO: 2310275 - RNA, 19 nt, Artificial Sequence
  Description of Artificial Sequence: Synthetic oligonucleotide
  Antisense strand to SEQ ID NO: 2310274
aaucuacccaguuugugau

SEQ ID NO: 2310276 - RNA, 19 nt, Artificial Sequence
  Description of Artificial Sequence: Synthetic oligonucleotide
  Sense strand starting at position 3067 of SEQ ID NO: 1885024
aggcccucagacugaaaua

SEQ ID NO: 2310277 - RNA, 19 nt, Artificial Sequence
  Description of Artificial Sequence: Synthetic oligonucleotide
  Antisense strand to SEQ ID NO: 2310276
uauuucagucugagggccu

SEQ ID NO: 2310278 - RNA, 19 nt, Artificial Sequence
  Description of Artificial Sequence: Synthetic oligonucleotide
  Sense strand starting at position 3204 of SEQ ID NO: 1885024
gccacucuggcauauggau

SEQ ID NO: 2310279 - RNA, 19 nt, Artificial Sequence
  Description of Artificial Sequence: Synthetic oligonucleotide
  Antisense strand to SEQ ID NO: 2310278
auccauaugccagaguggc

SEQ ID NO: 2310280 - RNA, 19 nt, Artificial Sequence
  Description of Artificial Sequence: Synthetic oligonucleotide
  Sense strand starting at position 3916 of SEQ ID NO: 1885024
gaauacuccuauguguaug

SEQ ID NO: 2310281 - RNA, 19 nt, Artificial Sequence
  Description of Artificial Sequence: Synthetic oligonucleotide
  Antisense strand to SEQ ID NO: 2310280
cauacacauaggaguauuc

SEQ ID NO: 2310282 - RNA, 19 nt, Artificial Sequence
  Description of Artificial Sequence: Synthetic oligonucleotide
  Sense strand starting at position 92 of SEQ ID NO: 1885025
aggcuuguugcugugaugu

SEQ ID NO: 2310283 - RNA, 19 nt, Artificial Sequence
  Description of Artificial Sequence: Synthetic oligonucleotide
  Antisense strand to SEQ ID NO: 2310282
acaucacagcaacaagccu

SEQ ID NO: 2310284 - RNA, 19 nt, Artificial Sequence
  Description of Artificial Sequence: Synthetic oligonucleotide
  Sense strand starting at position 100 of SEQ ID NO: 1885025
ugcugugauguauaccaua

SEQ ID NO: 2310285 - RNA, 19 nt, Artificial Sequence
  Description of Artificial Sequence: Synthetic oligonucleotide
  Antisense strand to SEQ ID NO: 2310284
uaugguauacaucacagca

SEQ ID NO: 2310286 - RNA, 19 nt, Artificial Sequence
  Description of Artificial Sequence: Synthetic oligonucleotide
  Sense strand starting at position 105 of SEQ ID NO: 1885025
ugauguauaccauauguga

SEQ ID NO: 2310287 - RNA, 19 nt, Artificial Sequence
  Description of Artificial Sequence: Synthetic oligonucleotide
  Antisense strand to SEQ ID NO: 2310286
ucacauaugguauacauca

SEQ ID NO: 2310288 - RNA, 19 nt, Artificial Sequence
  Description of Artificial Sequence: Synthetic oligonucleotide
  Sense strand starting at position 108 of SEQ ID NO: 1885025
uguauaccauaugugaaau

SEQ ID NO: 2310289 - RNA, 19 nt, Artificial Sequence
  Description of Artificial Sequence: Synthetic oligonucleotide
  Antisense strand to SEQ ID NO: 2310288
auuucacauaugguauaca

SEQ ID NO: 2310290 - RNA, 19 nt, Artificial Sequence
  Description of Artificial Sequence: Synthetic oligonucleotide
  Sense strand starting at position 302 of SEQ ID NO: 1885025
guaauacucuagccaagga

SEQ ID NO: 2310291 - RNA, 19 nt, Artificial Sequence
  Description of Artificial Sequence: Synthetic oligonucleotide
  Antisense strand to SEQ ID NO: 2310290
uccuuggcuagaguauuac

SEQ ID NO: 2310292 - RNA, 19 nt, Artificial Sequence
  Description of Artificial Sequence: Synthetic oligonucleotide
  Sense strand starting at position 348 of SEQ ID NO: 1885025
caccacugucauuguggaa

SEQ ID NO: 2310293 - RNA, 19 nt, Artificial Sequence
  Description of Artificial Sequence: Synthetic oligonucleotide
  Antisense strand to SEQ ID NO: 2310292
uuccacaaugacaguggug

SEQ ID NO: 2310294 - RNA, 19 nt, Artificial Sequence
  Description of Artificial Sequence: Synthetic oligonucleotide
  Sense strand starting at position 390 of SEQ ID NO: 1885025
auugaaauauguguacaac

SEQ ID NO: 2310295 - RNA, 19 nt, Artificial Sequence
  Description of Artificial Sequence: Synthetic oligonucleotide
  Antisense strand to SEQ ID NO: 2310294
guuguacacauauuucaau

SEQ ID NO: 2310296 - RNA, 19 nt, Artificial Sequence
  Description of Artificial Sequence: Synthetic oligonucleotide
  Sense strand starting at position 477 of SEQ ID NO: 1885025
cuuagagaaauguguugga

SEQ ID NO: 2310297 - RNA, 19 nt, Artificial Sequence
  Description of Artificial Sequence: Synthetic oligonucleotide
  Antisense strand to SEQ ID NO: 2310296
uccaacacauuucucuaag

SEQ ID NO: 2310298 - RNA, 19 nt, Artificial Sequence
  Description of Artificial Sequence: Synthetic oligonucleotide
  Sense strand starting at position 497 of SEQ ID NO: 1885025
uuugauucugcagaugaca

SEQ ID NO: 2310299 - RNA, 19 nt, Artificial Sequence
  Description of Artificial Sequence: Synthetic oligonucleotide
  Antisense strand to SEQ ID NO: 2310298
ugucaucugcagaaucaaa

SEQ ID NO: 2310300 - RNA, 19 nt, Artificial Sequence
  Description of Artificial Sequence: Synthetic oligonucleotide
  Sense strand starting at position 499 of SEQ ID NO: 1885025
ugauucugcagaugacagu

SEQ ID NO: 2310301 - RNA, 19 nt, Artificial Sequence
  Description of Artificial Sequence: Synthetic oligonucleotide
  Antisense strand to SEQ ID NO: 2310300
acugucaucugcagaauca

SEQ ID NO: 2310302 - RNA, 19 nt, Artificial Sequence
  Description of Artificial Sequence: Synthetic oligonucleotide
  Sense strand starting at position 558 of SEQ ID NO: 1885025
gggagcauaucucuguaua

SEQ ID NO: 2310303 - RNA, 19 nt, Artificial Sequence
  Description of Artificial Sequence: Synthetic oligonucleotide
  Antisense strand to SEQ ID NO: 2310302
uauacagagauaugcuccc

SEQ ID NO: 2310304 - RNA, 19 nt, Artificial Sequence
  Description of Artificial Sequence: Synthetic oligonucleotide
  Sense strand starting at position 559 of SEQ ID NO: 1885025
ggagcauaucucuguauaa

SEQ ID NO: 2310305 - RNA, 19 nt, Artificial Sequence
  Description of Artificial Sequence: Synthetic oligonucleotide
  Antisense strand to SEQ ID NO: 2310304
uuauacagagauaugcucc

SEQ ID NO: 2310306 - RNA, 19 nt, Artificial Sequence
  Description of Artificial Sequence: Synthetic oligonucleotide
  Sense strand starting at position 629 of SEQ ID NO: 1885025
gcuaaauuuguuuguacau

SEQ ID NO: 2310307 - RNA, 19 nt, Artificial Sequence
  Description of Artificial Sequence: Synthetic oligonucleotide
  Antisense strand to SEQ ID NO: 2310306
auguacaaacaaauuuagc

SEQ ID NO: 2310308 - RNA, 19 nt, Artificial Sequence
  Description of Artificial Sequence: Synthetic oligonucleotide
  Sense strand starting at position 646 of SEQ ID NO: 1885025
auugcauuccuaugugaaa

SEQ ID NO: 2310309 - RNA, 19 nt, Artificial Sequence
  Description of Artificial Sequence: Synthetic oligonucleotide
  Antisense strand to SEQ ID NO: 2310308
uuucacauaggaaugcaau

SEQ ID NO: 2310310 - RNA, 19 nt, Artificial Sequence
  Description of Artificial Sequence: Synthetic oligonucleotide
  Sense strand starting at position 753 of SEQ ID NO: 1885025
uggaaucacugcucuauua

SEQ ID NO: 2310311 - RNA, 19 nt, Artificial Sequence
  Description of Artificial Sequence: Synthetic oligonucleotide
  Antisense strand to SEQ ID NO: 2310310
uaauagagcagugauucca

SEQ ID NO: 2310312 - RNA, 19 nt, Artificial Sequence
  Description of Artificial Sequence: Synthetic oligonucleotide
  Sense strand starting at position 1068 of SEQ ID NO: 1885025
uuuccuagguucuugagau

SEQ ID NO: 2310313 - RNA, 19 nt, Artificial Sequence
  Description of Artificial Sequence: Synthetic oligonucleotide
  Antisense strand to SEQ ID NO: 2310312
aucucaagaaccuaggaaa

SEQ ID NO: 2310314 - RNA, 19 nt, Artificial Sequence
  Description of Artificial Sequence: Synthetic oligonucleotide
  Sense strand starting at position 1076 of SEQ ID NO: 1885025
guucuugagauaggagcuu

SEQ ID NO: 2310315 - RNA, 19 nt, Artificial Sequence
  Description of Artificial Sequence: Synthetic oligonucleotide
  Antisense strand to SEQ ID NO: 2310314
aagcuccuaucucaagaac

SEQ ID NO: 2310316 - RNA, 19 nt, Artificial Sequence
  Description of Artificial Sequence: Synthetic oligonucleotide
  Sense strand starting at position 1224 of SEQ ID NO: 1885025
guaaaucucugucuauaaa

SEQ ID NO: 2310317 - RNA, 19 nt, Artificial Sequence
  Description of Artificial Sequence: Synthetic oligonucleotide
  Antisense strand to SEQ ID NO: 2310316
uuuauagacagagauuuac

SEQ ID NO: 2310318 - RNA, 19 nt, Artificial Sequence
  Description of Artificial Sequence: Synthetic oligonucleotide
  Sense strand starting at position 1461 of SEQ ID NO: 1885025
ugacuccuuccuuaguaca

SEQ ID NO: 2310319 - RNA, 19 nt, Artificial Sequence
  Description of Artificial Sequence: Synthetic oligonucleotide
  Antisense strand to SEQ ID NO: 2310318
uguacuaaggaaggaguca

SEQ ID NO: 2310320 - RNA, 19 nt, Artificial Sequence
  Description of Artificial Sequence: Synthetic oligonucleotide
  Sense strand starting at position 1685 of SEQ ID NO: 1885025
ggcaauguuccugggacag

SEQ ID NO: 2310321 - RNA, 19 nt, Artificial Sequence
  Description of Artificial Sequence: Synthetic oligonucleotide
  Antisense strand to SEQ ID NO: 2310320
cugucccaggaacauugcc

SEQ ID NO: 2310322 - RNA, 19 nt, Artificial Sequence
  Description of Artificial Sequence: Synthetic oligonucleotide
  Sense strand starting at position 1736 of SEQ ID NO: 1885025
gagcaugugguacauuaga

SEQ ID NO: 2310323 - RNA, 19 nt, Artificial Sequence
  Description of Artificial Sequence: Synthetic oligonucleotide
  Antisense strand to SEQ ID NO: 2310322
ucuaauguaccacaugcuc

SEQ ID NO: 2310324 - RNA, 19 nt, Artificial Sequence
  Description of Artificial Sequence: Synthetic oligonucleotide
  Sense strand starting at position 1786 of SEQ ID NO: 1885025
aaugauuaggaucgagcaa

SEQ ID NO: 2310325 - RNA, 19 nt, Artificial Sequence
  Description of Artificial Sequence: Synthetic oligonucleotide
  Antisense strand to SEQ ID NO: 2310324
uugcucgauccuaaucauu

SEQ ID NO: 2310326 - RNA, 19 nt, Artificial Sequence
  Description of Artificial Sequence: Synthetic oligonucleotide
  Sense strand starting at position 1903 of SEQ ID NO: 1885025
gcuguagcuauggaaugau

SEQ ID NO: 2310327 - RNA, 19 nt, Artificial Sequence
  Description of Artificial Sequence: Synthetic oligonucleotide
  Antisense strand to SEQ ID NO: 2310326
aucauuccauagcuacagc

SEQ ID NO: 2310328 - RNA, 19 nt, Artificial Sequence
  Description of Artificial Sequence: Synthetic oligonucleotide
  Sense strand starting at position 1922 of SEQ ID NO: 1885025
ggugacagcaauuggagaa

SEQ ID NO: 2310329 - RNA, 19 nt, Artificial Sequence
  Description of Artificial Sequence: Synthetic oligonucleotide
  Antisense strand to SEQ ID NO: 2310328
uucuccaauugcugucacc

SEQ ID NO: 2310330 - RNA, 19 nt, Artificial Sequence
  Description of Artificial Sequence: Synthetic oligonucleotide
  Sense strand starting at position 2007 of SEQ ID NO: 1885025
agcuguugaguguagacaa

SEQ ID NO: 2310331 - RNA, 19 nt, Artificial Sequence
  Description of Artificial Sequence: Synthetic oligonucleotide
  Antisense strand to SEQ ID NO: 2310330
uugucuacacucaacagcu

SEQ ID NO: 2310332 - RNA, 19 nt, Artificial Sequence
  Description of Artificial Sequence: Synthetic oligonucleotide
  Sense strand starting at position 2045 of SEQ ID NO: 1885025
uguagcugucaggagauaa

SEQ ID NO: 2310333 - RNA, 19 nt, Artificial Sequence
  Description of Artificial Sequence: Synthetic oligonucleotide
  Antisense strand to SEQ ID NO: 2310332
uuaucuccugacagcuaca

SEQ ID NO: 2310334 - RNA, 19 nt, Artificial Sequence
  Description of Artificial Sequence: Synthetic oligonucleotide
  Sense strand starting at position 2895 of SEQ ID NO: 1885025
uuccacagauauguugaau

SEQ ID NO: 2310335 - RNA, 19 nt, Artificial Sequence
  Description of Artificial Sequence: Synthetic oligonucleotide
  Antisense strand to SEQ ID NO: 2310334
auucaacauaucuguggaa

SEQ ID NO: 2310336 - RNA, 19 nt, Artificial Sequence
  Description of Artificial Sequence: Synthetic oligonucleotide
  Sense strand starting at position 2906 of SEQ ID NO: 1885025
uguugaauagagggugaga

SEQ ID NO: 2310337 - RNA, 19 nt, Artificial Sequence
  Description of Artificial Sequence: Synthetic oligonucleotide
  Antisense strand to SEQ ID NO: 2310336
ucucacccucuauucaaca

SEQ ID NO: 2310338 - RNA, 19 nt, Artificial Sequence
  Description of Artificial Sequence: Synthetic oligonucleotide
  Sense strand starting at position 2917 of SEQ ID NO: 1885025
gggugagaguggaaauacu

SEQ ID NO: 2310339 - RNA, 19 nt, Artificial Sequence
  Description of Artificial Sequence: Synthetic oligonucleotide
  Antisense strand to SEQ ID NO: 2310338
aguauuuccacucucaccc

SEQ ID NO: 2310340 - RNA, 19 nt, Artificial Sequence
  Description of Artificial Sequence: Synthetic oligonucleotide
  Sense strand starting at position 2936 of SEQ ID NO: 1885025
ugccuuguuccugaacaac

SEQ ID NO: 2310341 - RNA, 19 nt, Artificial Sequence
  Description of Artificial Sequence: Synthetic oligonucleotide
  Antisense strand to SEQ ID NO: 2310340
guuguucaggaacaaggca

SEQ ID NO: 2310342 - RNA, 19 nt, Artificial Sequence
  Description of Artificial Sequence: Synthetic oligonucleotide
  Sense strand starting at position 3160 of SEQ ID NO: 1885025
gguagauuaccuugauuaa

SEQ ID NO: 2310343 - RNA, 19 nt, Artificial Sequence
  Description of Artificial Sequence: Synthetic oligonucleotide
  Antisense strand to SEQ ID NO: 2310342
uuaaucaagguaaucuacc

SEQ ID NO: 2310344 - RNA, 19 nt, Artificial Sequence
  Description of Artificial Sequence: Synthetic oligonucleotide
  Sense strand starting at position 3253 of SEQ ID NO: 1885025
auugcugaauuguugaauu

SEQ ID NO: 2310345 - RNA, 19 nt, Artificial Sequence
  Description of Artificial Sequence: Synthetic oligonucleotide
  Antisense strand to SEQ ID NO: 2310344
aauucaacaauucagcaau

SEQ ID NO: 2310346 - RNA, 19 nt, Artificial Sequence
  Description of Artificial Sequence: Synthetic oligonucleotide
  Sense strand starting at position 3292 of SEQ ID NO: 1885025
ugucaagaauucuuguauc

SEQ ID NO: 2310347 - RNA, 19 nt, Artificial Sequence
  Description of Artificial Sequence: Synthetic oligonucleotide
  Antisense strand to SEQ ID NO: 2310346
gauacaagaauucuugaca

SEQ ID NO: 2310348 - RNA, 19 nt, Artificial Sequence
  Description of Artificial Sequence: Synthetic oligonucleotide
  Sense strand starting at position 3324 of SEQ ID NO: 1885025
aggacauuaguuuguagua

SEQ ID NO: 2310349 - RNA, 19 nt, Artificial Sequence
  Description of Artificial Sequence: Synthetic oligonucleotide
  Antisense strand to SEQ ID NO: 2310348
uacuacaaacuaauguccu

SEQ ID NO: 2310350 - RNA, 19 nt, Artificial Sequence
  Description of Artificial Sequence: Synthetic oligonucleotide
  Sense strand starting at position 3427 of SEQ ID NO: 1885025
gaaagagacugugaagaaa

SEQ ID NO: 2310351 - RNA, 19 nt, Artificial Sequence
  Description of Artificial Sequence: Synthetic oligonucleotide
  Antisense strand to SEQ ID NO: 2310350
uuucuucacagucucuuuc

SEQ ID NO: 2310352 - RNA, 19 nt, Artificial Sequence
  Description of Artificial Sequence: Synthetic oligonucleotide
  Sense strand starting at position 3472 of SEQ ID NO: 1885025
guagauggcacauggaaua

SEQ ID NO: 2310353 - RNA, 19 nt, Artificial Sequence
  Description of Artificial Sequence: Synthetic oligonucleotide
  Antisense strand to SEQ ID NO: 2310352
uauuccaugugccaucuac

SEQ ID NO: 2310354 - RNA, 19 nt, Artificial Sequence
  Description of Artificial Sequence: Synthetic oligonucleotide
  Sense strand starting at position 3552 of SEQ ID NO: 1885025
accaucugugucuggagau

SEQ ID NO: 2310355 - RNA, 19 nt, Artificial Sequence
  Description of Artificial Sequence: Synthetic oligonucleotide
  Antisense strand to SEQ ID NO: 2310354
aucuccagacacagauggu

SEQ ID NO: 2310356 - RNA, 19 nt, Artificial Sequence
  Description of Artificial Sequence: Synthetic oligonucleotide
  Sense strand starting at position 3639 of SEQ ID NO: 1885025
uauuucucauuuggugagu

SEQ ID NO: 2310357 - RNA, 19 nt, Artificial Sequence
  Description of Artificial Sequence: Synthetic oligonucleotide
  Antisense strand to SEQ ID NO: 2310356
acucaccaaaugagaaaua

SEQ ID NO: 2310358 - RNA, 19 nt, Artificial Sequence
  Description of Artificial Sequence: Synthetic oligonucleotide
  Sense strand starting at position 3702 of SEQ ID NO: 1885025
gucaaauuuauguguguug

SEQ ID NO: 2310359 - RNA, 19 nt, Artificial Sequence
  Description of Artificial Sequence: Synthetic oligonucleotide
  Antisense strand to SEQ ID NO: 2310358
caacacacauaaauuugac

SEQ ID NO: 2310360 - RNA, 19 nt, Artificial Sequence
  Description of Artificial Sequence: Synthetic oligonucleotide
  Sense strand starting at position 3839 of SEQ ID NO: 1885025
uguagagguuuguccauuu

SEQ ID NO: 2310361 - RNA, 19 nt, Artificial Sequence
  Description of Artificial Sequence: Synthetic oligonucleotide
  Antisense strand to SEQ ID NO: 2310360
aaauggacaaaccucuaca

SEQ ID NO: 2310362 - RNA, 19 nt, Artificial Sequence
  Description of Artificial Sequence: Synthetic oligonucleotide
  Sense strand starting at position 190 of SEQ ID NO: 1885026
ccaagaaacuaugcugauu

SEQ ID NO: 2310363 - RNA, 19 nt, Artificial Sequence
  Description of Artificial Sequence: Synthetic oligonucleotide
  Antisense strand to SEQ ID NO: 2310362
aaucagcauaguuucuugg

SEQ ID NO: 2310364 - RNA, 19 nt, Artificial Sequence
  Description of Artificial Sequence: Synthetic oligonucleotide
  Sense strand starting at position 209 of SEQ ID NO: 1885026
uuacuugucccauaagggu

SEQ ID NO: 2310365 - RNA, 19 nt, Artificial Sequence
  Description of Artificial Sequence: Synthetic oligonucleotide
  Antisense strand to SEQ ID NO: 2310364
acccuuaugggacaaguaa

SEQ ID NO: 2310366 - RNA, 19 nt, Artificial Sequence
  Description of Artificial Sequence: Synthetic oligonucleotide
  Sense strand starting at position 223 of SEQ ID NO: 1885026
agggucuucucuugugcaa

SEQ ID NO: 2310367 - RNA, 19 nt, Artificial Sequence
  Description of Artificial Sequence: Synthetic oligonucleotide
  Antisense strand to SEQ ID NO: 2310366
uugcacaagagaagacccu

SEQ ID NO: 2310368 - RNA, 19 nt, Artificial Sequence
  Description of Artificial Sequence: Synthetic oligonucleotide
  Sense strand starting at position 225 of SEQ ID NO: 1885026
ggucuucucuugugcaagu

SEQ ID NO: 2310369 - RNA, 19 nt, Artificial Sequence
  Description of Artificial Sequence: Synthetic oligonucleotide
  Antisense strand to SEQ ID NO: 2310368
acuugcacaagagaagacc

SEQ ID NO: 2310370 - RNA, 19 nt, Artificial Sequence
  Description of Artificial Sequence: Synthetic oligonucleotide
  Sense strand starting at position 236 of SEQ ID NO: 1885026
gugcaagugugauucugau

SEQ ID NO: 2310371 - RNA, 19 nt, Artificial Sequence
  Description of Artificial Sequence: Synthetic oligonucleotide
  Antisense strand to SEQ ID NO: 2310370
aucagaaucacacuugcac

SEQ ID NO: 2310372 - RNA, 19 nt, Artificial Sequence
  Description of Artificial Sequence: Synthetic oligonucleotide
  Sense strand starting at position 242 of SEQ ID NO: 1885026
gugugauucugauucccau

SEQ ID NO: 2310373 - RNA, 19 nt, Artificial Sequence
  Description of Artificial Sequence: Synthetic oligonucleotide
  Antisense strand to SEQ ID NO: 2310372
augggaaucagaaucacac

SEQ ID NO: 2310374 - RNA, 19 nt, Artificial Sequence
  Description of Artificial Sequence: Synthetic oligonucleotide
  Sense strand starting at position 343 of SEQ ID NO: 1885026
ggcaucuguucccagcauu

SEQ ID NO: 2310375 - RNA, 19 nt, Artificial Sequence
  Description of Artificial Sequence: Synthetic oligonucleotide
  Antisense strand to SEQ ID NO: 2310374
aaugcugggaacagaugcc

SEQ ID NO: 2310376 - RNA, 19 nt, Artificial Sequence
  Description of Artificial Sequence: Synthetic oligonucleotide
  Sense strand starting at position 384 of SEQ ID NO: 1885026
ucucuuccucuuggaggaa

SEQ ID NO: 2310377 - RNA, 19 nt, Artificial Sequence
  Description of Artificial Sequence: Synthetic oligonucleotide
  Antisense strand to SEQ ID NO: 2310376
uuccuccaagaggaagaga

SEQ ID NO: 2310378 - RNA, 19 nt, Artificial Sequence
  Description of Artificial Sequence: Synthetic oligonucleotide
  Sense strand starting at position 385 of SEQ ID NO: 1885026
cucuuccucuuggaggaaa

SEQ ID NO: 2310379 - RNA, 19 nt, Artificial Sequence
  Description of Artificial Sequence: Synthetic oligonucleotide
  Antisense strand to SEQ ID NO: 2310378
uuuccuccaagaggaagag

SEQ ID NO: 2310380 - RNA, 19 nt, Artificial Sequence
  Description of Artificial Sequence: Synthetic oligonucleotide
  Sense strand starting at position 403 of SEQ ID NO: 1885026
aguggaaaccucggucacu

SEQ ID NO: 2310381 - RNA, 19 nt, Artificial Sequence
  Description of Artificial Sequence: Synthetic oligonucleotide
  Antisense strand to SEQ ID NO: 2310380
agugaccgagguuuccacu

SEQ ID NO: 2310382 - RNA, 19 nt, Artificial Sequence
  Description of Artificial Sequence: Synthetic oligonucleotide
  Sense strand starting at position 404 of SEQ ID NO: 1885026
guggaaaccucggucacua

SEQ ID NO: 2310383 - RNA, 19 nt, Artificial Sequence
  Description of Artificial Sequence: Synthetic oligonucleotide
  Antisense strand to SEQ ID NO: 2310382
uagugaccgagguuuccac

SEQ ID NO: 2310384 - RNA, 19 nt, Artificial Sequence
  Description of Artificial Sequence: Synthetic oligonucleotide
  Sense strand starting at position 415 of SEQ ID NO: 1885026
ggucacuacuuccuagaag

SEQ ID NO: 2310385 - RNA, 19 nt, Artificial Sequence
  Description of Artificial Sequence: Synthetic oligonucleotide
  Antisense strand to SEQ ID NO: 2310384
cuucuaggaaguagugacc

SEQ ID NO: 2310386 - RNA, 19 nt, Artificial Sequence
  Description of Artificial Sequence: Synthetic oligonucleotide
  Sense strand starting at position 416 of SEQ ID NO: 1885026
gucacuacuuccuagaaga

SEQ ID NO: 2310387 - RNA, 19 nt, Artificial Sequence
  Description of Artificial Sequence: Synthetic oligonucleotide
  Antisense strand to SEQ ID NO: 2310386
ucuucuaggaaguagugac

SEQ ID NO: 2310388 - RNA, 19 nt, Artificial Sequence
  Description of Artificial Sequence: Synthetic oligonucleotide
  Sense strand starting at position 451 of SEQ ID NO: 1885026
gcagcaaaguccuuaaugu

SEQ ID NO: 2310389 - RNA, 19 nt, Artificial Sequence
  Description of Artificial Sequence: Synthetic oligonucleotide
  Antisense strand to SEQ ID NO: 2310388
acauuaaggacuuugcugc

SEQ ID NO: 2310390 - RNA, 19 nt, Artificial Sequence
  Description of Artificial Sequence: Synthetic oligonucleotide
  Sense strand starting at position 452 of SEQ ID NO: 1885026
cagcaaaguccuuaaugug

SEQ ID NO: 2310391 - RNA, 19 nt, Artificial Sequence
  Description of Artificial Sequence: Synthetic oligonucleotide
  Antisense strand to SEQ ID NO: 2310390
cacauuaaggacuuugcug

SEQ ID NO: 2310392 - RNA, 19 nt, Artificial Sequence
  Description of Artificial Sequence: Synthetic oligonucleotide
  Sense strand starting at position 460 of SEQ ID NO: 1885026
uccuuaauguguuaccuuu

SEQ ID NO: 2310393 - RNA, 19 nt, Artificial Sequence
  Description of Artificial Sequence: Synthetic oligonucleotide
  Antisense strand to SEQ ID NO: 2310392
aaagguaacacauuaagga

SEQ ID NO: 2310394 - RNA, 19 nt, Artificial Sequence
  Description of Artificial Sequence: Synthetic oligonucleotide
  Sense strand starting at position 645 of SEQ ID NO: 1885026
agaaauaagugaguugugu

SEQ ID NO: 2310395 - RNA, 19 nt, Artificial Sequence
  Description of Artificial Sequence: Synthetic oligonucleotide
  Antisense strand to SEQ ID NO: 2310394
acacaacucacuuauuucu

SEQ ID NO: 2310396 - RNA, 19 nt, Artificial Sequence
  Description of Artificial Sequence: Synthetic oligonucleotide
  Sense strand starting at position 649 of SEQ ID NO: 1885026
auaagugaguuguguuugu

SEQ ID NO: 2310397 - RNA, 19 nt, Artificial Sequence
  Description of Artificial Sequence: Synthetic oligonucleotide
  Antisense strand to SEQ ID NO: 2310396
acaaacacaacucacuuau

SEQ ID NO: 2310398 - RNA, 19 nt, Artificial Sequence
  Description of Artificial Sequence: Synthetic oligonucleotide
  Sense strand starting at position 652 of SEQ ID NO: 1885026
agugaguuguguuugugag

SEQ ID NO: 2310399 - RNA, 19 nt, Artificial Sequence
  Description of Artificial Sequence: Synthetic oligonucleotide
  Antisense strand to SEQ ID NO: 2310398
cucacaaacacaacucacu

SEQ ID NO: 2310400 - RNA, 19 nt, Artificial Sequence
  Description of Artificial Sequence: Synthetic oligonucleotide
  Sense strand starting at position 653 of SEQ ID NO: 1885026
gugaguuguguuugugagc

SEQ ID NO: 2310401 - RNA, 19 nt, Artificial Sequence
  Description of Artificial Sequence: Synthetic oligonucleotide
  Antisense strand to SEQ ID NO: 2310400
gcucacaaacacaacucac

SEQ ID NO: 2310402 - RNA, 19 nt, Artificial Sequence
  Description of Artificial Sequence: Synthetic oligonucleotide
  Sense strand starting at position 654 of SEQ ID NO: 1885026
ugaguuguguuugugagca

SEQ ID NO: 2310403 - RNA, 19 nt, Artificial Sequence
  Description of Artificial Sequence: Synthetic oligonucleotide
  Antisense strand to SEQ ID NO: 2310402
ugcucacaaacacaacuca

SEQ ID NO: 2310404 - RNA, 19 nt, Artificial Sequence
  Description of Artificial Sequence: Synthetic oligonucleotide
  Sense strand starting at position 656 of SEQ ID NO: 1885026
aguuguguuugugagcaaa

SEQ ID NO: 2310405 - RNA, 19 nt, Artificial Sequence
  Description of Artificial Sequence: Synthetic oligonucleotide
  Antisense strand to SEQ ID NO: 2310404
uuugcucacaaacacaacu

SEQ ID NO: 2310406 - RNA, 19 nt, Artificial Sequence
  Description of Artificial Sequence: Synthetic oligonucleotide
  Sense strand starting at position 720 of SEQ ID NO: 1885026
uugagaauuugugacugua

SEQ ID NO: 2310407 - RNA, 19 nt, Artificial Sequence
  Description of Artificial Sequence: Synthetic oligonucleotide
  Antisense strand to SEQ ID NO: 2310406
uacagucacaaauucucaa

SEQ ID NO: 2310408 - RNA, 19 nt, Artificial Sequence
  Description of Artificial Sequence: Synthetic oligonucleotide
  Sense strand starting at position 732 of SEQ ID NO: 1885026
gacuguaaauaugaacguu

SEQ ID NO: 2310409 - RNA, 19 nt, Artificial Sequence
  Description of Artificial Sequence: Synthetic oligonucleotide
  Antisense strand to SEQ ID NO: 2310408
aacguucauauuuacaguc

SEQ ID NO: 2310410 - RNA, 19 nt, Artificial Sequence
  Description of Artificial Sequence: Synthetic oligonucleotide
  Sense strand starting at position 793 of SEQ ID NO: 1885026
gaaucagauagugguugca

SEQ ID NO: 2310411 - RNA, 19 nt, Artificial Sequence
  Description of Artificial Sequence: Synthetic oligonucleotide
  Antisense strand to SEQ ID NO: 2310410
ugcaaccacuaucugauuc

SEQ ID NO: 2310412 - RNA, 19 nt, Artificial Sequence
  Description of Artificial Sequence: Synthetic oligonucleotide
  Sense strand starting at position 795 of SEQ ID NO: 1885026
aucagauagugguugcaag

SEQ ID NO: 2310413 - RNA, 19 nt, Artificial Sequence
  Description of Artificial Sequence: Synthetic oligonucleotide
  Antisense strand to SEQ ID NO: 2310412
cuugcaaccacuaucugau

SEQ ID NO: 2310414 - RNA, 19 nt, Artificial Sequence
  Description of Artificial Sequence: Synthetic oligonucleotide
  Sense strand starting at position 796 of SEQ ID NO: 1885026
ucagauagugguugcaaga

SEQ ID NO: 2310415 - RNA, 19 nt, Artificial Sequence
  Description of Artificial Sequence: Synthetic oligonucleotide
  Antisense strand to SEQ ID NO: 2310414
ucuugcaaccacuaucuga

SEQ ID NO: 2310416 - RNA, 19 nt, Artificial Sequence
  Description of Artificial Sequence: Synthetic oligonucleotide
  Sense strand starting at position 859 of SEQ ID NO: 1885026
ggaacuuucugagugggua

SEQ ID NO: 2310417 - RNA, 19 nt, Artificial Sequence
  Description of Artificial Sequence: Synthetic oligonucleotide
  Antisense strand to SEQ ID NO: 2310416
uacccacucagaaaguucc

SEQ ID NO: 2310418 - RNA, 19 nt, Artificial Sequence
  Description of Artificial Sequence: Synthetic oligonucleotide
  Sense strand starting at position 860 of SEQ ID NO: 1885026
gaacuuucugaguggguac

SEQ ID NO: 2310419 - RNA, 19 nt, Artificial Sequence
  Description of Artificial Sequence: Synthetic oligonucleotide
  Antisense strand to SEQ ID NO: 2310418
guacccacucagaaaguuc

SEQ ID NO: 2310420 - RNA, 19 nt, Artificial Sequence
  Description of Artificial Sequence: Synthetic oligonucleotide
  Sense strand starting at position 875 of SEQ ID NO: 1885026
guacgauggaaauguccua

SEQ ID NO: 2310421 - RNA, 19 nt, Artificial Sequence
  Description of Artificial Sequence: Synthetic oligonucleotide
  Antisense strand to SEQ ID NO: 2310420
uaggacauuuccaucguac

SEQ ID NO: 2310422 - RNA, 19 nt, Artificial Sequence
  Description of Artificial Sequence: Synthetic oligonucleotide
  Sense strand starting at position 880 of SEQ ID NO: 1885026
auggaaauguccuauauca

SEQ ID NO: 2310423 - RNA, 19 nt, Artificial Sequence
  Description of Artificial Sequence: Synthetic oligonucleotide
  Antisense strand to SEQ ID NO: 2310422
ugauauaggacauuuccau

SEQ ID NO: 2310424 - RNA, 19 nt, Artificial Sequence
  Description of Artificial Sequence: Synthetic oligonucleotide
  Sense strand starting at position 887 of SEQ ID NO: 1885026
uguccuauaucaugauugu

SEQ ID NO: 2310425 - RNA, 19 nt, Artificial Sequence
  Description of Artificial Sequence: Synthetic oligonucleotide
  Antisense strand to SEQ ID NO: 2310424
acaaucaugauauaggaca

SEQ ID NO: 2310426 - RNA, 19 nt, Artificial Sequence
  Description of Artificial Sequence: Synthetic oligonucleotide
  Sense strand starting at position 888 of SEQ ID NO: 1885026
guccuauaucaugauugug

SEQ ID NO: 2310427 - RNA, 19 nt, Artificial Sequence
  Description of Artificial Sequence: Synthetic oligonucleotide
  Antisense strand to SEQ ID NO: 2310426
cacaaucaugauauaggac

SEQ ID NO: 2310428 - RNA, 19 nt, Artificial Sequence
  Description of Artificial Sequence: Synthetic oligonucleotide
  Sense strand starting at position 890 of SEQ ID NO: 1885026
ccuauaucaugauugugau

SEQ ID NO: 2310429 - RNA, 19 nt, Artificial Sequence
  Description of Artificial Sequence: Synthetic oligonucleotide
  Antisense strand to SEQ ID NO: 2310428
aucacaaucaugauauagg

SEQ ID NO: 2310430 - RNA, 19 nt, Artificial Sequence
  Description of Artificial Sequence: Synthetic oligonucleotide
  Sense strand starting at position 896 of SEQ ID NO: 1885026
ucaugauugugauggguaa

SEQ ID NO: 2310431 - RNA, 19 nt, Artificial Sequence
  Description of Artificial Sequence: Synthetic oligonucleotide
  Antisense strand to SEQ ID NO: 2310430
uuacccaucacaaucauga

SEQ ID NO: 2310432 - RNA, 19 nt, Artificial Sequence
  Description of Artificial Sequence: Synthetic oligonucleotide
  Sense strand starting at position 897 of SEQ ID NO: 1885026
caugauugugauggguaau

SEQ ID NO: 2310433 - RNA, 19 nt, Artificial Sequence
  Description of Artificial Sequence: Synthetic oligonucleotide
  Antisense strand to SEQ ID NO: 2310432
auuacccaucacaaucaug

SEQ ID NO: 2310434 - RNA, 19 nt, Artificial Sequence
  Description of Artificial Sequence: Synthetic oligonucleotide
  Sense strand starting at position 898 of SEQ ID NO: 1885026
augauugugauggguaaua

SEQ ID NO: 2310435 - RNA, 19 nt, Artificial Sequence
  Description of Artificial Sequence: Synthetic oligonucleotide
  Antisense strand to SEQ ID NO: 2310434
uauuacccaucacaaucau

SEQ ID NO: 2310436 - RNA, 19 nt, Artificial Sequence
  Description of Artificial Sequence: Synthetic oligonucleotide
  Sense strand starting at position 946 of SEQ ID NO: 1885026
acucuuaauugagguaaau

SEQ ID NO: 2310437 - RNA, 19 nt, Artificial Sequence
  Description of Artificial Sequence: Synthetic oligonucleotide
  Antisense strand to SEQ ID NO: 2310436
auuuaccucaauuaagagu

SEQ ID NO: 2310438 - RNA, 19 nt, Artificial Sequence
  Description of Artificial Sequence: Synthetic oligonucleotide
  Sense strand starting at position 1379 of SEQ ID NO: 1885026
ccuaaaguccaguacaauu

SEQ ID NO: 2310439 - RNA, 19 nt, Artificial Sequence
  Description of Artificial Sequence: Synthetic oligonucleotide
  Antisense strand to SEQ ID NO: 2310438
aauuguacuggacuuuagg

SEQ ID NO: 2310440 - RNA, 19 nt, Artificial Sequence
  Description of Artificial Sequence: Synthetic oligonucleotide
  Sense strand starting at position 483 of SEQ ID NO: 1885027
cucugagagucagucucua

SEQ ID NO: 2310441 - RNA, 19 nt, Artificial Sequence
  Description of Artificial Sequence: Synthetic oligonucleotide
  Antisense strand to SEQ ID NO: 2310440
uagagacugacucucagag

SEQ ID NO: 2310442 - RNA, 19 nt, Artificial Sequence
  Description of Artificial Sequence: Synthetic oligonucleotide
  Sense strand starting at position 487 of SEQ ID NO: 1885027
gagagucagucucuaucca

SEQ ID NO: 2310443 - RNA, 19 nt, Artificial Sequence
  Description of Artificial Sequence: Synthetic oligonucleotide
  Antisense strand to SEQ ID NO: 2310442
uggauagagacugacucuc

SEQ ID NO: 2310444 - RNA, 19 nt, Artificial Sequence
  Description of Artificial Sequence: Synthetic oligonucleotide
  Sense strand starting at position 488 of SEQ ID NO: 1885027
agagucagucucuauccaa

SEQ ID NO: 2310445 - RNA, 19 nt, Artificial Sequence
  Description of Artificial Sequence: Synthetic oligonucleotide
  Antisense strand to SEQ ID NO: 2310444
uuggauagagacugacucu

SEQ ID NO: 2310446 - RNA, 19 nt, Artificial Sequence
  Description of Artificial Sequence: Synthetic oligonucleotide
  Sense strand starting at position 491 of SEQ ID NO: 1885027
gucagucucuauccaauga

SEQ ID NO: 2310447 - RNA, 19 nt, Artificial Sequence
  Description of Artificial Sequence: Synthetic oligonucleotide
  Antisense strand to SEQ ID NO: 2310446
ucauuggauagagacugac

SEQ ID NO: 2310448 - RNA, 19 nt, Artificial Sequence
  Description of Artificial Sequence: Synthetic oligonucleotide
  Sense strand starting at position 495 of SEQ ID NO: 1885027
gucucuauccaaugaaagg

SEQ ID NO: 2310449 - RNA, 19 nt, Artificial Sequence
  Description of Artificial Sequence: Synthetic oligonucleotide
  Antisense strand to SEQ ID NO: 2310448
ccuuucauuggauagagac

SEQ ID NO: 2310450 - RNA, 19 nt, Artificial Sequence
  Description of Artificial Sequence: Synthetic oligonucleotide
  Sense strand starting at position 553 of SEQ ID NO: 1885027
uaggacagugccuaaugau

SEQ ID NO: 2310451 - RNA, 19 nt, Artificial Sequence
  Description of Artificial Sequence: Synthetic oligonucleotide
  Antisense strand to SEQ ID NO: 2310450
aucauuaggcacuguccua

SEQ ID NO: 2310452 - RNA, 19 nt, Artificial Sequence
  Description of Artificial Sequence: Synthetic oligonucleotide
  Sense strand starting at position 639 of SEQ ID NO: 1885027
ggaaaucugugaucccauc

SEQ ID NO: 2310453 - RNA, 19 nt, Artificial Sequence
  Description of Artificial Sequence: Synthetic oligonucleotide
  Antisense strand to SEQ ID NO: 2310452
gaugggaucacagauuucc

SEQ ID NO: 2310454 - RNA, 19 nt, Artificial Sequence
  Description of Artificial Sequence: Synthetic oligonucleotide
  Sense strand starting at position 741 of SEQ ID NO: 1885027
ggaaauuguugaaggagug

SEQ ID NO: 2310455 - RNA, 19 nt, Artificial Sequence
  Description of Artificial Sequence: Synthetic oligonucleotide
  Antisense strand to SEQ ID NO: 2310454
cacuccuucaacaauuucc

SEQ ID NO: 2310456 - RNA, 19 nt, Artificial Sequence
  Description of Artificial Sequence: Synthetic oligonucleotide
  Sense strand starting at position 753 of SEQ ID NO: 1885027
aggagugcucauugaugug

SEQ ID NO: 2310457 - RNA, 19 nt, Artificial Sequence
  Description of Artificial Sequence: Synthetic oligonucleotide
  Antisense strand to SEQ ID NO: 2310456
cacaucaaugagcacuccu

SEQ ID NO: 2310458 - RNA, 19 nt, Artificial Sequence
  Description of Artificial Sequence: Synthetic oligonucleotide
  Sense strand starting at position 883 of SEQ ID NO: 1885027
accaaucgucuugaucuuu

SEQ ID NO: 2310459 - RNA, 19 nt, Artificial Sequence
  Description of Artificial Sequence: Synthetic oligonucleotide
  Antisense strand to SEQ ID NO: 2310458
aaagaucaagacgauuggu

SEQ ID NO: 2310460 - RNA, 19 nt, Artificial Sequence
  Description of Artificial Sequence: Synthetic oligonucleotide
  Sense strand starting at position 1062 of SEQ ID NO: 1885027
cugcuaucaguguaagacu

SEQ ID NO: 2310461 - RNA, 19 nt, Artificial Sequence
  Description of Artificial Sequence: Synthetic oligonucleotide
  Antisense strand to SEQ ID NO: 2310460
agucuuacacugauagcag

SEQ ID NO: 2310462 - RNA, 19 nt, Artificial Sequence
  Description of Artificial Sequence: Synthetic oligonucleotide
  Sense strand starting at position 1177 of SEQ ID NO: 1885027
ccacaagugcaauauuaag

SEQ ID NO: 2310463 - RNA, 19 nt, Artificial Sequence
  Description of Artificial Sequence: Synthetic oligonucleotide
  Antisense strand to SEQ ID NO: 2310462
cuuaauauugcacuugugg

SEQ ID NO: 2310464 - RNA, 19 nt, Artificial Sequence
  Description of Artificial Sequence: Synthetic oligonucleotide
  Sense strand starting at position 1246 of SEQ ID NO: 1885027
gugacuucccuccagaaca

SEQ ID NO: 2310465 - RNA, 19 nt, Artificial Sequence
  Description of Artificial Sequence: Synthetic oligonucleotide
  Antisense strand to SEQ ID NO: 2310464
uguucuggagggaagucac

SEQ ID NO: 2310466 - RNA, 19 nt, Artificial Sequence
  Description of Artificial Sequence: Synthetic oligonucleotide
  Sense strand starting at position 1272 of SEQ ID NO: 1885027
gcccauuccugaucuggau

SEQ ID NO: 2310467 - RNA, 19 nt, Artificial Sequence
  Description of Artificial Sequence: Synthetic oligonucleotide
  Antisense strand to SEQ ID NO: 2310466
auccagaucaggaaugggc

SEQ ID NO: 2310468 - RNA, 19 nt, Artificial Sequence
  Description of Artificial Sequence: Synthetic oligonucleotide
  Sense strand starting at position 1359 of SEQ ID NO: 1885027
ucaugagguucuguccaca

SEQ ID NO: 2310469 - RNA, 19 nt, Artificial Sequence
  Description of Artificial Sequence: Synthetic oligonucleotide
  Antisense strand to SEQ ID NO: 2310468
uguggacagaaccucauga

SEQ ID NO: 2310470 - RNA, 19 nt, Artificial Sequence
  Description of Artificial Sequence: Synthetic oligonucleotide
  Sense strand starting at position 1364 of SEQ ID NO: 1885027
agguucuguccacagacua

SEQ ID NO: 2310471 - RNA, 19 nt, Artificial Sequence
  Description of Artificial Sequence: Synthetic oligonucleotide
  Antisense strand to SEQ ID NO: 2310470
uagucuguggacagaaccu

SEQ ID NO: 2310472 - RNA, 19 nt, Artificial Sequence
  Description of Artificial Sequence: Synthetic oligonucleotide
  Sense strand starting at position 1555 of SEQ ID NO: 1885027
ugaugacucugggucccau

SEQ ID NO: 2310473 - RNA, 19 nt, Artificial Sequence
  Description of Artificial Sequence: Synthetic oligonucleotide
  Antisense strand to SEQ ID NO: 2310472
augggacccagagucauca

SEQ ID NO: 2310474 - RNA, 19 nt, Artificial Sequence
  Description of Artificial Sequence: Synthetic oligonucleotide
  Sense strand starting at position 1794 of SEQ ID NO: 1885027
cacucacacgacugauagu

SEQ ID NO: 2310475 - RNA, 19 nt, Artificial Sequence
  Description of Artificial Sequence: Synthetic oligonucleotide
  Antisense strand to SEQ ID NO: 2310474
acuaucagucgugugagug

SEQ ID NO: 2310476 - RNA, 19 nt, Artificial Sequence
  Description of Artificial Sequence: Synthetic oligonucleotide
  Sense strand starting at position 1858 of SEQ ID NO: 1885027
cguccuugggcagaauguu

SEQ ID NO: 2310477 - RNA, 19 nt, Artificial Sequence
  Description of Artificial Sequence: Synthetic oligonucleotide
  Antisense strand to SEQ ID NO: 2310476
aacauucugcccaaggacg

SEQ ID NO: 2310478 - RNA, 19 nt, Artificial Sequence
  Description of Artificial Sequence: Synthetic oligonucleotide
  Sense strand starting at position 2001 of SEQ ID NO: 1885027
cuuggaagugcggauaaga

SEQ ID NO: 2310479 - RNA, 19 nt, Artificial Sequence
  Description of Artificial Sequence: Synthetic oligonucleotide
  Antisense strand to SEQ ID NO: 2310478
ucuuauccgcacuuccaag

SEQ ID NO: 2310480 - RNA, 19 nt, Artificial Sequence
  Description of Artificial Sequence: Synthetic oligonucleotide
  Sense strand starting at position 2260 of SEQ ID NO: 1885027
guaguuuccagaggaaguc

SEQ ID NO: 2310481 - RNA, 19 nt, Artificial Sequence
  Description of Artificial Sequence: Synthetic oligonucleotide
  Antisense strand to SEQ ID NO: 2310480
gacuuccucuggaaacuac

SEQ ID NO: 2310482 - RNA, 19 nt, Artificial Sequence
  Description of Artificial Sequence: Synthetic oligonucleotide
  Sense strand starting at position 2406 of SEQ ID NO: 1885027
augcuuggugucugaagga

SEQ ID NO: 2310483 - RNA, 19 nt, Artificial Sequence
  Description of Artificial Sequence: Synthetic oligonucleotide
  Antisense strand to SEQ ID NO: 2310482
uccuucagacaccaagcau

SEQ ID NO: 2310484 - RNA, 19 nt, Artificial Sequence
  Description of Artificial Sequence: Synthetic oligonucleotide
  Sense strand starting at position 2497 of SEQ ID NO: 1885027
ggaagaagcccugguaaga

SEQ ID NO: 2310485 - RNA, 19 nt, Artificial Sequence
  Description of Artificial Sequence: Synthetic oligonucleotide
  Antisense strand to SEQ ID NO: 2310484
ucuuaccagggcuucuucc

SEQ ID NO: 2310486 - RNA, 19 nt, Artificial Sequence
  Description of Artificial Sequence: Synthetic oligonucleotide
  Sense strand starting at position 2705 of SEQ ID NO: 1885027
ccagcuaugugaccugaga

SEQ ID NO: 2310487 - RNA, 19 nt, Artificial Sequence
  Description of Artificial Sequence: Synthetic oligonucleotide
  Antisense strand to SEQ ID NO: 2310486
ucucaggucacauagcugg

SEQ ID NO: 2310488 - RNA, 19 nt, Artificial Sequence
  Description of Artificial Sequence: Synthetic oligonucleotide
  Sense strand starting at position 2707 of SEQ ID NO: 1885027
agcuaugugaccugagaca

SEQ ID NO: 2310489 - RNA, 19 nt, Artificial Sequence
  Description of Artificial Sequence: Synthetic oligonucleotide
  Antisense strand to SEQ ID NO: 2310488
ugucucaggucacauagcu

SEQ ID NO: 2310490 - RNA, 19 nt, Artificial Sequence
  Description of Artificial Sequence: Synthetic oligonucleotide
  Sense strand starting at position 2719 of SEQ ID NO: 1885027
ugagacaagucgcuuaacu

SEQ ID NO: 2310491 - RNA, 19 nt, Artificial Sequence
  Description of Artificial Sequence: Synthetic oligonucleotide
  Antisense strand to SEQ ID NO: 2310490
aguuaagcgacuugucuca

SEQ ID NO: 2310492 - RNA, 19 nt, Artificial Sequence
  Description of Artificial Sequence: Synthetic oligonucleotide
  Sense strand starting at position 2721 of SEQ ID NO: 1885027
agacaagucgcuuaacucu

SEQ ID NO: 2310493 - RNA, 19 nt, Artificial Sequence
  Description of Artificial Sequence: Synthetic oligonucleotide
  Antisense strand to SEQ ID NO: 2310492
agaguuaagcgacuugucu

SEQ ID NO: 2310494 - RNA, 19 nt, Artificial Sequence
  Description of Artificial Sequence: Synthetic oligonucleotide
  Sense strand starting at position 2822 of SEQ ID NO: 1885027
gucagccuuccauaaaugu

SEQ ID NO: 2310495 - RNA, 19 nt, Artificial Sequence
  Description of Artificial Sequence: Synthetic oligonucleotide
  Antisense strand to SEQ ID NO: 2310494
acauuuauggaaggcugac

SEQ ID NO: 2310496 - RNA, 19 nt, Artificial Sequence
  Description of Artificial Sequence: Synthetic oligonucleotide
  Sense strand starting at position 3010 of SEQ ID NO: 1885027
acaagcuauggccacauau

SEQ ID NO: 2310497 - RNA, 19 nt, Artificial Sequence
  Description of Artificial Sequence: Synthetic oligonucleotide
  Antisense strand to SEQ ID NO: 2310496
auauguggccauagcuugu

SEQ ID NO: 2310498 - RNA, 19 nt, Artificial Sequence
  Description of Artificial Sequence: Synthetic oligonucleotide
  Sense strand starting at position 3141 of SEQ ID NO: 1885027
auguccuauaggugguuaa

SEQ ID NO: 2310499 - RNA, 19 nt, Artificial Sequence
  Description of Artificial Sequence: Synthetic oligonucleotide
  Antisense strand to SEQ ID NO: 2310498
uuaaccaccuauaggacau

SEQ ID NO: 2310500 - RNA, 19 nt, Artificial Sequence
  Description of Artificial Sequence: Synthetic oligonucleotide
  Sense strand starting at position 3144 of SEQ ID NO: 1885027
uccuauaggugguuaagau

SEQ ID NO: 2310501 - RNA, 19 nt, Artificial Sequence
  Description of Artificial Sequence: Synthetic oligonucleotide
  Antisense strand to SEQ ID NO: 2310500
aucuuaaccaccuauagga

SEQ ID NO: 2310502 - RNA, 19 nt, Artificial Sequence
  Description of Artificial Sequence: Synthetic oligonucleotide
  Sense strand starting at position 3145 of SEQ ID NO: 1885027
ccuauaggugguuaagaug

SEQ ID NO: 2310503 - RNA, 19 nt, Artificial Sequence
  Description of Artificial Sequence: Synthetic oligonucleotide
  Antisense strand to SEQ ID NO: 2310502
caucuuaaccaccuauagg

SEQ ID NO: 2310504 - RNA, 19 nt, Artificial Sequence
  Description of Artificial Sequence: Synthetic oligonucleotide
  Sense strand starting at position 3151 of SEQ ID NO: 1885027
ggugguuaagaugguggau

SEQ ID NO: 2310505 - RNA, 19 nt, Artificial Sequence
  Description of Artificial Sequence: Synthetic oligonucleotide
  Antisense strand to SEQ ID NO: 2310504
auccaccaucuuaaccacc

SEQ ID NO: 2310506 - RNA, 19 nt, Artificial Sequence
  Description of Artificial Sequence: Synthetic oligonucleotide
  Sense strand starting at position 3183 of SEQ ID NO: 1885027
gcaaauguaagagggaauu

SEQ ID NO: 2310507 - RNA, 19 nt, Artificial Sequence
  Description of Artificial Sequence: Synthetic oligonucleotide
  Antisense strand to SEQ ID NO: 2310506
aauucccucuuacauuugc

SEQ ID NO: 2310508 - RNA, 19 nt, Artificial Sequence
  Description of Artificial Sequence: Synthetic oligonucleotide
  Sense strand starting at position 3208 of SEQ ID NO: 1885027
uuuaaugucuagccuaaag

SEQ ID NO: 2310509 - RNA, 19 nt, Artificial Sequence
  Description of Artificial Sequence: Synthetic oligonucleotide
  Antisense strand to SEQ ID NO: 2310508
cuuuaggcuagacauuaaa

SEQ ID NO: 2310510 - RNA, 19 nt, Artificial Sequence
  Description of Artificial Sequence: Synthetic oligonucleotide
  Sense strand starting at position 3327 of SEQ ID NO: 1885027
guggcauuccaaggcacaa

SEQ ID NO: 2310511 - RNA, 19 nt, Artificial Sequence
  Description of Artificial Sequence: Synthetic oligonucleotide
  Antisense strand to SEQ ID NO: 2310510
uugugccuuggaaugccac

SEQ ID NO: 2310512 - RNA, 19 nt, Artificial Sequence
  Description of Artificial Sequence: Synthetic oligonucleotide
  Sense strand starting at position 3451 of SEQ ID NO: 1885027
guaggucauaguugucaaa

SEQ ID NO: 2310513 - RNA, 19 nt, Artificial Sequence
  Description of Artificial Sequence: Synthetic oligonucleotide
  Antisense strand to SEQ ID NO: 2310512
uuugacaacuaugaccuac

SEQ ID NO: 2310514 - RNA, 19 nt, Artificial Sequence
  Description of Artificial Sequence: Synthetic oligonucleotide
  Sense strand starting at position 3453 of SEQ ID NO: 1885027
aggucauaguugucaaaga

SEQ ID NO: 2310515 - RNA, 19 nt, Artificial Sequence
  Description of Artificial Sequence: Synthetic oligonucleotide
  Antisense strand to SEQ ID NO: 2310514
ucuuugacaacuaugaccu

SEQ ID NO: 2310516 - RNA, 19 nt, Artificial Sequence
  Description of Artificial Sequence: Synthetic oligonucleotide
  Sense strand starting at position 3590 of SEQ ID NO: 1885027
cagcauguucccgaugaag

SEQ ID NO: 2310517 - RNA, 19 nt, Artificial Sequence
  Description of Artificial Sequence: Synthetic oligonucleotide
  Antisense strand to SEQ ID NO: 2310516
cuucaucgggaacaugcug

SEQ ID NO: 2310518 - RNA, 19 nt, Artificial Sequence
  Description of Artificial Sequence: Synthetic oligonucleotide
  Sense strand starting at position 3893 of SEQ ID NO: 1885027
gcucgaacaccucaggaaa

SEQ ID NO: 2310519 - RNA, 19 nt, Artificial Sequence
  Description of Artificial Sequence: Synthetic oligonucleotide
  Antisense strand to SEQ ID NO: 2310518
uuuccugagguguucgagc

SEQ ID NO: 2310520 - RNA, 19 nt, Artificial Sequence
  Description of Artificial Sequence: Synthetic oligonucleotide
  Sense strand starting at position 132 of SEQ ID NO: 1885028
ugaccucccuguuuaguga

SEQ ID NO: 2310521 - RNA, 19 nt, Artificial Sequence
  Description of Artificial Sequence: Synthetic oligonucleotide
  Antisense strand to SEQ ID NO: 2310520
ucacuaaacagggagguca

SEQ ID NO: 2310522 - RNA, 19 nt, Artificial Sequence
  Description of Artificial Sequence: Synthetic oligonucleotide
  Sense strand starting at position 135 of SEQ ID NO: 1885028
ccucccuguuuagugagaa

SEQ ID NO: 2310523 - RNA, 19 nt, Artificial Sequence
  Description of Artificial Sequence: Synthetic oligonucleotide
  Antisense strand to SEQ ID NO: 2310522
uucucacuaaacagggagg

SEQ ID NO: 2310524 - RNA, 19 nt, Artificial Sequence
  Description of Artificial Sequence: Synthetic oligonucleotide
  Sense strand starting at position 143 of SEQ ID NO: 1885028
uuuagugagaaccgaguua

SEQ ID NO: 2310525 - RNA, 19 nt, Artificial Sequence
  Description of Artificial Sequence: Synthetic oligonucleotide
  Antisense strand to SEQ ID NO: 2310524
uaacucgguucucacuaaa

SEQ ID NO: 2310526 - RNA, 19 nt, Artificial Sequence
  Description of Artificial Sequence: Synthetic oligonucleotide
  Sense strand starting at position 148 of SEQ ID NO: 1885028
ugagaaccgaguuauucuu

SEQ ID NO: 2310527 - RNA, 19 nt, Artificial Sequence
  Description of Artificial Sequence: Synthetic oligonucleotide
  Antisense strand to SEQ ID NO: 2310526
aagaauaacucgguucuca

SEQ ID NO: 2310528 - RNA, 19 nt, Artificial Sequence
  Description of Artificial Sequence: Synthetic oligonucleotide
  Sense strand starting at position 171 of SEQ ID NO: 1885028
uugacuugucacuggccaa

SEQ ID NO: 2310529 - RNA, 19 nt, Artificial Sequence
  Description of Artificial Sequence: Synthetic oligonucleotide
  Antisense strand to SEQ ID NO: 2310528
uuggccagugacaagucaa

SEQ ID NO: 2310530 - RNA, 19 nt, Artificial Sequence
  Description of Artificial Sequence: Synthetic oligonucleotide
  Sense strand starting at position 174 of SEQ ID NO: 1885028
acuugucacuggccaaaga

SEQ ID NO: 2310531 - RNA, 19 nt, Artificial Sequence
  Description of Artificial Sequence: Synthetic oligonucleotide
  Antisense strand to SEQ ID NO: 2310530
ucuuuggccagugacaagu

SEQ ID NO: 2310532 - RNA, 19 nt, Artificial Sequence
  Description of Artificial Sequence: Synthetic oligonucleotide
  Sense strand starting at position 235 of SEQ ID NO: 1885028
acuuucugaggcugagaga

SEQ ID NO: 2310533 - RNA, 19 nt, Artificial Sequence
  Description of Artificial Sequence: Synthetic oligonucleotide
  Antisense strand to SEQ ID NO: 2310532
ucucucagccucagaaagu

SEQ ID NO: 2310534 - RNA, 19 nt, Artificial Sequence
  Description of Artificial Sequence: Synthetic oligonucleotide
  Sense strand starting at position 266 of SEQ ID NO: 1885028
cccucagauugggcucaaa

SEQ ID NO: 2310535 - RNA, 19 nt, Artificial Sequence
  Description of Artificial Sequence: Synthetic oligonucleotide
  Antisense strand to SEQ ID NO: 2310534
uuugagcccaaucugaggg

SEQ ID NO: 2310536 - RNA, 19 nt, Artificial Sequence
  Description of Artificial Sequence: Synthetic oligonucleotide
  Sense strand starting at position 330 of SEQ ID NO: 1885028
gauguagacuucuuaggaa

SEQ ID NO: 2310537 - RNA, 19 nt, Artificial Sequence
  Description of Artificial Sequence: Synthetic oligonucleotide
  Antisense strand to SEQ ID NO: 2310536
uuccuaagaagucuacauc

SEQ ID NO: 2310538 - RNA, 19 nt, Artificial Sequence
  Description of Artificial Sequence: Synthetic oligonucleotide
  Sense strand starting at position 410 of SEQ ID NO: 1885028
gguuaauguacuggccaaa

SEQ ID NO: 2310539 - RNA, 19 nt, Artificial Sequence
  Description of Artificial Sequence: Synthetic oligonucleotide
  Antisense strand to SEQ ID NO: 2310538
uuuggccaguacauuaacc

SEQ ID NO: 2310540 - RNA, 19 nt, Artificial Sequence
  Description of Artificial Sequence: Synthetic oligonucleotide
  Sense strand starting at position 465 of SEQ ID NO: 1885028
caaggagugugguuccaga

SEQ ID NO: 2310541 - RNA, 19 nt, Artificial Sequence
  Description of Artificial Sequence: Synthetic oligonucleotide
  Antisense strand to SEQ ID NO: 2310540
ucuggaaccacacuccuug

SEQ ID NO: 2310542 - RNA, 19 nt, Artificial Sequence
  Description of Artificial Sequence: Synthetic oligonucleotide
  Sense strand starting at position 476 of SEQ ID NO: 1885028
guuccagagucuguagaca

SEQ ID NO: 2310543 - RNA, 19 nt, Artificial Sequence
  Description of Artificial Sequence: Synthetic oligonucleotide
  Antisense strand to SEQ ID NO: 2310542
ugucuacagacucuggaac

SEQ ID NO: 2310544 - RNA, 19 nt, Artificial Sequence
  Description of Artificial Sequence: Synthetic oligonucleotide
  Sense strand starting at position 960 of SEQ ID NO: 1885028
auaguugucccuuaggcaa

SEQ ID NO: 2310545 - RNA, 19 nt, Artificial Sequence
  Description of Artificial Sequence: Synthetic oligonucleotide
  Antisense strand to SEQ ID NO: 2310544
uugccuaagggacaacuau

SEQ ID NO: 2310546 - RNA, 19 nt, Artificial Sequence
  Description of Artificial Sequence: Synthetic oligonucleotide
  Sense strand starting at position 1007 of SEQ ID NO: 1885028
cguaauuugacuuggccuu

SEQ ID NO: 2310547 - RNA, 19 nt, Artificial Sequence
  Description of Artificial Sequence: Synthetic oligonucleotide
  Antisense strand to SEQ ID NO: 2310546
aaggccaagucaaauuacg

SEQ ID NO: 2310548 - RNA, 19 nt, Artificial Sequence
  Description of Artificial Sequence: Synthetic oligonucleotide
  Sense strand starting at position 1203 of SEQ ID NO: 1885028
gugcuuugaggagagcaga

SEQ ID NO: 2310549 - RNA, 19 nt, Artificial Sequence
  Description of Artificial Sequence: Synthetic oligonucleotide
  Antisense strand to SEQ ID NO: 2310548
ucugcucuccucaaagcac

SEQ ID NO: 2310550 - RNA, 19 nt, Artificial Sequence
  Description of Artificial Sequence: Synthetic oligonucleotide
  Sense strand starting at position 2103 of SEQ ID NO: 1885028
caggcaguuguugagguua

SEQ ID NO: 2310551 - RNA, 19 nt, Artificial Sequence
  Description of Artificial Sequence: Synthetic oligonucleotide
  Antisense strand to SEQ ID NO: 2310550
uaaccucaacaacugccug

SEQ ID NO: 2310552 - RNA, 19 nt, Artificial Sequence
  Description of Artificial Sequence: Synthetic oligonucleotide
  Sense strand starting at position 2108 of SEQ ID NO: 1885028
aguuguugagguuaugcau

SEQ ID NO: 2310553 - RNA, 19 nt, Artificial Sequence
  Description of Artificial Sequence: Synthetic oligonucleotide
  Antisense strand to SEQ ID NO: 2310552
augcauaaccucaacaacu

SEQ ID NO: 2310554 - RNA, 19 nt, Artificial Sequence
  Description of Artificial Sequence: Synthetic oligonucleotide
  Sense strand starting at position 2316 of SEQ ID NO: 1885028
cagccauuaggauaguuau

SEQ ID NO: 2310555 - RNA, 19 nt, Artificial Sequence
  Description of Artificial Sequence: Synthetic oligonucleotide
  Antisense strand to SEQ ID NO: 2310554
auaacuauccuaauggcug

SEQ ID NO: 2310556 - RNA, 19 nt, Artificial Sequence
  Description of Artificial Sequence: Synthetic oligonucleotide
  Sense strand starting at position 2344 of SEQ ID NO: 1885028
cuggcucugucacuacaaa

SEQ ID NO: 2310557 - RNA, 19 nt, Artificial Sequence
  Description of Artificial Sequence: Synthetic oligonucleotide
  Antisense strand to SEQ ID NO: 2310556
uuuguagugacagagccag

SEQ ID NO: 2310558 - RNA, 19 nt, Artificial Sequence
  Description of Artificial Sequence: Synthetic oligonucleotide
  Sense strand starting at position 2384 of SEQ ID NO: 1885028
ucccgaaucagauggucuu

SEQ ID NO: 2310559 - RNA, 19 nt, Artificial Sequence
  Description of Artificial Sequence: Synthetic oligonucleotide
  Antisense strand to SEQ ID NO: 2310558
aagaccaucugauucggga

SEQ ID NO: 2310560 - RNA, 19 nt, Artificial Sequence
  Description of Artificial Sequence: Synthetic oligonucleotide
  Sense strand starting at position 2385 of SEQ ID NO: 1885028
cccgaaucagauggucuua

SEQ ID NO: 2310561 - RNA, 19 nt, Artificial Sequence
  Description of Artificial Sequence: Synthetic oligonucleotide
  Antisense strand to SEQ ID NO: 2310560
uaagaccaucugauucggg

SEQ ID NO: 2310562 - RNA, 19 nt, Artificial Sequence
  Description of Artificial Sequence: Synthetic oligonucleotide
  Sense strand starting at position 2387 of SEQ ID NO: 1885028
cgaaucagauggucuuaag

SEQ ID NO: 2310563 - RNA, 19 nt, Artificial Sequence
  Description of Artificial Sequence: Synthetic oligonucleotide
  Antisense strand to SEQ ID NO: 2310562
cuuaagaccaucugauucg

SEQ ID NO: 2310564 - RNA, 19 nt, Artificial Sequence
  Description of Artificial Sequence: Synthetic oligonucleotide
  Sense strand starting at position 2398 of SEQ ID NO: 1885028
gucuuaagacaguguauca

SEQ ID NO: 2310565 - RNA, 19 nt, Artificial Sequence
  Description of Artificial Sequence: Synthetic oligonucleotide
  Antisense strand to SEQ ID NO: 2310564
ugauacacugucuuaagac

SEQ ID NO: 2310566 - RNA, 19 nt, Artificial Sequence
  Description of Artificial Sequence: Synthetic oligonucleotide
  Sense strand starting at position 2424 of SEQ ID NO: 1885028
ugacuuugaugggcacaga

SEQ ID NO: 2310567 - RNA, 19 nt, Artificial Sequence
  Description of Artificial Sequence: Synthetic oligonucleotide
  Antisense strand to SEQ ID NO: 2310566
ucugugcccaucaaaguca

SEQ ID NO: 2310568 - RNA, 19 nt, Artificial Sequence
  Description of Artificial Sequence: Synthetic oligonucleotide
  Sense strand starting at position 2517 of SEQ ID NO: 1885028
ccuuaacaugcuugucaga

SEQ ID NO: 2310569 - RNA, 19 nt, Artificial Sequence
  Description of Artificial Sequence: Synthetic oligonucleotide
  Antisense strand to SEQ ID NO: 2310568
ucugacaagcauguuaagg

SEQ ID NO: 2310570 - RNA, 19 nt, Artificial Sequence
  Description of Artificial Sequence: Synthetic oligonucleotide
  Sense strand starting at position 2524 of SEQ ID NO: 1885028
augcuugucagaggaaagu

SEQ ID NO: 2310571 - RNA, 19 nt, Artificial Sequence
  Description of Artificial Sequence: Synthetic oligonucleotide
  Antisense strand to SEQ ID NO: 2310570
acuuuccucugacaagcau

SEQ ID NO: 2310572 - RNA, 19 nt, Artificial Sequence
  Description of Artificial Sequence: Synthetic oligonucleotide
  Sense strand starting at position 2776 of SEQ ID NO: 1885028
gugucagucagugaucuca

SEQ ID NO: 2310573 - RNA, 19 nt, Artificial Sequence
  Description of Artificial Sequence: Synthetic oligonucleotide
  Antisense strand to SEQ ID NO: 2310572
ugagaucacugacugacac

SEQ ID NO: 2310574 - RNA, 19 nt, Artificial Sequence
  Description of Artificial Sequence: Synthetic oligonucleotide
  Sense strand starting at position 2778 of SEQ ID NO: 1885028
gucagucagugaucucaga

SEQ ID NO: 2310575 - RNA, 19 nt, Artificial Sequence
  Description of Artificial Sequence: Synthetic oligonucleotide
  Antisense strand to SEQ ID NO: 2310574
ucugagaucacugacugac

SEQ ID NO: 2310576 - RNA, 19 nt, Artificial Sequence
  Description of Artificial Sequence: Synthetic oligonucleotide
  Sense strand starting at position 2801 of SEQ ID NO: 1885028
gcagaucuauuucucgcau

SEQ ID NO: 2310577 - RNA, 19 nt, Artificial Sequence
  Description of Artificial Sequence: Synthetic oligonucleotide
  Antisense strand to SEQ ID NO: 2310576
augcgagaaauagaucugc

SEQ ID NO: 2310578 - RNA, 19 nt, Artificial Sequence
  Description of Artificial Sequence: Synthetic oligonucleotide
  Sense strand starting at position 2993 of SEQ ID NO: 1885028
gacugaucuucuguuccag

SEQ ID NO: 2310579 - RNA, 19 nt, Artificial Sequence
  Description of Artificial Sequence: Synthetic oligonucleotide
  Antisense strand to SEQ ID NO: 2310578
cuggaacagaagaucaguc

SEQ ID NO: 2310580 - RNA, 19 nt, Artificial Sequence
  Description of Artificial Sequence: Synthetic oligonucleotide
  Sense strand starting at position 3001 of SEQ ID NO: 1885028
uucuguuccagccagggaa

SEQ ID NO: 2310581 - RNA, 19 nt, Artificial Sequence
  Description of Artificial Sequence: Synthetic oligonucleotide
  Antisense strand to SEQ ID NO: 2310580
uucccuggcuggaacagaa

SEQ ID NO: 2310582 - RNA, 19 nt, Artificial Sequence
  Description of Artificial Sequence: Synthetic oligonucleotide
  Sense strand starting at position 3036 of SEQ ID NO: 1885028
agaggcuugcuccaggauu

SEQ ID NO: 2310583 - RNA, 19 nt, Artificial Sequence
  Description of Artificial Sequence: Synthetic oligonucleotide
  Antisense strand to SEQ ID NO: 2310582
aauccuggagcaagccucu

SEQ ID NO: 2310584 - RNA, 19 nt, Artificial Sequence
  Description of Artificial Sequence: Synthetic oligonucleotide
  Sense strand starting at position 3211 of SEQ ID NO: 1885028
cuuguucucuucccagaca

SEQ ID NO: 2310585 - RNA, 19 nt, Artificial Sequence
  Description of Artificial Sequence: Synthetic oligonucleotide
  Antisense strand to SEQ ID NO: 2310584
ugucugggaagagaacaag

SEQ ID NO: 2310586 - RNA, 19 nt, Artificial Sequence
  Description of Artificial Sequence: Synthetic oligonucleotide
  Sense strand starting at position 3244 of SEQ ID NO: 1885028
uuggcugucugaguaaaca

SEQ ID NO: 2310587 - RNA, 19 nt, Artificial Sequence
  Description of Artificial Sequence: Synthetic oligonucleotide
  Antisense strand to SEQ ID NO: 2310586
uguuuacucagacagccaa

SEQ ID NO: 2310588 - RNA, 19 nt, Artificial Sequence
  Description of Artificial Sequence: Synthetic oligonucleotide
  Sense strand starting at position 3276 of SEQ ID NO: 1885028
uugggauucuaccuaauag

SEQ ID NO: 2310589 - RNA, 19 nt, Artificial Sequence
  Description of Artificial Sequence: Synthetic oligonucleotide
  Antisense strand to SEQ ID NO: 2310588
cuauuagguagaaucccaa

SEQ ID NO: 2310590 - RNA, 19 nt, Artificial Sequence
  Description of Artificial Sequence: Synthetic oligonucleotide
  Sense strand starting at position 3837 of SEQ ID NO: 1885028
auauacauguggguaugaa

SEQ ID NO: 2310591 - RNA, 19 nt, Artificial Sequence
  Description of Artificial Sequence: Synthetic oligonucleotide
  Antisense strand to SEQ ID NO: 2310590
uucauacccacauguauau

SEQ ID NO: 2310592 - RNA, 19 nt, Artificial Sequence
  Description of Artificial Sequence: Synthetic oligonucleotide
  Sense strand starting at position 3870 of SEQ ID NO: 1885028
ggagccauacuguaccuaa

SEQ ID NO: 2310593 - RNA, 19 nt, Artificial Sequence
  Description of Artificial Sequence: Synthetic oligonucleotide
  Antisense strand to SEQ ID NO: 2310592
uuagguacaguauggcucc

SEQ ID NO: 2310594 - RNA, 19 nt, Artificial Sequence
  Description of Artificial Sequence: Synthetic oligonucleotide
  Sense strand starting at position 3880 of SEQ ID NO: 1885028
uguaccuaaugguuuauaa

SEQ ID NO: 2310595 - RNA, 19 nt, Artificial Sequence
  Description of Artificial Sequence: Synthetic oligonucleotide
  Antisense strand to SEQ ID NO: 2310594
uuauaaaccauuagguaca

SEQ ID NO: 2310596 - RNA, 19 nt, Artificial Sequence
  Description of Artificial Sequence: Synthetic oligonucleotide
  Sense strand starting at position 3943 of SEQ ID NO: 1885028
cuagacaugucuuugaauu

SEQ ID NO: 2310597 - RNA, 19 nt, Artificial Sequence
  Description of Artificial Sequence: Synthetic oligonucleotide
  Antisense strand to SEQ ID NO: 2310596
aauucaaagacaugucuag

SEQ ID NO: 2310598 - RNA, 19 nt, Artificial Sequence
  Description of Artificial Sequence: Synthetic oligonucleotide
  Sense strand starting at position 3978 of SEQ ID NO: 1885028
ugcucuacuuauuuaguga

SEQ ID NO: 2310599 - RNA, 19 nt, Artificial Sequence
  Description of Artificial Sequence: Synthetic oligonucleotide
  Antisense strand to SEQ ID NO: 2310598
ucacuaaauaaguagagca

SEQ ID NO: 2310600 - RNA, 19 nt, Artificial Sequence
  Description of Artificial Sequence: Synthetic oligonucleotide
  Sense strand starting at position 250 of SEQ ID NO: 1885029
gacggaucuguggguggaa

SEQ ID NO: 2310601 - RNA, 19 nt, Artificial Sequence
  Description of Artificial Sequence: Synthetic oligonucleotide
  Antisense strand to SEQ ID NO: 2310600
uuccacccacagauccguc

SEQ ID NO: 2310602 - RNA, 19 nt, Artificial Sequence
  Description of Artificial Sequence: Synthetic oligonucleotide
  Sense strand starting at position 284 of SEQ ID NO: 1885029
uccagugacucaucccgau

SEQ ID NO: 2310603 - RNA, 19 nt, Artificial Sequence
  Description of Artificial Sequence: Synthetic oligonucleotide
  Antisense strand to SEQ ID NO: 2310602
aucgggaugagucacugga

SEQ ID NO: 2310604 - RNA, 19 nt, Artificial Sequence
  Description of Artificial Sequence: Synthetic oligonucleotide
  Sense strand starting at position 288 of SEQ ID NO: 1885029
gugacucaucccgauucuu

SEQ ID NO: 2310605 - RNA, 19 nt, Artificial Sequence
  Description of Artificial Sequence: Synthetic oligonucleotide
  Antisense strand to SEQ ID NO: 2310604
aagaaucgggaugagucac

SEQ ID NO: 2310606 - RNA, 19 nt, Artificial Sequence
  Description of Artificial Sequence: Synthetic oligonucleotide
  Sense strand starting at position 298 of SEQ ID NO: 1885029
ccgauucuugcacauucua

SEQ ID NO: 2310607 - RNA, 19 nt, Artificial Sequence
  Description of Artificial Sequence: Synthetic oligonucleotide
  Antisense strand to SEQ ID NO: 2310606
uagaaugugcaagaaucgg

SEQ ID NO: 2310608 - RNA, 19 nt, Artificial Sequence
  Description of Artificial Sequence: Synthetic oligonucleotide
  Sense strand starting at position 351 of SEQ ID NO: 1885029
uuaagagcgugacuugaua

SEQ ID NO: 2310609 - RNA, 19 nt, Artificial Sequence
  Description of Artificial Sequence: Synthetic oligonucleotide
  Antisense strand to SEQ ID NO: 2310608
uaucaagucacgcucuuaa

SEQ ID NO: 2310610 - RNA, 19 nt, Artificial Sequence
  Description of Artificial Sequence: Synthetic oligonucleotide
  Sense strand starting at position 461 of SEQ ID NO: 1885029
aggacaggguuucuuaauu

SEQ ID NO: 2310611 - RNA, 19 nt, Artificial Sequence
  Description of Artificial Sequence: Synthetic oligonucleotide
  Antisense strand to SEQ ID NO: 2310610
aauuaagaaacccuguccu

SEQ ID NO: 2310612 - RNA, 19 nt, Artificial Sequence
  Description of Artificial Sequence: Synthetic oligonucleotide
  Sense strand starting at position 489 of SEQ ID NO: 1885029
uuaauauguugggucugau

SEQ ID NO: 2310613 - RNA, 19 nt, Artificial Sequence
  Description of Artificial Sequence: Synthetic oligonucleotide
  Antisense strand to SEQ ID NO: 2310612
aucagacccaacauauuaa

SEQ ID NO: 2310614 - RNA, 19 nt, Artificial Sequence
  Description of Artificial Sequence: Synthetic oligonucleotide
  Sense strand starting at position 492 of SEQ ID NO: 1885029
auauguugggucugauaau

SEQ ID NO: 2310615 - RNA, 19 nt, Artificial Sequence
  Description of Artificial Sequence: Synthetic oligonucleotide
  Antisense strand to SEQ ID NO: 2310614
auuaucagacccaacauau

SEQ ID NO: 2310616 - RNA, 19 nt, Artificial Sequence
  Description of Artificial Sequence: Synthetic oligonucleotide
  Sense strand starting at position 663 of SEQ ID NO: 1885029
gcaaaucacuccuuguuga

SEQ ID NO: 2310617 - RNA, 19 nt, Artificial Sequence
  Description of Artificial Sequence: Synthetic oligonucleotide
  Antisense strand to SEQ ID NO: 2310616
ucaacaaggagugauuugc

SEQ ID NO: 2310618 - RNA, 19 nt, Artificial Sequence
  Description of Artificial Sequence: Synthetic oligonucleotide
  Sense strand starting at position 679 of SEQ ID NO: 1885029
ugagaaccauuguuguaga

SEQ ID NO: 2310619 - RNA, 19 nt, Artificial Sequence
  Description of Artificial Sequence: Synthetic oligonucleotide
  Antisense strand to SEQ ID NO: 2310618
ucuacaacaaugguucuca

SEQ ID NO: 2310620 - RNA, 19 nt, Artificial Sequence
  Description of Artificial Sequence: Synthetic oligonucleotide
  Sense strand starting at position 790 of SEQ ID NO: 1885029
ccauuuaagucagggaaug

SEQ ID NO: 2310621 - RNA, 19 nt, Artificial Sequence
  Description of Artificial Sequence: Synthetic oligonucleotide
  Antisense strand to SEQ ID NO: 2310620
cauucccugacuuaaaugg

SEQ ID NO: 2310622 - RNA, 19 nt, Artificial Sequence
  Description of Artificial Sequence: Synthetic oligonucleotide
  Sense strand starting at position 800 of SEQ ID NO: 1885029
cagggaaugcugggauguu

SEQ ID NO: 2310623 - RNA, 19 nt, Artificial Sequence
  Description of Artificial Sequence: Synthetic oligonucleotide
  Antisense strand to SEQ ID NO: 2310622
aacaucccagcauucccug

SEQ ID NO: 2310624 - RNA, 19 nt, Artificial Sequence
  Description of Artificial Sequence: Synthetic oligonucleotide
  Sense strand starting at position 1187 of SEQ ID NO: 1885029
ugcagaaauguguauugga

SEQ ID NO: 2310625 - RNA, 19 nt, Artificial Sequence
  Description of Artificial Sequence: Synthetic oligonucleotide
  Antisense strand to SEQ ID NO: 2310624
uccaauacacauuucugca

SEQ ID NO: 2310626 - RNA, 19 nt, Artificial Sequence
  Description of Artificial Sequence: Synthetic oligonucleotide
  Sense strand starting at position 1425 of SEQ ID NO: 1885029
aagucugccguuuaaauaa

SEQ ID NO: 2310627 - RNA, 19 nt, Artificial Sequence
  Description of Artificial Sequence: Synthetic oligonucleotide
  Antisense strand to SEQ ID NO: 2310626
uuauuuaaacggcagacuu

SEQ ID NO: 2310628 - RNA, 19 nt, Artificial Sequence
  Description of Artificial Sequence: Synthetic oligonucleotide
  Sense strand starting at position 1591 of SEQ ID NO: 1885029
agggacuauuuguagaaga

SEQ ID NO: 2310629 - RNA, 19 nt, Artificial Sequence
  Description of Artificial Sequence: Synthetic oligonucleotide
  Antisense strand to SEQ ID NO: 2310628
ucuucuacaaauagucccu

SEQ ID NO: 2310630 - RNA, 19 nt, Artificial Sequence
  Description of Artificial Sequence: Synthetic oligonucleotide
  Sense strand starting at position 1618 of SEQ ID NO: 1885029
ggaacaguggcugggaaau

SEQ ID NO: 2310631 - RNA, 19 nt, Artificial Sequence
  Description of Artificial Sequence: Synthetic oligonucleotide
  Antisense strand to SEQ ID NO: 2310630
auuucccagccacuguucc

SEQ ID NO: 2310632 - RNA, 19 nt, Artificial Sequence
  Description of Artificial Sequence: Synthetic oligonucleotide
  Sense strand starting at position 1827 of SEQ ID NO: 1885029
auagaauugcccuguagaa

SEQ ID NO: 2310633 - RNA, 19 nt, Artificial Sequence
  Description of Artificial Sequence: Synthetic oligonucleotide
  Antisense strand to SEQ ID NO: 2310632
uucuacagggcaauucuau

SEQ ID NO: 2310634 - RNA, 19 nt, Artificial Sequence
  Description of Artificial Sequence: Synthetic oligonucleotide
  Sense strand starting at position 1829 of SEQ ID NO: 1885029
agaauugcccuguagaauu

SEQ ID NO: 2310635 - RNA, 19 nt, Artificial Sequence
  Description of Artificial Sequence: Synthetic oligonucleotide
  Antisense strand to SEQ ID NO: 2310634
aauucuacagggcaauucu

SEQ ID NO: 2310636 - RNA, 19 nt, Artificial Sequence
  Description of Artificial Sequence: Synthetic oligonucleotide
  Sense strand starting at position 2228 of SEQ ID NO: 1885029
cugagaucugccgagucau

SEQ ID NO: 2310637 - RNA, 19 nt, Artificial Sequence
  Description of Artificial Sequence: Synthetic oligonucleotide
  Antisense strand to SEQ ID NO: 2310636
augacucggcagaucucag

SEQ ID NO: 2310638 - RNA, 19 nt, Artificial Sequence
  Description of Artificial Sequence: Synthetic oligonucleotide
  Sense strand starting at position 2331 of SEQ ID NO: 1885029
ccgucauuaccucaaaugu

SEQ ID NO: 2310639 - RNA, 19 nt, Artificial Sequence
  Description of Artificial Sequence: Synthetic oligonucleotide
  Antisense strand to SEQ ID NO: 2310638
acauuugagguaaugacgg

SEQ ID NO: 2310640 - RNA, 19 nt, Artificial Sequence
  Description of Artificial Sequence: Synthetic oligonucleotide
  Sense strand starting at position 2821 of SEQ ID NO: 1885029
ggcgauucugcggagggau

SEQ ID NO: 2310641 - RNA, 19 nt, Artificial Sequence
  Description of Artificial Sequence: Synthetic oligonucleotide
  Antisense strand to SEQ ID NO: 2310640
aucccuccgcagaaucgcc

SEQ ID NO: 2310642 - RNA, 19 nt, Artificial Sequence
  Description of Artificial Sequence: Synthetic oligonucleotide
  Sense strand starting at position 2822 of SEQ ID NO: 1885029
gcgauucugcggagggauc

SEQ ID NO: 2310643 - RNA, 19 nt, Artificial Sequence
  Description of Artificial Sequence: Synthetic oligonucleotide
  Antisense strand to SEQ ID NO: 2310642
gaucccuccgcagaaucgc

SEQ ID NO: 2310644 - RNA, 19 nt, Artificial Sequence
  Description of Artificial Sequence: Synthetic oligonucleotide
  Sense strand starting at position 2852 of SEQ ID NO: 1885029
gugaacgccgaugauuaua

SEQ ID NO: 2310645 - RNA, 19 nt, Artificial Sequence
  Description of Artificial Sequence: Synthetic oligonucleotide
  Antisense strand to SEQ ID NO: 2310644
uauaaucaucggcguucac

SEQ ID NO: 2310646 - RNA, 19 nt, Artificial Sequence
  Description of Artificial Sequence: Synthetic oligonucleotide
  Sense strand starting at position 2854 of SEQ ID NO: 1885029
gaacgccgaugauuauaua

SEQ ID NO: 2310647 - RNA, 19 nt, Artificial Sequence
  Description of Artificial Sequence: Synthetic oligonucleotide
  Antisense strand to SEQ ID NO: 2310646
uauauaaucaucggcguuc

SEQ ID NO: 2310648 - RNA, 19 nt, Artificial Sequence
  Description of Artificial Sequence: Synthetic oligonucleotide
  Sense strand starting at position 2912 of SEQ ID NO: 1885029
cgggauuugggucgcaguu

SEQ ID NO: 2310649 - RNA, 19 nt, Artificial Sequence
  Description of Artificial Sequence: Synthetic oligonucleotide
  Antisense strand to SEQ ID NO: 2310648
aacugcgacccaaaucccg

SEQ ID NO: 2310650 - RNA, 19 nt, Artificial Sequence
  Description of Artificial Sequence: Synthetic oligonucleotide
  Sense strand starting at position 3124 of SEQ ID NO: 1885029
ccgagucuugaauggaaga

SEQ ID NO: 2310651 - RNA, 19 nt, Artificial Sequence
  Description of Artificial Sequence: Synthetic oligonucleotide
  Antisense strand to SEQ ID NO: 2310650
ucuuccauucaagacucgg

SEQ ID NO: 2310652 - RNA, 19 nt, Artificial Sequence
  Description of Artificial Sequence: Synthetic oligonucleotide
  Sense strand starting at position 3240 of SEQ ID NO: 1885029
cucuuauucgggugagaug

SEQ ID NO: 2310653 - RNA, 19 nt, Artificial Sequence
  Description of Artificial Sequence: Synthetic oligonucleotide
  Antisense strand to SEQ ID NO: 2310652
caucucacccgaauaagag

SEQ ID NO: 2310654 - RNA, 19 nt, Artificial Sequence
  Description of Artificial Sequence: Synthetic oligonucleotide
  Sense strand starting at position 3277 of SEQ ID NO: 1885029
ggacccugacgugaaguuu

SEQ ID NO: 2310655 - RNA, 19 nt, Artificial Sequence
  Description of Artificial Sequence: Synthetic oligonucleotide
  Antisense strand to SEQ ID NO: 2310654
aaacuucacgucagggucc

SEQ ID NO: 2310656 - RNA, 19 nt, Artificial Sequence
  Description of Artificial Sequence: Synthetic oligonucleotide
  Sense strand starting at position 3288 of SEQ ID NO: 1885029
ugaaguuugucacugacug

SEQ ID NO: 2310657 - RNA, 19 nt, Artificial Sequence
  Description of Artificial Sequence: Synthetic oligonucleotide
  Antisense strand to SEQ ID NO: 2310656
cagucagugacaaacuuca

SEQ ID NO: 2310658 - RNA, 19 nt, Artificial Sequence
  Description of Artificial Sequence: Synthetic oligonucleotide
  Sense strand starting at position 3292 of SEQ ID NO: 1885029
guuugucacugacuggaga

SEQ ID NO: 2310659 - RNA, 19 nt, Artificial Sequence
  Description of Artificial Sequence: Synthetic oligonucleotide
  Antisense strand to SEQ ID NO: 2310658
ucuccagucagugacaaac

SEQ ID NO: 2310660 - RNA, 19 nt, Artificial Sequence
  Description of Artificial Sequence: Synthetic oligonucleotide
  Sense strand starting at position 3293 of SEQ ID NO: 1885029
uuugucacugacuggagaa

SEQ ID NO: 2310661 - RNA, 19 nt, Artificial Sequence
  Description of Artificial Sequence: Synthetic oligonucleotide
  Antisense strand to SEQ ID NO: 2310660
uucuccagucagugacaaa

SEQ ID NO: 2310662 - RNA, 19 nt, Artificial Sequence
  Description of Artificial Sequence: Synthetic oligonucleotide
  Sense strand starting at position 3505 of SEQ ID NO: 1885029
aggguaggcucuccugaau

SEQ ID NO: 2310663 - RNA, 19 nt, Artificial Sequence
  Description of Artificial Sequence: Synthetic oligonucleotide
  Antisense strand to SEQ ID NO: 2310662
auucaggagagccuacccu

SEQ ID NO: 2310664 - RNA, 19 nt, Artificial Sequence
  Description of Artificial Sequence: Synthetic oligonucleotide
  Sense strand starting at position 3508 of SEQ ID NO: 1885029
guaggcucuccugaaucga

SEQ ID NO: 2310665 - RNA, 19 nt, Artificial Sequence
  Description of Artificial Sequence: Synthetic oligonucleotide
  Antisense strand to SEQ ID NO: 2310664
ucgauucaggagagccuac

SEQ ID NO: 2310666 - RNA, 19 nt, Artificial Sequence
  Description of Artificial Sequence: Synthetic oligonucleotide
  Sense strand starting at position 3591 of SEQ ID NO: 1885029
guaccuaucuucuuaagua

SEQ ID NO: 2310667 - RNA, 19 nt, Artificial Sequence
  Description of Artificial Sequence: Synthetic oligonucleotide
  Antisense strand to SEQ ID NO: 2310666
uacuuaagaagauagguac

SEQ ID NO: 2310668 - RNA, 19 nt, Artificial Sequence
  Description of Artificial Sequence: Synthetic oligonucleotide
  Sense strand starting at position 3739 of SEQ ID NO: 1885029
cgcuaaauucuggccguuu

SEQ ID NO: 2310669 - RNA, 19 nt, Artificial Sequence
  Description of Artificial Sequence: Synthetic oligonucleotide
  Antisense strand to SEQ ID NO: 2310668
aaacggccagaauuuagcg

SEQ ID NO: 2310670 - RNA, 19 nt, Artificial Sequence
  Description of Artificial Sequence: Synthetic oligonucleotide
  Sense strand starting at position 3766 of SEQ ID NO: 1885029
uuuguuagacaaugcagau

SEQ ID NO: 2310671 - RNA, 19 nt, Artificial Sequence
  Description of Artificial Sequence: Synthetic oligonucleotide
  Antisense strand to SEQ ID NO: 2310670
aucugcauugucuaacaaa

SEQ ID NO: 2310672 - RNA, 19 nt, Artificial Sequence
  Description of Artificial Sequence: Synthetic oligonucleotide
  Sense strand starting at position 3775 of SEQ ID NO: 1885029
caaugcagaucuucgugaa

SEQ ID NO: 2310673 - RNA, 19 nt, Artificial Sequence
  Description of Artificial Sequence: Synthetic oligonucleotide
  Antisense strand to SEQ ID NO: 2310672
uucacgaagaucugcauug

SEQ ID NO: 2310674 - RNA, 19 nt, Artificial Sequence
  Description of Artificial Sequence: Synthetic oligonucleotide
  Sense strand starting at position 3779 of SEQ ID NO: 1885029
gcagaucuucgugaagacu

SEQ ID NO: 2310675 - RNA, 19 nt, Artificial Sequence
  Description of Artificial Sequence: Synthetic oligonucleotide
  Antisense strand to SEQ ID NO: 2310674
agucuucacgaagaucugc

SEQ ID NO: 2310676 - RNA, 19 nt, Artificial Sequence
  Description of Artificial Sequence: Synthetic oligonucleotide
  Sense strand starting at position 3790 of SEQ ID NO: 1885029
ugaagacucugacugguaa

SEQ ID NO: 2310677 - RNA, 19 nt, Artificial Sequence
  Description of Artificial Sequence: Synthetic oligonucleotide
  Antisense strand to SEQ ID NO: 2310676
uuaccagucagagucuuca

SEQ ID NO: 2310678 - RNA, 19 nt, Artificial Sequence
  Description of Artificial Sequence: Synthetic oligonucleotide
  Sense strand starting at position 3901 of SEQ ID NO: 1885029
ggcugaucuuugcuggaaa

SEQ ID NO: 2310679 - RNA, 19 nt, Artificial Sequence
  Description of Artificial Sequence: Synthetic oligonucleotide
  Antisense strand to SEQ ID NO: 2310678
uuuccagcaaagaucagcc

SEQ ID NO: 2310680 - RNA, 19 nt, Artificial Sequence
  Description of Artificial Sequence: Synthetic oligonucleotide
  Sense strand starting at position 85 of SEQ ID NO: 1885030
ucaccugcauuugacagau

SEQ ID NO: 2310681 - RNA, 19 nt, Artificial Sequence
  Description of Artificial Sequence: Synthetic oligonucleotide
  Antisense strand to SEQ ID NO: 2310680
aucugucaaaugcagguga

SEQ ID NO: 2310682 - RNA, 19 nt, Artificial Sequence
  Description of Artificial Sequence: Synthetic oligonucleotide
  Sense strand starting at position 87 of SEQ ID NO: 1885030
accugcauuugacagauga

SEQ ID NO: 2310683 - RNA, 19 nt, Artificial Sequence
  Description of Artificial Sequence: Synthetic oligonucleotide
  Antisense strand to SEQ ID NO: 2310682
ucaucugucaaaugcaggu

SEQ ID NO: 2310684 - RNA, 19 nt, Artificial Sequence
  Description of Artificial Sequence: Synthetic oligonucleotide
  Sense strand starting at position 136 of SEQ ID NO: 1885030
ucuucuguuccaggucaca

SEQ ID NO: 2310685 - RNA, 19 nt, Artificial Sequence
  Description of Artificial Sequence: Synthetic oligonucleotide
  Antisense strand to SEQ ID NO: 2310684
ugugaccuggaacagaaga

SEQ ID NO: 2310686 - RNA, 19 nt, Artificial Sequence
  Description of Artificial Sequence: Synthetic oligonucleotide
  Sense strand starting at position 895 of SEQ ID NO: 1885030
cacagagacuaaguuugau

SEQ ID NO: 2310687 - RNA, 19 nt, Artificial Sequence
  Description of Artificial Sequence: Synthetic oligonucleotide
  Antisense strand to SEQ ID NO: 2310686
aucaaacuuagucucugug

SEQ ID NO: 2310688 - RNA, 19 nt, Artificial Sequence
  Description of Artificial Sequence: Synthetic oligonucleotide
  Sense strand starting at position 899 of SEQ ID NO: 1885030
gagacuaaguuugauaccu

SEQ ID NO: 2310689 - RNA, 19 nt, Artificial Sequence
  Description of Artificial Sequence: Synthetic oligonucleotide
  Antisense strand to SEQ ID NO: 2310688
agguaucaaacuuagucuc

SEQ ID NO: 2310690 - RNA, 19 nt, Artificial Sequence
  Description of Artificial Sequence: Synthetic oligonucleotide
  Sense strand starting at position 995 of SEQ ID NO: 1885030
ugaaccaaguucuguucua

SEQ ID NO: 2310691 - RNA, 19 nt, Artificial Sequence
  Description of Artificial Sequence: Synthetic oligonucleotide
  Antisense strand to SEQ ID NO: 2310690
uagaacagaacuugguuca

SEQ ID NO: 2310692 - RNA, 19 nt, Artificial Sequence
  Description of Artificial Sequence: Synthetic oligonucleotide
  Sense strand starting at position 1045 of SEQ ID NO: 1885030
acauccuagugggaggaau

SEQ ID NO: 2310693 - RNA, 19 nt, Artificial Sequence
  Description of Artificial Sequence: Synthetic oligonucleotide
  Antisense strand to SEQ ID NO: 2310692
auuccucccacuaggaugu

SEQ ID NO: 2310694 - RNA, 19 nt, Artificial Sequence
  Description of Artificial Sequence: Synthetic oligonucleotide
  Sense strand starting at position 1959 of SEQ ID NO: 1885030
aaguaaugccauuggaggu

SEQ ID NO: 2310695 - RNA, 19 nt, Artificial Sequence
  Description of Artificial Sequence: Synthetic oligonucleotide
  Antisense strand to SEQ ID NO: 2310694
accuccaauggcauuacuu

SEQ ID NO: 2310696 - RNA, 19 nt, Artificial Sequence
  Description of Artificial Sequence: Synthetic oligonucleotide
  Sense strand starting at position 1960 of SEQ ID NO: 1885030
aguaaugccauuggaggua

SEQ ID NO: 2310697 - RNA, 19 nt, Artificial Sequence
  Description of Artificial Sequence: Synthetic oligonucleotide
  Antisense strand to SEQ ID NO: 2310696
uaccuccaauggcauuacu

SEQ ID NO: 2310698 - RNA, 19 nt, Artificial Sequence
  Description of Artificial Sequence: Synthetic oligonucleotide
  Sense strand starting at position 2003 of SEQ ID NO: 1885030
gcgccaaucuaauagauau

SEQ ID NO: 2310699 - RNA, 19 nt, Artificial Sequence
  Description of Artificial Sequence: Synthetic oligonucleotide
  Antisense strand to SEQ ID NO: 2310698
auaucuauuagauuggcgc

SEQ ID NO: 2310700 - RNA, 19 nt, Artificial Sequence
  Description of Artificial Sequence: Synthetic oligonucleotide
  Sense strand starting at position 2021 of SEQ ID NO: 1885030
uguagauaauaugaucgau

SEQ ID NO: 2310701 - RNA, 19 nt, Artificial Sequence
  Description of Artificial Sequence: Synthetic oligonucleotide
  Antisense strand to SEQ ID NO: 2310700
aucgaucauauuaucuaca

SEQ ID NO: 2310702 - RNA, 19 nt, Artificial Sequence
  Description of Artificial Sequence: Synthetic oligonucleotide
  Sense strand starting at position 2024 of SEQ ID NO: 1885030
agauaauaugaucgauggu

SEQ ID NO: 2310703 - RNA, 19 nt, Artificial Sequence
  Description of Artificial Sequence: Synthetic oligonucleotide
  Antisense strand to SEQ ID NO: 2310702
accaucgaucauauuaucu

SEQ ID NO: 2310704 - RNA, 19 nt, Artificial Sequence
  Description of Artificial Sequence: Synthetic oligonucleotide
  Sense strand starting at position 2027 of SEQ ID NO: 1885030
uaauaugaucgauggugau

SEQ ID NO: 2310705 - RNA, 19 nt, Artificial Sequence
  Description of Artificial Sequence: Synthetic oligonucleotide
  Antisense strand to SEQ ID NO: 2310704
aucaccaucgaucauauua

SEQ ID NO: 2310706 - RNA, 19 nt, Artificial Sequence
  Description of Artificial Sequence: Synthetic oligonucleotide
  Sense strand starting at position 2033 of SEQ ID NO: 1885030
gaucgauggugaucaguga

SEQ ID NO: 2310707 - RNA, 19 nt, Artificial Sequence
  Description of Artificial Sequence: Synthetic oligonucleotide
  Antisense strand to SEQ ID NO: 2310706
ucacugaucaccaucgauc

SEQ ID NO: 2310708 - RNA, 19 nt, Artificial Sequence
  Description of Artificial Sequence: Synthetic oligonucleotide
  Sense strand starting at position 2034 of SEQ ID NO: 1885030
aucgauggugaucagugau

SEQ ID NO: 2310709 - RNA, 19 nt, Artificial Sequence
  Description of Artificial Sequence: Synthetic oligonucleotide
  Antisense strand to SEQ ID NO: 2310708
aucacugaucaccaucgau

SEQ ID NO: 2310710 - RNA, 19 nt, Artificial Sequence
  Description of Artificial Sequence: Synthetic oligonucleotide
  Sense strand starting at position 2037 of SEQ ID NO: 1885030
gauggugaucagugauaac

SEQ ID NO: 2310711 - RNA, 19 nt, Artificial Sequence
  Description of Artificial Sequence: Synthetic oligonucleotide
  Antisense strand to SEQ ID NO: 2310710
guuaucacugaucaccauc

SEQ ID NO: 2310712 - RNA, 19 nt, Artificial Sequence
  Description of Artificial Sequence: Synthetic oligonucleotide
  Sense strand starting at position 2040 of SEQ ID NO: 1885030
ggugaucagugauaacagu

SEQ ID NO: 2310713 - RNA, 19 nt, Artificial Sequence
  Description of Artificial Sequence: Synthetic oligonucleotide
  Antisense strand to SEQ ID NO: 2310712
acuguuaucacugaucacc

SEQ ID NO: 2310714 - RNA, 19 nt, Artificial Sequence
  Description of Artificial Sequence: Synthetic oligonucleotide
  Sense strand starting at position 2429 of SEQ ID NO: 1885030
ugguaaauguggucuccaa

SEQ ID NO: 2310715 - RNA, 19 nt, Artificial Sequence
  Description of Artificial Sequence: Synthetic oligonucleotide
  Antisense strand to SEQ ID NO: 2310714
uuggagaccacauuuacca

SEQ ID NO: 2310716 - RNA, 19 nt, Artificial Sequence
  Description of Artificial Sequence: Synthetic oligonucleotide
  Sense strand starting at position 2483 of SEQ ID NO: 1885030
ccauuaugcaagugaggag

SEQ ID NO: 2310717 - RNA, 19 nt, Artificial Sequence
  Description of Artificial Sequence: Synthetic oligonucleotide
  Antisense strand to SEQ ID NO: 2310716
cuccucacuugcauaaugg

SEQ ID NO: 2310718 - RNA, 19 nt, Artificial Sequence
  Description of Artificial Sequence: Synthetic oligonucleotide
  Sense strand starting at position 2643 of SEQ ID NO: 1885030
gcaucaggcuuucucucaa

SEQ ID NO: 2310719 - RNA, 19 nt, Artificial Sequence
  Description of Artificial Sequence: Synthetic oligonucleotide
  Antisense strand to SEQ ID NO: 2310718
uugagagaaagccugaugc

SEQ ID NO: 2310720 - RNA, 19 nt, Artificial Sequence
  Description of Artificial Sequence: Synthetic oligonucleotide
  Sense strand starting at position 2687 of SEQ ID NO: 1885030
ggucaaucccugugagcag

SEQ ID NO: 2310721 - RNA, 19 nt, Artificial Sequence
  Description of Artificial Sequence: Synthetic oligonucleotide
  Antisense strand to SEQ ID NO: 2310720
cugcucacagggauugacc

SEQ ID NO: 2310722 - RNA, 19 nt, Artificial Sequence
  Description of Artificial Sequence: Synthetic oligonucleotide
  Sense strand starting at position 2688 of SEQ ID NO: 1885030
gucaaucccugugagcaga

SEQ ID NO: 2310723 - RNA, 19 nt, Artificial Sequence
  Description of Artificial Sequence: Synthetic oligonucleotide
  Antisense strand to SEQ ID NO: 2310722
ucugcucacagggauugac

SEQ ID NO: 2310724 - RNA, 19 nt, Artificial Sequence
  Description of Artificial Sequence: Synthetic oligonucleotide
  Sense strand starting at position 2749 of SEQ ID NO: 1885030
agcagacauugaggaauca

SEQ ID NO: 2310725 - RNA, 19 nt, Artificial Sequence
  Description of Artificial Sequence: Synthetic oligonucleotide
  Antisense strand to SEQ ID NO: 2310724
ugauuccucaaugucugcu

SEQ ID NO: 2310726 - RNA, 19 nt, Artificial Sequence
  Description of Artificial Sequence: Synthetic oligonucleotide
  Sense strand starting at position 2800 of SEQ ID NO: 1885030
gaagcucaggcugaugaau

SEQ ID NO: 2310727 - RNA, 19 nt, Artificial Sequence
  Description of Artificial Sequence: Synthetic oligonucleotide
  Antisense strand to SEQ ID NO: 2310726
auucaucagccugagcuuc

SEQ ID NO: 2310728 - RNA, 19 nt, Artificial Sequence
  Description of Artificial Sequence: Synthetic oligonucleotide
  Sense strand starting at position 2808 of SEQ ID NO: 1885030
ggcugaugaaucgauucca

SEQ ID NO: 2310729 - RNA, 19 nt, Artificial Sequence
  Description of Artificial Sequence: Synthetic oligonucleotide
  Antisense strand to SEQ ID NO: 2310728
uggaaucgauucaucagcc

SEQ ID NO: 2310730 - RNA, 19 nt, Artificial Sequence
  Description of Artificial Sequence: Synthetic oligonucleotide
  Sense strand starting at position 2813 of SEQ ID NO: 1885030
augaaucgauuccagagau

SEQ ID NO: 2310731 - RNA, 19 nt, Artificial Sequence
  Description of Artificial Sequence: Synthetic oligonucleotide
  Antisense strand to SEQ ID NO: 2310730
aucucuggaaucgauucau

SEQ ID NO: 2310732 - RNA, 19 nt, Artificial Sequence
  Description of Artificial Sequence: Synthetic oligonucleotide
  Sense strand starting at position 2855 of SEQ ID NO: 1885030
guaggaucuucugggacua

SEQ ID NO: 2310733 - RNA, 19 nt, Artificial Sequence
  Description of Artificial Sequence: Synthetic oligonucleotide
  Antisense strand to SEQ ID NO: 2310732
uagucccagaagauccuac

SEQ ID NO: 2310734 - RNA, 19 nt, Artificial Sequence
  Description of Artificial Sequence: Synthetic oligonucleotide
  Sense strand starting at position 2856 of SEQ ID NO: 1885030
uaggaucuucugggacuau

SEQ ID NO: 2310735 - RNA, 19 nt, Artificial Sequence
  Description of Artificial Sequence: Synthetic oligonucleotide
  Antisense strand to SEQ ID NO: 2310734
auagucccagaagauccua

SEQ ID NO: 2310736 - RNA, 19 nt, Artificial Sequence
  Description of Artificial Sequence: Synthetic oligonucleotide
  Sense strand starting at position 2857 of SEQ ID NO: 1885030
aggaucuucugggacuauu

SEQ ID NO: 2310737 - RNA, 19 nt, Artificial Sequence
  Description of Artificial Sequence: Synthetic oligonucleotide
  Antisense strand to SEQ ID NO: 2310736
aauagucccagaagauccu

SEQ ID NO: 2310738 - RNA, 19 nt, Artificial Sequence
  Description of Artificial Sequence: Synthetic oligonucleotide
  Sense strand starting at position 2963 of SEQ ID NO: 1885030
cgacgcuaguuaccuaaua

SEQ ID NO: 2310739 - RNA, 19 nt, Artificial Sequence
  Description of Artificial Sequence: Synthetic oligonucleotide
  Antisense strand to SEQ ID NO: 2310738
uauuagguaacuagcgucg

SEQ ID NO: 2310740 - RNA, 19 nt, Artificial Sequence
  Description of Artificial Sequence: Synthetic oligonucleotide
  Sense strand starting at position 2964 of SEQ ID NO: 1885030
gacgcuaguuaccuaauaa

SEQ ID NO: 2310741 - RNA, 19 nt, Artificial Sequence
  Description of Artificial Sequence: Synthetic oligonucleotide
  Antisense strand to SEQ ID NO: 2310740
uuauuagguaacuagcguc

SEQ ID NO: 2310742 - RNA, 19 nt, Artificial Sequence
  Description of Artificial Sequence: Synthetic oligonucleotide
  Sense strand starting at position 3346 of SEQ ID NO: 1885030
aagcuagagucacaugcaa

SEQ ID NO: 2310743 - RNA, 19 nt, Artificial Sequence
  Description of Artificial Sequence: Synthetic oligonucleotide
  Antisense strand to SEQ ID NO: 2310742
uugcaugugacucuagcuu

SEQ ID NO: 2310744 - RNA, 19 nt, Artificial Sequence
  Description of Artificial Sequence: Synthetic oligonucleotide
  Sense strand starting at position 3494 of SEQ ID NO: 1885030
ugacucaguuugugugcaa

SEQ ID NO: 2310745 - RNA, 19 nt, Artificial Sequence
  Description of Artificial Sequence: Synthetic oligonucleotide
  Antisense strand to SEQ ID NO: 2310744
uugcacacaaacugaguca

SEQ ID NO: 2310746 - RNA, 19 nt, Artificial Sequence
  Description of Artificial Sequence: Synthetic oligonucleotide
  Sense strand starting at position 3508 of SEQ ID NO: 1885030
ugcaacaggugucaugaau

SEQ ID NO: 2310747 - RNA, 19 nt, Artificial Sequence
  Description of Artificial Sequence: Synthetic oligonucleotide
  Antisense strand to SEQ ID NO: 2310746
auucaugacaccuguugca

SEQ ID NO: 2310748 - RNA, 19 nt, Artificial Sequence
  Description of Artificial Sequence: Synthetic oligonucleotide
  Sense strand starting at position 3514 of SEQ ID NO: 1885030
aggugucaugaauaagggu

SEQ ID NO: 2310749 - RNA, 19 nt, Artificial Sequence
  Description of Artificial Sequence: Synthetic oligonucleotide
  Antisense strand to SEQ ID NO: 2310748
acccuuauucaugacaccu

SEQ ID NO: 2310750 - RNA, 19 nt, Artificial Sequence
  Description of Artificial Sequence: Synthetic oligonucleotide
  Sense strand starting at position 3538 of SEQ ID NO: 1885030
uguggaauagaguggguaa

SEQ ID NO: 2310751 - RNA, 19 nt, Artificial Sequence
  Description of Artificial Sequence: Synthetic oligonucleotide
  Antisense strand to SEQ ID NO: 2310750
uuacccacucuauuccaca

SEQ ID NO: 2310752 - RNA, 19 nt, Artificial Sequence
  Description of Artificial Sequence: Synthetic oligonucleotide
  Sense strand starting at position 3550 of SEQ ID NO: 1885030
uggguaagggucuggacuu

SEQ ID NO: 2310753 - RNA, 19 nt, Artificial Sequence
  Description of Artificial Sequence: Synthetic oligonucleotide
  Antisense strand to SEQ ID NO: 2310752
aaguccagacccuuaccca

SEQ ID NO: 2310754 - RNA, 19 nt, Artificial Sequence
  Description of Artificial Sequence: Synthetic oligonucleotide
  Sense strand starting at position 3626 of SEQ ID NO: 1885030
cuaagaaacuugguaucuu

SEQ ID NO: 2310755 - RNA, 19 nt, Artificial Sequence
  Description of Artificial Sequence: Synthetic oligonucleotide
  Antisense strand to SEQ ID NO: 2310754
aagauaccaaguuucuuag

SEQ ID NO: 2310756 - RNA, 19 nt, Artificial Sequence
  Description of Artificial Sequence: Synthetic oligonucleotide
  Sense strand starting at position 3917 of SEQ ID NO: 1885030
gccagugugucaggacuuu

SEQ ID NO: 2310757 - RNA, 19 nt, Artificial Sequence
  Description of Artificial Sequence: Synthetic oligonucleotide
  Antisense strand to SEQ ID NO: 2310756
aaaguccugacacacuggc

SEQ ID NO: 2310758 - RNA, 19 nt, Artificial Sequence
  Description of Artificial Sequence: Synthetic oligonucleotide
  Sense strand starting at position 288 of SEQ ID NO: 1885031
agagcuuccuccuuuagga

SEQ ID NO: 2310759 - RNA, 19 nt, Artificial Sequence
  Description of Artificial Sequence: Synthetic oligonucleotide
  Antisense strand to SEQ ID NO: 2310758
uccuaaaggaggaagcucu

SEQ ID NO: 2310760 - RNA, 19 nt, Artificial Sequence
  Description of Artificial Sequence: Synthetic oligonucleotide
  Sense strand starting at position 290 of SEQ ID NO: 1885031
agcuuccuccuuuaggaau

SEQ ID NO: 2310761 - RNA, 19 nt, Artificial Sequence
  Description of Artificial Sequence: Synthetic oligonucleotide
  Antisense strand to SEQ ID NO: 2310760
auuccuaaaggaggaagcu

SEQ ID NO: 2310762 - RNA, 19 nt, Artificial Sequence
  Description of Artificial Sequence: Synthetic oligonucleotide
  Sense strand starting at position 301 of SEQ ID NO: 1885031
uuaggaauggauuguaagu

SEQ ID NO: 2310763 - RNA, 19 nt, Artificial Sequence
  Description of Artificial Sequence: Synthetic oligonucleotide
  Antisense strand to SEQ ID NO: 2310762
acuuacaauccauuccuaa

SEQ ID NO: 2310764 - RNA, 19 nt, Artificial Sequence
  Description of Artificial Sequence: Synthetic oligonucleotide
  Sense strand starting at position 306 of SEQ ID NO: 1885031
aauggauuguaaguggauu

SEQ ID NO: 2310765 - RNA, 19 nt, Artificial Sequence
  Description of Artificial Sequence: Synthetic oligonucleotide
  Antisense strand to SEQ ID NO: 2310764
aauccacuuacaauccauu

SEQ ID NO: 2310766 - RNA, 19 nt, Artificial Sequence
  Description of Artificial Sequence: Synthetic oligonucleotide
  Sense strand starting at position 340 of SEQ ID NO: 1885031
uagguuugccuuuaugaaa

SEQ ID NO: 2310767 - RNA, 19 nt, Artificial Sequence
  Description of Artificial Sequence: Synthetic oligonucleotide
  Antisense strand to SEQ ID NO: 2310766
uuucauaaaggcaaaccua

SEQ ID NO: 2310768 - RNA, 19 nt, Artificial Sequence
  Description of Artificial Sequence: Synthetic oligonucleotide
  Sense strand starting at position 356 of SEQ ID NO: 1885031
aaacguacucguuccgcua

SEQ ID NO: 2310769 - RNA, 19 nt, Artificial Sequence
  Description of Artificial Sequence: Synthetic oligonucleotide
  Antisense strand to SEQ ID NO: 2310768
uagcggaacgaguacguuu

SEQ ID NO: 2310770 - RNA, 19 nt, Artificial Sequence
  Description of Artificial Sequence: Synthetic oligonucleotide
  Sense strand starting at position 360 of SEQ ID NO: 1885031
guacucguuccgcuacaca

SEQ ID NO: 2310771 - RNA, 19 nt, Artificial Sequence
  Description of Artificial Sequence: Synthetic oligonucleotide
  Antisense strand to SEQ ID NO: 2310770
uguguagcggaacgaguac

SEQ ID NO: 2310772 - RNA, 19 nt, Artificial Sequence
  Description of Artificial Sequence: Synthetic oligonucleotide
  Sense strand starting at position 553 of SEQ ID NO: 1885031
cagaaauauggccggacau

SEQ ID NO: 2310773 - RNA, 19 nt, Artificial Sequence
  Description of Artificial Sequence: Synthetic oligonucleotide
  Antisense strand to SEQ ID NO: 2310772
auguccggccauauuucug

SEQ ID NO: 2310774 - RNA, 19 nt, Artificial Sequence
  Description of Artificial Sequence: Synthetic oligonucleotide
  Sense strand starting at position 1021 of SEQ ID NO: 1885031
uucccauagcugggaaauu

SEQ ID NO: 2310775 - RNA, 19 nt, Artificial Sequence
  Description of Artificial Sequence: Synthetic oligonucleotide
  Antisense strand to SEQ ID NO: 2310774
aauuucccagcuaugggaa

SEQ ID NO: 2310776 - RNA, 19 nt, Artificial Sequence
  Description of Artificial Sequence: Synthetic oligonucleotide
  Sense strand starting at position 1033 of SEQ ID NO: 1885031
ggaaauuacucacuacagu

SEQ ID NO: 2310777 - RNA, 19 nt, Artificial Sequence
  Description of Artificial Sequence: Synthetic oligonucleotide
  Antisense strand to SEQ ID NO: 2310776
acuguagugaguaauuucc

SEQ ID NO: 2310778 - RNA, 19 nt, Artificial Sequence
  Description of Artificial Sequence: Synthetic oligonucleotide
  Sense strand starting at position 1073 of SEQ ID NO: 1885031
cuggcaugucaugaaaccu

SEQ ID NO: 2310779 - RNA, 19 nt, Artificial Sequence
  Description of Artificial Sequence: Synthetic oligonucleotide
  Antisense strand to SEQ ID NO: 2310778
agguuucaugacaugccag

SEQ ID NO: 2310780 - RNA, 19 nt, Artificial Sequence
  Description of Artificial Sequence: Synthetic oligonucleotide
  Sense strand starting at position 1104 of SEQ ID NO: 1885031
ggccuaaacggauaaacgu

SEQ ID NO: 2310781 - RNA, 19 nt, Artificial Sequence
  Description of Artificial Sequence: Synthetic oligonucleotide
  Antisense strand to SEQ ID NO: 2310780
acguuuauccguuuaggcc

SEQ ID NO: 2310782 - RNA, 19 nt, Artificial Sequence
  Description of Artificial Sequence: Synthetic oligonucleotide
  Sense strand starting at position 1139 of SEQ ID NO: 1885031
aucucagaguuccucugaa

SEQ ID NO: 2310783 - RNA, 19 nt, Artificial Sequence
  Description of Artificial Sequence: Synthetic oligonucleotide
  Antisense strand to SEQ ID NO: 2310782
uucagaggaacucugagau

SEQ ID NO: 2310784 - RNA, 19 nt, Artificial Sequence
  Description of Artificial Sequence: Synthetic oligonucleotide
  Sense strand starting at position 1259 of SEQ ID NO: 1885031
uuccuccuacgugauauau

SEQ ID NO: 2310785 - RNA, 19 nt, Artificial Sequence
  Description of Artificial Sequence: Synthetic oligonucleotide
  Antisense strand to SEQ ID NO: 2310784
auauaucacguaggaggaa

SEQ ID NO: 2310786 - RNA, 19 nt, Artificial Sequence
  Description of Artificial Sequence: Synthetic oligonucleotide
  Sense strand starting at position 1704 of SEQ ID NO: 1885031
acaguaagcuuguuugaau

SEQ ID NO: 2310787 - RNA, 19 nt, Artificial Sequence
  Description of Artificial Sequence: Synthetic oligonucleotide
  Antisense strand to SEQ ID NO: 2310786
auucaaacaagcuuacugu

SEQ ID NO: 2310788 - RNA, 19 nt, Artificial Sequence
  Description of Artificial Sequence: Synthetic oligonucleotide
  Sense strand starting at position 1733 of SEQ ID NO: 1885031
gggauuaaggagggcucau

SEQ ID NO: 2310789 - RNA, 19 nt, Artificial Sequence
  Description of Artificial Sequence: Synthetic oligonucleotide
  Antisense strand to SEQ ID NO: 2310788
augagcccuccuuaauccc

SEQ ID NO: 2310790 - RNA, 19 nt, Artificial Sequence
  Description of Artificial Sequence: Synthetic oligonucleotide
  Sense strand starting at position 1842 of SEQ ID NO: 1885031
aggaguuaaucagaauaaa

SEQ ID NO: 2310791 - RNA, 19 nt, Artificial Sequence
  Description of Artificial Sequence: Synthetic oligonucleotide
  Antisense strand to SEQ ID NO: 2310790
uuuauucugauuaacuccu

SEQ ID NO: 2310792 - RNA, 19 nt, Artificial Sequence
  Description of Artificial Sequence: Synthetic oligonucleotide
  Sense strand starting at position 2037 of SEQ ID NO: 1885031
acaguaagccuauaaguaa

SEQ ID NO: 2310793 - RNA, 19 nt, Artificial Sequence
  Description of Artificial Sequence: Synthetic oligonucleotide
  Antisense strand to SEQ ID NO: 2310792
uuacuuauaggcuuacugu

SEQ ID NO: 2310794 - RNA, 19 nt, Artificial Sequence
  Description of Artificial Sequence: Synthetic oligonucleotide
  Sense strand starting at position 2063 of SEQ ID NO: 1885031
aaauuaucuuuggugggua

SEQ ID NO: 2310795 - RNA, 19 nt, Artificial Sequence
  Description of Artificial Sequence: Synthetic oligonucleotide
  Antisense strand to SEQ ID NO: 2310794
uacccaccaaagauaauuu

SEQ ID NO: 2310796 - RNA, 19 nt, Artificial Sequence
  Description of Artificial Sequence: Synthetic oligonucleotide
  Sense strand starting at position 2469 of SEQ ID NO: 1885031
uaaauucuaccagaguggu

SEQ ID NO: 2310797 - RNA, 19 nt, Artificial Sequence
  Description of Artificial Sequence: Synthetic oligonucleotide
  Antisense strand to SEQ ID NO: 2310796
accacucugguagaauuua

SEQ ID NO: 2310798 - RNA, 19 nt, Artificial Sequence
  Description of Artificial Sequence: Synthetic oligonucleotide
  Sense strand starting at position 2475 of SEQ ID NO: 1885031
cuaccagagugguuggaaa

SEQ ID NO: 2310799 - RNA, 19 nt, Artificial Sequence
  Description of Artificial Sequence: Synthetic oligonucleotide
  Antisense strand to SEQ ID NO: 2310798
uuuccaaccacucugguag

SEQ ID NO: 2310800 - RNA, 19 nt, Artificial Sequence
  Description of Artificial Sequence: Synthetic oligonucleotide
  Sense strand starting at position 2598 of SEQ ID NO: 1885031
uucugaaucccacggguuu

SEQ ID NO: 2310801 - RNA, 19 nt, Artificial Sequence
  Description of Artificial Sequence: Synthetic oligonucleotide
  Antisense strand to SEQ ID NO: 2310800
aaacccgugggauucagaa

SEQ ID NO: 2310802 - RNA, 19 nt, Artificial Sequence
  Description of Artificial Sequence: Synthetic oligonucleotide
  Sense strand starting at position 2599 of SEQ ID NO: 1885031
ucugaaucccacggguuua

SEQ ID NO: 2310803 - RNA, 19 nt, Artificial Sequence
  Description of Artificial Sequence: Synthetic oligonucleotide
  Antisense strand to SEQ ID NO: 2310802
uaaacccgugggauucaga

SEQ ID NO: 2310804 - RNA, 19 nt, Artificial Sequence
  Description of Artificial Sequence: Synthetic oligonucleotide
  Sense strand starting at position 2600 of SEQ ID NO: 1885031
cugaaucccacggguuuau

SEQ ID NO: 2310805 - RNA, 19 nt, Artificial Sequence
  Description of Artificial Sequence: Synthetic oligonucleotide
  Antisense strand to SEQ ID NO: 2310804
auaaacccgugggauucag

SEQ ID NO: 2310806 - RNA, 19 nt, Artificial Sequence
  Description of Artificial Sequence: Synthetic oligonucleotide
  Sense strand starting at position 2654 of SEQ ID NO: 1885031
guuguaacuacaggaguaa

SEQ ID NO: 2310807 - RNA, 19 nt, Artificial Sequence
  Description of Artificial Sequence: Synthetic oligonucleotide
  Antisense strand to SEQ ID NO: 2310806
uuacuccuguaguuacaac

SEQ ID NO: 2310808 - RNA, 19 nt, Artificial Sequence
  Description of Artificial Sequence: Synthetic oligonucleotide
  Sense strand starting at position 3187 of SEQ ID NO: 1885031
aaaggucaugcauggacaa

SEQ ID NO: 2310809 - RNA, 19 nt, Artificial Sequence
  Description of Artificial Sequence: Synthetic oligonucleotide
  Antisense strand to SEQ ID NO: 2310808
uuguccaugcaugaccuuu

SEQ ID NO: 2310810 - RNA, 19 nt, Artificial Sequence
  Description of Artificial Sequence: Synthetic oligonucleotide
  Sense strand starting at position 3188 of SEQ ID NO: 1885031
aaggucaugcauggacaau

SEQ ID NO: 2310811 - RNA, 19 nt, Artificial Sequence
  Description of Artificial Sequence: Synthetic oligonucleotide
  Antisense strand to SEQ ID NO: 2310810
auuguccaugcaugaccuu

SEQ ID NO: 2310812 - RNA, 19 nt, Artificial Sequence
  Description of Artificial Sequence: Synthetic oligonucleotide
  Sense strand starting at position 3189 of SEQ ID NO: 1885031
aggucaugcauggacaauu

SEQ ID NO: 2310813 - RNA, 19 nt, Artificial Sequence
  Description of Artificial Sequence: Synthetic oligonucleotide
  Antisense strand to SEQ ID NO: 2310812
aauuguccaugcaugaccu

SEQ ID NO: 2310814 - RNA, 19 nt, Artificial Sequence
  Description of Artificial Sequence: Synthetic oligonucleotide
  Sense strand starting at position 3219 of SEQ ID NO: 1885031
gagauuuacucagaaguau

SEQ ID NO: 2310815 - RNA, 19 nt, Artificial Sequence
  Description of Artificial Sequence: Synthetic oligonucleotide
  Antisense strand to SEQ ID NO: 2310814
auacuucugaguaaaucuc

SEQ ID NO: 2310816 - RNA, 19 nt, Artificial Sequence
  Description of Artificial Sequence: Synthetic oligonucleotide
  Sense strand starting at position 3611 of SEQ ID NO: 1885031
ggugccuuuaguuauugaa

SEQ ID NO: 2310817 - RNA, 19 nt, Artificial Sequence
  Description of Artificial Sequence: Synthetic oligonucleotide
  Antisense strand to SEQ ID NO: 2310816
uucaauaacuaaaggcacc

SEQ ID NO: 2310818 - RNA, 19 nt, Artificial Sequence
  Description of Artificial Sequence: Synthetic oligonucleotide
  Sense strand starting at position 3816 of SEQ ID NO: 1885031
agguauuuauuagugcuau

SEQ ID NO: 2310819 - RNA, 19 nt, Artificial Sequence
  Description of Artificial Sequence: Synthetic oligonucleotide
  Antisense strand to SEQ ID NO: 2310818
auagcacuaauaaauaccu

SEQ ID NO: 2310820 - RNA, 19 nt, Artificial Sequence
  Description of Artificial Sequence: Synthetic oligonucleotide
  Sense strand starting at position 3866 of SEQ ID NO: 1885031
uuuccaauauuugggaaua

SEQ ID NO: 2310821 - RNA, 19 nt, Artificial Sequence
  Description of Artificial Sequence: Synthetic oligonucleotide
  Antisense strand to SEQ ID NO: 2310820
uauucccaaauauuggaaa

SEQ ID NO: 2310822 - RNA, 19 nt, Artificial Sequence
  Description of Artificial Sequence: Synthetic oligonucleotide
  Sense strand starting at position 3867 of SEQ ID NO: 1885031
uuccaauauuugggaauaa

SEQ ID NO: 2310823 - RNA, 19 nt, Artificial Sequence
  Description of Artificial Sequence: Synthetic oligonucleotide
  Antisense strand to SEQ ID NO: 2310822
uuauucccaaauauuggaa

SEQ ID NO: 2310824 - RNA, 19 nt, Artificial Sequence
  Description of Artificial Sequence: Synthetic oligonucleotide
  Sense strand starting at position 3868 of SEQ ID NO: 1885031
uccaauauuugggaauaac

SEQ ID NO: 2310825 - RNA, 19 nt, Artificial Sequence
  Description of Artificial Sequence: Synthetic oligonucleotide
  Antisense strand to SEQ ID NO: 2310824
guuauucccaaauauugga

SEQ ID NO: 2310826 - RNA, 19 nt, Artificial Sequence
  Description of Artificial Sequence: Synthetic oligonucleotide
  Sense strand starting at position 3926 of SEQ ID NO: 1885031
gcugaaaucaagcagcagu

SEQ ID NO: 2310827 - RNA, 19 nt, Artificial Sequence
  Description of Artificial Sequence: Synthetic oligonucleotide
  Antisense strand to SEQ ID NO: 2310826
acugcugcuugauuucagc

SEQ ID NO: 2310828 - RNA, 19 nt, Artificial Sequence
  Description of Artificial Sequence: Synthetic oligonucleotide
  Sense strand starting at position 3929 of SEQ ID NO: 1885031
gaaaucaagcagcaguauu

SEQ ID NO: 2310829 - RNA, 19 nt, Artificial Sequence
  Description of Artificial Sequence: Synthetic oligonucleotide
  Antisense strand to SEQ ID NO: 2310828
aauacugcugcuugauuuc

SEQ ID NO: 2310830 - RNA, 19 nt, Artificial Sequence
  Description of Artificial Sequence: Synthetic oligonucleotide
  Sense strand starting at position 3946 of SEQ ID NO: 1885031
uuccauaauccuggguuua

SEQ ID NO: 2310831 - RNA, 19 nt, Artificial Sequence
  Description of Artificial Sequence: Synthetic oligonucleotide
  Antisense strand to SEQ ID NO: 2310830
uaaacccaggauuauggaa

SEQ ID NO: 2310832 - RNA, 19 nt, Artificial Sequence
  Description of Artificial Sequence: Synthetic oligonucleotide
  Sense strand starting at position 3947 of SEQ ID NO: 1885031
uccauaauccuggguuuaa

SEQ ID NO: 2310833 - RNA, 19 nt, Artificial Sequence
  Description of Artificial Sequence: Synthetic oligonucleotide
  Antisense strand to SEQ ID NO: 2310832
uuaaacccaggauuaugga

SEQ ID NO: 2310834 - RNA, 19 nt, Artificial Sequence
  Description of Artificial Sequence: Synthetic oligonucleotide
  Sense strand starting at position 3948 of SEQ ID NO: 1885031
ccauaauccuggguuuaaa

SEQ ID NO: 2310835 - RNA, 19 nt, Artificial Sequence
  Description of Artificial Sequence: Synthetic oligonucleotide
  Antisense strand to SEQ ID NO: 2310834
uuuaaacccaggauuaugg

SEQ ID NO: 2310836 - RNA, 19 nt, Artificial Sequence
  Description of Artificial Sequence: Synthetic oligonucleotide
  Sense strand starting at position 3983 of SEQ ID NO: 1885031
ucaguauaguauuccucaa

SEQ ID NO: 2310837 - RNA, 19 nt, Artificial Sequence
  Description of Artificial Sequence: Synthetic oligonucleotide
  Antisense strand to SEQ ID NO: 2310836
uugaggaauacuauacuga

SEQ ID NO: 2310838 - RNA, 19 nt, Artificial Sequence
  Description of Artificial Sequence: Synthetic oligonucleotide
  Sense strand starting at position 122 of SEQ ID NO: 1885032
uuuauaggauaguuguaca

SEQ ID NO: 2310839 - RNA, 19 nt, Artificial Sequence
  Description of Artificial Sequence: Synthetic oligonucleotide
  Antisense strand to SEQ ID NO: 2310838
uguacaacuauccuauaaa

SEQ ID NO: 2310840 - RNA, 19 nt, Artificial Sequence
  Description of Artificial Sequence: Synthetic oligonucleotide
  Sense strand starting at position 154 of SEQ ID NO: 1885032
acuaauuaugaggguguga

SEQ ID NO: 2310841 - RNA, 19 nt, Artificial Sequence
  Description of Artificial Sequence: Synthetic oligonucleotide
  Antisense strand to SEQ ID NO: 2310840
ucacacccucauaauuagu

SEQ ID NO: 2310842 - RNA, 19 nt, Artificial Sequence
  Description of Artificial Sequence: Synthetic oligonucleotide
  Sense strand starting at position 156 of SEQ ID NO: 1885032
uaauuaugagggugugacu

SEQ ID NO: 2310843 - RNA, 19 nt, Artificial Sequence
  Description of Artificial Sequence: Synthetic oligonucleotide
  Antisense strand to SEQ ID NO: 2310842
agucacacccucauaauua

SEQ ID NO: 2310844 - RNA, 19 nt, Artificial Sequence
  Description of Artificial Sequence: Synthetic oligonucleotide
  Sense strand starting at position 289 of SEQ ID NO: 1885032
ggcaccuuauugcuauuua

SEQ ID NO: 2310845 - RNA, 19 nt, Artificial Sequence
  Description of Artificial Sequence: Synthetic oligonucleotide
  Antisense strand to SEQ ID NO: 2310844
uaaauagcaauaaggugcc

SEQ ID NO: 2310846 - RNA, 19 nt, Artificial Sequence
  Description of Artificial Sequence: Synthetic oligonucleotide
  Sense strand starting at position 681 of SEQ ID NO: 1885032
aaucucccuugugugagaa

SEQ ID NO: 2310847 - RNA, 19 nt, Artificial Sequence
  Description of Artificial Sequence: Synthetic oligonucleotide
  Antisense strand to SEQ ID NO: 2310846
uucucacacaagggagauu

SEQ ID NO: 2310848 - RNA, 19 nt, Artificial Sequence
  Description of Artificial Sequence: Synthetic oligonucleotide
  Sense strand starting at position 682 of SEQ ID NO: 1885032
aucucccuugugugagaau

SEQ ID NO: 2310849 - RNA, 19 nt, Artificial Sequence
  Description of Artificial Sequence: Synthetic oligonucleotide
  Antisense strand to SEQ ID NO: 2310848
auucucacacaagggagau

SEQ ID NO: 2310850 - RNA, 19 nt, Artificial Sequence
  Description of Artificial Sequence: Synthetic oligonucleotide
  Sense strand starting at position 693 of SEQ ID NO: 1885032
gugagaauuguccaugcau

SEQ ID NO: 2310851 - RNA, 19 nt, Artificial Sequence
  Description of Artificial Sequence: Synthetic oligonucleotide
  Antisense strand to SEQ ID NO: 2310850
augcauggacaauucucac

SEQ ID NO: 2310852 - RNA, 19 nt, Artificial Sequence
  Description of Artificial Sequence: Synthetic oligonucleotide
  Sense strand starting at position 695 of SEQ ID NO: 1885032
gagaauuguccaugcauga

SEQ ID NO: 2310853 - RNA, 19 nt, Artificial Sequence
  Description of Artificial Sequence: Synthetic oligonucleotide
  Antisense strand to SEQ ID NO: 2310852
ucaugcauggacaauucuc

SEQ ID NO: 2310854 - RNA, 19 nt, Artificial Sequence
  Description of Artificial Sequence: Synthetic oligonucleotide
  Sense strand starting at position 716 of SEQ ID NO: 1885032
uuugcccauuugucuauua

SEQ ID NO: 2310855 - RNA, 19 nt, Artificial Sequence
  Description of Artificial Sequence: Synthetic oligonucleotide
  Antisense strand to SEQ ID NO: 2310854
uaauagacaaaugggcaaa

SEQ ID NO: 2310856 - RNA, 19 nt, Artificial Sequence
  Description of Artificial Sequence: Synthetic oligonucleotide
  Sense strand starting at position 725 of SEQ ID NO: 1885032
uugucuauuagguaggcaa

SEQ ID NO: 2310857 - RNA, 19 nt, Artificial Sequence
  Description of Artificial Sequence: Synthetic oligonucleotide
  Antisense strand to SEQ ID NO: 2310856
uugccuaccuaauagacaa

SEQ ID NO: 2310858 - RNA, 19 nt, Artificial Sequence
  Description of Artificial Sequence: Synthetic oligonucleotide
  Sense strand starting at position 748 of SEQ ID NO: 1885032
uugagagagcacugcuuga

SEQ ID NO: 2310859 - RNA, 19 nt, Artificial Sequence
  Description of Artificial Sequence: Synthetic oligonucleotide
  Antisense strand to SEQ ID NO: 2310858
ucaagcagugcucucucaa

SEQ ID NO: 2310860 - RNA, 19 nt, Artificial Sequence
  Description of Artificial Sequence: Synthetic oligonucleotide
  Sense strand starting at position 1092 of SEQ ID NO: 1885032
ccugaucuccgguaaucua

SEQ ID NO: 2310861 - RNA, 19 nt, Artificial Sequence
  Description of Artificial Sequence: Synthetic oligonucleotide
  Antisense strand to SEQ ID NO: 2310860
uagauuaccggagaucagg

SEQ ID NO: 2310862 - RNA, 19 nt, Artificial Sequence
  Description of Artificial Sequence: Synthetic oligonucleotide
  Sense strand starting at position 1200 of SEQ ID NO: 1885032
ggcugacaucacugaaacu

SEQ ID NO: 2310863 - RNA, 19 nt, Artificial Sequence
  Description of Artificial Sequence: Synthetic oligonucleotide
  Antisense strand to SEQ ID NO: 2310862
aguuucagugaugucagcc

SEQ ID NO: 2310864 - RNA, 19 nt, Artificial Sequence
  Description of Artificial Sequence: Synthetic oligonucleotide
  Sense strand starting at position 1230 of SEQ ID NO: 1885032
uuauuacuccuguaguuac

SEQ ID NO: 2310865 - RNA, 19 nt, Artificial Sequence
  Description of Artificial Sequence: Synthetic oligonucleotide
  Antisense strand to SEQ ID NO: 2310864
guaacuacaggaguaauaa

SEQ ID NO: 2310866 - RNA, 19 nt, Artificial Sequence
  Description of Artificial Sequence: Synthetic oligonucleotide
  Sense strand starting at position 1241 of SEQ ID NO: 1885032
guaguuacaacaugggaaa

SEQ ID NO: 2310867 - RNA, 19 nt, Artificial Sequence
  Description of Artificial Sequence: Synthetic oligonucleotide
  Antisense strand to SEQ ID NO: 2310866
uuucccauguuguaacuac

SEQ ID NO: 2310868 - RNA, 19 nt, Artificial Sequence
  Description of Artificial Sequence: Synthetic oligonucleotide
  Sense strand starting at position 1284 of SEQ ID NO: 1885032
uaaauaaacccgugggauu

SEQ ID NO: 2310869 - RNA, 19 nt, Artificial Sequence
  Description of Artificial Sequence: Synthetic oligonucleotide
  Antisense strand to SEQ ID NO: 2310868
aaucccacggguuuauuua

SEQ ID NO: 2310870 - RNA, 19 nt, Artificial Sequence
  Description of Artificial Sequence: Synthetic oligonucleotide
  Sense strand starting at position 1771 of SEQ ID NO: 1885032
guaaguauacuagguauug

SEQ ID NO: 2310871 - RNA, 19 nt, Artificial Sequence
  Description of Artificial Sequence: Synthetic oligonucleotide
  Antisense strand to SEQ ID NO: 2310870
caauaccuaguauacuuac

SEQ ID NO: 2310872 - RNA, 19 nt, Artificial Sequence
  Description of Artificial Sequence: Synthetic oligonucleotide
  Sense strand starting at position 1772 of SEQ ID NO: 1885032
uaaguauacuagguauuga

SEQ ID NO: 2310873 - RNA, 19 nt, Artificial Sequence
  Description of Artificial Sequence: Synthetic oligonucleotide
  Antisense strand to SEQ ID NO: 2310872
ucaauaccuaguauacuua

SEQ ID NO: 2310874 - RNA, 19 nt, Artificial Sequence
  Description of Artificial Sequence: Synthetic oligonucleotide
  Sense strand starting at position 1889 of SEQ ID NO: 1885032
ugagaaaggaaucggcauu

SEQ ID NO: 2310875 - RNA, 19 nt, Artificial Sequence
  Description of Artificial Sequence: Synthetic oligonucleotide
  Antisense strand to SEQ ID NO: 2310874
aaugccgauuccuuucuca

SEQ ID NO: 2310876 - RNA, 19 nt, Artificial Sequence
  Description of Artificial Sequence: Synthetic oligonucleotide
  Sense strand starting at position 2009 of SEQ ID NO: 1885032
guugaagccuaaguagaaa

SEQ ID NO: 2310877 - RNA, 19 nt, Artificial Sequence
  Description of Artificial Sequence: Synthetic oligonucleotide
  Antisense strand to SEQ ID NO: 2310876
uuucuacuuaggcuucaac

SEQ ID NO: 2310878 - RNA, 19 nt, Artificial Sequence
  Description of Artificial Sequence: Synthetic oligonucleotide
  Sense strand starting at position 2117 of SEQ ID NO: 1885032
ugugaagaguuacuucuga

SEQ ID NO: 2310879 - RNA, 19 nt, Artificial Sequence
  Description of Artificial Sequence: Synthetic oligonucleotide
  Antisense strand to SEQ ID NO: 2310878
ucagaaguaacucuucaca

SEQ ID NO: 2310880 - RNA, 19 nt, Artificial Sequence
  Description of Artificial Sequence: Synthetic oligonucleotide
  Sense strand starting at position 2124 of SEQ ID NO: 1885032
aguuacuucugacuuuaug

SEQ ID NO: 2310881 - RNA, 19 nt, Artificial Sequence
  Description of Artificial Sequence: Synthetic oligonucleotide
  Antisense strand to SEQ ID NO: 2310880
cauaaagucagaaguaacu

SEQ ID NO: 2310882 - RNA, 19 nt, Artificial Sequence
  Description of Artificial Sequence: Synthetic oligonucleotide
  Sense strand starting at position 2132 of SEQ ID NO: 1885032
cugacuuuaugauugauag

SEQ ID NO: 2310883 - RNA, 19 nt, Artificial Sequence
  Description of Artificial Sequence: Synthetic oligonucleotide
  Antisense strand to SEQ ID NO: 2310882
cuaucaaucauaaagucag

SEQ ID NO: 2310884 - RNA, 19 nt, Artificial Sequence
  Description of Artificial Sequence: Synthetic oligonucleotide
  Sense strand starting at position 2572 of SEQ ID NO: 1885032
agcaaagucauaggagcaa

SEQ ID NO: 2310885 - RNA, 19 nt, Artificial Sequence
  Description of Artificial Sequence: Synthetic oligonucleotide
  Antisense strand to SEQ ID NO: 2310884
uugcuccuaugacuuugcu

SEQ ID NO: 2310886 - RNA, 19 nt, Artificial Sequence
  Description of Artificial Sequence: Synthetic oligonucleotide
  Sense strand starting at position 2628 of SEQ ID NO: 1885032
auauaucacguaggaggaa

SEQ ID NO: 2310887 - RNA, 19 nt, Artificial Sequence
  Description of Artificial Sequence: Synthetic oligonucleotide
  Antisense strand to SEQ ID NO: 2310886
uuccuccuacgugauauau

SEQ ID NO: 2310888 - RNA, 19 nt, Artificial Sequence
  Description of Artificial Sequence: Synthetic oligonucleotide
  Sense strand starting at position 2699 of SEQ ID NO: 1885032
agggcauuccaagggaauu

SEQ ID NO: 2310889 - RNA, 19 nt, Artificial Sequence
  Description of Artificial Sequence: Synthetic oligonucleotide
  Antisense strand to SEQ ID NO: 2310888
aauucccuuggaaugcccu

SEQ ID NO: 2310890 - RNA, 19 nt, Artificial Sequence
  Description of Artificial Sequence: Synthetic oligonucleotide
  Sense strand starting at position 2700 of SEQ ID NO: 1885032
gggcauuccaagggaauua

SEQ ID NO: 2310891 - RNA, 19 nt, Artificial Sequence
  Description of Artificial Sequence: Synthetic oligonucleotide
  Antisense strand to SEQ ID NO: 2310890
uaauucccuuggaaugccc

SEQ ID NO: 2310892 - RNA, 19 nt, Artificial Sequence
  Description of Artificial Sequence: Synthetic oligonucleotide
  Sense strand starting at position 2752 of SEQ ID NO: 1885032
gaggaacucugagaugaga

SEQ ID NO: 2310893 - RNA, 19 nt, Artificial Sequence
  Description of Artificial Sequence: Synthetic oligonucleotide
  Antisense strand to SEQ ID NO: 2310892
ucucaucucagaguuccuc

SEQ ID NO: 2310894 - RNA, 19 nt, Artificial Sequence
  Description of Artificial Sequence: Synthetic oligonucleotide
  Sense strand starting at position 2772 of SEQ ID NO: 1885032
auuuaacuagcacguuuau

SEQ ID NO: 2310895 - RNA, 19 nt, Artificial Sequence
  Description of Artificial Sequence: Synthetic oligonucleotide
  Antisense strand to SEQ ID NO: 2310894
auaaacgugcuaguuaaau

SEQ ID NO: 2310896 - RNA, 19 nt, Artificial Sequence
  Description of Artificial Sequence: Synthetic oligonucleotide
  Sense strand starting at position 2822 of SEQ ID NO: 1885032
ugacaugccagagguaaau

SEQ ID NO: 2310897 - RNA, 19 nt, Artificial Sequence
  Description of Artificial Sequence: Synthetic oligonucleotide
  Antisense strand to SEQ ID NO: 2310896
auuuaccucuggcauguca

SEQ ID NO: 2310898 - RNA, 19 nt, Artificial Sequence
  Description of Artificial Sequence: Synthetic oligonucleotide
  Sense strand starting at position 2850 of SEQ ID NO: 1885032
cuugacuguagugaguaau

SEQ ID NO: 2310899 - RNA, 19 nt, Artificial Sequence
  Description of Artificial Sequence: Synthetic oligonucleotide
  Antisense strand to SEQ ID NO: 2310898
auuacucacuacagucaag

SEQ ID NO: 2310900 - RNA, 19 nt, Artificial Sequence
  Description of Artificial Sequence: Synthetic oligonucleotide
  Sense strand starting at position 2860 of SEQ ID NO: 1885032
gugaguaauuucccagcua

SEQ ID NO: 2310901 - RNA, 19 nt, Artificial Sequence
  Description of Artificial Sequence: Synthetic oligonucleotide
  Antisense strand to SEQ ID NO: 2310900
uagcugggaaauuacucac

SEQ ID NO: 2310902 - RNA, 19 nt, Artificial Sequence
  Description of Artificial Sequence: Synthetic oligonucleotide
  Sense strand starting at position 2919 of SEQ ID NO: 1885032
auauuacguuuguccauuu

SEQ ID NO: 2310903 - RNA, 19 nt, Artificial Sequence
  Description of Artificial Sequence: Synthetic oligonucleotide
  Antisense strand to SEQ ID NO: 2310902
aaauggacaaacguaauau

SEQ ID NO: 2310904 - RNA, 19 nt, Artificial Sequence
  Description of Artificial Sequence: Synthetic oligonucleotide
  Sense strand starting at position 2932 of SEQ ID NO: 1885032
ccauuuaaggucuguuucu

SEQ ID NO: 2310905 - RNA, 19 nt, Artificial Sequence
  Description of Artificial Sequence: Synthetic oligonucleotide
  Antisense strand to SEQ ID NO: 2310904
agaaacagaccuuaaaugg

SEQ ID NO: 2310906 - RNA, 19 nt, Artificial Sequence
  Description of Artificial Sequence: Synthetic oligonucleotide
  Sense strand starting at position 2956 of SEQ ID NO: 1885032
uucagacaggcuuguggau

SEQ ID NO: 2310907 - RNA, 19 nt, Artificial Sequence
  Description of Artificial Sequence: Synthetic oligonucleotide
  Antisense strand to SEQ ID NO: 2310906
auccacaagccugucugaa

SEQ ID NO: 2310908 - RNA, 19 nt, Artificial Sequence
  Description of Artificial Sequence: Synthetic oligonucleotide
  Sense strand starting at position 3405 of SEQ ID NO: 1885032
ugucaauuagcaugaauga

SEQ ID NO: 2310909 - RNA, 19 nt, Artificial Sequence
  Description of Artificial Sequence: Synthetic oligonucleotide
  Antisense strand to SEQ ID NO: 2310908
ucauucaugcuaauugaca

SEQ ID NO: 2310910 - RNA, 19 nt, Artificial Sequence
  Description of Artificial Sequence: Synthetic oligonucleotide
  Sense strand starting at position 3507 of SEQ ID NO: 1885032
ggaagagaauuugggcuua

SEQ ID NO: 2310911 - RNA, 19 nt, Artificial Sequence
  Description of Artificial Sequence: Synthetic oligonucleotide
  Antisense strand to SEQ ID NO: 2310910
uaagcccaaauucucuucc

SEQ ID NO: 2310912 - RNA, 19 nt, Artificial Sequence
  Description of Artificial Sequence: Synthetic oligonucleotide
  Sense strand starting at position 3606 of SEQ ID NO: 1885032
ggaggaagcucuguuacag

SEQ ID NO: 2310913 - RNA, 19 nt, Artificial Sequence
  Description of Artificial Sequence: Synthetic oligonucleotide
  Antisense strand to SEQ ID NO: 2310912
cuguaacagagcuuccucc

SEQ ID NO: 2310914 - RNA, 19 nt, Artificial Sequence
  Description of Artificial Sequence: Synthetic oligonucleotide
  Sense strand starting at position 3777 of SEQ ID NO: 1885032
gugcuagcuguauuaucuu

SEQ ID NO: 2310915 - RNA, 19 nt, Artificial Sequence
  Description of Artificial Sequence: Synthetic oligonucleotide
  Antisense strand to SEQ ID NO: 2310914
aagauaauacagcuagcac

SEQ ID NO: 2310916 - RNA, 19 nt, Artificial Sequence
  Description of Artificial Sequence: Synthetic oligonucleotide
  Sense strand starting at position 3784 of SEQ ID NO: 1885032
cuguauuaucuugagcaag

SEQ ID NO: 2310917 - RNA, 19 nt, Artificial Sequence
  Description of Artificial Sequence: Synthetic oligonucleotide
  Antisense strand to SEQ ID NO: 2310916
cuugcucaagauaauacag

SEQ ID NO: 2310918 - RNA, 19 nt, Artificial Sequence
  Description of Artificial Sequence: Synthetic oligonucleotide
  Sense strand starting at position 46 of SEQ ID NO: 1885033
ggcagagauaccugaagcu

SEQ ID NO: 2310919 - RNA, 19 nt, Artificial Sequence
  Description of Artificial Sequence: Synthetic oligonucleotide
  Antisense strand to SEQ ID NO: 2310918
agcuucagguaucucugcc

SEQ ID NO: 2310920 - RNA, 19 nt, Artificial Sequence
  Description of Artificial Sequence: Synthetic oligonucleotide
  Sense strand starting at position 84 of SEQ ID NO: 1885033
gagccaugagcugacagau

SEQ ID NO: 2310921 - RNA, 19 nt, Artificial Sequence
  Description of Artificial Sequence: Synthetic oligonucleotide
  Antisense strand to SEQ ID NO: 2310920
aucugucagcucauggcuc

SEQ ID NO: 2310922 - RNA, 19 nt, Artificial Sequence
  Description of Artificial Sequence: Synthetic oligonucleotide
  Sense strand starting at position 94 of SEQ ID NO: 1885033
cugacagauuuguggauaa

SEQ ID NO: 2310923 - RNA, 19 nt, Artificial Sequence
  Description of Artificial Sequence: Synthetic oligonucleotide
  Antisense strand to SEQ ID NO: 2310922
uuauccacaaaucugucag

SEQ ID NO: 2310924 - RNA, 19 nt, Artificial Sequence
  Description of Artificial Sequence: Synthetic oligonucleotide
  Sense strand starting at position 152 of SEQ ID NO: 1885033
cucccuggcuuccugagau

SEQ ID NO: 2310925 - RNA, 19 nt, Artificial Sequence
  Description of Artificial Sequence: Synthetic oligonucleotide
  Antisense strand to SEQ ID NO: 2310924
aucucaggaagccagggag

SEQ ID NO: 2310926 - RNA, 19 nt, Artificial Sequence
  Description of Artificial Sequence: Synthetic oligonucleotide
  Sense strand starting at position 167 of SEQ ID NO: 1885033
agauucuugagguguguaa

SEQ ID NO: 2310927 - RNA, 19 nt, Artificial Sequence
  Description of Artificial Sequence: Synthetic oligonucleotide
  Antisense strand to SEQ ID NO: 2310926
uuacacaccucaagaaucu

SEQ ID NO: 2310928 - RNA, 19 nt, Artificial Sequence
  Description of Artificial Sequence: Synthetic oligonucleotide
  Sense strand starting at position 169 of SEQ ID NO: 1885033
auucuugagguguguaauu

SEQ ID NO: 2310929 - RNA, 19 nt, Artificial Sequence
  Description of Artificial Sequence: Synthetic oligonucleotide
  Antisense strand to SEQ ID NO: 2310928
aauuacacaccucaagaau

SEQ ID NO: 2310930 - RNA, 19 nt, Artificial Sequence
  Description of Artificial Sequence: Synthetic oligonucleotide
  Sense strand starting at position 268 of SEQ ID NO: 1885033
ggcugcgugacaucugcua

SEQ ID NO: 2310931 - RNA, 19 nt, Artificial Sequence
  Description of Artificial Sequence: Synthetic oligonucleotide
  Antisense strand to SEQ ID NO: 2310930
uagcagaugucacgcagcc

SEQ ID NO: 2310932 - RNA, 19 nt, Artificial Sequence
  Description of Artificial Sequence: Synthetic oligonucleotide
  Sense strand starting at position 353 of SEQ ID NO: 1885033
ggccuuuaacuugacuaaa

SEQ ID NO: 2310933 - RNA, 19 nt, Artificial Sequence
  Description of Artificial Sequence: Synthetic oligonucleotide
  Antisense strand to SEQ ID NO: 2310932
uuuagucaaguuaaaggcc

SEQ ID NO: 2310934 - RNA, 19 nt, Artificial Sequence
  Description of Artificial Sequence: Synthetic oligonucleotide
  Sense strand starting at position 388 of SEQ ID NO: 1885033
ugcgucagccauguuaaca

SEQ ID NO: 2310935 - RNA, 19 nt, Artificial Sequence
  Description of Artificial Sequence: Synthetic oligonucleotide
  Antisense strand to SEQ ID NO: 2310934
uguuaacauggcugacgca

SEQ ID NO: 2310936 - RNA, 19 nt, Artificial Sequence
  Description of Artificial Sequence: Synthetic oligonucleotide
  Sense strand starting at position 434 of SEQ ID NO: 1885033
uggcuuaggcauugagaau

SEQ ID NO: 2310937 - RNA, 19 nt, Artificial Sequence
  Description of Artificial Sequence: Synthetic oligonucleotide
  Antisense strand to SEQ ID NO: 2310936
auucucaaugccuaagcca

SEQ ID NO: 2310938 - RNA, 19 nt, Artificial Sequence
  Description of Artificial Sequence: Synthetic oligonucleotide
  Sense strand starting at position 435 of SEQ ID NO: 1885033
ggcuuaggcauugagaauu

SEQ ID NO: 2310939 - RNA, 19 nt, Artificial Sequence
  Description of Artificial Sequence: Synthetic oligonucleotide
  Antisense strand to SEQ ID NO: 2310938
aauucucaaugccuaagcc

SEQ ID NO: 2310940 - RNA, 19 nt, Artificial Sequence
  Description of Artificial Sequence: Synthetic oligonucleotide
  Sense strand starting at position 602 of SEQ ID NO: 1885033
ccuggauccuucucugauu

SEQ ID NO: 2310941 - RNA, 19 nt, Artificial Sequence
  Description of Artificial Sequence: Synthetic oligonucleotide
  Antisense strand to SEQ ID NO: 2310940
aaucagagaaggauccagg

SEQ ID NO: 2310942 - RNA, 19 nt, Artificial Sequence
  Description of Artificial Sequence: Synthetic oligonucleotide
  Sense strand starting at position 616 of SEQ ID NO: 1885033
ugauucuuggacugucaau

SEQ ID NO: 2310943 - RNA, 19 nt, Artificial Sequence
  Description of Artificial Sequence: Synthetic oligonucleotide
  Antisense strand to SEQ ID NO: 2310942
auugacaguccaagaauca

SEQ ID NO: 2310944 - RNA, 19 nt, Artificial Sequence
  Description of Artificial Sequence: Synthetic oligonucleotide
  Sense strand starting at position 622 of SEQ ID NO: 1885033
uuggacugucaaugucaca

SEQ ID NO: 2310945 - RNA, 19 nt, Artificial Sequence
  Description of Artificial Sequence: Synthetic oligonucleotide
  Antisense strand to SEQ ID NO: 2310944
ugugacauugacaguccaa

SEQ ID NO: 2310946 - RNA, 19 nt, Artificial Sequence
  Description of Artificial Sequence: Synthetic oligonucleotide
  Sense strand starting at position 887 of SEQ ID NO: 1885033
ucagaauugcaaggugacu

SEQ ID NO: 2310947 - RNA, 19 nt, Artificial Sequence
  Description of Artificial Sequence: Synthetic oligonucleotide
  Antisense strand to SEQ ID NO: 2310946
agucaccuugcaauucuga

SEQ ID NO: 2310948 - RNA, 19 nt, Artificial Sequence
  Description of Artificial Sequence: Synthetic oligonucleotide
  Sense strand starting at position 896 of SEQ ID NO: 1885033
caaggugacuuccugcuau

SEQ ID NO: 2310949 - RNA, 19 nt, Artificial Sequence
  Description of Artificial Sequence: Synthetic oligonucleotide
  Antisense strand to SEQ ID NO: 2310948
auagcaggaagucaccuug

SEQ ID NO: 2310950 - RNA, 19 nt, Artificial Sequence
  Description of Artificial Sequence: Synthetic oligonucleotide
  Sense strand starting at position 1616 of SEQ ID NO: 1885033
gcuccuuggcagcuguaua

SEQ ID NO: 2310951 - RNA, 19 nt, Artificial Sequence
  Description of Artificial Sequence: Synthetic oligonucleotide
  Antisense strand to SEQ ID NO: 2310950
uauacagcugccaaggagc

SEQ ID NO: 2310952 - RNA, 19 nt, Artificial Sequence
  Description of Artificial Sequence: Synthetic oligonucleotide
  Sense strand starting at position 1626 of SEQ ID NO: 1885033
agcuguauaugcuugaaug

SEQ ID NO: 2310953 - RNA, 19 nt, Artificial Sequence
  Description of Artificial Sequence: Synthetic oligonucleotide
  Antisense strand to SEQ ID NO: 2310952
cauucaagcauauacagcu

SEQ ID NO: 2310954 - RNA, 19 nt, Artificial Sequence
  Description of Artificial Sequence: Synthetic oligonucleotide
  Sense strand starting at position 1628 of SEQ ID NO: 1885033
cuguauaugcuugaaugua

SEQ ID NO: 2310955 - RNA, 19 nt, Artificial Sequence
  Description of Artificial Sequence: Synthetic oligonucleotide
  Antisense strand to SEQ ID NO: 2310954
uacauucaagcauauacag

SEQ ID NO: 2310956 - RNA, 19 nt, Artificial Sequence
  Description of Artificial Sequence: Synthetic oligonucleotide
  Sense strand starting at position 1674 of SEQ ID NO: 1885033
gggauauucuugucagagu

SEQ ID NO: 2310957 - RNA, 19 nt, Artificial Sequence
  Description of Artificial Sequence: Synthetic oligonucleotide
  Antisense strand to SEQ ID NO: 2310956
acucugacaagaauauccc

SEQ ID NO: 2310958 - RNA, 19 nt, Artificial Sequence
  Description of Artificial Sequence: Synthetic oligonucleotide
  Sense strand starting at position 1687 of SEQ ID NO: 1885033
cagagugaauccguuagca

SEQ ID NO: 2310959 - RNA, 19 nt, Artificial Sequence
  Description of Artificial Sequence: Synthetic oligonucleotide
  Antisense strand to SEQ ID NO: 2310958
ugcuaacggauucacucug

SEQ ID NO: 2310960 - RNA, 19 nt, Artificial Sequence
  Description of Artificial Sequence: Synthetic oligonucleotide
  Sense strand starting at position 1689 of SEQ ID NO: 1885033
gagugaauccguuagcaug

SEQ ID NO: 2310961 - RNA, 19 nt, Artificial Sequence
  Description of Artificial Sequence: Synthetic oligonucleotide
  Antisense strand to SEQ ID NO: 2310960
caugcuaacggauucacuc

SEQ ID NO: 2310962 - RNA, 19 nt, Artificial Sequence
  Description of Artificial Sequence: Synthetic oligonucleotide
  Sense strand starting at position 1691 of SEQ ID NO: 1885033
gugaauccguuagcaugaa

SEQ ID NO: 2310963 - RNA, 19 nt, Artificial Sequence
  Description of Artificial Sequence: Synthetic oligonucleotide
  Antisense strand to SEQ ID NO: 2310962
uucaugcuaacggauucac

SEQ ID NO: 2310964 - RNA, 19 nt, Artificial Sequence
  Description of Artificial Sequence: Synthetic oligonucleotide
  Sense strand starting at position 1753 of SEQ ID NO: 1885033
uucugaacuccaugacaug

SEQ ID NO: 2310965 - RNA, 19 nt, Artificial Sequence
  Description of Artificial Sequence: Synthetic oligonucleotide
  Antisense strand to SEQ ID NO: 2310964
caugucauggaguucagaa

SEQ ID NO: 2310966 - RNA, 19 nt, Artificial Sequence
  Description of Artificial Sequence: Synthetic oligonucleotide
  Sense strand starting at position 1884 of SEQ ID NO: 1885033
acuguuaacugccuaggau

SEQ ID NO: 2310967 - RNA, 19 nt, Artificial Sequence
  Description of Artificial Sequence: Synthetic oligonucleotide
  Antisense strand to SEQ ID NO: 2310966
auccuaggcaguuaacagu

SEQ ID NO: 2310968 - RNA, 19 nt, Artificial Sequence
  Description of Artificial Sequence: Synthetic oligonucleotide
  Sense strand starting at position 1885 of SEQ ID NO: 1885033
cuguuaacugccuaggauu

SEQ ID NO: 2310969 - RNA, 19 nt, Artificial Sequence
  Description of Artificial Sequence: Synthetic oligonucleotide
  Antisense strand to SEQ ID NO: 2310968
aauccuaggcaguuaacag

SEQ ID NO: 2310970 - RNA, 19 nt, Artificial Sequence
  Description of Artificial Sequence: Synthetic oligonucleotide
  Sense strand starting at position 1887 of SEQ ID NO: 1885033
guuaacugccuaggauuau

SEQ ID NO: 2310971 - RNA, 19 nt, Artificial Sequence
  Description of Artificial Sequence: Synthetic oligonucleotide
  Antisense strand to SEQ ID NO: 2310970
auaauccuaggcaguuaac

SEQ ID NO: 2310972 - RNA, 19 nt, Artificial Sequence
  Description of Artificial Sequence: Synthetic oligonucleotide
  Sense strand starting at position 1910 of SEQ ID NO: 1885033
guuagaugagaucguagau

SEQ ID NO: 2310973 - RNA, 19 nt, Artificial Sequence
  Description of Artificial Sequence: Synthetic oligonucleotide
  Antisense strand to SEQ ID NO: 2310972
aucuacgaucucaucuaac

SEQ ID NO: 2310974 - RNA, 19 nt, Artificial Sequence
  Description of Artificial Sequence: Synthetic oligonucleotide
  Sense strand starting at position 1919 of SEQ ID NO: 1885033
gaucguagaugcucaauaa

SEQ ID NO: 2310975 - RNA, 19 nt, Artificial Sequence
  Description of Artificial Sequence: Synthetic oligonucleotide
  Antisense strand to SEQ ID NO: 2310974
uuauugagcaucuacgauc

SEQ ID NO: 2310976 - RNA, 19 nt, Artificial Sequence
  Description of Artificial Sequence: Synthetic oligonucleotide
  Sense strand starting at position 2005 of SEQ ID NO: 1885033
guuuauuuaugugagacag

SEQ ID NO: 2310977 - RNA, 19 nt, Artificial Sequence
  Description of Artificial Sequence: Synthetic oligonucleotide
  Antisense strand to SEQ ID NO: 2310976
cugucucacauaaauaaac

SEQ ID NO: 2310978 - RNA, 19 nt, Artificial Sequence
  Description of Artificial Sequence: Synthetic oligonucleotide
  Sense strand starting at position 2343 of SEQ ID NO: 1885033
auguuacuauccucuugga

SEQ ID NO: 2310979 - RNA, 19 nt, Artificial Sequence
  Description of Artificial Sequence: Synthetic oligonucleotide
  Antisense strand to SEQ ID NO: 2310978
uccaagaggauaguaacau

SEQ ID NO: 2310980 - RNA, 19 nt, Artificial Sequence
  Description of Artificial Sequence: Synthetic oligonucleotide
  Sense strand starting at position 2536 of SEQ ID NO: 1885033
uuaguagacucuuccaaag

SEQ ID NO: 2310981 - RNA, 19 nt, Artificial Sequence
  Description of Artificial Sequence: Synthetic oligonucleotide
  Antisense strand to SEQ ID NO: 2310980
cuuuggaagagucuacuaa

SEQ ID NO: 2310982 - RNA, 19 nt, Artificial Sequence
  Description of Artificial Sequence: Synthetic oligonucleotide
  Sense strand starting at position 2555 of SEQ ID NO: 1885033
uagaaauauuucuggguca

SEQ ID NO: 2310983 - RNA, 19 nt, Artificial Sequence
  Description of Artificial Sequence: Synthetic oligonucleotide
  Antisense strand to SEQ ID NO: 2310982
ugacccagaaauauuucua

SEQ ID NO: 2310984 - RNA, 19 nt, Artificial Sequence
  Description of Artificial Sequence: Synthetic oligonucleotide
  Sense strand starting at position 2556 of SEQ ID NO: 1885033
agaaauauuucugggucag

SEQ ID NO: 2310985 - RNA, 19 nt, Artificial Sequence
  Description of Artificial Sequence: Synthetic oligonucleotide
  Antisense strand to SEQ ID NO: 2310984
cugacccagaaauauuucu

SEQ ID NO: 2310986 - RNA, 19 nt, Artificial Sequence
  Description of Artificial Sequence: Synthetic oligonucleotide
  Sense strand starting at position 2615 of SEQ ID NO: 1885033
ggugguucuguuuggaaag

SEQ ID NO: 2310987 - RNA, 19 nt, Artificial Sequence
  Description of Artificial Sequence: Synthetic oligonucleotide
  Antisense strand to SEQ ID NO: 2310986
cuuuccaaacagaaccacc

SEQ ID NO: 2310988 - RNA, 19 nt, Artificial Sequence
  Description of Artificial Sequence: Synthetic oligonucleotide
  Sense strand starting at position 2669 of SEQ ID NO: 1885033
uuuggcuugaaaugaguaa

SEQ ID NO: 2310989 - RNA, 19 nt, Artificial Sequence
  Description of Artificial Sequence: Synthetic oligonucleotide
  Antisense strand to SEQ ID NO: 2310988
uuacucauuucaagccaaa

SEQ ID NO: 2310990 - RNA, 19 nt, Artificial Sequence
  Description of Artificial Sequence: Synthetic oligonucleotide
  Sense strand starting at position 2709 of SEQ ID NO: 1885033
cugagucagcagugaguaa

SEQ ID NO: 2310991 - RNA, 19 nt, Artificial Sequence
  Description of Artificial Sequence: Synthetic oligonucleotide
  Antisense strand to SEQ ID NO: 2310990
uuacucacugcugacucag

SEQ ID NO: 2310992 - RNA, 19 nt, Artificial Sequence
  Description of Artificial Sequence: Synthetic oligonucleotide
  Sense strand starting at position 2843 of SEQ ID NO: 1885033
gucaccugcucagucagaa

SEQ ID NO: 2310993 - RNA, 19 nt, Artificial Sequence
  Description of Artificial Sequence: Synthetic oligonucleotide
  Antisense strand to SEQ ID NO: 2310992
uucugacugagcaggugac

SEQ ID NO: 2310994 - RNA, 19 nt, Artificial Sequence
  Description of Artificial Sequence: Synthetic oligonucleotide
  Sense strand starting at position 2926 of SEQ ID NO: 1885033
guguuucuucccgcagcaa

SEQ ID NO: 2310995 - RNA, 19 nt, Artificial Sequence
  Description of Artificial Sequence: Synthetic oligonucleotide
  Antisense strand to SEQ ID NO: 2310994
uugcugcgggaagaaacac

SEQ ID NO: 2310996 - RNA, 19 nt, Artificial Sequence
  Description of Artificial Sequence: Synthetic oligonucleotide
  Sense strand starting at position 3105 of SEQ ID NO: 1885033
ccuccugccucuucugaga

SEQ ID NO: 2310997 - RNA, 19 nt, Artificial Sequence
  Description of Artificial Sequence: Synthetic oligonucleotide
  Antisense strand to SEQ ID NO: 2310996
ucucagaagaggcaggagg

SEQ ID NO: 2310998 - RNA, 19 nt, Artificial Sequence
  Description of Artificial Sequence: Synthetic oligonucleotide
  Sense strand starting at position 119 of SEQ ID NO: 1885034
aggagagguucagugauua

SEQ ID NO: 2310999 - RNA, 19 nt, Artificial Sequence
  Description of Artificial Sequence: Synthetic oligonucleotide
  Antisense strand to SEQ ID NO: 2310998
uaaucacugaaccucuccu

SEQ ID NO: 2311000 - RNA, 19 nt, Artificial Sequence
  Description of Artificial Sequence: Synthetic oligonucleotide
  Sense strand starting at position 141 of SEQ ID NO: 1885034
uuugaaccgaaugguuauu

SEQ ID NO: 2311001 - RNA, 19 nt, Artificial Sequence
  Description of Artificial Sequence: Synthetic oligonucleotide
  Antisense strand to SEQ ID NO: 2311000
aauaaccauucgguucaaa

SEQ ID NO: 2311002 - RNA, 19 nt, Artificial Sequence
  Description of Artificial Sequence: Synthetic oligonucleotide
  Sense strand starting at position 241 of SEQ ID NO: 1885034
ggaaaugucacaggucauu

SEQ ID NO: 2311003 - RNA, 19 nt, Artificial Sequence
  Description of Artificial Sequence: Synthetic oligonucleotide
  Antisense strand to SEQ ID NO: 2311002
aaugaccugugacauuucc

SEQ ID NO: 2311004 - RNA, 19 nt, Artificial Sequence
  Description of Artificial Sequence: Synthetic oligonucleotide
  Sense strand starting at position 311 of SEQ ID NO: 1885034
guagacucccgguaaauau

SEQ ID NO: 2311005 - RNA, 19 nt, Artificial Sequence
  Description of Artificial Sequence: Synthetic oligonucleotide
  Antisense strand to SEQ ID NO: 2311004
auauuuaccgggagucuac

SEQ ID NO: 2311006 - RNA, 19 nt, Artificial Sequence
  Description of Artificial Sequence: Synthetic oligonucleotide
  Sense strand starting at position 921 of SEQ ID NO: 1885034
cuuuaauaauuaguccagu

SEQ ID NO: 2311007 - RNA, 19 nt, Artificial Sequence
  Description of Artificial Sequence: Synthetic oligonucleotide
  Antisense strand to SEQ ID NO: 2311006
acuggacuaauuauuaaag

SEQ ID NO: 2311008 - RNA, 19 nt, Artificial Sequence
  Description of Artificial Sequence: Synthetic oligonucleotide
  Sense strand starting at position 948 of SEQ ID NO: 1885034
augucaugugaauaugucu

SEQ ID NO: 2311009 - RNA, 19 nt, Artificial Sequence
  Description of Artificial Sequence: Synthetic oligonucleotide
  Antisense strand to SEQ ID NO: 2311008
agacauauucacaugacau

SEQ ID NO: 2311010 - RNA, 19 nt, Artificial Sequence
  Description of Artificial Sequence: Synthetic oligonucleotide
  Sense strand starting at position 955 of SEQ ID NO: 1885034
gugaauaugucucucagag

SEQ ID NO: 2311011 - RNA, 19 nt, Artificial Sequence
  Description of Artificial Sequence: Synthetic oligonucleotide
  Antisense strand to SEQ ID NO: 2311010
cucugagagacauauucac

SEQ ID NO: 2311012 - RNA, 19 nt, Artificial Sequence
  Description of Artificial Sequence: Synthetic oligonucleotide
  Sense strand starting at position 1005 of SEQ ID NO: 1885034
caaucuugucaggguccaa

SEQ ID NO: 2311013 - RNA, 19 nt, Artificial Sequence
  Description of Artificial Sequence: Synthetic oligonucleotide
  Antisense strand to SEQ ID NO: 2311012
uuggacccugacaagauug

SEQ ID NO: 2311014 - RNA, 19 nt, Artificial Sequence
  Description of Artificial Sequence: Synthetic oligonucleotide
  Sense strand starting at position 1029 of SEQ ID NO: 1885034
agaguagucucagcaaaca

SEQ ID NO: 2311015 - RNA, 19 nt, Artificial Sequence
  Description of Artificial Sequence: Synthetic oligonucleotide
  Antisense strand to SEQ ID NO: 2311014
uguuugcugagacuacucu

SEQ ID NO: 2311016 - RNA, 19 nt, Artificial Sequence
  Description of Artificial Sequence: Synthetic oligonucleotide
  Sense strand starting at position 1084 of SEQ ID NO: 1885034
gcugaaagacaaugucauc

SEQ ID NO: 2311017 - RNA, 19 nt, Artificial Sequence
  Description of Artificial Sequence: Synthetic oligonucleotide
  Antisense strand to SEQ ID NO: 2311016
gaugacauugucuuucagc

SEQ ID NO: 2311018 - RNA, 19 nt, Artificial Sequence
  Description of Artificial Sequence: Synthetic oligonucleotide
  Sense strand starting at position 1312 of SEQ ID NO: 1885034
acacuacuccuuuagaugu

SEQ ID NO: 2311019 - RNA, 19 nt, Artificial Sequence
  Description of Artificial Sequence: Synthetic oligonucleotide
  Antisense strand to SEQ ID NO: 2311018
acaucuaaaggaguagugu

SEQ ID NO: 2311020 - RNA, 19 nt, Artificial Sequence
  Description of Artificial Sequence: Synthetic oligonucleotide
  Sense strand starting at position 1629 of SEQ ID NO: 1885034
caaugcagucgagauuacu

SEQ ID NO: 2311021 - RNA, 19 nt, Artificial Sequence
  Description of Artificial Sequence: Synthetic oligonucleotide
  Antisense strand to SEQ ID NO: 2311020
aguaaucucgacugcauug

SEQ ID NO: 2311022 - RNA, 19 nt, Artificial Sequence
  Description of Artificial Sequence: Synthetic oligonucleotide
  Sense strand starting at position 1679 of SEQ ID NO: 1885034
aggagcuuugcauaaacaa

SEQ ID NO: 2311023 - RNA, 19 nt, Artificial Sequence
  Description of Artificial Sequence: Synthetic oligonucleotide
  Antisense strand to SEQ ID NO: 2311022
uuguuuaugcaaagcuccu

SEQ ID NO: 2311024 - RNA, 19 nt, Artificial Sequence
  Description of Artificial Sequence: Synthetic oligonucleotide
  Sense strand starting at position 1794 of SEQ ID NO: 1885034
uuucuuagaguagaaaguu

SEQ ID NO: 2311025 - RNA, 19 nt, Artificial Sequence
  Description of Artificial Sequence: Synthetic oligonucleotide
  Antisense strand to SEQ ID NO: 2311024
aacuuucuacucuaagaaa

SEQ ID NO: 2311026 - RNA, 19 nt, Artificial Sequence
  Description of Artificial Sequence: Synthetic oligonucleotide
  Sense strand starting at position 1803 of SEQ ID NO: 1885034
guagaaaguuuaguaucag

SEQ ID NO: 2311027 - RNA, 19 nt, Artificial Sequence
  Description of Artificial Sequence: Synthetic oligonucleotide
  Antisense strand to SEQ ID NO: 2311026
cugauacuaaacuuucuac

SEQ ID NO: 2311028 - RNA, 19 nt, Artificial Sequence
  Description of Artificial Sequence: Synthetic oligonucleotide
  Sense strand starting at position 1957 of SEQ ID NO: 1885034
aaaucaguugacugaaggu

SEQ ID NO: 2311029 - RNA, 19 nt, Artificial Sequence
  Description of Artificial Sequence: Synthetic oligonucleotide
  Antisense strand to SEQ ID NO: 2311028
accuucagucaacugauuu

SEQ ID NO: 2311030 - RNA, 19 nt, Artificial Sequence
  Description of Artificial Sequence: Synthetic oligonucleotide
  Sense strand starting at position 2376 of SEQ ID NO: 1885034
gggagccuagcccauuaaa

SEQ ID NO: 2311031 - RNA, 19 nt, Artificial Sequence
  Description of Artificial Sequence: Synthetic oligonucleotide
  Antisense strand to SEQ ID NO: 2311030
uuuaaugggcuaggcuccc

SEQ ID NO: 2311032 - RNA, 19 nt, Artificial Sequence
  Description of Artificial Sequence: Synthetic oligonucleotide
  Sense strand starting at position 2498 of SEQ ID NO: 1885034
ggguauguugaguacaacu

SEQ ID NO: 2311033 - RNA, 19 nt, Artificial Sequence
  Description of Artificial Sequence: Synthetic oligonucleotide
  Antisense strand to SEQ ID NO: 2311032
aguuguacucaacauaccc

SEQ ID NO: 2311034 - RNA, 19 nt, Artificial Sequence
  Description of Artificial Sequence: Synthetic oligonucleotide
  Sense strand starting at position 2500 of SEQ ID NO: 1885034
guauguugaguacaacuuu

SEQ ID NO: 2311035 - RNA, 19 nt, Artificial Sequence
  Description of Artificial Sequence: Synthetic oligonucleotide
  Antisense strand to SEQ ID NO: 2311034
aaaguuguacucaacauac

SEQ ID NO: 2311036 - RNA, 19 nt, Artificial Sequence
  Description of Artificial Sequence: Synthetic oligonucleotide
  Sense strand starting at position 2539 of SEQ ID NO: 1885034
gagauuacauguuuagguu

SEQ ID NO: 2311037 - RNA, 19 nt, Artificial Sequence
  Description of Artificial Sequence: Synthetic oligonucleotide
  Antisense strand to SEQ ID NO: 2311036
aaccuaaacauguaaucuc

SEQ ID NO: 2311038 - RNA, 19 nt, Artificial Sequence
  Description of Artificial Sequence: Synthetic oligonucleotide
  Sense strand starting at position 2540 of SEQ ID NO: 1885034
agauuacauguuuagguuu

SEQ ID NO: 2311039 - RNA, 19 nt, Artificial Sequence
  Description of Artificial Sequence: Synthetic oligonucleotide
  Antisense strand to SEQ ID NO: 2311038
aaaccuaaacauguaaucu

SEQ ID NO: 2311040 - RNA, 19 nt, Artificial Sequence
  Description of Artificial Sequence: Synthetic oligonucleotide
  Sense strand starting at position 2614 of SEQ ID NO: 1885034
cggucuggcauuuguuuaa

SEQ ID NO: 2311041 - RNA, 19 nt, Artificial Sequence
  Description of Artificial Sequence: Synthetic oligonucleotide
  Antisense strand to SEQ ID NO: 2311040
uuaaacaaaugccagaccg

SEQ ID NO: 2311042 - RNA, 19 nt, Artificial Sequence
  Description of Artificial Sequence: Synthetic oligonucleotide
  Sense strand starting at position 2617 of SEQ ID NO: 1885034
ucuggcauuuguuuaaauu

SEQ ID NO: 2311043 - RNA, 19 nt, Artificial Sequence
  Description of Artificial Sequence: Synthetic oligonucleotide
  Antisense strand to SEQ ID NO: 2311042
aauuuaaacaaaugccaga

SEQ ID NO: 2311044 - RNA, 19 nt, Artificial Sequence
  Description of Artificial Sequence: Synthetic oligonucleotide
  Sense strand starting at position 2805 of SEQ ID NO: 1885034
agguuaaugugggcugaga

SEQ ID NO: 2311045 - RNA, 19 nt, Artificial Sequence
  Description of Artificial Sequence: Synthetic oligonucleotide
  Antisense strand to SEQ ID NO: 2311044
ucucagcccacauuaaccu

SEQ ID NO: 2311046 - RNA, 19 nt, Artificial Sequence
  Description of Artificial Sequence: Synthetic oligonucleotide
  Sense strand starting at position 2886 of SEQ ID NO: 1885034
uuggccuaucuuugaagau

SEQ ID NO: 2311047 - RNA, 19 nt, Artificial Sequence
  Description of Artificial Sequence: Synthetic oligonucleotide
  Antisense strand to SEQ ID NO: 2311046
aucuucaaagauaggccaa

SEQ ID NO: 2311048 - RNA, 19 nt, Artificial Sequence
  Description of Artificial Sequence: Synthetic oligonucleotide
  Sense strand starting at position 2893 of SEQ ID NO: 1885034
aucuuugaagaucaacgua

SEQ ID NO: 2311049 - RNA, 19 nt, Artificial Sequence
  Description of Artificial Sequence: Synthetic oligonucleotide
  Antisense strand to SEQ ID NO: 2311048
uacguugaucuucaaagau

SEQ ID NO: 2311050 - RNA, 19 nt, Artificial Sequence
  Description of Artificial Sequence: Synthetic oligonucleotide
  Sense strand starting at position 2896 of SEQ ID NO: 1885034
uuugaagaucaacguauau

SEQ ID NO: 2311051 - RNA, 19 nt, Artificial Sequence
  Description of Artificial Sequence: Synthetic oligonucleotide
  Antisense strand to SEQ ID NO: 2311050
auauacguugaucuucaaa

SEQ ID NO: 2311052 - RNA, 19 nt, Artificial Sequence
  Description of Artificial Sequence: Synthetic oligonucleotide
  Sense strand starting at position 2990 of SEQ ID NO: 1885034
ccgacaacauccuuccgaa

SEQ ID NO: 2311053 - RNA, 19 nt, Artificial Sequence
  Description of Artificial Sequence: Synthetic oligonucleotide
  Antisense strand to SEQ ID NO: 2311052
uucggaaggauguugucgg

SEQ ID NO: 2311054 - RNA, 19 nt, Artificial Sequence
  Description of Artificial Sequence: Synthetic oligonucleotide
  Sense strand starting at position 3132 of SEQ ID NO: 1885034
gagauuauaugagucucca

SEQ ID NO: 2311055 - RNA, 19 nt, Artificial Sequence
  Description of Artificial Sequence: Synthetic oligonucleotide
  Antisense strand to SEQ ID NO: 2311054
uggagacucauauaaucuc

SEQ ID NO: 2311056 - RNA, 19 nt, Artificial Sequence
  Description of Artificial Sequence: Synthetic oligonucleotide
  Sense strand starting at position 3196 of SEQ ID NO: 1885034
guaacuucccaguaggaca

SEQ ID NO: 2311057 - RNA, 19 nt, Artificial Sequence
  Description of Artificial Sequence: Synthetic oligonucleotide
  Antisense strand to SEQ ID NO: 2311056
uguccuacugggaaguuac

SEQ ID NO: 2311058 - RNA, 19 nt, Artificial Sequence
  Description of Artificial Sequence: Synthetic oligonucleotide
  Sense strand starting at position 3279 of SEQ ID NO: 1885034
uacuuugacugucuggaau

SEQ ID NO: 2311059 - RNA, 19 nt, Artificial Sequence
  Description of Artificial Sequence: Synthetic oligonucleotide
  Antisense strand to SEQ ID NO: 2311058
auuccagacagucaaagua

SEQ ID NO: 2311060 - RNA, 19 nt, Artificial Sequence
  Description of Artificial Sequence: Synthetic oligonucleotide
  Sense strand starting at position 3290 of SEQ ID NO: 1885034
ucuggaauuuguuaggaag

SEQ ID NO: 2311061 - RNA, 19 nt, Artificial Sequence
  Description of Artificial Sequence: Synthetic oligonucleotide
  Antisense strand to SEQ ID NO: 2311060
cuuccuaacaaauuccaga

SEQ ID NO: 2311062 - RNA, 19 nt, Artificial Sequence
  Description of Artificial Sequence: Synthetic oligonucleotide
  Sense strand starting at position 3372 of SEQ ID NO: 1885034
cuagguuggaaaugaugua

SEQ ID NO: 2311063 - RNA, 19 nt, Artificial Sequence
  Description of Artificial Sequence: Synthetic oligonucleotide
  Antisense strand to SEQ ID NO: 2311062
uacaucauuuccaaccuag

SEQ ID NO: 2311064 - RNA, 19 nt, Artificial Sequence
  Description of Artificial Sequence: Synthetic oligonucleotide
  Sense strand starting at position 3412 of SEQ ID NO: 1885034
uacauaaauguguggguaa

SEQ ID NO: 2311065 - RNA, 19 nt, Artificial Sequence
  Description of Artificial Sequence: Synthetic oligonucleotide
  Antisense strand to SEQ ID NO: 2311064
uuacccacacauuuaugua

SEQ ID NO: 2311066 - RNA, 19 nt, Artificial Sequence
  Description of Artificial Sequence: Synthetic oligonucleotide
  Sense strand starting at position 3727 of SEQ ID NO: 1885034
caaggauaaugguuuaagu

SEQ ID NO: 2311067 - RNA, 19 nt, Artificial Sequence
  Description of Artificial Sequence: Synthetic oligonucleotide
  Antisense strand to SEQ ID NO: 2311066
acuuaaaccauuauccuug

SEQ ID NO: 2311068 - RNA, 19 nt, Artificial Sequence
  Description of Artificial Sequence: Synthetic oligonucleotide
  Sense strand starting at position 3735 of SEQ ID NO: 1885034
augguuuaagucugaccau

SEQ ID NO: 2311069 - RNA, 19 nt, Artificial Sequence
  Description of Artificial Sequence: Synthetic oligonucleotide
  Antisense strand to SEQ ID NO: 2311068
auggucagacuuaaaccau

SEQ ID NO: 2311070 - RNA, 19 nt, Artificial Sequence
  Description of Artificial Sequence: Synthetic oligonucleotide
  Sense strand starting at position 3762 of SEQ ID NO: 1885034
aacuuaaugugauugugau

SEQ ID NO: 2311071 - RNA, 19 nt, Artificial Sequence
  Description of Artificial Sequence: Synthetic oligonucleotide
  Antisense strand to SEQ ID NO: 2311070
aucacaaucacauuaaguu

SEQ ID NO: 2311072 - RNA, 19 nt, Artificial Sequence
  Description of Artificial Sequence: Synthetic oligonucleotide
  Sense strand starting at position 3763 of SEQ ID NO: 1885034
acuuaaugugauugugauc

SEQ ID NO: 2311073 - RNA, 19 nt, Artificial Sequence
  Description of Artificial Sequence: Synthetic oligonucleotide
  Antisense strand to SEQ ID NO: 2311072
gaucacaaucacauuaagu

SEQ ID NO: 2311074 - RNA, 19 nt, Artificial Sequence
  Description of Artificial Sequence: Synthetic oligonucleotide
  Sense strand starting at position 3819 of SEQ ID NO: 1885034
gaaaccacuguaugugaua

SEQ ID NO: 2311075 - RNA, 19 nt, Artificial Sequence
  Description of Artificial Sequence: Synthetic oligonucleotide
  Antisense strand to SEQ ID NO: 2311074
uaucacauacagugguuuc

SEQ ID NO: 2311076 - RNA, 19 nt, Artificial Sequence
  Description of Artificial Sequence: Synthetic oligonucleotide
  Sense strand starting at position 3880 of SEQ ID NO: 1885034
aaagauagcguugaauucu

SEQ ID NO: 2311077 - RNA, 19 nt, Artificial Sequence
  Description of Artificial Sequence: Synthetic oligonucleotide
  Antisense strand to SEQ ID NO: 2311076
agaauucaacgcuaucuuu

SEQ ID NO: 2311078 - RNA, 19 nt, Artificial Sequence
  Description of Artificial Sequence: Synthetic oligonucleotide
  Sense strand starting at position 31 of SEQ ID NO: 1885035
gguaaacauggguguccua

SEQ ID NO: 2311079 - RNA, 19 nt, Artificial Sequence
  Description of Artificial Sequence: Synthetic oligonucleotide
  Antisense strand to SEQ ID NO: 2311078
uaggacacccauguuuacc

SEQ ID NO: 2311080 - RNA, 19 nt, Artificial Sequence
  Description of Artificial Sequence: Synthetic oligonucleotide
  Sense strand starting at position 38 of SEQ ID NO: 1885035
auggguguccuaggaaaug

SEQ ID NO: 2311081 - RNA, 19 nt, Artificial Sequence
  Description of Artificial Sequence: Synthetic oligonucleotide
  Antisense strand to SEQ ID NO: 2311080
cauuuccuaggacacccau

SEQ ID NO: 2311082 - RNA, 19 nt, Artificial Sequence
  Description of Artificial Sequence: Synthetic oligonucleotide
  Sense strand starting at position 413 of SEQ ID NO: 1885035
auuauuaagucacuugaag

SEQ ID NO: 2311083 - RNA, 19 nt, Artificial Sequence
  Description of Artificial Sequence: Synthetic oligonucleotide
  Antisense strand to SEQ ID NO: 2311082
cuucaagugacuuaauaau

SEQ ID NO: 2311084 - RNA, 19 nt, Artificial Sequence
  Description of Artificial Sequence: Synthetic oligonucleotide
  Sense strand starting at position 478 of SEQ ID NO: 1885035
agggauuucuaucauacaa

SEQ ID NO: 2311085 - RNA, 19 nt, Artificial Sequence
  Description of Artificial Sequence: Synthetic oligonucleotide
  Antisense strand to SEQ ID NO: 2311084
uuguaugauagaaaucccu

SEQ ID NO: 2311086 - RNA, 19 nt, Artificial Sequence
  Description of Artificial Sequence: Synthetic oligonucleotide
  Sense strand starting at position 896 of SEQ ID NO: 1885035
uaugguaacaguggaaagu

SEQ ID NO: 2311087 - RNA, 19 nt, Artificial Sequence
  Description of Artificial Sequence: Synthetic oligonucleotide
  Antisense strand to SEQ ID NO: 2311086
acuuuccacuguuaccaua

SEQ ID NO: 2311088 - RNA, 19 nt, Artificial Sequence
  Description of Artificial Sequence: Synthetic oligonucleotide
  Sense strand starting at position 1000 of SEQ ID NO: 1885035
uaaguuauuguagaugcca

SEQ ID NO: 2311089 - RNA, 19 nt, Artificial Sequence
  Description of Artificial Sequence: Synthetic oligonucleotide
  Antisense strand to SEQ ID NO: 2311088
uggcaucuacaauaacuua

SEQ ID NO: 2311090 - RNA, 19 nt, Artificial Sequence
  Description of Artificial Sequence: Synthetic oligonucleotide
  Sense strand starting at position 1009 of SEQ ID NO: 1885035
guagaugccacuugauaug

SEQ ID NO: 2311091 - RNA, 19 nt, Artificial Sequence
  Description of Artificial Sequence: Synthetic oligonucleotide
  Antisense strand to SEQ ID NO: 2311090
cauaucaaguggcaucuac

SEQ ID NO: 2311092 - RNA, 19 nt, Artificial Sequence
  Description of Artificial Sequence: Synthetic oligonucleotide
  Sense strand starting at position 1018 of SEQ ID NO: 1885035
acuugauauggucgacaag

SEQ ID NO: 2311093 - RNA, 19 nt, Artificial Sequence
  Description of Artificial Sequence: Synthetic oligonucleotide
  Antisense strand to SEQ ID NO: 2311092
cuugucgaccauaucaagu

SEQ ID NO: 2311094 - RNA, 19 nt, Artificial Sequence
  Description of Artificial Sequence: Synthetic oligonucleotide
  Sense strand starting at position 1019 of SEQ ID NO: 1885035
cuugauauggucgacaagu

SEQ ID NO: 2311095 - RNA, 19 nt, Artificial Sequence
  Description of Artificial Sequence: Synthetic oligonucleotide
  Antisense strand to SEQ ID NO: 2311094
acuugucgaccauaucaag

SEQ ID NO: 2311096 - RNA, 19 nt, Artificial Sequence
  Description of Artificial Sequence: Synthetic oligonucleotide
  Sense strand starting at position 1021 of SEQ ID NO: 1885035
ugauauggucgacaagugu

SEQ ID NO: 2311097 - RNA, 19 nt, Artificial Sequence
  Description of Artificial Sequence: Synthetic oligonucleotide
  Antisense strand to SEQ ID NO: 2311096
acacuugucgaccauauca

SEQ ID NO: 2311098 - RNA, 19 nt, Artificial Sequence
  Description of Artificial Sequence: Synthetic oligonucleotide
  Sense strand starting at position 1025 of SEQ ID NO: 1885035
auggucgacaagugugaaa

SEQ ID NO: 2311099 - RNA, 19 nt, Artificial Sequence
  Description of Artificial Sequence: Synthetic oligonucleotide
  Antisense strand to SEQ ID NO: 2311098
uuucacacuugucgaccau

SEQ ID NO: 2311100 - RNA, 19 nt, Artificial Sequence
  Description of Artificial Sequence: Synthetic oligonucleotide
  Sense strand starting at position 1073 of SEQ ID NO: 1885035
auguauaaccuuugguauu

SEQ ID NO: 2311101 - RNA, 19 nt, Artificial Sequence
  Description of Artificial Sequence: Synthetic oligonucleotide
  Antisense strand to SEQ ID NO: 2311100
aauaccaaagguuauacau

SEQ ID NO: 2311102 - RNA, 19 nt, Artificial Sequence
  Description of Artificial Sequence: Synthetic oligonucleotide
  Sense strand starting at position 1453 of SEQ ID NO: 1885035
agaaguaaagccggugaga

SEQ ID NO: 2311103 - RNA, 19 nt, Artificial Sequence
  Description of Artificial Sequence: Synthetic oligonucleotide
  Antisense strand to SEQ ID NO: 2311102
ucucaccggcuuuacuucu

SEQ ID NO: 2311104 - RNA, 19 nt, Artificial Sequence
  Description of Artificial Sequence: Synthetic oligonucleotide
  Sense strand starting at position 2445 of SEQ ID NO: 1885035
gaacccaagcucggugaau

SEQ ID NO: 2311105 - RNA, 19 nt, Artificial Sequence
  Description of Artificial Sequence: Synthetic oligonucleotide
  Antisense strand to SEQ ID NO: 2311104
auucaccgagcuuggguuc

SEQ ID NO: 2311106 - RNA, 19 nt, Artificial Sequence
  Description of Artificial Sequence: Synthetic oligonucleotide
  Sense strand starting at position 2446 of SEQ ID NO: 1885035
aacccaagcucggugaaua

SEQ ID NO: 2311107 - RNA, 19 nt, Artificial Sequence
  Description of Artificial Sequence: Synthetic oligonucleotide
  Antisense strand to SEQ ID NO: 2311106
uauucaccgagcuuggguu

SEQ ID NO: 2311108 - RNA, 19 nt, Artificial Sequence
  Description of Artificial Sequence: Synthetic oligonucleotide
  Sense strand starting at position 2630 of SEQ ID NO: 1885035
ccaguucaucggugaacag

SEQ ID NO: 2311109 - RNA, 19 nt, Artificial Sequence
  Description of Artificial Sequence: Synthetic oligonucleotide
  Antisense strand to SEQ ID NO: 2311108
cuguucaccgaugaacugg

SEQ ID NO: 2311110 - RNA, 19 nt, Artificial Sequence
  Description of Artificial Sequence: Synthetic oligonucleotide
  Sense strand starting at position 2716 of SEQ ID NO: 1885035
uuguuuauacaggauagua

SEQ ID NO: 2311111 - RNA, 19 nt, Artificial Sequence
  Description of Artificial Sequence: Synthetic oligonucleotide
  Antisense strand to SEQ ID NO: 2311110
uacuauccuguauaaacaa

SEQ ID NO: 2311112 - RNA, 19 nt, Artificial Sequence
  Description of Artificial Sequence: Synthetic oligonucleotide
  Sense strand starting at position 2763 of SEQ ID NO: 1885035
ugccguacaccugaaauga

SEQ ID NO: 2311113 - RNA, 19 nt, Artificial Sequence
  Description of Artificial Sequence: Synthetic oligonucleotide
  Antisense strand to SEQ ID NO: 2311112
ucauuucagguguacggca

SEQ ID NO: 2311114 - RNA, 19 nt, Artificial Sequence
  Description of Artificial Sequence: Synthetic oligonucleotide
  Sense strand starting at position 2800 of SEQ ID NO: 1885035
uuugaagucaacgauuaug

SEQ ID NO: 2311115 - RNA, 19 nt, Artificial Sequence
  Description of Artificial Sequence: Synthetic oligonucleotide
  Antisense strand to SEQ ID NO: 2311114
cauaaucguugacuucaaa

SEQ ID NO: 2311116 - RNA, 19 nt, Artificial Sequence
  Description of Artificial Sequence: Synthetic oligonucleotide
  Sense strand starting at position 2803 of SEQ ID NO: 1885035
gaagucaacgauuauguua

SEQ ID NO: 2311117 - RNA, 19 nt, Artificial Sequence
  Description of Artificial Sequence: Synthetic oligonucleotide
  Antisense strand to SEQ ID NO: 2311116
uaacauaaucguugacuuc

SEQ ID NO: 2311118 - RNA, 19 nt, Artificial Sequence
  Description of Artificial Sequence: Synthetic oligonucleotide
  Sense strand starting at position 2806 of SEQ ID NO: 1885035
gucaacgauuauguuacaa

SEQ ID NO: 2311119 - RNA, 19 nt, Artificial Sequence
  Description of Artificial Sequence: Synthetic oligonucleotide
  Antisense strand to SEQ ID NO: 2311118
uuguaacauaaucguugac

SEQ ID NO: 2311120 - RNA, 19 nt, Artificial Sequence
  Description of Artificial Sequence: Synthetic oligonucleotide
  Sense strand starting at position 2887 of SEQ ID NO: 1885035
uggagaggcugguucaaga

SEQ ID NO: 2311121 - RNA, 19 nt, Artificial Sequence
  Description of Artificial Sequence: Synthetic oligonucleotide
  Antisense strand to SEQ ID NO: 2311120
ucuugaaccagccucucca

SEQ ID NO: 2311122 - RNA, 19 nt, Artificial Sequence
  Description of Artificial Sequence: Synthetic oligonucleotide
  Sense strand starting at position 2906 of SEQ ID NO: 1885035
gcccacaugcuauacagua

SEQ ID NO: 2311123 - RNA, 19 nt, Artificial Sequence
  Description of Artificial Sequence: Synthetic oligonucleotide
  Antisense strand to SEQ ID NO: 2311122
uacuguauagcaugugggc

SEQ ID NO: 2311124 - RNA, 19 nt, Artificial Sequence
  Description of Artificial Sequence: Synthetic oligonucleotide
  Sense strand starting at position 3027 of SEQ ID NO: 1885035
ugguuagcacaguacugau

SEQ ID NO: 2311125 - RNA, 19 nt, Artificial Sequence
  Description of Artificial Sequence: Synthetic oligonucleotide
  Antisense strand to SEQ ID NO: 2311124
aucaguacugugcuaacca

SEQ ID NO: 2311126 - RNA, 19 nt, Artificial Sequence
  Description of Artificial Sequence: Synthetic oligonucleotide
  Sense strand starting at position 3102 of SEQ ID NO: 1885035
uuaaguauucccgagcaug

SEQ ID NO: 2311127 - RNA, 19 nt, Artificial Sequence
  Description of Artificial Sequence: Synthetic oligonucleotide
  Antisense strand to SEQ ID NO: 2311126
caugcucgggaauacuuaa

SEQ ID NO: 2311128 - RNA, 19 nt, Artificial Sequence
  Description of Artificial Sequence: Synthetic oligonucleotide
  Sense strand starting at position 3105 of SEQ ID NO: 1885035
aguauucccgagcaugaug

SEQ ID NO: 2311129 - RNA, 19 nt, Artificial Sequence
  Description of Artificial Sequence: Synthetic oligonucleotide
  Antisense strand to SEQ ID NO: 2311128
caucaugcucgggaauacu

SEQ ID NO: 2311130 - RNA, 19 nt, Artificial Sequence
  Description of Artificial Sequence: Synthetic oligonucleotide
  Sense strand starting at position 3231 of SEQ ID NO: 1885035
gugagaaugcgauaaaggu

SEQ ID NO: 2311131 - RNA, 19 nt, Artificial Sequence
  Description of Artificial Sequence: Synthetic oligonucleotide
  Antisense strand to SEQ ID NO: 2311130
accuuuaucgcauucucac

SEQ ID NO: 2311132 - RNA, 19 nt, Artificial Sequence
  Description of Artificial Sequence: Synthetic oligonucleotide
  Sense strand starting at position 3241 of SEQ ID NO: 1885035
gauaaagguagguguaguu

SEQ ID NO: 2311133 - RNA, 19 nt, Artificial Sequence
  Description of Artificial Sequence: Synthetic oligonucleotide
  Antisense strand to SEQ ID NO: 2311132
aacuacaccuaccuuuauc

SEQ ID NO: 2311134 - RNA, 19 nt, Artificial Sequence
  Description of Artificial Sequence: Synthetic oligonucleotide
  Sense strand starting at position 3266 of SEQ ID NO: 1885035
guaggaagugcugaaucca

SEQ ID NO: 2311135 - RNA, 19 nt, Artificial Sequence
  Description of Artificial Sequence: Synthetic oligonucleotide
  Antisense strand to SEQ ID NO: 2311134
uggauucagcacuuccuac

SEQ ID NO: 2311136 - RNA, 19 nt, Artificial Sequence
  Description of Artificial Sequence: Synthetic oligonucleotide
  Sense strand starting at position 3275 of SEQ ID NO: 1885035
gcugaauccaagugaaagu

SEQ ID NO: 2311137 - RNA, 19 nt, Artificial Sequence
  Description of Artificial Sequence: Synthetic oligonucleotide
  Antisense strand to SEQ ID NO: 2311136
acuuucacuuggauucagc

SEQ ID NO: 2311138 - RNA, 19 nt, Artificial Sequence
  Description of Artificial Sequence: Synthetic oligonucleotide
  Sense strand starting at position 3286 of SEQ ID NO: 1885035
gugaaaguaguguauauug

SEQ ID NO: 2311139 - RNA, 19 nt, Artificial Sequence
  Description of Artificial Sequence: Synthetic oligonucleotide
  Antisense strand to SEQ ID NO: 2311138
caauauacacuacuuucac

SEQ ID NO: 2311140 - RNA, 19 nt, Artificial Sequence
  Description of Artificial Sequence: Synthetic oligonucleotide
  Sense strand starting at position 3297 of SEQ ID NO: 1885035
guauauuggcauuaugauu

SEQ ID NO: 2311141 - RNA, 19 nt, Artificial Sequence
  Description of Artificial Sequence: Synthetic oligonucleotide
  Antisense strand to SEQ ID NO: 2311140
aaucauaaugccaauauac

SEQ ID NO: 2311142 - RNA, 19 nt, Artificial Sequence
  Description of Artificial Sequence: Synthetic oligonucleotide
  Sense strand starting at position 3304 of SEQ ID NO: 1885035
ggcauuaugauuuguguau

SEQ ID NO: 2311143 - RNA, 19 nt, Artificial Sequence
  Description of Artificial Sequence: Synthetic oligonucleotide
  Antisense strand to SEQ ID NO: 2311142
auacacaaaucauaaugcc

SEQ ID NO: 2311144 - RNA, 19 nt, Artificial Sequence
  Description of Artificial Sequence: Synthetic oligonucleotide
  Sense strand starting at position 3305 of SEQ ID NO: 1885035
gcauuaugauuuguguaua

SEQ ID NO: 2311145 - RNA, 19 nt, Artificial Sequence
  Description of Artificial Sequence: Synthetic oligonucleotide
  Antisense strand to SEQ ID NO: 2311144
uauacacaaaucauaaugc

SEQ ID NO: 2311146 - RNA, 19 nt, Artificial Sequence
  Description of Artificial Sequence: Synthetic oligonucleotide
  Sense strand starting at position 3316 of SEQ ID NO: 1885035
uguguauaucaguauuaug

SEQ ID NO: 2311147 - RNA, 19 nt, Artificial Sequence
  Description of Artificial Sequence: Synthetic oligonucleotide
  Antisense strand to SEQ ID NO: 2311146
cauaauacugauauacaca

SEQ ID NO: 2311148 - RNA, 19 nt, Artificial Sequence
  Description of Artificial Sequence: Synthetic oligonucleotide
  Sense strand starting at position 3340 of SEQ ID NO: 1885035
gauugcuuauuucugcgua

SEQ ID NO: 2311149 - RNA, 19 nt, Artificial Sequence
  Description of Artificial Sequence: Synthetic oligonucleotide
  Antisense strand to SEQ ID NO: 2311148
uacgcagaaauaagcaauc

SEQ ID NO: 2311150 - RNA, 19 nt, Artificial Sequence
  Description of Artificial Sequence: Synthetic oligonucleotide
  Sense strand starting at position 3343 of SEQ ID NO: 1885035
ugcuuauuucugcguaaua

SEQ ID NO: 2311151 - RNA, 19 nt, Artificial Sequence
  Description of Artificial Sequence: Synthetic oligonucleotide
  Antisense strand to SEQ ID NO: 2311150
uauuacgcagaaauaagca

SEQ ID NO: 2311152 - RNA, 19 nt, Artificial Sequence
  Description of Artificial Sequence: Synthetic oligonucleotide
  Sense strand starting at position 3344 of SEQ ID NO: 1885035
gcuuauuucugcguaauaa

SEQ ID NO: 2311153 - RNA, 19 nt, Artificial Sequence
  Description of Artificial Sequence: Synthetic oligonucleotide
  Antisense strand to SEQ ID NO: 2311152
uuauuacgcagaaauaagc

SEQ ID NO: 2311154 - RNA, 19 nt, Artificial Sequence
  Description of Artificial Sequence: Synthetic oligonucleotide
  Sense strand starting at position 3585 of SEQ ID NO: 1885035
gagcuacauggauguaagu

SEQ ID NO: 2311155 - RNA, 19 nt, Artificial Sequence
  Description of Artificial Sequence: Synthetic oligonucleotide
  Antisense strand to SEQ ID NO: 2311154
acuuacauccauguagcuc

SEQ ID NO: 2311156 - RNA, 19 nt, Artificial Sequence
  Description of Artificial Sequence: Synthetic oligonucleotide
  Sense strand starting at position 3634 of SEQ ID NO: 1885035
guucuugcccuuuaauuga

SEQ ID NO: 2311157 - RNA, 19 nt, Artificial Sequence
  Description of Artificial Sequence: Synthetic oligonucleotide
  Antisense strand to SEQ ID NO: 2311156
ucaauuaaagggcaagaac

SEQ ID NO: 2311158 - RNA, 19 nt, Artificial Sequence
  Description of Artificial Sequence: Synthetic oligonucleotide
  Sense strand starting at position 16 of SEQ ID NO: 1885036
uuaggugauccaggcagau

SEQ ID NO: 2311159 - RNA, 19 nt, Artificial Sequence
  Description of Artificial Sequence: Synthetic oligonucleotide
  Antisense strand to SEQ ID NO: 2311158
aucugccuggaucaccuaa

SEQ ID NO: 2311160 - RNA, 19 nt, Artificial Sequence
  Description of Artificial Sequence: Synthetic oligonucleotide
  Sense strand starting at position 303 of SEQ ID NO: 1885036
uccaguaucuugguacuau

SEQ ID NO: 2311161 - RNA, 19 nt, Artificial Sequence
  Description of Artificial Sequence: Synthetic oligonucleotide
  Antisense strand to SEQ ID NO: 2311160
auaguaccaagauacugga

SEQ ID NO: 2311162 - RNA, 19 nt, Artificial Sequence
  Description of Artificial Sequence: Synthetic oligonucleotide
  Sense strand starting at position 434 of SEQ ID NO: 1885036
gaggcagucuucucaauga

SEQ ID NO: 2311163 - RNA, 19 nt, Artificial Sequence
  Description of Artificial Sequence: Synthetic oligonucleotide
  Antisense strand to SEQ ID NO: 2311162
ucauugagaagacugccuc

SEQ ID NO: 2311164 - RNA, 19 nt, Artificial Sequence
  Description of Artificial Sequence: Synthetic oligonucleotide
  Sense strand starting at position 660 of SEQ ID NO: 1885036
uuuauuccuugagugacuu

SEQ ID NO: 2311165 - RNA, 19 nt, Artificial Sequence
  Description of Artificial Sequence: Synthetic oligonucleotide
  Antisense strand to SEQ ID NO: 2311164
aagucacucaaggaauaaa

SEQ ID NO: 2311166 - RNA, 19 nt, Artificial Sequence
  Description of Artificial Sequence: Synthetic oligonucleotide
  Sense strand starting at position 664 of SEQ ID NO: 1885036
uuccuugagugacuugauu

SEQ ID NO: 2311167 - RNA, 19 nt, Artificial Sequence
  Description of Artificial Sequence: Synthetic oligonucleotide
  Antisense strand to SEQ ID NO: 2311166
aaucaagucacucaaggaa

SEQ ID NO: 2311168 - RNA, 19 nt, Artificial Sequence
  Description of Artificial Sequence: Synthetic oligonucleotide
  Sense strand starting at position 673 of SEQ ID NO: 1885036
ugacuugauuucugaucuu

SEQ ID NO: 2311169 - RNA, 19 nt, Artificial Sequence
  Description of Artificial Sequence: Synthetic oligonucleotide
  Antisense strand to SEQ ID NO: 2311168
aagaucagaaaucaaguca

SEQ ID NO: 2311170 - RNA, 19 nt, Artificial Sequence
  Description of Artificial Sequence: Synthetic oligonucleotide
  Sense strand starting at position 1063 of SEQ ID NO: 1885036
acacuuuggcuuuaauguu

SEQ ID NO: 2311171 - RNA, 19 nt, Artificial Sequence
  Description of Artificial Sequence: Synthetic oligonucleotide
  Antisense strand to SEQ ID NO: 2311170
aacauuaaagccaaagugu

SEQ ID NO: 2311172 - RNA, 19 nt, Artificial Sequence
  Description of Artificial Sequence: Synthetic oligonucleotide
  Sense strand starting at position 1174 of SEQ ID NO: 1885036
cuuugucuucgccuuaagu

SEQ ID NO: 2311173 - RNA, 19 nt, Artificial Sequence
  Description of Artificial Sequence: Synthetic oligonucleotide
  Antisense strand to SEQ ID NO: 2311172
acuuaaggcgaagacaaag

SEQ ID NO: 2311174 - RNA, 19 nt, Artificial Sequence
  Description of Artificial Sequence: Synthetic oligonucleotide
  Sense strand starting at position 1182 of SEQ ID NO: 1885036
ucgccuuaaguguaacagu

SEQ ID NO: 2311175 - RNA, 19 nt, Artificial Sequence
  Description of Artificial Sequence: Synthetic oligonucleotide
  Antisense strand to SEQ ID NO: 2311174
acuguuacacuuaaggcga

SEQ ID NO: 2311176 - RNA, 19 nt, Artificial Sequence
  Description of Artificial Sequence: Synthetic oligonucleotide
  Sense strand starting at position 1299 of SEQ ID NO: 1885036
gccggguguggugauauga

SEQ ID NO: 2311177 - RNA, 19 nt, Artificial Sequence
  Description of Artificial Sequence: Synthetic oligonucleotide
  Antisense strand to SEQ ID NO: 2311176
ucauaucaccacacccggc

SEQ ID NO: 2311178 - RNA, 19 nt, Artificial Sequence
  Description of Artificial Sequence: Synthetic oligonucleotide
  Sense strand starting at position 1309 of SEQ ID NO: 1885036
gugauaugagacuguaguu

SEQ ID NO: 2311179 - RNA, 19 nt, Artificial Sequence
  Description of Artificial Sequence: Synthetic oligonucleotide
  Antisense strand to SEQ ID NO: 2311178
aacuacagucucauaucac

SEQ ID NO: 2311180 - RNA, 19 nt, Artificial Sequence
  Description of Artificial Sequence: Synthetic oligonucleotide
  Sense strand starting at position 1615 of SEQ ID NO: 1885036
ccucuacauggcuggaaau

SEQ ID NO: 2311181 - RNA, 19 nt, Artificial Sequence
  Description of Artificial Sequence: Synthetic oligonucleotide
  Antisense strand to SEQ ID NO: 2311180
auuuccagccauguagagg

SEQ ID NO: 2311182 - RNA, 19 nt, Artificial Sequence
  Description of Artificial Sequence: Synthetic oligonucleotide
  Sense strand starting at position 1630 of SEQ ID NO: 1885036
aaaugaagguuccaagaug

SEQ ID NO: 2311183 - RNA, 19 nt, Artificial Sequence
  Description of Artificial Sequence: Synthetic oligonucleotide
  Antisense strand to SEQ ID NO: 2311182
caucuuggaaccuucauuu

SEQ ID NO: 2311184 - RNA, 19 nt, Artificial Sequence
  Description of Artificial Sequence: Synthetic oligonucleotide
  Sense strand starting at position 1664 of SEQ ID NO: 1885036
gggagaagcccugaucccu

SEQ ID NO: 2311185 - RNA, 19 nt, Artificial Sequence
  Description of Artificial Sequence: Synthetic oligonucleotide
  Antisense strand to SEQ ID NO: 2311184
agggaucagggcuucuccc

SEQ ID NO: 2311186 - RNA, 19 nt, Artificial Sequence
  Description of Artificial Sequence: Synthetic oligonucleotide
  Sense strand starting at position 1685 of SEQ ID NO: 1885036
auuugcugcuuagagaaga

SEQ ID NO: 2311187 - RNA, 19 nt, Artificial Sequence
  Description of Artificial Sequence: Synthetic oligonucleotide
  Antisense strand to SEQ ID NO: 2311186
ucuucucuaagcagcaaau

SEQ ID NO: 2311188 - RNA, 19 nt, Artificial Sequence
  Description of Artificial Sequence: Synthetic oligonucleotide
  Sense strand starting at position 1764 of SEQ ID NO: 1885036
gcauuaagccauugagagu

SEQ ID NO: 2311189 - RNA, 19 nt, Artificial Sequence
  Description of Artificial Sequence: Synthetic oligonucleotide
  Antisense strand to SEQ ID NO: 2311188
acucucaauggcuuaaugc

SEQ ID NO: 2311190 - RNA, 19 nt, Artificial Sequence
  Description of Artificial Sequence: Synthetic oligonucleotide
  Sense strand starting at position 1775 of SEQ ID NO: 1885036
uugagaguucaggguuuau

SEQ ID NO: 2311191 - RNA, 19 nt, Artificial Sequence
  Description of Artificial Sequence: Synthetic oligonucleotide
  Antisense strand to SEQ ID NO: 2311190
auaaacccugaacucucaa

SEQ ID NO: 2311192 - RNA, 19 nt, Artificial Sequence
  Description of Artificial Sequence: Synthetic oligonucleotide
  Sense strand starting at position 1794 of SEQ ID NO: 1885036
uuguuagcccagcagaguu

SEQ ID NO: 2311193 - RNA, 19 nt, Artificial Sequence
  Description of Artificial Sequence: Synthetic oligonucleotide
  Antisense strand to SEQ ID NO: 2311192
aacucugcugggcuaacaa

SEQ ID NO: 2311194 - RNA, 19 nt, Artificial Sequence
  Description of Artificial Sequence: Synthetic oligonucleotide
  Sense strand starting at position 1801 of SEQ ID NO: 1885036
cccagcagaguuuauucua

SEQ ID NO: 2311195 - RNA, 19 nt, Artificial Sequence
  Description of Artificial Sequence: Synthetic oligonucleotide
  Antisense strand to SEQ ID NO: 2311194
uagaauaaacucugcuggg

SEQ ID NO: 2311196 - RNA, 19 nt, Artificial Sequence
  Description of Artificial Sequence: Synthetic oligonucleotide
  Sense strand starting at position 1895 of SEQ ID NO: 1885036
gugagaugcacauaaaggu

SEQ ID NO: 2311197 - RNA, 19 nt, Artificial Sequence
  Description of Artificial Sequence: Synthetic oligonucleotide
  Antisense strand to SEQ ID NO: 2311196
accuuuaugugcaucucac

SEQ ID NO: 2311198 - RNA, 19 nt, Artificial Sequence
  Description of Artificial Sequence: Synthetic oligonucleotide
  Sense strand starting at position 1901 of SEQ ID NO: 1885036
ugcacauaaagguguauga

SEQ ID NO: 2311199 - RNA, 19 nt, Artificial Sequence
  Description of Artificial Sequence: Synthetic oligonucleotide
  Antisense strand to SEQ ID NO: 2311198
ucauacaccuuuaugugca

SEQ ID NO: 2311200 - RNA, 19 nt, Artificial Sequence
  Description of Artificial Sequence: Synthetic oligonucleotide
  Sense strand starting at position 1903 of SEQ ID NO: 1885036
cacauaaagguguaugagu

SEQ ID NO: 2311201 - RNA, 19 nt, Artificial Sequence
  Description of Artificial Sequence: Synthetic oligonucleotide
  Antisense strand to SEQ ID NO: 2311200
acucauacaccuuuaugug

SEQ ID NO: 2311202 - RNA, 19 nt, Artificial Sequence
  Description of Artificial Sequence: Synthetic oligonucleotide
  Sense strand starting at position 1989 of SEQ ID NO: 1885036
aaacgcacucaccgagaaa

SEQ ID NO: 2311203 - RNA, 19 nt, Artificial Sequence
  Description of Artificial Sequence: Synthetic oligonucleotide
  Antisense strand to SEQ ID NO: 2311202
uuucucggugagugcguuu

SEQ ID NO: 2311204 - RNA, 19 nt, Artificial Sequence
  Description of Artificial Sequence: Synthetic oligonucleotide
  Sense strand starting at position 1992 of SEQ ID NO: 1885036
cgcacucaccgagaaauca

SEQ ID NO: 2311205 - RNA, 19 nt, Artificial Sequence
  Description of Artificial Sequence: Synthetic oligonucleotide
  Antisense strand to SEQ ID NO: 2311204
ugauuucucggugagugcg

SEQ ID NO: 2311206 - RNA, 19 nt, Artificial Sequence
  Description of Artificial Sequence: Synthetic oligonucleotide
  Sense strand starting at position 2116 of SEQ ID NO: 1885036
aauacugagguuuauaguu

SEQ ID NO: 2311207 - RNA, 19 nt, Artificial Sequence
  Description of Artificial Sequence: Synthetic oligonucleotide
  Antisense strand to SEQ ID NO: 2311206
aacuauaaaccucaguauu

SEQ ID NO: 2311208 - RNA, 19 nt, Artificial Sequence
  Description of Artificial Sequence: Synthetic oligonucleotide
  Sense strand starting at position 2121 of SEQ ID NO: 1885036
ugagguuuauaguuugcua

SEQ ID NO: 2311209 - RNA, 19 nt, Artificial Sequence
  Description of Artificial Sequence: Synthetic oligonucleotide
  Antisense strand to SEQ ID NO: 2311208
uagcaaacuauaaaccuca

SEQ ID NO: 2311210 - RNA, 19 nt, Artificial Sequence
  Description of Artificial Sequence: Synthetic oligonucleotide
  Sense strand starting at position 2851 of SEQ ID NO: 1885036
aagguauuauagguaaucu

SEQ ID NO: 2311211 - RNA, 19 nt, Artificial Sequence
  Description of Artificial Sequence: Synthetic oligonucleotide
  Antisense strand to SEQ ID NO: 2311210
agauuaccuauaauaccuu

SEQ ID NO: 2311212 - RNA, 19 nt, Artificial Sequence
  Description of Artificial Sequence: Synthetic oligonucleotide
  Sense strand starting at position 2940 of SEQ ID NO: 1885036
cagaaaugcgaggaugcua

SEQ ID NO: 2311213 - RNA, 19 nt, Artificial Sequence
  Description of Artificial Sequence: Synthetic oligonucleotide
  Antisense strand to SEQ ID NO: 2311212
uagcauccucgcauuucug

SEQ ID NO: 2311214 - RNA, 19 nt, Artificial Sequence
  Description of Artificial Sequence: Synthetic oligonucleotide
  Sense strand starting at position 3055 of SEQ ID NO: 1885036
augcaaaugcuacauaguu

SEQ ID NO: 2311215 - RNA, 19 nt, Artificial Sequence
  Description of Artificial Sequence: Synthetic oligonucleotide
  Antisense strand to SEQ ID NO: 2311214
aacuauguagcauuugcau

SEQ ID NO: 2311216 - RNA, 19 nt, Artificial Sequence
  Description of Artificial Sequence: Synthetic oligonucleotide
  Sense strand starting at position 3063 of SEQ ID NO: 1885036
gcuacauaguuauuauacu

SEQ ID NO: 2311217 - RNA, 19 nt, Artificial Sequence
  Description of Artificial Sequence: Synthetic oligonucleotide
  Antisense strand to SEQ ID NO: 2311216
aguauaauaacuauguagc

SEQ ID NO: 2311218 - RNA, 19 nt, Artificial Sequence
  Description of Artificial Sequence: Synthetic oligonucleotide
  Sense strand starting at position 3339 of SEQ ID NO: 1885036
guacuuaggaauuguuaag

SEQ ID NO: 2311219 - RNA, 19 nt, Artificial Sequence
  Description of Artificial Sequence: Synthetic oligonucleotide
  Antisense strand to SEQ ID NO: 2311218
cuuaacaauuccuaaguac

SEQ ID NO: 2311220 - RNA, 19 nt, Artificial Sequence
  Description of Artificial Sequence: Synthetic oligonucleotide
  Sense strand starting at position 3348 of SEQ ID NO: 1885036
aauuguuaagaggguaguu

SEQ ID NO: 2311221 - RNA, 19 nt, Artificial Sequence
  Description of Artificial Sequence: Synthetic oligonucleotide
  Antisense strand to SEQ ID NO: 2311220
aacuacccucuuaacaauu

SEQ ID NO: 2311222 - RNA, 19 nt, Artificial Sequence
  Description of Artificial Sequence: Synthetic oligonucleotide
  Sense strand starting at position 3368 of SEQ ID NO: 1885036
uuaaauguucucgccgcau

SEQ ID NO: 2311223 - RNA, 19 nt, Artificial Sequence
  Description of Artificial Sequence: Synthetic oligonucleotide
  Antisense strand to SEQ ID NO: 2311222
augcggcgagaacauuuaa

SEQ ID NO: 2311224 - RNA, 19 nt, Artificial Sequence
  Description of Artificial Sequence: Synthetic oligonucleotide
  Sense strand starting at position 3371 of SEQ ID NO: 1885036
aauguucucgccgcauaca

SEQ ID NO: 2311225 - RNA, 19 nt, Artificial Sequence
  Description of Artificial Sequence: Synthetic oligonucleotide
  Antisense strand to SEQ ID NO: 2311224
uguaugcggcgagaacauu

SEQ ID NO: 2311226 - RNA, 19 nt, Artificial Sequence
  Description of Artificial Sequence: Synthetic oligonucleotide
  Sense strand starting at position 3462 of SEQ ID NO: 1885036
acaucaugcugugcacaau

SEQ ID NO: 2311227 - RNA, 19 nt, Artificial Sequence
  Description of Artificial Sequence: Synthetic oligonucleotide
  Antisense strand to SEQ ID NO: 2311226
auugugcacagcaugaugu

SEQ ID NO: 2311228 - RNA, 19 nt, Artificial Sequence
  Description of Artificial Sequence: Synthetic oligonucleotide
  Sense strand starting at position 3471 of SEQ ID NO: 1885036
ugugcacaaugaguauaua

SEQ ID NO: 2311229 - RNA, 19 nt, Artificial Sequence
  Description of Artificial Sequence: Synthetic oligonucleotide
  Antisense strand to SEQ ID NO: 2311228
uauauacucauugugcaca

SEQ ID NO: 2311230 - RNA, 19 nt, Artificial Sequence
  Description of Artificial Sequence: Synthetic oligonucleotide
  Sense strand starting at position 3549 of SEQ ID NO: 1885036
cccagacuagagugaaauc

SEQ ID NO: 2311231 - RNA, 19 nt, Artificial Sequence
  Description of Artificial Sequence: Synthetic oligonucleotide
  Antisense strand to SEQ ID NO: 2311230
gauuucacucuagucuggg

SEQ ID NO: 2311232 - RNA, 19 nt, Artificial Sequence
  Description of Artificial Sequence: Synthetic oligonucleotide
  Sense strand starting at position 3819 of SEQ ID NO: 1885036
acaucaugcuagucauucu

SEQ ID NO: 2311233 - RNA, 19 nt, Artificial Sequence
  Description of Artificial Sequence: Synthetic oligonucleotide
  Antisense strand to SEQ ID NO: 2311232
agaaugacuagcaugaugu

SEQ ID NO: 2311234 - RNA, 19 nt, Artificial Sequence
  Description of Artificial Sequence: Synthetic oligonucleotide
  Sense strand starting at position 3822 of SEQ ID NO: 1885036
ucaugcuagucauucucua

SEQ ID NO: 2311235 - RNA, 19 nt, Artificial Sequence
  Description of Artificial Sequence: Synthetic oligonucleotide
  Antisense strand to SEQ ID NO: 2311234
uagagaaugacuagcauga

SEQ ID NO: 2311236 - RNA, 19 nt, Artificial Sequence
  Description of Artificial Sequence: Synthetic oligonucleotide
  Sense strand starting at position 3930 of SEQ ID NO: 1885036
aaucaaaggucacugcaga

SEQ ID NO: 2311237 - RNA, 19 nt, Artificial Sequence
  Description of Artificial Sequence: Synthetic oligonucleotide
  Antisense strand to SEQ ID NO: 2311236
ucugcagugaccuuugauu

SEQ ID NO: 2311238 - RNA, 19 nt, Artificial Sequence
  Description of Artificial Sequence: Synthetic oligonucleotide
  Sense strand starting at position 127 of SEQ ID NO: 1885037
ggaagagggaccuguguuu

SEQ ID NO: 2311239 - RNA, 19 nt, Artificial Sequence
  Description of Artificial Sequence: Synthetic oligonucleotide
  Antisense strand to SEQ ID NO: 2311238
aaacacaggucccucuucc

SEQ ID NO: 2311240 - RNA, 19 nt, Artificial Sequence
  Description of Artificial Sequence: Synthetic oligonucleotide
  Sense strand starting at position 307 of SEQ ID NO: 1885037
cucaaagacuucucuggga

SEQ ID NO: 2311241 - RNA, 19 nt, Artificial Sequence
  Description of Artificial Sequence: Synthetic oligonucleotide
  Antisense strand to SEQ ID NO: 2311240
ucccagagaagucuuugag

SEQ ID NO: 2311242 - RNA, 19 nt, Artificial Sequence
  Description of Artificial Sequence: Synthetic oligonucleotide
  Sense strand starting at position 311 of SEQ ID NO: 1885037
aagacuucucugggaagug

SEQ ID NO: 2311243 - RNA, 19 nt, Artificial Sequence
  Description of Artificial Sequence: Synthetic oligonucleotide
  Antisense strand to SEQ ID NO: 2311242
cacuucccagagaagucuu

SEQ ID NO: 2311244 - RNA, 19 nt, Artificial Sequence
  Description of Artificial Sequence: Synthetic oligonucleotide
  Sense strand starting at position 320 of SEQ ID NO: 1885037
cugggaaguguccagaauu

SEQ ID NO: 2311245 - RNA, 19 nt, Artificial Sequence
  Description of Artificial Sequence: Synthetic oligonucleotide
  Antisense strand to SEQ ID NO: 2311244
aauucuggacacuucccag

SEQ ID NO: 2311246 - RNA, 19 nt, Artificial Sequence
  Description of Artificial Sequence: Synthetic oligonucleotide
  Sense strand starting at position 524 of SEQ ID NO: 1885037
aagaaaucuggagguugca

SEQ ID NO: 2311247 - RNA, 19 nt, Artificial Sequence
  Description of Artificial Sequence: Synthetic oligonucleotide
  Antisense strand to SEQ ID NO: 2311246
ugcaaccuccagauuucuu

SEQ ID NO: 2311248 - RNA, 19 nt, Artificial Sequence
  Description of Artificial Sequence: Synthetic oligonucleotide
  Sense strand starting at position 623 of SEQ ID NO: 1885037
agcagcauccuuggaacau

SEQ ID NO: 2311249 - RNA, 19 nt, Artificial Sequence
  Description of Artificial Sequence: Synthetic oligonucleotide
  Antisense strand to SEQ ID NO: 2311248
auguuccaaggaugcugcu

SEQ ID NO: 2311250 - RNA, 19 nt, Artificial Sequence
  Description of Artificial Sequence: Synthetic oligonucleotide
  Sense strand starting at position 767 of SEQ ID NO: 1885037
ccuggaucucagcagucaa

SEQ ID NO: 2311251 - RNA, 19 nt, Artificial Sequence
  Description of Artificial Sequence: Synthetic oligonucleotide
  Antisense strand to SEQ ID NO: 2311250
uugacugcugagauccagg

SEQ ID NO: 2311252 - RNA, 19 nt, Artificial Sequence
  Description of Artificial Sequence: Synthetic oligonucleotide
  Sense strand starting at position 929 of SEQ ID NO: 1885037
uccaguucucagcaguaau

SEQ ID NO: 2311253 - RNA, 19 nt, Artificial Sequence
  Description of Artificial Sequence: Synthetic oligonucleotide
  Antisense strand to SEQ ID NO: 2311252
auuacugcugagaacugga

SEQ ID NO: 2311254 - RNA, 19 nt, Artificial Sequence
  Description of Artificial Sequence: Synthetic oligonucleotide
  Sense strand starting at position 1156 of SEQ ID NO: 1885037
uggaaauaccuuggagggu

SEQ ID NO: 2311255 - RNA, 19 nt, Artificial Sequence
  Description of Artificial Sequence: Synthetic oligonucleotide
  Antisense strand to SEQ ID NO: 2311254
acccuccaagguauuucca

SEQ ID NO: 2311256 - RNA, 19 nt, Artificial Sequence
  Description of Artificial Sequence: Synthetic oligonucleotide
  Sense strand starting at position 1222 of SEQ ID NO: 1885037
gagagcaauucuuuaaagu

SEQ ID NO: 2311257 - RNA, 19 nt, Artificial Sequence
  Description of Artificial Sequence: Synthetic oligonucleotide
  Antisense strand to SEQ ID NO: 2311256
acuuuaaagaauugcucuc

SEQ ID NO: 2311258 - RNA, 19 nt, Artificial Sequence
  Description of Artificial Sequence: Synthetic oligonucleotide
  Sense strand starting at position 1223 of SEQ ID NO: 1885037
agagcaauucuuuaaaguu

SEQ ID NO: 2311259 - RNA, 19 nt, Artificial Sequence
  Description of Artificial Sequence: Synthetic oligonucleotide
  Antisense strand to SEQ ID NO: 2311258
aacuuuaaagaauugcucu

SEQ ID NO: 2311260 - RNA, 19 nt, Artificial Sequence
  Description of Artificial Sequence: Synthetic oligonucleotide
  Sense strand starting at position 1393 of SEQ ID NO: 1885037
gaggguugaugccugaagu

SEQ ID NO: 2311261 - RNA, 19 nt, Artificial Sequence
  Description of Artificial Sequence: Synthetic oligonucleotide
  Antisense strand to SEQ ID NO: 2311260
acuucaggcaucaacccuc

SEQ ID NO: 2311262 - RNA, 19 nt, Artificial Sequence
  Description of Artificial Sequence: Synthetic oligonucleotide
  Sense strand starting at position 1394 of SEQ ID NO: 1885037
aggguugaugccugaagug

SEQ ID NO: 2311263 - RNA, 19 nt, Artificial Sequence
  Description of Artificial Sequence: Synthetic oligonucleotide
  Antisense strand to SEQ ID NO: 2311262
cacuucaggcaucaacccu

SEQ ID NO: 2311264 - RNA, 19 nt, Artificial Sequence
  Description of Artificial Sequence: Synthetic oligonucleotide
  Sense strand starting at position 1551 of SEQ ID NO: 1885037
gcccguuuaggucaaagga

SEQ ID NO: 2311265 - RNA, 19 nt, Artificial Sequence
  Description of Artificial Sequence: Synthetic oligonucleotide
  Antisense strand to SEQ ID NO: 2311264
uccuuugaccuaaacgggc

SEQ ID NO: 2311266 - RNA, 19 nt, Artificial Sequence
  Description of Artificial Sequence: Synthetic oligonucleotide
  Sense strand starting at position 1688 of SEQ ID NO: 1885037
cggaauguucuccaguuug

SEQ ID NO: 2311267 - RNA, 19 nt, Artificial Sequence
  Description of Artificial Sequence: Synthetic oligonucleotide
  Antisense strand to SEQ ID NO: 2311266
caaacuggagaacauuccg

SEQ ID NO: 2311268 - RNA, 19 nt, Artificial Sequence
  Description of Artificial Sequence: Synthetic oligonucleotide
  Sense strand starting at position 1699 of SEQ ID NO: 1885037
ccaguuugauucucagaug

SEQ ID NO: 2311269 - RNA, 19 nt, Artificial Sequence
  Description of Artificial Sequence: Synthetic oligonucleotide
  Antisense strand to SEQ ID NO: 2311268
caucugagaaucaaacugg

SEQ ID NO: 2311270 - RNA, 19 nt, Artificial Sequence
  Description of Artificial Sequence: Synthetic oligonucleotide
  Sense strand starting at position 1737 of SEQ ID NO: 1885037
agaggucccuacuuaaaca

SEQ ID NO: 2311271 - RNA, 19 nt, Artificial Sequence
  Description of Artificial Sequence: Synthetic oligonucleotide
  Antisense strand to SEQ ID NO: 2311270
uguuuaaguagggaccucu

SEQ ID NO: 2311272 - RNA, 19 nt, Artificial Sequence
  Description of Artificial Sequence: Synthetic oligonucleotide
  Sense strand starting at position 1824 of SEQ ID NO: 1885037
gcuuauuuaugugcagaag

SEQ ID NO: 2311273 - RNA, 19 nt, Artificial Sequence
  Description of Artificial Sequence: Synthetic oligonucleotide
  Antisense strand to SEQ ID NO: 2311272
cuucugcacauaaauaagc

SEQ ID NO: 2311274 - RNA, 19 nt, Artificial Sequence
  Description of Artificial Sequence: Synthetic oligonucleotide
  Sense strand starting at position 1841 of SEQ ID NO: 1885037
aggugugagaccugaagau

SEQ ID NO: 2311275 - RNA, 19 nt, Artificial Sequence
  Description of Artificial Sequence: Synthetic oligonucleotide
  Antisense strand to SEQ ID NO: 2311274
aucuucaggucucacaccu

SEQ ID NO: 2311276 - RNA, 19 nt, Artificial Sequence
  Description of Artificial Sequence: Synthetic oligonucleotide
  Sense strand starting at position 1893 of SEQ ID NO: 1885037
acagguacugcucaaauga

SEQ ID NO: 2311277 - RNA, 19 nt, Artificial Sequence
  Description of Artificial Sequence: Synthetic oligonucleotide
  Antisense strand to SEQ ID NO: 2311276
ucauuugagcaguaccugu

SEQ ID NO: 2311278 - RNA, 19 nt, Artificial Sequence
  Description of Artificial Sequence: Synthetic oligonucleotide
  Sense strand starting at position 2510 of SEQ ID NO: 1885037
cuguaacuaucaguguaaa

SEQ ID NO: 2311279 - RNA, 19 nt, Artificial Sequence
  Description of Artificial Sequence: Synthetic oligonucleotide
  Antisense strand to SEQ ID NO: 2311278
uuuacacugauaguuacag

SEQ ID NO: 2311280 - RNA, 19 nt, Artificial Sequence
  Description of Artificial Sequence: Synthetic oligonucleotide
  Sense strand starting at position 2511 of SEQ ID NO: 1885037
uguaacuaucaguguaaag

SEQ ID NO: 2311281 - RNA, 19 nt, Artificial Sequence
  Description of Artificial Sequence: Synthetic oligonucleotide
  Antisense strand to SEQ ID NO: 2311280
cuuuacacugauaguuaca

SEQ ID NO: 2311282 - RNA, 19 nt, Artificial Sequence
  Description of Artificial Sequence: Synthetic oligonucleotide
  Sense strand starting at position 2698 of SEQ ID NO: 1885037
aggagaaucacucgagcac

SEQ ID NO: 2311283 - RNA, 19 nt, Artificial Sequence
  Description of Artificial Sequence: Synthetic oligonucleotide
  Antisense strand to SEQ ID NO: 2311282
gugcucgagugauucuccu

SEQ ID NO: 2311284 - RNA, 19 nt, Artificial Sequence
  Description of Artificial Sequence: Synthetic oligonucleotide
  Sense strand starting at position 2811 of SEQ ID NO: 1885037
aaugccgauccagaguauu

SEQ ID NO: 2311285 - RNA, 19 nt, Artificial Sequence
  Description of Artificial Sequence: Synthetic oligonucleotide
  Antisense strand to SEQ ID NO: 2311284
aauacucuggaucggcauu

SEQ ID NO: 2311286 - RNA, 19 nt, Artificial Sequence
  Description of Artificial Sequence: Synthetic oligonucleotide
  Sense strand starting at position 3328 of SEQ ID NO: 1885037
ugcauuucuugagucccua

SEQ ID NO: 2311287 - RNA, 19 nt, Artificial Sequence
  Description of Artificial Sequence: Synthetic oligonucleotide
  Antisense strand to SEQ ID NO: 2311286
uagggacucaagaaaugca

SEQ ID NO: 2311288 - RNA, 19 nt, Artificial Sequence
  Description of Artificial Sequence: Synthetic oligonucleotide
  Sense strand starting at position 3338 of SEQ ID NO: 1885037
gagucccuagccuaugaua

SEQ ID NO: 2311289 - RNA, 19 nt, Artificial Sequence
  Description of Artificial Sequence: Synthetic oligonucleotide
  Antisense strand to SEQ ID NO: 2311288
uaucauaggcuagggacuc

SEQ ID NO: 2311290 - RNA, 19 nt, Artificial Sequence
  Description of Artificial Sequence: Synthetic oligonucleotide
  Sense strand starting at position 3340 of SEQ ID NO: 1885037
gucccuagccuaugauaga

SEQ ID NO: 2311291 - RNA, 19 nt, Artificial Sequence
  Description of Artificial Sequence: Synthetic oligonucleotide
  Antisense strand to SEQ ID NO: 2311290
ucuaucauaggcuagggac

SEQ ID NO: 2311292 - RNA, 19 nt, Artificial Sequence
  Description of Artificial Sequence: Synthetic oligonucleotide
  Sense strand starting at position 3367 of SEQ ID NO: 1885037
gugaaaccacauugcuuua

SEQ ID NO: 2311293 - RNA, 19 nt, Artificial Sequence
  Description of Artificial Sequence: Synthetic oligonucleotide
  Antisense strand to SEQ ID NO: 2311292
uaaagcaaugugguuucac

SEQ ID NO: 2311294 - RNA, 19 nt, Artificial Sequence
  Description of Artificial Sequence: Synthetic oligonucleotide
  Sense strand starting at position 3427 of SEQ ID NO: 1885037
accagaaggaucuguguca

SEQ ID NO: 2311295 - RNA, 19 nt, Artificial Sequence
  Description of Artificial Sequence: Synthetic oligonucleotide
  Antisense strand to SEQ ID NO: 2311294
ugacacagauccuucuggu

SEQ ID NO: 2311296 - RNA, 19 nt, Artificial Sequence
  Description of Artificial Sequence: Synthetic oligonucleotide
  Sense strand starting at position 3628 of SEQ ID NO: 1885037
ggaaguaacucccugacuu

SEQ ID NO: 2311297 - RNA, 19 nt, Artificial Sequence
  Description of Artificial Sequence: Synthetic oligonucleotide
  Antisense strand to SEQ ID NO: 2311296
aagucagggaguuacuucc

SEQ ID NO: 2311298 - RNA, 19 nt, Artificial Sequence
  Description of Artificial Sequence: Synthetic oligonucleotide
  Sense strand starting at position 3672 of SEQ ID NO: 1885037
aguuucuauguagagggau

SEQ ID NO: 2311299 - RNA, 19 nt, Artificial Sequence
  Description of Artificial Sequence: Synthetic oligonucleotide
  Antisense strand to SEQ ID NO: 2311298
aucccucuacauagaaacu

SEQ ID NO: 2311300 - RNA, 19 nt, Artificial Sequence
  Description of Artificial Sequence: Synthetic oligonucleotide
  Sense strand starting at position 3674 of SEQ ID NO: 1885037
uuucuauguagagggauua

SEQ ID NO: 2311301 - RNA, 19 nt, Artificial Sequence
  Description of Artificial Sequence: Synthetic oligonucleotide
  Antisense strand to SEQ ID NO: 2311300
uaaucccucuacauagaaa

SEQ ID NO: 2311302 - RNA, 19 nt, Artificial Sequence
  Description of Artificial Sequence: Synthetic oligonucleotide
  Sense strand starting at position 3675 of SEQ ID NO: 1885037
uucuauguagagggauuau

SEQ ID NO: 2311303 - RNA, 19 nt, Artificial Sequence
  Description of Artificial Sequence: Synthetic oligonucleotide
  Antisense strand to SEQ ID NO: 2311302
auaaucccucuacauagaa

SEQ ID NO: 2311304 - RNA, 19 nt, Artificial Sequence
  Description of Artificial Sequence: Synthetic oligonucleotide
  Sense strand starting at position 3738 of SEQ ID NO: 1885037
cagagcucuuucuuggauu

SEQ ID NO: 2311305 - RNA, 19 nt, Artificial Sequence
  Description of Artificial Sequence: Synthetic oligonucleotide
  Antisense strand to SEQ ID NO: 2311304
aauccaagaaagagcucug

SEQ ID NO: 2311306 - RNA, 19 nt, Artificial Sequence
  Description of Artificial Sequence: Synthetic oligonucleotide
  Sense strand starting at position 3744 of SEQ ID NO: 1885037
ucuuucuuggauuaaguca

SEQ ID NO: 2311307 - RNA, 19 nt, Artificial Sequence
  Description of Artificial Sequence: Synthetic oligonucleotide
  Antisense strand to SEQ ID NO: 2311306
ugacuuaauccaagaaaga

SEQ ID NO: 2311308 - RNA, 19 nt, Artificial Sequence
  Description of Artificial Sequence: Synthetic oligonucleotide
  Sense strand starting at position 3761 of SEQ ID NO: 1885037
caauuaucaugguuaggug

SEQ ID NO: 2311309 - RNA, 19 nt, Artificial Sequence
  Description of Artificial Sequence: Synthetic oligonucleotide
  Antisense strand to SEQ ID NO: 2311308
caccuaaccaugauaauug

SEQ ID NO: 2311310 - RNA, 19 nt, Artificial Sequence
  Description of Artificial Sequence: Synthetic oligonucleotide
  Sense strand starting at position 3795 of SEQ ID NO: 1885037
aagagacauuugugaacua

SEQ ID NO: 2311311 - RNA, 19 nt, Artificial Sequence
  Description of Artificial Sequence: Synthetic oligonucleotide
  Antisense strand to SEQ ID NO: 2311310
uaguucacaaaugucucuu

SEQ ID NO: 2311312 - RNA, 19 nt, Artificial Sequence
  Description of Artificial Sequence: Synthetic oligonucleotide
  Sense strand starting at position 3796 of SEQ ID NO: 1885037
agagacauuugugaacuaa

SEQ ID NO: 2311313 - RNA, 19 nt, Artificial Sequence
  Description of Artificial Sequence: Synthetic oligonucleotide
  Antisense strand to SEQ ID NO: 2311312
uuaguucacaaaugucucu

SEQ ID NO: 2311314 - RNA, 19 nt, Artificial Sequence
  Description of Artificial Sequence: Synthetic oligonucleotide
  Sense strand starting at position 3851 of SEQ ID NO: 1885037
acaauuagaccuuggguga

SEQ ID NO: 2311315 - RNA, 19 nt, Artificial Sequence
  Description of Artificial Sequence: Synthetic oligonucleotide
  Antisense strand to SEQ ID NO: 2311314
ucacccaaggucuaauugu

SEQ ID NO: 2311316 - RNA, 19 nt, Artificial Sequence
  Description of Artificial Sequence: Synthetic oligonucleotide
  Sense strand starting at position 3852 of SEQ ID NO: 1885037
caauuagaccuugggugaa

SEQ ID NO: 2311317 - RNA, 19 nt, Artificial Sequence
  Description of Artificial Sequence: Synthetic oligonucleotide
  Antisense strand to SEQ ID NO: 2311316
uucacccaaggucuaauug

SEQ ID NO: 2311318 - RNA, 19 nt, Artificial Sequence
  Description of Artificial Sequence: Synthetic oligonucleotide
  Sense strand starting at position 37 of SEQ ID NO: 1885038
cccaguaucuuagauacug

SEQ ID NO: 2311319 - RNA, 19 nt, Artificial Sequence
  Description of Artificial Sequence: Synthetic oligonucleotide
  Antisense strand to SEQ ID NO: 2311318
caguaucuaagauacuggg

SEQ ID NO: 2311320 - RNA, 19 nt, Artificial Sequence
  Description of Artificial Sequence: Synthetic oligonucleotide
  Sense strand starting at position 130 of SEQ ID NO: 1885038
ccaaaugggucccuagagu

SEQ ID NO: 2311321 - RNA, 19 nt, Artificial Sequence
  Description of Artificial Sequence: Synthetic oligonucleotide
  Antisense strand to SEQ ID NO: 2311320
acucuagggacccauuugg

SEQ ID NO: 2311322 - RNA, 19 nt, Artificial Sequence
  Description of Artificial Sequence: Synthetic oligonucleotide
  Sense strand starting at position 408 of SEQ ID NO: 1885038
ucuuguugcagccaaggaa

SEQ ID NO: 2311323 - RNA, 19 nt, Artificial Sequence
  Description of Artificial Sequence: Synthetic oligonucleotide
  Antisense strand to SEQ ID NO: 2311322
uuccuuggcugcaacaaga

SEQ ID NO: 2311324 - RNA, 19 nt, Artificial Sequence
  Description of Artificial Sequence: Synthetic oligonucleotide
  Sense strand starting at position 498 of SEQ ID NO: 1885038
gcuuaaaguuugugggucu

SEQ ID NO: 2311325 - RNA, 19 nt, Artificial Sequence
  Description of Artificial Sequence: Synthetic oligonucleotide
  Antisense strand to SEQ ID NO: 2311324
agacccacaaacuuuaagc

SEQ ID NO: 2311326 - RNA, 19 nt, Artificial Sequence
  Description of Artificial Sequence: Synthetic oligonucleotide
  Sense strand starting at position 505 of SEQ ID NO: 1885038
guuugugggucuccuucua

SEQ ID NO: 2311327 - RNA, 19 nt, Artificial Sequence
  Description of Artificial Sequence: Synthetic oligonucleotide
  Antisense strand to SEQ ID NO: 2311326
uagaaggagacccacaaac

SEQ ID NO: 2311328 - RNA, 19 nt, Artificial Sequence
  Description of Artificial Sequence: Synthetic oligonucleotide
  Sense strand starting at position 2191 of SEQ ID NO: 1885038
auccaauuaugucgucgua

SEQ ID NO: 2311329 - RNA, 19 nt, Artificial Sequence
  Description of Artificial Sequence: Synthetic oligonucleotide
  Antisense strand to SEQ ID NO: 2311328
uacgacgacauaauuggau

SEQ ID NO: 2311330 - RNA, 19 nt, Artificial Sequence
  Description of Artificial Sequence: Synthetic oligonucleotide
  Sense strand starting at position 2193 of SEQ ID NO: 1885038
ccaauuaugucgucguaaa

SEQ ID NO: 2311331 - RNA, 19 nt, Artificial Sequence
  Description of Artificial Sequence: Synthetic oligonucleotide
  Antisense strand to SEQ ID NO: 2311330
uuuacgacgacauaauugg

SEQ ID NO: 2311332 - RNA, 19 nt, Artificial Sequence
  Description of Artificial Sequence: Synthetic oligonucleotide
  Sense strand starting at position 2194 of SEQ ID NO: 1885038
caauuaugucgucguaaau

SEQ ID NO: 2311333 - RNA, 19 nt, Artificial Sequence
  Description of Artificial Sequence: Synthetic oligonucleotide
  Antisense strand to SEQ ID NO: 2311332
auuuacgacgacauaauug

SEQ ID NO: 2311334 - RNA, 19 nt, Artificial Sequence
  Description of Artificial Sequence: Synthetic oligonucleotide
  Sense strand starting at position 2260 of SEQ ID NO: 1885038
cauugaugccuggaucgua

SEQ ID NO: 2311335 - RNA, 19 nt, Artificial Sequence
  Description of Artificial Sequence: Synthetic oligonucleotide
  Antisense strand to SEQ ID NO: 2311334
uacgauccaggcaucaaug

SEQ ID NO: 2311336 - RNA, 19 nt, Artificial Sequence
  Description of Artificial Sequence: Synthetic oligonucleotide
  Sense strand starting at position 2280 of SEQ ID NO: 1885038
aauuuauggccgcagguuu

SEQ ID NO: 2311337 - RNA, 19 nt, Artificial Sequence
  Description of Artificial Sequence: Synthetic oligonucleotide
  Antisense strand to SEQ ID NO: 2311336
aaaccugcggccauaaauu

SEQ ID NO: 2311338 - RNA, 19 nt, Artificial Sequence
  Description of Artificial Sequence: Synthetic oligonucleotide
  Sense strand starting at position 2365 of SEQ ID NO: 1885038
uaaaguuuaccguggcuca

SEQ ID NO: 2311339 - RNA, 19 nt, Artificial Sequence
  Description of Artificial Sequence: Synthetic oligonucleotide
  Antisense strand to SEQ ID NO: 2311338
ugagccacgguaaacuuua

SEQ ID NO: 2311340 - RNA, 19 nt, Artificial Sequence
  Description of Artificial Sequence: Synthetic oligonucleotide
  Sense strand starting at position 2366 of SEQ ID NO: 1885038
aaaguuuaccguggcucau

SEQ ID NO: 2311341 - RNA, 19 nt, Artificial Sequence
  Description of Artificial Sequence: Synthetic oligonucleotide
  Antisense strand to SEQ ID NO: 2311340
augagccacgguaaacuuu

SEQ ID NO: 2311342 - RNA, 19 nt, Artificial Sequence
  Description of Artificial Sequence: Synthetic oligonucleotide
  Sense strand starting at position 2936 of SEQ ID NO: 1885038
ggagauaucucuuucuuua

SEQ ID NO: 2311343 - RNA, 19 nt, Artificial Sequence
  Description of Artificial Sequence: Synthetic oligonucleotide
  Antisense strand to SEQ ID NO: 2311342
uaaagaaagagauaucucc

SEQ ID NO: 2311344 - RNA, 19 nt, Artificial Sequence
  Description of Artificial Sequence: Synthetic oligonucleotide
  Sense strand starting at position 2984 of SEQ ID NO: 1885038
cuuaaauagagucacguga

SEQ ID NO: 2311345 - RNA, 19 nt, Artificial Sequence
  Description of Artificial Sequence: Synthetic oligonucleotide
  Antisense strand to SEQ ID NO: 2311344
ucacgugacucuauuuaag

SEQ ID NO: 2311346 - RNA, 19 nt, Artificial Sequence
  Description of Artificial Sequence: Synthetic oligonucleotide
  Sense strand starting at position 2986 of SEQ ID NO: 1885038
uaaauagagucacgugacu

SEQ ID NO: 2311347 - RNA, 19 nt, Artificial Sequence
  Description of Artificial Sequence: Synthetic oligonucleotide
  Antisense strand to SEQ ID NO: 2311346
agucacgugacucuauuua

SEQ ID NO: 2311348 - RNA, 19 nt, Artificial Sequence
  Description of Artificial Sequence: Synthetic oligonucleotide
  Sense strand starting at position 3007 of SEQ ID NO: 1885038
agcggccacucauaaauuu

SEQ ID NO: 2311349 - RNA, 19 nt, Artificial Sequence
  Description of Artificial Sequence: Synthetic oligonucleotide
  Antisense strand to SEQ ID NO: 2311348
aaauuuaugaguggccgcu

SEQ ID NO: 2311350 - RNA, 19 nt, Artificial Sequence
  Description of Artificial Sequence: Synthetic oligonucleotide
  Sense strand starting at position 3030 of SEQ ID NO: 1885038
ugaugaccuccgggagguu

SEQ ID NO: 2311351 - RNA, 19 nt, Artificial Sequence
  Description of Artificial Sequence: Synthetic oligonucleotide
  Antisense strand to SEQ ID NO: 2311350
aaccucccggaggucauca

SEQ ID NO: 2311352 - RNA, 19 nt, Artificial Sequence
  Description of Artificial Sequence: Synthetic oligonucleotide
  Sense strand starting at position 3067 of SEQ ID NO: 1885038
aaagcaucucgauauguug

SEQ ID NO: 2311353 - RNA, 19 nt, Artificial Sequence
  Description of Artificial Sequence: Synthetic oligonucleotide
  Antisense strand to SEQ ID NO: 2311352
caacauaucgagaugcuuu

SEQ ID NO: 2311354 - RNA, 19 nt, Artificial Sequence
  Description of Artificial Sequence: Synthetic oligonucleotide
  Sense strand starting at position 3073 of SEQ ID NO: 1885038
ucucgauauguuggcaaag

SEQ ID NO: 2311355 - RNA, 19 nt, Artificial Sequence
  Description of Artificial Sequence: Synthetic oligonucleotide
  Antisense strand to SEQ ID NO: 2311354
cuuugccaacauaucgaga

SEQ ID NO: 2311356 - RNA, 19 nt, Artificial Sequence
  Description of Artificial Sequence: Synthetic oligonucleotide
  Sense strand starting at position 3444 of SEQ ID NO: 1885038
ggauuaaguuagguaaggu

SEQ ID NO: 2311357 - RNA, 19 nt, Artificial Sequence
  Description of Artificial Sequence: Synthetic oligonucleotide
  Antisense strand to SEQ ID NO: 2311356
accuuaccuaacuuaaucc

SEQ ID NO: 2311358 - RNA, 19 nt, Artificial Sequence
  Description of Artificial Sequence: Synthetic oligonucleotide
  Sense strand starting at position 3445 of SEQ ID NO: 1885038
gauuaaguuagguaaggug

SEQ ID NO: 2311359 - RNA, 19 nt, Artificial Sequence
  Description of Artificial Sequence: Synthetic oligonucleotide
  Antisense strand to SEQ ID NO: 2311358
caccuuaccuaacuuaauc

SEQ ID NO: 2311360 - RNA, 19 nt, Artificial Sequence
  Description of Artificial Sequence: Synthetic oligonucleotide
  Sense strand starting at position 3569 of SEQ ID NO: 1885038
ggugccuaucagcaagaga

SEQ ID NO: 2311361 - RNA, 19 nt, Artificial Sequence
  Description of Artificial Sequence: Synthetic oligonucleotide
  Antisense strand to SEQ ID NO: 2311360
ucucuugcugauaggcacc

SEQ ID NO: 2311362 - RNA, 19 nt, Artificial Sequence
  Description of Artificial Sequence: Synthetic oligonucleotide
  Sense strand starting at position 3592 of SEQ ID NO: 1885038
agaauuagcuucugaagag

SEQ ID NO: 2311363 - RNA, 19 nt, Artificial Sequence
  Description of Artificial Sequence: Synthetic oligonucleotide
  Antisense strand to SEQ ID NO: 2311362
cucuucagaagcuaauucu

SEQ ID NO: 2311364 - RNA, 19 nt, Artificial Sequence
  Description of Artificial Sequence: Synthetic oligonucleotide
  Sense strand starting at position 3593 of SEQ ID NO: 1885038
gaauuagcuucugaagagg

SEQ ID NO: 2311365 - RNA, 19 nt, Artificial Sequence
  Description of Artificial Sequence: Synthetic oligonucleotide
  Antisense strand to SEQ ID NO: 2311364
ccucuucagaagcuaauuc

SEQ ID NO: 2311366 - RNA, 19 nt, Artificial Sequence
  Description of Artificial Sequence: Synthetic oligonucleotide
  Sense strand starting at position 3631 of SEQ ID NO: 1885038
gagggauccugagugguca

SEQ ID NO: 2311367 - RNA, 19 nt, Artificial Sequence
  Description of Artificial Sequence: Synthetic oligonucleotide
  Antisense strand to SEQ ID NO: 2311366
ugaccacucaggaucccuc

SEQ ID NO: 2311368 - RNA, 19 nt, Artificial Sequence
  Description of Artificial Sequence: Synthetic oligonucleotide
  Sense strand starting at position 3633 of SEQ ID NO: 1885038
gggauccugaguggucaga

SEQ ID NO: 2311369 - RNA, 19 nt, Artificial Sequence
  Description of Artificial Sequence: Synthetic oligonucleotide
  Antisense strand to SEQ ID NO: 2311368
ucugaccacucaggauccc

SEQ ID NO: 2311370 - RNA, 19 nt, Artificial Sequence
  Description of Artificial Sequence: Synthetic oligonucleotide
  Sense strand starting at position 3635 of SEQ ID NO: 1885038
gauccugaguggucagaac

SEQ ID NO: 2311371 - RNA, 19 nt, Artificial Sequence
  Description of Artificial Sequence: Synthetic oligonucleotide
  Antisense strand to SEQ ID NO: 2311370
guucugaccacucaggauc

SEQ ID NO: 2311372 - RNA, 19 nt, Artificial Sequence
  Description of Artificial Sequence: Synthetic oligonucleotide
  Sense strand starting at position 3686 of SEQ ID NO: 1885038
caggcuguuugggauggau

SEQ ID NO: 2311373 - RNA, 19 nt, Artificial Sequence
  Description of Artificial Sequence: Synthetic oligonucleotide
  Antisense strand to SEQ ID NO: 2311372
auccaucccaaacagccug

SEQ ID NO: 2311374 - RNA, 19 nt, Artificial Sequence
  Description of Artificial Sequence: Synthetic oligonucleotide
  Sense strand starting at position 3688 of SEQ ID NO: 1885038
ggcuguuugggauggaucu

SEQ ID NO: 2311375 - RNA, 19 nt, Artificial Sequence
  Description of Artificial Sequence: Synthetic oligonucleotide
  Antisense strand to SEQ ID NO: 2311374
agauccaucccaaacagcc

SEQ ID NO: 2311376 - RNA, 19 nt, Artificial Sequence
  Description of Artificial Sequence: Synthetic oligonucleotide
  Sense strand starting at position 3732 of SEQ ID NO: 1885038
gcuagaccucaccaugcua

SEQ ID NO: 2311377 - RNA, 19 nt, Artificial Sequence
  Description of Artificial Sequence: Synthetic oligonucleotide
  Antisense strand to SEQ ID NO: 2311376
uagcauggugaggucuagc

SEQ ID NO: 2311378 - RNA, 19 nt, Artificial Sequence
  Description of Artificial Sequence: Synthetic oligonucleotide
  Sense strand starting at position 3839 of SEQ ID NO: 1885038
cccugugugcgauccuuau

SEQ ID NO: 2311379 - RNA, 19 nt, Artificial Sequence
  Description of Artificial Sequence: Synthetic oligonucleotide
  Antisense strand to SEQ ID NO: 2311378
auaaggaucgcacacaggg

SEQ ID NO: 2311380 - RNA, 19 nt, Artificial Sequence
  Description of Artificial Sequence: Synthetic oligonucleotide
  Sense strand starting at position 3841 of SEQ ID NO: 1885038
cugugugcgauccuuaugu

SEQ ID NO: 2311381 - RNA, 19 nt, Artificial Sequence
  Description of Artificial Sequence: Synthetic oligonucleotide
  Antisense strand to SEQ ID NO: 2311380
acauaaggaucgcacacag

SEQ ID NO: 2311382 - RNA, 19 nt, Artificial Sequence
  Description of Artificial Sequence: Synthetic oligonucleotide
  Sense strand starting at position 3845 of SEQ ID NO: 1885038
gugcgauccuuauguggua

SEQ ID NO: 2311383 - RNA, 19 nt, Artificial Sequence
  Description of Artificial Sequence: Synthetic oligonucleotide
  Antisense strand to SEQ ID NO: 2311382
uaccacauaaggaucgcac

SEQ ID NO: 2311384 - RNA, 19 nt, Artificial Sequence
  Description of Artificial Sequence: Synthetic oligonucleotide
  Sense strand starting at position 3850 of SEQ ID NO: 1885038
auccuuaugugguaccuau

SEQ ID NO: 2311385 - RNA, 19 nt, Artificial Sequence
  Description of Artificial Sequence: Synthetic oligonucleotide
  Antisense strand to SEQ ID NO: 2311384
auagguaccacauaaggau

SEQ ID NO: 2311386 - RNA, 19 nt, Artificial Sequence
  Description of Artificial Sequence: Synthetic oligonucleotide
  Sense strand starting at position 3861 of SEQ ID NO: 1885038
guaccuaugccagagguuu

SEQ ID NO: 2311387 - RNA, 19 nt, Artificial Sequence
  Description of Artificial Sequence: Synthetic oligonucleotide
  Antisense strand to SEQ ID NO: 2311386
aaaccucuggcauagguac

SEQ ID NO: 2311388 - RNA, 19 nt, Artificial Sequence
  Description of Artificial Sequence: Synthetic oligonucleotide
  Sense strand starting at position 3893 of SEQ ID NO: 1885038
gauguuaauugaggacaug

SEQ ID NO: 2311389 - RNA, 19 nt, Artificial Sequence
  Description of Artificial Sequence: Synthetic oligonucleotide
  Antisense strand to SEQ ID NO: 2311388
cauguccucaauuaacauc

SEQ ID NO: 2311390 - RNA, 19 nt, Artificial Sequence
  Description of Artificial Sequence: Synthetic oligonucleotide
  Sense strand starting at position 3935 of SEQ ID NO: 1885038
caaauauuacgugagcaug

SEQ ID NO: 2311391 - RNA, 19 nt, Artificial Sequence
  Description of Artificial Sequence: Synthetic oligonucleotide
  Antisense strand to SEQ ID NO: 2311390
caugcucacguaauauuug

SEQ ID NO: 2311392 - RNA, 19 nt, Artificial Sequence
  Description of Artificial Sequence: Synthetic oligonucleotide
  Sense strand starting at position 109 of SEQ ID NO: 1885039
cagugucccgaaggagaaa

SEQ ID NO: 2311393 - RNA, 19 nt, Artificial Sequence
  Description of Artificial Sequence: Synthetic oligonucleotide
  Antisense strand to SEQ ID NO: 2311392
uuucuccuucgggacacug

SEQ ID NO: 2311394 - RNA, 19 nt, Artificial Sequence
  Description of Artificial Sequence: Synthetic oligonucleotide
  Sense strand starting at position 173 of SEQ ID NO: 1885039
agcacaucugcaggauaau

SEQ ID NO: 2311395 - RNA, 19 nt, Artificial Sequence
  Description of Artificial Sequence: Synthetic oligonucleotide
  Antisense strand to SEQ ID NO: 2311394
auuauccugcagaugugcu

SEQ ID NO: 2311396 - RNA, 19 nt, Artificial Sequence
  Description of Artificial Sequence: Synthetic oligonucleotide
  Sense strand starting at position 174 of SEQ ID NO: 1885039
gcacaucugcaggauaaug

SEQ ID NO: 2311397 - RNA, 19 nt, Artificial Sequence
  Description of Artificial Sequence: Synthetic oligonucleotide
  Antisense strand to SEQ ID NO: 2311396
cauuauccugcagaugugc

SEQ ID NO: 2311398 - RNA, 19 nt, Artificial Sequence
  Description of Artificial Sequence: Synthetic oligonucleotide
  Sense strand starting at position 458 of SEQ ID NO: 1885039
uguggugauguaugaagau

SEQ ID NO: 2311399 - RNA, 19 nt, Artificial Sequence
  Description of Artificial Sequence: Synthetic oligonucleotide
  Antisense strand to SEQ ID NO: 2311398
aucuucauacaucaccaca

SEQ ID NO: 2311400 - RNA, 19 nt, Artificial Sequence
  Description of Artificial Sequence: Synthetic oligonucleotide
  Sense strand starting at position 961 of SEQ ID NO: 1885039
gggccugacuuucuuuauu

SEQ ID NO: 2311401 - RNA, 19 nt, Artificial Sequence
  Description of Artificial Sequence: Synthetic oligonucleotide
  Antisense strand to SEQ ID NO: 2311400
aauaaagaaagucaggccc

SEQ ID NO: 2311402 - RNA, 19 nt, Artificial Sequence
  Description of Artificial Sequence: Synthetic oligonucleotide
  Sense strand starting at position 993 of SEQ ID NO: 1885039
auuuguaguccugguuaca

SEQ ID NO: 2311403 - RNA, 19 nt, Artificial Sequence
  Description of Artificial Sequence: Synthetic oligonucleotide
  Antisense strand to SEQ ID NO: 2311402
uguaaccaggacuacaaau

SEQ ID NO: 2311404 - RNA, 19 nt, Artificial Sequence
  Description of Artificial Sequence: Synthetic oligonucleotide
  Sense strand starting at position 996 of SEQ ID NO: 1885039
uguaguccugguuacauaa

SEQ ID NO: 2311405 - RNA, 19 nt, Artificial Sequence
  Description of Artificial Sequence: Synthetic oligonucleotide
  Antisense strand to SEQ ID NO: 2311404
uuauguaaccaggacuaca

SEQ ID NO: 2311406 - RNA, 19 nt, Artificial Sequence
  Description of Artificial Sequence: Synthetic oligonucleotide
  Sense strand starting at position 1062 of SEQ ID NO: 1885039
ucaaaucugccaggguaaa

SEQ ID NO: 2311407 - RNA, 19 nt, Artificial Sequence
  Description of Artificial Sequence: Synthetic oligonucleotide
  Antisense strand to SEQ ID NO: 2311406
uuuacccuggcagauuuga

SEQ ID NO: 2311408 - RNA, 19 nt, Artificial Sequence
  Description of Artificial Sequence: Synthetic oligonucleotide
  Sense strand starting at position 1098 of SEQ ID NO: 1885039
gggaacaaaucauagcauu

SEQ ID NO: 2311409 - RNA, 19 nt, Artificial Sequence
  Description of Artificial Sequence: Synthetic oligonucleotide
  Antisense strand to SEQ ID NO: 2311408
aaugcuaugauuuguuccc

SEQ ID NO: 2311410 - RNA, 19 nt, Artificial Sequence
  Description of Artificial Sequence: Synthetic oligonucleotide
  Sense strand starting at position 1139 of SEQ ID NO: 1885039
gcugacauccuccaaaugu

SEQ ID NO: 2311411 - RNA, 19 nt, Artificial Sequence
  Description of Artificial Sequence: Synthetic oligonucleotide
  Antisense strand to SEQ ID NO: 2311410
acauuuggaggaugucagc

SEQ ID NO: 2311412 - RNA, 19 nt, Artificial Sequence
  Description of Artificial Sequence: Synthetic oligonucleotide
  Sense strand starting at position 1243 of SEQ ID NO: 1885039
accuaagacuaugugcaaa

SEQ ID NO: 2311413 - RNA, 19 nt, Artificial Sequence
  Description of Artificial Sequence: Synthetic oligonucleotide
  Antisense strand to SEQ ID NO: 2311412
uuugcacauagucuuaggu

SEQ ID NO: 2311414 - RNA, 19 nt, Artificial Sequence
  Description of Artificial Sequence: Synthetic oligonucleotide
  Sense strand starting at position 1262 of SEQ ID NO: 1885039
ggcaaacucuugcugauuu

SEQ ID NO: 2311415 - RNA, 19 nt, Artificial Sequence
  Description of Artificial Sequence: Synthetic oligonucleotide
  Antisense strand to SEQ ID NO: 2311414
aaaucagcaagaguuugcc

SEQ ID NO: 2311416 - RNA, 19 nt, Artificial Sequence
  Description of Artificial Sequence: Synthetic oligonucleotide
  Sense strand starting at position 1310 of SEQ ID NO: 1885039
ugacaacucuaguugcuua

SEQ ID NO: 2311417 - RNA, 19 nt, Artificial Sequence
  Description of Artificial Sequence: Synthetic oligonucleotide
  Antisense strand to SEQ ID NO: 2311416
uaagcaacuagaguuguca

SEQ ID NO: 2311418 - RNA, 19 nt, Artificial Sequence
  Description of Artificial Sequence: Synthetic oligonucleotide
  Sense strand starting at position 1315 of SEQ ID NO: 1885039
acucuaguugcuuaagcua

SEQ ID NO: 2311419 - RNA, 19 nt, Artificial Sequence
  Description of Artificial Sequence: Synthetic oligonucleotide
  Antisense strand to SEQ ID NO: 2311418
uagcuuaagcaacuagagu

SEQ ID NO: 2311420 - RNA, 19 nt, Artificial Sequence
  Description of Artificial Sequence: Synthetic oligonucleotide
  Sense strand starting at position 1735 of SEQ ID NO: 1885039
cuuugcuuagaagaaucua

SEQ ID NO: 2311421 - RNA, 19 nt, Artificial Sequence
  Description of Artificial Sequence: Synthetic oligonucleotide
  Antisense strand to SEQ ID NO: 2311420
uagauucuucuaagcaaag

SEQ ID NO: 2311422 - RNA, 19 nt, Artificial Sequence
  Description of Artificial Sequence: Synthetic oligonucleotide
  Sense strand starting at position 1812 of SEQ ID NO: 1885039
ugcagaaacuuucugacug

SEQ ID NO: 2311423 - RNA, 19 nt, Artificial Sequence
  Description of Artificial Sequence: Synthetic oligonucleotide
  Antisense strand to SEQ ID NO: 2311422
cagucagaaaguuucugca

SEQ ID NO: 2311424 - RNA, 19 nt, Artificial Sequence
  Description of Artificial Sequence: Synthetic oligonucleotide
  Sense strand starting at position 1829 of SEQ ID NO: 1885039
ugcagaaggucuucccauu

SEQ ID NO: 2311425 - RNA, 19 nt, Artificial Sequence
  Description of Artificial Sequence: Synthetic oligonucleotide
  Antisense strand to SEQ ID NO: 2311424
aaugggaagaccuucugca

SEQ ID NO: 2311426 - RNA, 19 nt, Artificial Sequence
  Description of Artificial Sequence: Synthetic oligonucleotide
  Sense strand starting at position 1913 of SEQ ID NO: 1885039
aggucauuccucugcucaa

SEQ ID NO: 2311427 - RNA, 19 nt, Artificial Sequence
  Description of Artificial Sequence: Synthetic oligonucleotide
  Antisense strand to SEQ ID NO: 2311426
uugagcagaggaaugaccu

SEQ ID NO: 2311428 - RNA, 19 nt, Artificial Sequence
  Description of Artificial Sequence: Synthetic oligonucleotide
  Sense strand starting at position 1914 of SEQ ID NO: 1885039
ggucauuccucugcucaaa

SEQ ID NO: 2311429 - RNA, 19 nt, Artificial Sequence
  Description of Artificial Sequence: Synthetic oligonucleotide
  Antisense strand to SEQ ID NO: 2311428
uuugagcagaggaaugacc

SEQ ID NO: 2311430 - RNA, 19 nt, Artificial Sequence
  Description of Artificial Sequence: Synthetic oligonucleotide
  Sense strand starting at position 2073 of SEQ ID NO: 1885039
gcuuucuccguggcacuua

SEQ ID NO: 2311431 - RNA, 19 nt, Artificial Sequence
  Description of Artificial Sequence: Synthetic oligonucleotide
  Antisense strand to SEQ ID NO: 2311430
uaagugccacggagaaagc

SEQ ID NO: 2311432 - RNA, 19 nt, Artificial Sequence
  Description of Artificial Sequence: Synthetic oligonucleotide
  Sense strand starting at position 2129 of SEQ ID NO: 1885039
uuuccucuugcucaaggau

SEQ ID NO: 2311433 - RNA, 19 nt, Artificial Sequence
  Description of Artificial Sequence: Synthetic oligonucleotide
  Antisense strand to SEQ ID NO: 2311432
auccuugagcaagaggaaa

SEQ ID NO: 2311434 - RNA, 19 nt, Artificial Sequence
  Description of Artificial Sequence: Synthetic oligonucleotide
  Sense strand starting at position 2132 of SEQ ID NO: 1885039
ccucuugcucaaggaugua

SEQ ID NO: 2311435 - RNA, 19 nt, Artificial Sequence
  Description of Artificial Sequence: Synthetic oligonucleotide
  Antisense strand to SEQ ID NO: 2311434
uacauccuugagcaagagg

SEQ ID NO: 2311436 - RNA, 19 nt, Artificial Sequence
  Description of Artificial Sequence: Synthetic oligonucleotide
  Sense strand starting at position 2176 of SEQ ID NO: 1885039
acaguagguccucauuaag

SEQ ID NO: 2311437 - RNA, 19 nt, Artificial Sequence
  Description of Artificial Sequence: Synthetic oligonucleotide
  Antisense strand to SEQ ID NO: 2311436
cuuaaugaggaccuacugu

SEQ ID NO: 2311438 - RNA, 19 nt, Artificial Sequence
  Description of Artificial Sequence: Synthetic oligonucleotide
  Sense strand starting at position 2179 of SEQ ID NO: 1885039
guagguccucauuaaguau

SEQ ID NO: 2311439 - RNA, 19 nt, Artificial Sequence
  Description of Artificial Sequence: Synthetic oligonucleotide
  Antisense strand to SEQ ID NO: 2311438
auacuuaaugaggaccuac

SEQ ID NO: 2311440 - RNA, 19 nt, Artificial Sequence
  Description of Artificial Sequence: Synthetic oligonucleotide
  Sense strand starting at position 2281 of SEQ ID NO: 1885039
gggcuagagaugcaauauu

SEQ ID NO: 2311441 - RNA, 19 nt, Artificial Sequence
  Description of Artificial Sequence: Synthetic oligonucleotide
  Antisense strand to SEQ ID NO: 2311440
aauauugcaucucuagccc

SEQ ID NO: 2311442 - RNA, 19 nt, Artificial Sequence
  Description of Artificial Sequence: Synthetic oligonucleotide
  Sense strand starting at position 2290 of SEQ ID NO: 1885039
augcaauauugcccgaagu

SEQ ID NO: 2311443 - RNA, 19 nt, Artificial Sequence
  Description of Artificial Sequence: Synthetic oligonucleotide
  Antisense strand to SEQ ID NO: 2311442
acuucgggcaauauugcau

SEQ ID NO: 2311444 - RNA, 19 nt, Artificial Sequence
  Description of Artificial Sequence: Synthetic oligonucleotide
  Sense strand starting at position 2291 of SEQ ID NO: 1885039
ugcaauauugcccgaagua

SEQ ID NO: 2311445 - RNA, 19 nt, Artificial Sequence
  Description of Artificial Sequence: Synthetic oligonucleotide
  Antisense strand to SEQ ID NO: 2311444
uacuucgggcaauauugca

SEQ ID NO: 2311446 - RNA, 19 nt, Artificial Sequence
  Description of Artificial Sequence: Synthetic oligonucleotide
  Sense strand starting at position 2292 of SEQ ID NO: 1885039
gcaauauugcccgaaguau

SEQ ID NO: 2311447 - RNA, 19 nt, Artificial Sequence
  Description of Artificial Sequence: Synthetic oligonucleotide
  Antisense strand to SEQ ID NO: 2311446
auacuucgggcaauauugc

SEQ ID NO: 2311448 - RNA, 19 nt, Artificial Sequence
  Description of Artificial Sequence: Synthetic oligonucleotide
  Sense strand starting at position 2426 of SEQ ID NO: 1885039
gccugaugcaaugguuaca

SEQ ID NO: 2311449 - RNA, 19 nt, Artificial Sequence
  Description of Artificial Sequence: Synthetic oligonucleotide
  Antisense strand to SEQ ID NO: 2311448
uguaaccauugcaucaggc

SEQ ID NO: 2311450 - RNA, 19 nt, Artificial Sequence
  Description of Artificial Sequence: Synthetic oligonucleotide
  Sense strand starting at position 2459 of SEQ ID NO: 1885039
gagacaggaccggguuaaa

SEQ ID NO: 2311451 - RNA, 19 nt, Artificial Sequence
  Description of Artificial Sequence: Synthetic oligonucleotide
  Antisense strand to SEQ ID NO: 2311450
uuuaacccgguccugucuc

SEQ ID NO: 2311452 - RNA, 19 nt, Artificial Sequence
  Description of Artificial Sequence: Synthetic oligonucleotide
  Sense strand starting at position 2578 of SEQ ID NO: 1885039
cagagaccucuacggcaaa

SEQ ID NO: 2311453 - RNA, 19 nt, Artificial Sequence
  Description of Artificial Sequence: Synthetic oligonucleotide
  Antisense strand to SEQ ID NO: 2311452
uuugccguagaggucucug

SEQ ID NO: 2311454 - RNA, 19 nt, Artificial Sequence
  Description of Artificial Sequence: Synthetic oligonucleotide
  Sense strand starting at position 2862 of SEQ ID NO: 1885039
aacgaugaggccugaaguu

SEQ ID NO: 2311455 - RNA, 19 nt, Artificial Sequence
  Description of Artificial Sequence: Synthetic oligonucleotide
  Antisense strand to SEQ ID NO: 2311454
aacuucaggccucaucguu

SEQ ID NO: 2311456 - RNA, 19 nt, Artificial Sequence
  Description of Artificial Sequence: Synthetic oligonucleotide
  Sense strand starting at position 2874 of SEQ ID NO: 1885039
ugaaguuggcuacgggaaa

SEQ ID NO: 2311457 - RNA, 19 nt, Artificial Sequence
  Description of Artificial Sequence: Synthetic oligonucleotide
  Antisense strand to SEQ ID NO: 2311456
uuucccguagccaacuuca

SEQ ID NO: 2311458 - RNA, 19 nt, Artificial Sequence
  Description of Artificial Sequence: Synthetic oligonucleotide
  Sense strand starting at position 2981 of SEQ ID NO: 1885039
cgccgucguccgaagcaau

SEQ ID NO: 2311459 - RNA, 19 nt, Artificial Sequence
  Description of Artificial Sequence: Synthetic oligonucleotide
  Antisense strand to SEQ ID NO: 2311458
auugcuucggacgacggcg

SEQ ID NO: 2311460 - RNA, 19 nt, Artificial Sequence
  Description of Artificial Sequence: Synthetic oligonucleotide
  Sense strand starting at position 2982 of SEQ ID NO: 1885039
gccgucguccgaagcaaua

SEQ ID NO: 2311461 - RNA, 19 nt, Artificial Sequence
  Description of Artificial Sequence: Synthetic oligonucleotide
  Antisense strand to SEQ ID NO: 2311460
uauugcuucggacgacggc

SEQ ID NO: 2311462 - RNA, 19 nt, Artificial Sequence
  Description of Artificial Sequence: Synthetic oligonucleotide
  Sense strand starting at position 3226 of SEQ ID NO: 1885039
cgcucagugccuuagacuu

SEQ ID NO: 2311463 - RNA, 19 nt, Artificial Sequence
  Description of Artificial Sequence: Synthetic oligonucleotide
  Antisense strand to SEQ ID NO: 2311462
aagucuaaggcacugagcg

SEQ ID NO: 2311464 - RNA, 19 nt, Artificial Sequence
  Description of Artificial Sequence: Synthetic oligonucleotide
  Sense strand starting at position 3239 of SEQ ID NO: 1885039
agacuuaagucucugaccu

SEQ ID NO: 2311465 - RNA, 19 nt, Artificial Sequence
  Description of Artificial Sequence: Synthetic oligonucleotide
  Antisense strand to SEQ ID NO: 2311464
aggucagagacuuaagucu

SEQ ID NO: 2311466 - RNA, 19 nt, Artificial Sequence
  Description of Artificial Sequence: Synthetic oligonucleotide
  Sense strand starting at position 3869 of SEQ ID NO: 1885039
guauccauccacugggauu

SEQ ID NO: 2311467 - RNA, 19 nt, Artificial Sequence
  Description of Artificial Sequence: Synthetic oligonucleotide
  Antisense strand to SEQ ID NO: 2311466
aaucccaguggauggauac

SEQ ID NO: 2311468 - RNA, 19 nt, Artificial Sequence
  Description of Artificial Sequence: Synthetic oligonucleotide
  Sense strand starting at position 3887 of SEQ ID NO: 1885039
ugucgacaucucgagucuu

SEQ ID NO: 2311469 - RNA, 19 nt, Artificial Sequence
  Description of Artificial Sequence: Synthetic oligonucleotide
  Antisense strand to SEQ ID NO: 2311468
aagacucgagaugucgaca

SEQ ID NO: 2311470 - RNA, 19 nt, Artificial Sequence
  Description of Artificial Sequence: Synthetic oligonucleotide
  Sense strand starting at position 3895 of SEQ ID NO: 1885039
ucucgagucuucuuaaaga

SEQ ID NO: 2311471 - RNA, 19 nt, Artificial Sequence
  Description of Artificial Sequence: Synthetic oligonucleotide
  Antisense strand to SEQ ID NO: 2311470
ucuuuaagaagacucgaga

SEQ ID NO: 2311472 - RNA, 19 nt, Artificial Sequence
  Description of Artificial Sequence: Synthetic oligonucleotide
  Sense strand starting at position 149 of SEQ ID NO: 1885040
cuuaaagacuugguguuga

SEQ ID NO: 2311473 - RNA, 19 nt, Artificial Sequence
  Description of Artificial Sequence: Synthetic oligonucleotide
  Antisense strand to SEQ ID NO: 2311472
ucaacaccaagucuuuaag

SEQ ID NO: 2311474 - RNA, 19 nt, Artificial Sequence
  Description of Artificial Sequence: Synthetic oligonucleotide
  Sense strand starting at position 192 of SEQ ID NO: 1885040
gaaugaucugaauguucuu

SEQ ID NO: 2311475 - RNA, 19 nt, Artificial Sequence
  Description of Artificial Sequence: Synthetic oligonucleotide
  Antisense strand to SEQ ID NO: 2311474
aagaacauucagaucauuc

SEQ ID NO: 2311476 - RNA, 19 nt, Artificial Sequence
  Description of Artificial Sequence: Synthetic oligonucleotide
  Sense strand starting at position 412 of SEQ ID NO: 1885040
gccauacuagaaugugaac

SEQ ID NO: 2311477 - RNA, 19 nt, Artificial Sequence
  Description of Artificial Sequence: Synthetic oligonucleotide
  Antisense strand to SEQ ID NO: 2311476
guucacauucuaguauggc

SEQ ID NO: 2311478 - RNA, 19 nt, Artificial Sequence
  Description of Artificial Sequence: Synthetic oligonucleotide
  Sense strand starting at position 532 of SEQ ID NO: 1885040
cugagugaaugacuauuga

SEQ ID NO: 2311479 - RNA, 19 nt, Artificial Sequence
  Description of Artificial Sequence: Synthetic oligonucleotide
  Antisense strand to SEQ ID NO: 2311478
ucaauagucauucacucag

SEQ ID NO: 2311480 - RNA, 19 nt, Artificial Sequence
  Description of Artificial Sequence: Synthetic oligonucleotide
  Sense strand starting at position 591 of SEQ ID NO: 1885040
aggugcuuuagauacaagu

SEQ ID NO: 2311481 - RNA, 19 nt, Artificial Sequence
  Description of Artificial Sequence: Synthetic oligonucleotide
  Antisense strand to SEQ ID NO: 2311480
acuuguaucuaaagcaccu

SEQ ID NO: 2311482 - RNA, 19 nt, Artificial Sequence
  Description of Artificial Sequence: Synthetic oligonucleotide
  Sense strand starting at position 623 of SEQ ID NO: 1885040
gucgauuuauugcccuauc

SEQ ID NO: 2311483 - RNA, 19 nt, Artificial Sequence
  Description of Artificial Sequence: Synthetic oligonucleotide
  Antisense strand to SEQ ID NO: 2311482
gauagggcaauaaaucgac

SEQ ID NO: 2311484 - RNA, 19 nt, Artificial Sequence
  Description of Artificial Sequence: Synthetic oligonucleotide
  Sense strand starting at position 624 of SEQ ID NO: 1885040
ucgauuuauugcccuaucu

SEQ ID NO: 2311485 - RNA, 19 nt, Artificial Sequence
  Description of Artificial Sequence: Synthetic oligonucleotide
  Antisense strand to SEQ ID NO: 2311484
agauagggcaauaaaucga

SEQ ID NO: 2311486 - RNA, 19 nt, Artificial Sequence
  Description of Artificial Sequence: Synthetic oligonucleotide
  Sense strand starting at position 694 of SEQ ID NO: 1885040
acugaaagcagaugaaugu

SEQ ID NO: 2311487 - RNA, 19 nt, Artificial Sequence
  Description of Artificial Sequence: Synthetic oligonucleotide
  Antisense strand to SEQ ID NO: 2311486
acauucaucugcuuucagu

SEQ ID NO: 2311488 - RNA, 19 nt, Artificial Sequence
  Description of Artificial Sequence: Synthetic oligonucleotide
  Sense strand starting at position 703 of SEQ ID NO: 1885040
agaugaaugugcuuggauc

SEQ ID NO: 2311489 - RNA, 19 nt, Artificial Sequence
  Description of Artificial Sequence: Synthetic oligonucleotide
  Antisense strand to SEQ ID NO: 2311488
gauccaagcacauucaucu

SEQ ID NO: 2311490 - RNA, 19 nt, Artificial Sequence
  Description of Artificial Sequence: Synthetic oligonucleotide
  Sense strand starting at position 714 of SEQ ID NO: 1885040
cuuggaucuaggcagagua

SEQ ID NO: 2311491 - RNA, 19 nt, Artificial Sequence
  Description of Artificial Sequence: Synthetic oligonucleotide
  Antisense strand to SEQ ID NO: 2311490
uacucugccuagauccaag

SEQ ID NO: 2311492 - RNA, 19 nt, Artificial Sequence
  Description of Artificial Sequence: Synthetic oligonucleotide
  Sense strand starting at position 1105 of SEQ ID NO: 1885040
acacgacucaugugaaaug

SEQ ID NO: 2311493 - RNA, 19 nt, Artificial Sequence
  Description of Artificial Sequence: Synthetic oligonucleotide
  Antisense strand to SEQ ID NO: 2311492
cauuucacaugagucgugu

SEQ ID NO: 2311494 - RNA, 19 nt, Artificial Sequence
  Description of Artificial Sequence: Synthetic oligonucleotide
  Sense strand starting at position 1167 of SEQ ID NO: 1885040
gcuauaacaugggcaauga

SEQ ID NO: 2311495 - RNA, 19 nt, Artificial Sequence
  Description of Artificial Sequence: Synthetic oligonucleotide
  Antisense strand to SEQ ID NO: 2311494
ucauugcccauguuauagc

SEQ ID NO: 2311496 - RNA, 19 nt, Artificial Sequence
  Description of Artificial Sequence: Synthetic oligonucleotide
  Sense strand starting at position 1199 of SEQ ID NO: 1885040
ucuuacauugccuaagagu

SEQ ID NO: 2311497 - RNA, 19 nt, Artificial Sequence
  Description of Artificial Sequence: Synthetic oligonucleotide
  Antisense strand to SEQ ID NO: 2311496
acucuuaggcaauguaaga

SEQ ID NO: 2311498 - RNA, 19 nt, Artificial Sequence
  Description of Artificial Sequence: Synthetic oligonucleotide
  Sense strand starting at position 1405 of SEQ ID NO: 1885040
agacuuuacugagugguca

SEQ ID NO: 2311499 - RNA, 19 nt, Artificial Sequence
  Description of Artificial Sequence: Synthetic oligonucleotide
  Antisense strand to SEQ ID NO: 2311498
ugaccacucaguaaagucu

SEQ ID NO: 2311500 - RNA, 19 nt, Artificial Sequence
  Description of Artificial Sequence: Synthetic oligonucleotide
  Sense strand starting at position 1406 of SEQ ID NO: 1885040
gacuuuacugaguggucaa

SEQ ID NO: 2311501 - RNA, 19 nt, Artificial Sequence
  Description of Artificial Sequence: Synthetic oligonucleotide
  Antisense strand to SEQ ID NO: 2311500
uugaccacucaguaaaguc

SEQ ID NO: 2311502 - RNA, 19 nt, Artificial Sequence
  Description of Artificial Sequence: Synthetic oligonucleotide
  Sense strand starting at position 1409 of SEQ ID NO: 1885040
uuuacugaguggucaaaua

SEQ ID NO: 2311503 - RNA, 19 nt, Artificial Sequence
  Description of Artificial Sequence: Synthetic oligonucleotide
  Antisense strand to SEQ ID NO: 2311502
uauuugaccacucaguaaa

SEQ ID NO: 2311504 - RNA, 19 nt, Artificial Sequence
  Description of Artificial Sequence: Synthetic oligonucleotide
  Sense strand starting at position 1555 of SEQ ID NO: 1885040
gugcauccauuucuacuua

SEQ ID NO: 2311505 - RNA, 19 nt, Artificial Sequence
  Description of Artificial Sequence: Synthetic oligonucleotide
  Antisense strand to SEQ ID NO: 2311504
uaaguagaaauggaugcac

SEQ ID NO: 2311506 - RNA, 19 nt, Artificial Sequence
  Description of Artificial Sequence: Synthetic oligonucleotide
  Sense strand starting at position 1590 of SEQ ID NO: 1885040
guguuucuaggauaauuag

SEQ ID NO: 2311507 - RNA, 19 nt, Artificial Sequence
  Description of Artificial Sequence: Synthetic oligonucleotide
  Antisense strand to SEQ ID NO: 2311506
cuaauuauccuagaaacac

SEQ ID NO: 2311508 - RNA, 19 nt, Artificial Sequence
  Description of Artificial Sequence: Synthetic oligonucleotide
  Sense strand starting at position 1621 of SEQ ID NO: 1885040
ucccuuaggguaugaucua

SEQ ID NO: 2311509 - RNA, 19 nt, Artificial Sequence
  Description of Artificial Sequence: Synthetic oligonucleotide
  Antisense strand to SEQ ID NO: 2311508
uagaucauacccuaaggga

SEQ ID NO: 2311510 - RNA, 19 nt, Artificial Sequence
  Description of Artificial Sequence: Synthetic oligonucleotide
  Sense strand starting at position 1701 of SEQ ID NO: 1885040
uuagcagucugacugaaga

SEQ ID NO: 2311511 - RNA, 19 nt, Artificial Sequence
  Description of Artificial Sequence: Synthetic oligonucleotide
  Antisense strand to SEQ ID NO: 2311510
ucuucagucagacugcuaa

SEQ ID NO: 2311512 - RNA, 19 nt, Artificial Sequence
  Description of Artificial Sequence: Synthetic oligonucleotide
  Sense strand starting at position 1703 of SEQ ID NO: 1885040
agcagucugacugaagauu

SEQ ID NO: 2311513 - RNA, 19 nt, Artificial Sequence
  Description of Artificial Sequence: Synthetic oligonucleotide
  Antisense strand to SEQ ID NO: 2311512
aaucuucagucagacugcu

SEQ ID NO: 2311514 - RNA, 19 nt, Artificial Sequence
  Description of Artificial Sequence: Synthetic oligonucleotide
  Sense strand starting at position 1814 of SEQ ID NO: 1885040
cauccaugguaauugggau

SEQ ID NO: 2311515 - RNA, 19 nt, Artificial Sequence
  Description of Artificial Sequence: Synthetic oligonucleotide
  Antisense strand to SEQ ID NO: 2311514
aucccaauuaccauggaug

SEQ ID NO: 2311516 - RNA, 19 nt, Artificial Sequence
  Description of Artificial Sequence: Synthetic oligonucleotide
  Sense strand starting at position 1868 of SEQ ID NO: 1885040
gagaucaagccuuggauga

SEQ ID NO: 2311517 - RNA, 19 nt, Artificial Sequence
  Description of Artificial Sequence: Synthetic oligonucleotide
  Antisense strand to SEQ ID NO: 2311516
ucauccaaggcuugaucuc

SEQ ID NO: 2311518 - RNA, 19 nt, Artificial Sequence
  Description of Artificial Sequence: Synthetic oligonucleotide
  Sense strand starting at position 1869 of SEQ ID NO: 1885040
agaucaagccuuggaugaa

SEQ ID NO: 2311519 - RNA, 19 nt, Artificial Sequence
  Description of Artificial Sequence: Synthetic oligonucleotide
  Antisense strand to SEQ ID NO: 2311518
uucauccaaggcuugaucu

SEQ ID NO: 2311520 - RNA, 19 nt, Artificial Sequence
  Description of Artificial Sequence: Synthetic oligonucleotide
  Sense strand starting at position 2082 of SEQ ID NO: 1885040
uugguagaaguccauucua

SEQ ID NO: 2311521 - RNA, 19 nt, Artificial Sequence
  Description of Artificial Sequence: Synthetic oligonucleotide
  Antisense strand to SEQ ID NO: 2311520
uagaauggacuucuaccaa

SEQ ID NO: 2311522 - RNA, 19 nt, Artificial Sequence
  Description of Artificial Sequence: Synthetic oligonucleotide
  Sense strand starting at position 2158 of SEQ ID NO: 1885040
uacuauaugguuuggaacu

SEQ ID NO: 2311523 - RNA, 19 nt, Artificial Sequence
  Description of Artificial Sequence: Synthetic oligonucleotide
  Antisense strand to SEQ ID NO: 2311522
aguuccaaaccauauagua

SEQ ID NO: 2311524 - RNA, 19 nt, Artificial Sequence
  Description of Artificial Sequence: Synthetic oligonucleotide
  Sense strand starting at position 2204 of SEQ ID NO: 1885040
uuaagauagugauucucaa

SEQ ID NO: 2311525 - RNA, 19 nt, Artificial Sequence
  Description of Artificial Sequence: Synthetic oligonucleotide
  Antisense strand to SEQ ID NO: 2311524
uugagaaucacuaucuuaa

SEQ ID NO: 2311526 - RNA, 19 nt, Artificial Sequence
  Description of Artificial Sequence: Synthetic oligonucleotide
  Sense strand starting at position 2300 of SEQ ID NO: 1885040
gguguuacuggccaggaua

SEQ ID NO: 2311527 - RNA, 19 nt, Artificial Sequence
  Description of Artificial Sequence: Synthetic oligonucleotide
  Antisense strand to SEQ ID NO: 2311526
uauccuggccaguaacacc

SEQ ID NO: 2311528 - RNA, 19 nt, Artificial Sequence
  Description of Artificial Sequence: Synthetic oligonucleotide
  Sense strand starting at position 2302 of SEQ ID NO: 1885040
uguuacuggccaggauaaa

SEQ ID NO: 2311529 - RNA, 19 nt, Artificial Sequence
  Description of Artificial Sequence: Synthetic oligonucleotide
  Antisense strand to SEQ ID NO: 2311528
uuuauccuggccaguaaca

SEQ ID NO: 2311530 - RNA, 19 nt, Artificial Sequence
  Description of Artificial Sequence: Synthetic oligonucleotide
  Sense strand starting at position 2391 of SEQ ID NO: 1885040
gugagaaauccugguugac

SEQ ID NO: 2311531 - RNA, 19 nt, Artificial Sequence
  Description of Artificial Sequence: Synthetic oligonucleotide
  Antisense strand to SEQ ID NO: 2311530
gucaaccaggauuucucac

SEQ ID NO: 2311532 - RNA, 19 nt, Artificial Sequence
  Description of Artificial Sequence: Synthetic oligonucleotide
  Sense strand starting at position 2406 of SEQ ID NO: 1885040
ugacaaauguaauugagug

SEQ ID NO: 2311533 - RNA, 19 nt, Artificial Sequence
  Description of Artificial Sequence: Synthetic oligonucleotide
  Antisense strand to SEQ ID NO: 2311532
cacucaauuacauuuguca

SEQ ID NO: 2311534 - RNA, 19 nt, Artificial Sequence
  Description of Artificial Sequence: Synthetic oligonucleotide
  Sense strand starting at position 2471 of SEQ ID NO: 1885040
gucaguuugauagagcuca

SEQ ID NO: 2311535 - RNA, 19 nt, Artificial Sequence
  Description of Artificial Sequence: Synthetic oligonucleotide
  Antisense strand to SEQ ID NO: 2311534
ugagcucuaucaaacugac

SEQ ID NO: 2311536 - RNA, 19 nt, Artificial Sequence
  Description of Artificial Sequence: Synthetic oligonucleotide
  Sense strand starting at position 2476 of SEQ ID NO: 1885040
uuugauagagcucaguuaa

SEQ ID NO: 2311537 - RNA, 19 nt, Artificial Sequence
  Description of Artificial Sequence: Synthetic oligonucleotide
  Antisense strand to SEQ ID NO: 2311536
uuaacugagcucuaucaaa

SEQ ID NO: 2311538 - RNA, 19 nt, Artificial Sequence
  Description of Artificial Sequence: Synthetic oligonucleotide
  Sense strand starting at position 2557 of SEQ ID NO: 1885040
auggcugagccauagacaa

SEQ ID NO: 2311539 - RNA, 19 nt, Artificial Sequence
  Description of Artificial Sequence: Synthetic oligonucleotide
  Antisense strand to SEQ ID NO: 2311538
uugucuauggcucagccau

SEQ ID NO: 2311540 - RNA, 19 nt, Artificial Sequence
  Description of Artificial Sequence: Synthetic oligonucleotide
  Sense strand starting at position 2640 of SEQ ID NO: 1885040
aggcaagauccuugucaga

SEQ ID NO: 2311541 - RNA, 19 nt, Artificial Sequence
  Description of Artificial Sequence: Synthetic oligonucleotide
  Antisense strand to SEQ ID NO: 2311540
ucugacaaggaucuugccu

SEQ ID NO: 2311542 - RNA, 19 nt, Artificial Sequence
  Description of Artificial Sequence: Synthetic oligonucleotide
  Sense strand starting at position 2642 of SEQ ID NO: 1885040
gcaagauccuugucagaaa

SEQ ID NO: 2311543 - RNA, 19 nt, Artificial Sequence
  Description of Artificial Sequence: Synthetic oligonucleotide
  Antisense strand to SEQ ID NO: 2311542
uuucugacaaggaucuugc

SEQ ID NO: 2311544 - RNA, 19 nt, Artificial Sequence
  Description of Artificial Sequence: Synthetic oligonucleotide
  Sense strand starting at position 2660 of SEQ ID NO: 1885040
acccaagaguucuugguaa

SEQ ID NO: 2311545 - RNA, 19 nt, Artificial Sequence
  Description of Artificial Sequence: Synthetic oligonucleotide
  Antisense strand to SEQ ID NO: 2311544
uuaccaagaacucuugggu

SEQ ID NO: 2311546 - RNA, 19 nt, Artificial Sequence
  Description of Artificial Sequence: Synthetic oligonucleotide
  Sense strand starting at position 2897 of SEQ ID NO: 1885040
uggcaauugccagaauaac

SEQ ID NO: 2311547 - RNA, 19 nt, Artificial Sequence
  Description of Artificial Sequence: Synthetic oligonucleotide
  Antisense strand to SEQ ID NO: 2311546
guuauucuggcaauugcca

SEQ ID NO: 2311548 - RNA, 19 nt, Artificial Sequence
  Description of Artificial Sequence: Synthetic oligonucleotide
  Sense strand starting at position 3260 of SEQ ID NO: 1885040
gcaauaaccggcuagaauu

SEQ ID NO: 2311549 - RNA, 19 nt, Artificial Sequence
  Description of Artificial Sequence: Synthetic oligonucleotide
  Antisense strand to SEQ ID NO: 2311548
aauucuagccgguuauugc

SEQ ID NO: 2311550 - RNA, 19 nt, Artificial Sequence
  Description of Artificial Sequence: Synthetic oligonucleotide
  Sense strand starting at position 3273 of SEQ ID NO: 1885040
agaauuguaauagggcauu

SEQ ID NO: 2311551 - RNA, 19 nt, Artificial Sequence
  Description of Artificial Sequence: Synthetic oligonucleotide
  Antisense strand to SEQ ID NO: 2311550
aaugcccuauuacaauucu

SEQ ID NO: 2311552 - RNA, 19 nt, Artificial Sequence
  Description of Artificial Sequence: Synthetic oligonucleotide
  Sense strand starting at position 156 of SEQ ID NO: 1885041
ggcguaagucuggugcaca

SEQ ID NO: 2311553 - RNA, 19 nt, Artificial Sequence
  Description of Artificial Sequence: Synthetic oligonucleotide
  Antisense strand to SEQ ID NO: 2311552
ugugcaccagacuuacgcc

SEQ ID NO: 2311554 - RNA, 19 nt, Artificial Sequence
  Description of Artificial Sequence: Synthetic oligonucleotide
  Sense strand starting at position 159 of SEQ ID NO: 1885041
guaagucuggugcacaaua

SEQ ID NO: 2311555 - RNA, 19 nt, Artificial Sequence
  Description of Artificial Sequence: Synthetic oligonucleotide
  Antisense strand to SEQ ID NO: 2311554
uauugugcaccagacuuac

SEQ ID NO: 2311556 - RNA, 19 nt, Artificial Sequence
  Description of Artificial Sequence: Synthetic oligonucleotide
  Sense strand starting at position 161 of SEQ ID NO: 1885041
aagucuggugcacaauauu

SEQ ID NO: 2311557 - RNA, 19 nt, Artificial Sequence
  Description of Artificial Sequence: Synthetic oligonucleotide
  Antisense strand to SEQ ID NO: 2311556
aauauugugcaccagacuu

SEQ ID NO: 2311558 - RNA, 19 nt, Artificial Sequence
  Description of Artificial Sequence: Synthetic oligonucleotide
  Sense strand starting at position 288 of SEQ ID NO: 1885041
uugcauauagaaggugaua

SEQ ID NO: 2311559 - RNA, 19 nt, Artificial Sequence
  Description of Artificial Sequence: Synthetic oligonucleotide
  Antisense strand to SEQ ID NO: 2311558
uaucaccuucuauaugcaa

SEQ ID NO: 2311560 - RNA, 19 nt, Artificial Sequence
  Description of Artificial Sequence: Synthetic oligonucleotide
  Sense strand starting at position 290 of SEQ ID NO: 1885041
gcauauagaaggugauaaa

SEQ ID NO: 2311561 - RNA, 19 nt, Artificial Sequence
  Description of Artificial Sequence: Synthetic oligonucleotide
  Antisense strand to SEQ ID NO: 2311560
uuuaucaccuucuauaugc

SEQ ID NO: 2311562 - RNA, 19 nt, Artificial Sequence
  Description of Artificial Sequence: Synthetic oligonucleotide
  Sense strand starting at position 326 of SEQ ID NO: 1885041
aauauuugccucugugugu

SEQ ID NO: 2311563 - RNA, 19 nt, Artificial Sequence
  Description of Artificial Sequence: Synthetic oligonucleotide
  Antisense strand to SEQ ID NO: 2311562
acacacagaggcaaauauu

SEQ ID NO: 2311564 - RNA, 19 nt, Artificial Sequence
  Description of Artificial Sequence: Synthetic oligonucleotide
  Sense strand starting at position 327 of SEQ ID NO: 1885041
auauuugccucugugugua

SEQ ID NO: 2311565 - RNA, 19 nt, Artificial Sequence
  Description of Artificial Sequence: Synthetic oligonucleotide
  Antisense strand to SEQ ID NO: 2311564
uacacacagaggcaaauau

SEQ ID NO: 2311566 - RNA, 19 nt, Artificial Sequence
  Description of Artificial Sequence: Synthetic oligonucleotide
  Sense strand starting at position 388 of SEQ ID NO: 1885041
guagaauuaugucucuuua

SEQ ID NO: 2311567 - RNA, 19 nt, Artificial Sequence
  Description of Artificial Sequence: Synthetic oligonucleotide
  Antisense strand to SEQ ID NO: 2311566
uaaagagacauaauucuac

SEQ ID NO: 2311568 - RNA, 19 nt, Artificial Sequence
  Description of Artificial Sequence: Synthetic oligonucleotide
  Sense strand starting at position 434 of SEQ ID NO: 1885041
uagggucuggcuuaugaua

SEQ ID NO: 2311569 - RNA, 19 nt, Artificial Sequence
  Description of Artificial Sequence: Synthetic oligonucleotide
  Antisense strand to SEQ ID NO: 2311568
uaucauaagccagacccua

SEQ ID NO: 2311570 - RNA, 19 nt, Artificial Sequence
  Description of Artificial Sequence: Synthetic oligonucleotide
  Sense strand starting at position 442 of SEQ ID NO: 1885041
ggcuuaugauagguacuca

SEQ ID NO: 2311571 - RNA, 19 nt, Artificial Sequence
  Description of Artificial Sequence: Synthetic oligonucleotide
  Antisense strand to SEQ ID NO: 2311570
ugaguaccuaucauaagcc

SEQ ID NO: 2311572 - RNA, 19 nt, Artificial Sequence
  Description of Artificial Sequence: Synthetic oligonucleotide
  Sense strand starting at position 454 of SEQ ID NO: 1885041
guacucauuaagugaagga

SEQ ID NO: 2311573 - RNA, 19 nt, Artificial Sequence
  Description of Artificial Sequence: Synthetic oligonucleotide
  Antisense strand to SEQ ID NO: 2311572
uccuucacuuaaugaguac

SEQ ID NO: 2311574 - RNA, 19 nt, Artificial Sequence
  Description of Artificial Sequence: Synthetic oligonucleotide
  Sense strand starting at position 528 of SEQ ID NO: 1885041
agaccuuuacaggguugau

SEQ ID NO: 2311575 - RNA, 19 nt, Artificial Sequence
  Description of Artificial Sequence: Synthetic oligonucleotide
  Antisense strand to SEQ ID NO: 2311574
aucaacccuguaaaggucu

SEQ ID NO: 2311576 - RNA, 19 nt, Artificial Sequence
  Description of Artificial Sequence: Synthetic oligonucleotide
  Sense strand starting at position 654 of SEQ ID NO: 1885041
gcuuacuucccagagcaga

SEQ ID NO: 2311577 - RNA, 19 nt, Artificial Sequence
  Description of Artificial Sequence: Synthetic oligonucleotide
  Antisense strand to SEQ ID NO: 2311576
ucugcucugggaaguaagc

SEQ ID NO: 2311578 - RNA, 19 nt, Artificial Sequence
  Description of Artificial Sequence: Synthetic oligonucleotide
  Sense strand starting at position 729 of SEQ ID NO: 1885041
uuuggaaagcaguaaaucu

SEQ ID NO: 2311579 - RNA, 19 nt, Artificial Sequence
  Description of Artificial Sequence: Synthetic oligonucleotide
  Antisense strand to SEQ ID NO: 2311578
agauuuacugcuuuccaaa

SEQ ID NO: 2311580 - RNA, 19 nt, Artificial Sequence
  Description of Artificial Sequence: Synthetic oligonucleotide
  Sense strand starting at position 797 of SEQ ID NO: 1885041
agacuauauccauguauga

SEQ ID NO: 2311581 - RNA, 19 nt, Artificial Sequence
  Description of Artificial Sequence: Synthetic oligonucleotide
  Antisense strand to SEQ ID NO: 2311580
ucauacauggauauagucu

SEQ ID NO: 2311582 - RNA, 19 nt, Artificial Sequence
  Description of Artificial Sequence: Synthetic oligonucleotide
  Sense strand starting at position 1065 of SEQ ID NO: 1885041
uugguuaaacaucacaguu

SEQ ID NO: 2311583 - RNA, 19 nt, Artificial Sequence
  Description of Artificial Sequence: Synthetic oligonucleotide
  Antisense strand to SEQ ID NO: 2311582
aacugugauguuuaaccaa

SEQ ID NO: 2311584 - RNA, 19 nt, Artificial Sequence
  Description of Artificial Sequence: Synthetic oligonucleotide
  Sense strand starting at position 1143 of SEQ ID NO: 1885041
gaaucucuggccuauguua

SEQ ID NO: 2311585 - RNA, 19 nt, Artificial Sequence
  Description of Artificial Sequence: Synthetic oligonucleotide
  Antisense strand to SEQ ID NO: 2311584
uaacauaggccagagauuc

SEQ ID NO: 2311586 - RNA, 19 nt, Artificial Sequence
  Description of Artificial Sequence: Synthetic oligonucleotide
  Sense strand starting at position 1307 of SEQ ID NO: 1885041
cugugagucagggacuaua

SEQ ID NO: 2311587 - RNA, 19 nt, Artificial Sequence
  Description of Artificial Sequence: Synthetic oligonucleotide
  Antisense strand to SEQ ID NO: 2311586
uauagucccugacucacag

SEQ ID NO: 2311588 - RNA, 19 nt, Artificial Sequence
  Description of Artificial Sequence: Synthetic oligonucleotide
  Sense strand starting at position 1375 of SEQ ID NO: 1885041
cggaguucuauccaauagg

SEQ ID NO: 2311589 - RNA, 19 nt, Artificial Sequence
  Description of Artificial Sequence: Synthetic oligonucleotide
  Antisense strand to SEQ ID NO: 2311588
ccuauuggauagaacuccg

SEQ ID NO: 2311590 - RNA, 19 nt, Artificial Sequence
  Description of Artificial Sequence: Synthetic oligonucleotide
  Sense strand starting at position 1402 of SEQ ID NO: 1885041
aaugcaacagagugugaua

SEQ ID NO: 2311591 - RNA, 19 nt, Artificial Sequence
  Description of Artificial Sequence: Synthetic oligonucleotide
  Antisense strand to SEQ ID NO: 2311590
uaucacacucuguugcauu

SEQ ID NO: 2311592 - RNA, 19 nt, Artificial Sequence
  Description of Artificial Sequence: Synthetic oligonucleotide
  Sense strand starting at position 1404 of SEQ ID NO: 1885041
ugcaacagagugugauaaa

SEQ ID NO: 2311593 - RNA, 19 nt, Artificial Sequence
  Description of Artificial Sequence: Synthetic oligonucleotide
  Antisense strand to SEQ ID NO: 2311592
uuuaucacacucuguugca

SEQ ID NO: 2311594 - RNA, 19 nt, Artificial Sequence
  Description of Artificial Sequence: Synthetic oligonucleotide
  Sense strand starting at position 1414 of SEQ ID NO: 1885041
ugugauaaaugcuuuaaug

SEQ ID NO: 2311595 - RNA, 19 nt, Artificial Sequence
  Description of Artificial Sequence: Synthetic oligonucleotide
  Antisense strand to SEQ ID NO: 2311594
cauuaaagcauuuaucaca

SEQ ID NO: 2311596 - RNA, 19 nt, Artificial Sequence
  Description of Artificial Sequence: Synthetic oligonucleotide
  Sense strand starting at position 1448 of SEQ ID NO: 1885041
gucaauuuagagcgcauca

SEQ ID NO: 2311597 - RNA, 19 nt, Artificial Sequence
  Description of Artificial Sequence: Synthetic oligonucleotide
  Antisense strand to SEQ ID NO: 2311596
ugaugcgcucuaaauugac

SEQ ID NO: 2311598 - RNA, 19 nt, Artificial Sequence
  Description of Artificial Sequence: Synthetic oligonucleotide
  Sense strand starting at position 1552 of SEQ ID NO: 1885041
ugaauuauagacugcuaaa

SEQ ID NO: 2311599 - RNA, 19 nt, Artificial Sequence
  Description of Artificial Sequence: Synthetic oligonucleotide
  Antisense strand to SEQ ID NO: 2311598
uuuagcagucuauaauuca

SEQ ID NO: 2311600 - RNA, 19 nt, Artificial Sequence
  Description of Artificial Sequence: Synthetic oligonucleotide
  Sense strand starting at position 1579 of SEQ ID NO: 1885041
guguuagaaucaucuaauu

SEQ ID NO: 2311601 - RNA, 19 nt, Artificial Sequence
  Description of Artificial Sequence: Synthetic oligonucleotide
  Antisense strand to SEQ ID NO: 2311600
aauuagaugauucuaacac

SEQ ID NO: 2311602 - RNA, 19 nt, Artificial Sequence
  Description of Artificial Sequence: Synthetic oligonucleotide
  Sense strand starting at position 1632 of SEQ ID NO: 1885041
uccagagaggcugauguau

SEQ ID NO: 2311603 - RNA, 19 nt, Artificial Sequence
  Description of Artificial Sequence: Synthetic oligonucleotide
  Antisense strand to SEQ ID NO: 2311602
auacaucagccucucugga

SEQ ID NO: 2311604 - RNA, 19 nt, Artificial Sequence
  Description of Artificial Sequence: Synthetic oligonucleotide
  Sense strand starting at position 1671 of SEQ ID NO: 1885041
gcagcuaggacccagauau

SEQ ID NO: 2311605 - RNA, 19 nt, Artificial Sequence
  Description of Artificial Sequence: Synthetic oligonucleotide
  Antisense strand to SEQ ID NO: 2311604
auaucuggguccuagcugc

SEQ ID NO: 2311606 - RNA, 19 nt, Artificial Sequence
  Description of Artificial Sequence: Synthetic oligonucleotide
  Sense strand starting at position 1839 of SEQ ID NO: 1885041
uggugaugccaauaaccca

SEQ ID NO: 2311607 - RNA, 19 nt, Artificial Sequence
  Description of Artificial Sequence: Synthetic oligonucleotide
  Antisense strand to SEQ ID NO: 2311606
uggguuauuggcaucacca

SEQ ID NO: 2311608 - RNA, 19 nt, Artificial Sequence
  Description of Artificial Sequence: Synthetic oligonucleotide
  Sense strand starting at position 1857 of SEQ ID NO: 1885041
aucaucucuugguuauaga

SEQ ID NO: 2311609 - RNA, 19 nt, Artificial Sequence
  Description of Artificial Sequence: Synthetic oligonucleotide
  Antisense strand to SEQ ID NO: 2311608
ucuauaaccaagagaugau

SEQ ID NO: 2311610 - RNA, 19 nt, Artificial Sequence
  Description of Artificial Sequence: Synthetic oligonucleotide
  Sense strand starting at position 1858 of SEQ ID NO: 1885041
ucaucucuugguuauagau

SEQ ID NO: 2311611 - RNA, 19 nt, Artificial Sequence
  Description of Artificial Sequence: Synthetic oligonucleotide
  Antisense strand to SEQ ID NO: 2311610
aucuauaaccaagagauga

SEQ ID NO: 2311612 - RNA, 19 nt, Artificial Sequence
  Description of Artificial Sequence: Synthetic oligonucleotide
  Sense strand starting at position 1880 of SEQ ID NO: 1885041
ccaugagcugcugaugaau

SEQ ID NO: 2311613 - RNA, 19 nt, Artificial Sequence
  Description of Artificial Sequence: Synthetic oligonucleotide
  Antisense strand to SEQ ID NO: 2311612
auucaucagcagcucaugg

SEQ ID NO: 2311614 - RNA, 19 nt, Artificial Sequence
  Description of Artificial Sequence: Synthetic oligonucleotide
  Sense strand starting at position 1986 of SEQ ID NO: 1885041
ggcugugaacaagagcaaa

SEQ ID NO: 2311615 - RNA, 19 nt, Artificial Sequence
  Description of Artificial Sequence: Synthetic oligonucleotide
  Antisense strand to SEQ ID NO: 2311614
uuugcucuuguucacagcc

SEQ ID NO: 2311616 - RNA, 19 nt, Artificial Sequence
  Description of Artificial Sequence: Synthetic oligonucleotide
  Sense strand starting at position 2058 of SEQ ID NO: 1885041
gcaucuaagggcuaaggua

SEQ ID NO: 2311617 - RNA, 19 nt, Artificial Sequence
  Description of Artificial Sequence: Synthetic oligonucleotide
  Antisense strand to SEQ ID NO: 2311616
uaccuuagcccuuagaugc

SEQ ID NO: 2311618 - RNA, 19 nt, Artificial Sequence
  Description of Artificial Sequence: Synthetic oligonucleotide
  Sense strand starting at position 2256 of SEQ ID NO: 1885041
ggaagcucauaguuucuga

SEQ ID NO: 2311619 - RNA, 19 nt, Artificial Sequence
  Description of Artificial Sequence: Synthetic oligonucleotide
  Antisense strand to SEQ ID NO: 2311618
ucagaaacuaugagcuucc

SEQ ID NO: 2311620 - RNA, 19 nt, Artificial Sequence
  Description of Artificial Sequence: Synthetic oligonucleotide
  Sense strand starting at position 2292 of SEQ ID NO: 1885041
gguucuuaccggcaaugga

SEQ ID NO: 2311621 - RNA, 19 nt, Artificial Sequence
  Description of Artificial Sequence: Synthetic oligonucleotide
  Antisense strand to SEQ ID NO: 2311620
uccauugccgguaagaacc

SEQ ID NO: 2311622 - RNA, 19 nt, Artificial Sequence
  Description of Artificial Sequence: Synthetic oligonucleotide
  Sense strand starting at position 2320 of SEQ ID NO: 1885041
cuuagugcagaugaugaua

SEQ ID NO: 2311623 - RNA, 19 nt, Artificial Sequence
  Description of Artificial Sequence: Synthetic oligonucleotide
  Antisense strand to SEQ ID NO: 2311622
uaucaucaucugcacuaag

SEQ ID NO: 2311624 - RNA, 19 nt, Artificial Sequence
  Description of Artificial Sequence: Synthetic oligonucleotide
  Sense strand starting at position 2371 of SEQ ID NO: 1885041
uucugaggucuuuaacuac

SEQ ID NO: 2311625 - RNA, 19 nt, Artificial Sequence
  Description of Artificial Sequence: Synthetic oligonucleotide
  Antisense strand to SEQ ID NO: 2311624
guaguuaaagaccucagaa

SEQ ID NO: 2311626 - RNA, 19 nt, Artificial Sequence
  Description of Artificial Sequence: Synthetic oligonucleotide
  Sense strand starting at position 2513 of SEQ ID NO: 1885041
aacagauugcguuaaaguc

SEQ ID NO: 2311627 - RNA, 19 nt, Artificial Sequence
  Description of Artificial Sequence: Synthetic oligonucleotide
  Antisense strand to SEQ ID NO: 2311626
gacuuuaacgcaaucuguu

SEQ ID NO: 2311628 - RNA, 19 nt, Artificial Sequence
  Description of Artificial Sequence: Synthetic oligonucleotide
  Sense strand starting at position 3141 of SEQ ID NO: 1885041
cgccgcuuucgaucucgaa

SEQ ID NO: 2311629 - RNA, 19 nt, Artificial Sequence
  Description of Artificial Sequence: Synthetic oligonucleotide
  Antisense strand to SEQ ID NO: 2311628
uucgagaucgaaagcggcg

SEQ ID NO: 2311630 - RNA, 19 nt, Artificial Sequence
  Description of Artificial Sequence: Synthetic oligonucleotide
  Sense strand starting at position 3645 of SEQ ID NO: 1885041
ggaagaaaguguucuguuc

SEQ ID NO: 2311631 - RNA, 19 nt, Artificial Sequence
  Description of Artificial Sequence: Synthetic oligonucleotide
  Antisense strand to SEQ ID NO: 2311630
gaacagaacacuuucuucc

SEQ ID NO: 2311632 - RNA, 19 nt, Artificial Sequence
  Description of Artificial Sequence: Synthetic oligonucleotide
  Sense strand starting at position 24 of SEQ ID NO: 1885042
ucaggucuuccugacaacu

SEQ ID NO: 2311633 - RNA, 19 nt, Artificial Sequence
  Description of Artificial Sequence: Synthetic oligonucleotide
  Antisense strand to SEQ ID NO: 2311632
aguugucaggaagaccuga

SEQ ID NO: 2311634 - RNA, 19 nt, Artificial Sequence
  Description of Artificial Sequence: Synthetic oligonucleotide
  Sense strand starting at position 77 of SEQ ID NO: 1885042
cccacaucaccuugagugu

SEQ ID NO: 2311635 - RNA, 19 nt, Artificial Sequence
  Description of Artificial Sequence: Synthetic oligonucleotide
  Antisense strand to SEQ ID NO: 2311634
acacucaaggugauguggg

SEQ ID NO: 2311636 - RNA, 19 nt, Artificial Sequence
  Description of Artificial Sequence: Synthetic oligonucleotide
  Sense strand starting at position 99 of SEQ ID NO: 1885042
gagagcuaggccuaugacu

SEQ ID NO: 2311637 - RNA, 19 nt, Artificial Sequence
  Description of Artificial Sequence: Synthetic oligonucleotide
  Antisense strand to SEQ ID NO: 2311636
agucauaggccuagcucuc

SEQ ID NO: 2311638 - RNA, 19 nt, Artificial Sequence
  Description of Artificial Sequence: Synthetic oligonucleotide
  Sense strand starting at position 110 of SEQ ID NO: 1885042
cuaugacuucucugucuca

SEQ ID NO: 2311639 - RNA, 19 nt, Artificial Sequence
  Description of Artificial Sequence: Synthetic oligonucleotide
  Antisense strand to SEQ ID NO: 2311638
ugagacagagaagucauag

SEQ ID NO: 2311640 - RNA, 19 nt, Artificial Sequence
  Description of Artificial Sequence: Synthetic oligonucleotide
  Sense strand starting at position 113 of SEQ ID NO: 1885042
ugacuucucugucucagga

SEQ ID NO: 2311641 - RNA, 19 nt, Artificial Sequence
  Description of Artificial Sequence: Synthetic oligonucleotide
  Antisense strand to SEQ ID NO: 2311640
uccugagacagagaaguca

SEQ ID NO: 2311642 - RNA, 19 nt, Artificial Sequence
  Description of Artificial Sequence: Synthetic oligonucleotide
  Sense strand starting at position 177 of SEQ ID NO: 1885042
ccaauaacaucuucguuga

SEQ ID NO: 2311643 - RNA, 19 nt, Artificial Sequence
  Description of Artificial Sequence: Synthetic oligonucleotide
  Antisense strand to SEQ ID NO: 2311642
ucaacgaagauguuauugg

SEQ ID NO: 2311644 - RNA, 19 nt, Artificial Sequence
  Description of Artificial Sequence: Synthetic oligonucleotide
  Sense strand starting at position 208 of SEQ ID NO: 1885042
gcacaucagguauguuaac

SEQ ID NO: 2311645 - RNA, 19 nt, Artificial Sequence
  Description of Artificial Sequence: Synthetic oligonucleotide
  Antisense strand to SEQ ID NO: 2311644
guuaacauaccugaugugc

SEQ ID NO: 2311646 - RNA, 19 nt, Artificial Sequence
  Description of Artificial Sequence: Synthetic oligonucleotide
  Sense strand starting at position 528 of SEQ ID NO: 1885042
gcaggaguguaacucugaa

SEQ ID NO: 2311647 - RNA, 19 nt, Artificial Sequence
  Description of Artificial Sequence: Synthetic oligonucleotide
  Antisense strand to SEQ ID NO: 2311646
uucagaguuacacuccugc

SEQ ID NO: 2311648 - RNA, 19 nt, Artificial Sequence
  Description of Artificial Sequence: Synthetic oligonucleotide
  Sense strand starting at position 1428 of SEQ ID NO: 1885042
gagcaucuguugccagaaa

SEQ ID NO: 2311649 - RNA, 19 nt, Artificial Sequence
  Description of Artificial Sequence: Synthetic oligonucleotide
  Antisense strand to SEQ ID NO: 2311648
uuucuggcaacagaugcuc

SEQ ID NO: 2311650 - RNA, 19 nt, Artificial Sequence
  Description of Artificial Sequence: Synthetic oligonucleotide
  Sense strand starting at position 1733 of SEQ ID NO: 1885042
ccaccuuagugaccaaagu

SEQ ID NO: 2311651 - RNA, 19 nt, Artificial Sequence
  Description of Artificial Sequence: Synthetic oligonucleotide
  Antisense strand to SEQ ID NO: 2311650
acuuuggucacuaaggugg

SEQ ID NO: 2311652 - RNA, 19 nt, Artificial Sequence
  Description of Artificial Sequence: Synthetic oligonucleotide
  Sense strand starting at position 1748 of SEQ ID NO: 1885042
aagugaaugucaccauagu

SEQ ID NO: 2311653 - RNA, 19 nt, Artificial Sequence
  Description of Artificial Sequence: Synthetic oligonucleotide
  Antisense strand to SEQ ID NO: 2311652
acuauggugacauucacuu

SEQ ID NO: 2311654 - RNA, 19 nt, Artificial Sequence
  Description of Artificial Sequence: Synthetic oligonucleotide
  Sense strand starting at position 1749 of SEQ ID NO: 1885042
agugaaugucaccauagug

SEQ ID NO: 2311655 - RNA, 19 nt, Artificial Sequence
  Description of Artificial Sequence: Synthetic oligonucleotide
  Antisense strand to SEQ ID NO: 2311654
cacuauggugacauucacu

SEQ ID NO: 2311656 - RNA, 19 nt, Artificial Sequence
  Description of Artificial Sequence: Synthetic oligonucleotide
  Sense strand starting at position 1925 of SEQ ID NO: 1885042
caaacauguccaggucaug

SEQ ID NO: 2311657 - RNA, 19 nt, Artificial Sequence
  Description of Artificial Sequence: Synthetic oligonucleotide
  Antisense strand to SEQ ID NO: 2311656
caugaccuggacauguuug

SEQ ID NO: 2311658 - RNA, 19 nt, Artificial Sequence
  Description of Artificial Sequence: Synthetic oligonucleotide
  Sense strand starting at position 2121 of SEQ ID NO: 1885042
ggcgcuaaggcacaagaau

SEQ ID NO: 2311659 - RNA, 19 nt, Artificial Sequence
  Description of Artificial Sequence: Synthetic oligonucleotide
  Antisense strand to SEQ ID NO: 2311658
auucuugugccuuagcgcc

SEQ ID NO: 2311660 - RNA, 19 nt, Artificial Sequence
  Description of Artificial Sequence: Synthetic oligonucleotide
  Sense strand starting at position 2375 of SEQ ID NO: 1885042
gacauauggugacucuuga

SEQ ID NO: 2311661 - RNA, 19 nt, Artificial Sequence
  Description of Artificial Sequence: Synthetic oligonucleotide
  Antisense strand to SEQ ID NO: 2311660
ucaagagucaccauauguc

SEQ ID NO: 2311662 - RNA, 19 nt, Artificial Sequence
  Description of Artificial Sequence: Synthetic oligonucleotide
  Sense strand starting at position 2484 of SEQ ID NO: 1885042
ucuguauuccaaggguaau

SEQ ID NO: 2311663 - RNA, 19 nt, Artificial Sequence
  Description of Artificial Sequence: Synthetic oligonucleotide
  Antisense strand to SEQ ID NO: 2311662
auuacccuuggaauacaga

SEQ ID NO: 2311664 - RNA, 19 nt, Artificial Sequence
  Description of Artificial Sequence: Synthetic oligonucleotide
  Sense strand starting at position 2485 of SEQ ID NO: 1885042
cuguauuccaaggguaaug

SEQ ID NO: 2311665 - RNA, 19 nt, Artificial Sequence
  Description of Artificial Sequence: Synthetic oligonucleotide
  Antisense strand to SEQ ID NO: 2311664
cauuacccuuggaauacag

SEQ ID NO: 2311666 - RNA, 19 nt, Artificial Sequence
  Description of Artificial Sequence: Synthetic oligonucleotide
  Sense strand starting at position 2503 of SEQ ID NO: 1885042
ggaguagcagguugacaaa

SEQ ID NO: 2311667 - RNA, 19 nt, Artificial Sequence
  Description of Artificial Sequence: Synthetic oligonucleotide
  Antisense strand to SEQ ID NO: 2311666
uuugucaaccugcuacucc

SEQ ID NO: 2311668 - RNA, 19 nt, Artificial Sequence
  Description of Artificial Sequence: Synthetic oligonucleotide
  Sense strand starting at position 2570 of SEQ ID NO: 1885042
auucuuauguaagcuggaa

SEQ ID NO: 2311669 - RNA, 19 nt, Artificial Sequence
  Description of Artificial Sequence: Synthetic oligonucleotide
  Antisense strand to SEQ ID NO: 2311668
uuccagcuuacauaagaau

SEQ ID NO: 2311670 - RNA, 19 nt, Artificial Sequence
  Description of Artificial Sequence: Synthetic oligonucleotide
  Sense strand starting at position 2574 of SEQ ID NO: 1885042
uuauguaagcuggaaauua

SEQ ID NO: 2311671 - RNA, 19 nt, Artificial Sequence
  Description of Artificial Sequence: Synthetic oligonucleotide
  Antisense strand to SEQ ID NO: 2311670
uaauuuccagcuuacauaa

SEQ ID NO: 2311672 - RNA, 19 nt, Artificial Sequence
  Description of Artificial Sequence: Synthetic oligonucleotide
  Sense strand starting at position 2667 of SEQ ID NO: 1885042
augcauaaacuguguaaug

SEQ ID NO: 2311673 - RNA, 19 nt, Artificial Sequence
  Description of Artificial Sequence: Synthetic oligonucleotide
  Antisense strand to SEQ ID NO: 2311672
cauuacacaguuuaugcau

SEQ ID NO: 2311674 - RNA, 19 nt, Artificial Sequence
  Description of Artificial Sequence: Synthetic oligonucleotide
  Sense strand starting at position 2668 of SEQ ID NO: 1885042
ugcauaaacuguguaauga

SEQ ID NO: 2311675 - RNA, 19 nt, Artificial Sequence
  Description of Artificial Sequence: Synthetic oligonucleotide
  Antisense strand to SEQ ID NO: 2311674
ucauuacacaguuuaugca

SEQ ID NO: 2311676 - RNA, 19 nt, Artificial Sequence
  Description of Artificial Sequence: Synthetic oligonucleotide
  Sense strand starting at position 2669 of SEQ ID NO: 1885042
gcauaaacuguguaaugac

SEQ ID NO: 2311677 - RNA, 19 nt, Artificial Sequence
  Description of Artificial Sequence: Synthetic oligonucleotide
  Antisense strand to SEQ ID NO: 2311676
gucauuacacaguuuaugc

SEQ ID NO: 2311678 - RNA, 19 nt, Artificial Sequence
  Description of Artificial Sequence: Synthetic oligonucleotide
  Sense strand starting at position 2676 of SEQ ID NO: 1885042
cuguguaaugaccaaguca

SEQ ID NO: 2311679 - RNA, 19 nt, Artificial Sequence
  Description of Artificial Sequence: Synthetic oligonucleotide
  Antisense strand to SEQ ID NO: 2311678
ugacuuggucauuacacag

SEQ ID NO: 2311680 - RNA, 19 nt, Artificial Sequence
  Description of Artificial Sequence: Synthetic oligonucleotide
  Sense strand starting at position 2708 of SEQ ID NO: 1885042
auccaugaccuugaguauu

SEQ ID NO: 2311681 - RNA, 19 nt, Artificial Sequence
  Description of Artificial Sequence: Synthetic oligonucleotide
  Antisense strand to SEQ ID NO: 2311680
aauacucaaggucauggau

SEQ ID NO: 2311682 - RNA, 19 nt, Artificial Sequence
  Description of Artificial Sequence: Synthetic oligonucleotide
  Sense strand starting at position 2710 of SEQ ID NO: 1885042
ccaugaccuugaguauuaa

SEQ ID NO: 2311683 - RNA, 19 nt, Artificial Sequence
  Description of Artificial Sequence: Synthetic oligonucleotide
  Antisense strand to SEQ ID NO: 2311682
uuaauacucaaggucaugg

SEQ ID NO: 2311684 - RNA, 19 nt, Artificial Sequence
  Description of Artificial Sequence: Synthetic oligonucleotide
  Sense strand starting at position 2737 of SEQ ID NO: 1885042
auguguugggagcauuaca

SEQ ID NO: 2311685 - RNA, 19 nt, Artificial Sequence
  Description of Artificial Sequence: Synthetic oligonucleotide
  Antisense strand to SEQ ID NO: 2311684
uguaaugcucccaacacau

SEQ ID NO: 2311686 - RNA, 19 nt, Artificial Sequence
  Description of Artificial Sequence: Synthetic oligonucleotide
  Sense strand starting at position 3144 of SEQ ID NO: 1885042
uuucuuuaucgguagguaa

SEQ ID NO: 2311687 - RNA, 19 nt, Artificial Sequence
  Description of Artificial Sequence: Synthetic oligonucleotide
  Antisense strand to SEQ ID NO: 2311686
uuaccuaccgauaaagaaa

SEQ ID NO: 2311688 - RNA, 19 nt, Artificial Sequence
  Description of Artificial Sequence: Synthetic oligonucleotide
  Sense strand starting at position 3147 of SEQ ID NO: 1885042
cuuuaucgguagguaauaa

SEQ ID NO: 2311689 - RNA, 19 nt, Artificial Sequence
  Description of Artificial Sequence: Synthetic oligonucleotide
  Antisense strand to SEQ ID NO: 2311688
uuauuaccuaccgauaaag

SEQ ID NO: 2311690 - RNA, 19 nt, Artificial Sequence
  Description of Artificial Sequence: Synthetic oligonucleotide
  Sense strand starting at position 3148 of SEQ ID NO: 1885042
uuuaucgguagguaauaaa

SEQ ID NO: 2311691 - RNA, 19 nt, Artificial Sequence
  Description of Artificial Sequence: Synthetic oligonucleotide
  Antisense strand to SEQ ID NO: 2311690
uuuauuaccuaccgauaaa

SEQ ID NO: 2311692 - RNA, 19 nt, Artificial Sequence
  Description of Artificial Sequence: Synthetic oligonucleotide
  Sense strand starting at position 3692 of SEQ ID NO: 1885042
agacaacuugcuuguccau

SEQ ID NO: 2311693 - RNA, 19 nt, Artificial Sequence
  Description of Artificial Sequence: Synthetic oligonucleotide
  Antisense strand to SEQ ID NO: 2311692
auggacaagcaaguugucu

SEQ ID NO: 2311694 - RNA, 19 nt, Artificial Sequence
  Description of Artificial Sequence: Synthetic oligonucleotide
  Sense strand starting at position 3729 of SEQ ID NO: 1885042
uugugaacaccacagguau

SEQ ID NO: 2311695 - RNA, 19 nt, Artificial Sequence
  Description of Artificial Sequence: Synthetic oligonucleotide
  Antisense strand to SEQ ID NO: 2311694
auaccugugguguucacaa

SEQ ID NO: 2311696 - RNA, 19 nt, Artificial Sequence
  Description of Artificial Sequence: Synthetic oligonucleotide
  Sense strand starting at position 3758 of SEQ ID NO: 1885042
gaguucuuccgaggaacug

SEQ ID NO: 2311697 - RNA, 19 nt, Artificial Sequence
  Description of Artificial Sequence: Synthetic oligonucleotide
  Antisense strand to SEQ ID NO: 2311696
caguuccucggaagaacuc

SEQ ID NO: 2311698 - RNA, 19 nt, Artificial Sequence
  Description of Artificial Sequence: Synthetic oligonucleotide
  Sense strand starting at position 3759 of SEQ ID NO: 1885042
aguucuuccgaggaacuga

SEQ ID NO: 2311699 - RNA, 19 nt, Artificial Sequence
  Description of Artificial Sequence: Synthetic oligonucleotide
  Antisense strand to SEQ ID NO: 2311698
ucaguuccucggaagaacu

SEQ ID NO: 2311700 - RNA, 19 nt, Artificial Sequence
  Description of Artificial Sequence: Synthetic oligonucleotide
  Sense strand starting at position 3806 of SEQ ID NO: 1885042
ucaagagauuggucuuguu

SEQ ID NO: 2311701 - RNA, 19 nt, Artificial Sequence
  Description of Artificial Sequence: Synthetic oligonucleotide
  Antisense strand to SEQ ID NO: 2311700
aacaagaccaaucucuuga

SEQ ID NO: 2311702 - RNA, 19 nt, Artificial Sequence
  Description of Artificial Sequence: Synthetic oligonucleotide
  Sense strand starting at position 3835 of SEQ ID NO: 1885042
cuuugacuaccaggaaacu

SEQ ID NO: 2311703 - RNA, 19 nt, Artificial Sequence
  Description of Artificial Sequence: Synthetic oligonucleotide
  Antisense strand to SEQ ID NO: 2311702
aguuuccugguagucaaag

SEQ ID NO: 2311704 - RNA, 19 nt, Artificial Sequence
  Description of Artificial Sequence: Synthetic oligonucleotide
  Sense strand starting at position 3856 of SEQ ID NO: 1885042
aagucagaucuguggccaa

SEQ ID NO: 2311705 - RNA, 19 nt, Artificial Sequence
  Description of Artificial Sequence: Synthetic oligonucleotide
  Antisense strand to SEQ ID NO: 2311704
uuggccacagaucugacuu

SEQ ID NO: 2311706 - RNA, 19 nt, Artificial Sequence
  Description of Artificial Sequence: Synthetic oligonucleotide
  Sense strand starting at position 3859 of SEQ ID NO: 1885042
ucagaucuguggccaaauu

SEQ ID NO: 2311707 - RNA, 19 nt, Artificial Sequence
  Description of Artificial Sequence: Synthetic oligonucleotide
  Antisense strand to SEQ ID NO: 2311706
aauuuggccacagaucuga

SEQ ID NO: 2311708 - RNA, 19 nt, Artificial Sequence
  Description of Artificial Sequence: Synthetic oligonucleotide
  Sense strand starting at position 3887 of SEQ ID NO: 1885042
auaccaaugcuaugucaug

SEQ ID NO: 2311709 - RNA, 19 nt, Artificial Sequence
  Description of Artificial Sequence: Synthetic oligonucleotide
  Antisense strand to SEQ ID NO: 2311708
caugacauagcauugguau

SEQ ID NO: 2311710 - RNA, 19 nt, Artificial Sequence
  Description of Artificial Sequence: Synthetic oligonucleotide
  Sense strand starting at position 3951 of SEQ ID NO: 1885042
gcuuucuucgugucccgau

SEQ ID NO: 2311711 - RNA, 19 nt, Artificial Sequence
  Description of Artificial Sequence: Synthetic oligonucleotide
  Antisense strand to SEQ ID NO: 2311710
aucgggacacgaagaaagc

SEQ ID NO: 2311712 - RNA, 19 nt, Artificial Sequence
  Description of Artificial Sequence: Synthetic oligonucleotide
  Sense strand starting at position 262 of SEQ ID NO: 1885043
gccucaacucaucaugaag

SEQ ID NO: 2311713 - RNA, 19 nt, Artificial Sequence
  Description of Artificial Sequence: Synthetic oligonucleotide
  Antisense strand to SEQ ID NO: 2311712
cuucaugaugaguugaggc

SEQ ID NO: 2311714 - RNA, 19 nt, Artificial Sequence
  Description of Artificial Sequence: Synthetic oligonucleotide
  Sense strand starting at position 276 of SEQ ID NO: 1885043
ugaagaguuuaaguauaca

SEQ ID NO: 2311715 - RNA, 19 nt, Artificial Sequence
  Description of Artificial Sequence: Synthetic oligonucleotide
  Antisense strand to SEQ ID NO: 2311714
uguauacuuaaacucuuca

SEQ ID NO: 2311716 - RNA, 19 nt, Artificial Sequence
  Description of Artificial Sequence: Synthetic oligonucleotide
  Sense strand starting at position 355 of SEQ ID NO: 1885043
gcccuacuaugccuaagaa

SEQ ID NO: 2311717 - RNA, 19 nt, Artificial Sequence
  Description of Artificial Sequence: Synthetic oligonucleotide
  Antisense strand to SEQ ID NO: 2311716
uucuuaggcauaguagggc

SEQ ID NO: 2311718 - RNA, 19 nt, Artificial Sequence
  Description of Artificial Sequence: Synthetic oligonucleotide
  Sense strand starting at position 412 of SEQ ID NO: 1885043
ggcccauugccucagagaa

SEQ ID NO: 2311719 - RNA, 19 nt, Artificial Sequence
  Description of Artificial Sequence: Synthetic oligonucleotide
  Antisense strand to SEQ ID NO: 2311718
uucucugaggcaaugggcc

SEQ ID NO: 2311720 - RNA, 19 nt, Artificial Sequence
  Description of Artificial Sequence: Synthetic oligonucleotide
  Sense strand starting at position 476 of SEQ ID NO: 1885043
gcaaacugugcuuauaaga

SEQ ID NO: 2311721 - RNA, 19 nt, Artificial Sequence
  Description of Artificial Sequence: Synthetic oligonucleotide
  Antisense strand to SEQ ID NO: 2311720
ucuuauaagcacaguuugc

SEQ ID NO: 2311722 - RNA, 19 nt, Artificial Sequence
  Description of Artificial Sequence: Synthetic oligonucleotide
  Sense strand starting at position 639 of SEQ ID NO: 1885043
accugacuuuacuuguaua

SEQ ID NO: 2311723 - RNA, 19 nt, Artificial Sequence
  Description of Artificial Sequence: Synthetic oligonucleotide
  Antisense strand to SEQ ID NO: 2311722
uauacaaguaaagucaggu

SEQ ID NO: 2311724 - RNA, 19 nt, Artificial Sequence
  Description of Artificial Sequence: Synthetic oligonucleotide
  Sense strand starting at position 930 of SEQ ID NO: 1885043
accuaaaggucaucuugua

SEQ ID NO: 2311725 - RNA, 19 nt, Artificial Sequence
  Description of Artificial Sequence: Synthetic oligonucleotide
  Antisense strand to SEQ ID NO: 2311724
uacaagaugaccuuuaggu

SEQ ID NO: 2311726 - RNA, 19 nt, Artificial Sequence
  Description of Artificial Sequence: Synthetic oligonucleotide
  Sense strand starting at position 967 of SEQ ID NO: 1885043
acaucuugacagcacgaua

SEQ ID NO: 2311727 - RNA, 19 nt, Artificial Sequence
  Description of Artificial Sequence: Synthetic oligonucleotide
  Antisense strand to SEQ ID NO: 2311726
uaucgugcugucaagaugu

SEQ ID NO: 2311728 - RNA, 19 nt, Artificial Sequence
  Description of Artificial Sequence: Synthetic oligonucleotide
  Sense strand starting at position 1059 of SEQ ID NO: 1885043
agaagaacgguuggguauu

SEQ ID NO: 2311729 - RNA, 19 nt, Artificial Sequence
  Description of Artificial Sequence: Synthetic oligonucleotide
  Antisense strand to SEQ ID NO: 2311728
aauacccaaccguucuucu

SEQ ID NO: 2311730 - RNA, 19 nt, Artificial Sequence
  Description of Artificial Sequence: Synthetic oligonucleotide
  Sense strand starting at position 1582 of SEQ ID NO: 1885043
ucacuuagugugcaaauaa

SEQ ID NO: 2311731 - RNA, 19 nt, Artificial Sequence
  Description of Artificial Sequence: Synthetic oligonucleotide
  Antisense strand to SEQ ID NO: 2311730
uuauuugcacacuaaguga

SEQ ID NO: 2311732 - RNA, 19 nt, Artificial Sequence
  Description of Artificial Sequence: Synthetic oligonucleotide
  Sense strand starting at position 2092 of SEQ ID NO: 1885043
aaaggaggcuuugcuuuaa

SEQ ID NO: 2311733 - RNA, 19 nt, Artificial Sequence
  Description of Artificial Sequence: Synthetic oligonucleotide
  Antisense strand to SEQ ID NO: 2311732
uuaaagcaaagccuccuuu

SEQ ID NO: 2311734 - RNA, 19 nt, Artificial Sequence
  Description of Artificial Sequence: Synthetic oligonucleotide
  Sense strand starting at position 2096 of SEQ ID NO: 1885043
gaggcuuugcuuuaagaag

SEQ ID NO: 2311735 - RNA, 19 nt, Artificial Sequence
  Description of Artificial Sequence: Synthetic oligonucleotide
  Antisense strand to SEQ ID NO: 2311734
cuucuuaaagcaaagccuc

SEQ ID NO: 2311736 - RNA, 19 nt, Artificial Sequence
  Description of Artificial Sequence: Synthetic oligonucleotide
  Sense strand starting at position 2196 of SEQ ID NO: 1885043
agaucuguuccucaguauu

SEQ ID NO: 2311737 - RNA, 19 nt, Artificial Sequence
  Description of Artificial Sequence: Synthetic oligonucleotide
  Antisense strand to SEQ ID NO: 2311736
aauacugaggaacagaucu

SEQ ID NO: 2311738 - RNA, 19 nt, Artificial Sequence
  Description of Artificial Sequence: Synthetic oligonucleotide
  Sense strand starting at position 2380 of SEQ ID NO: 1885043
acaacucauuguuugagau

SEQ ID NO: 2311739 - RNA, 19 nt, Artificial Sequence
  Description of Artificial Sequence: Synthetic oligonucleotide
  Antisense strand to SEQ ID NO: 2311738
aucucaaacaaugaguugu

SEQ ID NO: 2311740 - RNA, 19 nt, Artificial Sequence
  Description of Artificial Sequence: Synthetic oligonucleotide
  Sense strand starting at position 2440 of SEQ ID NO: 1885043
guaccaugugcccagaaua

SEQ ID NO: 2311741 - RNA, 19 nt, Artificial Sequence
  Description of Artificial Sequence: Synthetic oligonucleotide
  Antisense strand to SEQ ID NO: 2311740
uauucugggcacaugguac

SEQ ID NO: 2311742 - RNA, 19 nt, Artificial Sequence
  Description of Artificial Sequence: Synthetic oligonucleotide
  Sense strand starting at position 2560 of SEQ ID NO: 1885043
ggcauucuugauuauguuu

SEQ ID NO: 2311743 - RNA, 19 nt, Artificial Sequence
  Description of Artificial Sequence: Synthetic oligonucleotide
  Antisense strand to SEQ ID NO: 2311742
aaacauaaucaagaaugcc

SEQ ID NO: 2311744 - RNA, 19 nt, Artificial Sequence
  Description of Artificial Sequence: Synthetic oligonucleotide
  Sense strand starting at position 2662 of SEQ ID NO: 1885043
ggcugaucagaaggaauug

SEQ ID NO: 2311745 - RNA, 19 nt, Artificial Sequence
  Description of Artificial Sequence: Synthetic oligonucleotide
  Antisense strand to SEQ ID NO: 2311744
caauuccuucugaucagcc

SEQ ID NO: 2311746 - RNA, 19 nt, Artificial Sequence
  Description of Artificial Sequence: Synthetic oligonucleotide
  Sense strand starting at position 2673 of SEQ ID NO: 1885043
aggaauugucuagagcuca

SEQ ID NO: 2311747 - RNA, 19 nt, Artificial Sequence
  Description of Artificial Sequence: Synthetic oligonucleotide
  Antisense strand to SEQ ID NO: 2311746
ugagcucuagacaauuccu

SEQ ID NO: 2311748 - RNA, 19 nt, Artificial Sequence
  Description of Artificial Sequence: Synthetic oligonucleotide
  Sense strand starting at position 2688 of SEQ ID NO: 1885043
cucagcugucaugaccuau

SEQ ID NO: 2311749 - RNA, 19 nt, Artificial Sequence
  Description of Artificial Sequence: Synthetic oligonucleotide
  Antisense strand to SEQ ID NO: 2311748
auaggucaugacagcugag

SEQ ID NO: 2311750 - RNA, 19 nt, Artificial Sequence
  Description of Artificial Sequence: Synthetic oligonucleotide
  Sense strand starting at position 2736 of SEQ ID NO: 1885043
aaaggaauucugcaugguu

SEQ ID NO: 2311751 - RNA, 19 nt, Artificial Sequence
  Description of Artificial Sequence: Synthetic oligonucleotide
  Antisense strand to SEQ ID NO: 2311750
aaccaugcagaauuccuuu

SEQ ID NO: 2311752 - RNA, 19 nt, Artificial Sequence
  Description of Artificial Sequence: Synthetic oligonucleotide
  Sense strand starting at position 2738 of SEQ ID NO: 1885043
aggaauucugcaugguuua

SEQ ID NO: 2311753 - RNA, 19 nt, Artificial Sequence
  Description of Artificial Sequence: Synthetic oligonucleotide
  Antisense strand to SEQ ID NO: 2311752
uaaaccaugcagaauuccu

SEQ ID NO: 2311754 - RNA, 19 nt, Artificial Sequence
  Description of Artificial Sequence: Synthetic oligonucleotide
  Sense strand starting at position 2739 of SEQ ID NO: 1885043
ggaauucugcaugguuuag

SEQ ID NO: 2311755 - RNA, 19 nt, Artificial Sequence
  Description of Artificial Sequence: Synthetic oligonucleotide
  Antisense strand to SEQ ID NO: 2311754
cuaaaccaugcagaauucc

SEQ ID NO: 2311756 - RNA, 19 nt, Artificial Sequence
  Description of Artificial Sequence: Synthetic oligonucleotide
  Sense strand starting at position 2741 of SEQ ID NO: 1885043
aauucugcaugguuuagau

SEQ ID NO: 2311757 - RNA, 19 nt, Artificial Sequence
  Description of Artificial Sequence: Synthetic oligonucleotide
  Antisense strand to SEQ ID NO: 2311756
aucuaaaccaugcagaauu

SEQ ID NO: 2311758 - RNA, 19 nt, Artificial Sequence
  Description of Artificial Sequence: Synthetic oligonucleotide
  Sense strand starting at position 2743 of SEQ ID NO: 1885043
uucugcaugguuuagauaa

SEQ ID NO: 2311759 - RNA, 19 nt, Artificial Sequence
  Description of Artificial Sequence: Synthetic oligonucleotide
  Antisense strand to SEQ ID NO: 2311758
uuaucuaaaccaugcagaa

SEQ ID NO: 2311760 - RNA, 19 nt, Artificial Sequence
  Description of Artificial Sequence: Synthetic oligonucleotide
  Sense strand starting at position 2763 of SEQ ID NO: 1885043
auguuugauugauuaaccu

SEQ ID NO: 2311761 - RNA, 19 nt, Artificial Sequence
  Description of Artificial Sequence: Synthetic oligonucleotide
  Antisense strand to SEQ ID NO: 2311760
agguuaaucaaucaaacau

SEQ ID NO: 2311762 - RNA, 19 nt, Artificial Sequence
  Description of Artificial Sequence: Synthetic oligonucleotide
  Sense strand starting at position 2839 of SEQ ID NO: 1885043
aaagaaggcuggcucuaaa

SEQ ID NO: 2311763 - RNA, 19 nt, Artificial Sequence
  Description of Artificial Sequence: Synthetic oligonucleotide
  Antisense strand to SEQ ID NO: 2311762
uuuagagccagccuucuuu

SEQ ID NO: 2311764 - RNA, 19 nt, Artificial Sequence
  Description of Artificial Sequence: Synthetic oligonucleotide
  Sense strand starting at position 2922 of SEQ ID NO: 1885043
aguauccgguauuugugaa

SEQ ID NO: 2311765 - RNA, 19 nt, Artificial Sequence
  Description of Artificial Sequence: Synthetic oligonucleotide
  Antisense strand to SEQ ID NO: 2311764
uucacaaauaccggauacu

SEQ ID NO: 2311766 - RNA, 19 nt, Artificial Sequence
  Description of Artificial Sequence: Synthetic oligonucleotide
  Sense strand starting at position 2923 of SEQ ID NO: 1885043
guauccgguauuugugaaa

SEQ ID NO: 2311767 - RNA, 19 nt, Artificial Sequence
  Description of Artificial Sequence: Synthetic oligonucleotide
  Antisense strand to SEQ ID NO: 2311766
uuucacaaauaccggauac

SEQ ID NO: 2311768 - RNA, 19 nt, Artificial Sequence
  Description of Artificial Sequence: Synthetic oligonucleotide
  Sense strand starting at position 2994 of SEQ ID NO: 1885043
gaccuuaaaggguggguaa

SEQ ID NO: 2311769 - RNA, 19 nt, Artificial Sequence
  Description of Artificial Sequence: Synthetic oligonucleotide
  Antisense strand to SEQ ID NO: 2311768
uuacccacccuuuaagguc

SEQ ID NO: 2311770 - RNA, 19 nt, Artificial Sequence
  Description of Artificial Sequence: Synthetic oligonucleotide
  Sense strand starting at position 3007 of SEQ ID NO: 1885043
ggguaacauuuagaauaag

SEQ ID NO: 2311771 - RNA, 19 nt, Artificial Sequence
  Description of Artificial Sequence: Synthetic oligonucleotide
  Antisense strand to SEQ ID NO: 2311770
cuuauucuaaauguuaccc

SEQ ID NO: 2311772 - RNA, 19 nt, Artificial Sequence
  Description of Artificial Sequence: Synthetic oligonucleotide
  Sense strand starting at position 3049 of SEQ ID NO: 1885043
cgcugauacagaugaccua

SEQ ID NO: 2311773 - RNA, 19 nt, Artificial Sequence
  Description of Artificial Sequence: Synthetic oligonucleotide
  Antisense strand to SEQ ID NO: 2311772
uaggucaucuguaucagcg

SEQ ID NO: 2311774 - RNA, 19 nt, Artificial Sequence
  Description of Artificial Sequence: Synthetic oligonucleotide
  Sense strand starting at position 3105 of SEQ ID NO: 1885043
agaguuaggcauugagaau

SEQ ID NO: 2311775 - RNA, 19 nt, Artificial Sequence
  Description of Artificial Sequence: Synthetic oligonucleotide
  Antisense strand to SEQ ID NO: 2311774
auucucaaugccuaacucu

SEQ ID NO: 2311776 - RNA, 19 nt, Artificial Sequence
  Description of Artificial Sequence: Synthetic oligonucleotide
  Sense strand starting at position 3114 of SEQ ID NO: 1885043
cauugagaaugguuuggcu

SEQ ID NO: 2311777 - RNA, 19 nt, Artificial Sequence
  Description of Artificial Sequence: Synthetic oligonucleotide
  Antisense strand to SEQ ID NO: 2311776
agccaaaccauucucaaug

SEQ ID NO: 2311778 - RNA, 19 nt, Artificial Sequence
  Description of Artificial Sequence: Synthetic oligonucleotide
  Sense strand starting at position 3116 of SEQ ID NO: 1885043
uugagaaugguuuggcuag

SEQ ID NO: 2311779 - RNA, 19 nt, Artificial Sequence
  Description of Artificial Sequence: Synthetic oligonucleotide
  Antisense strand to SEQ ID NO: 2311778
cuagccaaaccauucucaa

SEQ ID NO: 2311780 - RNA, 19 nt, Artificial Sequence
  Description of Artificial Sequence: Synthetic oligonucleotide
  Sense strand starting at position 3118 of SEQ ID NO: 1885043
gagaaugguuuggcuagag

SEQ ID NO: 2311781 - RNA, 19 nt, Artificial Sequence
  Description of Artificial Sequence: Synthetic oligonucleotide
  Antisense strand to SEQ ID NO: 2311780
cucuagccaaaccauucuc

SEQ ID NO: 2311782 - RNA, 19 nt, Artificial Sequence
  Description of Artificial Sequence: Synthetic oligonucleotide
  Sense strand starting at position 3122 of SEQ ID NO: 1885043
augguuuggcuagagauga

SEQ ID NO: 2311783 - RNA, 19 nt, Artificial Sequence
  Description of Artificial Sequence: Synthetic oligonucleotide
  Antisense strand to SEQ ID NO: 2311782
ucaucucuagccaaaccau

SEQ ID NO: 2311784 - RNA, 19 nt, Artificial Sequence
  Description of Artificial Sequence: Synthetic oligonucleotide
  Sense strand starting at position 3126 of SEQ ID NO: 1885043
uuuggcuagagaugaguaa

SEQ ID NO: 2311785 - RNA, 19 nt, Artificial Sequence
  Description of Artificial Sequence: Synthetic oligonucleotide
  Antisense strand to SEQ ID NO: 2311784
uuacucaucucuagccaaa

SEQ ID NO: 2311786 - RNA, 19 nt, Artificial Sequence
  Description of Artificial Sequence: Synthetic oligonucleotide
  Sense strand starting at position 3272 of SEQ ID NO: 1885043
aaagaaaggugugauauuu

SEQ ID NO: 2311787 - RNA, 19 nt, Artificial Sequence
  Description of Artificial Sequence: Synthetic oligonucleotide
  Antisense strand to SEQ ID NO: 2311786
aaauaucacaccuuucuuu

SEQ ID NO: 2311788 - RNA, 19 nt, Artificial Sequence
  Description of Artificial Sequence: Synthetic oligonucleotide
  Sense strand starting at position 3456 of SEQ ID NO: 1885043
augcaagaaucucuguaaa

SEQ ID NO: 2311789 - RNA, 19 nt, Artificial Sequence
  Description of Artificial Sequence: Synthetic oligonucleotide
  Antisense strand to SEQ ID NO: 2311788
uuuacagagauucuugcau

SEQ ID NO: 2311790 - RNA, 19 nt, Artificial Sequence
  Description of Artificial Sequence: Synthetic oligonucleotide
  Sense strand starting at position 3458 of SEQ ID NO: 1885043
gcaagaaucucuguaaaga

SEQ ID NO: 2311791 - RNA, 19 nt, Artificial Sequence
  Description of Artificial Sequence: Synthetic oligonucleotide
  Antisense strand to SEQ ID NO: 2311790
ucuuuacagagauucuugc

SEQ ID NO: 2311792 - RNA, 19 nt, Artificial Sequence
  Description of Artificial Sequence: Synthetic oligonucleotide
  Sense strand starting at position 67 of SEQ ID NO: 1885045
gggccagguaucugagaug

SEQ ID NO: 2311793 - RNA, 19 nt, Artificial Sequence
  Description of Artificial Sequence: Synthetic oligonucleotide
  Antisense strand to SEQ ID NO: 2311792
caucucagauaccuggccc

SEQ ID NO: 2311794 - RNA, 19 nt, Artificial Sequence
  Description of Artificial Sequence: Synthetic oligonucleotide
  Sense strand starting at position 72 of SEQ ID NO: 1885045
agguaucugagaugagagu

SEQ ID NO: 2311795 - RNA, 19 nt, Artificial Sequence
  Description of Artificial Sequence: Synthetic oligonucleotide
  Antisense strand to SEQ ID NO: 2311794
acucucaucucagauaccu

SEQ ID NO: 2311796 - RNA, 19 nt, Artificial Sequence
  Description of Artificial Sequence: Synthetic oligonucleotide
  Sense strand starting at position 109 of SEQ ID NO: 1885045
aguuguacucuacaaauag

SEQ ID NO: 2311797 - RNA, 19 nt, Artificial Sequence
  Description of Artificial Sequence: Synthetic oligonucleotide
  Antisense strand to SEQ ID NO: 2311796
cuauuuguagaguacaacu

SEQ ID NO: 2311798 - RNA, 19 nt, Artificial Sequence
  Description of Artificial Sequence: Synthetic oligonucleotide
  Sense strand starting at position 233 of SEQ ID NO: 1885045
augagauucugucucuaac

SEQ ID NO: 2311799 - RNA, 19 nt, Artificial Sequence
  Description of Artificial Sequence: Synthetic oligonucleotide
  Antisense strand to SEQ ID NO: 2311798
guuagagacagaaucucau

SEQ ID NO: 2311800 - RNA, 19 nt, Artificial Sequence
  Description of Artificial Sequence: Synthetic oligonucleotide
  Sense strand starting at position 236 of SEQ ID NO: 1885045
agauucugucucuaacgga

SEQ ID NO: 2311801 - RNA, 19 nt, Artificial Sequence
  Description of Artificial Sequence: Synthetic oligonucleotide
  Antisense strand to SEQ ID NO: 2311800
uccguuagagacagaaucu

SEQ ID NO: 2311802 - RNA, 19 nt, Artificial Sequence
  Description of Artificial Sequence: Synthetic oligonucleotide
  Sense strand starting at position 510 of SEQ ID NO: 1885045
ugaggaucuuacccacagu

SEQ ID NO: 2311803 - RNA, 19 nt, Artificial Sequence
  Description of Artificial Sequence: Synthetic oligonucleotide
  Antisense strand to SEQ ID NO: 2311802
acuguggguaagauccuca

SEQ ID NO: 2311804 - RNA, 19 nt, Artificial Sequence
  Description of Artificial Sequence: Synthetic oligonucleotide
  Sense strand starting at position 643 of SEQ ID NO: 1885045
uuacccucucugggagaua

SEQ ID NO: 2311805 - RNA, 19 nt, Artificial Sequence
  Description of Artificial Sequence: Synthetic oligonucleotide
  Antisense strand to SEQ ID NO: 2311804
uaucucccagagaggguaa

SEQ ID NO: 2311806 - RNA, 19 nt, Artificial Sequence
  Description of Artificial Sequence: Synthetic oligonucleotide
  Sense strand starting at position 654 of SEQ ID NO: 1885045
gggagauacauguaugcug

SEQ ID NO: 2311807 - RNA, 19 nt, Artificial Sequence
  Description of Artificial Sequence: Synthetic oligonucleotide
  Antisense strand to SEQ ID NO: 2311806
cagcauacauguaucuccc

SEQ ID NO: 2311808 - RNA, 19 nt, Artificial Sequence
  Description of Artificial Sequence: Synthetic oligonucleotide
  Sense strand starting at position 715 of SEQ ID NO: 1885045
ggaaauacuuuagccacaa

SEQ ID NO: 2311809 - RNA, 19 nt, Artificial Sequence
  Description of Artificial Sequence: Synthetic oligonucleotide
  Antisense strand to SEQ ID NO: 2311808
uuguggcuaaaguauuucc

SEQ ID NO: 2311810 - RNA, 19 nt, Artificial Sequence
  Description of Artificial Sequence: Synthetic oligonucleotide
  Sense strand starting at position 719 of SEQ ID NO: 1885045
auacuuuagccacaaggua

SEQ ID NO: 2311811 - RNA, 19 nt, Artificial Sequence
  Description of Artificial Sequence: Synthetic oligonucleotide
  Antisense strand to SEQ ID NO: 2311810
uaccuuguggcuaaaguau

SEQ ID NO: 2311812 - RNA, 19 nt, Artificial Sequence
  Description of Artificial Sequence: Synthetic oligonucleotide
  Sense strand starting at position 739 of SEQ ID NO: 1885045
ccuuccuaggccugagaaa

SEQ ID NO: 2311813 - RNA, 19 nt, Artificial Sequence
  Description of Artificial Sequence: Synthetic oligonucleotide
  Antisense strand to SEQ ID NO: 2311812
uuucucaggccuaggaagg

SEQ ID NO: 2311814 - RNA, 19 nt, Artificial Sequence
  Description of Artificial Sequence: Synthetic oligonucleotide
  Sense strand starting at position 1472 of SEQ ID NO: 1885045
cugugaucuuaccugacaa

SEQ ID NO: 2311815 - RNA, 19 nt, Artificial Sequence
  Description of Artificial Sequence: Synthetic oligonucleotide
  Antisense strand to SEQ ID NO: 2311814
uugucagguaagaucacag

SEQ ID NO: 2311816 - RNA, 19 nt, Artificial Sequence
  Description of Artificial Sequence: Synthetic oligonucleotide
  Sense strand starting at position 1615 of SEQ ID NO: 1885045
gccuauuugugucugggua

SEQ ID NO: 2311817 - RNA, 19 nt, Artificial Sequence
  Description of Artificial Sequence: Synthetic oligonucleotide
  Antisense strand to SEQ ID NO: 2311816
uacccagacacaaauaggc

SEQ ID NO: 2311818 - RNA, 19 nt, Artificial Sequence
  Description of Artificial Sequence: Synthetic oligonucleotide
  Sense strand starting at position 1616 of SEQ ID NO: 1885045
ccuauuugugucuggguaa

SEQ ID NO: 2311819 - RNA, 19 nt, Artificial Sequence
  Description of Artificial Sequence: Synthetic oligonucleotide
  Antisense strand to SEQ ID NO: 2311818
uuacccagacacaaauagg

SEQ ID NO: 2311820 - RNA, 19 nt, Artificial Sequence
  Description of Artificial Sequence: Synthetic oligonucleotide
  Sense strand starting at position 2011 of SEQ ID NO: 1885045
cuaacauaacugugugacu

SEQ ID NO: 2311821 - RNA, 19 nt, Artificial Sequence
  Description of Artificial Sequence: Synthetic oligonucleotide
  Antisense strand to SEQ ID NO: 2311820
agucacacaguuauguuag

SEQ ID NO: 2311822 - RNA, 19 nt, Artificial Sequence
  Description of Artificial Sequence: Synthetic oligonucleotide
  Sense strand starting at position 2020 of SEQ ID NO: 1885045
cugugugacucccuagaaa

SEQ ID NO: 2311823 - RNA, 19 nt, Artificial Sequence
  Description of Artificial Sequence: Synthetic oligonucleotide
  Antisense strand to SEQ ID NO: 2311822
uuucuagggagucacacag

SEQ ID NO: 2311824 - RNA, 19 nt, Artificial Sequence
  Description of Artificial Sequence: Synthetic oligonucleotide
  Sense strand starting at position 2023 of SEQ ID NO: 1885045
ugugacucccuagaaaguu

SEQ ID NO: 2311825 - RNA, 19 nt, Artificial Sequence
  Description of Artificial Sequence: Synthetic oligonucleotide
  Antisense strand to SEQ ID NO: 2311824
aacuuucuagggagucaca

SEQ ID NO: 2311826 - RNA, 19 nt, Artificial Sequence
  Description of Artificial Sequence: Synthetic oligonucleotide
  Sense strand starting at position 2031 of SEQ ID NO: 1885045
ccuagaaaguuccuugaca

SEQ ID NO: 2311827 - RNA, 19 nt, Artificial Sequence
  Description of Artificial Sequence: Synthetic oligonucleotide
  Antisense strand to SEQ ID NO: 2311826
ugucaaggaacuuucuagg

SEQ ID NO: 2311828 - RNA, 19 nt, Artificial Sequence
  Description of Artificial Sequence: Synthetic oligonucleotide
  Sense strand starting at position 2032 of SEQ ID NO: 1885045
cuagaaaguuccuugacau

SEQ ID NO: 2311829 - RNA, 19 nt, Artificial Sequence
  Description of Artificial Sequence: Synthetic oligonucleotide
  Antisense strand to SEQ ID NO: 2311828
augucaaggaacuuucuag

SEQ ID NO: 2311830 - RNA, 19 nt, Artificial Sequence
  Description of Artificial Sequence: Synthetic oligonucleotide
  Sense strand starting at position 2042 of SEQ ID NO: 1885045
ccuugacauccuuaagagu

SEQ ID NO: 2311831 - RNA, 19 nt, Artificial Sequence
  Description of Artificial Sequence: Synthetic oligonucleotide
  Antisense strand to SEQ ID NO: 2311830
acucuuaaggaugucaagg

SEQ ID NO: 2311832 - RNA, 19 nt, Artificial Sequence
  Description of Artificial Sequence: Synthetic oligonucleotide
  Sense strand starting at position 2291 of SEQ ID NO: 1885045
cccuaauggccugacauua

SEQ ID NO: 2311833 - RNA, 19 nt, Artificial Sequence
  Description of Artificial Sequence: Synthetic oligonucleotide
  Antisense strand to SEQ ID NO: 2311832
uaaugucaggccauuaggg

SEQ ID NO: 2311834 - RNA, 19 nt, Artificial Sequence
  Description of Artificial Sequence: Synthetic oligonucleotide
  Sense strand starting at position 2309 of SEQ ID NO: 1885045
acuggauuguguccaaauu

SEQ ID NO: 2311835 - RNA, 19 nt, Artificial Sequence
  Description of Artificial Sequence: Synthetic oligonucleotide
  Antisense strand to SEQ ID NO: 2311834
aauuuggacacaauccagu

SEQ ID NO: 2311836 - RNA, 19 nt, Artificial Sequence
  Description of Artificial Sequence: Synthetic oligonucleotide
  Sense strand starting at position 2310 of SEQ ID NO: 1885045
cuggauuguguccaaauua

SEQ ID NO: 2311837 - RNA, 19 nt, Artificial Sequence
  Description of Artificial Sequence: Synthetic oligonucleotide
  Antisense strand to SEQ ID NO: 2311836
uaauuuggacacaauccag

SEQ ID NO: 2311838 - RNA, 19 nt, Artificial Sequence
  Description of Artificial Sequence: Synthetic oligonucleotide
  Sense strand starting at position 2531 of SEQ ID NO: 1885045
aucuauaagucccugggaa

SEQ ID NO: 2311839 - RNA, 19 nt, Artificial Sequence
  Description of Artificial Sequence: Synthetic oligonucleotide
  Antisense strand to SEQ ID NO: 2311838
uucccagggacuuauagau

SEQ ID NO: 2311840 - RNA, 19 nt, Artificial Sequence
  Description of Artificial Sequence: Synthetic oligonucleotide
  Sense strand starting at position 2532 of SEQ ID NO: 1885045
ucuauaagucccugggaaa

SEQ ID NO: 2311841 - RNA, 19 nt, Artificial Sequence
  Description of Artificial Sequence: Synthetic oligonucleotide
  Antisense strand to SEQ ID NO: 2311840
uuucccagggacuuauaga

SEQ ID NO: 2311842 - RNA, 19 nt, Artificial Sequence
  Description of Artificial Sequence: Synthetic oligonucleotide
  Sense strand starting at position 2533 of SEQ ID NO: 1885045
cuauaagucccugggaaau

SEQ ID NO: 2311843 - RNA, 19 nt, Artificial Sequence
  Description of Artificial Sequence: Synthetic oligonucleotide
  Antisense strand to SEQ ID NO: 2311842
auuucccagggacuuauag

SEQ ID NO: 2311844 - RNA, 19 nt, Artificial Sequence
  Description of Artificial Sequence: Synthetic oligonucleotide
  Sense strand starting at position 2555 of SEQ ID NO: 1885045
ggcuuucuaucccugagag

SEQ ID NO: 2311845 - RNA, 19 nt, Artificial Sequence
  Description of Artificial Sequence: Synthetic oligonucleotide
  Antisense strand to SEQ ID NO: 2311844
cucucagggauagaaagcc

SEQ ID NO: 2311846 - RNA, 19 nt, Artificial Sequence
  Description of Artificial Sequence: Synthetic oligonucleotide
  Sense strand starting at position 2556 of SEQ ID NO: 1885045
gcuuucuaucccugagaga

SEQ ID NO: 2311847 - RNA, 19 nt, Artificial Sequence
  Description of Artificial Sequence: Synthetic oligonucleotide
  Antisense strand to SEQ ID NO: 2311846
ucucucagggauagaaagc

SEQ ID NO: 2311848 - RNA, 19 nt, Artificial Sequence
  Description of Artificial Sequence: Synthetic oligonucleotide
  Sense strand starting at position 2594 of SEQ ID NO: 1885045
agguaaguauacuuagguu

SEQ ID NO: 2311849 - RNA, 19 nt, Artificial Sequence
  Description of Artificial Sequence: Synthetic oligonucleotide
  Antisense strand to SEQ ID NO: 2311848
aaccuaaguauacuuaccu

SEQ ID NO: 2311850 - RNA, 19 nt, Artificial Sequence
  Description of Artificial Sequence: Synthetic oligonucleotide
  Sense strand starting at position 2636 of SEQ ID NO: 1885045
cagccaugacuuugggaua

SEQ ID NO: 2311851 - RNA, 19 nt, Artificial Sequence
  Description of Artificial Sequence: Synthetic oligonucleotide
  Antisense strand to SEQ ID NO: 2311850
uaucccaaagucauggcug

SEQ ID NO: 2311852 - RNA, 19 nt, Artificial Sequence
  Description of Artificial Sequence: Synthetic oligonucleotide
  Sense strand starting at position 2660 of SEQ ID NO: 1885045
ggagaauucuggcucauuc

SEQ ID NO: 2311853 - RNA, 19 nt, Artificial Sequence
  Description of Artificial Sequence: Synthetic oligonucleotide
  Antisense strand to SEQ ID NO: 2311852
gaaugagccagaauucucc

SEQ ID NO: 2311854 - RNA, 19 nt, Artificial Sequence
  Description of Artificial Sequence: Synthetic oligonucleotide
  Sense strand starting at position 3122 of SEQ ID NO: 1885045
agaguaagaucugcuuaug

SEQ ID NO: 2311855 - RNA, 19 nt, Artificial Sequence
  Description of Artificial Sequence: Synthetic oligonucleotide
  Antisense strand to SEQ ID NO: 2311854
cauaagcagaucuuacucu

SEQ ID NO: 2311856 - RNA, 19 nt, Artificial Sequence
  Description of Artificial Sequence: Synthetic oligonucleotide
  Sense strand starting at position 3383 of SEQ ID NO: 1885045
cagggaguucucuggaaca

SEQ ID NO: 2311857 - RNA, 19 nt, Artificial Sequence
  Description of Artificial Sequence: Synthetic oligonucleotide
  Antisense strand to SEQ ID NO: 2311856
uguuccagagaacucccug

SEQ ID NO: 2311858 - RNA, 19 nt, Artificial Sequence
  Description of Artificial Sequence: Synthetic oligonucleotide
  Sense strand starting at position 3508 of SEQ ID NO: 1885045
gcccguuaggcuucucuau

SEQ ID NO: 2311859 - RNA, 19 nt, Artificial Sequence
  Description of Artificial Sequence: Synthetic oligonucleotide
  Antisense strand to SEQ ID NO: 2311858
auagagaagccuaacgggc

SEQ ID NO: 2311860 - RNA, 19 nt, Artificial Sequence
  Description of Artificial Sequence: Synthetic oligonucleotide
  Sense strand starting at position 3603 of SEQ ID NO: 1885045
cuggaugcucgugagacua

SEQ ID NO: 2311861 - RNA, 19 nt, Artificial Sequence
  Description of Artificial Sequence: Synthetic oligonucleotide
  Antisense strand to SEQ ID NO: 2311860
uagucucacgagcauccag

SEQ ID NO: 2311862 - RNA, 19 nt, Artificial Sequence
  Description of Artificial Sequence: Synthetic oligonucleotide
  Sense strand starting at position 3613 of SEQ ID NO: 1885045
gugagacuaucauauuuaa

SEQ ID NO: 2311863 - RNA, 19 nt, Artificial Sequence
  Description of Artificial Sequence: Synthetic oligonucleotide
  Antisense strand to SEQ ID NO: 2311862
uuaaauaugauagucucac

SEQ ID NO: 2311864 - RNA, 19 nt, Artificial Sequence
  Description of Artificial Sequence: Synthetic oligonucleotide
  Sense strand starting at position 3699 of SEQ ID NO: 1885045
cugggauguggauauccuu

SEQ ID NO: 2311865 - RNA, 19 nt, Artificial Sequence
  Description of Artificial Sequence: Synthetic oligonucleotide
  Antisense strand to SEQ ID NO: 2311864
aaggauauccacaucccag

SEQ ID NO: 2311866 - RNA, 19 nt, Artificial Sequence
  Description of Artificial Sequence: Synthetic oligonucleotide
  Sense strand starting at position 3707 of SEQ ID NO: 1885045
uggauauccuuccuaauag

SEQ ID NO: 2311867 - RNA, 19 nt, Artificial Sequence
  Description of Artificial Sequence: Synthetic oligonucleotide
  Antisense strand to SEQ ID NO: 2311866
cuauuaggaaggauaucca

SEQ ID NO: 2311868 - RNA, 19 nt, Artificial Sequence
  Description of Artificial Sequence: Synthetic oligonucleotide
  Sense strand starting at position 3789 of SEQ ID NO: 1885045
gauaacagauggucuugau

SEQ ID NO: 2311869 - RNA, 19 nt, Artificial Sequence
  Description of Artificial Sequence: Synthetic oligonucleotide
  Antisense strand to SEQ ID NO: 2311868
aucaagaccaucuguuauc

SEQ ID NO: 2311870 - RNA, 19 nt, Artificial Sequence
  Description of Artificial Sequence: Synthetic oligonucleotide
  Sense strand starting at position 3980 of SEQ ID NO: 1885045
ucagaaaguuaugcaaacu

SEQ ID NO: 2311871 - RNA, 19 nt, Artificial Sequence
  Description of Artificial Sequence: Synthetic oligonucleotide
  Antisense strand to SEQ ID NO: 2311870
aguuugcauaacuuucuga

SEQ ID NO: 2311872 - RNA, 19 nt, Artificial Sequence
  Description of Artificial Sequence: Synthetic oligonucleotide
  Sense strand starting at position 221 of SEQ ID NO: 1885046
uggagugcugccuguggaa

SEQ ID NO: 2311873 - RNA, 19 nt, Artificial Sequence
  Description of Artificial Sequence: Synthetic oligonucleotide
  Antisense strand to SEQ ID NO: 2311872
uuccacaggcagcacucca

SEQ ID NO: 2311874 - RNA, 19 nt, Artificial Sequence
  Description of Artificial Sequence: Synthetic oligonucleotide
  Sense strand starting at position 622 of SEQ ID NO: 1885046
cauguuaccugggagaaag

SEQ ID NO: 2311875 - RNA, 19 nt, Artificial Sequence
  Description of Artificial Sequence: Synthetic oligonucleotide
  Antisense strand to SEQ ID NO: 2311874
cuuucucccagguaacaug

SEQ ID NO: 2311876 - RNA, 19 nt, Artificial Sequence
  Description of Artificial Sequence: Synthetic oligonucleotide
  Sense strand starting at position 720 of SEQ ID NO: 1885046
ccucgaucucaaggugauc

SEQ ID NO: 2311877 - RNA, 19 nt, Artificial Sequence
  Description of Artificial Sequence: Synthetic oligonucleotide
  Antisense strand to SEQ ID NO: 2311876
gaucaccuugagaucgagg

SEQ ID NO: 2311878 - RNA, 19 nt, Artificial Sequence
  Description of Artificial Sequence: Synthetic oligonucleotide
  Sense strand starting at position 809 of SEQ ID NO: 1885046
ccaggauucuucuuguuga

SEQ ID NO: 2311879 - RNA, 19 nt, Artificial Sequence
  Description of Artificial Sequence: Synthetic oligonucleotide
  Antisense strand to SEQ ID NO: 2311878
ucaacaagaagaauccugg

SEQ ID NO: 2311880 - RNA, 19 nt, Artificial Sequence
  Description of Artificial Sequence: Synthetic oligonucleotide
  Sense strand starting at position 812 of SEQ ID NO: 1885046
ggauucuucuuguugacag

SEQ ID NO: 2311881 - RNA, 19 nt, Artificial Sequence
  Description of Artificial Sequence: Synthetic oligonucleotide
  Antisense strand to SEQ ID NO: 2311880
cugucaacaagaagaaucc

SEQ ID NO: 2311882 - RNA, 19 nt, Artificial Sequence
  Description of Artificial Sequence: Synthetic oligonucleotide
  Sense strand starting at position 1368 of SEQ ID NO: 1885046
agcugauauaucuggugga

SEQ ID NO: 2311883 - RNA, 19 nt, Artificial Sequence
  Description of Artificial Sequence: Synthetic oligonucleotide
  Antisense strand to SEQ ID NO: 2311882
uccaccagauauaucagcu

SEQ ID NO: 2311884 - RNA, 19 nt, Artificial Sequence
  Description of Artificial Sequence: Synthetic oligonucleotide
  Sense strand starting at position 1387 of SEQ ID NO: 1885046
gggcgugucaaggagaaca

SEQ ID NO: 2311885 - RNA, 19 nt, Artificial Sequence
  Description of Artificial Sequence: Synthetic oligonucleotide
  Antisense strand to SEQ ID NO: 2311884
uguucuccuugacacgccc

SEQ ID NO: 2311886 - RNA, 19 nt, Artificial Sequence
  Description of Artificial Sequence: Synthetic oligonucleotide
  Sense strand starting at position 1389 of SEQ ID NO: 1885046
gcgugucaaggagaacaua

SEQ ID NO: 2311887 - RNA, 19 nt, Artificial Sequence
  Description of Artificial Sequence: Synthetic oligonucleotide
  Antisense strand to SEQ ID NO: 2311886
uauguucuccuugacacgc

SEQ ID NO: 2311888 - RNA, 19 nt, Artificial Sequence
  Description of Artificial Sequence: Synthetic oligonucleotide
  Sense strand starting at position 1615 of SEQ ID NO: 1885046
ucagguucucuuuaugacu

SEQ ID NO: 2311889 - RNA, 19 nt, Artificial Sequence
  Description of Artificial Sequence: Synthetic oligonucleotide
  Antisense strand to SEQ ID NO: 2311888
agucauaaagagaaccuga

SEQ ID NO: 2311890 - RNA, 19 nt, Artificial Sequence
  Description of Artificial Sequence: Synthetic oligonucleotide
  Sense strand starting at position 1630 of SEQ ID NO: 1885046
gacugaucuccucgucuau

SEQ ID NO: 2311891 - RNA, 19 nt, Artificial Sequence
  Description of Artificial Sequence: Synthetic oligonucleotide
  Antisense strand to SEQ ID NO: 2311890
auagacgaggagaucaguc

SEQ ID NO: 2311892 - RNA, 19 nt, Artificial Sequence
  Description of Artificial Sequence: Synthetic oligonucleotide
  Sense strand starting at position 1632 of SEQ ID NO: 1885046
cugaucuccucgucuauuu

SEQ ID NO: 2311893 - RNA, 19 nt, Artificial Sequence
  Description of Artificial Sequence: Synthetic oligonucleotide
  Antisense strand to SEQ ID NO: 2311892
aaauagacgaggagaucag

SEQ ID NO: 2311894 - RNA, 19 nt, Artificial Sequence
  Description of Artificial Sequence: Synthetic oligonucleotide
  Sense strand starting at position 1644 of SEQ ID NO: 1885046
ucuauuuauucccaggucu

SEQ ID NO: 2311895 - RNA, 19 nt, Artificial Sequence
  Description of Artificial Sequence: Synthetic oligonucleotide
  Antisense strand to SEQ ID NO: 2311894
agaccugggaauaaauaga

SEQ ID NO: 2311896 - RNA, 19 nt, Artificial Sequence
  Description of Artificial Sequence: Synthetic oligonucleotide
  Sense strand starting at position 1682 of SEQ ID NO: 1885046
gcaugaaagcuccaugaga

SEQ ID NO: 2311897 - RNA, 19 nt, Artificial Sequence
  Description of Artificial Sequence: Synthetic oligonucleotide
  Antisense strand to SEQ ID NO: 2311896
ucucauggagcuuucaugc

SEQ ID NO: 2311898 - RNA, 19 nt, Artificial Sequence
  Description of Artificial Sequence: Synthetic oligonucleotide
  Sense strand starting at position 1747 of SEQ ID NO: 1885046
uggcacacucagugaaagu

SEQ ID NO: 2311899 - RNA, 19 nt, Artificial Sequence
  Description of Artificial Sequence: Synthetic oligonucleotide
  Antisense strand to SEQ ID NO: 2311898
acuuucacugagugugcca

SEQ ID NO: 2311900 - RNA, 19 nt, Artificial Sequence
  Description of Artificial Sequence: Synthetic oligonucleotide
  Sense strand starting at position 1760 of SEQ ID NO: 1885046
gaaagugugcugcaugaau

SEQ ID NO: 2311901 - RNA, 19 nt, Artificial Sequence
  Description of Artificial Sequence: Synthetic oligonucleotide
  Antisense strand to SEQ ID NO: 2311900
auucaugcagcacacuuuc

SEQ ID NO: 2311902 - RNA, 19 nt, Artificial Sequence
  Description of Artificial Sequence: Synthetic oligonucleotide
  Sense strand starting at position 1762 of SEQ ID NO: 1885046
aagugugcugcaugaauaa

SEQ ID NO: 2311903 - RNA, 19 nt, Artificial Sequence
  Description of Artificial Sequence: Synthetic oligonucleotide
  Antisense strand to SEQ ID NO: 2311902
uuauucaugcagcacacuu

SEQ ID NO: 2311904 - RNA, 19 nt, Artificial Sequence
  Description of Artificial Sequence: Synthetic oligonucleotide
  Sense strand starting at position 2021 of SEQ ID NO: 1885046
augauucucuaagucuaga

SEQ ID NO: 2311905 - RNA, 19 nt, Artificial Sequence
  Description of Artificial Sequence: Synthetic oligonucleotide
  Antisense strand to SEQ ID NO: 2311904
ucuagacuuagagaaucau

SEQ ID NO: 2311906 - RNA, 19 nt, Artificial Sequence
  Description of Artificial Sequence: Synthetic oligonucleotide
  Sense strand starting at position 2110 of SEQ ID NO: 1885046
aggcaauuguucccugaac

SEQ ID NO: 2311907 - RNA, 19 nt, Artificial Sequence
  Description of Artificial Sequence: Synthetic oligonucleotide
  Antisense strand to SEQ ID NO: 2311906
guucagggaacaauugccu

SEQ ID NO: 2311908 - RNA, 19 nt, Artificial Sequence
  Description of Artificial Sequence: Synthetic oligonucleotide
  Sense strand starting at position 2111 of SEQ ID NO: 1885046
ggcaauuguucccugaacu

SEQ ID NO: 2311909 - RNA, 19 nt, Artificial Sequence
  Description of Artificial Sequence: Synthetic oligonucleotide
  Antisense strand to SEQ ID NO: 2311908
aguucagggaacaauugcc

SEQ ID NO: 2311910 - RNA, 19 nt, Artificial Sequence
  Description of Artificial Sequence: Synthetic oligonucleotide
  Sense strand starting at position 2112 of SEQ ID NO: 1885046
gcaauuguucccugaacuu

SEQ ID NO: 2311911 - RNA, 19 nt, Artificial Sequence
  Description of Artificial Sequence: Synthetic oligonucleotide
  Antisense strand to SEQ ID NO: 2311910
aaguucagggaacaauugc

SEQ ID NO: 2311912 - RNA, 19 nt, Artificial Sequence
  Description of Artificial Sequence: Synthetic oligonucleotide
  Sense strand starting at position 2163 of SEQ ID NO: 1885046
accaucuuauggguugaau

SEQ ID NO: 2311913 - RNA, 19 nt, Artificial Sequence
  Description of Artificial Sequence: Synthetic oligonucleotide
  Antisense strand to SEQ ID NO: 2311912
auucaacccauaagauggu

SEQ ID NO: 2311914 - RNA, 19 nt, Artificial Sequence
  Description of Artificial Sequence: Synthetic oligonucleotide
  Sense strand starting at position 2165 of SEQ ID NO: 1885046
caucuuauggguugaauua

SEQ ID NO: 2311915 - RNA, 19 nt, Artificial Sequence
  Description of Artificial Sequence: Synthetic oligonucleotide
  Antisense strand to SEQ ID NO: 2311914
uaauucaacccauaagaug

SEQ ID NO: 2311916 - RNA, 19 nt, Artificial Sequence
  Description of Artificial Sequence: Synthetic oligonucleotide
  Sense strand starting at position 2234 of SEQ ID NO: 1885046
ggccguugcagacauaauu

SEQ ID NO: 2311917 - RNA, 19 nt, Artificial Sequence
  Description of Artificial Sequence: Synthetic oligonucleotide
  Antisense strand to SEQ ID NO: 2311916
aauuaugucugcaacggcc

SEQ ID NO: 2311918 - RNA, 19 nt, Artificial Sequence
  Description of Artificial Sequence: Synthetic oligonucleotide
  Sense strand starting at position 2377 of SEQ ID NO: 1885046
cagcgauuacagugaugug

SEQ ID NO: 2311919 - RNA, 19 nt, Artificial Sequence
  Description of Artificial Sequence: Synthetic oligonucleotide
  Antisense strand to SEQ ID NO: 2311918
cacaucacuguaaucgcug

SEQ ID NO: 2311920 - RNA, 19 nt, Artificial Sequence
  Description of Artificial Sequence: Synthetic oligonucleotide
  Sense strand starting at position 2378 of SEQ ID NO: 1885046
agcgauuacagugaugugu

SEQ ID NO: 2311921 - RNA, 19 nt, Artificial Sequence
  Description of Artificial Sequence: Synthetic oligonucleotide
  Antisense strand to SEQ ID NO: 2311920
acacaucacuguaaucgcu

SEQ ID NO: 2311922 - RNA, 19 nt, Artificial Sequence
  Description of Artificial Sequence: Synthetic oligonucleotide
  Sense strand starting at position 2386 of SEQ ID NO: 1885046
cagugaugugucugcaaac

SEQ ID NO: 2311923 - RNA, 19 nt, Artificial Sequence
  Description of Artificial Sequence: Synthetic oligonucleotide
  Antisense strand to SEQ ID NO: 2311922
guuugcagacacaucacug

SEQ ID NO: 2311924 - RNA, 19 nt, Artificial Sequence
  Description of Artificial Sequence: Synthetic oligonucleotide
  Sense strand starting at position 2538 of SEQ ID NO: 1885046
agaguacauuuccacuguu

SEQ ID NO: 2311925 - RNA, 19 nt, Artificial Sequence
  Description of Artificial Sequence: Synthetic oligonucleotide
  Antisense strand to SEQ ID NO: 2311924
aacaguggaaauguacucu

SEQ ID NO: 2311926 - RNA, 19 nt, Artificial Sequence
  Description of Artificial Sequence: Synthetic oligonucleotide
  Sense strand starting at position 3152 of SEQ ID NO: 1885046
ugcccuuguuucccugaca

SEQ ID NO: 2311927 - RNA, 19 nt, Artificial Sequence
  Description of Artificial Sequence: Synthetic oligonucleotide
  Antisense strand to SEQ ID NO: 2311926
ugucagggaaacaagggca

SEQ ID NO: 2311928 - RNA, 19 nt, Artificial Sequence
  Description of Artificial Sequence: Synthetic oligonucleotide
  Sense strand starting at position 3155 of SEQ ID NO: 1885046
ccuuguuucccugacagac

SEQ ID NO: 2311929 - RNA, 19 nt, Artificial Sequence
  Description of Artificial Sequence: Synthetic oligonucleotide
  Antisense strand to SEQ ID NO: 2311928
gucugucagggaaacaagg

SEQ ID NO: 2311930 - RNA, 19 nt, Artificial Sequence
  Description of Artificial Sequence: Synthetic oligonucleotide
  Sense strand starting at position 3496 of SEQ ID NO: 1885046
ccaugauagccucggcacu

SEQ ID NO: 2311931 - RNA, 19 nt, Artificial Sequence
  Description of Artificial Sequence: Synthetic oligonucleotide
  Antisense strand to SEQ ID NO: 2311930
agugccgaggcuaucaugg

SEQ ID NO: 2311932 - RNA, 19 nt, Artificial Sequence
  Description of Artificial Sequence: Synthetic oligonucleotide
  Sense strand starting at position 3508 of SEQ ID NO: 1885046
cggcacuuuccuuauccau

SEQ ID NO: 2311933 - RNA, 19 nt, Artificial Sequence
  Description of Artificial Sequence: Synthetic oligonucleotide
  Antisense strand to SEQ ID NO: 2311932
auggauaaggaaagugccg

SEQ ID NO: 2311934 - RNA, 19 nt, Artificial Sequence
  Description of Artificial Sequence: Synthetic oligonucleotide
  Sense strand starting at position 3560 of SEQ ID NO: 1885046
gggugucuccaguaauaua

SEQ ID NO: 2311935 - RNA, 19 nt, Artificial Sequence
  Description of Artificial Sequence: Synthetic oligonucleotide
  Antisense strand to SEQ ID NO: 2311934
uauauuacuggagacaccc

SEQ ID NO: 2311936 - RNA, 19 nt, Artificial Sequence
  Description of Artificial Sequence: Synthetic oligonucleotide
  Sense strand starting at position 3568 of SEQ ID NO: 1885046
ccaguaauauaucauggga

SEQ ID NO: 2311937 - RNA, 19 nt, Artificial Sequence
  Description of Artificial Sequence: Synthetic oligonucleotide
  Antisense strand to SEQ ID NO: 2311936
ucccaugauauauuacugg

SEQ ID NO: 2311938 - RNA, 19 nt, Artificial Sequence
  Description of Artificial Sequence: Synthetic oligonucleotide
  Sense strand starting at position 3589 of SEQ ID NO: 1885046
gugggaaagugcuuaagag

SEQ ID NO: 2311939 - RNA, 19 nt, Artificial Sequence
  Description of Artificial Sequence: Synthetic oligonucleotide
  Antisense strand to SEQ ID NO: 2311938
cucuuaagcacuuucccac

SEQ ID NO: 2311940 - RNA, 19 nt, Artificial Sequence
  Description of Artificial Sequence: Synthetic oligonucleotide
  Sense strand starting at position 3596 of SEQ ID NO: 1885046
agugcuuaagagugaagua

SEQ ID NO: 2311941 - RNA, 19 nt, Artificial Sequence
  Description of Artificial Sequence: Synthetic oligonucleotide
  Antisense strand to SEQ ID NO: 2311940
uacuucacucuuaagcacu

SEQ ID NO: 2311942 - RNA, 19 nt, Artificial Sequence
  Description of Artificial Sequence: Synthetic oligonucleotide
  Sense strand starting at position 3597 of SEQ ID NO: 1885046
gugcuuaagagugaaguag

SEQ ID NO: 2311943 - RNA, 19 nt, Artificial Sequence
  Description of Artificial Sequence: Synthetic oligonucleotide
  Antisense strand to SEQ ID NO: 2311942
cuacuucacucuuaagcac

SEQ ID NO: 2311944 - RNA, 19 nt, Artificial Sequence
  Description of Artificial Sequence: Synthetic oligonucleotide
  Sense strand starting at position 3786 of SEQ ID NO: 1885046
cagaaaugaucuccggcaa

SEQ ID NO: 2311945 - RNA, 19 nt, Artificial Sequence
  Description of Artificial Sequence: Synthetic oligonucleotide
  Antisense strand to SEQ ID NO: 2311944
uugccggagaucauuucug

SEQ ID NO: 2311946 - RNA, 19 nt, Artificial Sequence
  Description of Artificial Sequence: Synthetic oligonucleotide
  Sense strand starting at position 3787 of SEQ ID NO: 1885046
agaaaugaucuccggcaau

SEQ ID NO: 2311947 - RNA, 19 nt, Artificial Sequence
  Description of Artificial Sequence: Synthetic oligonucleotide
  Antisense strand to SEQ ID NO: 2311946
auugccggagaucauuucu

SEQ ID NO: 2311948 - RNA, 19 nt, Artificial Sequence
  Description of Artificial Sequence: Synthetic oligonucleotide
  Sense strand starting at position 3818 of SEQ ID NO: 1885046
ggagguggauccuaaguaa

SEQ ID NO: 2311949 - RNA, 19 nt, Artificial Sequence
  Description of Artificial Sequence: Synthetic oligonucleotide
  Antisense strand to SEQ ID NO: 2311948
uuacuuaggauccaccucc

SEQ ID NO: 2311950 - RNA, 19 nt, Artificial Sequence
  Description of Artificial Sequence: Synthetic oligonucleotide
  Sense strand starting at position 3821 of SEQ ID NO: 1885046
gguggauccuaaguaagaa

SEQ ID NO: 2311951 - RNA, 19 nt, Artificial Sequence
  Description of Artificial Sequence: Synthetic oligonucleotide
  Antisense strand to SEQ ID NO: 2311950
uucuuacuuaggauccacc

SEQ ID NO: 2311952 - RNA, 19 nt, Artificial Sequence
  Description of Artificial Sequence: Synthetic oligonucleotide
  Sense strand starting at position 9 of SEQ ID NO: 1885047
ggaaguuauuaucccgucu

SEQ ID NO: 2311953 - RNA, 19 nt, Artificial Sequence
  Description of Artificial Sequence: Synthetic oligonucleotide
  Antisense strand to SEQ ID NO: 2311952
agacgggauaauaacuucc

SEQ ID NO: 2311954 - RNA, 19 nt, Artificial Sequence
  Description of Artificial Sequence: Synthetic oligonucleotide
  Sense strand starting at position 57 of SEQ ID NO: 1885047
gcuguacauucucucagga

SEQ ID NO: 2311955 - RNA, 19 nt, Artificial Sequence
  Description of Artificial Sequence: Synthetic oligonucleotide
  Antisense strand to SEQ ID NO: 2311954
uccugagagaauguacagc

SEQ ID NO: 2311956 - RNA, 19 nt, Artificial Sequence
  Description of Artificial Sequence: Synthetic oligonucleotide
  Sense strand starting at position 71 of SEQ ID NO: 1885047
caggauuccugccuggaac

SEQ ID NO: 2311957 - RNA, 19 nt, Artificial Sequence
  Description of Artificial Sequence: Synthetic oligonucleotide
  Antisense strand to SEQ ID NO: 2311956
guuccaggcaggaauccug

SEQ ID NO: 2311958 - RNA, 19 nt, Artificial Sequence
  Description of Artificial Sequence: Synthetic oligonucleotide
  Sense strand starting at position 72 of SEQ ID NO: 1885047
aggauuccugccuggaaca

SEQ ID NO: 2311959 - RNA, 19 nt, Artificial Sequence
  Description of Artificial Sequence: Synthetic oligonucleotide
  Antisense strand to SEQ ID NO: 2311958
uguuccaggcaggaauccu

SEQ ID NO: 2311960 - RNA, 19 nt, Artificial Sequence
  Description of Artificial Sequence: Synthetic oligonucleotide
  Sense strand starting at position 116 of SEQ ID NO: 1885047
guagacaaggccuaauuau

SEQ ID NO: 2311961 - RNA, 19 nt, Artificial Sequence
  Description of Artificial Sequence: Synthetic oligonucleotide
  Antisense strand to SEQ ID NO: 2311960
auaauuaggccuugucuac

SEQ ID NO: 2311962 - RNA, 19 nt, Artificial Sequence
  Description of Artificial Sequence: Synthetic oligonucleotide
  Sense strand starting at position 151 of SEQ ID NO: 1885047
cuaagaaucugacucugca

SEQ ID NO: 2311963 - RNA, 19 nt, Artificial Sequence
  Description of Artificial Sequence: Synthetic oligonucleotide
  Antisense strand to SEQ ID NO: 2311962
ugcagagucagauucuuag

SEQ ID NO: 2311964 - RNA, 19 nt, Artificial Sequence
  Description of Artificial Sequence: Synthetic oligonucleotide
  Sense strand starting at position 158 of SEQ ID NO: 1885047
ucugacucugcacauaaga

SEQ ID NO: 2311965 - RNA, 19 nt, Artificial Sequence
  Description of Artificial Sequence: Synthetic oligonucleotide
  Antisense strand to SEQ ID NO: 2311964
ucuuaugugcagagucaga

SEQ ID NO: 2311966 - RNA, 19 nt, Artificial Sequence
  Description of Artificial Sequence: Synthetic oligonucleotide
  Sense strand starting at position 319 of SEQ ID NO: 1885047
uggccuggccauggugaaa

SEQ ID NO: 2311967 - RNA, 19 nt, Artificial Sequence
  Description of Artificial Sequence: Synthetic oligonucleotide
  Antisense strand to SEQ ID NO: 2311966
uuucaccauggccaggcca

SEQ ID NO: 2311968 - RNA, 19 nt, Artificial Sequence
  Description of Artificial Sequence: Synthetic oligonucleotide
  Sense strand starting at position 549 of SEQ ID NO: 1885047
ccaagcugaguauguguua

SEQ ID NO: 2311969 - RNA, 19 nt, Artificial Sequence
  Description of Artificial Sequence: Synthetic oligonucleotide
  Antisense strand to SEQ ID NO: 2311968
uaacacauacucagcuugg

SEQ ID NO: 2311970 - RNA, 19 nt, Artificial Sequence
  Description of Artificial Sequence: Synthetic oligonucleotide
  Sense strand starting at position 550 of SEQ ID NO: 1885047
caagcugaguauguguuaa

SEQ ID NO: 2311971 - RNA, 19 nt, Artificial Sequence
  Description of Artificial Sequence: Synthetic oligonucleotide
  Antisense strand to SEQ ID NO: 2311970
uuaacacauacucagcuug

SEQ ID NO: 2311972 - RNA, 19 nt, Artificial Sequence
  Description of Artificial Sequence: Synthetic oligonucleotide
  Sense strand starting at position 552 of SEQ ID NO: 1885047
agcugaguauguguuaacu

SEQ ID NO: 2311973 - RNA, 19 nt, Artificial Sequence
  Description of Artificial Sequence: Synthetic oligonucleotide
  Antisense strand to SEQ ID NO: 2311972
aguuaacacauacucagcu

SEQ ID NO: 2311974 - RNA, 19 nt, Artificial Sequence
  Description of Artificial Sequence: Synthetic oligonucleotide
  Sense strand starting at position 629 of SEQ ID NO: 1885047
ugaggauucucacucuguu

SEQ ID NO: 2311975 - RNA, 19 nt, Artificial Sequence
  Description of Artificial Sequence: Synthetic oligonucleotide
  Antisense strand to SEQ ID NO: 2311974
aacagagugagaauccuca

SEQ ID NO: 2311976 - RNA, 19 nt, Artificial Sequence
  Description of Artificial Sequence: Synthetic oligonucleotide
  Sense strand starting at position 826 of SEQ ID NO: 1885047
cucgaacuccuguagguaa

SEQ ID NO: 2311977 - RNA, 19 nt, Artificial Sequence
  Description of Artificial Sequence: Synthetic oligonucleotide
  Antisense strand to SEQ ID NO: 2311976
uuaccuacaggaguucgag

SEQ ID NO: 2311978 - RNA, 19 nt, Artificial Sequence
  Description of Artificial Sequence: Synthetic oligonucleotide
  Sense strand starting at position 951 of SEQ ID NO: 1885047
ggagaauacugcuuuagau

SEQ ID NO: 2311979 - RNA, 19 nt, Artificial Sequence
  Description of Artificial Sequence: Synthetic oligonucleotide
  Antisense strand to SEQ ID NO: 2311978
aucuaaagcaguauucucc

SEQ ID NO: 2311980 - RNA, 19 nt, Artificial Sequence
  Description of Artificial Sequence: Synthetic oligonucleotide
  Sense strand starting at position 958 of SEQ ID NO: 1885047
acugcuuuagauugcagaa

SEQ ID NO: 2311981 - RNA, 19 nt, Artificial Sequence
  Description of Artificial Sequence: Synthetic oligonucleotide
  Antisense strand to SEQ ID NO: 2311980
uucugcaaucuaaagcagu

SEQ ID NO: 2311982 - RNA, 19 nt, Artificial Sequence
  Description of Artificial Sequence: Synthetic oligonucleotide
  Sense strand starting at position 1230 of SEQ ID NO: 1885047
uuuguagagaugggagauu

SEQ ID NO: 2311983 - RNA, 19 nt, Artificial Sequence
  Description of Artificial Sequence: Synthetic oligonucleotide
  Antisense strand to SEQ ID NO: 2311982
aaucucccaucucuacaaa

SEQ ID NO: 2311984 - RNA, 19 nt, Artificial Sequence
  Description of Artificial Sequence: Synthetic oligonucleotide
  Sense strand starting at position 1248 of SEQ ID NO: 1885047
ucauuauguuggucaggca

SEQ ID NO: 2311985 - RNA, 19 nt, Artificial Sequence
  Description of Artificial Sequence: Synthetic oligonucleotide
  Antisense strand to SEQ ID NO: 2311984
ugccugaccaacauaauga

SEQ ID NO: 2311986 - RNA, 19 nt, Artificial Sequence
  Description of Artificial Sequence: Synthetic oligonucleotide
  Sense strand starting at position 1249 of SEQ ID NO: 1885047
cauuauguuggucaggcaa

SEQ ID NO: 2311987 - RNA, 19 nt, Artificial Sequence
  Description of Artificial Sequence: Synthetic oligonucleotide
  Antisense strand to SEQ ID NO: 2311986
uugccugaccaacauaaug

SEQ ID NO: 2311988 - RNA, 19 nt, Artificial Sequence
  Description of Artificial Sequence: Synthetic oligonucleotide
  Sense strand starting at position 1408 of SEQ ID NO: 1885047
caaugaucugcaggugaac

SEQ ID NO: 2311989 - RNA, 19 nt, Artificial Sequence
  Description of Artificial Sequence: Synthetic oligonucleotide
  Antisense strand to SEQ ID NO: 2311988
guucaccugcagaucauug

SEQ ID NO: 2311990 - RNA, 19 nt, Artificial Sequence
  Description of Artificial Sequence: Synthetic oligonucleotide
  Sense strand starting at position 1410 of SEQ ID NO: 1885047
augaucugcaggugaacua

SEQ ID NO: 2311991 - RNA, 19 nt, Artificial Sequence
  Description of Artificial Sequence: Synthetic oligonucleotide
  Antisense strand to SEQ ID NO: 2311990
uaguucaccugcagaucau

SEQ ID NO: 2311992 - RNA, 19 nt, Artificial Sequence
  Description of Artificial Sequence: Synthetic oligonucleotide
  Sense strand starting at position 1574 of SEQ ID NO: 1885047
aggaacagaucccaauuaa

SEQ ID NO: 2311993 - RNA, 19 nt, Artificial Sequence
  Description of Artificial Sequence: Synthetic oligonucleotide
  Antisense strand to SEQ ID NO: 2311992
uuaauugggaucuguuccu

SEQ ID NO: 2311994 - RNA, 19 nt, Artificial Sequence
  Description of Artificial Sequence: Synthetic oligonucleotide
  Sense strand starting at position 2176 of SEQ ID NO: 1885047
guucuuguucguuucucua

SEQ ID NO: 2311995 - RNA, 19 nt, Artificial Sequence
  Description of Artificial Sequence: Synthetic oligonucleotide
  Antisense strand to SEQ ID NO: 2311994
uagagaaacgaacaagaac

SEQ ID NO: 2311996 - RNA, 19 nt, Artificial Sequence
  Description of Artificial Sequence: Synthetic oligonucleotide
  Sense strand starting at position 2251 of SEQ ID NO: 1885047
gcagcucuccaagaucuuu

SEQ ID NO: 2311997 - RNA, 19 nt, Artificial Sequence
  Description of Artificial Sequence: Synthetic oligonucleotide
  Antisense strand to SEQ ID NO: 2311996
aaagaucuuggagagcugc

SEQ ID NO: 2311998 - RNA, 19 nt, Artificial Sequence
  Description of Artificial Sequence: Synthetic oligonucleotide
  Sense strand starting at position 2314 of SEQ ID NO: 1885047
aguagucuuccaggguacu

SEQ ID NO: 2311999 - RNA, 19 nt, Artificial Sequence
  Description of Artificial Sequence: Synthetic oligonucleotide
  Antisense strand to SEQ ID NO: 2311998
aguacccuggaagacuacu

SEQ ID NO: 2312000 - RNA, 19 nt, Artificial Sequence
  Description of Artificial Sequence: Synthetic oligonucleotide
  Sense strand starting at position 2315 of SEQ ID NO: 1885047
guagucuuccaggguacuu

SEQ ID NO: 2312001 - RNA, 19 nt, Artificial Sequence
  Description of Artificial Sequence: Synthetic oligonucleotide
  Antisense strand to SEQ ID NO: 2312000
aaguacccuggaagacuac

SEQ ID NO: 2312002 - RNA, 19 nt, Artificial Sequence
  Description of Artificial Sequence: Synthetic oligonucleotide
  Sense strand starting at position 2325 of SEQ ID NO: 1885047
aggguacuuaccuguagca

SEQ ID NO: 2312003 - RNA, 19 nt, Artificial Sequence
  Description of Artificial Sequence: Synthetic oligonucleotide
  Antisense strand to SEQ ID NO: 2312002
ugcuacagguaaguacccu

SEQ ID NO: 2312004 - RNA, 19 nt, Artificial Sequence
  Description of Artificial Sequence: Synthetic oligonucleotide
  Sense strand starting at position 2327 of SEQ ID NO: 1885047
gguacuuaccuguagcaau

SEQ ID NO: 2312005 - RNA, 19 nt, Artificial Sequence
  Description of Artificial Sequence: Synthetic oligonucleotide
  Antisense strand to SEQ ID NO: 2312004
auugcuacagguaaguacc

SEQ ID NO: 2312006 - RNA, 19 nt, Artificial Sequence
  Description of Artificial Sequence: Synthetic oligonucleotide
  Sense strand starting at position 2741 of SEQ ID NO: 1885047
agacauaaucagcagucua

SEQ ID NO: 2312007 - RNA, 19 nt, Artificial Sequence
  Description of Artificial Sequence: Synthetic oligonucleotide
  Antisense strand to SEQ ID NO: 2312006
uagacugcugauuaugucu

SEQ ID NO: 2312008 - RNA, 19 nt, Artificial Sequence
  Description of Artificial Sequence: Synthetic oligonucleotide
  Sense strand starting at position 2786 of SEQ ID NO: 1885047
aaggcugaaugauaugaau

SEQ ID NO: 2312009 - RNA, 19 nt, Artificial Sequence
  Description of Artificial Sequence: Synthetic oligonucleotide
  Antisense strand to SEQ ID NO: 2312008
auucauaucauucagccuu

SEQ ID NO: 2312010 - RNA, 19 nt, Artificial Sequence
  Description of Artificial Sequence: Synthetic oligonucleotide
  Sense strand starting at position 2789 of SEQ ID NO: 1885047
gcugaaugauaugaauaaa

SEQ ID NO: 2312011 - RNA, 19 nt, Artificial Sequence
  Description of Artificial Sequence: Synthetic oligonucleotide
  Antisense strand to SEQ ID NO: 2312010
uuuauucauaucauucagc

SEQ ID NO: 2312012 - RNA, 19 nt, Artificial Sequence
  Description of Artificial Sequence: Synthetic oligonucleotide
  Sense strand starting at position 2982 of SEQ ID NO: 1885047
gcuucuccagcugagauaa

SEQ ID NO: 2312013 - RNA, 19 nt, Artificial Sequence
  Description of Artificial Sequence: Synthetic oligonucleotide
  Antisense strand to SEQ ID NO: 2312012
uuaucucagcuggagaagc

SEQ ID NO: 2312014 - RNA, 19 nt, Artificial Sequence
  Description of Artificial Sequence: Synthetic oligonucleotide
  Sense strand starting at position 3010 of SEQ ID NO: 1885047
agggcugauuuaggaaagu

SEQ ID NO: 2312015 - RNA, 19 nt, Artificial Sequence
  Description of Artificial Sequence: Synthetic oligonucleotide
  Antisense strand to SEQ ID NO: 2312014
acuuuccuaaaucagcccu

SEQ ID NO: 2312016 - RNA, 19 nt, Artificial Sequence
  Description of Artificial Sequence: Synthetic oligonucleotide
  Sense strand starting at position 3021 of SEQ ID NO: 1885047
aggaaagucucauauaugg

SEQ ID NO: 2312017 - RNA, 19 nt, Artificial Sequence
  Description of Artificial Sequence: Synthetic oligonucleotide
  Antisense strand to SEQ ID NO: 2312016
ccauauaugagacuuuccu

SEQ ID NO: 2312018 - RNA, 19 nt, Artificial Sequence
  Description of Artificial Sequence: Synthetic oligonucleotide
  Sense strand starting at position 3028 of SEQ ID NO: 1885047
ucucauauaugguuagcau

SEQ ID NO: 2312019 - RNA, 19 nt, Artificial Sequence
  Description of Artificial Sequence: Synthetic oligonucleotide
  Antisense strand to SEQ ID NO: 2312018
augcuaaccauauaugaga

SEQ ID NO: 2312020 - RNA, 19 nt, Artificial Sequence
  Description of Artificial Sequence: Synthetic oligonucleotide
  Sense strand starting at position 3029 of SEQ ID NO: 1885047
cucauauaugguuagcaua

SEQ ID NO: 2312021 - RNA, 19 nt, Artificial Sequence
  Description of Artificial Sequence: Synthetic oligonucleotide
  Antisense strand to SEQ ID NO: 2312020
uaugcuaaccauauaugag

SEQ ID NO: 2312022 - RNA, 19 nt, Artificial Sequence
  Description of Artificial Sequence: Synthetic oligonucleotide
  Sense strand starting at position 3031 of SEQ ID NO: 1885047
cauauaugguuagcauaag

SEQ ID NO: 2312023 - RNA, 19 nt, Artificial Sequence
  Description of Artificial Sequence: Synthetic oligonucleotide
  Antisense strand to SEQ ID NO: 2312022
cuuaugcuaaccauauaug

SEQ ID NO: 2312024 - RNA, 19 nt, Artificial Sequence
  Description of Artificial Sequence: Synthetic oligonucleotide
  Sense strand starting at position 3584 of SEQ ID NO: 1885047
gucauucuugugcagagga

SEQ ID NO: 2312025 - RNA, 19 nt, Artificial Sequence
  Description of Artificial Sequence: Synthetic oligonucleotide
  Antisense strand to SEQ ID NO: 2312024
uccucugcacaagaaugac

SEQ ID NO: 2312026 - RNA, 19 nt, Artificial Sequence
  Description of Artificial Sequence: Synthetic oligonucleotide
  Sense strand starting at position 3604 of SEQ ID NO: 1885047
gugcuaaucuuguccauau

SEQ ID NO: 2312027 - RNA, 19 nt, Artificial Sequence
  Description of Artificial Sequence: Synthetic oligonucleotide
  Antisense strand to SEQ ID NO: 2312026
auauggacaagauuagcac

SEQ ID NO: 2312028 - RNA, 19 nt, Artificial Sequence
  Description of Artificial Sequence: Synthetic oligonucleotide
  Sense strand starting at position 3853 of SEQ ID NO: 1885047
ucccaaaguguuggaaguu

SEQ ID NO: 2312029 - RNA, 19 nt, Artificial Sequence
  Description of Artificial Sequence: Synthetic oligonucleotide
  Antisense strand to SEQ ID NO: 2312028
aacuuccaacacuuuggga

SEQ ID NO: 2312030 - RNA, 19 nt, Artificial Sequence
  Description of Artificial Sequence: Synthetic oligonucleotide
  Sense strand starting at position 3859 of SEQ ID NO: 1885047
aguguuggaaguuggaauu

SEQ ID NO: 2312031 - RNA, 19 nt, Artificial Sequence
  Description of Artificial Sequence: Synthetic oligonucleotide
  Antisense strand to SEQ ID NO: 2312030
aauuccaacuuccaacacu

SEQ ID NO: 2312032 - RNA, 19 nt, Artificial Sequence
  Description of Artificial Sequence: Synthetic oligonucleotide
  Sense strand starting at position 97 of SEQ ID NO: 1885048
ugcccaaguuggcaaauuu

SEQ ID NO: 2312033 - RNA, 19 nt, Artificial Sequence
  Description of Artificial Sequence: Synthetic oligonucleotide
  Antisense strand to SEQ ID NO: 2312032
aaauuugccaacuugggca

SEQ ID NO: 2312034 - RNA, 19 nt, Artificial Sequence
  Description of Artificial Sequence: Synthetic oligonucleotide
  Sense strand starting at position 117 of SEQ ID NO: 1885048
guuugaaugucauuguuuc

SEQ ID NO: 2312035 - RNA, 19 nt, Artificial Sequence
  Description of Artificial Sequence: Synthetic oligonucleotide
  Antisense strand to SEQ ID NO: 2312034
gaaacaaugacauucaaac

SEQ ID NO: 2312036 - RNA, 19 nt, Artificial Sequence
  Description of Artificial Sequence: Synthetic oligonucleotide
  Sense strand starting at position 227 of SEQ ID NO: 1885048
guaggacacuggucagaua

SEQ ID NO: 2312037 - RNA, 19 nt, Artificial Sequence
  Description of Artificial Sequence: Synthetic oligonucleotide
  Antisense strand to SEQ ID NO: 2312036
uaucugaccaguguccuac

SEQ ID NO: 2312038 - RNA, 19 nt, Artificial Sequence
  Description of Artificial Sequence: Synthetic oligonucleotide
  Sense strand starting at position 230 of SEQ ID NO: 1885048
ggacacuggucagauaaca

SEQ ID NO: 2312039 - RNA, 19 nt, Artificial Sequence
  Description of Artificial Sequence: Synthetic oligonucleotide
  Antisense strand to SEQ ID NO: 2312038
uguuaucugaccagugucc

SEQ ID NO: 2312040 - RNA, 19 nt, Artificial Sequence
  Description of Artificial Sequence: Synthetic oligonucleotide
  Sense strand starting at position 235 of SEQ ID NO: 1885048
cuggucagauaacaguaaa

SEQ ID NO: 2312041 - RNA, 19 nt, Artificial Sequence
  Description of Artificial Sequence: Synthetic oligonucleotide
  Antisense strand to SEQ ID NO: 2312040
uuuacuguuaucugaccag

SEQ ID NO: 2312042 - RNA, 19 nt, Artificial Sequence
  Description of Artificial Sequence: Synthetic oligonucleotide
  Sense strand starting at position 238 of SEQ ID NO: 1885048
gucagauaacaguaaaguu

SEQ ID NO: 2312043 - RNA, 19 nt, Artificial Sequence
  Description of Artificial Sequence: Synthetic oligonucleotide
  Antisense strand to SEQ ID NO: 2312042
aacuuuacuguuaucugac

SEQ ID NO: 2312044 - RNA, 19 nt, Artificial Sequence
  Description of Artificial Sequence: Synthetic oligonucleotide
  Sense strand starting at position 246 of SEQ ID NO: 1885048
acaguaaaguuucuaggga

SEQ ID NO: 2312045 - RNA, 19 nt, Artificial Sequence
  Description of Artificial Sequence: Synthetic oligonucleotide
  Antisense strand to SEQ ID NO: 2312044
ucccuagaaacuuuacugu

SEQ ID NO: 2312046 - RNA, 19 nt, Artificial Sequence
  Description of Artificial Sequence: Synthetic oligonucleotide
  Sense strand starting at position 262 of SEQ ID NO: 1885048
ggacauucggcauagguau

SEQ ID NO: 2312047 - RNA, 19 nt, Artificial Sequence
  Description of Artificial Sequence: Synthetic oligonucleotide
  Antisense strand to SEQ ID NO: 2312046
auaccuaugccgaaugucc

SEQ ID NO: 2312048 - RNA, 19 nt, Artificial Sequence
  Description of Artificial Sequence: Synthetic oligonucleotide
  Sense strand starting at position 264 of SEQ ID NO: 1885048
acauucggcauagguauua

SEQ ID NO: 2312049 - RNA, 19 nt, Artificial Sequence
  Description of Artificial Sequence: Synthetic oligonucleotide
  Antisense strand to SEQ ID NO: 2312048
uaauaccuaugccgaaugu

SEQ ID NO: 2312050 - RNA, 19 nt, Artificial Sequence
  Description of Artificial Sequence: Synthetic oligonucleotide
  Sense strand starting at position 275 of SEQ ID NO: 1885048
agguauuagucacuagcaa

SEQ ID NO: 2312051 - RNA, 19 nt, Artificial Sequence
  Description of Artificial Sequence: Synthetic oligonucleotide
  Antisense strand to SEQ ID NO: 2312050
uugcuagugacuaauaccu

SEQ ID NO: 2312052 - RNA, 19 nt, Artificial Sequence
  Description of Artificial Sequence: Synthetic oligonucleotide
  Sense strand starting at position 276 of SEQ ID NO: 1885048
gguauuagucacuagcaac

SEQ ID NO: 2312053 - RNA, 19 nt, Artificial Sequence
  Description of Artificial Sequence: Synthetic oligonucleotide
  Antisense strand to SEQ ID NO: 2312052
guugcuagugacuaauacc

SEQ ID NO: 2312054 - RNA, 19 nt, Artificial Sequence
  Description of Artificial Sequence: Synthetic oligonucleotide
  Sense strand starting at position 447 of SEQ ID NO: 1885048
gagguaacauucuccaguu

SEQ ID NO: 2312055 - RNA, 19 nt, Artificial Sequence
  Description of Artificial Sequence: Synthetic oligonucleotide
  Antisense strand to SEQ ID NO: 2312054
aacuggagaauguuaccuc

SEQ ID NO: 2312056 - RNA, 19 nt, Artificial Sequence
  Description of Artificial Sequence: Synthetic oligonucleotide
  Sense strand starting at position 516 of SEQ ID NO: 1885048
cucccuuuguuccuacaga

SEQ ID NO: 2312057 - RNA, 19 nt, Artificial Sequence
  Description of Artificial Sequence: Synthetic oligonucleotide
  Antisense strand to SEQ ID NO: 2312056
ucuguaggaacaaagggag

SEQ ID NO: 2312058 - RNA, 19 nt, Artificial Sequence
  Description of Artificial Sequence: Synthetic oligonucleotide
  Sense strand starting at position 527 of SEQ ID NO: 1885048
ccuacagauccuugguguu

SEQ ID NO: 2312059 - RNA, 19 nt, Artificial Sequence
  Description of Artificial Sequence: Synthetic oligonucleotide
  Antisense strand to SEQ ID NO: 2312058
aacaccaaggaucuguagg

SEQ ID NO: 2312060 - RNA, 19 nt, Artificial Sequence
  Description of Artificial Sequence: Synthetic oligonucleotide
  Sense strand starting at position 1710 of SEQ ID NO: 1885048
gcagcaaaguaaucucugu

SEQ ID NO: 2312061 - RNA, 19 nt, Artificial Sequence
  Description of Artificial Sequence: Synthetic oligonucleotide
  Antisense strand to SEQ ID NO: 2312060
acagagauuacuuugcugc

SEQ ID NO: 2312062 - RNA, 19 nt, Artificial Sequence
  Description of Artificial Sequence: Synthetic oligonucleotide
  Sense strand starting at position 1747 of SEQ ID NO: 1885048
ccuccauagccucagagau

SEQ ID NO: 2312063 - RNA, 19 nt, Artificial Sequence
  Description of Artificial Sequence: Synthetic oligonucleotide
  Antisense strand to SEQ ID NO: 2312062
aucucugaggcuauggagg

SEQ ID NO: 2312064 - RNA, 19 nt, Artificial Sequence
  Description of Artificial Sequence: Synthetic oligonucleotide
  Sense strand starting at position 1769 of SEQ ID NO: 1885048
ggcaaagauugcccucuca

SEQ ID NO: 2312065 - RNA, 19 nt, Artificial Sequence
  Description of Artificial Sequence: Synthetic oligonucleotide
  Antisense strand to SEQ ID NO: 2312064
ugagagggcaaucuuugcc

SEQ ID NO: 2312066 - RNA, 19 nt, Artificial Sequence
  Description of Artificial Sequence: Synthetic oligonucleotide
  Sense strand starting at position 1837 of SEQ ID NO: 1885048
cauugcucacuccggauua

SEQ ID NO: 2312067 - RNA, 19 nt, Artificial Sequence
  Description of Artificial Sequence: Synthetic oligonucleotide
  Antisense strand to SEQ ID NO: 2312066
uaauccggagugagcaaug

SEQ ID NO: 2312068 - RNA, 19 nt, Artificial Sequence
  Description of Artificial Sequence: Synthetic oligonucleotide
  Sense strand starting at position 1899 of SEQ ID NO: 1885048
cagagauucgcuugugugg

SEQ ID NO: 2312069 - RNA, 19 nt, Artificial Sequence
  Description of Artificial Sequence: Synthetic oligonucleotide
  Antisense strand to SEQ ID NO: 2312068
ccacacaagcgaaucucug

SEQ ID NO: 2312070 - RNA, 19 nt, Artificial Sequence
  Description of Artificial Sequence: Synthetic oligonucleotide
  Sense strand starting at position 2323 of SEQ ID NO: 1885048
caggauggguucucuucua

SEQ ID NO: 2312071 - RNA, 19 nt, Artificial Sequence
  Description of Artificial Sequence: Synthetic oligonucleotide
  Antisense strand to SEQ ID NO: 2312070
uagaagagaacccauccug

SEQ ID NO: 2312072 - RNA, 19 nt, Artificial Sequence
  Description of Artificial Sequence: Synthetic oligonucleotide
  Sense strand starting at position 2330 of SEQ ID NO: 1885048
gguucucuucuauauccuu

SEQ ID NO: 2312073 - RNA, 19 nt, Artificial Sequence
  Description of Artificial Sequence: Synthetic oligonucleotide
  Antisense strand to SEQ ID NO: 2312072
aaggauauagaagagaacc

SEQ ID NO: 2312074 - RNA, 19 nt, Artificial Sequence
  Description of Artificial Sequence: Synthetic oligonucleotide
  Sense strand starting at position 2591 of SEQ ID NO: 1885048
gauacaucucgaggccagu

SEQ ID NO: 2312075 - RNA, 19 nt, Artificial Sequence
  Description of Artificial Sequence: Synthetic oligonucleotide
  Antisense strand to SEQ ID NO: 2312074
acuggccucgagauguauc

SEQ ID NO: 2312076 - RNA, 19 nt, Artificial Sequence
  Description of Artificial Sequence: Synthetic oligonucleotide
  Sense strand starting at position 2752 of SEQ ID NO: 1885048
cucccauguuggucacuua

SEQ ID NO: 2312077 - RNA, 19 nt, Artificial Sequence
  Description of Artificial Sequence: Synthetic oligonucleotide
  Antisense strand to SEQ ID NO: 2312076
uaagugaccaacaugggag

SEQ ID NO: 2312078 - RNA, 19 nt, Artificial Sequence
  Description of Artificial Sequence: Synthetic oligonucleotide
  Sense strand starting at position 2861 of SEQ ID NO: 1885048
aagauaucuuaguugaaug

SEQ ID NO: 2312079 - RNA, 19 nt, Artificial Sequence
  Description of Artificial Sequence: Synthetic oligonucleotide
  Antisense strand to SEQ ID NO: 2312078
cauucaacuaagauaucuu

SEQ ID NO: 2312080 - RNA, 19 nt, Artificial Sequence
  Description of Artificial Sequence: Synthetic oligonucleotide
  Sense strand starting at position 2863 of SEQ ID NO: 1885048
gauaucuuaguugaauggu

SEQ ID NO: 2312081 - RNA, 19 nt, Artificial Sequence
  Description of Artificial Sequence: Synthetic oligonucleotide
  Antisense strand to SEQ ID NO: 2312080
accauucaacuaagauauc

SEQ ID NO: 2312082 - RNA, 19 nt, Artificial Sequence
  Description of Artificial Sequence: Synthetic oligonucleotide
  Sense strand starting at position 2872 of SEQ ID NO: 1885048
guugaaugguuacugcuua

SEQ ID NO: 2312083 - RNA, 19 nt, Artificial Sequence
  Description of Artificial Sequence: Synthetic oligonucleotide
  Antisense strand to SEQ ID NO: 2312082
uaagcaguaaccauucaac

SEQ ID NO: 2312084 - RNA, 19 nt, Artificial Sequence
  Description of Artificial Sequence: Synthetic oligonucleotide
  Sense strand starting at position 2902 of SEQ ID NO: 1885048
uaggaaguauagggaauaa

SEQ ID NO: 2312085 - RNA, 19 nt, Artificial Sequence
  Description of Artificial Sequence: Synthetic oligonucleotide
  Antisense strand to SEQ ID NO: 2312084
uuauucccuauacuuccua

SEQ ID NO: 2312086 - RNA, 19 nt, Artificial Sequence
  Description of Artificial Sequence: Synthetic oligonucleotide
  Sense strand starting at position 3079 of SEQ ID NO: 1885048
gucugauguggguggauca

SEQ ID NO: 2312087 - RNA, 19 nt, Artificial Sequence
  Description of Artificial Sequence: Synthetic oligonucleotide
  Antisense strand to SEQ ID NO: 2312086
ugauccacccacaucagac

SEQ ID NO: 2312088 - RNA, 19 nt, Artificial Sequence
  Description of Artificial Sequence: Synthetic oligonucleotide
  Sense strand starting at position 3540 of SEQ ID NO: 1885048
ugaaguuccuaauuccaga

SEQ ID NO: 2312089 - RNA, 19 nt, Artificial Sequence
  Description of Artificial Sequence: Synthetic oligonucleotide
  Antisense strand to SEQ ID NO: 2312088
ucuggaauuaggaacuuca

SEQ ID NO: 2312090 - RNA, 19 nt, Artificial Sequence
  Description of Artificial Sequence: Synthetic oligonucleotide
  Sense strand starting at position 3568 of SEQ ID NO: 1885048
agcuuucugcuaugggcaa

SEQ ID NO: 2312091 - RNA, 19 nt, Artificial Sequence
  Description of Artificial Sequence: Synthetic oligonucleotide
  Antisense strand to SEQ ID NO: 2312090
uugcccauagcagaaagcu

SEQ ID NO: 2312092 - RNA, 19 nt, Artificial Sequence
  Description of Artificial Sequence: Synthetic oligonucleotide
  Sense strand starting at position 3572 of SEQ ID NO: 1885048
uucugcuaugggcaaguua

SEQ ID NO: 2312093 - RNA, 19 nt, Artificial Sequence
  Description of Artificial Sequence: Synthetic oligonucleotide
  Antisense strand to SEQ ID NO: 2312092
uaacuugcccauagcagaa

SEQ ID NO: 2312094 - RNA, 19 nt, Artificial Sequence
  Description of Artificial Sequence: Synthetic oligonucleotide
  Sense strand starting at position 3587 of SEQ ID NO: 1885048
guuaguaguacgcaaguaa

SEQ ID NO: 2312095 - RNA, 19 nt, Artificial Sequence
  Description of Artificial Sequence: Synthetic oligonucleotide
  Antisense strand to SEQ ID NO: 2312094
uuacuugcguacuacuaac

SEQ ID NO: 2312096 - RNA, 19 nt, Artificial Sequence
  Description of Artificial Sequence: Synthetic oligonucleotide
  Sense strand starting at position 3627 of SEQ ID NO: 1885048
agcuuaugcuacuuuggga

SEQ ID NO: 2312097 - RNA, 19 nt, Artificial Sequence
  Description of Artificial Sequence: Synthetic oligonucleotide
  Antisense strand to SEQ ID NO: 2312096
ucccaaaguagcauaagcu

SEQ ID NO: 2312098 - RNA, 19 nt, Artificial Sequence
  Description of Artificial Sequence: Synthetic oligonucleotide
  Sense strand starting at position 3764 of SEQ ID NO: 1885048
agugucagcuaguugggaa

SEQ ID NO: 2312099 - RNA, 19 nt, Artificial Sequence
  Description of Artificial Sequence: Synthetic oligonucleotide
  Antisense strand to SEQ ID NO: 2312098
uucccaacuagcugacacu

SEQ ID NO: 2312100 - RNA, 19 nt, Artificial Sequence
  Description of Artificial Sequence: Synthetic oligonucleotide
  Sense strand starting at position 3902 of SEQ ID NO: 1885048
aagguauggaugugguuua

SEQ ID NO: 2312101 - RNA, 19 nt, Artificial Sequence
  Description of Artificial Sequence: Synthetic oligonucleotide
  Antisense strand to SEQ ID NO: 2312100
uaaaccacauccauaccuu

SEQ ID NO: 2312102 - RNA, 19 nt, Artificial Sequence
  Description of Artificial Sequence: Synthetic oligonucleotide
  Sense strand starting at position 3907 of SEQ ID NO: 1885048
auggaugugguuuaugaac

SEQ ID NO: 2312103 - RNA, 19 nt, Artificial Sequence
  Description of Artificial Sequence: Synthetic oligonucleotide
  Antisense strand to SEQ ID NO: 2312102
guucauaaaccacauccau

SEQ ID NO: 2312104 - RNA, 19 nt, Artificial Sequence
  Description of Artificial Sequence: Synthetic oligonucleotide
  Sense strand starting at position 3913 of SEQ ID NO: 1885048
gugguuuaugaacaagcga

SEQ ID NO: 2312105 - RNA, 19 nt, Artificial Sequence
  Description of Artificial Sequence: Synthetic oligonucleotide
  Antisense strand to SEQ ID NO: 2312104
ucgcuuguucauaaaccac

SEQ ID NO: 2312106 - RNA, 19 nt, Artificial Sequence
  Description of Artificial Sequence: Synthetic oligonucleotide
  Sense strand starting at position 3968 of SEQ ID NO: 1885048
ccauacuuucgacgaaaca

SEQ ID NO: 2312107 - RNA, 19 nt, Artificial Sequence
  Description of Artificial Sequence: Synthetic oligonucleotide
  Antisense strand to SEQ ID NO: 2312106
uguuucgucgaaaguaugg

SEQ ID NO: 2312108 - RNA, 19 nt, Artificial Sequence
  Description of Artificial Sequence: Synthetic oligonucleotide
  Sense strand starting at position 3979 of SEQ ID NO: 1885048
acgaaacaucucugcaaag

SEQ ID NO: 2312109 - RNA, 19 nt, Artificial Sequence
  Description of Artificial Sequence: Synthetic oligonucleotide
  Antisense strand to SEQ ID NO: 2312108
cuuugcagagauguuucgu

SEQ ID NO: 2312110 - RNA, 19 nt, Artificial Sequence
  Description of Artificial Sequence: Synthetic oligonucleotide
  Sense strand starting at position 3980 of SEQ ID NO: 1885048
cgaaacaucucugcaaaga

SEQ ID NO: 2312111 - RNA, 19 nt, Artificial Sequence
  Description of Artificial Sequence: Synthetic oligonucleotide
  Antisense strand to SEQ ID NO: 2312110
ucuuugcagagauguuucg

SEQ ID NO: 2312112 - RNA, 19 nt, Artificial Sequence
  Description of Artificial Sequence: Synthetic oligonucleotide
  Sense strand starting at position 33 of SEQ ID NO: 1885049
ggcaaauuccucuacgagg

SEQ ID NO: 2312113 - RNA, 19 nt, Artificial Sequence
  Description of Artificial Sequence: Synthetic oligonucleotide
  Antisense strand to SEQ ID NO: 2312112
ccucguagaggaauuugcc

SEQ ID NO: 2312114 - RNA, 19 nt, Artificial Sequence
  Description of Artificial Sequence: Synthetic oligonucleotide
  Sense strand starting at position 118 of SEQ ID NO: 1885049
uguguuaugccgucaccca

SEQ ID NO: 2312115 - RNA, 19 nt, Artificial Sequence
  Description of Artificial Sequence: Synthetic oligonucleotide
  Antisense strand to SEQ ID NO: 2312114
ugggugacggcauaacaca

SEQ ID NO: 2312116 - RNA, 19 nt, Artificial Sequence
  Description of Artificial Sequence: Synthetic oligonucleotide
  Sense strand starting at position 312 of SEQ ID NO: 1885049
agacaugcgcgugcucaaa

SEQ ID NO: 2312117 - RNA, 19 nt, Artificial Sequence
  Description of Artificial Sequence: Synthetic oligonucleotide
  Antisense strand to SEQ ID NO: 2312116
uuugagcacgcgcaugucu

SEQ ID NO: 2312118 - RNA, 19 nt, Artificial Sequence
  Description of Artificial Sequence: Synthetic oligonucleotide
  Sense strand starting at position 337 of SEQ ID NO: 1885049
acaugcucucaugagcaaa

SEQ ID NO: 2312119 - RNA, 19 nt, Artificial Sequence
  Description of Artificial Sequence: Synthetic oligonucleotide
  Antisense strand to SEQ ID NO: 2312118
uuugcucaugagagcaugu

SEQ ID NO: 2312120 - RNA, 19 nt, Artificial Sequence
  Description of Artificial Sequence: Synthetic oligonucleotide
  Sense strand starting at position 407 of SEQ ID NO: 1885049
guacuuagugagcauauac

SEQ ID NO: 2312121 - RNA, 19 nt, Artificial Sequence
  Description of Artificial Sequence: Synthetic oligonucleotide
  Antisense strand to SEQ ID NO: 2312120
guauaugcucacuaaguac

SEQ ID NO: 2312122 - RNA, 19 nt, Artificial Sequence
  Description of Artificial Sequence: Synthetic oligonucleotide
  Sense strand starting at position 614 of SEQ ID NO: 1885049
cccuauaaaguagauguua

SEQ ID NO: 2312123 - RNA, 19 nt, Artificial Sequence
  Description of Artificial Sequence: Synthetic oligonucleotide
  Antisense strand to SEQ ID NO: 2312122
uaacaucuacuuuauaggg

SEQ ID NO: 2312124 - RNA, 19 nt, Artificial Sequence
  Description of Artificial Sequence: Synthetic oligonucleotide
  Sense strand starting at position 622 of SEQ ID NO: 1885049
aguagauguuaauuguaca

SEQ ID NO: 2312125 - RNA, 19 nt, Artificial Sequence
  Description of Artificial Sequence: Synthetic oligonucleotide
  Antisense strand to SEQ ID NO: 2312124
uguacaauuaacaucuacu

SEQ ID NO: 2312126 - RNA, 19 nt, Artificial Sequence
  Description of Artificial Sequence: Synthetic oligonucleotide
  Sense strand starting at position 827 of SEQ ID NO: 1885049
ucagguucauggguggaga

SEQ ID NO: 2312127 - RNA, 19 nt, Artificial Sequence
  Description of Artificial Sequence: Synthetic oligonucleotide
  Antisense strand to SEQ ID NO: 2312126
ucuccacccaugaaccuga

SEQ ID NO: 2312128 - RNA, 19 nt, Artificial Sequence
  Description of Artificial Sequence: Synthetic oligonucleotide
  Sense strand starting at position 866 of SEQ ID NO: 1885049
accuguuauuauguaagga

SEQ ID NO: 2312129 - RNA, 19 nt, Artificial Sequence
  Description of Artificial Sequence: Synthetic oligonucleotide
  Antisense strand to SEQ ID NO: 2312128
uccuuacauaauaacaggu

SEQ ID NO: 2312130 - RNA, 19 nt, Artificial Sequence
  Description of Artificial Sequence: Synthetic oligonucleotide
  Sense strand starting at position 971 of SEQ ID NO: 1885049
caggauggagacugcuaau

SEQ ID NO: 2312131 - RNA, 19 nt, Artificial Sequence
  Description of Artificial Sequence: Synthetic oligonucleotide
  Antisense strand to SEQ ID NO: 2312130
auuagcagucuccauccug

SEQ ID NO: 2312132 - RNA, 19 nt, Artificial Sequence
  Description of Artificial Sequence: Synthetic oligonucleotide
  Sense strand starting at position 1020 of SEQ ID NO: 1885049
ugaugaaagucucuuguca

SEQ ID NO: 2312133 - RNA, 19 nt, Artificial Sequence
  Description of Artificial Sequence: Synthetic oligonucleotide
  Antisense strand to SEQ ID NO: 2312132
ugacaagagacuuucauca

SEQ ID NO: 2312134 - RNA, 19 nt, Artificial Sequence
  Description of Artificial Sequence: Synthetic oligonucleotide
  Sense strand starting at position 1024 of SEQ ID NO: 1885049
gaaagucucuugucaagaa

SEQ ID NO: 2312135 - RNA, 19 nt, Artificial Sequence
  Description of Artificial Sequence: Synthetic oligonucleotide
  Antisense strand to SEQ ID NO: 2312134
uucuugacaagagacuuuc

SEQ ID NO: 2312136 - RNA, 19 nt, Artificial Sequence
  Description of Artificial Sequence: Synthetic oligonucleotide
  Sense strand starting at position 1028 of SEQ ID NO: 1885049
gucucuugucaagaaauga

SEQ ID NO: 2312137 - RNA, 19 nt, Artificial Sequence
  Description of Artificial Sequence: Synthetic oligonucleotide
  Antisense strand to SEQ ID NO: 2312136
ucauuucuugacaagagac

SEQ ID NO: 2312138 - RNA, 19 nt, Artificial Sequence
  Description of Artificial Sequence: Synthetic oligonucleotide
  Sense strand starting at position 1115 of SEQ ID NO: 1885049
caagaaccucaggguugau

SEQ ID NO: 2312139 - RNA, 19 nt, Artificial Sequence
  Description of Artificial Sequence: Synthetic oligonucleotide
  Antisense strand to SEQ ID NO: 2312138
aucaacccugagguucuug

SEQ ID NO: 2312140 - RNA, 19 nt, Artificial Sequence
  Description of Artificial Sequence: Synthetic oligonucleotide
  Sense strand starting at position 1124 of SEQ ID NO: 1885049
caggguugaucaccgaaga

SEQ ID NO: 2312141 - RNA, 19 nt, Artificial Sequence
  Description of Artificial Sequence: Synthetic oligonucleotide
  Antisense strand to SEQ ID NO: 2312140
ucuucggugaucaacccug

SEQ ID NO: 2312142 - RNA, 19 nt, Artificial Sequence
  Description of Artificial Sequence: Synthetic oligonucleotide
  Sense strand starting at position 1205 of SEQ ID NO: 1885049
gaaaccaauggcugaguau

SEQ ID NO: 2312143 - RNA, 19 nt, Artificial Sequence
  Description of Artificial Sequence: Synthetic oligonucleotide
  Antisense strand to SEQ ID NO: 2312142
auacucagccauugguuuc

SEQ ID NO: 2312144 - RNA, 19 nt, Artificial Sequence
  Description of Artificial Sequence: Synthetic oligonucleotide
  Sense strand starting at position 1208 of SEQ ID NO: 1885049
accaauggcugaguaugaa

SEQ ID NO: 2312145 - RNA, 19 nt, Artificial Sequence
  Description of Artificial Sequence: Synthetic oligonucleotide
  Antisense strand to SEQ ID NO: 2312144
uucauacucagccauuggu

SEQ ID NO: 2312146 - RNA, 19 nt, Artificial Sequence
  Description of Artificial Sequence: Synthetic oligonucleotide
  Sense strand starting at position 1483 of SEQ ID NO: 1885049
ucagaaugaucuuuggucu

SEQ ID NO: 2312147 - RNA, 19 nt, Artificial Sequence
  Description of Artificial Sequence: Synthetic oligonucleotide
  Antisense strand to SEQ ID NO: 2312146
agaccaaagaucauucuga

SEQ ID NO: 2312148 - RNA, 19 nt, Artificial Sequence
  Description of Artificial Sequence: Synthetic oligonucleotide
  Sense strand starting at position 1486 of SEQ ID NO: 1885049
gaaugaucuuuggucugag

SEQ ID NO: 2312149 - RNA, 19 nt, Artificial Sequence
  Description of Artificial Sequence: Synthetic oligonucleotide
  Antisense strand to SEQ ID NO: 2312148
cucagaccaaagaucauuc

SEQ ID NO: 2312150 - RNA, 19 nt, Artificial Sequence
  Description of Artificial Sequence: Synthetic oligonucleotide
  Sense strand starting at position 1489 of SEQ ID NO: 1885049
ugaucuuuggucugaggaa

SEQ ID NO: 2312151 - RNA, 19 nt, Artificial Sequence
  Description of Artificial Sequence: Synthetic oligonucleotide
  Antisense strand to SEQ ID NO: 2312150
uuccucagaccaaagauca

SEQ ID NO: 2312152 - RNA, 19 nt, Artificial Sequence
  Description of Artificial Sequence: Synthetic oligonucleotide
  Sense strand starting at position 1511 of SEQ ID NO: 1885049
ccuggcauucuuggauaau

SEQ ID NO: 2312153 - RNA, 19 nt, Artificial Sequence
  Description of Artificial Sequence: Synthetic oligonucleotide
  Antisense strand to SEQ ID NO: 2312152
auuauccaagaaugccagg

SEQ ID NO: 2312154 - RNA, 19 nt, Artificial Sequence
  Description of Artificial Sequence: Synthetic oligonucleotide
  Sense strand starting at position 1560 of SEQ ID NO: 1885049
acuggaacuccugguaaua

SEQ ID NO: 2312155 - RNA, 19 nt, Artificial Sequence
  Description of Artificial Sequence: Synthetic oligonucleotide
  Antisense strand to SEQ ID NO: 2312154
uauuaccaggaguuccagu

SEQ ID NO: 2312156 - RNA, 19 nt, Artificial Sequence
  Description of Artificial Sequence: Synthetic oligonucleotide
  Sense strand starting at position 1569 of SEQ ID NO: 1885049
ccugguaauaaaggguaua

SEQ ID NO: 2312157 - RNA, 19 nt, Artificial Sequence
  Description of Artificial Sequence: Synthetic oligonucleotide
  Antisense strand to SEQ ID NO: 2312156
uauacccuuuauuaccagg

SEQ ID NO: 2312158 - RNA, 19 nt, Artificial Sequence
  Description of Artificial Sequence: Synthetic oligonucleotide
  Sense strand starting at position 1570 of SEQ ID NO: 1885049
cugguaauaaaggguauau

SEQ ID NO: 2312159 - RNA, 19 nt, Artificial Sequence
  Description of Artificial Sequence: Synthetic oligonucleotide
  Antisense strand to SEQ ID NO: 2312158
auauacccuuuauuaccag

SEQ ID NO: 2312160 - RNA, 19 nt, Artificial Sequence
  Description of Artificial Sequence: Synthetic oligonucleotide
  Sense strand starting at position 1648 of SEQ ID NO: 1885049
gcaggucauagugauuaug

SEQ ID NO: 2312161 - RNA, 19 nt, Artificial Sequence
  Description of Artificial Sequence: Synthetic oligonucleotide
  Antisense strand to SEQ ID NO: 2312160
cauaaucacuaugaccugc

SEQ ID NO: 2312162 - RNA, 19 nt, Artificial Sequence
  Description of Artificial Sequence: Synthetic oligonucleotide
  Sense strand starting at position 2988 of SEQ ID NO: 1885049
uccaacucccgggaucaau

SEQ ID NO: 2312163 - RNA, 19 nt, Artificial Sequence
  Description of Artificial Sequence: Synthetic oligonucleotide
  Antisense strand to SEQ ID NO: 2312162
auugaucccgggaguugga

SEQ ID NO: 2312164 - RNA, 19 nt, Artificial Sequence
  Description of Artificial Sequence: Synthetic oligonucleotide
  Sense strand starting at position 3054 of SEQ ID NO: 1885049
acuaccaugacggguuaau

SEQ ID NO: 2312165 - RNA, 19 nt, Artificial Sequence
  Description of Artificial Sequence: Synthetic oligonucleotide
  Antisense strand to SEQ ID NO: 2312164
auuaacccgucaugguagu

SEQ ID NO: 2312166 - RNA, 19 nt, Artificial Sequence
  Description of Artificial Sequence: Synthetic oligonucleotide
  Sense strand starting at position 3527 of SEQ ID NO: 1885049
gguagaucuuaauucuuaa

SEQ ID NO: 2312167 - RNA, 19 nt, Artificial Sequence
  Description of Artificial Sequence: Synthetic oligonucleotide
  Antisense strand to SEQ ID NO: 2312166
uuaagaauuaagaucuacc

SEQ ID NO: 2312168 - RNA, 19 nt, Artificial Sequence
  Description of Artificial Sequence: Synthetic oligonucleotide
  Sense strand starting at position 3594 of SEQ ID NO: 1885049
uguggcuuuggagagaaau

SEQ ID NO: 2312169 - RNA, 19 nt, Artificial Sequence
  Description of Artificial Sequence: Synthetic oligonucleotide
  Antisense strand to SEQ ID NO: 2312168
auuucucuccaaagccaca

SEQ ID NO: 2312170 - RNA, 19 nt, Artificial Sequence
  Description of Artificial Sequence: Synthetic oligonucleotide
  Sense strand starting at position 3605 of SEQ ID NO: 1885049
agagaaaucugggcucaca

SEQ ID NO: 2312171 - RNA, 19 nt, Artificial Sequence
  Description of Artificial Sequence: Synthetic oligonucleotide
  Antisense strand to SEQ ID NO: 2312170
ugugagcccagauuucucu

SEQ ID NO: 2312172 - RNA, 19 nt, Artificial Sequence
  Description of Artificial Sequence: Synthetic oligonucleotide
  Sense strand starting at position 3732 of SEQ ID NO: 1885049
aggguuguucugcaaauga

SEQ ID NO: 2312173 - RNA, 19 nt, Artificial Sequence
  Description of Artificial Sequence: Synthetic oligonucleotide
  Antisense strand to SEQ ID NO: 2312172
ucauuugcagaacaacccu

SEQ ID NO: 2312174 - RNA, 19 nt, Artificial Sequence
  Description of Artificial Sequence: Synthetic oligonucleotide
  Sense strand starting at position 3835 of SEQ ID NO: 1885049
uaacaucaugaggguauau

SEQ ID NO: 2312175 - RNA, 19 nt, Artificial Sequence
  Description of Artificial Sequence: Synthetic oligonucleotide
  Antisense strand to SEQ ID NO: 2312174
auauacccucaugauguua

SEQ ID NO: 2312176 - RNA, 19 nt, Artificial Sequence
  Description of Artificial Sequence: Synthetic oligonucleotide
  Sense strand starting at position 3846 of SEQ ID NO: 1885049
ggguauauuacuugagcca

SEQ ID NO: 2312177 - RNA, 19 nt, Artificial Sequence
  Description of Artificial Sequence: Synthetic oligonucleotide
  Antisense strand to SEQ ID NO: 2312176
uggcucaaguaauauaccc

SEQ ID NO: 2312178 - RNA, 19 nt, Artificial Sequence
  Description of Artificial Sequence: Synthetic oligonucleotide
  Sense strand starting at position 3847 of SEQ ID NO: 1885049
gguauauuacuugagccau

SEQ ID NO: 2312179 - RNA, 19 nt, Artificial Sequence
  Description of Artificial Sequence: Synthetic oligonucleotide
  Antisense strand to SEQ ID NO: 2312178
auggcucaaguaauauacc

SEQ ID NO: 2312180 - RNA, 19 nt, Artificial Sequence
  Description of Artificial Sequence: Synthetic oligonucleotide
  Sense strand starting at position 3857 of SEQ ID NO: 1885049
uugagccauuacuuagaga

SEQ ID NO: 2312181 - RNA, 19 nt, Artificial Sequence
  Description of Artificial Sequence: Synthetic oligonucleotide
  Antisense strand to SEQ ID NO: 2312180
ucucuaaguaauggcucaa

SEQ ID NO: 2312182 - RNA, 19 nt, Artificial Sequence
  Description of Artificial Sequence: Synthetic oligonucleotide
  Sense strand starting at position 3881 of SEQ ID NO: 1885049
aagagcuguggcuguauuu

SEQ ID NO: 2312183 - RNA, 19 nt, Artificial Sequence
  Description of Artificial Sequence: Synthetic oligonucleotide
  Antisense strand to SEQ ID NO: 2312182
aaauacagccacagcucuu

SEQ ID NO: 2312184 - RNA, 19 nt, Artificial Sequence
  Description of Artificial Sequence: Synthetic oligonucleotide
  Sense strand starting at position 3921 of SEQ ID NO: 1885049
ggucauagugauuauguuu

SEQ ID NO: 2312185 - RNA, 19 nt, Artificial Sequence
  Description of Artificial Sequence: Synthetic oligonucleotide
  Antisense strand to SEQ ID NO: 2312184
aaacauaaucacuaugacc

SEQ ID NO: 2312186 - RNA, 19 nt, Artificial Sequence
  Description of Artificial Sequence: Synthetic oligonucleotide
  Sense strand starting at position 3927 of SEQ ID NO: 1885049
agugauuauguuuaacuac

SEQ ID NO: 2312187 - RNA, 19 nt, Artificial Sequence
  Description of Artificial Sequence: Synthetic oligonucleotide
  Antisense strand to SEQ ID NO: 2312186
guaguuaaacauaaucacu

SEQ ID NO: 2312188 - RNA, 19 nt, Artificial Sequence
  Description of Artificial Sequence: Synthetic oligonucleotide
  Sense strand starting at position 3956 of SEQ ID NO: 1885049
ggacaaucaggaugcuaug

SEQ ID NO: 2312189 - RNA, 19 nt, Artificial Sequence
  Description of Artificial Sequence: Synthetic oligonucleotide
  Antisense strand to SEQ ID NO: 2312188
cauagcauccugauugucc

SEQ ID NO: 2312190 - RNA, 19 nt, Artificial Sequence
  Description of Artificial Sequence: Synthetic oligonucleotide
  Sense strand starting at position 3965 of SEQ ID NO: 1885049
ggaugcuaugcccaaugua

SEQ ID NO: 2312191 - RNA, 19 nt, Artificial Sequence
  Description of Artificial Sequence: Synthetic oligonucleotide
  Antisense strand to SEQ ID NO: 2312190
uacauugggcauagcaucc

SEQ ID NO: 2312192 - RNA, 19 nt, Artificial Sequence
  Description of Artificial Sequence: Synthetic oligonucleotide
  Sense strand starting at position 50 of SEQ ID NO: 1885050
uauggauucgccuauucua

SEQ ID NO: 2312193 - RNA, 19 nt, Artificial Sequence
  Description of Artificial Sequence: Synthetic oligonucleotide
  Antisense strand to SEQ ID NO: 2312192
uagaauaggcgaauccaua

SEQ ID NO: 2312194 - RNA, 19 nt, Artificial Sequence
  Description of Artificial Sequence: Synthetic oligonucleotide
  Sense strand starting at position 53 of SEQ ID NO: 1885050
ggauucgccuauucuagau

SEQ ID NO: 2312195 - RNA, 19 nt, Artificial Sequence
  Description of Artificial Sequence: Synthetic oligonucleotide
  Antisense strand to SEQ ID NO: 2312194
aucuagaauaggcgaaucc

SEQ ID NO: 2312196 - RNA, 19 nt, Artificial Sequence
  Description of Artificial Sequence: Synthetic oligonucleotide
  Sense strand starting at position 55 of SEQ ID NO: 1885050
auucgccuauucuagauau

SEQ ID NO: 2312197 - RNA, 19 nt, Artificial Sequence
  Description of Artificial Sequence: Synthetic oligonucleotide
  Antisense strand to SEQ ID NO: 2312196
auaucuagaauaggcgaau

SEQ ID NO: 2312198 - RNA, 19 nt, Artificial Sequence
  Description of Artificial Sequence: Synthetic oligonucleotide
  Sense strand starting at position 414 of SEQ ID NO: 1885050
cagacagucuggguucuuu

SEQ ID NO: 2312199 - RNA, 19 nt, Artificial Sequence
  Description of Artificial Sequence: Synthetic oligonucleotide
  Antisense strand to SEQ ID NO: 2312198
aaagaacccagacugucug

SEQ ID NO: 2312200 - RNA, 19 nt, Artificial Sequence
  Description of Artificial Sequence: Synthetic oligonucleotide
  Sense strand starting at position 481 of SEQ ID NO: 1885050
acugauauggcuuggcuuu

SEQ ID NO: 2312201 - RNA, 19 nt, Artificial Sequence
  Description of Artificial Sequence: Synthetic oligonucleotide
  Antisense strand to SEQ ID NO: 2312200
aaagccaagccauaucagu

SEQ ID NO: 2312202 - RNA, 19 nt, Artificial Sequence
  Description of Artificial Sequence: Synthetic oligonucleotide
  Sense strand starting at position 788 of SEQ ID NO: 1885050
ucugcaaugucuuuaccag

SEQ ID NO: 2312203 - RNA, 19 nt, Artificial Sequence
  Description of Artificial Sequence: Synthetic oligonucleotide
  Antisense strand to SEQ ID NO: 2312202
cugguaaagacauugcaga

SEQ ID NO: 2312204 - RNA, 19 nt, Artificial Sequence
  Description of Artificial Sequence: Synthetic oligonucleotide
  Sense strand starting at position 1088 of SEQ ID NO: 1885050
ccacaaugagugugccauu

SEQ ID NO: 2312205 - RNA, 19 nt, Artificial Sequence
  Description of Artificial Sequence: Synthetic oligonucleotide
  Antisense strand to SEQ ID NO: 2312204
aauggcacacucauugugg

SEQ ID NO: 2312206 - RNA, 19 nt, Artificial Sequence
  Description of Artificial Sequence: Synthetic oligonucleotide
  Sense strand starting at position 1089 of SEQ ID NO: 1885050
cacaaugagugugccauuu

SEQ ID NO: 2312207 - RNA, 19 nt, Artificial Sequence
  Description of Artificial Sequence: Synthetic oligonucleotide
  Antisense strand to SEQ ID NO: 2312206
aaauggcacacucauugug

SEQ ID NO: 2312208 - RNA, 19 nt, Artificial Sequence
  Description of Artificial Sequence: Synthetic oligonucleotide
  Sense strand starting at position 1478 of SEQ ID NO: 1885050
ggaucagugucacaaucau

SEQ ID NO: 2312209 - RNA, 19 nt, Artificial Sequence
  Description of Artificial Sequence: Synthetic oligonucleotide
  Antisense strand to SEQ ID NO: 2312208
augauugugacacugaucc

SEQ ID NO: 2312210 - RNA, 19 nt, Artificial Sequence
  Description of Artificial Sequence: Synthetic oligonucleotide
  Sense strand starting at position 1580 of SEQ ID NO: 1885050
gccuuugcaccacagagaa

SEQ ID NO: 2312211 - RNA, 19 nt, Artificial Sequence
  Description of Artificial Sequence: Synthetic oligonucleotide
  Antisense strand to SEQ ID NO: 2312210
uucucuguggugcaaaggc

SEQ ID NO: 2312212 - RNA, 19 nt, Artificial Sequence
  Description of Artificial Sequence: Synthetic oligonucleotide
  Sense strand starting at position 1599 of SEQ ID NO: 1885050
gcuugauccuucggaggug

SEQ ID NO: 2312213 - RNA, 19 nt, Artificial Sequence
  Description of Artificial Sequence: Synthetic oligonucleotide
  Antisense strand to SEQ ID NO: 2312212
caccuccgaaggaucaagc

SEQ ID NO: 2312214 - RNA, 19 nt, Artificial Sequence
  Description of Artificial Sequence: Synthetic oligonucleotide
  Sense strand starting at position 1715 of SEQ ID NO: 1885050
ggcccuggcuuugaggaau

SEQ ID NO: 2312215 - RNA, 19 nt, Artificial Sequence
  Description of Artificial Sequence: Synthetic oligonucleotide
  Antisense strand to SEQ ID NO: 2312214
auuccucaaagccagggcc

SEQ ID NO: 2312216 - RNA, 19 nt, Artificial Sequence
  Description of Artificial Sequence: Synthetic oligonucleotide
  Sense strand starting at position 1726 of SEQ ID NO: 1885050
ugaggaaucucuguugggu

SEQ ID NO: 2312217 - RNA, 19 nt, Artificial Sequence
  Description of Artificial Sequence: Synthetic oligonucleotide
  Antisense strand to SEQ ID NO: 2312216
acccaacagagauuccuca

SEQ ID NO: 2312218 - RNA, 19 nt, Artificial Sequence
  Description of Artificial Sequence: Synthetic oligonucleotide
  Sense strand starting at position 1920 of SEQ ID NO: 1885050
gcccgaagaucuggaguga

SEQ ID NO: 2312219 - RNA, 19 nt, Artificial Sequence
  Description of Artificial Sequence: Synthetic oligonucleotide
  Antisense strand to SEQ ID NO: 2312218
ucacuccagaucuucgggc

SEQ ID NO: 2312220 - RNA, 19 nt, Artificial Sequence
  Description of Artificial Sequence: Synthetic oligonucleotide
  Sense strand starting at position 2032 of SEQ ID NO: 1885050
ccagccaugcucuaacagu

SEQ ID NO: 2312221 - RNA, 19 nt, Artificial Sequence
  Description of Artificial Sequence: Synthetic oligonucleotide
  Antisense strand to SEQ ID NO: 2312220
acuguuagagcauggcugg

SEQ ID NO: 2312222 - RNA, 19 nt, Artificial Sequence
  Description of Artificial Sequence: Synthetic oligonucleotide
  Sense strand starting at position 2133 of SEQ ID NO: 1885050
ccgggcuuuacauacagua

SEQ ID NO: 2312223 - RNA, 19 nt, Artificial Sequence
  Description of Artificial Sequence: Synthetic oligonucleotide
  Antisense strand to SEQ ID NO: 2312222
uacuguauguaaagcccgg

SEQ ID NO: 2312224 - RNA, 19 nt, Artificial Sequence
  Description of Artificial Sequence: Synthetic oligonucleotide
  Sense strand starting at position 2177 of SEQ ID NO: 1885050
guauguuauucacacguga

SEQ ID NO: 2312225 - RNA, 19 nt, Artificial Sequence
  Description of Artificial Sequence: Synthetic oligonucleotide
  Antisense strand to SEQ ID NO: 2312224
ucacgugugaauaacauac

SEQ ID NO: 2312226 - RNA, 19 nt, Artificial Sequence
  Description of Artificial Sequence: Synthetic oligonucleotide
  Sense strand starting at position 2196 of SEQ ID NO: 1885050
cacguagauuuagugucaa

SEQ ID NO: 2312227 - RNA, 19 nt, Artificial Sequence
  Description of Artificial Sequence: Synthetic oligonucleotide
  Antisense strand to SEQ ID NO: 2312226
uugacacuaaaucuacgug

SEQ ID NO: 2312228 - RNA, 19 nt, Artificial Sequence
  Description of Artificial Sequence: Synthetic oligonucleotide
  Sense strand starting at position 2200 of SEQ ID NO: 1885050
uagauuuagugucaaagaa

SEQ ID NO: 2312229 - RNA, 19 nt, Artificial Sequence
  Description of Artificial Sequence: Synthetic oligonucleotide
  Antisense strand to SEQ ID NO: 2312228
uucuuugacacuaaaucua

SEQ ID NO: 2312230 - RNA, 19 nt, Artificial Sequence
  Description of Artificial Sequence: Synthetic oligonucleotide
  Sense strand starting at position 3219 of SEQ ID NO: 1885050
gcuauaaggagccaugauu

SEQ ID NO: 2312231 - RNA, 19 nt, Artificial Sequence
  Description of Artificial Sequence: Synthetic oligonucleotide
  Antisense strand to SEQ ID NO: 2312230
aaucauggcuccuuauagc

SEQ ID NO: 2312232 - RNA, 19 nt, Artificial Sequence
  Description of Artificial Sequence: Synthetic oligonucleotide
  Sense strand starting at position 3266 of SEQ ID NO: 1885050
gagcaagaaucugacugaa

SEQ ID NO: 2312233 - RNA, 19 nt, Artificial Sequence
  Description of Artificial Sequence: Synthetic oligonucleotide
  Antisense strand to SEQ ID NO: 2312232
uucagucagauucuugcuc

SEQ ID NO: 2312234 - RNA, 19 nt, Artificial Sequence
  Description of Artificial Sequence: Synthetic oligonucleotide
  Sense strand starting at position 3303 of SEQ ID NO: 1885050
aggagcagacaaugucauu

SEQ ID NO: 2312235 - RNA, 19 nt, Artificial Sequence
  Description of Artificial Sequence: Synthetic oligonucleotide
  Antisense strand to SEQ ID NO: 2312234
aaugacauugucugcuccu

SEQ ID NO: 2312236 - RNA, 19 nt, Artificial Sequence
  Description of Artificial Sequence: Synthetic oligonucleotide
  Sense strand starting at position 3314 of SEQ ID NO: 1885050
augucauuccuagacuccu

SEQ ID NO: 2312237 - RNA, 19 nt, Artificial Sequence
  Description of Artificial Sequence: Synthetic oligonucleotide
  Antisense strand to SEQ ID NO: 2312236
aggagucuaggaaugacau

SEQ ID NO: 2312238 - RNA, 19 nt, Artificial Sequence
  Description of Artificial Sequence: Synthetic oligonucleotide
  Sense strand starting at position 3420 of SEQ ID NO: 1885050
gggacaagaucagauacau

SEQ ID NO: 2312239 - RNA, 19 nt, Artificial Sequence
  Description of Artificial Sequence: Synthetic oligonucleotide
  Antisense strand to SEQ ID NO: 2312238
auguaucugaucuuguccc

SEQ ID NO: 2312240 - RNA, 19 nt, Artificial Sequence
  Description of Artificial Sequence: Synthetic oligonucleotide
  Sense strand starting at position 3438 of SEQ ID NO: 1885050
uacuaugaauagcguguua

SEQ ID NO: 2312241 - RNA, 19 nt, Artificial Sequence
  Description of Artificial Sequence: Synthetic oligonucleotide
  Antisense strand to SEQ ID NO: 2312240
uaacacgcuauucauagua

SEQ ID NO: 2312242 - RNA, 19 nt, Artificial Sequence
  Description of Artificial Sequence: Synthetic oligonucleotide
  Sense strand starting at position 3440 of SEQ ID NO: 1885050
cuaugaauagcguguuaug

SEQ ID NO: 2312243 - RNA, 19 nt, Artificial Sequence
  Description of Artificial Sequence: Synthetic oligonucleotide
  Antisense strand to SEQ ID NO: 2312242
cauaacacgcuauucauag

SEQ ID NO: 2312244 - RNA, 19 nt, Artificial Sequence
  Description of Artificial Sequence: Synthetic oligonucleotide
  Sense strand starting at position 3459 of SEQ ID NO: 1885050
ggcacugguucuggguaua

SEQ ID NO: 2312245 - RNA, 19 nt, Artificial Sequence
  Description of Artificial Sequence: Synthetic oligonucleotide
  Antisense strand to SEQ ID NO: 2312244
uauacccagaaccagugcc

SEQ ID NO: 2312246 - RNA, 19 nt, Artificial Sequence
  Description of Artificial Sequence: Synthetic oligonucleotide
  Sense strand starting at position 3462 of SEQ ID NO: 1885050
acugguucuggguauaacu

SEQ ID NO: 2312247 - RNA, 19 nt, Artificial Sequence
  Description of Artificial Sequence: Synthetic oligonucleotide
  Antisense strand to SEQ ID NO: 2312246
aguuauacccagaaccagu

SEQ ID NO: 2312248 - RNA, 19 nt, Artificial Sequence
  Description of Artificial Sequence: Synthetic oligonucleotide
  Sense strand starting at position 3469 of SEQ ID NO: 1885050
cuggguauaacuugagauc

SEQ ID NO: 2312249 - RNA, 19 nt, Artificial Sequence
  Description of Artificial Sequence: Synthetic oligonucleotide
  Antisense strand to SEQ ID NO: 2312248
gaucucaaguuauacccag

SEQ ID NO: 2312250 - RNA, 19 nt, Artificial Sequence
  Description of Artificial Sequence: Synthetic oligonucleotide
  Sense strand starting at position 3529 of SEQ ID NO: 1885050
ggcugaacuguuuaccuca

SEQ ID NO: 2312251 - RNA, 19 nt, Artificial Sequence
  Description of Artificial Sequence: Synthetic oligonucleotide
  Antisense strand to SEQ ID NO: 2312250
ugagguaaacaguucagcc

SEQ ID NO: 2312252 - RNA, 19 nt, Artificial Sequence
  Description of Artificial Sequence: Synthetic oligonucleotide
  Sense strand starting at position 3553 of SEQ ID NO: 1885050
cgccaagaauguuuccaga

SEQ ID NO: 2312253 - RNA, 19 nt, Artificial Sequence
  Description of Artificial Sequence: Synthetic oligonucleotide
  Antisense strand to SEQ ID NO: 2312252
ucuggaaacauucuuggcg

SEQ ID NO: 2312254 - RNA, 19 nt, Artificial Sequence
  Description of Artificial Sequence: Synthetic oligonucleotide
  Sense strand starting at position 3556 of SEQ ID NO: 1885050
caagaauguuuccagagca

SEQ ID NO: 2312255 - RNA, 19 nt, Artificial Sequence
  Description of Artificial Sequence: Synthetic oligonucleotide
  Antisense strand to SEQ ID NO: 2312254
ugcucuggaaacauucuug

SEQ ID NO: 2312256 - RNA, 19 nt, Artificial Sequence
  Description of Artificial Sequence: Synthetic oligonucleotide
  Sense strand starting at position 3856 of SEQ ID NO: 1885050
ggaccaaggucauaagaaa

SEQ ID NO: 2312257 - RNA, 19 nt, Artificial Sequence
  Description of Artificial Sequence: Synthetic oligonucleotide
  Antisense strand to SEQ ID NO: 2312256
uuucuuaugaccuuggucc

SEQ ID NO: 2312258 - RNA, 19 nt, Artificial Sequence
  Description of Artificial Sequence: Synthetic oligonucleotide
  Sense strand starting at position 141 of SEQ ID NO: 1885051
ggaggauucgcagcguggu

SEQ ID NO: 2312259 - RNA, 19 nt, Artificial Sequence
  Description of Artificial Sequence: Synthetic oligonucleotide
  Antisense strand to SEQ ID NO: 2312258
accacgcugcgaauccucc

SEQ ID NO: 2312260 - RNA, 19 nt, Artificial Sequence
  Description of Artificial Sequence: Synthetic oligonucleotide
  Sense strand starting at position 244 of SEQ ID NO: 1885051
cauggaauguugcuaagga

SEQ ID NO: 2312261 - RNA, 19 nt, Artificial Sequence
  Description of Artificial Sequence: Synthetic oligonucleotide
  Antisense strand to SEQ ID NO: 2312260
uccuuagcaacauuccaug

SEQ ID NO: 2312262 - RNA, 19 nt, Artificial Sequence
  Description of Artificial Sequence: Synthetic oligonucleotide
  Sense strand starting at position 245 of SEQ ID NO: 1885051
auggaauguugcuaaggaa

SEQ ID NO: 2312263 - RNA, 19 nt, Artificial Sequence
  Description of Artificial Sequence: Synthetic oligonucleotide
  Antisense strand to SEQ ID NO: 2312262
uuccuuagcaacauuccau

SEQ ID NO: 2312264 - RNA, 19 nt, Artificial Sequence
  Description of Artificial Sequence: Synthetic oligonucleotide
  Sense strand starting at position 248 of SEQ ID NO: 1885051
gaauguugcuaaggaagag

SEQ ID NO: 2312265 - RNA, 19 nt, Artificial Sequence
  Description of Artificial Sequence: Synthetic oligonucleotide
  Antisense strand to SEQ ID NO: 2312264
cucuuccuuagcaacauuc

SEQ ID NO: 2312266 - RNA, 19 nt, Artificial Sequence
  Description of Artificial Sequence: Synthetic oligonucleotide
  Sense strand starting at position 368 of SEQ ID NO: 1885051
guuaccaauaucugaggga

SEQ ID NO: 2312267 - RNA, 19 nt, Artificial Sequence
  Description of Artificial Sequence: Synthetic oligonucleotide
  Antisense strand to SEQ ID NO: 2312266
ucccucagauauugguaac

SEQ ID NO: 2312268 - RNA, 19 nt, Artificial Sequence
  Description of Artificial Sequence: Synthetic oligonucleotide
  Sense strand starting at position 369 of SEQ ID NO: 1885051
uuaccaauaucugagggaa

SEQ ID NO: 2312269 - RNA, 19 nt, Artificial Sequence
  Description of Artificial Sequence: Synthetic oligonucleotide
  Antisense strand to SEQ ID NO: 2312268
uucccucagauauugguaa

SEQ ID NO: 2312270 - RNA, 19 nt, Artificial Sequence
  Description of Artificial Sequence: Synthetic oligonucleotide
  Sense strand starting at position 849 of SEQ ID NO: 1885051
auggucagauggucugaua

SEQ ID NO: 2312271 - RNA, 19 nt, Artificial Sequence
  Description of Artificial Sequence: Synthetic oligonucleotide
  Antisense strand to SEQ ID NO: 2312270
uaucagaccaucugaccau

SEQ ID NO: 2312272 - RNA, 19 nt, Artificial Sequence
  Description of Artificial Sequence: Synthetic oligonucleotide
  Sense strand starting at position 1034 of SEQ ID NO: 1885051
gauggagaauuugggaaga

SEQ ID NO: 2312273 - RNA, 19 nt, Artificial Sequence
  Description of Artificial Sequence: Synthetic oligonucleotide
  Antisense strand to SEQ ID NO: 2312272
ucuucccaaauucuccauc

SEQ ID NO: 2312274 - RNA, 19 nt, Artificial Sequence
  Description of Artificial Sequence: Synthetic oligonucleotide
  Sense strand starting at position 1067 of SEQ ID NO: 1885051
cacagaaagcugugcaauc

SEQ ID NO: 2312275 - RNA, 19 nt, Artificial Sequence
  Description of Artificial Sequence: Synthetic oligonucleotide
  Antisense strand to SEQ ID NO: 2312274
gauugcacagcuuucugug

SEQ ID NO: 2312276 - RNA, 19 nt, Artificial Sequence
  Description of Artificial Sequence: Synthetic oligonucleotide
  Sense strand starting at position 1068 of SEQ ID NO: 1885051
acagaaagcugugcaaucu

SEQ ID NO: 2312277 - RNA, 19 nt, Artificial Sequence
  Description of Artificial Sequence: Synthetic oligonucleotide
  Antisense strand to SEQ ID NO: 2312276
agauugcacagcuuucugu

SEQ ID NO: 2312278 - RNA, 19 nt, Artificial Sequence
  Description of Artificial Sequence: Synthetic oligonucleotide
  Sense strand starting at position 1092 of SEQ ID NO: 1885051
gagugaggcagucacuaaa

SEQ ID NO: 2312279 - RNA, 19 nt, Artificial Sequence
  Description of Artificial Sequence: Synthetic oligonucleotide
  Antisense strand to SEQ ID NO: 2312278
uuuagugacugccucacuc

SEQ ID NO: 2312280 - RNA, 19 nt, Artificial Sequence
  Description of Artificial Sequence: Synthetic oligonucleotide
  Sense strand starting at position 1144 of SEQ ID NO: 1885051
ucgccugugccauaagcaa

SEQ ID NO: 2312281 - RNA, 19 nt, Artificial Sequence
  Description of Artificial Sequence: Synthetic oligonucleotide
  Antisense strand to SEQ ID NO: 2312280
uugcuuauggcacaggcga

SEQ ID NO: 2312282 - RNA, 19 nt, Artificial Sequence
  Description of Artificial Sequence: Synthetic oligonucleotide
  Sense strand starting at position 1192 of SEQ ID NO: 1885051
gugugaaccuauuauugag

SEQ ID NO: 2312283 - RNA, 19 nt, Artificial Sequence
  Description of Artificial Sequence: Synthetic oligonucleotide
  Antisense strand to SEQ ID NO: 2312282
cucaauaauagguucacac

SEQ ID NO: 2312284 - RNA, 19 nt, Artificial Sequence
  Description of Artificial Sequence: Synthetic oligonucleotide
  Sense strand starting at position 1194 of SEQ ID NO: 1885051
gugaaccuauuauugagaa

SEQ ID NO: 2312285 - RNA, 19 nt, Artificial Sequence
  Description of Artificial Sequence: Synthetic oligonucleotide
  Antisense strand to SEQ ID NO: 2312284
uucucaauaauagguucac

SEQ ID NO: 2312286 - RNA, 19 nt, Artificial Sequence
  Description of Artificial Sequence: Synthetic oligonucleotide
  Sense strand starting at position 1195 of SEQ ID NO: 1885051
ugaaccuauuauugagaaa

SEQ ID NO: 2312287 - RNA, 19 nt, Artificial Sequence
  Description of Artificial Sequence: Synthetic oligonucleotide
  Antisense strand to SEQ ID NO: 2312286
uuucucaauaauagguuca

SEQ ID NO: 2312288 - RNA, 19 nt, Artificial Sequence
  Description of Artificial Sequence: Synthetic oligonucleotide
  Sense strand starting at position 1198 of SEQ ID NO: 1885051
accuauuauugagaaacgu

SEQ ID NO: 2312289 - RNA, 19 nt, Artificial Sequence
  Description of Artificial Sequence: Synthetic oligonucleotide
  Antisense strand to SEQ ID NO: 2312288
acguuucucaauaauaggu

SEQ ID NO: 2312290 - RNA, 19 nt, Artificial Sequence
  Description of Artificial Sequence: Synthetic oligonucleotide
  Sense strand starting at position 1204 of SEQ ID NO: 1885051
uauugagaaacguggagau

SEQ ID NO: 2312291 - RNA, 19 nt, Artificial Sequence
  Description of Artificial Sequence: Synthetic oligonucleotide
  Antisense strand to SEQ ID NO: 2312290
aucuccacguuucucaaua

SEQ ID NO: 2312292 - RNA, 19 nt, Artificial Sequence
  Description of Artificial Sequence: Synthetic oligonucleotide
  Sense strand starting at position 1217 of SEQ ID NO: 1885051
ggagaugacuaacagaaga

SEQ ID NO: 2312293 - RNA, 19 nt, Artificial Sequence
  Description of Artificial Sequence: Synthetic oligonucleotide
  Antisense strand to SEQ ID NO: 2312292
ucuucuguuagucaucucc

SEQ ID NO: 2312294 - RNA, 19 nt, Artificial Sequence
  Description of Artificial Sequence: Synthetic oligonucleotide
  Sense strand starting at position 1516 of SEQ ID NO: 1885051
cuggguaggcggcagauau

SEQ ID NO: 2312295 - RNA, 19 nt, Artificial Sequence
  Description of Artificial Sequence: Synthetic oligonucleotide
  Antisense strand to SEQ ID NO: 2312294
auaucugccgccuacccag

SEQ ID NO: 2312296 - RNA, 19 nt, Artificial Sequence
  Description of Artificial Sequence: Synthetic oligonucleotide
  Sense strand starting at position 1520 of SEQ ID NO: 1885051
guaggcggcagauaucaaa

SEQ ID NO: 2312297 - RNA, 19 nt, Artificial Sequence
  Description of Artificial Sequence: Synthetic oligonucleotide
  Antisense strand to SEQ ID NO: 2312296
uuugauaucugccgccuac

SEQ ID NO: 2312298 - RNA, 19 nt, Artificial Sequence
  Description of Artificial Sequence: Synthetic oligonucleotide
  Sense strand starting at position 1827 of SEQ ID NO: 1885051
uucugugguccgggaccua

SEQ ID NO: 2312299 - RNA, 19 nt, Artificial Sequence
  Description of Artificial Sequence: Synthetic oligonucleotide
  Antisense strand to SEQ ID NO: 2312298
uaggucccggaccacagaa

SEQ ID NO: 2312300 - RNA, 19 nt, Artificial Sequence
  Description of Artificial Sequence: Synthetic oligonucleotide
  Sense strand starting at position 2029 of SEQ ID NO: 1885051
gguugugagagauggagga

SEQ ID NO: 2312301 - RNA, 19 nt, Artificial Sequence
  Description of Artificial Sequence: Synthetic oligonucleotide
  Antisense strand to SEQ ID NO: 2312300
uccuccaucucucacaacc

SEQ ID NO: 2312302 - RNA, 19 nt, Artificial Sequence
  Description of Artificial Sequence: Synthetic oligonucleotide
  Sense strand starting at position 2075 of SEQ ID NO: 1885051
acuaauuccugacugcuga

SEQ ID NO: 2312303 - RNA, 19 nt, Artificial Sequence
  Description of Artificial Sequence: Synthetic oligonucleotide
  Antisense strand to SEQ ID NO: 2312302
ucagcagucaggaauuagu

SEQ ID NO: 2312304 - RNA, 19 nt, Artificial Sequence
  Description of Artificial Sequence: Synthetic oligonucleotide
  Sense strand starting at position 2076 of SEQ ID NO: 1885051
cuaauuccugacugcugaa

SEQ ID NO: 2312305 - RNA, 19 nt, Artificial Sequence
  Description of Artificial Sequence: Synthetic oligonucleotide
  Antisense strand to SEQ ID NO: 2312304
uucagcagucaggaauuag

SEQ ID NO: 2312306 - RNA, 19 nt, Artificial Sequence
  Description of Artificial Sequence: Synthetic oligonucleotide
  Sense strand starting at position 2158 of SEQ ID NO: 1885051
gcugggagucgggaaaguu

SEQ ID NO: 2312307 - RNA, 19 nt, Artificial Sequence
  Description of Artificial Sequence: Synthetic oligonucleotide
  Antisense strand to SEQ ID NO: 2312306
aacuuucccgacucccagc

SEQ ID NO: 2312308 - RNA, 19 nt, Artificial Sequence
  Description of Artificial Sequence: Synthetic oligonucleotide
  Sense strand starting at position 2440 of SEQ ID NO: 1885051
agaauuauauacucugggu

SEQ ID NO: 2312309 - RNA, 19 nt, Artificial Sequence
  Description of Artificial Sequence: Synthetic oligonucleotide
  Antisense strand to SEQ ID NO: 2312308
acccagaguauauaauucu

SEQ ID NO: 2312310 - RNA, 19 nt, Artificial Sequence
  Description of Artificial Sequence: Synthetic oligonucleotide
  Sense strand starting at position 2516 of SEQ ID NO: 1885051
gagcucuuaccaugaugau

SEQ ID NO: 2312311 - RNA, 19 nt, Artificial Sequence
  Description of Artificial Sequence: Synthetic oligonucleotide
  Antisense strand to SEQ ID NO: 2312310
aucaucaugguaagagcuc

SEQ ID NO: 2312312 - RNA, 19 nt, Artificial Sequence
  Description of Artificial Sequence: Synthetic oligonucleotide
  Sense strand starting at position 2517 of SEQ ID NO: 1885051
agcucuuaccaugaugaug

SEQ ID NO: 2312313 - RNA, 19 nt, Artificial Sequence
  Description of Artificial Sequence: Synthetic oligonucleotide
  Antisense strand to SEQ ID NO: 2312312
caucaucaugguaagagcu

SEQ ID NO: 2312314 - RNA, 19 nt, Artificial Sequence
  Description of Artificial Sequence: Synthetic oligonucleotide
  Sense strand starting at position 2590 of SEQ ID NO: 1885051
aaagaagcauccugaugag

SEQ ID NO: 2312315 - RNA, 19 nt, Artificial Sequence
  Description of Artificial Sequence: Synthetic oligonucleotide
  Antisense strand to SEQ ID NO: 2312314
cucaucaggaugcuucuuu

SEQ ID NO: 2312316 - RNA, 19 nt, Artificial Sequence
  Description of Artificial Sequence: Synthetic oligonucleotide
  Sense strand starting at position 2699 of SEQ ID NO: 1885051
gguugugagcuccaggaaa

SEQ ID NO: 2312317 - RNA, 19 nt, Artificial Sequence
  Description of Artificial Sequence: Synthetic oligonucleotide
  Antisense strand to SEQ ID NO: 2312316
uuuccuggagcucacaacc

SEQ ID NO: 2312318 - RNA, 19 nt, Artificial Sequence
  Description of Artificial Sequence: Synthetic oligonucleotide
  Sense strand starting at position 2701 of SEQ ID NO: 1885051
uugugagcuccaggaaaga

SEQ ID NO: 2312319 - RNA, 19 nt, Artificial Sequence
  Description of Artificial Sequence: Synthetic oligonucleotide
  Antisense strand to SEQ ID NO: 2312318
ucuuuccuggagcucacaa

SEQ ID NO: 2312320 - RNA, 19 nt, Artificial Sequence
  Description of Artificial Sequence: Synthetic oligonucleotide
  Sense strand starting at position 2823 of SEQ ID NO: 1885051
ggaucuuacugggugcaga

SEQ ID NO: 2312321 - RNA, 19 nt, Artificial Sequence
  Description of Artificial Sequence: Synthetic oligonucleotide
  Antisense strand to SEQ ID NO: 2312320
ucugcacccaguaagaucc

SEQ ID NO: 2312322 - RNA, 19 nt, Artificial Sequence
  Description of Artificial Sequence: Synthetic oligonucleotide
  Sense strand starting at position 2824 of SEQ ID NO: 1885051
gaucuuacugggugcagau

SEQ ID NO: 2312323 - RNA, 19 nt, Artificial Sequence
  Description of Artificial Sequence: Synthetic oligonucleotide
  Antisense strand to SEQ ID NO: 2312322
aucugcacccaguaagauc

SEQ ID NO: 2312324 - RNA, 19 nt, Artificial Sequence
  Description of Artificial Sequence: Synthetic oligonucleotide
  Sense strand starting at position 2887 of SEQ ID NO: 1885051
ggcuguguucgccucuuca

SEQ ID NO: 2312325 - RNA, 19 nt, Artificial Sequence
  Description of Artificial Sequence: Synthetic oligonucleotide
  Antisense strand to SEQ ID NO: 2312324
ugaagaggcgaacacagcc

SEQ ID NO: 2312326 - RNA, 19 nt, Artificial Sequence
  Description of Artificial Sequence: Synthetic oligonucleotide
  Sense strand starting at position 3091 of SEQ ID NO: 1885051
gagugagcuccaggaucca

SEQ ID NO: 2312327 - RNA, 19 nt, Artificial Sequence
  Description of Artificial Sequence: Synthetic oligonucleotide
  Antisense strand to SEQ ID NO: 2312326
uggauccuggagcucacuc

SEQ ID NO: 2312328 - RNA, 19 nt, Artificial Sequence
  Description of Artificial Sequence: Synthetic oligonucleotide
  Sense strand starting at position 3478 of SEQ ID NO: 1885051
ccgaguucuggccaaggau

SEQ ID NO: 2312329 - RNA, 19 nt, Artificial Sequence
  Description of Artificial Sequence: Synthetic oligonucleotide
  Antisense strand to SEQ ID NO: 2312328
auccuuggccagaacucgg

SEQ ID NO: 2312330 - RNA, 19 nt, Artificial Sequence
  Description of Artificial Sequence: Synthetic oligonucleotide
  Sense strand starting at position 3487 of SEQ ID NO: 1885051
ggccaaggauccuucuguu

SEQ ID NO: 2312331 - RNA, 19 nt, Artificial Sequence
  Description of Artificial Sequence: Synthetic oligonucleotide
  Antisense strand to SEQ ID NO: 2312330
aacagaaggauccuuggcc

SEQ ID NO: 2312332 - RNA, 19 nt, Artificial Sequence
  Description of Artificial Sequence: Synthetic oligonucleotide
  Sense strand starting at position 3564 of SEQ ID NO: 1885051
aaggaaugcccuuggcuau

SEQ ID NO: 2312333 - RNA, 19 nt, Artificial Sequence
  Description of Artificial Sequence: Synthetic oligonucleotide
  Antisense strand to SEQ ID NO: 2312332
auagccaagggcauuccuu

SEQ ID NO: 2312334 - RNA, 19 nt, Artificial Sequence
  Description of Artificial Sequence: Synthetic oligonucleotide
  Sense strand starting at position 3565 of SEQ ID NO: 1885051
aggaaugcccuuggcuauu

SEQ ID NO: 2312335 - RNA, 19 nt, Artificial Sequence
  Description of Artificial Sequence: Synthetic oligonucleotide
  Antisense strand to SEQ ID NO: 2312334
aauagccaagggcauuccu

SEQ ID NO: 2312336 - RNA, 19 nt, Artificial Sequence
  Description of Artificial Sequence: Synthetic oligonucleotide
  Sense strand starting at position 3882 of SEQ ID NO: 1885051
uauggcuguucuguuaaua

SEQ ID NO: 2312337 - RNA, 19 nt, Artificial Sequence
  Description of Artificial Sequence: Synthetic oligonucleotide
  Antisense strand to SEQ ID NO: 2312336
uauuaacagaacagccaua

SEQ ID NO: 2312338 - RNA, 19 nt, Artificial Sequence
  Description of Artificial Sequence: Synthetic oligonucleotide
  Sense strand starting at position 1366 of SEQ ID NO: 1885052
ggaggucucccggauggca

SEQ ID NO: 2312339 - RNA, 19 nt, Artificial Sequence
  Description of Artificial Sequence: Synthetic oligonucleotide
  Antisense strand to SEQ ID NO: 2312338
ugccauccgggagaccucc

SEQ ID NO: 2312340 - RNA, 19 nt, Artificial Sequence
  Description of Artificial Sequence: Synthetic oligonucleotide
  Sense strand starting at position 2352 of SEQ ID NO: 1885052
guggguacugccugcauga

SEQ ID NO: 2312341 - RNA, 19 nt, Artificial Sequence
  Description of Artificial Sequence: Synthetic oligonucleotide
  Antisense strand to SEQ ID NO: 2312340
ucaugcaggcaguacccac

SEQ ID NO: 2312342 - RNA, 19 nt, Artificial Sequence
  Description of Artificial Sequence: Synthetic oligonucleotide
  Sense strand starting at position 2573 of SEQ ID NO: 1885052
ccagguuugacagaagcca

SEQ ID NO: 2312343 - RNA, 19 nt, Artificial Sequence
  Description of Artificial Sequence: Synthetic oligonucleotide
  Antisense strand to SEQ ID NO: 2312342
uggcuucugucaaaccugg

SEQ ID NO: 2312344 - RNA, 19 nt, Artificial Sequence
  Description of Artificial Sequence: Synthetic oligonucleotide
  Sense strand starting at position 2698 of SEQ ID NO: 1885052
gcguguccagucagaguaa

SEQ ID NO: 2312345 - RNA, 19 nt, Artificial Sequence
  Description of Artificial Sequence: Synthetic oligonucleotide
  Antisense strand to SEQ ID NO: 2312344
uuacucugacuggacacgc

SEQ ID NO: 2312346 - RNA, 19 nt, Artificial Sequence
  Description of Artificial Sequence: Synthetic oligonucleotide
  Sense strand starting at position 2732 of SEQ ID NO: 1885052
ccacaauucggaggagguu

SEQ ID NO: 2312347 - RNA, 19 nt, Artificial Sequence
  Description of Artificial Sequence: Synthetic oligonucleotide
  Antisense strand to SEQ ID NO: 2312346
aaccuccuccgaauugugg

SEQ ID NO: 2312348 - RNA, 19 nt, Artificial Sequence
  Description of Artificial Sequence: Synthetic oligonucleotide
  Sense strand starting at position 2902 of SEQ ID NO: 1885052
gccuuuaucucagagcuuu

SEQ ID NO: 2312349 - RNA, 19 nt, Artificial Sequence
  Description of Artificial Sequence: Synthetic oligonucleotide
  Antisense strand to SEQ ID NO: 2312348
aaagcucugagauaaaggc

SEQ ID NO: 2312350 - RNA, 19 nt, Artificial Sequence
  Description of Artificial Sequence: Synthetic oligonucleotide
  Sense strand starting at position 2933 of SEQ ID NO: 1885052
gauagaugguccucacuuc

SEQ ID NO: 2312351 - RNA, 19 nt, Artificial Sequence
  Description of Artificial Sequence: Synthetic oligonucleotide
  Antisense strand to SEQ ID NO: 2312350
gaagugaggaccaucuauc

SEQ ID NO: 2312352 - RNA, 19 nt, Artificial Sequence
  Description of Artificial Sequence: Synthetic oligonucleotide
  Sense strand starting at position 2940 of SEQ ID NO: 1885052
gguccucacuucuuaaugu

SEQ ID NO: 2312353 - RNA, 19 nt, Artificial Sequence
  Description of Artificial Sequence: Synthetic oligonucleotide
  Antisense strand to SEQ ID NO: 2312352
acauuaagaagugaggacc

SEQ ID NO: 2312354 - RNA, 19 nt, Artificial Sequence
  Description of Artificial Sequence: Synthetic oligonucleotide
  Sense strand starting at position 3146 of SEQ ID NO: 1885052
gggauucagugcuguuggu

SEQ ID NO: 2312355 - RNA, 19 nt, Artificial Sequence
  Description of Artificial Sequence: Synthetic oligonucleotide
  Antisense strand to SEQ ID NO: 2312354
accaacagcacugaauccc

SEQ ID NO: 2312356 - RNA, 19 nt, Artificial Sequence
  Description of Artificial Sequence: Synthetic oligonucleotide
  Sense strand starting at position 3191 of SEQ ID NO: 1885052
gagagcagguuucugguaa

SEQ ID NO: 2312357 - RNA, 19 nt, Artificial Sequence
  Description of Artificial Sequence: Synthetic oligonucleotide
  Antisense strand to SEQ ID NO: 2312356
uuaccagaaaccugcucuc

SEQ ID NO: 2312358 - RNA, 19 nt, Artificial Sequence
  Description of Artificial Sequence: Synthetic oligonucleotide
  Sense strand starting at position 3192 of SEQ ID NO: 1885052
agagcagguuucugguaaa

SEQ ID NO: 2312359 - RNA, 19 nt, Artificial Sequence
  Description of Artificial Sequence: Synthetic oligonucleotide
  Antisense strand to SEQ ID NO: 2312358
uuuaccagaaaccugcucu

SEQ ID NO: 2312360 - RNA, 19 nt, Artificial Sequence
  Description of Artificial Sequence: Synthetic oligonucleotide
  Sense strand starting at position 3195 of SEQ ID NO: 1885052
gcagguuucugguaaagac

SEQ ID NO: 2312361 - RNA, 19 nt, Artificial Sequence
  Description of Artificial Sequence: Synthetic oligonucleotide
  Antisense strand to SEQ ID NO: 2312360
gucuuuaccagaaaccugc

SEQ ID NO: 2312362 - RNA, 19 nt, Artificial Sequence
  Description of Artificial Sequence: Synthetic oligonucleotide
  Sense strand starting at position 3219 of SEQ ID NO: 1885052
gggcgucaucuuuagguua

SEQ ID NO: 2312363 - RNA, 19 nt, Artificial Sequence
  Description of Artificial Sequence: Synthetic oligonucleotide
  Antisense strand to SEQ ID NO: 2312362
uaaccuaaagaugacgccc

SEQ ID NO: 2312364 - RNA, 19 nt, Artificial Sequence
  Description of Artificial Sequence: Synthetic oligonucleotide
  Sense strand starting at position 3221 of SEQ ID NO: 1885052
gcgucaucuuuagguuacu

SEQ ID NO: 2312365 - RNA, 19 nt, Artificial Sequence
  Description of Artificial Sequence: Synthetic oligonucleotide
  Antisense strand to SEQ ID NO: 2312364
aguaaccuaaagaugacgc

SEQ ID NO: 2312366 - RNA, 19 nt, Artificial Sequence
  Description of Artificial Sequence: Synthetic oligonucleotide
  Sense strand starting at position 3254 of SEQ ID NO: 1885052
gcccuaaucuuagggaccu

SEQ ID NO: 2312367 - RNA, 19 nt, Artificial Sequence
  Description of Artificial Sequence: Synthetic oligonucleotide
  Antisense strand to SEQ ID NO: 2312366
aggucccuaagauuagggc

SEQ ID NO: 2312368 - RNA, 19 nt, Artificial Sequence
  Description of Artificial Sequence: Synthetic oligonucleotide
  Sense strand starting at position 3448 of SEQ ID NO: 1885052
agaguacacugccucaaau

SEQ ID NO: 2312369 - RNA, 19 nt, Artificial Sequence
  Description of Artificial Sequence: Synthetic oligonucleotide
  Antisense strand to SEQ ID NO: 2312368
auuugaggcaguguacucu

SEQ ID NO: 2312370 - RNA, 19 nt, Artificial Sequence
  Description of Artificial Sequence: Synthetic oligonucleotide
  Sense strand starting at position 3476 of SEQ ID NO: 1885052
gggagaggcugaggaauua

SEQ ID NO: 2312371 - RNA, 19 nt, Artificial Sequence
  Description of Artificial Sequence: Synthetic oligonucleotide
  Antisense strand to SEQ ID NO: 2312370
uaauuccucagccucuccc

SEQ ID NO: 2312372 - RNA, 19 nt, Artificial Sequence
  Description of Artificial Sequence: Synthetic oligonucleotide
  Sense strand starting at position 3932 of SEQ ID NO: 1885052
aacuucuggugagauuaau

SEQ ID NO: 2312373 - RNA, 19 nt, Artificial Sequence
  Description of Artificial Sequence: Synthetic oligonucleotide
  Antisense strand to SEQ ID NO: 2312372
auuaaucucaccagaaguu

SEQ ID NO: 2312374 - RNA, 19 nt, Artificial Sequence
  Description of Artificial Sequence: Synthetic oligonucleotide
  Sense strand starting at position 3938 of SEQ ID NO: 1885052
uggugagauuaaugaagga

SEQ ID NO: 2312375 - RNA, 19 nt, Artificial Sequence
  Description of Artificial Sequence: Synthetic oligonucleotide
  Antisense strand to SEQ ID NO: 2312374
uccuucauuaaucucacca

SEQ ID NO: 2312376 - RNA, 19 nt, Artificial Sequence
  Description of Artificial Sequence: Synthetic oligonucleotide
  Sense strand starting at position 40 of SEQ ID NO: 1885053
ggagucuccaucuggacuu

SEQ ID NO: 2312377 - RNA, 19 nt, Artificial Sequence
  Description of Artificial Sequence: Synthetic oligonucleotide
  Antisense strand to SEQ ID NO: 2312376
aaguccagauggagacucc

SEQ ID NO: 2312378 - RNA, 19 nt, Artificial Sequence
  Description of Artificial Sequence: Synthetic oligonucleotide
  Sense strand starting at position 57 of SEQ ID NO: 1885053
uugagugucugggucacua

SEQ ID NO: 2312379 - RNA, 19 nt, Artificial Sequence
  Description of Artificial Sequence: Synthetic oligonucleotide
  Antisense strand to SEQ ID NO: 2312378
uagugacccagacacucaa

SEQ ID NO: 2312380 - RNA, 19 nt, Artificial Sequence
  Description of Artificial Sequence: Synthetic oligonucleotide
  Sense strand starting at position 59 of SEQ ID NO: 1885053
gagugucugggucacuaaa

SEQ ID NO: 2312381 - RNA, 19 nt, Artificial Sequence
  Description of Artificial Sequence: Synthetic oligonucleotide
  Antisense strand to SEQ ID NO: 2312380
uuuagugacccagacacuc

SEQ ID NO: 2312382 - RNA, 19 nt, Artificial Sequence
  Description of Artificial Sequence: Synthetic oligonucleotide
  Sense strand starting at position 131 of SEQ ID NO: 1885053
ggcccuuucccuuguccua

SEQ ID NO: 2312383 - RNA, 19 nt, Artificial Sequence
  Description of Artificial Sequence: Synthetic oligonucleotide
  Antisense strand to SEQ ID NO: 2312382
uaggacaagggaaagggcc

SEQ ID NO: 2312384 - RNA, 19 nt, Artificial Sequence
  Description of Artificial Sequence: Synthetic oligonucleotide
  Sense strand starting at position 167 of SEQ ID NO: 1885053
agggccauuucugagcauu

SEQ ID NO: 2312385 - RNA, 19 nt, Artificial Sequence
  Description of Artificial Sequence: Synthetic oligonucleotide
  Antisense strand to SEQ ID NO: 2312384
aaugcucagaaauggcccu

SEQ ID NO: 2312386 - RNA, 19 nt, Artificial Sequence
  Description of Artificial Sequence: Synthetic oligonucleotide
  Sense strand starting at position 318 of SEQ ID NO: 1885053
cagcuaggcucugugaacu

SEQ ID NO: 2312387 - RNA, 19 nt, Artificial Sequence
  Description of Artificial Sequence: Synthetic oligonucleotide
  Antisense strand to SEQ ID NO: 2312386
aguucacagagccuagcug

SEQ ID NO: 2312388 - RNA, 19 nt, Artificial Sequence
  Description of Artificial Sequence: Synthetic oligonucleotide
  Sense strand starting at position 494 of SEQ ID NO: 1885053
aguucuaaagcaggaagau

SEQ ID NO: 2312389 - RNA, 19 nt, Artificial Sequence
  Description of Artificial Sequence: Synthetic oligonucleotide
  Antisense strand to SEQ ID NO: 2312388
aucuuccugcuuuagaacu

SEQ ID NO: 2312390 - RNA, 19 nt, Artificial Sequence
  Description of Artificial Sequence: Synthetic oligonucleotide
  Sense strand starting at position 752 of SEQ ID NO: 1885053
gccuuauggcauuagaauc

SEQ ID NO: 2312391 - RNA, 19 nt, Artificial Sequence
  Description of Artificial Sequence: Synthetic oligonucleotide
  Antisense strand to SEQ ID NO: 2312390
gauucuaaugccauaaggc

SEQ ID NO: 2312392 - RNA, 19 nt, Artificial Sequence
  Description of Artificial Sequence: Synthetic oligonucleotide
  Sense strand starting at position 813 of SEQ ID NO: 1885053
acaaacugucugggaacua

SEQ ID NO: 2312393 - RNA, 19 nt, Artificial Sequence
  Description of Artificial Sequence: Synthetic oligonucleotide
  Antisense strand to SEQ ID NO: 2312392
uaguucccagacaguuugu

SEQ ID NO: 2312394 - RNA, 19 nt, Artificial Sequence
  Description of Artificial Sequence: Synthetic oligonucleotide
  Sense strand starting at position 901 of SEQ ID NO: 1885053
aagguuaagucuuccagga

SEQ ID NO: 2312395 - RNA, 19 nt, Artificial Sequence
  Description of Artificial Sequence: Synthetic oligonucleotide
  Antisense strand to SEQ ID NO: 2312394
uccuggaagacuuaaccuu

SEQ ID NO: 2312396 - RNA, 19 nt, Artificial Sequence
  Description of Artificial Sequence: Synthetic oligonucleotide
  Sense strand starting at position 1079 of SEQ ID NO: 1885053
gggucuucacgguagugaa

SEQ ID NO: 2312397 - RNA, 19 nt, Artificial Sequence
  Description of Artificial Sequence: Synthetic oligonucleotide
  Antisense strand to SEQ ID NO: 2312396
uucacuaccgugaagaccc

SEQ ID NO: 2312398 - RNA, 19 nt, Artificial Sequence
  Description of Artificial Sequence: Synthetic oligonucleotide
  Sense strand starting at position 1104 of SEQ ID NO: 1885053
aacgaaguuucuccagcau

SEQ ID NO: 2312399 - RNA, 19 nt, Artificial Sequence
  Description of Artificial Sequence: Synthetic oligonucleotide
  Antisense strand to SEQ ID NO: 2312398
augcuggagaaacuucguu

SEQ ID NO: 2312400 - RNA, 19 nt, Artificial Sequence
  Description of Artificial Sequence: Synthetic oligonucleotide
  Sense strand starting at position 1117 of SEQ ID NO: 1885053
cagcaugauuuccagagag

SEQ ID NO: 2312401 - RNA, 19 nt, Artificial Sequence
  Description of Artificial Sequence: Synthetic oligonucleotide
  Antisense strand to SEQ ID NO: 2312400
cucucuggaaaucaugcug

SEQ ID NO: 2312402 - RNA, 19 nt, Artificial Sequence
  Description of Artificial Sequence: Synthetic oligonucleotide
  Sense strand starting at position 1284 of SEQ ID NO: 1885053
agguuugccuccuugggua

SEQ ID NO: 2312403 - RNA, 19 nt, Artificial Sequence
  Description of Artificial Sequence: Synthetic oligonucleotide
  Antisense strand to SEQ ID NO: 2312402
uacccaaggaggcaaaccu

SEQ ID NO: 2312404 - RNA, 19 nt, Artificial Sequence
  Description of Artificial Sequence: Synthetic oligonucleotide
  Sense strand starting at position 1357 of SEQ ID NO: 1885053
cgagauguucuuggaggga

SEQ ID NO: 2312405 - RNA, 19 nt, Artificial Sequence
  Description of Artificial Sequence: Synthetic oligonucleotide
  Antisense strand to SEQ ID NO: 2312404
ucccuccaagaacaucucg

SEQ ID NO: 2312406 - RNA, 19 nt, Artificial Sequence
  Description of Artificial Sequence: Synthetic oligonucleotide
  Sense strand starting at position 1421 of SEQ ID NO: 1885053
ggguuugucugcccagcaa

SEQ ID NO: 2312407 - RNA, 19 nt, Artificial Sequence
  Description of Artificial Sequence: Synthetic oligonucleotide
  Antisense strand to SEQ ID NO: 2312406
uugcugggcagacaaaccc

SEQ ID NO: 2312408 - RNA, 19 nt, Artificial Sequence
  Description of Artificial Sequence: Synthetic oligonucleotide
  Sense strand starting at position 1485 of SEQ ID NO: 1885053
guuagaagauuugaagcau

SEQ ID NO: 2312409 - RNA, 19 nt, Artificial Sequence
  Description of Artificial Sequence: Synthetic oligonucleotide
  Antisense strand to SEQ ID NO: 2312408
augcuucaaaucuucuaac

SEQ ID NO: 2312410 - RNA, 19 nt, Artificial Sequence
  Description of Artificial Sequence: Synthetic oligonucleotide
  Sense strand starting at position 1574 of SEQ ID NO: 1885053
gggcccuaauccucaauga

SEQ ID NO: 2312411 - RNA, 19 nt, Artificial Sequence
  Description of Artificial Sequence: Synthetic oligonucleotide
  Antisense strand to SEQ ID NO: 2312410
ucauugaggauuagggccc

SEQ ID NO: 2312412 - RNA, 19 nt, Artificial Sequence
  Description of Artificial Sequence: Synthetic oligonucleotide
  Sense strand starting at position 1575 of SEQ ID NO: 1885053
ggcccuaauccucaaugau

SEQ ID NO: 2312413 - RNA, 19 nt, Artificial Sequence
  Description of Artificial Sequence: Synthetic oligonucleotide
  Antisense strand to SEQ ID NO: 2312412
aucauugaggauuagggcc

SEQ ID NO: 2312414 - RNA, 19 nt, Artificial Sequence
  Description of Artificial Sequence: Synthetic oligonucleotide
  Sense strand starting at position 1584 of SEQ ID NO: 1885053
ccucaaugaugucugaguu

SEQ ID NO: 2312415 - RNA, 19 nt, Artificial Sequence
  Description of Artificial Sequence: Synthetic oligonucleotide
  Antisense strand to SEQ ID NO: 2312414
aacucagacaucauugagg

SEQ ID NO: 2312416 - RNA, 19 nt, Artificial Sequence
  Description of Artificial Sequence: Synthetic oligonucleotide
  Sense strand starting at position 1585 of SEQ ID NO: 1885053
cucaaugaugucugaguuu

SEQ ID NO: 2312417 - RNA, 19 nt, Artificial Sequence
  Description of Artificial Sequence: Synthetic oligonucleotide
  Antisense strand to SEQ ID NO: 2312416
aaacucagacaucauugag

SEQ ID NO: 2312418 - RNA, 19 nt, Artificial Sequence
  Description of Artificial Sequence: Synthetic oligonucleotide
  Sense strand starting at position 1853 of SEQ ID NO: 1885053
gcuccuccugggugaacau

SEQ ID NO: 2312419 - RNA, 19 nt, Artificial Sequence
  Description of Artificial Sequence: Synthetic oligonucleotide
  Antisense strand to SEQ ID NO: 2312418
auguucacccaggaggagc

SEQ ID NO: 2312420 - RNA, 19 nt, Artificial Sequence
  Description of Artificial Sequence: Synthetic oligonucleotide
  Sense strand starting at position 1886 of SEQ ID NO: 1885053
agaagaacucgaugugcug

SEQ ID NO: 2312421 - RNA, 19 nt, Artificial Sequence
  Description of Artificial Sequence: Synthetic oligonucleotide
  Antisense strand to SEQ ID NO: 2312420
cagcacaucgaguucuucu

SEQ ID NO: 2312422 - RNA, 19 nt, Artificial Sequence
  Description of Artificial Sequence: Synthetic oligonucleotide
  Sense strand starting at position 1950 of SEQ ID NO: 1885053
aggagagguccagguguca

SEQ ID NO: 2312423 - RNA, 19 nt, Artificial Sequence
  Description of Artificial Sequence: Synthetic oligonucleotide
  Antisense strand to SEQ ID NO: 2312422
ugacaccuggaccucuccu

SEQ ID NO: 2312424 - RNA, 19 nt, Artificial Sequence
  Description of Artificial Sequence: Synthetic oligonucleotide
  Sense strand starting at position 2211 of SEQ ID NO: 1885053
ggaugucuaccuugaggaa

SEQ ID NO: 2312425 - RNA, 19 nt, Artificial Sequence
  Description of Artificial Sequence: Synthetic oligonucleotide
  Antisense strand to SEQ ID NO: 2312424
uuccucaagguagacaucc

SEQ ID NO: 2312426 - RNA, 19 nt, Artificial Sequence
  Description of Artificial Sequence: Synthetic oligonucleotide
  Sense strand starting at position 2223 of SEQ ID NO: 1885053
ugaggaacucgagguugau

SEQ ID NO: 2312427 - RNA, 19 nt, Artificial Sequence
  Description of Artificial Sequence: Synthetic oligonucleotide
  Antisense strand to SEQ ID NO: 2312426
aucaaccucgaguuccuca

SEQ ID NO: 2312428 - RNA, 19 nt, Artificial Sequence
  Description of Artificial Sequence: Synthetic oligonucleotide
  Sense strand starting at position 2226 of SEQ ID NO: 1885053
ggaacucgagguugaugua

SEQ ID NO: 2312429 - RNA, 19 nt, Artificial Sequence
  Description of Artificial Sequence: Synthetic oligonucleotide
  Antisense strand to SEQ ID NO: 2312428
uacaucaaccucgaguucc

SEQ ID NO: 2312430 - RNA, 19 nt, Artificial Sequence
  Description of Artificial Sequence: Synthetic oligonucleotide
  Sense strand starting at position 2394 of SEQ ID NO: 1885053
cguagauguccuuguucuc

SEQ ID NO: 2312431 - RNA, 19 nt, Artificial Sequence
  Description of Artificial Sequence: Synthetic oligonucleotide
  Antisense strand to SEQ ID NO: 2312430
gagaacaaggacaucuacg

SEQ ID NO: 2312432 - RNA, 19 nt, Artificial Sequence
  Description of Artificial Sequence: Synthetic oligonucleotide
  Sense strand starting at position 2651 of SEQ ID NO: 1885053
ucucccucuccuggugaaa

SEQ ID NO: 2312433 - RNA, 19 nt, Artificial Sequence
  Description of Artificial Sequence: Synthetic oligonucleotide
  Antisense strand to SEQ ID NO: 2312432
uuucaccaggagagggaga

SEQ ID NO: 2312434 - RNA, 19 nt, Artificial Sequence
  Description of Artificial Sequence: Synthetic oligonucleotide
  Sense strand starting at position 2695 of SEQ ID NO: 1885053
ucgugucauugcccaggaa

SEQ ID NO: 2312435 - RNA, 19 nt, Artificial Sequence
  Description of Artificial Sequence: Synthetic oligonucleotide
  Antisense strand to SEQ ID NO: 2312434
uuccugggcaaugacacga

SEQ ID NO: 2312436 - RNA, 19 nt, Artificial Sequence
  Description of Artificial Sequence: Synthetic oligonucleotide
  Sense strand starting at position 2699 of SEQ ID NO: 1885053
gucauugcccaggaacaga

SEQ ID NO: 2312437 - RNA, 19 nt, Artificial Sequence
  Description of Artificial Sequence: Synthetic oligonucleotide
  Antisense strand to SEQ ID NO: 2312436
ucuguuccugggcaaugac

SEQ ID NO: 2312438 - RNA, 19 nt, Artificial Sequence
  Description of Artificial Sequence: Synthetic oligonucleotide
  Sense strand starting at position 2948 of SEQ ID NO: 1885053
cauugaucuggagggugga

SEQ ID NO: 2312439 - RNA, 19 nt, Artificial Sequence
  Description of Artificial Sequence: Synthetic oligonucleotide
  Antisense strand to SEQ ID NO: 2312438
uccacccuccagaucaaug

SEQ ID NO: 2312440 - RNA, 19 nt, Artificial Sequence
  Description of Artificial Sequence: Synthetic oligonucleotide
  Sense strand starting at position 2971 of SEQ ID NO: 1885053
gagcgaggcucauuaugag

SEQ ID NO: 2312441 - RNA, 19 nt, Artificial Sequence
  Description of Artificial Sequence: Synthetic oligonucleotide
  Antisense strand to SEQ ID NO: 2312440
cucauaaugagccucgcuc

SEQ ID NO: 2312442 - RNA, 19 nt, Artificial Sequence
  Description of Artificial Sequence: Synthetic oligonucleotide
  Sense strand starting at position 3067 of SEQ ID NO: 1885053
uguagaugagcaugugaca

SEQ ID NO: 2312443 - RNA, 19 nt, Artificial Sequence
  Description of Artificial Sequence: Synthetic oligonucleotide
  Antisense strand to SEQ ID NO: 2312442
ugucacaugcucaucuaca

SEQ ID NO: 2312444 - RNA, 19 nt, Artificial Sequence
  Description of Artificial Sequence: Synthetic oligonucleotide
  Sense strand starting at position 3216 of SEQ ID NO: 1885053
gaccgacuaugaugggaaa

SEQ ID NO: 2312445 - RNA, 19 nt, Artificial Sequence
  Description of Artificial Sequence: Synthetic oligonucleotide
  Antisense strand to SEQ ID NO: 2312444
uuucccaucauagucgguc

SEQ ID NO: 2312446 - RNA, 19 nt, Artificial Sequence
  Description of Artificial Sequence: Synthetic oligonucleotide
  Sense strand starting at position 3273 of SEQ ID NO: 1885053
gagagacugcuugaggcua

SEQ ID NO: 2312447 - RNA, 19 nt, Artificial Sequence
  Description of Artificial Sequence: Synthetic oligonucleotide
  Antisense strand to SEQ ID NO: 2312446
uagccucaagcagucucuc

SEQ ID NO: 2312448 - RNA, 19 nt, Artificial Sequence
  Description of Artificial Sequence: Synthetic oligonucleotide
  Sense strand starting at position 3278 of SEQ ID NO: 1885053
acugcuugaggcuaauuau

SEQ ID NO: 2312449 - RNA, 19 nt, Artificial Sequence
  Description of Artificial Sequence: Synthetic oligonucleotide
  Antisense strand to SEQ ID NO: 2312448
auaauuagccucaagcagu

SEQ ID NO: 2312450 - RNA, 19 nt, Artificial Sequence
  Description of Artificial Sequence: Synthetic oligonucleotide
  Sense strand starting at position 3287 of SEQ ID NO: 1885053
ggcuaauuaugcuugcuuu

SEQ ID NO: 2312451 - RNA, 19 nt, Artificial Sequence
  Description of Artificial Sequence: Synthetic oligonucleotide
  Antisense strand to SEQ ID NO: 2312450
aaagcaagcauaauuagcc

SEQ ID NO: 2312452 - RNA, 19 nt, Artificial Sequence
  Description of Artificial Sequence: Synthetic oligonucleotide
  Sense strand starting at position 3950 of SEQ ID NO: 1885053
agaugauacuguuugaaca

SEQ ID NO: 2312453 - RNA, 19 nt, Artificial Sequence
  Description of Artificial Sequence: Synthetic oligonucleotide
  Antisense strand to SEQ ID NO: 2312452
uguucaaacaguaucaucu

SEQ ID NO: 2312454 - RNA, 19 nt, Artificial Sequence
  Description of Artificial Sequence: Synthetic oligonucleotide
  Sense strand starting at position 3951 of SEQ ID NO: 1885053
gaugauacuguuugaacac

SEQ ID NO: 2312455 - RNA, 19 nt, Artificial Sequence
  Description of Artificial Sequence: Synthetic oligonucleotide
  Antisense strand to SEQ ID NO: 2312454
guguucaaacaguaucauc

SEQ ID NO: 2312456 - RNA, 19 nt, Artificial Sequence
  Description of Artificial Sequence: Synthetic oligonucleotide
  Sense strand starting at position 112 of SEQ ID NO: 1885054
gccuuugagccucaugauc

SEQ ID NO: 2312457 - RNA, 19 nt, Artificial Sequence
  Description of Artificial Sequence: Synthetic oligonucleotide
  Antisense strand to SEQ ID NO: 2312456
gaucaugaggcucaaaggc

SEQ ID NO: 2312458 - RNA, 19 nt, Artificial Sequence
  Description of Artificial Sequence: Synthetic oligonucleotide
  Sense strand starting at position 114 of SEQ ID NO: 1885054
cuuugagccucaugaucca

SEQ ID NO: 2312459 - RNA, 19 nt, Artificial Sequence
  Description of Artificial Sequence: Synthetic oligonucleotide
  Antisense strand to SEQ ID NO: 2312458
uggaucaugaggcucaaag

SEQ ID NO: 2312460 - RNA, 19 nt, Artificial Sequence
  Description of Artificial Sequence: Synthetic oligonucleotide
  Sense strand starting at position 1244 of SEQ ID NO: 1885054
agucgucagcgcgugcaaa

SEQ ID NO: 2312461 - RNA, 19 nt, Artificial Sequence
  Description of Artificial Sequence: Synthetic oligonucleotide
  Antisense strand to SEQ ID NO: 2312460
uuugcacgcgcugacgacu

SEQ ID NO: 2312462 - RNA, 19 nt, Artificial Sequence
  Description of Artificial Sequence: Synthetic oligonucleotide
  Sense strand starting at position 1441 of SEQ ID NO: 1885054
ccuuuaucgugagcaauuu

SEQ ID NO: 2312463 - RNA, 19 nt, Artificial Sequence
  Description of Artificial Sequence: Synthetic oligonucleotide
  Antisense strand to SEQ ID NO: 2312462
aaauugcucacgauaaagg

SEQ ID NO: 2312464 - RNA, 19 nt, Artificial Sequence
  Description of Artificial Sequence: Synthetic oligonucleotide
  Sense strand starting at position 1450 of SEQ ID NO: 1885054
ugagcaauuugacgcauga

SEQ ID NO: 2312465 - RNA, 19 nt, Artificial Sequence
  Description of Artificial Sequence: Synthetic oligonucleotide
  Antisense strand to SEQ ID NO: 2312464
ucaugcgucaaauugcuca

SEQ ID NO: 2312466 - RNA, 19 nt, Artificial Sequence
  Description of Artificial Sequence: Synthetic oligonucleotide
  Sense strand starting at position 1463 of SEQ ID NO: 1885054
gcaugauaaucgcgucuau

SEQ ID NO: 2312467 - RNA, 19 nt, Artificial Sequence
  Description of Artificial Sequence: Synthetic oligonucleotide
  Antisense strand to SEQ ID NO: 2312466
auagacgcgauuaucaugc

SEQ ID NO: 2312468 - RNA, 19 nt, Artificial Sequence
  Description of Artificial Sequence: Synthetic oligonucleotide
  Sense strand starting at position 1467 of SEQ ID NO: 1885054
gauaaucgcgucuaugaag

SEQ ID NO: 2312469 - RNA, 19 nt, Artificial Sequence
  Description of Artificial Sequence: Synthetic oligonucleotide
  Antisense strand to SEQ ID NO: 2312468
cuucauagacgcgauuauc

SEQ ID NO: 2312470 - RNA, 19 nt, Artificial Sequence
  Description of Artificial Sequence: Synthetic oligonucleotide
  Sense strand starting at position 1500 of SEQ ID NO: 1885054
gguggucuuacccagagaa

SEQ ID NO: 2312471 - RNA, 19 nt, Artificial Sequence
  Description of Artificial Sequence: Synthetic oligonucleotide
  Antisense strand to SEQ ID NO: 2312470
uucucuggguaagaccacc

SEQ ID NO: 2312472 - RNA, 19 nt, Artificial Sequence
  Description of Artificial Sequence: Synthetic oligonucleotide
  Sense strand starting at position 1523 of SEQ ID NO: 1885054
guuccaguuccuggaugga

SEQ ID NO: 2312473 - RNA, 19 nt, Artificial Sequence
  Description of Artificial Sequence: Synthetic oligonucleotide
  Antisense strand to SEQ ID NO: 2312472
uccauccaggaacuggaac

SEQ ID NO: 2312474 - RNA, 19 nt, Artificial Sequence
  Description of Artificial Sequence: Synthetic oligonucleotide
  Sense strand starting at position 1543 of SEQ ID NO: 1885054
aaggguuuacuuugagucu

SEQ ID NO: 2312475 - RNA, 19 nt, Artificial Sequence
  Description of Artificial Sequence: Synthetic oligonucleotide
  Antisense strand to SEQ ID NO: 2312474
agacucaaaguaaacccuu

SEQ ID NO: 2312476 - RNA, 19 nt, Artificial Sequence
  Description of Artificial Sequence: Synthetic oligonucleotide
  Sense strand starting at position 1544 of SEQ ID NO: 1885054
aggguuuacuuugagucuu

SEQ ID NO: 2312477 - RNA, 19 nt, Artificial Sequence
  Description of Artificial Sequence: Synthetic oligonucleotide
  Antisense strand to SEQ ID NO: 2312476
aagacucaaaguaaacccu

SEQ ID NO: 2312478 - RNA, 19 nt, Artificial Sequence
  Description of Artificial Sequence: Synthetic oligonucleotide
  Sense strand starting at position 2009 of SEQ ID NO: 1885054
cccauugcccugggauaaa

SEQ ID NO: 2312479 - RNA, 19 nt, Artificial Sequence
  Description of Artificial Sequence: Synthetic oligonucleotide
  Antisense strand to SEQ ID NO: 2312478
uuuaucccagggcaauggg

SEQ ID NO: 2312480 - RNA, 19 nt, Artificial Sequence
  Description of Artificial Sequence: Synthetic oligonucleotide
  Sense strand starting at position 2079 of SEQ ID NO: 1885054
gccagacucugugcgucau

SEQ ID NO: 2312481 - RNA, 19 nt, Artificial Sequence
  Description of Artificial Sequence: Synthetic oligonucleotide
  Antisense strand to SEQ ID NO: 2312480
augacgcacagagucuggc

SEQ ID NO: 2312482 - RNA, 19 nt, Artificial Sequence
  Description of Artificial Sequence: Synthetic oligonucleotide
  Sense strand starting at position 2083 of SEQ ID NO: 1885054
gacucugugcgucaugguu

SEQ ID NO: 2312483 - RNA, 19 nt, Artificial Sequence
  Description of Artificial Sequence: Synthetic oligonucleotide
  Antisense strand to SEQ ID NO: 2312482
aaccaugacgcacagaguc

SEQ ID NO: 2312484 - RNA, 19 nt, Artificial Sequence
  Description of Artificial Sequence: Synthetic oligonucleotide
  Sense strand starting at position 2091 of SEQ ID NO: 1885054
gcgucaugguuugacccau

SEQ ID NO: 2312485 - RNA, 19 nt, Artificial Sequence
  Description of Artificial Sequence: Synthetic oligonucleotide
  Antisense strand to SEQ ID NO: 2312484
augggucaaaccaugacgc

SEQ ID NO: 2312486 - RNA, 19 nt, Artificial Sequence
  Description of Artificial Sequence: Synthetic oligonucleotide
  Sense strand starting at position 2183 of SEQ ID NO: 1885054
uguucuagacacugugaau

SEQ ID NO: 2312487 - RNA, 19 nt, Artificial Sequence
  Description of Artificial Sequence: Synthetic oligonucleotide
  Antisense strand to SEQ ID NO: 2312486
auucacagugucuagaaca

SEQ ID NO: 2312488 - RNA, 19 nt, Artificial Sequence
  Description of Artificial Sequence: Synthetic oligonucleotide
  Sense strand starting at position 2186 of SEQ ID NO: 1885054
ucuagacacugugaauaca

SEQ ID NO: 2312489 - RNA, 19 nt, Artificial Sequence
  Description of Artificial Sequence: Synthetic oligonucleotide
  Antisense strand to SEQ ID NO: 2312488
uguauucacagugucuaga

SEQ ID NO: 2312490 - RNA, 19 nt, Artificial Sequence
  Description of Artificial Sequence: Synthetic oligonucleotide
  Sense strand starting at position 2194 of SEQ ID NO: 1885054
cugugaauacagcggucau

SEQ ID NO: 2312491 - RNA, 19 nt, Artificial Sequence
  Description of Artificial Sequence: Synthetic oligonucleotide
  Antisense strand to SEQ ID NO: 2312490
augaccgcuguauucacag

SEQ ID NO: 2312492 - RNA, 19 nt, Artificial Sequence
  Description of Artificial Sequence: Synthetic oligonucleotide
  Sense strand starting at position 2195 of SEQ ID NO: 1885054
ugugaauacagcggucaua

SEQ ID NO: 2312493 - RNA, 19 nt, Artificial Sequence
  Description of Artificial Sequence: Synthetic oligonucleotide
  Antisense strand to SEQ ID NO: 2312492
uaugaccgcuguauucaca

SEQ ID NO: 2312494 - RNA, 19 nt, Artificial Sequence
  Description of Artificial Sequence: Synthetic oligonucleotide
  Sense strand starting at position 2258 of SEQ ID NO: 1885054
cgaucacauuaacagauau

SEQ ID NO: 2312495 - RNA, 19 nt, Artificial Sequence
  Description of Artificial Sequence: Synthetic oligonucleotide
  Antisense strand to SEQ ID NO: 2312494
auaucuguuaaugugaucg

SEQ ID NO: 2312496 - RNA, 19 nt, Artificial Sequence
  Description of Artificial Sequence: Synthetic oligonucleotide
  Sense strand starting at position 2295 of SEQ ID NO: 1885054
ugguaacuguguggaggua

SEQ ID NO: 2312497 - RNA, 19 nt, Artificial Sequence
  Description of Artificial Sequence: Synthetic oligonucleotide
  Antisense strand to SEQ ID NO: 2312496
uaccuccacacaguuacca

SEQ ID NO: 2312498 - RNA, 19 nt, Artificial Sequence
  Description of Artificial Sequence: Synthetic oligonucleotide
  Sense strand starting at position 2307 of SEQ ID NO: 1885054
ggagguagucaaugaggua

SEQ ID NO: 2312499 - RNA, 19 nt, Artificial Sequence
  Description of Artificial Sequence: Synthetic oligonucleotide
  Antisense strand to SEQ ID NO: 2312498
uaccucauugacuaccucc

SEQ ID NO: 2312500 - RNA, 19 nt, Artificial Sequence
  Description of Artificial Sequence: Synthetic oligonucleotide
  Sense strand starting at position 2509 of SEQ ID NO: 1885054
uucccagcucugugaguga

SEQ ID NO: 2312501 - RNA, 19 nt, Artificial Sequence
  Description of Artificial Sequence: Synthetic oligonucleotide
  Antisense strand to SEQ ID NO: 2312500
ucacucacagagcugggaa

SEQ ID NO: 2312502 - RNA, 19 nt, Artificial Sequence
  Description of Artificial Sequence: Synthetic oligonucleotide
  Sense strand starting at position 2953 of SEQ ID NO: 1885054
aggaguaaguugccucuaa

SEQ ID NO: 2312503 - RNA, 19 nt, Artificial Sequence
  Description of Artificial Sequence: Synthetic oligonucleotide
  Antisense strand to SEQ ID NO: 2312502
uuagaggcaacuuacuccu

SEQ ID NO: 2312504 - RNA, 19 nt, Artificial Sequence
  Description of Artificial Sequence: Synthetic oligonucleotide
  Sense strand starting at position 2954 of SEQ ID NO: 1885054
ggaguaaguugccucuaaa

SEQ ID NO: 2312505 - RNA, 19 nt, Artificial Sequence
  Description of Artificial Sequence: Synthetic oligonucleotide
  Antisense strand to SEQ ID NO: 2312504
uuuagaggcaacuuacucc

SEQ ID NO: 2312506 - RNA, 19 nt, Artificial Sequence
  Description of Artificial Sequence: Synthetic oligonucleotide
  Sense strand starting at position 2957 of SEQ ID NO: 1885054
guaaguugccucuaaauag

SEQ ID NO: 2312507 - RNA, 19 nt, Artificial Sequence
  Description of Artificial Sequence: Synthetic oligonucleotide
  Antisense strand to SEQ ID NO: 2312506
cuauuuagaggcaacuuac

SEQ ID NO: 2312508 - RNA, 19 nt, Artificial Sequence
  Description of Artificial Sequence: Synthetic oligonucleotide
  Sense strand starting at position 3397 of SEQ ID NO: 1885054
cagagaaacuugggacuuu

SEQ ID NO: 2312509 - RNA, 19 nt, Artificial Sequence
  Description of Artificial Sequence: Synthetic oligonucleotide
  Antisense strand to SEQ ID NO: 2312508
aaagucccaaguuucucug

SEQ ID NO: 2312510 - RNA, 19 nt, Artificial Sequence
  Description of Artificial Sequence: Synthetic oligonucleotide
  Sense strand starting at position 3407 of SEQ ID NO: 1885054
ugggacuuuguccaggcaa

SEQ ID NO: 2312511 - RNA, 19 nt, Artificial Sequence
  Description of Artificial Sequence: Synthetic oligonucleotide
  Antisense strand to SEQ ID NO: 2312510
uugccuggacaaaguccca

SEQ ID NO: 2312512 - RNA, 19 nt, Artificial Sequence
  Description of Artificial Sequence: Synthetic oligonucleotide
  Sense strand starting at position 3409 of SEQ ID NO: 1885054
ggacuuuguccaggcaaga

SEQ ID NO: 2312513 - RNA, 19 nt, Artificial Sequence
  Description of Artificial Sequence: Synthetic oligonucleotide
  Antisense strand to SEQ ID NO: 2312512
ucuugccuggacaaagucc

SEQ ID NO: 2312514 - RNA, 19 nt, Artificial Sequence
  Description of Artificial Sequence: Synthetic oligonucleotide
  Sense strand starting at position 3470 of SEQ ID NO: 1885054
ccgggaaagucuuuccuca

SEQ ID NO: 2312515 - RNA, 19 nt, Artificial Sequence
  Description of Artificial Sequence: Synthetic oligonucleotide
  Antisense strand to SEQ ID NO: 2312514
ugaggaaagacuuucccgg

SEQ ID NO: 2312516 - RNA, 19 nt, Artificial Sequence
  Description of Artificial Sequence: Synthetic oligonucleotide
  Sense strand starting at position 3472 of SEQ ID NO: 1885054
gggaaagucuuuccucaca

SEQ ID NO: 2312517 - RNA, 19 nt, Artificial Sequence
  Description of Artificial Sequence: Synthetic oligonucleotide
  Antisense strand to SEQ ID NO: 2312516
ugugaggaaagacuuuccc

SEQ ID NO: 2312518 - RNA, 19 nt, Artificial Sequence
  Description of Artificial Sequence: Synthetic oligonucleotide
  Sense strand starting at position 3832 of SEQ ID NO: 1885054
uggcuaaucuggccaucua

SEQ ID NO: 2312519 - RNA, 19 nt, Artificial Sequence
  Description of Artificial Sequence: Synthetic oligonucleotide
  Antisense strand to SEQ ID NO: 2312518
uagauggccagauuagcca

SEQ ID NO: 2312520 - RNA, 19 nt, Artificial Sequence
  Description of Artificial Sequence: Synthetic oligonucleotide
  Sense strand starting at position 3833 of SEQ ID NO: 1885054
ggcuaaucuggccaucuau

SEQ ID NO: 2312521 - RNA, 19 nt, Artificial Sequence
  Description of Artificial Sequence: Synthetic oligonucleotide
  Antisense strand to SEQ ID NO: 2312520
auagauggccagauuagcc

SEQ ID NO: 2312522 - RNA, 19 nt, Artificial Sequence
  Description of Artificial Sequence: Synthetic oligonucleotide
  Sense strand starting at position 7 of SEQ ID NO: 1885055
auggauccaugguauuuau

SEQ ID NO: 2312523 - RNA, 19 nt, Artificial Sequence
  Description of Artificial Sequence: Synthetic oligonucleotide
  Antisense strand to SEQ ID NO: 2312522
auaaauaccauggauccau

SEQ ID NO: 2312524 - RNA, 19 nt, Artificial Sequence
  Description of Artificial Sequence: Synthetic oligonucleotide
  Sense strand starting at position 104 of SEQ ID NO: 1885055
gaauaugacugauccaguu

SEQ ID NO: 2312525 - RNA, 19 nt, Artificial Sequence
  Description of Artificial Sequence: Synthetic oligonucleotide
  Antisense strand to SEQ ID NO: 2312524
aacuggaucagucauauuc

SEQ ID NO: 2312526 - RNA, 19 nt, Artificial Sequence
  Description of Artificial Sequence: Synthetic oligonucleotide
  Sense strand starting at position 129 of SEQ ID NO: 1885055
aaauaaagcugauugaugu

SEQ ID NO: 2312527 - RNA, 19 nt, Artificial Sequence
  Description of Artificial Sequence: Synthetic oligonucleotide
  Antisense strand to SEQ ID NO: 2312526
acaucaaucagcuuuauuu

SEQ ID NO: 2312528 - RNA, 19 nt, Artificial Sequence
  Description of Artificial Sequence: Synthetic oligonucleotide
  Sense strand starting at position 130 of SEQ ID NO: 1885055
aauaaagcugauugaugua

SEQ ID NO: 2312529 - RNA, 19 nt, Artificial Sequence
  Description of Artificial Sequence: Synthetic oligonucleotide
  Antisense strand to SEQ ID NO: 2312528
uacaucaaucagcuuuauu

SEQ ID NO: 2312530 - RNA, 19 nt, Artificial Sequence
  Description of Artificial Sequence: Synthetic oligonucleotide
  Sense strand starting at position 585 of SEQ ID NO: 1885055
cugaguggcucuuccugaa

SEQ ID NO: 2312531 - RNA, 19 nt, Artificial Sequence
  Description of Artificial Sequence: Synthetic oligonucleotide
  Antisense strand to SEQ ID NO: 2312530
uucaggaagagccacucag

SEQ ID NO: 2312532 - RNA, 19 nt, Artificial Sequence
  Description of Artificial Sequence: Synthetic oligonucleotide
  Sense strand starting at position 604 of SEQ ID NO: 1885055
uccguuuccucauugggaa

SEQ ID NO: 2312533 - RNA, 19 nt, Artificial Sequence
  Description of Artificial Sequence: Synthetic oligonucleotide
  Antisense strand to SEQ ID NO: 2312532
uucccaaugaggaaacgga

SEQ ID NO: 2312534 - RNA, 19 nt, Artificial Sequence
  Description of Artificial Sequence: Synthetic oligonucleotide
  Sense strand starting at position 606 of SEQ ID NO: 1885055
cguuuccucauugggaaga

SEQ ID NO: 2312535 - RNA, 19 nt, Artificial Sequence
  Description of Artificial Sequence: Synthetic oligonucleotide
  Antisense strand to SEQ ID NO: 2312534
ucuucccaaugaggaaacg

SEQ ID NO: 2312536 - RNA, 19 nt, Artificial Sequence
  Description of Artificial Sequence: Synthetic oligonucleotide
  Sense strand starting at position 833 of SEQ ID NO: 1885055
ggguccaugcuagaugaga

SEQ ID NO: 2312537 - RNA, 19 nt, Artificial Sequence
  Description of Artificial Sequence: Synthetic oligonucleotide
  Antisense strand to SEQ ID NO: 2312536
ucucaucuagcauggaccc

SEQ ID NO: 2312538 - RNA, 19 nt, Artificial Sequence
  Description of Artificial Sequence: Synthetic oligonucleotide
  Sense strand starting at position 835 of SEQ ID NO: 1885055
guccaugcuagaugagaga

SEQ ID NO: 2312539 - RNA, 19 nt, Artificial Sequence
  Description of Artificial Sequence: Synthetic oligonucleotide
  Antisense strand to SEQ ID NO: 2312538
ucucucaucuagcauggac

SEQ ID NO: 2312540 - RNA, 19 nt, Artificial Sequence
  Description of Artificial Sequence: Synthetic oligonucleotide
  Sense strand starting at position 1311 of SEQ ID NO: 1885055
accagcagugcucaauaaa

SEQ ID NO: 2312541 - RNA, 19 nt, Artificial Sequence
  Description of Artificial Sequence: Synthetic oligonucleotide
  Antisense strand to SEQ ID NO: 2312540
uuuauugagcacugcuggu

SEQ ID NO: 2312542 - RNA, 19 nt, Artificial Sequence
  Description of Artificial Sequence: Synthetic oligonucleotide
  Sense strand starting at position 1314 of SEQ ID NO: 1885055
agcagugcucaauaaagau

SEQ ID NO: 2312543 - RNA, 19 nt, Artificial Sequence
  Description of Artificial Sequence: Synthetic oligonucleotide
  Antisense strand to SEQ ID NO: 2312542
aucuuuauugagcacugcu

SEQ ID NO: 2312544 - RNA, 19 nt, Artificial Sequence
  Description of Artificial Sequence: Synthetic oligonucleotide
  Sense strand starting at position 2094 of SEQ ID NO: 1885055
gccucauggaguggucaau

SEQ ID NO: 2312545 - RNA, 19 nt, Artificial Sequence
  Description of Artificial Sequence: Synthetic oligonucleotide
  Antisense strand to SEQ ID NO: 2312544
auugaccacuccaugaggc

SEQ ID NO: 2312546 - RNA, 19 nt, Artificial Sequence
  Description of Artificial Sequence: Synthetic oligonucleotide
  Sense strand starting at position 2251 of SEQ ID NO: 1885055
aaugcauuuccauggugua

SEQ ID NO: 2312547 - RNA, 19 nt, Artificial Sequence
  Description of Artificial Sequence: Synthetic oligonucleotide
  Antisense strand to SEQ ID NO: 2312546
uacaccauggaaaugcauu

SEQ ID NO: 2312548 - RNA, 19 nt, Artificial Sequence
  Description of Artificial Sequence: Synthetic oligonucleotide
  Sense strand starting at position 2252 of SEQ ID NO: 1885055
augcauuuccaugguguaa

SEQ ID NO: 2312549 - RNA, 19 nt, Artificial Sequence
  Description of Artificial Sequence: Synthetic oligonucleotide
  Antisense strand to SEQ ID NO: 2312548
uuacaccauggaaaugcau

SEQ ID NO: 2312550 - RNA, 19 nt, Artificial Sequence
  Description of Artificial Sequence: Synthetic oligonucleotide
  Sense strand starting at position 2264 of SEQ ID NO: 1885055
gguguaaaguggucagaau

SEQ ID NO: 2312551 - RNA, 19 nt, Artificial Sequence
  Description of Artificial Sequence: Synthetic oligonucleotide
  Antisense strand to SEQ ID NO: 2312550
auucugaccacuuuacacc

SEQ ID NO: 2312552 - RNA, 19 nt, Artificial Sequence
  Description of Artificial Sequence: Synthetic oligonucleotide
  Sense strand starting at position 2265 of SEQ ID NO: 1885055
guguaaaguggucagaauu

SEQ ID NO: 2312553 - RNA, 19 nt, Artificial Sequence
  Description of Artificial Sequence: Synthetic oligonucleotide
  Antisense strand to SEQ ID NO: 2312552
aauucugaccacuuuacac

SEQ ID NO: 2312554 - RNA, 19 nt, Artificial Sequence
  Description of Artificial Sequence: Synthetic oligonucleotide
  Sense strand starting at position 2316 of SEQ ID NO: 1885055
gcaugacuguuacuauuaa

SEQ ID NO: 2312555 - RNA, 19 nt, Artificial Sequence
  Description of Artificial Sequence: Synthetic oligonucleotide
  Antisense strand to SEQ ID NO: 2312554
uuaauaguaacagucaugc

SEQ ID NO: 2312556 - RNA, 19 nt, Artificial Sequence
  Description of Artificial Sequence: Synthetic oligonucleotide
  Sense strand starting at position 2349 of SEQ ID NO: 1885055
aggaguguaugucuccaca

SEQ ID NO: 2312557 - RNA, 19 nt, Artificial Sequence
  Description of Artificial Sequence: Synthetic oligonucleotide
  Antisense strand to SEQ ID NO: 2312556
uguggagacauacacuccu

SEQ ID NO: 2312558 - RNA, 19 nt, Artificial Sequence
  Description of Artificial Sequence: Synthetic oligonucleotide
  Sense strand starting at position 2352 of SEQ ID NO: 1885055
aguguaugucuccacagca

SEQ ID NO: 2312559 - RNA, 19 nt, Artificial Sequence
  Description of Artificial Sequence: Synthetic oligonucleotide
  Antisense strand to SEQ ID NO: 2312558
ugcuguggagacauacacu

SEQ ID NO: 2312560 - RNA, 19 nt, Artificial Sequence
  Description of Artificial Sequence: Synthetic oligonucleotide
  Sense strand starting at position 2446 of SEQ ID NO: 1885055
augcucuaggcuuguuaga

SEQ ID NO: 2312561 - RNA, 19 nt, Artificial Sequence
  Description of Artificial Sequence: Synthetic oligonucleotide
  Antisense strand to SEQ ID NO: 2312560
ucuaacaagccuagagcau

SEQ ID NO: 2312562 - RNA, 19 nt, Artificial Sequence
  Description of Artificial Sequence: Synthetic oligonucleotide
  Sense strand starting at position 2448 of SEQ ID NO: 1885055
gcucuaggcuuguuagaug

SEQ ID NO: 2312563 - RNA, 19 nt, Artificial Sequence
  Description of Artificial Sequence: Synthetic oligonucleotide
  Antisense strand to SEQ ID NO: 2312562
caucuaacaagccuagagc

SEQ ID NO: 2312564 - RNA, 19 nt, Artificial Sequence
  Description of Artificial Sequence: Synthetic oligonucleotide
  Sense strand starting at position 2480 of SEQ ID NO: 1885055
gaugaaccuuccuuuaggu

SEQ ID NO: 2312565 - RNA, 19 nt, Artificial Sequence
  Description of Artificial Sequence: Synthetic oligonucleotide
  Antisense strand to SEQ ID NO: 2312564
accuaaaggaagguucauc

SEQ ID NO: 2312566 - RNA, 19 nt, Artificial Sequence
  Description of Artificial Sequence: Synthetic oligonucleotide
  Sense strand starting at position 2486 of SEQ ID NO: 1885055
ccuuccuuuaggugggaga

SEQ ID NO: 2312567 - RNA, 19 nt, Artificial Sequence
  Description of Artificial Sequence: Synthetic oligonucleotide
  Antisense strand to SEQ ID NO: 2312566
ucucccaccuaaaggaagg

SEQ ID NO: 2312568 - RNA, 19 nt, Artificial Sequence
  Description of Artificial Sequence: Synthetic oligonucleotide
  Sense strand starting at position 2531 of SEQ ID NO: 1885055
agggacuuaucugagauca

SEQ ID NO: 2312569 - RNA, 19 nt, Artificial Sequence
  Description of Artificial Sequence: Synthetic oligonucleotide
  Antisense strand to SEQ ID NO: 2312568
ugaucucagauaagucccu

SEQ ID NO: 2312570 - RNA, 19 nt, Artificial Sequence
  Description of Artificial Sequence: Synthetic oligonucleotide
  Sense strand starting at position 2533 of SEQ ID NO: 1885055
ggacuuaucugagaucaca

SEQ ID NO: 2312571 - RNA, 19 nt, Artificial Sequence
  Description of Artificial Sequence: Synthetic oligonucleotide
  Antisense strand to SEQ ID NO: 2312570
ugugaucucagauaagucc

SEQ ID NO: 2312572 - RNA, 19 nt, Artificial Sequence
  Description of Artificial Sequence: Synthetic oligonucleotide
  Sense strand starting at position 2615 of SEQ ID NO: 1885055
guaguccauucuucuaguu

SEQ ID NO: 2312573 - RNA, 19 nt, Artificial Sequence
  Description of Artificial Sequence: Synthetic oligonucleotide
  Antisense strand to SEQ ID NO: 2312572
aacuagaagaauggacuac

SEQ ID NO: 2312574 - RNA, 19 nt, Artificial Sequence
  Description of Artificial Sequence: Synthetic oligonucleotide
  Sense strand starting at position 2627 of SEQ ID NO: 1885055
ucuaguucuccgggaggca

SEQ ID NO: 2312575 - RNA, 19 nt, Artificial Sequence
  Description of Artificial Sequence: Synthetic oligonucleotide
  Antisense strand to SEQ ID NO: 2312574
ugccucccggagaacuaga

SEQ ID NO: 2312576 - RNA, 19 nt, Artificial Sequence
  Description of Artificial Sequence: Synthetic oligonucleotide
  Sense strand starting at position 2628 of SEQ ID NO: 1885055
cuaguucuccgggaggcaa

SEQ ID NO: 2312577 - RNA, 19 nt, Artificial Sequence
  Description of Artificial Sequence: Synthetic oligonucleotide
  Antisense strand to SEQ ID NO: 2312576
uugccucccggagaacuag

SEQ ID NO: 2312578 - RNA, 19 nt, Artificial Sequence
  Description of Artificial Sequence: Synthetic oligonucleotide
  Sense strand starting at position 2982 of SEQ ID NO: 1885055
aggagacacucccacagau

SEQ ID NO: 2312579 - RNA, 19 nt, Artificial Sequence
  Description of Artificial Sequence: Synthetic oligonucleotide
  Antisense strand to SEQ ID NO: 2312578
aucugugggagugucuccu

SEQ ID NO: 2312580 - RNA, 19 nt, Artificial Sequence
  Description of Artificial Sequence: Synthetic oligonucleotide
  Sense strand starting at position 3446 of SEQ ID NO: 1885055
gguccaaguccucagauga

SEQ ID NO: 2312581 - RNA, 19 nt, Artificial Sequence
  Description of Artificial Sequence: Synthetic oligonucleotide
  Antisense strand to SEQ ID NO: 2312580
ucaucugaggacuuggacc

SEQ ID NO: 2312582 - RNA, 19 nt, Artificial Sequence
  Description of Artificial Sequence: Synthetic oligonucleotide
  Sense strand starting at position 3559 of SEQ ID NO: 1885055
ugcgucuuuggugacauga

SEQ ID NO: 2312583 - RNA, 19 nt, Artificial Sequence
  Description of Artificial Sequence: Synthetic oligonucleotide
  Antisense strand to SEQ ID NO: 2312582
ucaugucaccaaagacgca

SEQ ID NO: 2312584 - RNA, 19 nt, Artificial Sequence
  Description of Artificial Sequence: Synthetic oligonucleotide
  Sense strand starting at position 3652 of SEQ ID NO: 1885055
ggucgaaccacaugcaaau

SEQ ID NO: 2312585 - RNA, 19 nt, Artificial Sequence
  Description of Artificial Sequence: Synthetic oligonucleotide
  Antisense strand to SEQ ID NO: 2312584
auuugcaugugguucgacc

SEQ ID NO: 2312586 - RNA, 19 nt, Artificial Sequence
  Description of Artificial Sequence: Synthetic oligonucleotide
  Sense strand starting at position 3736 of SEQ ID NO: 1885055
uuuacacaaucggcuuaau

SEQ ID NO: 2312587 - RNA, 19 nt, Artificial Sequence
  Description of Artificial Sequence: Synthetic oligonucleotide
  Antisense strand to SEQ ID NO: 2312586
auuaagccgauuguguaaa

SEQ ID NO: 2312588 - RNA, 19 nt, Artificial Sequence
  Description of Artificial Sequence: Synthetic oligonucleotide
  Sense strand starting at position 3739 of SEQ ID NO: 1885055
acacaaucggcuuaauuag

SEQ ID NO: 2312589 - RNA, 19 nt, Artificial Sequence
  Description of Artificial Sequence: Synthetic oligonucleotide
  Antisense strand to SEQ ID NO: 2312588
cuaauuaagccgauugugu

SEQ ID NO: 2312590 - RNA, 19 nt, Artificial Sequence
  Description of Artificial Sequence: Synthetic oligonucleotide
  Sense strand starting at position 3746 of SEQ ID NO: 1885055
cggcuuaauuaggugaaca

SEQ ID NO: 2312591 - RNA, 19 nt, Artificial Sequence
  Description of Artificial Sequence: Synthetic oligonucleotide
  Antisense strand to SEQ ID NO: 2312590
uguucaccuaauuaagccg

SEQ ID NO: 2312592 - RNA, 19 nt, Artificial Sequence
  Description of Artificial Sequence: Synthetic oligonucleotide
  Sense strand starting at position 3747 of SEQ ID NO: 1885055
ggcuuaauuaggugaacag

SEQ ID NO: 2312593 - RNA, 19 nt, Artificial Sequence
  Description of Artificial Sequence: Synthetic oligonucleotide
  Antisense strand to SEQ ID NO: 2312592
cuguucaccuaauuaagcc

SEQ ID NO: 2312594 - RNA, 19 nt, Artificial Sequence
  Description of Artificial Sequence: Synthetic oligonucleotide
  Sense strand starting at position 3765 of SEQ ID NO: 1885055
gggcaucuaccagaaguua

SEQ ID NO: 2312595 - RNA, 19 nt, Artificial Sequence
  Description of Artificial Sequence: Synthetic oligonucleotide
  Antisense strand to SEQ ID NO: 2312594
uaacuucugguagaugccc

SEQ ID NO: 2312596 - RNA, 19 nt, Artificial Sequence
  Description of Artificial Sequence: Synthetic oligonucleotide
  Sense strand starting at position 3773 of SEQ ID NO: 1885055
accagaaguuaucccugua

SEQ ID NO: 2312597 - RNA, 19 nt, Artificial Sequence
  Description of Artificial Sequence: Synthetic oligonucleotide
  Antisense strand to SEQ ID NO: 2312596
uacagggauaacuucuggu

SEQ ID NO: 2312598 - RNA, 19 nt, Artificial Sequence
  Description of Artificial Sequence: Synthetic oligonucleotide
  Sense strand starting at position 3776 of SEQ ID NO: 1885055
agaaguuaucccuguagcu

SEQ ID NO: 2312599 - RNA, 19 nt, Artificial Sequence
  Description of Artificial Sequence: Synthetic oligonucleotide
  Antisense strand to SEQ ID NO: 2312598
agcuacagggauaacuucu

SEQ ID NO: 2312600 - RNA, 19 nt, Artificial Sequence
  Description of Artificial Sequence: Synthetic oligonucleotide
  Sense strand starting at position 3867 of SEQ ID NO: 1885055
ggugcucgugaccaucaga

SEQ ID NO: 2312601 - RNA, 19 nt, Artificial Sequence
  Description of Artificial Sequence: Synthetic oligonucleotide
  Antisense strand to SEQ ID NO: 2312600
ucugauggucacgagcacc

SEQ ID NO: 2312602 - RNA, 19 nt, Artificial Sequence
  Description of Artificial Sequence: Synthetic oligonucleotide
  Sense strand starting at position 969 of SEQ ID NO: 1885056
gagccaguucuggagcaca

SEQ ID NO: 2312603 - RNA, 19 nt, Artificial Sequence
  Description of Artificial Sequence: Synthetic oligonucleotide
  Antisense strand to SEQ ID NO: 2312602
ugugcuccagaacuggcuc

SEQ ID NO: 2312604 - RNA, 19 nt, Artificial Sequence
  Description of Artificial Sequence: Synthetic oligonucleotide
  Sense strand starting at position 1465 of SEQ ID NO: 1885056
aggagugacucgcugguuu

SEQ ID NO: 2312605 - RNA, 19 nt, Artificial Sequence
  Description of Artificial Sequence: Synthetic oligonucleotide
  Antisense strand to SEQ ID NO: 2312604
aaaccagcgagucacuccu

SEQ ID NO: 2312606 - RNA, 19 nt, Artificial Sequence
  Description of Artificial Sequence: Synthetic oligonucleotide
  Sense strand starting at position 1539 of SEQ ID NO: 1885056
gcaagaggccgggauuauc

SEQ ID NO: 2312607 - RNA, 19 nt, Artificial Sequence
  Description of Artificial Sequence: Synthetic oligonucleotide
  Antisense strand to SEQ ID NO: 2312606
gauaaucccggccucuugc

SEQ ID NO: 2312608 - RNA, 19 nt, Artificial Sequence
  Description of Artificial Sequence: Synthetic oligonucleotide
  Sense strand starting at position 1547 of SEQ ID NO: 1885056
ccgggauuaucccaagcuc

SEQ ID NO: 2312609 - RNA, 19 nt, Artificial Sequence
  Description of Artificial Sequence: Synthetic oligonucleotide
  Antisense strand to SEQ ID NO: 2312608
gagcuugggauaaucccgg

SEQ ID NO: 2312610 - RNA, 19 nt, Artificial Sequence
  Description of Artificial Sequence: Synthetic oligonucleotide
  Sense strand starting at position 1714 of SEQ ID NO: 1885056
gugcacgucgucagacuuu

SEQ ID NO: 2312611 - RNA, 19 nt, Artificial Sequence
  Description of Artificial Sequence: Synthetic oligonucleotide
  Antisense strand to SEQ ID NO: 2312610
aaagucugacgacgugcac

SEQ ID NO: 2312612 - RNA, 19 nt, Artificial Sequence
  Description of Artificial Sequence: Synthetic oligonucleotide
  Sense strand starting at position 1723 of SEQ ID NO: 1885056
gucagacuuucugcgcaga

SEQ ID NO: 2312613 - RNA, 19 nt, Artificial Sequence
  Description of Artificial Sequence: Synthetic oligonucleotide
  Antisense strand to SEQ ID NO: 2312612
ucugcgcagaaagucugac

SEQ ID NO: 2312614 - RNA, 19 nt, Artificial Sequence
  Description of Artificial Sequence: Synthetic oligonucleotide
  Sense strand starting at position 1724 of SEQ ID NO: 1885056
ucagacuuucugcgcagaa

SEQ ID NO: 2312615 - RNA, 19 nt, Artificial Sequence
  Description of Artificial Sequence: Synthetic oligonucleotide
  Antisense strand to SEQ ID NO: 2312614
uucugcgcagaaagucuga

SEQ ID NO: 2312616 - RNA, 19 nt, Artificial Sequence
  Description of Artificial Sequence: Synthetic oligonucleotide
  Sense strand starting at position 1725 of SEQ ID NO: 1885056
cagacuuucugcgcagaag

SEQ ID NO: 2312617 - RNA, 19 nt, Artificial Sequence
  Description of Artificial Sequence: Synthetic oligonucleotide
  Antisense strand to SEQ ID NO: 2312616
cuucugcgcagaaagucug

SEQ ID NO: 2312618 - RNA, 19 nt, Artificial Sequence
  Description of Artificial Sequence: Synthetic oligonucleotide
  Sense strand starting at position 1757 of SEQ ID NO: 1885056
accuucuucgagugcucau

SEQ ID NO: 2312619 - RNA, 19 nt, Artificial Sequence
  Description of Artificial Sequence: Synthetic oligonucleotide
  Antisense strand to SEQ ID NO: 2312618
augagcacucgaagaaggu

SEQ ID NO: 2312620 - RNA, 19 nt, Artificial Sequence
  Description of Artificial Sequence: Synthetic oligonucleotide
  Sense strand starting at position 1836 of SEQ ID NO: 1885056
ccuuguugucccgguucau

SEQ ID NO: 2312621 - RNA, 19 nt, Artificial Sequence
  Description of Artificial Sequence: Synthetic oligonucleotide
  Antisense strand to SEQ ID NO: 2312620
augaaccgggacaacaagg

SEQ ID NO: 2312622 - RNA, 19 nt, Artificial Sequence
  Description of Artificial Sequence: Synthetic oligonucleotide
  Sense strand starting at position 1954 of SEQ ID NO: 1885056
acuguauaccuuuggacuu

SEQ ID NO: 2312623 - RNA, 19 nt, Artificial Sequence
  Description of Artificial Sequence: Synthetic oligonucleotide
  Antisense strand to SEQ ID NO: 2312622
aaguccaaagguauacagu

SEQ ID NO: 2312624 - RNA, 19 nt, Artificial Sequence
  Description of Artificial Sequence: Synthetic oligonucleotide
  Sense strand starting at position 2009 of SEQ ID NO: 1885056
gccugaaacuccugggaca

SEQ ID NO: 2312625 - RNA, 19 nt, Artificial Sequence
  Description of Artificial Sequence: Synthetic oligonucleotide
  Antisense strand to SEQ ID NO: 2312624
ugucccaggaguuucaggc

SEQ ID NO: 2312626 - RNA, 19 nt, Artificial Sequence
  Description of Artificial Sequence: Synthetic oligonucleotide
  Sense strand starting at position 2144 of SEQ ID NO: 1885056
uuuggaagcucgucguuga

SEQ ID NO: 2312627 - RNA, 19 nt, Artificial Sequence
  Description of Artificial Sequence: Synthetic oligonucleotide
  Antisense strand to SEQ ID NO: 2312626
ucaacgacgagcuuccaaa

SEQ ID NO: 2312628 - RNA, 19 nt, Artificial Sequence
  Description of Artificial Sequence: Synthetic oligonucleotide
  Sense strand starting at position 2483 of SEQ ID NO: 1885056
ggguaugacccagguaaag

SEQ ID NO: 2312629 - RNA, 19 nt, Artificial Sequence
  Description of Artificial Sequence: Synthetic oligonucleotide
  Antisense strand to SEQ ID NO: 2312628
cuuuaccugggucauaccc

SEQ ID NO: 2312630 - RNA, 19 nt, Artificial Sequence
  Description of Artificial Sequence: Synthetic oligonucleotide
  Sense strand starting at position 2580 of SEQ ID NO: 1885056
gggccuuguucucccagaa

SEQ ID NO: 2312631 - RNA, 19 nt, Artificial Sequence
  Description of Artificial Sequence: Synthetic oligonucleotide
  Antisense strand to SEQ ID NO: 2312630
uucugggagaacaaggccc

SEQ ID NO: 2312632 - RNA, 19 nt, Artificial Sequence
  Description of Artificial Sequence: Synthetic oligonucleotide
  Sense strand starting at position 2651 of SEQ ID NO: 1885056
uguguuugccaucugcuga

SEQ ID NO: 2312633 - RNA, 19 nt, Artificial Sequence
  Description of Artificial Sequence: Synthetic oligonucleotide
  Antisense strand to SEQ ID NO: 2312632
ucagcagauggcaaacaca

SEQ ID NO: 2312634 - RNA, 19 nt, Artificial Sequence
  Description of Artificial Sequence: Synthetic oligonucleotide
  Sense strand starting at position 2714 of SEQ ID NO: 1885056
guguguuuauuccuuugau

SEQ ID NO: 2312635 - RNA, 19 nt, Artificial Sequence
  Description of Artificial Sequence: Synthetic oligonucleotide
  Antisense strand to SEQ ID NO: 2312634
aucaaaggaauaaacacac

SEQ ID NO: 2312636 - RNA, 19 nt, Artificial Sequence
  Description of Artificial Sequence: Synthetic oligonucleotide
  Sense strand starting at position 2715 of SEQ ID NO: 1885056
uguguuuauuccuuugaug

SEQ ID NO: 2312637 - RNA, 19 nt, Artificial Sequence
  Description of Artificial Sequence: Synthetic oligonucleotide
  Antisense strand to SEQ ID NO: 2312636
caucaaaggaauaaacaca

SEQ ID NO: 2312638 - RNA, 19 nt, Artificial Sequence
  Description of Artificial Sequence: Synthetic oligonucleotide
  Sense strand starting at position 2717 of SEQ ID NO: 1885056
uguuuauuccuuugaugac

SEQ ID NO: 2312639 - RNA, 19 nt, Artificial Sequence
  Description of Artificial Sequence: Synthetic oligonucleotide
  Antisense strand to SEQ ID NO: 2312638
gucaucaaaggaauaaaca

SEQ ID NO: 2312640 - RNA, 19 nt, Artificial Sequence
  Description of Artificial Sequence: Synthetic oligonucleotide
  Sense strand starting at position 2718 of SEQ ID NO: 1885056
guuuauuccuuugaugaca

SEQ ID NO: 2312641 - RNA, 19 nt, Artificial Sequence
  Description of Artificial Sequence: Synthetic oligonucleotide
  Antisense strand to SEQ ID NO: 2312640
ugucaucaaaggaauaaac

SEQ ID NO: 2312642 - RNA, 19 nt, Artificial Sequence
  Description of Artificial Sequence: Synthetic oligonucleotide
  Sense strand starting at position 2771 of SEQ ID NO: 1885056
ccgggcuuaucccuugaca

SEQ ID NO: 2312643 - RNA, 19 nt, Artificial Sequence
  Description of Artificial Sequence: Synthetic oligonucleotide
  Antisense strand to SEQ ID NO: 2312642
ugucaagggauaagcccgg

SEQ ID NO: 2312644 - RNA, 19 nt, Artificial Sequence
  Description of Artificial Sequence: Synthetic oligonucleotide
  Sense strand starting at position 2773 of SEQ ID NO: 1885056
gggcuuaucccuugacaca

SEQ ID NO: 2312645 - RNA, 19 nt, Artificial Sequence
  Description of Artificial Sequence: Synthetic oligonucleotide
  Antisense strand to SEQ ID NO: 2312644
ugugucaagggauaagccc

SEQ ID NO: 2312646 - RNA, 19 nt, Artificial Sequence
  Description of Artificial Sequence: Synthetic oligonucleotide
  Sense strand starting at position 2774 of SEQ ID NO: 1885056
ggcuuaucccuugacacac

SEQ ID NO: 2312647 - RNA, 19 nt, Artificial Sequence
  Description of Artificial Sequence: Synthetic oligonucleotide
  Antisense strand to SEQ ID NO: 2312646
gugugucaagggauaagcc

SEQ ID NO: 2312648 - RNA, 19 nt, Artificial Sequence
  Description of Artificial Sequence: Synthetic oligonucleotide
  Sense strand starting at position 2937 of SEQ ID NO: 1885056
gguggaugauuucauugca

SEQ ID NO: 2312649 - RNA, 19 nt, Artificial Sequence
  Description of Artificial Sequence: Synthetic oligonucleotide
  Antisense strand to SEQ ID NO: 2312648
ugcaaugaaaucauccacc

SEQ ID NO: 2312650 - RNA, 19 nt, Artificial Sequence
  Description of Artificial Sequence: Synthetic oligonucleotide
  Sense strand starting at position 2958 of SEQ ID NO: 1885056
uggagcacuccaugagcau

SEQ ID NO: 2312651 - RNA, 19 nt, Artificial Sequence
  Description of Artificial Sequence: Synthetic oligonucleotide
  Antisense strand to SEQ ID NO: 2312650
augcucauggagugcucca

SEQ ID NO: 2312652 - RNA, 19 nt, Artificial Sequence
  Description of Artificial Sequence: Synthetic oligonucleotide
  Sense strand starting at position 2967 of SEQ ID NO: 1885056
ccaugagcaugagguuaaa

SEQ ID NO: 2312653 - RNA, 19 nt, Artificial Sequence
  Description of Artificial Sequence: Synthetic oligonucleotide
  Antisense strand to SEQ ID NO: 2312652
uuuaaccucaugcucaugg

SEQ ID NO: 2312654 - RNA, 19 nt, Artificial Sequence
  Description of Artificial Sequence: Synthetic oligonucleotide
  Sense strand starting at position 2970 of SEQ ID NO: 1885056
ugagcaugagguuaaacuu

SEQ ID NO: 2312655 - RNA, 19 nt, Artificial Sequence
  Description of Artificial Sequence: Synthetic oligonucleotide
  Antisense strand to SEQ ID NO: 2312654
aaguuuaaccucaugcuca

SEQ ID NO: 2312656 - RNA, 19 nt, Artificial Sequence
  Description of Artificial Sequence: Synthetic oligonucleotide
  Sense strand starting at position 3192 of SEQ ID NO: 1885056
ggcacauucgcucacucau

SEQ ID NO: 2312657 - RNA, 19 nt, Artificial Sequence
  Description of Artificial Sequence: Synthetic oligonucleotide
  Antisense strand to SEQ ID NO: 2312656
augagugagcgaaugugcc

SEQ ID NO: 2312658 - RNA, 19 nt, Artificial Sequence
  Description of Artificial Sequence: Synthetic oligonucleotide
  Sense strand starting at position 3215 of SEQ ID NO: 1885056
ugaaauacguaucaggcua

SEQ ID NO: 2312659 - RNA, 19 nt, Artificial Sequence
  Description of Artificial Sequence: Synthetic oligonucleotide
  Antisense strand to SEQ ID NO: 2312658
uagccugauacguauuuca

SEQ ID NO: 2312660 - RNA, 19 nt, Artificial Sequence
  Description of Artificial Sequence: Synthetic oligonucleotide
  Sense strand starting at position 3492 of SEQ ID NO: 1885056
cccagauccaugcggauga

SEQ ID NO: 2312661 - RNA, 19 nt, Artificial Sequence
  Description of Artificial Sequence: Synthetic oligonucleotide
  Antisense strand to SEQ ID NO: 2312660
ucauccgcauggaucuggg

SEQ ID NO: 2312662 - RNA, 19 nt, Artificial Sequence
  Description of Artificial Sequence: Synthetic oligonucleotide
  Sense strand starting at position 3496 of SEQ ID NO: 1885056
gauccaugcggaugagaug

SEQ ID NO: 2312663 - RNA, 19 nt, Artificial Sequence
  Description of Artificial Sequence: Synthetic oligonucleotide
  Antisense strand to SEQ ID NO: 2312662
caucucauccgcauggauc

SEQ ID NO: 2312664 - RNA, 19 nt, Artificial Sequence
  Description of Artificial Sequence: Synthetic oligonucleotide
  Sense strand starting at position 3520 of SEQ ID NO: 1885056
gcaucucaccaguggguau

SEQ ID NO: 2312665 - RNA, 19 nt, Artificial Sequence
  Description of Artificial Sequence: Synthetic oligonucleotide
  Antisense strand to SEQ ID NO: 2312664
auacccacuggugagaugc

SEQ ID NO: 2312666 - RNA, 19 nt, Artificial Sequence
  Description of Artificial Sequence: Synthetic oligonucleotide
  Sense strand starting at position 3633 of SEQ ID NO: 1885056
uuugcacaguauugauauu

SEQ ID NO: 2312667 - RNA, 19 nt, Artificial Sequence
  Description of Artificial Sequence: Synthetic oligonucleotide
  Antisense strand to SEQ ID NO: 2312666
aauaucaauacugugcaaa

SEQ ID NO: 2312668 - RNA, 19 nt, Artificial Sequence
  Description of Artificial Sequence: Synthetic oligonucleotide
  Sense strand starting at position 3649 of SEQ ID NO: 1885056
auuuguacuggcgggugaa

SEQ ID NO: 2312669 - RNA, 19 nt, Artificial Sequence
  Description of Artificial Sequence: Synthetic oligonucleotide
  Antisense strand to SEQ ID NO: 2312668
uucacccgccaguacaaau

SEQ ID NO: 2312670 - RNA, 19 nt, Artificial Sequence
  Description of Artificial Sequence: Synthetic oligonucleotide
  Sense strand starting at position 3650 of SEQ ID NO: 1885056
uuuguacuggcgggugaaa

SEQ ID NO: 2312671 - RNA, 19 nt, Artificial Sequence
  Description of Artificial Sequence: Synthetic oligonucleotide
  Antisense strand to SEQ ID NO: 2312670
uuucacccgccaguacaaa

SEQ ID NO: 2312672 - RNA, 19 nt, Artificial Sequence
  Description of Artificial Sequence: Synthetic oligonucleotide
  Sense strand starting at position 3733 of SEQ ID NO: 1885056
augccauacgcuuauuaaa

SEQ ID NO: 2312673 - RNA, 19 nt, Artificial Sequence
  Description of Artificial Sequence: Synthetic oligonucleotide
  Antisense strand to SEQ ID NO: 2312672
uuuaauaagcguauggcau

SEQ ID NO: 2312674 - RNA, 19 nt, Artificial Sequence
  Description of Artificial Sequence: Synthetic oligonucleotide
  Sense strand starting at position 329 of SEQ ID NO: 1885057
agccaacuggaucaguaau

SEQ ID NO: 2312675 - RNA, 19 nt, Artificial Sequence
  Description of Artificial Sequence: Synthetic oligonucleotide
  Antisense strand to SEQ ID NO: 2312674
auuacugauccaguuggcu

SEQ ID NO: 2312676 - RNA, 19 nt, Artificial Sequence
  Description of Artificial Sequence: Synthetic oligonucleotide
  Sense strand starting at position 494 of SEQ ID NO: 1885057
uuaaucuagcaguauugaa

SEQ ID NO: 2312677 - RNA, 19 nt, Artificial Sequence
  Description of Artificial Sequence: Synthetic oligonucleotide
  Antisense strand to SEQ ID NO: 2312676
uucaauacugcuagauuaa

SEQ ID NO: 2312678 - RNA, 19 nt, Artificial Sequence
  Description of Artificial Sequence: Synthetic oligonucleotide
  Sense strand starting at position 502 of SEQ ID NO: 1885057
gcaguauugaaggagccau

SEQ ID NO: 2312679 - RNA, 19 nt, Artificial Sequence
  Description of Artificial Sequence: Synthetic oligonucleotide
  Antisense strand to SEQ ID NO: 2312678
auggcuccuucaauacugc

SEQ ID NO: 2312680 - RNA, 19 nt, Artificial Sequence
  Description of Artificial Sequence: Synthetic oligonucleotide
  Sense strand starting at position 544 of SEQ ID NO: 1885057
agcuaagucguauaauaaa

SEQ ID NO: 2312681 - RNA, 19 nt, Artificial Sequence
  Description of Artificial Sequence: Synthetic oligonucleotide
  Antisense strand to SEQ ID NO: 2312680
uuuauuauacgacuuagcu

SEQ ID NO: 2312682 - RNA, 19 nt, Artificial Sequence
  Description of Artificial Sequence: Synthetic oligonucleotide
  Sense strand starting at position 570 of SEQ ID NO: 1885057
gaguaccuacucuguggaa

SEQ ID NO: 2312683 - RNA, 19 nt, Artificial Sequence
  Description of Artificial Sequence: Synthetic oligonucleotide
  Antisense strand to SEQ ID NO: 2312682
uuccacagaguagguacuc

SEQ ID NO: 2312684 - RNA, 19 nt, Artificial Sequence
  Description of Artificial Sequence: Synthetic oligonucleotide
  Sense strand starting at position 612 of SEQ ID NO: 1885057
acacaaagcugauucguga

SEQ ID NO: 2312685 - RNA, 19 nt, Artificial Sequence
  Description of Artificial Sequence: Synthetic oligonucleotide
  Antisense strand to SEQ ID NO: 2312684
ucacgaaucagcuuugugu

SEQ ID NO: 2312686 - RNA, 19 nt, Artificial Sequence
  Description of Artificial Sequence: Synthetic oligonucleotide
  Sense strand starting at position 626 of SEQ ID NO: 1885057
cgugacauuaaguagcaaa

SEQ ID NO: 2312687 - RNA, 19 nt, Artificial Sequence
  Description of Artificial Sequence: Synthetic oligonucleotide
  Antisense strand to SEQ ID NO: 2312686
uuugcuacuuaaugucacg

SEQ ID NO: 2312688 - RNA, 19 nt, Artificial Sequence
  Description of Artificial Sequence: Synthetic oligonucleotide
  Sense strand starting at position 802 of SEQ ID NO: 1885057
gcagguauauuugaggaua

SEQ ID NO: 2312689 - RNA, 19 nt, Artificial Sequence
  Description of Artificial Sequence: Synthetic oligonucleotide
  Antisense strand to SEQ ID NO: 2312688
uauccucaaauauaccugc

SEQ ID NO: 2312690 - RNA, 19 nt, Artificial Sequence
  Description of Artificial Sequence: Synthetic oligonucleotide
  Sense strand starting at position 804 of SEQ ID NO: 1885057
agguauauuugaggauaaa

SEQ ID NO: 2312691 - RNA, 19 nt, Artificial Sequence
  Description of Artificial Sequence: Synthetic oligonucleotide
  Antisense strand to SEQ ID NO: 2312690
uuuauccucaaauauaccu

SEQ ID NO: 2312692 - RNA, 19 nt, Artificial Sequence
  Description of Artificial Sequence: Synthetic oligonucleotide
  Sense strand starting at position 889 of SEQ ID NO: 1885057
ugaagagacuugcuauccu

SEQ ID NO: 2312693 - RNA, 19 nt, Artificial Sequence
  Description of Artificial Sequence: Synthetic oligonucleotide
  Antisense strand to SEQ ID NO: 2312692
aggauagcaagucucuuca

SEQ ID NO: 2312694 - RNA, 19 nt, Artificial Sequence
  Description of Artificial Sequence: Synthetic oligonucleotide
  Sense strand starting at position 1114 of SEQ ID NO: 1885057
agcaaacguggcuaggaua

SEQ ID NO: 2312695 - RNA, 19 nt, Artificial Sequence
  Description of Artificial Sequence: Synthetic oligonucleotide
  Antisense strand to SEQ ID NO: 2312694
uauccuagccacguuugcu

SEQ ID NO: 2312696 - RNA, 19 nt, Artificial Sequence
  Description of Artificial Sequence: Synthetic oligonucleotide
  Sense strand starting at position 1366 of SEQ ID NO: 1885057
ccacuuauuggaggcagau

SEQ ID NO: 2312697 - RNA, 19 nt, Artificial Sequence
  Description of Artificial Sequence: Synthetic oligonucleotide
  Antisense strand to SEQ ID NO: 2312696
aucugccuccaauaagugg

SEQ ID NO: 2312698 - RNA, 19 nt, Artificial Sequence
  Description of Artificial Sequence: Synthetic oligonucleotide
  Sense strand starting at position 1747 of SEQ ID NO: 1885057
cagguuuggguguaugaag

SEQ ID NO: 2312699 - RNA, 19 nt, Artificial Sequence
  Description of Artificial Sequence: Synthetic oligonucleotide
  Antisense strand to SEQ ID NO: 2312698
cuucauacacccaaaccug

SEQ ID NO: 2312700 - RNA, 19 nt, Artificial Sequence
  Description of Artificial Sequence: Synthetic oligonucleotide
  Sense strand starting at position 2046 of SEQ ID NO: 1885057
cuguaacuucuauaauguu

SEQ ID NO: 2312701 - RNA, 19 nt, Artificial Sequence
  Description of Artificial Sequence: Synthetic oligonucleotide
  Antisense strand to SEQ ID NO: 2312700
aacauuauagaaguuacag

SEQ ID NO: 2312702 - RNA, 19 nt, Artificial Sequence
  Description of Artificial Sequence: Synthetic oligonucleotide
  Sense strand starting at position 2066 of SEQ ID NO: 1885057
caguaaauuuaggucguau

SEQ ID NO: 2312703 - RNA, 19 nt, Artificial Sequence
  Description of Artificial Sequence: Synthetic oligonucleotide
  Antisense strand to SEQ ID NO: 2312702
auacgaccuaaauuuacug

SEQ ID NO: 2312704 - RNA, 19 nt, Artificial Sequence
  Description of Artificial Sequence: Synthetic oligonucleotide
  Sense strand starting at position 2068 of SEQ ID NO: 1885057
guaaauuuaggucguauug

SEQ ID NO: 2312705 - RNA, 19 nt, Artificial Sequence
  Description of Artificial Sequence: Synthetic oligonucleotide
  Antisense strand to SEQ ID NO: 2312704
caauacgaccuaaauuuac

SEQ ID NO: 2312706 - RNA, 19 nt, Artificial Sequence
  Description of Artificial Sequence: Synthetic oligonucleotide
  Sense strand starting at position 2085 of SEQ ID NO: 1885057
uggucugauauagguguaa

SEQ ID NO: 2312707 - RNA, 19 nt, Artificial Sequence
  Description of Artificial Sequence: Synthetic oligonucleotide
  Antisense strand to SEQ ID NO: 2312706
uuacaccuauaucagacca

SEQ ID NO: 2312708 - RNA, 19 nt, Artificial Sequence
  Description of Artificial Sequence: Synthetic oligonucleotide
  Sense strand starting at position 2087 of SEQ ID NO: 1885057
gucugauauagguguaaua

SEQ ID NO: 2312709 - RNA, 19 nt, Artificial Sequence
  Description of Artificial Sequence: Synthetic oligonucleotide
  Antisense strand to SEQ ID NO: 2312708
uauuacaccuauaucagac

SEQ ID NO: 2312710 - RNA, 19 nt, Artificial Sequence
  Description of Artificial Sequence: Synthetic oligonucleotide
  Sense strand starting at position 2244 of SEQ ID NO: 1885057
cucaucacuuggucugaau

SEQ ID NO: 2312711 - RNA, 19 nt, Artificial Sequence
  Description of Artificial Sequence: Synthetic oligonucleotide
  Antisense strand to SEQ ID NO: 2312710
auucagaccaagugaugag

SEQ ID NO: 2312712 - RNA, 19 nt, Artificial Sequence
  Description of Artificial Sequence: Synthetic oligonucleotide
  Sense strand starting at position 2388 of SEQ ID NO: 1885057
gaacuuacaguuugagaau

SEQ ID NO: 2312713 - RNA, 19 nt, Artificial Sequence
  Description of Artificial Sequence: Synthetic oligonucleotide
  Antisense strand to SEQ ID NO: 2312712
auucucaaacuguaaguuc

SEQ ID NO: 2312714 - RNA, 19 nt, Artificial Sequence
  Description of Artificial Sequence: Synthetic oligonucleotide
  Sense strand starting at position 2434 of SEQ ID NO: 1885057
agcacaaaugcugauuauu

SEQ ID NO: 2312715 - RNA, 19 nt, Artificial Sequence
  Description of Artificial Sequence: Synthetic oligonucleotide
  Antisense strand to SEQ ID NO: 2312714
aauaaucagcauuugugcu

SEQ ID NO: 2312716 - RNA, 19 nt, Artificial Sequence
  Description of Artificial Sequence: Synthetic oligonucleotide
  Sense strand starting at position 2444 of SEQ ID NO: 1885057
cugauuauugcuuacauag

SEQ ID NO: 2312717 - RNA, 19 nt, Artificial Sequence
  Description of Artificial Sequence: Synthetic oligonucleotide
  Antisense strand to SEQ ID NO: 2312716
cuauguaagcaauaaucag

SEQ ID NO: 2312718 - RNA, 19 nt, Artificial Sequence
  Description of Artificial Sequence: Synthetic oligonucleotide
  Sense strand starting at position 2453 of SEQ ID NO: 1885057
gcuuacauaggcuauguau

SEQ ID NO: 2312719 - RNA, 19 nt, Artificial Sequence
  Description of Artificial Sequence: Synthetic oligonucleotide
  Antisense strand to SEQ ID NO: 2312718
auacauagccuauguaagc

SEQ ID NO: 2312720 - RNA, 19 nt, Artificial Sequence
  Description of Artificial Sequence: Synthetic oligonucleotide
  Sense strand starting at position 2455 of SEQ ID NO: 1885057
uuacauaggcuauguauga

SEQ ID NO: 2312721 - RNA, 19 nt, Artificial Sequence
  Description of Artificial Sequence: Synthetic oligonucleotide
  Antisense strand to SEQ ID NO: 2312720
ucauacauagccuauguaa

SEQ ID NO: 2312722 - RNA, 19 nt, Artificial Sequence
  Description of Artificial Sequence: Synthetic oligonucleotide
  Sense strand starting at position 2658 of SEQ ID NO: 1885057
gcuauauuggguuaaauua

SEQ ID NO: 2312723 - RNA, 19 nt, Artificial Sequence
  Description of Artificial Sequence: Synthetic oligonucleotide
  Antisense strand to SEQ ID NO: 2312722
uaauuuaacccaauauagc

SEQ ID NO: 2312724 - RNA, 19 nt, Artificial Sequence
  Description of Artificial Sequence: Synthetic oligonucleotide
  Sense strand starting at position 2786 of SEQ ID NO: 1885057
guuuacuuucuccaguaug

SEQ ID NO: 2312725 - RNA, 19 nt, Artificial Sequence
  Description of Artificial Sequence: Synthetic oligonucleotide
  Antisense strand to SEQ ID NO: 2312724
cauacuggagaaaguaaac

SEQ ID NO: 2312726 - RNA, 19 nt, Artificial Sequence
  Description of Artificial Sequence: Synthetic oligonucleotide
  Sense strand starting at position 2831 of SEQ ID NO: 1885057
guguguuucggcagggagu

SEQ ID NO: 2312727 - RNA, 19 nt, Artificial Sequence
  Description of Artificial Sequence: Synthetic oligonucleotide
  Antisense strand to SEQ ID NO: 2312726
acucccugccgaaacacac

SEQ ID NO: 2312728 - RNA, 19 nt, Artificial Sequence
  Description of Artificial Sequence: Synthetic oligonucleotide
  Sense strand starting at position 2842 of SEQ ID NO: 1885057
cagggaguuugagugguau

SEQ ID NO: 2312729 - RNA, 19 nt, Artificial Sequence
  Description of Artificial Sequence: Synthetic oligonucleotide
  Antisense strand to SEQ ID NO: 2312728
auaccacucaaacucccug

SEQ ID NO: 2312730 - RNA, 19 nt, Artificial Sequence
  Description of Artificial Sequence: Synthetic oligonucleotide
  Sense strand starting at position 2844 of SEQ ID NO: 1885057
gggaguuugagugguauug

SEQ ID NO: 2312731 - RNA, 19 nt, Artificial Sequence
  Description of Artificial Sequence: Synthetic oligonucleotide
  Antisense strand to SEQ ID NO: 2312730
caauaccacucaaacuccc

SEQ ID NO: 2312732 - RNA, 19 nt, Artificial Sequence
  Description of Artificial Sequence: Synthetic oligonucleotide
  Sense strand starting at position 2848 of SEQ ID NO: 1885057
guuugagugguauugcugu

SEQ ID NO: 2312733 - RNA, 19 nt, Artificial Sequence
  Description of Artificial Sequence: Synthetic oligonucleotide
  Antisense strand to SEQ ID NO: 2312732
acagcaauaccacucaaac

SEQ ID NO: 2312734 - RNA, 19 nt, Artificial Sequence
  Description of Artificial Sequence: Synthetic oligonucleotide
  Sense strand starting at position 2878 of SEQ ID NO: 1885057
uugcaauugcuugauuaau

SEQ ID NO: 2312735 - RNA, 19 nt, Artificial Sequence
  Description of Artificial Sequence: Synthetic oligonucleotide
  Antisense strand to SEQ ID NO: 2312734
auuaaucaagcaauugcaa

SEQ ID NO: 2312736 - RNA, 19 nt, Artificial Sequence
  Description of Artificial Sequence: Synthetic oligonucleotide
  Sense strand starting at position 2889 of SEQ ID NO: 1885057
ugauuaauccauuggaguu

SEQ ID NO: 2312737 - RNA, 19 nt, Artificial Sequence
  Description of Artificial Sequence: Synthetic oligonucleotide
  Antisense strand to SEQ ID NO: 2312736
aacuccaauggauuaauca

SEQ ID NO: 2312738 - RNA, 19 nt, Artificial Sequence
  Description of Artificial Sequence: Synthetic oligonucleotide
  Sense strand starting at position 2946 of SEQ ID NO: 1885057
uuuauaaugaaguggcaga

SEQ ID NO: 2312739 - RNA, 19 nt, Artificial Sequence
  Description of Artificial Sequence: Synthetic oligonucleotide
  Antisense strand to SEQ ID NO: 2312738
ucugccacuucauuauaaa

SEQ ID NO: 2312740 - RNA, 19 nt, Artificial Sequence
  Description of Artificial Sequence: Synthetic oligonucleotide
  Sense strand starting at position 2947 of SEQ ID NO: 1885057
uuauaaugaaguggcagau

SEQ ID NO: 2312741 - RNA, 19 nt, Artificial Sequence
  Description of Artificial Sequence: Synthetic oligonucleotide
  Antisense strand to SEQ ID NO: 2312740
aucugccacuucauuauaa

SEQ ID NO: 2312742 - RNA, 19 nt, Artificial Sequence
  Description of Artificial Sequence: Synthetic oligonucleotide
  Sense strand starting at position 3257 of SEQ ID NO: 1885057
ggaacauccagugauugcu

SEQ ID NO: 2312743 - RNA, 19 nt, Artificial Sequence
  Description of Artificial Sequence: Synthetic oligonucleotide
  Antisense strand to SEQ ID NO: 2312742
agcaaucacuggauguucc

SEQ ID NO: 2312744 - RNA, 19 nt, Artificial Sequence
  Description of Artificial Sequence: Synthetic oligonucleotide
  Sense strand starting at position 3758 of SEQ ID NO: 1885057
gaagauguguucuucugaa

SEQ ID NO: 2312745 - RNA, 19 nt, Artificial Sequence
  Description of Artificial Sequence: Synthetic oligonucleotide
  Antisense strand to SEQ ID NO: 2312744
uucagaagaacacaucuuc

SEQ ID NO: 2312746 - RNA, 19 nt, Artificial Sequence
  Description of Artificial Sequence: Synthetic oligonucleotide
  Sense strand starting at position 3801 of SEQ ID NO: 1885057
uaggaaggugaugguuaua

SEQ ID NO: 2312747 - RNA, 19 nt, Artificial Sequence
  Description of Artificial Sequence: Synthetic oligonucleotide
  Antisense strand to SEQ ID NO: 2312746
uauaaccaucaccuuccua

SEQ ID NO: 2312748 - RNA, 19 nt, Artificial Sequence
  Description of Artificial Sequence: Synthetic oligonucleotide
  Sense strand starting at position 3804 of SEQ ID NO: 1885057
gaaggugaugguuauaguu

SEQ ID NO: 2312749 - RNA, 19 nt, Artificial Sequence
  Description of Artificial Sequence: Synthetic oligonucleotide
  Antisense strand to SEQ ID NO: 2312748
aacuauaaccaucaccuuc

SEQ ID NO: 2312750 - RNA, 19 nt, Artificial Sequence
  Description of Artificial Sequence: Synthetic oligonucleotide
  Sense strand starting at position 3881 of SEQ ID NO: 1885057
aagaauguguaagugaguu

SEQ ID NO: 2312751 - RNA, 19 nt, Artificial Sequence
  Description of Artificial Sequence: Synthetic oligonucleotide
  Antisense strand to SEQ ID NO: 2312750
aacucacuuacacauucuu

SEQ ID NO: 2312752 - RNA, 19 nt, Artificial Sequence
  Description of Artificial Sequence: Synthetic oligonucleotide
  Sense strand starting at position 3969 of SEQ ID NO: 1885057
agauauucucuuugcuaug

SEQ ID NO: 2312753 - RNA, 19 nt, Artificial Sequence
  Description of Artificial Sequence: Synthetic oligonucleotide
  Antisense strand to SEQ ID NO: 2312752
cauagcaaagagaauaucu

SEQ ID NO: 2312754 - RNA, 19 nt, Artificial Sequence
  Description of Artificial Sequence: Synthetic oligonucleotide
  Sense strand starting at position 28 of SEQ ID NO: 1885058
ccaugacaucaccgaaaua

SEQ ID NO: 2312755 - RNA, 19 nt, Artificial Sequence
  Description of Artificial Sequence: Synthetic oligonucleotide
  Antisense strand to SEQ ID NO: 2312754
uauuucggugaugucaugg

SEQ ID NO: 2312756 - RNA, 19 nt, Artificial Sequence
  Description of Artificial Sequence: Synthetic oligonucleotide
  Sense strand starting at position 58 of SEQ ID NO: 1885058
acacaagcgcucugaguua

SEQ ID NO: 2312757 - RNA, 19 nt, Artificial Sequence
  Description of Artificial Sequence: Synthetic oligonucleotide
  Antisense strand to SEQ ID NO: 2312756
uaacucagagcgcuugugu

SEQ ID NO: 2312758 - RNA, 19 nt, Artificial Sequence
  Description of Artificial Sequence: Synthetic oligonucleotide
  Sense strand starting at position 63 of SEQ ID NO: 1885058
agcgcucugaguuaucaua

SEQ ID NO: 2312759 - RNA, 19 nt, Artificial Sequence
  Description of Artificial Sequence: Synthetic oligonucleotide
  Antisense strand to SEQ ID NO: 2312758
uaugauaacucagagcgcu

SEQ ID NO: 2312760 - RNA, 19 nt, Artificial Sequence
  Description of Artificial Sequence: Synthetic oligonucleotide
  Sense strand starting at position 65 of SEQ ID NO: 1885058
cgcucugaguuaucauauu

SEQ ID NO: 2312761 - RNA, 19 nt, Artificial Sequence
  Description of Artificial Sequence: Synthetic oligonucleotide
  Antisense strand to SEQ ID NO: 2312760
aauaugauaacucagagcg

SEQ ID NO: 2312762 - RNA, 19 nt, Artificial Sequence
  Description of Artificial Sequence: Synthetic oligonucleotide
  Sense strand starting at position 275 of SEQ ID NO: 1885058
auaagagagcgugaaguaa

SEQ ID NO: 2312763 - RNA, 19 nt, Artificial Sequence
  Description of Artificial Sequence: Synthetic oligonucleotide
  Antisense strand to SEQ ID NO: 2312762
uuacuucacgcucucuuau

SEQ ID NO: 2312764 - RNA, 19 nt, Artificial Sequence
  Description of Artificial Sequence: Synthetic oligonucleotide
  Sense strand starting at position 533 of SEQ ID NO: 1885058
augcgcuuuccacagcuau

SEQ ID NO: 2312765 - RNA, 19 nt, Artificial Sequence
  Description of Artificial Sequence: Synthetic oligonucleotide
  Antisense strand to SEQ ID NO: 2312764
auagcuguggaaagcgcau

SEQ ID NO: 2312766 - RNA, 19 nt, Artificial Sequence
  Description of Artificial Sequence: Synthetic oligonucleotide
  Sense strand starting at position 573 of SEQ ID NO: 1885058
ugaagaugcugcuuaaaua

SEQ ID NO: 2312767 - RNA, 19 nt, Artificial Sequence
  Description of Artificial Sequence: Synthetic oligonucleotide
  Antisense strand to SEQ ID NO: 2312766
uauuuaagcagcaucuuca

SEQ ID NO: 2312768 - RNA, 19 nt, Artificial Sequence
  Description of Artificial Sequence: Synthetic oligonucleotide
  Sense strand starting at position 722 of SEQ ID NO: 1885058
acacuauacugugcauaua

SEQ ID NO: 2312769 - RNA, 19 nt, Artificial Sequence
  Description of Artificial Sequence: Synthetic oligonucleotide
  Antisense strand to SEQ ID NO: 2312768
uauaugcacaguauagugu

SEQ ID NO: 2312770 - RNA, 19 nt, Artificial Sequence
  Description of Artificial Sequence: Synthetic oligonucleotide
  Sense strand starting at position 780 of SEQ ID NO: 1885058
cauaucauggguuaguuua

SEQ ID NO: 2312771 - RNA, 19 nt, Artificial Sequence
  Description of Artificial Sequence: Synthetic oligonucleotide
  Antisense strand to SEQ ID NO: 2312770
uaaacuaacccaugauaug

SEQ ID NO: 2312772 - RNA, 19 nt, Artificial Sequence
  Description of Artificial Sequence: Synthetic oligonucleotide
  Sense strand starting at position 792 of SEQ ID NO: 1885058
uaguuuacccaagggcaua

SEQ ID NO: 2312773 - RNA, 19 nt, Artificial Sequence
  Description of Artificial Sequence: Synthetic oligonucleotide
  Antisense strand to SEQ ID NO: 2312772
uaugcccuuggguaaacua

SEQ ID NO: 2312774 - RNA, 19 nt, Artificial Sequence
  Description of Artificial Sequence: Synthetic oligonucleotide
  Sense strand starting at position 858 of SEQ ID NO: 1885058
cucugauauucccuccagu

SEQ ID NO: 2312775 - RNA, 19 nt, Artificial Sequence
  Description of Artificial Sequence: Synthetic oligonucleotide
  Antisense strand to SEQ ID NO: 2312774
acuggagggaauaucagag

SEQ ID NO: 2312776 - RNA, 19 nt, Artificial Sequence
  Description of Artificial Sequence: Synthetic oligonucleotide
  Sense strand starting at position 861 of SEQ ID NO: 1885058
ugauauucccuccaguguu

SEQ ID NO: 2312777 - RNA, 19 nt, Artificial Sequence
  Description of Artificial Sequence: Synthetic oligonucleotide
  Antisense strand to SEQ ID NO: 2312776
aacacuggagggaauauca

SEQ ID NO: 2312778 - RNA, 19 nt, Artificial Sequence
  Description of Artificial Sequence: Synthetic oligonucleotide
  Sense strand starting at position 942 of SEQ ID NO: 1885058
cccuacaggcuuuaugaau

SEQ ID NO: 2312779 - RNA, 19 nt, Artificial Sequence
  Description of Artificial Sequence: Synthetic oligonucleotide
  Antisense strand to SEQ ID NO: 2312778
auucauaaagccuguaggg

SEQ ID NO: 2312780 - RNA, 19 nt, Artificial Sequence
  Description of Artificial Sequence: Synthetic oligonucleotide
  Sense strand starting at position 948 of SEQ ID NO: 1885058
aggcuuuaugaaugucaua

SEQ ID NO: 2312781 - RNA, 19 nt, Artificial Sequence
  Description of Artificial Sequence: Synthetic oligonucleotide
  Antisense strand to SEQ ID NO: 2312780
uaugacauucauaaagccu

SEQ ID NO: 2312782 - RNA, 19 nt, Artificial Sequence
  Description of Artificial Sequence: Synthetic oligonucleotide
  Sense strand starting at position 1021 of SEQ ID NO: 1885058
ccuucuugagcuuagcgaa

SEQ ID NO: 2312783 - RNA, 19 nt, Artificial Sequence
  Description of Artificial Sequence: Synthetic oligonucleotide
  Antisense strand to SEQ ID NO: 2312782
uucgcuaagcucaagaagg

SEQ ID NO: 2312784 - RNA, 19 nt, Artificial Sequence
  Description of Artificial Sequence: Synthetic oligonucleotide
  Sense strand starting at position 1065 of SEQ ID NO: 1885058
gagaucugucaauagcuca

SEQ ID NO: 2312785 - RNA, 19 nt, Artificial Sequence
  Description of Artificial Sequence: Synthetic oligonucleotide
  Antisense strand to SEQ ID NO: 2312784
ugagcuauugacagaucuc

SEQ ID NO: 2312786 - RNA, 19 nt, Artificial Sequence
  Description of Artificial Sequence: Synthetic oligonucleotide
  Sense strand starting at position 1247 of SEQ ID NO: 1885058
guaguagaauguguggcau

SEQ ID NO: 2312787 - RNA, 19 nt, Artificial Sequence
  Description of Artificial Sequence: Synthetic oligonucleotide
  Antisense strand to SEQ ID NO: 2312786
augccacacauucuacuac

SEQ ID NO: 2312788 - RNA, 19 nt, Artificial Sequence
  Description of Artificial Sequence: Synthetic oligonucleotide
  Sense strand starting at position 1253 of SEQ ID NO: 1885058
gaauguguggcauagagug

SEQ ID NO: 2312789 - RNA, 19 nt, Artificial Sequence
  Description of Artificial Sequence: Synthetic oligonucleotide
  Antisense strand to SEQ ID NO: 2312788
cacucuaugccacacauuc

SEQ ID NO: 2312790 - RNA, 19 nt, Artificial Sequence
  Description of Artificial Sequence: Synthetic oligonucleotide
  Sense strand starting at position 1255 of SEQ ID NO: 1885058
auguguggcauagagugaa

SEQ ID NO: 2312791 - RNA, 19 nt, Artificial Sequence
  Description of Artificial Sequence: Synthetic oligonucleotide
  Antisense strand to SEQ ID NO: 2312790
uucacucuaugccacacau

SEQ ID NO: 2312792 - RNA, 19 nt, Artificial Sequence
  Description of Artificial Sequence: Synthetic oligonucleotide
  Sense strand starting at position 1259 of SEQ ID NO: 1885058
guggcauagagugaauguu

SEQ ID NO: 2312793 - RNA, 19 nt, Artificial Sequence
  Description of Artificial Sequence: Synthetic oligonucleotide
  Antisense strand to SEQ ID NO: 2312792
aacauucacucuaugccac

SEQ ID NO: 2312794 - RNA, 19 nt, Artificial Sequence
  Description of Artificial Sequence: Synthetic oligonucleotide
  Sense strand starting at position 1265 of SEQ ID NO: 1885058
uagagugaauguuccauaa

SEQ ID NO: 2312795 - RNA, 19 nt, Artificial Sequence
  Description of Artificial Sequence: Synthetic oligonucleotide
  Antisense strand to SEQ ID NO: 2312794
uuauggaacauucacucua

SEQ ID NO: 2312796 - RNA, 19 nt, Artificial Sequence
  Description of Artificial Sequence: Synthetic oligonucleotide
  Sense strand starting at position 1269 of SEQ ID NO: 1885058
gugaauguuccauaauaau

SEQ ID NO: 2312797 - RNA, 19 nt, Artificial Sequence
  Description of Artificial Sequence: Synthetic oligonucleotide
  Antisense strand to SEQ ID NO: 2312796
auuauuauggaacauucac

SEQ ID NO: 2312798 - RNA, 19 nt, Artificial Sequence
  Description of Artificial Sequence: Synthetic oligonucleotide
  Sense strand starting at position 2089 of SEQ ID NO: 1885058
cuacuauaucugggccuaa

SEQ ID NO: 2312799 - RNA, 19 nt, Artificial Sequence
  Description of Artificial Sequence: Synthetic oligonucleotide
  Antisense strand to SEQ ID NO: 2312798
uuaggcccagauauaguag

SEQ ID NO: 2312800 - RNA, 19 nt, Artificial Sequence
  Description of Artificial Sequence: Synthetic oligonucleotide
  Sense strand starting at position 2200 of SEQ ID NO: 1885058
acuaauacuccagggagua

SEQ ID NO: 2312801 - RNA, 19 nt, Artificial Sequence
  Description of Artificial Sequence: Synthetic oligonucleotide
  Antisense strand to SEQ ID NO: 2312800
uacucccuggaguauuagu

SEQ ID NO: 2312802 - RNA, 19 nt, Artificial Sequence
  Description of Artificial Sequence: Synthetic oligonucleotide
  Sense strand starting at position 2201 of SEQ ID NO: 1885058
cuaauacuccagggaguaa

SEQ ID NO: 2312803 - RNA, 19 nt, Artificial Sequence
  Description of Artificial Sequence: Synthetic oligonucleotide
  Antisense strand to SEQ ID NO: 2312802
uuacucccuggaguauuag

SEQ ID NO: 2312804 - RNA, 19 nt, Artificial Sequence
  Description of Artificial Sequence: Synthetic oligonucleotide
  Sense strand starting at position 2286 of SEQ ID NO: 1885058
gcauucucauucuuagaga

SEQ ID NO: 2312805 - RNA, 19 nt, Artificial Sequence
  Description of Artificial Sequence: Synthetic oligonucleotide
  Antisense strand to SEQ ID NO: 2312804
ucucuaagaaugagaaugc

SEQ ID NO: 2312806 - RNA, 19 nt, Artificial Sequence
  Description of Artificial Sequence: Synthetic oligonucleotide
  Sense strand starting at position 2467 of SEQ ID NO: 1885058
ggccacgucucuccuuuaa

SEQ ID NO: 2312807 - RNA, 19 nt, Artificial Sequence
  Description of Artificial Sequence: Synthetic oligonucleotide
  Antisense strand to SEQ ID NO: 2312806
uuaaaggagagacguggcc

SEQ ID NO: 2312808 - RNA, 19 nt, Artificial Sequence
  Description of Artificial Sequence: Synthetic oligonucleotide
  Sense strand starting at position 2514 of SEQ ID NO: 1885058
agaugcuaucaguguuccu

SEQ ID NO: 2312809 - RNA, 19 nt, Artificial Sequence
  Description of Artificial Sequence: Synthetic oligonucleotide
  Antisense strand to SEQ ID NO: 2312808
aggaacacugauagcaucu

SEQ ID NO: 2312810 - RNA, 19 nt, Artificial Sequence
  Description of Artificial Sequence: Synthetic oligonucleotide
  Sense strand starting at position 2519 of SEQ ID NO: 1885058
cuaucaguguuccuuccaa

SEQ ID NO: 2312811 - RNA, 19 nt, Artificial Sequence
  Description of Artificial Sequence: Synthetic oligonucleotide
  Antisense strand to SEQ ID NO: 2312810
uuggaaggaacacugauag

SEQ ID NO: 2312812 - RNA, 19 nt, Artificial Sequence
  Description of Artificial Sequence: Synthetic oligonucleotide
  Sense strand starting at position 2565 of SEQ ID NO: 1885058
auaauaaucugucugaggu

SEQ ID NO: 2312813 - RNA, 19 nt, Artificial Sequence
  Description of Artificial Sequence: Synthetic oligonucleotide
  Antisense strand to SEQ ID NO: 2312812
accucagacagauuauuau

SEQ ID NO: 2312814 - RNA, 19 nt, Artificial Sequence
  Description of Artificial Sequence: Synthetic oligonucleotide
  Sense strand starting at position 2566 of SEQ ID NO: 1885058
uaauaaucugucugagguc

SEQ ID NO: 2312815 - RNA, 19 nt, Artificial Sequence
  Description of Artificial Sequence: Synthetic oligonucleotide
  Antisense strand to SEQ ID NO: 2312814
gaccucagacagauuauua

SEQ ID NO: 2312816 - RNA, 19 nt, Artificial Sequence
  Description of Artificial Sequence: Synthetic oligonucleotide
  Sense strand starting at position 2575 of SEQ ID NO: 1885058
gucugaggucaugaagucu

SEQ ID NO: 2312817 - RNA, 19 nt, Artificial Sequence
  Description of Artificial Sequence: Synthetic oligonucleotide
  Antisense strand to SEQ ID NO: 2312816
agacuucaugaccucagac

SEQ ID NO: 2312818 - RNA, 19 nt, Artificial Sequence
  Description of Artificial Sequence: Synthetic oligonucleotide
  Sense strand starting at position 2626 of SEQ ID NO: 1885058
gcgucauccaaauggcaag

SEQ ID NO: 2312819 - RNA, 19 nt, Artificial Sequence
  Description of Artificial Sequence: Synthetic oligonucleotide
  Antisense strand to SEQ ID NO: 2312818
cuugccauuuggaugacgc

SEQ ID NO: 2312820 - RNA, 19 nt, Artificial Sequence
  Description of Artificial Sequence: Synthetic oligonucleotide
  Sense strand starting at position 2665 of SEQ ID NO: 1885058
cuggaagcuccuugagaac

SEQ ID NO: 2312821 - RNA, 19 nt, Artificial Sequence
  Description of Artificial Sequence: Synthetic oligonucleotide
  Antisense strand to SEQ ID NO: 2312820
guucucaaggagcuuccag

SEQ ID NO: 2312822 - RNA, 19 nt, Artificial Sequence
  Description of Artificial Sequence: Synthetic oligonucleotide
  Sense strand starting at position 2749 of SEQ ID NO: 1885058
uagagauagcuaugaaagc

SEQ ID NO: 2312823 - RNA, 19 nt, Artificial Sequence
  Description of Artificial Sequence: Synthetic oligonucleotide
  Antisense strand to SEQ ID NO: 2312822
gcuuucauagcuaucucua

SEQ ID NO: 2312824 - RNA, 19 nt, Artificial Sequence
  Description of Artificial Sequence: Synthetic oligonucleotide
  Sense strand starting at position 3004 of SEQ ID NO: 1885058
cugaaucagcucuggaagu

SEQ ID NO: 2312825 - RNA, 19 nt, Artificial Sequence
  Description of Artificial Sequence: Synthetic oligonucleotide
  Antisense strand to SEQ ID NO: 2312824
acuuccagagcugauucag

SEQ ID NO: 2312826 - RNA, 19 nt, Artificial Sequence
  Description of Artificial Sequence: Synthetic oligonucleotide
  Sense strand starting at position 3006 of SEQ ID NO: 1885058
gaaucagcucuggaaguug

SEQ ID NO: 2312827 - RNA, 19 nt, Artificial Sequence
  Description of Artificial Sequence: Synthetic oligonucleotide
  Antisense strand to SEQ ID NO: 2312826
caacuuccagagcugauuc

SEQ ID NO: 2312828 - RNA, 19 nt, Artificial Sequence
  Description of Artificial Sequence: Synthetic oligonucleotide
  Sense strand starting at position 3032 of SEQ ID NO: 1885058
cccuaaugcugccuuaaag

SEQ ID NO: 2312829 - RNA, 19 nt, Artificial Sequence
  Description of Artificial Sequence: Synthetic oligonucleotide
  Antisense strand to SEQ ID NO: 2312828
cuuuaaggcagcauuaggg

SEQ ID NO: 2312830 - RNA, 19 nt, Artificial Sequence
  Description of Artificial Sequence: Synthetic oligonucleotide
  Sense strand starting at position 3198 of SEQ ID NO: 1885058
uugugagaccuuggacaau

SEQ ID NO: 2312831 - RNA, 19 nt, Artificial Sequence
  Description of Artificial Sequence: Synthetic oligonucleotide
  Antisense strand to SEQ ID NO: 2312830
auuguccaaggucucacaa

SEQ ID NO: 2312832 - RNA, 19 nt, Artificial Sequence
  Description of Artificial Sequence: Synthetic oligonucleotide
  Sense strand starting at position 3821 of SEQ ID NO: 1885058
cguucugccgggaagugua

SEQ ID NO: 2312833 - RNA, 19 nt, Artificial Sequence
  Description of Artificial Sequence: Synthetic oligonucleotide
  Antisense strand to SEQ ID NO: 2312832
uacacuucccggcagaacg

SEQ ID NO: 2312834 - RNA, 19 nt, Artificial Sequence
  Description of Artificial Sequence: Synthetic oligonucleotide
  Sense strand starting at position 37 of SEQ ID NO: 1885059
aucugucucccagacuuga

SEQ ID NO: 2312835 - RNA, 19 nt, Artificial Sequence
  Description of Artificial Sequence: Synthetic oligonucleotide
  Antisense strand to SEQ ID NO: 2312834
ucaagucugggagacagau

SEQ ID NO: 2312836 - RNA, 19 nt, Artificial Sequence
  Description of Artificial Sequence: Synthetic oligonucleotide
  Sense strand starting at position 51 of SEQ ID NO: 1885059
cuugaaagaucaguguaua

SEQ ID NO: 2312837 - RNA, 19 nt, Artificial Sequence
  Description of Artificial Sequence: Synthetic oligonucleotide
  Antisense strand to SEQ ID NO: 2312836
uauacacugaucuuucaag

SEQ ID NO: 2312838 - RNA, 19 nt, Artificial Sequence
  Description of Artificial Sequence: Synthetic oligonucleotide
  Sense strand starting at position 52 of SEQ ID NO: 1885059
uugaaagaucaguguauac

SEQ ID NO: 2312839 - RNA, 19 nt, Artificial Sequence
  Description of Artificial Sequence: Synthetic oligonucleotide
  Antisense strand to SEQ ID NO: 2312838
guauacacugaucuuucaa

SEQ ID NO: 2312840 - RNA, 19 nt, Artificial Sequence
  Description of Artificial Sequence: Synthetic oligonucleotide
  Sense strand starting at position 146 of SEQ ID NO: 1885059
gggagcucuucucugaauc

SEQ ID NO: 2312841 - RNA, 19 nt, Artificial Sequence
  Description of Artificial Sequence: Synthetic oligonucleotide
  Antisense strand to SEQ ID NO: 2312840
gauucagagaagagcuccc

SEQ ID NO: 2312842 - RNA, 19 nt, Artificial Sequence
  Description of Artificial Sequence: Synthetic oligonucleotide
  Sense strand starting at position 249 of SEQ ID NO: 1885059
uugaacaaguuugugaauu

SEQ ID NO: 2312843 - RNA, 19 nt, Artificial Sequence
  Description of Artificial Sequence: Synthetic oligonucleotide
  Antisense strand to SEQ ID NO: 2312842
aauucacaaacuuguucaa

SEQ ID NO: 2312844 - RNA, 19 nt, Artificial Sequence
  Description of Artificial Sequence: Synthetic oligonucleotide
  Sense strand starting at position 251 of SEQ ID NO: 1885059
gaacaaguuugugaauuua

SEQ ID NO: 2312845 - RNA, 19 nt, Artificial Sequence
  Description of Artificial Sequence: Synthetic oligonucleotide
  Antisense strand to SEQ ID NO: 2312844
uaaauucacaaacuuguuc

SEQ ID NO: 2312846 - RNA, 19 nt, Artificial Sequence
  Description of Artificial Sequence: Synthetic oligonucleotide
  Sense strand starting at position 347 of SEQ ID NO: 1885059
guacuaaaugcucaacgau

SEQ ID NO: 2312847 - RNA, 19 nt, Artificial Sequence
  Description of Artificial Sequence: Synthetic oligonucleotide
  Antisense strand to SEQ ID NO: 2312846
aucguugagcauuuaguac

SEQ ID NO: 2312848 - RNA, 19 nt, Artificial Sequence
  Description of Artificial Sequence: Synthetic oligonucleotide
  Sense strand starting at position 361 of SEQ ID NO: 1885059
acgauuccauucucucaga

SEQ ID NO: 2312849 - RNA, 19 nt, Artificial Sequence
  Description of Artificial Sequence: Synthetic oligonucleotide
  Antisense strand to SEQ ID NO: 2312848
ucugagagaauggaaucgu

SEQ ID NO: 2312850 - RNA, 19 nt, Artificial Sequence
  Description of Artificial Sequence: Synthetic oligonucleotide
  Sense strand starting at position 382 of SEQ ID NO: 1885059
auggaacauucugucacau

SEQ ID NO: 2312851 - RNA, 19 nt, Artificial Sequence
  Description of Artificial Sequence: Synthetic oligonucleotide
  Antisense strand to SEQ ID NO: 2312850
augugacagaauguuccau

SEQ ID NO: 2312852 - RNA, 19 nt, Artificial Sequence
  Description of Artificial Sequence: Synthetic oligonucleotide
  Sense strand starting at position 558 of SEQ ID NO: 1885059
agcaguuuccaugaacauu

SEQ ID NO: 2312853 - RNA, 19 nt, Artificial Sequence
  Description of Artificial Sequence: Synthetic oligonucleotide
  Antisense strand to SEQ ID NO: 2312852
aauguucauggaaacugcu

SEQ ID NO: 2312854 - RNA, 19 nt, Artificial Sequence
  Description of Artificial Sequence: Synthetic oligonucleotide
  Sense strand starting at position 626 of SEQ ID NO: 1885059
aaguaucaucugggcugaa

SEQ ID NO: 2312855 - RNA, 19 nt, Artificial Sequence
  Description of Artificial Sequence: Synthetic oligonucleotide
  Antisense strand to SEQ ID NO: 2312854
uucagcccagaugauacuu

SEQ ID NO: 2312856 - RNA, 19 nt, Artificial Sequence
  Description of Artificial Sequence: Synthetic oligonucleotide
  Sense strand starting at position 627 of SEQ ID NO: 1885059
aguaucaucugggcugaag

SEQ ID NO: 2312857 - RNA, 19 nt, Artificial Sequence
  Description of Artificial Sequence: Synthetic oligonucleotide
  Antisense strand to SEQ ID NO: 2312856
cuucagcccagaugauacu

SEQ ID NO: 2312858 - RNA, 19 nt, Artificial Sequence
  Description of Artificial Sequence: Synthetic oligonucleotide
  Sense strand starting at position 715 of SEQ ID NO: 1885059
guccuaauaccucaggacu

SEQ ID NO: 2312859 - RNA, 19 nt, Artificial Sequence
  Description of Artificial Sequence: Synthetic oligonucleotide
  Antisense strand to SEQ ID NO: 2312858
aguccugagguauuaggac

SEQ ID NO: 2312860 - RNA, 19 nt, Artificial Sequence
  Description of Artificial Sequence: Synthetic oligonucleotide
  Sense strand starting at position 912 of SEQ ID NO: 1885059
ugcuuucagcguuccgaca

SEQ ID NO: 2312861 - RNA, 19 nt, Artificial Sequence
  Description of Artificial Sequence: Synthetic oligonucleotide
  Antisense strand to SEQ ID NO: 2312860
ugucggaacgcugaaagca

SEQ ID NO: 2312862 - RNA, 19 nt, Artificial Sequence
  Description of Artificial Sequence: Synthetic oligonucleotide
  Sense strand starting at position 963 of SEQ ID NO: 1885059
ucgguuguccuucaaggaa

SEQ ID NO: 2312863 - RNA, 19 nt, Artificial Sequence
  Description of Artificial Sequence: Synthetic oligonucleotide
  Antisense strand to SEQ ID NO: 2312862
uuccuugaaggacaaccga

SEQ ID NO: 2312864 - RNA, 19 nt, Artificial Sequence
  Description of Artificial Sequence: Synthetic oligonucleotide
  Sense strand starting at position 1037 of SEQ ID NO: 1885059
cucacagaccugugaauaa

SEQ ID NO: 2312865 - RNA, 19 nt, Artificial Sequence
  Description of Artificial Sequence: Synthetic oligonucleotide
  Antisense strand to SEQ ID NO: 2312864
uuauucacaggucugugag

SEQ ID NO: 2312866 - RNA, 19 nt, Artificial Sequence
  Description of Artificial Sequence: Synthetic oligonucleotide
  Sense strand starting at position 1276 of SEQ ID NO: 1885059
cagaguagugcucacagga

SEQ ID NO: 2312867 - RNA, 19 nt, Artificial Sequence
  Description of Artificial Sequence: Synthetic oligonucleotide
  Antisense strand to SEQ ID NO: 2312866
uccugugagcacuacucug

SEQ ID NO: 2312868 - RNA, 19 nt, Artificial Sequence
  Description of Artificial Sequence: Synthetic oligonucleotide
  Sense strand starting at position 1365 of SEQ ID NO: 1885059
gcauuugcuagccaguuga

SEQ ID NO: 2312869 - RNA, 19 nt, Artificial Sequence
  Description of Artificial Sequence: Synthetic oligonucleotide
  Antisense strand to SEQ ID NO: 2312868
ucaacuggcuagcaaaugc

SEQ ID NO: 2312870 - RNA, 19 nt, Artificial Sequence
  Description of Artificial Sequence: Synthetic oligonucleotide
  Sense strand starting at position 1478 of SEQ ID NO: 1885059
cagguagacuuguuggaua

SEQ ID NO: 2312871 - RNA, 19 nt, Artificial Sequence
  Description of Artificial Sequence: Synthetic oligonucleotide
  Antisense strand to SEQ ID NO: 2312870
uauccaacaagucuaccug

SEQ ID NO: 2312872 - RNA, 19 nt, Artificial Sequence
  Description of Artificial Sequence: Synthetic oligonucleotide
  Sense strand starting at position 1480 of SEQ ID NO: 1885059
gguagacuuguuggauaac

SEQ ID NO: 2312873 - RNA, 19 nt, Artificial Sequence
  Description of Artificial Sequence: Synthetic oligonucleotide
  Antisense strand to SEQ ID NO: 2312872
guuauccaacaagucuacc

SEQ ID NO: 2312874 - RNA, 19 nt, Artificial Sequence
  Description of Artificial Sequence: Synthetic oligonucleotide
  Sense strand starting at position 1490 of SEQ ID NO: 1885059
uuggauaacagguguguga

SEQ ID NO: 2312875 - RNA, 19 nt, Artificial Sequence
  Description of Artificial Sequence: Synthetic oligonucleotide
  Antisense strand to SEQ ID NO: 2312874
ucacacaccuguuauccaa

SEQ ID NO: 2312876 - RNA, 19 nt, Artificial Sequence
  Description of Artificial Sequence: Synthetic oligonucleotide
  Sense strand starting at position 1492 of SEQ ID NO: 1885059
ggauaacaggugugugaua

SEQ ID NO: 2312877 - RNA, 19 nt, Artificial Sequence
  Description of Artificial Sequence: Synthetic oligonucleotide
  Antisense strand to SEQ ID NO: 2312876
uaucacacaccuguuaucc

SEQ ID NO: 2312878 - RNA, 19 nt, Artificial Sequence
  Description of Artificial Sequence: Synthetic oligonucleotide
  Sense strand starting at position 1493 of SEQ ID NO: 1885059
gauaacaggugugugauaa

SEQ ID NO: 2312879 - RNA, 19 nt, Artificial Sequence
  Description of Artificial Sequence: Synthetic oligonucleotide
  Antisense strand to SEQ ID NO: 2312878
uuaucacacaccuguuauc

SEQ ID NO: 2312880 - RNA, 19 nt, Artificial Sequence
  Description of Artificial Sequence: Synthetic oligonucleotide
  Sense strand starting at position 1494 of SEQ ID NO: 1885059
auaacaggugugugauaag

SEQ ID NO: 2312881 - RNA, 19 nt, Artificial Sequence
  Description of Artificial Sequence: Synthetic oligonucleotide
  Antisense strand to SEQ ID NO: 2312880
cuuaucacacaccuguuau

SEQ ID NO: 2312882 - RNA, 19 nt, Artificial Sequence
  Description of Artificial Sequence: Synthetic oligonucleotide
  Sense strand starting at position 1835 of SEQ ID NO: 1885059
aggaaaucggucugauuaa

SEQ ID NO: 2312883 - RNA, 19 nt, Artificial Sequence
  Description of Artificial Sequence: Synthetic oligonucleotide
  Antisense strand to SEQ ID NO: 2312882
uuaaucagaccgauuuccu

SEQ ID NO: 2312884 - RNA, 19 nt, Artificial Sequence
  Description of Artificial Sequence: Synthetic oligonucleotide
  Sense strand starting at position 1847 of SEQ ID NO: 1885059
ugauuaaggcagugagcaa

SEQ ID NO: 2312885 - RNA, 19 nt, Artificial Sequence
  Description of Artificial Sequence: Synthetic oligonucleotide
  Antisense strand to SEQ ID NO: 2312884
uugcucacugccuuaauca

SEQ ID NO: 2312886 - RNA, 19 nt, Artificial Sequence
  Description of Artificial Sequence: Synthetic oligonucleotide
  Sense strand starting at position 1867 of SEQ ID NO: 1885059
guaggagagcucugaaaca

SEQ ID NO: 2312887 - RNA, 19 nt, Artificial Sequence
  Description of Artificial Sequence: Synthetic oligonucleotide
  Antisense strand to SEQ ID NO: 2312886
uguuucagagcucuccuac

SEQ ID NO: 2312888 - RNA, 19 nt, Artificial Sequence
  Description of Artificial Sequence: Synthetic oligonucleotide
  Sense strand starting at position 1879 of SEQ ID NO: 1885059
ugaaacagauucguguuaa

SEQ ID NO: 2312889 - RNA, 19 nt, Artificial Sequence
  Description of Artificial Sequence: Synthetic oligonucleotide
  Antisense strand to SEQ ID NO: 2312888
uuaacacgaaucuguuuca

SEQ ID NO: 2312890 - RNA, 19 nt, Artificial Sequence
  Description of Artificial Sequence: Synthetic oligonucleotide
  Sense strand starting at position 1923 of SEQ ID NO: 1885059
cugcuacggaguuaagaga

SEQ ID NO: 2312891 - RNA, 19 nt, Artificial Sequence
  Description of Artificial Sequence: Synthetic oligonucleotide
  Antisense strand to SEQ ID NO: 2312890
ucucuuaacuccguagcag

SEQ ID NO: 2312892 - RNA, 19 nt, Artificial Sequence
  Description of Artificial Sequence: Synthetic oligonucleotide
  Sense strand starting at position 1932 of SEQ ID NO: 1885059
aguuaagagaauuguaguu

SEQ ID NO: 2312893 - RNA, 19 nt, Artificial Sequence
  Description of Artificial Sequence: Synthetic oligonucleotide
  Antisense strand to SEQ ID NO: 2312892
aacuacaauucucuuaacu

SEQ ID NO: 2312894 - RNA, 19 nt, Artificial Sequence
  Description of Artificial Sequence: Synthetic oligonucleotide
  Sense strand starting at position 2340 of SEQ ID NO: 1885059
ggagcuccagcuuagaaau

SEQ ID NO: 2312895 - RNA, 19 nt, Artificial Sequence
  Description of Artificial Sequence: Synthetic oligonucleotide
  Antisense strand to SEQ ID NO: 2312894
auuucuaagcuggagcucc

SEQ ID NO: 2312896 - RNA, 19 nt, Artificial Sequence
  Description of Artificial Sequence: Synthetic oligonucleotide
  Sense strand starting at position 2514 of SEQ ID NO: 1885059
accgaugaugauggugaua

SEQ ID NO: 2312897 - RNA, 19 nt, Artificial Sequence
  Description of Artificial Sequence: Synthetic oligonucleotide
  Antisense strand to SEQ ID NO: 2312896
uaucaccaucaucaucggu

SEQ ID NO: 2312898 - RNA, 19 nt, Artificial Sequence
  Description of Artificial Sequence: Synthetic oligonucleotide
  Sense strand starting at position 2547 of SEQ ID NO: 1885059
acaagaaucccaggcucau

SEQ ID NO: 2312899 - RNA, 19 nt, Artificial Sequence
  Description of Artificial Sequence: Synthetic oligonucleotide
  Antisense strand to SEQ ID NO: 2312898
augagccugggauucuugu

SEQ ID NO: 2312900 - RNA, 19 nt, Artificial Sequence
  Description of Artificial Sequence: Synthetic oligonucleotide
  Sense strand starting at position 2574 of SEQ ID NO: 1885059
guuguucacgaguagaaga

SEQ ID NO: 2312901 - RNA, 19 nt, Artificial Sequence
  Description of Artificial Sequence: Synthetic oligonucleotide
  Antisense strand to SEQ ID NO: 2312900
ucuucuacucgugaacaac

SEQ ID NO: 2312902 - RNA, 19 nt, Artificial Sequence
  Description of Artificial Sequence: Synthetic oligonucleotide
  Sense strand starting at position 2625 of SEQ ID NO: 1885059
gaggaaguauggcuaaguu

SEQ ID NO: 2312903 - RNA, 19 nt, Artificial Sequence
  Description of Artificial Sequence: Synthetic oligonucleotide
  Antisense strand to SEQ ID NO: 2312902
aacuuagccauacuuccuc

SEQ ID NO: 2312904 - RNA, 19 nt, Artificial Sequence
  Description of Artificial Sequence: Synthetic oligonucleotide
  Sense strand starting at position 3386 of SEQ ID NO: 1885059
gggaucuccaauggucagu

SEQ ID NO: 2312905 - RNA, 19 nt, Artificial Sequence
  Description of Artificial Sequence: Synthetic oligonucleotide
  Antisense strand to SEQ ID NO: 2312904
acugaccauuggagauccc

SEQ ID NO: 2312906 - RNA, 19 nt, Artificial Sequence
  Description of Artificial Sequence: Synthetic oligonucleotide
  Sense strand starting at position 3532 of SEQ ID NO: 1885059
gguguuacucaggacacca

SEQ ID NO: 2312907 - RNA, 19 nt, Artificial Sequence
  Description of Artificial Sequence: Synthetic oligonucleotide
  Antisense strand to SEQ ID NO: 2312906
ugguguccugaguaacacc

SEQ ID NO: 2312908 - RNA, 19 nt, Artificial Sequence
  Description of Artificial Sequence: Synthetic oligonucleotide
  Sense strand starting at position 3638 of SEQ ID NO: 1885059
uucuucugagauugacuca

SEQ ID NO: 2312909 - RNA, 19 nt, Artificial Sequence
  Description of Artificial Sequence: Synthetic oligonucleotide
  Antisense strand to SEQ ID NO: 2312908
ugagucaaucucagaagaa

SEQ ID NO: 2312910 - RNA, 19 nt, Artificial Sequence
  Description of Artificial Sequence: Synthetic oligonucleotide
  Sense strand starting at position 3675 of SEQ ID NO: 1885059
ugacaucuccaucagagcu

SEQ ID NO: 2312911 - RNA, 19 nt, Artificial Sequence
  Description of Artificial Sequence: Synthetic oligonucleotide
  Antisense strand to SEQ ID NO: 2312910
agcucugauggagauguca

SEQ ID NO: 2312912 - RNA, 19 nt, Artificial Sequence
  Description of Artificial Sequence: Synthetic oligonucleotide
  Sense strand starting at position 3977 of SEQ ID NO: 1885059
cugcaauaaccuuacacga

SEQ ID NO: 2312913 - RNA, 19 nt, Artificial Sequence
  Description of Artificial Sequence: Synthetic oligonucleotide
  Antisense strand to SEQ ID NO: 2312912
ucguguaagguuauugcag

SEQ ID NO: 2312914 - RNA, 19 nt, Artificial Sequence
  Description of Artificial Sequence: Synthetic oligonucleotide
  Sense strand starting at position 78 of SEQ ID NO: 1885060
ccaagcuaucucugaagga

SEQ ID NO: 2312915 - RNA, 19 nt, Artificial Sequence
  Description of Artificial Sequence: Synthetic oligonucleotide
  Antisense strand to SEQ ID NO: 2312914
uccuucagagauagcuugg

SEQ ID NO: 2312916 - RNA, 19 nt, Artificial Sequence
  Description of Artificial Sequence: Synthetic oligonucleotide
  Sense strand starting at position 82 of SEQ ID NO: 1885060
gcuaucucugaaggaagau

SEQ ID NO: 2312917 - RNA, 19 nt, Artificial Sequence
  Description of Artificial Sequence: Synthetic oligonucleotide
  Antisense strand to SEQ ID NO: 2312916
aucuuccuucagagauagc

SEQ ID NO: 2312918 - RNA, 19 nt, Artificial Sequence
  Description of Artificial Sequence: Synthetic oligonucleotide
  Sense strand starting at position 213 of SEQ ID NO: 1885060
uugaaaguagguuacuuau

SEQ ID NO: 2312919 - RNA, 19 nt, Artificial Sequence
  Description of Artificial Sequence: Synthetic oligonucleotide
  Antisense strand to SEQ ID NO: 2312918
auaaguaaccuacuuucaa

SEQ ID NO: 2312920 - RNA, 19 nt, Artificial Sequence
  Description of Artificial Sequence: Synthetic oligonucleotide
  Sense strand starting at position 215 of SEQ ID NO: 1885060
gaaaguagguuacuuauag

SEQ ID NO: 2312921 - RNA, 19 nt, Artificial Sequence
  Description of Artificial Sequence: Synthetic oligonucleotide
  Antisense strand to SEQ ID NO: 2312920
cuauaaguaaccuacuuuc

SEQ ID NO: 2312922 - RNA, 19 nt, Artificial Sequence
  Description of Artificial Sequence: Synthetic oligonucleotide
  Sense strand starting at position 275 of SEQ ID NO: 1885060
uaccauuagcuaugaggau

SEQ ID NO: 2312923 - RNA, 19 nt, Artificial Sequence
  Description of Artificial Sequence: Synthetic oligonucleotide
  Antisense strand to SEQ ID NO: 2312922
auccucauagcuaauggua

SEQ ID NO: 2312924 - RNA, 19 nt, Artificial Sequence
  Description of Artificial Sequence: Synthetic oligonucleotide
  Sense strand starting at position 279 of SEQ ID NO: 1885060
auuagcuaugaggauguau

SEQ ID NO: 2312925 - RNA, 19 nt, Artificial Sequence
  Description of Artificial Sequence: Synthetic oligonucleotide
  Antisense strand to SEQ ID NO: 2312924
auacauccucauagcuaau

SEQ ID NO: 2312926 - RNA, 19 nt, Artificial Sequence
  Description of Artificial Sequence: Synthetic oligonucleotide
  Sense strand starting at position 288 of SEQ ID NO: 1885060
gaggauguaucuuuauagc

SEQ ID NO: 2312927 - RNA, 19 nt, Artificial Sequence
  Description of Artificial Sequence: Synthetic oligonucleotide
  Antisense strand to SEQ ID NO: 2312926
gcuauaaagauacauccuc

SEQ ID NO: 2312928 - RNA, 19 nt, Artificial Sequence
  Description of Artificial Sequence: Synthetic oligonucleotide
  Sense strand starting at position 391 of SEQ ID NO: 1885060
cauguuuauguacauggaa

SEQ ID NO: 2312929 - RNA, 19 nt, Artificial Sequence
  Description of Artificial Sequence: Synthetic oligonucleotide
  Antisense strand to SEQ ID NO: 2312928
uuccauguacauaaacaug

SEQ ID NO: 2312930 - RNA, 19 nt, Artificial Sequence
  Description of Artificial Sequence: Synthetic oligonucleotide
  Sense strand starting at position 648 of SEQ ID NO: 1885060
gguugcagacauugaccaa

SEQ ID NO: 2312931 - RNA, 19 nt, Artificial Sequence
  Description of Artificial Sequence: Synthetic oligonucleotide
  Antisense strand to SEQ ID NO: 2312930
uuggucaaugucugcaacc

SEQ ID NO: 2312932 - RNA, 19 nt, Artificial Sequence
  Description of Artificial Sequence: Synthetic oligonucleotide
  Sense strand starting at position 651 of SEQ ID NO: 1885060
ugcagacauugaccaaauu

SEQ ID NO: 2312933 - RNA, 19 nt, Artificial Sequence
  Description of Artificial Sequence: Synthetic oligonucleotide
  Antisense strand to SEQ ID NO: 2312932
aauuuggucaaugucugca

SEQ ID NO: 2312934 - RNA, 19 nt, Artificial Sequence
  Description of Artificial Sequence: Synthetic oligonucleotide
  Sense strand starting at position 791 of SEQ ID NO: 1885060
uucuaaauuugacaaugga

SEQ ID NO: 2312935 - RNA, 19 nt, Artificial Sequence
  Description of Artificial Sequence: Synthetic oligonucleotide
  Antisense strand to SEQ ID NO: 2312934
uccauugucaaauuuagaa

SEQ ID NO: 2312936 - RNA, 19 nt, Artificial Sequence
  Description of Artificial Sequence: Synthetic oligonucleotide
  Sense strand starting at position 887 of SEQ ID NO: 1885060
gagguauacccauggcaac

SEQ ID NO: 2312937 - RNA, 19 nt, Artificial Sequence
  Description of Artificial Sequence: Synthetic oligonucleotide
  Antisense strand to SEQ ID NO: 2312936
guugccauggguauaccuc

SEQ ID NO: 2312938 - RNA, 19 nt, Artificial Sequence
  Description of Artificial Sequence: Synthetic oligonucleotide
  Sense strand starting at position 1011 of SEQ ID NO: 1885060
agcaaucccuguuugagaa

SEQ ID NO: 2312939 - RNA, 19 nt, Artificial Sequence
  Description of Artificial Sequence: Synthetic oligonucleotide
  Antisense strand to SEQ ID NO: 2312938
uucucaaacagggauugcu

SEQ ID NO: 2312940 - RNA, 19 nt, Artificial Sequence
  Description of Artificial Sequence: Synthetic oligonucleotide
  Sense strand starting at position 1018 of SEQ ID NO: 1885060
ccuguuugagaaggcaaau

SEQ ID NO: 2312941 - RNA, 19 nt, Artificial Sequence
  Description of Artificial Sequence: Synthetic oligonucleotide
  Antisense strand to SEQ ID NO: 2312940
auuugccuucucaaacagg

SEQ ID NO: 2312942 - RNA, 19 nt, Artificial Sequence
  Description of Artificial Sequence: Synthetic oligonucleotide
  Sense strand starting at position 1269 of SEQ ID NO: 1885060
uagaauguguuaguauaug

SEQ ID NO: 2312943 - RNA, 19 nt, Artificial Sequence
  Description of Artificial Sequence: Synthetic oligonucleotide
  Antisense strand to SEQ ID NO: 2312942
cauauacuaacacauucua

SEQ ID NO: 2312944 - RNA, 19 nt, Artificial Sequence
  Description of Artificial Sequence: Synthetic oligonucleotide
  Sense strand starting at position 1319 of SEQ ID NO: 1885060
gauuaagcuguauaaugcu

SEQ ID NO: 2312945 - RNA, 19 nt, Artificial Sequence
  Description of Artificial Sequence: Synthetic oligonucleotide
  Antisense strand to SEQ ID NO: 2312944
agcauuauacagcuuaauc

SEQ ID NO: 2312946 - RNA, 19 nt, Artificial Sequence
  Description of Artificial Sequence: Synthetic oligonucleotide
  Sense strand starting at position 1327 of SEQ ID NO: 1885060
uguauaaugcuggaaugua

SEQ ID NO: 2312947 - RNA, 19 nt, Artificial Sequence
  Description of Artificial Sequence: Synthetic oligonucleotide
  Antisense strand to SEQ ID NO: 2312946
uacauuccagcauuauaca

SEQ ID NO: 2312948 - RNA, 19 nt, Artificial Sequence
  Description of Artificial Sequence: Synthetic oligonucleotide
  Sense strand starting at position 1450 of SEQ ID NO: 1885060
gaguccuuaccaugaugua

SEQ ID NO: 2312949 - RNA, 19 nt, Artificial Sequence
  Description of Artificial Sequence: Synthetic oligonucleotide
  Antisense strand to SEQ ID NO: 2312948
uacaucaugguaaggacuc

SEQ ID NO: 2312950 - RNA, 19 nt, Artificial Sequence
  Description of Artificial Sequence: Synthetic oligonucleotide
  Sense strand starting at position 1451 of SEQ ID NO: 1885060
aguccuuaccaugauguaa

SEQ ID NO: 2312951 - RNA, 19 nt, Artificial Sequence
  Description of Artificial Sequence: Synthetic oligonucleotide
  Antisense strand to SEQ ID NO: 2312950
uuacaucaugguaaggacu

SEQ ID NO: 2312952 - RNA, 19 nt, Artificial Sequence
  Description of Artificial Sequence: Synthetic oligonucleotide
  Sense strand starting at position 1528 of SEQ ID NO: 1885060
auguuuguccucuagaauu

SEQ ID NO: 2312953 - RNA, 19 nt, Artificial Sequence
  Description of Artificial Sequence: Synthetic oligonucleotide
  Antisense strand to SEQ ID NO: 2312952
aauucuagaggacaaacau

SEQ ID NO: 2312954 - RNA, 19 nt, Artificial Sequence
  Description of Artificial Sequence: Synthetic oligonucleotide
  Sense strand starting at position 1605 of SEQ ID NO: 1885060
ggcauuucugaccgcccua

SEQ ID NO: 2312955 - RNA, 19 nt, Artificial Sequence
  Description of Artificial Sequence: Synthetic oligonucleotide
  Antisense strand to SEQ ID NO: 2312954
uagggcggucagaaaugcc

SEQ ID NO: 2312956 - RNA, 19 nt, Artificial Sequence
  Description of Artificial Sequence: Synthetic oligonucleotide
  Sense strand starting at position 2029 of SEQ ID NO: 1885060
gccucagugacagaauuag

SEQ ID NO: 2312957 - RNA, 19 nt, Artificial Sequence
  Description of Artificial Sequence: Synthetic oligonucleotide
  Antisense strand to SEQ ID NO: 2312956
cuaauucugucacugaggc

SEQ ID NO: 2312958 - RNA, 19 nt, Artificial Sequence
  Description of Artificial Sequence: Synthetic oligonucleotide
  Sense strand starting at position 2038 of SEQ ID NO: 1885060
acagaauuagacugucuca

SEQ ID NO: 2312959 - RNA, 19 nt, Artificial Sequence
  Description of Artificial Sequence: Synthetic oligonucleotide
  Antisense strand to SEQ ID NO: 2312958
ugagacagucuaauucugu

SEQ ID NO: 2312960 - RNA, 19 nt, Artificial Sequence
  Description of Artificial Sequence: Synthetic oligonucleotide
  Sense strand starting at position 2134 of SEQ ID NO: 1885060
gcagucacucgauaagauu

SEQ ID NO: 2312961 - RNA, 19 nt, Artificial Sequence
  Description of Artificial Sequence: Synthetic oligonucleotide
  Antisense strand to SEQ ID NO: 2312960
aaucuuaucgagugacugc

SEQ ID NO: 2312962 - RNA, 19 nt, Artificial Sequence
  Description of Artificial Sequence: Synthetic oligonucleotide
  Sense strand starting at position 2152 of SEQ ID NO: 1885060
uuacuuacccgguacaagu

SEQ ID NO: 2312963 - RNA, 19 nt, Artificial Sequence
  Description of Artificial Sequence: Synthetic oligonucleotide
  Antisense strand to SEQ ID NO: 2312962
acuuguaccggguaaguaa

SEQ ID NO: 2312964 - RNA, 19 nt, Artificial Sequence
  Description of Artificial Sequence: Synthetic oligonucleotide
  Sense strand starting at position 2628 of SEQ ID NO: 1885060
cagaccagucuggguauua

SEQ ID NO: 2312965 - RNA, 19 nt, Artificial Sequence
  Description of Artificial Sequence: Synthetic oligonucleotide
  Antisense strand to SEQ ID NO: 2312964
uaauacccagacuggucug

SEQ ID NO: 2312966 - RNA, 19 nt, Artificial Sequence
  Description of Artificial Sequence: Synthetic oligonucleotide
  Sense strand starting at position 2629 of SEQ ID NO: 1885060
agaccagucuggguauuau

SEQ ID NO: 2312967 - RNA, 19 nt, Artificial Sequence
  Description of Artificial Sequence: Synthetic oligonucleotide
  Antisense strand to SEQ ID NO: 2312966
auaauacccagacuggucu

SEQ ID NO: 2312968 - RNA, 19 nt, Artificial Sequence
  Description of Artificial Sequence: Synthetic oligonucleotide
  Sense strand starting at position 2964 of SEQ ID NO: 1885060
gaauauguacuguauaugu

SEQ ID NO: 2312969 - RNA, 19 nt, Artificial Sequence
  Description of Artificial Sequence: Synthetic oligonucleotide
  Antisense strand to SEQ ID NO: 2312968
acauauacaguacauauuc

SEQ ID NO: 2312970 - RNA, 19 nt, Artificial Sequence
  Description of Artificial Sequence: Synthetic oligonucleotide
  Sense strand starting at position 3069 of SEQ ID NO: 1885060
ucaugcuaugcuuaaugaa

SEQ ID NO: 2312971 - RNA, 19 nt, Artificial Sequence
  Description of Artificial Sequence: Synthetic oligonucleotide
  Antisense strand to SEQ ID NO: 2312970
uucauuaagcauagcauga

SEQ ID NO: 2312972 - RNA, 19 nt, Artificial Sequence
  Description of Artificial Sequence: Synthetic oligonucleotide
  Sense strand starting at position 3076 of SEQ ID NO: 1885060
augcuuaaugaaggaggua

SEQ ID NO: 2312973 - RNA, 19 nt, Artificial Sequence
  Description of Artificial Sequence: Synthetic oligonucleotide
  Antisense strand to SEQ ID NO: 2312972
uaccuccuucauuaagcau

SEQ ID NO: 2312974 - RNA, 19 nt, Artificial Sequence
  Description of Artificial Sequence: Synthetic oligonucleotide
  Sense strand starting at position 3099 of SEQ ID NO: 1885060
cugaguguuacgugauuuc

SEQ ID NO: 2312975 - RNA, 19 nt, Artificial Sequence
  Description of Artificial Sequence: Synthetic oligonucleotide
  Antisense strand to SEQ ID NO: 2312974
gaaaucacguaacacucag

SEQ ID NO: 2312976 - RNA, 19 nt, Artificial Sequence
  Description of Artificial Sequence: Synthetic oligonucleotide
  Sense strand starting at position 3102 of SEQ ID NO: 1885060
aguguuacgugauuucaca

SEQ ID NO: 2312977 - RNA, 19 nt, Artificial Sequence
  Description of Artificial Sequence: Synthetic oligonucleotide
  Antisense strand to SEQ ID NO: 2312976
ugugaaaucacguaacacu

SEQ ID NO: 2312978 - RNA, 19 nt, Artificial Sequence
  Description of Artificial Sequence: Synthetic oligonucleotide
  Sense strand starting at position 3208 of SEQ ID NO: 1885060
gugaauaauguagacaguu

SEQ ID NO: 2312979 - RNA, 19 nt, Artificial Sequence
  Description of Artificial Sequence: Synthetic oligonucleotide
  Antisense strand to SEQ ID NO: 2312978
aacugucuacauuauucac

SEQ ID NO: 2312980 - RNA, 19 nt, Artificial Sequence
  Description of Artificial Sequence: Synthetic oligonucleotide
  Sense strand starting at position 3303 of SEQ ID NO: 1885060
uuaggagaccacuguggua

SEQ ID NO: 2312981 - RNA, 19 nt, Artificial Sequence
  Description of Artificial Sequence: Synthetic oligonucleotide
  Antisense strand to SEQ ID NO: 2312980
uaccacaguggucuccuaa

SEQ ID NO: 2312982 - RNA, 19 nt, Artificial Sequence
  Description of Artificial Sequence: Synthetic oligonucleotide
  Sense strand starting at position 3305 of SEQ ID NO: 1885060
aggagaccacugugguaua

SEQ ID NO: 2312983 - RNA, 19 nt, Artificial Sequence
  Description of Artificial Sequence: Synthetic oligonucleotide
  Antisense strand to SEQ ID NO: 2312982
uauaccacaguggucuccu

SEQ ID NO: 2312984 - RNA, 19 nt, Artificial Sequence
  Description of Artificial Sequence: Synthetic oligonucleotide
  Sense strand starting at position 3356 of SEQ ID NO: 1885060
cugugcaugccuguacuau

SEQ ID NO: 2312985 - RNA, 19 nt, Artificial Sequence
  Description of Artificial Sequence: Synthetic oligonucleotide
  Antisense strand to SEQ ID NO: 2312984
auaguacaggcaugcacag

SEQ ID NO: 2312986 - RNA, 19 nt, Artificial Sequence
  Description of Artificial Sequence: Synthetic oligonucleotide
  Sense strand starting at position 3728 of SEQ ID NO: 1885060
ugcgguguguauuugagau

SEQ ID NO: 2312987 - RNA, 19 nt, Artificial Sequence
  Description of Artificial Sequence: Synthetic oligonucleotide
  Antisense strand to SEQ ID NO: 2312986
aucucaaauacacaccgca

SEQ ID NO: 2312988 - RNA, 19 nt, Artificial Sequence
  Description of Artificial Sequence: Synthetic oligonucleotide
  Sense strand starting at position 3791 of SEQ ID NO: 1885060
augccaauucgugaaggaa

SEQ ID NO: 2312989 - RNA, 19 nt, Artificial Sequence
  Description of Artificial Sequence: Synthetic oligonucleotide
  Antisense strand to SEQ ID NO: 2312988
uuccuucacgaauuggcau

SEQ ID NO: 2312990 - RNA, 19 nt, Artificial Sequence
  Description of Artificial Sequence: Synthetic oligonucleotide
  Sense strand starting at position 3794 of SEQ ID NO: 1885060
ccaauucgugaaggaauga

SEQ ID NO: 2312991 - RNA, 19 nt, Artificial Sequence
  Description of Artificial Sequence: Synthetic oligonucleotide
  Antisense strand to SEQ ID NO: 2312990
ucauuccuucacgaauugg

SEQ ID NO: 2312992 - RNA, 19 nt, Artificial Sequence
  Description of Artificial Sequence: Synthetic oligonucleotide
  Sense strand starting at position 3951 of SEQ ID NO: 1885060
gguuaagguccuggaauaa

SEQ ID NO: 2312993 - RNA, 19 nt, Artificial Sequence
  Description of Artificial Sequence: Synthetic oligonucleotide
  Antisense strand to SEQ ID NO: 2312992
uuauuccaggaccuuaacc

SEQ ID NO: 2312994 - RNA, 19 nt, Artificial Sequence
  Description of Artificial Sequence: Synthetic oligonucleotide
  Sense strand starting at position 187 of SEQ ID NO: 1885061
gagcuaugaccacgucacu

SEQ ID NO: 2312995 - RNA, 19 nt, Artificial Sequence
  Description of Artificial Sequence: Synthetic oligonucleotide
  Antisense strand to SEQ ID NO: 2312994
agugacguggucauagcuc

SEQ ID NO: 2312996 - RNA, 19 nt, Artificial Sequence
  Description of Artificial Sequence: Synthetic oligonucleotide
  Sense strand starting at position 329 of SEQ ID NO: 1885061
aaaguaaagucgucuccca

SEQ ID NO: 2312997 - RNA, 19 nt, Artificial Sequence
  Description of Artificial Sequence: Synthetic oligonucleotide
  Antisense strand to SEQ ID NO: 2312996
ugggagacgacuuuacuuu

SEQ ID NO: 2312998 - RNA, 19 nt, Artificial Sequence
  Description of Artificial Sequence: Synthetic oligonucleotide
  Sense strand starting at position 425 of SEQ ID NO: 1885061
aagucaccaguaggaaauu

SEQ ID NO: 2312999 - RNA, 19 nt, Artificial Sequence
  Description of Artificial Sequence: Synthetic oligonucleotide
  Antisense strand to SEQ ID NO: 2312998
aauuuccuacuggugacuu

SEQ ID NO: 2313000 - RNA, 19 nt, Artificial Sequence
  Description of Artificial Sequence: Synthetic oligonucleotide
  Sense strand starting at position 434 of SEQ ID NO: 1885061
guaggaaauucugcuaucu

SEQ ID NO: 2313001 - RNA, 19 nt, Artificial Sequence
  Description of Artificial Sequence: Synthetic oligonucleotide
  Antisense strand to SEQ ID NO: 2313000
agauagcagaauuuccuac

SEQ ID NO: 2313002 - RNA, 19 nt, Artificial Sequence
  Description of Artificial Sequence: Synthetic oligonucleotide
  Sense strand starting at position 444 of SEQ ID NO: 1885061
cugcuaucuucugugcaac

SEQ ID NO: 2313003 - RNA, 19 nt, Artificial Sequence
  Description of Artificial Sequence: Synthetic oligonucleotide
  Antisense strand to SEQ ID NO: 2313002
guugcacagaagauagcag

SEQ ID NO: 2313004 - RNA, 19 nt, Artificial Sequence
  Description of Artificial Sequence: Synthetic oligonucleotide
  Sense strand starting at position 447 of SEQ ID NO: 1885061
cuaucuucugugcaacgau

SEQ ID NO: 2313005 - RNA, 19 nt, Artificial Sequence
  Description of Artificial Sequence: Synthetic oligonucleotide
  Antisense strand to SEQ ID NO: 2313004
aucguugcacagaagauag

SEQ ID NO: 2313006 - RNA, 19 nt, Artificial Sequence
  Description of Artificial Sequence: Synthetic oligonucleotide
  Sense strand starting at position 450 of SEQ ID NO: 1885061
ucuucugugcaacgaugau

SEQ ID NO: 2313007 - RNA, 19 nt, Artificial Sequence
  Description of Artificial Sequence: Synthetic oligonucleotide
  Antisense strand to SEQ ID NO: 2313006
aucaucguugcacagaaga

SEQ ID NO: 2313008 - RNA, 19 nt, Artificial Sequence
  Description of Artificial Sequence: Synthetic oligonucleotide
  Sense strand starting at position 466 of SEQ ID NO: 1885061
gauagcuuucccuacgcuu

SEQ ID NO: 2313009 - RNA, 19 nt, Artificial Sequence
  Description of Artificial Sequence: Synthetic oligonucleotide
  Antisense strand to SEQ ID NO: 2313008
aagcguagggaaagcuauc

SEQ ID NO: 2313010 - RNA, 19 nt, Artificial Sequence
  Description of Artificial Sequence: Synthetic oligonucleotide
  Sense strand starting at position 472 of SEQ ID NO: 1885061
uuucccuacgcuuaugaaa

SEQ ID NO: 2313011 - RNA, 19 nt, Artificial Sequence
  Description of Artificial Sequence: Synthetic oligonucleotide
  Antisense strand to SEQ ID NO: 2313010
uuucauaagcguagggaaa

SEQ ID NO: 2313012 - RNA, 19 nt, Artificial Sequence
  Description of Artificial Sequence: Synthetic oligonucleotide
  Sense strand starting at position 491 of SEQ ID NO: 1885061
aucaauucugauugcuaga

SEQ ID NO: 2313013 - RNA, 19 nt, Artificial Sequence
  Description of Artificial Sequence: Synthetic oligonucleotide
  Antisense strand to SEQ ID NO: 2313012
ucuagcaaucagaauugau

SEQ ID NO: 2313014 - RNA, 19 nt, Artificial Sequence
  Description of Artificial Sequence: Synthetic oligonucleotide
  Sense strand starting at position 524 of SEQ ID NO: 1885061
auagaaucccucuguacug

SEQ ID NO: 2313015 - RNA, 19 nt, Artificial Sequence
  Description of Artificial Sequence: Synthetic oligonucleotide
  Antisense strand to SEQ ID NO: 2313014
caguacagagggauucuau

SEQ ID NO: 2313016 - RNA, 19 nt, Artificial Sequence
  Description of Artificial Sequence: Synthetic oligonucleotide
  Sense strand starting at position 536 of SEQ ID NO: 1885061
uguacugucagcucgcaga

SEQ ID NO: 2313017 - RNA, 19 nt, Artificial Sequence
  Description of Artificial Sequence: Synthetic oligonucleotide
  Antisense strand to SEQ ID NO: 2313016
ucugcgagcugacaguaca

SEQ ID NO: 2313018 - RNA, 19 nt, Artificial Sequence
  Description of Artificial Sequence: Synthetic oligonucleotide
  Sense strand starting at position 547 of SEQ ID NO: 1885061
cucgcagaauuaucugaaa

SEQ ID NO: 2313019 - RNA, 19 nt, Artificial Sequence
  Description of Artificial Sequence: Synthetic oligonucleotide
  Antisense strand to SEQ ID NO: 2313018
uuucagauaauucugcgag

SEQ ID NO: 2313020 - RNA, 19 nt, Artificial Sequence
  Description of Artificial Sequence: Synthetic oligonucleotide
  Sense strand starting at position 549 of SEQ ID NO: 1885061
cgcagaauuaucugaaagu

SEQ ID NO: 2313021 - RNA, 19 nt, Artificial Sequence
  Description of Artificial Sequence: Synthetic oligonucleotide
  Antisense strand to SEQ ID NO: 2313020
acuuucagauaauucugcg

SEQ ID NO: 2313022 - RNA, 19 nt, Artificial Sequence
  Description of Artificial Sequence: Synthetic oligonucleotide
  Sense strand starting at position 649 of SEQ ID NO: 1885061
cccuaauucuggcugucua

SEQ ID NO: 2313023 - RNA, 19 nt, Artificial Sequence
  Description of Artificial Sequence: Synthetic oligonucleotide
  Antisense strand to SEQ ID NO: 2313022
uagacagccagaauuaggg

SEQ ID NO: 2313024 - RNA, 19 nt, Artificial Sequence
  Description of Artificial Sequence: Synthetic oligonucleotide
  Sense strand starting at position 653 of SEQ ID NO: 1885061
aauucuggcugucuagaau

SEQ ID NO: 2313025 - RNA, 19 nt, Artificial Sequence
  Description of Artificial Sequence: Synthetic oligonucleotide
  Antisense strand to SEQ ID NO: 2313024
auucuagacagccagaauu

SEQ ID NO: 2313026 - RNA, 19 nt, Artificial Sequence
  Description of Artificial Sequence: Synthetic oligonucleotide
  Sense strand starting at position 656 of SEQ ID NO: 1885061
ucuggcugucuagaauaua

SEQ ID NO: 2313027 - RNA, 19 nt, Artificial Sequence
  Description of Artificial Sequence: Synthetic oligonucleotide
  Antisense strand to SEQ ID NO: 2313026
uauauucuagacagccaga

SEQ ID NO: 2313028 - RNA, 19 nt, Artificial Sequence
  Description of Artificial Sequence: Synthetic oligonucleotide
  Sense strand starting at position 659 of SEQ ID NO: 1885061
ggcugucuagaauauauga

SEQ ID NO: 2313029 - RNA, 19 nt, Artificial Sequence
  Description of Artificial Sequence: Synthetic oligonucleotide
  Antisense strand to SEQ ID NO: 2313028
ucauauauucuagacagcc

SEQ ID NO: 2313030 - RNA, 19 nt, Artificial Sequence
  Description of Artificial Sequence: Synthetic oligonucleotide
  Sense strand starting at position 819 of SEQ ID NO: 1885061
uugcuuuauuugucucuca

SEQ ID NO: 2313031 - RNA, 19 nt, Artificial Sequence
  Description of Artificial Sequence: Synthetic oligonucleotide
  Antisense strand to SEQ ID NO: 2313030
ugagagacaaauaaagcaa

SEQ ID NO: 2313032 - RNA, 19 nt, Artificial Sequence
  Description of Artificial Sequence: Synthetic oligonucleotide
  Sense strand starting at position 820 of SEQ ID NO: 1885061
ugcuuuauuugucucucau

SEQ ID NO: 2313033 - RNA, 19 nt, Artificial Sequence
  Description of Artificial Sequence: Synthetic oligonucleotide
  Antisense strand to SEQ ID NO: 2313032
augagagacaaauaaagca

SEQ ID NO: 2313034 - RNA, 19 nt, Artificial Sequence
  Description of Artificial Sequence: Synthetic oligonucleotide
  Sense strand starting at position 927 of SEQ ID NO: 1885061
gagcuucucugugcgagga

SEQ ID NO: 2313035 - RNA, 19 nt, Artificial Sequence
  Description of Artificial Sequence: Synthetic oligonucleotide
  Antisense strand to SEQ ID NO: 2313034
uccucgcacagagaagcuc

SEQ ID NO: 2313036 - RNA, 19 nt, Artificial Sequence
  Description of Artificial Sequence: Synthetic oligonucleotide
  Sense strand starting at position 928 of SEQ ID NO: 1885061
agcuucucugugcgaggau

SEQ ID NO: 2313037 - RNA, 19 nt, Artificial Sequence
  Description of Artificial Sequence: Synthetic oligonucleotide
  Antisense strand to SEQ ID NO: 2313036
auccucgcacagagaagcu

SEQ ID NO: 2313038 - RNA, 19 nt, Artificial Sequence
  Description of Artificial Sequence: Synthetic oligonucleotide
  Sense strand starting at position 931 of SEQ ID NO: 1885061
uucucugugcgaggaucaa

SEQ ID NO: 2313039 - RNA, 19 nt, Artificial Sequence
  Description of Artificial Sequence: Synthetic oligonucleotide
  Antisense strand to SEQ ID NO: 2313038
uugauccucgcacagagaa

SEQ ID NO: 2313040 - RNA, 19 nt, Artificial Sequence
  Description of Artificial Sequence: Synthetic oligonucleotide
  Sense strand starting at position 946 of SEQ ID NO: 1885061
ucaaguuagugguccgcaa

SEQ ID NO: 2313041 - RNA, 19 nt, Artificial Sequence
  Description of Artificial Sequence: Synthetic oligonucleotide
  Antisense strand to SEQ ID NO: 2313040
uugcggaccacuaacuuga

SEQ ID NO: 2313042 - RNA, 19 nt, Artificial Sequence
  Description of Artificial Sequence: Synthetic oligonucleotide
  Sense strand starting at position 948 of SEQ ID NO: 1885061
aaguuagugguccgcaaac

SEQ ID NO: 2313043 - RNA, 19 nt, Artificial Sequence
  Description of Artificial Sequence: Synthetic oligonucleotide
  Antisense strand to SEQ ID NO: 2313042
guuugcggaccacuaacuu

SEQ ID NO: 2313044 - RNA, 19 nt, Artificial Sequence
  Description of Artificial Sequence: Synthetic oligonucleotide
  Sense strand starting at position 950 of SEQ ID NO: 1885061
guuagugguccgcaaacau

SEQ ID NO: 2313045 - RNA, 19 nt, Artificial Sequence
  Description of Artificial Sequence: Synthetic oligonucleotide
  Antisense strand to SEQ ID NO: 2313044
auguuugcggaccacuaac

SEQ ID NO: 2313046 - RNA, 19 nt, Artificial Sequence
  Description of Artificial Sequence: Synthetic oligonucleotide
  Sense strand starting at position 1060 of SEQ ID NO: 1885061
caaaucuccucagcgguua

SEQ ID NO: 2313047 - RNA, 19 nt, Artificial Sequence
  Description of Artificial Sequence: Synthetic oligonucleotide
  Antisense strand to SEQ ID NO: 2313046
uaaccgcugaggagauuug

SEQ ID NO: 2313048 - RNA, 19 nt, Artificial Sequence
  Description of Artificial Sequence: Synthetic oligonucleotide
  Sense strand starting at position 1061 of SEQ ID NO: 1885061
aaaucuccucagcgguuaa

SEQ ID NO: 2313049 - RNA, 19 nt, Artificial Sequence
  Description of Artificial Sequence: Synthetic oligonucleotide
  Antisense strand to SEQ ID NO: 2313048
uuaaccgcugaggagauuu

SEQ ID NO: 2313050 - RNA, 19 nt, Artificial Sequence
  Description of Artificial Sequence: Synthetic oligonucleotide
  Sense strand starting at position 1345 of SEQ ID NO: 1885061
gguucagauuuaggaagga

SEQ ID NO: 2313051 - RNA, 19 nt, Artificial Sequence
  Description of Artificial Sequence: Synthetic oligonucleotide
  Antisense strand to SEQ ID NO: 2313050
uccuuccuaaaucugaacc

SEQ ID NO: 2313052 - RNA, 19 nt, Artificial Sequence
  Description of Artificial Sequence: Synthetic oligonucleotide
  Sense strand starting at position 2356 of SEQ ID NO: 1885061
aggagagucacgugacuac

SEQ ID NO: 2313053 - RNA, 19 nt, Artificial Sequence
  Description of Artificial Sequence: Synthetic oligonucleotide
  Antisense strand to SEQ ID NO: 2313052
guagucacgugacucuccu

SEQ ID NO: 2313054 - RNA, 19 nt, Artificial Sequence
  Description of Artificial Sequence: Synthetic oligonucleotide
  Sense strand starting at position 2602 of SEQ ID NO: 1885061
gcguuucugucacuuggaa

SEQ ID NO: 2313055 - RNA, 19 nt, Artificial Sequence
  Description of Artificial Sequence: Synthetic oligonucleotide
  Antisense strand to SEQ ID NO: 2313054
uuccaagugacagaaacgc

SEQ ID NO: 2313056 - RNA, 19 nt, Artificial Sequence
  Description of Artificial Sequence: Synthetic oligonucleotide
  Sense strand starting at position 2604 of SEQ ID NO: 1885061
guuucugucacuuggaaga

SEQ ID NO: 2313057 - RNA, 19 nt, Artificial Sequence
  Description of Artificial Sequence: Synthetic oligonucleotide
  Antisense strand to SEQ ID NO: 2313056
ucuuccaagugacagaaac

SEQ ID NO: 2313058 - RNA, 19 nt, Artificial Sequence
  Description of Artificial Sequence: Synthetic oligonucleotide
  Sense strand starting at position 2631 of SEQ ID NO: 1885061
uuaccuaguuaguccuaga

SEQ ID NO: 2313059 - RNA, 19 nt, Artificial Sequence
  Description of Artificial Sequence: Synthetic oligonucleotide
  Antisense strand to SEQ ID NO: 2313058
ucuaggacuaacuagguaa

SEQ ID NO: 2313060 - RNA, 19 nt, Artificial Sequence
  Description of Artificial Sequence: Synthetic oligonucleotide
  Sense strand starting at position 2675 of SEQ ID NO: 1885061
uuguuaggcucgcucaaag

SEQ ID NO: 2313061 - RNA, 19 nt, Artificial Sequence
  Description of Artificial Sequence: Synthetic oligonucleotide
  Antisense strand to SEQ ID NO: 2313060
cuuugagcgagccuaacaa

SEQ ID NO: 2313062 - RNA, 19 nt, Artificial Sequence
  Description of Artificial Sequence: Synthetic oligonucleotide
  Sense strand starting at position 2951 of SEQ ID NO: 1885061
uuuguaaagucauucugaa

SEQ ID NO: 2313063 - RNA, 19 nt, Artificial Sequence
  Description of Artificial Sequence: Synthetic oligonucleotide
  Antisense strand to SEQ ID NO: 2313062
uucagaaugacuuuacaaa

SEQ ID NO: 2313064 - RNA, 19 nt, Artificial Sequence
  Description of Artificial Sequence: Synthetic oligonucleotide
  Sense strand starting at position 2983 of SEQ ID NO: 1885061
uccguugcuuggguaauaa

SEQ ID NO: 2313065 - RNA, 19 nt, Artificial Sequence
  Description of Artificial Sequence: Synthetic oligonucleotide
  Antisense strand to SEQ ID NO: 2313064
uuauuacccaagcaacgga

SEQ ID NO: 2313066 - RNA, 19 nt, Artificial Sequence
  Description of Artificial Sequence: Synthetic oligonucleotide
  Sense strand starting at position 3077 of SEQ ID NO: 1885061
ggaacaguuggagguuaca

SEQ ID NO: 2313067 - RNA, 19 nt, Artificial Sequence
  Description of Artificial Sequence: Synthetic oligonucleotide
  Antisense strand to SEQ ID NO: 2313066
uguaaccuccaacuguucc

SEQ ID NO: 2313068 - RNA, 19 nt, Artificial Sequence
  Description of Artificial Sequence: Synthetic oligonucleotide
  Sense strand starting at position 3170 of SEQ ID NO: 1885061
aguguuuguacacauagau

SEQ ID NO: 2313069 - RNA, 19 nt, Artificial Sequence
  Description of Artificial Sequence: Synthetic oligonucleotide
  Antisense strand to SEQ ID NO: 2313068
aucuauguguacaaacacu

SEQ ID NO: 2313070 - RNA, 19 nt, Artificial Sequence
  Description of Artificial Sequence: Synthetic oligonucleotide
  Sense strand starting at position 3230 of SEQ ID NO: 1885061
agugcuaacuaaucgcuuu

SEQ ID NO: 2313071 - RNA, 19 nt, Artificial Sequence
  Description of Artificial Sequence: Synthetic oligonucleotide
  Antisense strand to SEQ ID NO: 2313070
aaagcgauuaguuagcacu

SEQ ID NO: 2313072 - RNA, 19 nt, Artificial Sequence
  Description of Artificial Sequence: Synthetic oligonucleotide
  Sense strand starting at position 3233 of SEQ ID NO: 1885061
gcuaacuaaucgcuuuacu

SEQ ID NO: 2313073 - RNA, 19 nt, Artificial Sequence
  Description of Artificial Sequence: Synthetic oligonucleotide
  Antisense strand to SEQ ID NO: 2313072
aguaaagcgauuaguuagc

SEQ ID NO: 2313074 - RNA, 19 nt, Artificial Sequence
  Description of Artificial Sequence: Synthetic oligonucleotide
  Sense strand starting at position 148 of SEQ ID NO: 1885062
cugauaaagugacuacuua

SEQ ID NO: 2313075 - RNA, 19 nt, Artificial Sequence
  Description of Artificial Sequence: Synthetic oligonucleotide
  Antisense strand to SEQ ID NO: 2313074
uaaguagucacuuuaucag

SEQ ID NO: 2313076 - RNA, 19 nt, Artificial Sequence
  Description of Artificial Sequence: Synthetic oligonucleotide
  Sense strand starting at position 345 of SEQ ID NO: 1885062
acauguauuccauaaguuu

SEQ ID NO: 2313077 - RNA, 19 nt, Artificial Sequence
  Description of Artificial Sequence: Synthetic oligonucleotide
  Antisense strand to SEQ ID NO: 2313076
aaacuuauggaauacaugu

SEQ ID NO: 2313078 - RNA, 19 nt, Artificial Sequence
  Description of Artificial Sequence: Synthetic oligonucleotide
  Sense strand starting at position 560 of SEQ ID NO: 1885062
gugugagugaguuugugca

SEQ ID NO: 2313079 - RNA, 19 nt, Artificial Sequence
  Description of Artificial Sequence: Synthetic oligonucleotide
  Antisense strand to SEQ ID NO: 2313078
ugcacaaacucacucacac

SEQ ID NO: 2313080 - RNA, 19 nt, Artificial Sequence
  Description of Artificial Sequence: Synthetic oligonucleotide
  Sense strand starting at position 568 of SEQ ID NO: 1885062
gaguuugugcaucacacau

SEQ ID NO: 2313081 - RNA, 19 nt, Artificial Sequence
  Description of Artificial Sequence: Synthetic oligonucleotide
  Antisense strand to SEQ ID NO: 2313080
augugugaugcacaaacuc

SEQ ID NO: 2313082 - RNA, 19 nt, Artificial Sequence
  Description of Artificial Sequence: Synthetic oligonucleotide
  Sense strand starting at position 591 of SEQ ID NO: 1885062
gcucacauggcugaauuaa

SEQ ID NO: 2313083 - RNA, 19 nt, Artificial Sequence
  Description of Artificial Sequence: Synthetic oligonucleotide
  Antisense strand to SEQ ID NO: 2313082
uuaauucagccaugugagc

SEQ ID NO: 2313084 - RNA, 19 nt, Artificial Sequence
  Description of Artificial Sequence: Synthetic oligonucleotide
  Sense strand starting at position 677 of SEQ ID NO: 1885062
ucaguugucgcuguaucuu

SEQ ID NO: 2313085 - RNA, 19 nt, Artificial Sequence
  Description of Artificial Sequence: Synthetic oligonucleotide
  Antisense strand to SEQ ID NO: 2313084
aagauacagcgacaacuga

SEQ ID NO: 2313086 - RNA, 19 nt, Artificial Sequence
  Description of Artificial Sequence: Synthetic oligonucleotide
  Sense strand starting at position 792 of SEQ ID NO: 1885062
cuaugaaucuggucuagaa

SEQ ID NO: 2313087 - RNA, 19 nt, Artificial Sequence
  Description of Artificial Sequence: Synthetic oligonucleotide
  Antisense strand to SEQ ID NO: 2313086
uucuagaccagauucauag

SEQ ID NO: 2313088 - RNA, 19 nt, Artificial Sequence
  Description of Artificial Sequence: Synthetic oligonucleotide
  Sense strand starting at position 914 of SEQ ID NO: 1885062
uggaauuacucugauuucu

SEQ ID NO: 2313089 - RNA, 19 nt, Artificial Sequence
  Description of Artificial Sequence: Synthetic oligonucleotide
  Antisense strand to SEQ ID NO: 2313088
agaaaucagaguaauucca

SEQ ID NO: 2313090 - RNA, 19 nt, Artificial Sequence
  Description of Artificial Sequence: Synthetic oligonucleotide
  Sense strand starting at position 1095 of SEQ ID NO: 1885062
uuaccauuugcuggucauu

SEQ ID NO: 2313091 - RNA, 19 nt, Artificial Sequence
  Description of Artificial Sequence: Synthetic oligonucleotide
  Antisense strand to SEQ ID NO: 2313090
aaugaccagcaaaugguaa

SEQ ID NO: 2313092 - RNA, 19 nt, Artificial Sequence
  Description of Artificial Sequence: Synthetic oligonucleotide
  Sense strand starting at position 1154 of SEQ ID NO: 1885062
uugcuuauuucuuccaugu

SEQ ID NO: 2313093 - RNA, 19 nt, Artificial Sequence
  Description of Artificial Sequence: Synthetic oligonucleotide
  Antisense strand to SEQ ID NO: 2313092
acauggaagaaauaagcaa

SEQ ID NO: 2313094 - RNA, 19 nt, Artificial Sequence
  Description of Artificial Sequence: Synthetic oligonucleotide
  Sense strand starting at position 1158 of SEQ ID NO: 1885062
uuauuucuuccaugugcuu

SEQ ID NO: 2313095 - RNA, 19 nt, Artificial Sequence
  Description of Artificial Sequence: Synthetic oligonucleotide
  Antisense strand to SEQ ID NO: 2313094
aagcacauggaagaaauaa

SEQ ID NO: 2313096 - RNA, 19 nt, Artificial Sequence
  Description of Artificial Sequence: Synthetic oligonucleotide
  Sense strand starting at position 1218 of SEQ ID NO: 1885062
auguaagaaguugagcauu

SEQ ID NO: 2313097 - RNA, 19 nt, Artificial Sequence
  Description of Artificial Sequence: Synthetic oligonucleotide
  Antisense strand to SEQ ID NO: 2313096
aaugcucaacuucuuacau

SEQ ID NO: 2313098 - RNA, 19 nt, Artificial Sequence
  Description of Artificial Sequence: Synthetic oligonucleotide
  Sense strand starting at position 1314 of SEQ ID NO: 1885062
uuacauagaugccugaauu

SEQ ID NO: 2313099 - RNA, 19 nt, Artificial Sequence
  Description of Artificial Sequence: Synthetic oligonucleotide
  Antisense strand to SEQ ID NO: 2313098
aauucaggcaucuauguaa

SEQ ID NO: 2313100 - RNA, 19 nt, Artificial Sequence
  Description of Artificial Sequence: Synthetic oligonucleotide
  Sense strand starting at position 1450 of SEQ ID NO: 1885062
uauguaauuguagggagga

SEQ ID NO: 2313101 - RNA, 19 nt, Artificial Sequence
  Description of Artificial Sequence: Synthetic oligonucleotide
  Antisense strand to SEQ ID NO: 2313100
uccucccuacaauuacaua

SEQ ID NO: 2313102 - RNA, 19 nt, Artificial Sequence
  Description of Artificial Sequence: Synthetic oligonucleotide
  Sense strand starting at position 1577 of SEQ ID NO: 1885062
cgcuaauaguaaccagaga

SEQ ID NO: 2313103 - RNA, 19 nt, Artificial Sequence
  Description of Artificial Sequence: Synthetic oligonucleotide
  Antisense strand to SEQ ID NO: 2313102
ucucugguuacuauuagcg

SEQ ID NO: 2313104 - RNA, 19 nt, Artificial Sequence
  Description of Artificial Sequence: Synthetic oligonucleotide
  Sense strand starting at position 1606 of SEQ ID NO: 1885062
ccauguaugaaaugagagu

SEQ ID NO: 2313105 - RNA, 19 nt, Artificial Sequence
  Description of Artificial Sequence: Synthetic oligonucleotide
  Antisense strand to SEQ ID NO: 2313104
acucucauuucauacaugg

SEQ ID NO: 2313106 - RNA, 19 nt, Artificial Sequence
  Description of Artificial Sequence: Synthetic oligonucleotide
  Sense strand starting at position 1668 of SEQ ID NO: 1885062
aagagucuccugggagcau

SEQ ID NO: 2313107 - RNA, 19 nt, Artificial Sequence
  Description of Artificial Sequence: Synthetic oligonucleotide
  Antisense strand to SEQ ID NO: 2313106
augcucccaggagacucuu

SEQ ID NO: 2313108 - RNA, 19 nt, Artificial Sequence
  Description of Artificial Sequence: Synthetic oligonucleotide
  Sense strand starting at position 1679 of SEQ ID NO: 1885062
gggagcauucagcagucau

SEQ ID NO: 2313109 - RNA, 19 nt, Artificial Sequence
  Description of Artificial Sequence: Synthetic oligonucleotide
  Antisense strand to SEQ ID NO: 2313108
augacugcugaaugcuccc

SEQ ID NO: 2313110 - RNA, 19 nt, Artificial Sequence
  Description of Artificial Sequence: Synthetic oligonucleotide
  Sense strand starting at position 1776 of SEQ ID NO: 1885062
uggcuaauggcuguguguu

SEQ ID NO: 2313111 - RNA, 19 nt, Artificial Sequence
  Description of Artificial Sequence: Synthetic oligonucleotide
  Antisense strand to SEQ ID NO: 2313110
aacacacagccauuagcca

SEQ ID NO: 2313112 - RNA, 19 nt, Artificial Sequence
  Description of Artificial Sequence: Synthetic oligonucleotide
  Sense strand starting at position 1859 of SEQ ID NO: 1885062
cuuaguuaugagugaagac

SEQ ID NO: 2313113 - RNA, 19 nt, Artificial Sequence
  Description of Artificial Sequence: Synthetic oligonucleotide
  Antisense strand to SEQ ID NO: 2313112
gucuucacucauaacuaag

SEQ ID NO: 2313114 - RNA, 19 nt, Artificial Sequence
  Description of Artificial Sequence: Synthetic oligonucleotide
  Sense strand starting at position 2031 of SEQ ID NO: 1885062
agagauaaaugucuuuguc

SEQ ID NO: 2313115 - RNA, 19 nt, Artificial Sequence
  Description of Artificial Sequence: Synthetic oligonucleotide
  Antisense strand to SEQ ID NO: 2313114
gacaaagacauuuaucucu

SEQ ID NO: 2313116 - RNA, 19 nt, Artificial Sequence
  Description of Artificial Sequence: Synthetic oligonucleotide
  Sense strand starting at position 2109 of SEQ ID NO: 1885062
aaguuauucuaucuggaug

SEQ ID NO: 2313117 - RNA, 19 nt, Artificial Sequence
  Description of Artificial Sequence: Synthetic oligonucleotide
  Antisense strand to SEQ ID NO: 2313116
cauccagauagaauaacuu

SEQ ID NO: 2313118 - RNA, 19 nt, Artificial Sequence
  Description of Artificial Sequence: Synthetic oligonucleotide
  Sense strand starting at position 2192 of SEQ ID NO: 1885062
uggcauguaccuugagaga

SEQ ID NO: 2313119 - RNA, 19 nt, Artificial Sequence
  Description of Artificial Sequence: Synthetic oligonucleotide
  Antisense strand to SEQ ID NO: 2313118
ucucucaagguacaugcca

SEQ ID NO: 2313120 - RNA, 19 nt, Artificial Sequence
  Description of Artificial Sequence: Synthetic oligonucleotide
  Sense strand starting at position 2356 of SEQ ID NO: 1885062
cugauucuugcagaguuaa

SEQ ID NO: 2313121 - RNA, 19 nt, Artificial Sequence
  Description of Artificial Sequence: Synthetic oligonucleotide
  Antisense strand to SEQ ID NO: 2313120
uuaacucugcaagaaucag

SEQ ID NO: 2313122 - RNA, 19 nt, Artificial Sequence
  Description of Artificial Sequence: Synthetic oligonucleotide
  Sense strand starting at position 2741 of SEQ ID NO: 1885062
ggucuacuacauuaugcua

SEQ ID NO: 2313123 - RNA, 19 nt, Artificial Sequence
  Description of Artificial Sequence: Synthetic oligonucleotide
  Antisense strand to SEQ ID NO: 2313122
uagcauaauguaguagacc

SEQ ID NO: 2313124 - RNA, 19 nt, Artificial Sequence
  Description of Artificial Sequence: Synthetic oligonucleotide
  Sense strand starting at position 2963 of SEQ ID NO: 1885062
ucuguuuagcuagaugaaa

SEQ ID NO: 2313125 - RNA, 19 nt, Artificial Sequence
  Description of Artificial Sequence: Synthetic oligonucleotide
  Antisense strand to SEQ ID NO: 2313124
uuucaucuagcuaaacaga

SEQ ID NO: 2313126 - RNA, 19 nt, Artificial Sequence
  Description of Artificial Sequence: Synthetic oligonucleotide
  Sense strand starting at position 3178 of SEQ ID NO: 1885062
gggaaaggcucuuugauaa

SEQ ID NO: 2313127 - RNA, 19 nt, Artificial Sequence
  Description of Artificial Sequence: Synthetic oligonucleotide
  Antisense strand to SEQ ID NO: 2313126
uuaucaaagagccuuuccc

SEQ ID NO: 2313128 - RNA, 19 nt, Artificial Sequence
  Description of Artificial Sequence: Synthetic oligonucleotide
  Sense strand starting at position 3466 of SEQ ID NO: 1885062
agaugaggagcauguuaug

SEQ ID NO: 2313129 - RNA, 19 nt, Artificial Sequence
  Description of Artificial Sequence: Synthetic oligonucleotide
  Antisense strand to SEQ ID NO: 2313128
cauaacaugcuccucaucu

SEQ ID NO: 2313130 - RNA, 19 nt, Artificial Sequence
  Description of Artificial Sequence: Synthetic oligonucleotide
  Sense strand starting at position 3500 of SEQ ID NO: 1885062
ggaucagucucacuuacaa

SEQ ID NO: 2313131 - RNA, 19 nt, Artificial Sequence
  Description of Artificial Sequence: Synthetic oligonucleotide
  Antisense strand to SEQ ID NO: 2313130
uuguaagugagacugaucc

SEQ ID NO: 2313132 - RNA, 19 nt, Artificial Sequence
  Description of Artificial Sequence: Synthetic oligonucleotide
  Sense strand starting at position 3513 of SEQ ID NO: 1885062
uuacaaguuguguacauca

SEQ ID NO: 2313133 - RNA, 19 nt, Artificial Sequence
  Description of Artificial Sequence: Synthetic oligonucleotide
  Antisense strand to SEQ ID NO: 2313132
ugauguacacaacuuguaa

SEQ ID NO: 2313134 - RNA, 19 nt, Artificial Sequence
  Description of Artificial Sequence: Synthetic oligonucleotide
  Sense strand starting at position 3515 of SEQ ID NO: 1885062
acaaguuguguacaucauu

SEQ ID NO: 2313135 - RNA, 19 nt, Artificial Sequence
  Description of Artificial Sequence: Synthetic oligonucleotide
  Antisense strand to SEQ ID NO: 2313134
aaugauguacacaacuugu

SEQ ID NO: 2313136 - RNA, 19 nt, Artificial Sequence
  Description of Artificial Sequence: Synthetic oligonucleotide
  Sense strand starting at position 3597 of SEQ ID NO: 1885062
gggcaacauugucuaacca

SEQ ID NO: 2313137 - RNA, 19 nt, Artificial Sequence
  Description of Artificial Sequence: Synthetic oligonucleotide
  Antisense strand to SEQ ID NO: 2313136
ugguuagacaauguugccc

SEQ ID NO: 2313138 - RNA, 19 nt, Artificial Sequence
  Description of Artificial Sequence: Synthetic oligonucleotide
  Sense strand starting at position 3604 of SEQ ID NO: 1885062
auugucuaaccaggauauu

SEQ ID NO: 2313139 - RNA, 19 nt, Artificial Sequence
  Description of Artificial Sequence: Synthetic oligonucleotide
  Antisense strand to SEQ ID NO: 2313138
aauauccugguuagacaau

SEQ ID NO: 2313140 - RNA, 19 nt, Artificial Sequence
  Description of Artificial Sequence: Synthetic oligonucleotide
  Sense strand starting at position 3697 of SEQ ID NO: 1885062
cagaauucucuugaguuug

SEQ ID NO: 2313141 - RNA, 19 nt, Artificial Sequence
  Description of Artificial Sequence: Synthetic oligonucleotide
  Antisense strand to SEQ ID NO: 2313140
caaacucaagagaauucug

SEQ ID NO: 2313142 - RNA, 19 nt, Artificial Sequence
  Description of Artificial Sequence: Synthetic oligonucleotide
  Sense strand starting at position 3699 of SEQ ID NO: 1885062
gaauucucuugaguuugaa

SEQ ID NO: 2313143 - RNA, 19 nt, Artificial Sequence
  Description of Artificial Sequence: Synthetic oligonucleotide
  Antisense strand to SEQ ID NO: 2313142
uucaaacucaagagaauuc

SEQ ID NO: 2313144 - RNA, 19 nt, Artificial Sequence
  Description of Artificial Sequence: Synthetic oligonucleotide
  Sense strand starting at position 3707 of SEQ ID NO: 1885062
uugaguuugaauuacgguu

SEQ ID NO: 2313145 - RNA, 19 nt, Artificial Sequence
  Description of Artificial Sequence: Synthetic oligonucleotide
  Antisense strand to SEQ ID NO: 2313144
aaccguaauucaaacucaa

SEQ ID NO: 2313146 - RNA, 19 nt, Artificial Sequence
  Description of Artificial Sequence: Synthetic oligonucleotide
  Sense strand starting at position 3824 of SEQ ID NO: 1885062
agcugaauuucucauuugu

SEQ ID NO: 2313147 - RNA, 19 nt, Artificial Sequence
  Description of Artificial Sequence: Synthetic oligonucleotide
  Antisense strand to SEQ ID NO: 2313146
acaaaugagaaauucagcu

SEQ ID NO: 2313148 - RNA, 19 nt, Artificial Sequence
  Description of Artificial Sequence: Synthetic oligonucleotide
  Sense strand starting at position 3832 of SEQ ID NO: 1885062
uucucauuuguuugccauu

SEQ ID NO: 2313149 - RNA, 19 nt, Artificial Sequence
  Description of Artificial Sequence: Synthetic oligonucleotide
  Antisense strand to SEQ ID NO: 2313148
aauggcaaacaaaugagaa

SEQ ID NO: 2313150 - RNA, 19 nt, Artificial Sequence
  Description of Artificial Sequence: Synthetic oligonucleotide
  Sense strand starting at position 3835 of SEQ ID NO: 1885062
ucauuuguuugccauuuau

SEQ ID NO: 2313151 - RNA, 19 nt, Artificial Sequence
  Description of Artificial Sequence: Synthetic oligonucleotide
  Antisense strand to SEQ ID NO: 2313150
auaaauggcaaacaaauga

SEQ ID NO: 2313152 - RNA, 19 nt, Artificial Sequence
  Description of Artificial Sequence: Synthetic oligonucleotide
  Sense strand starting at position 3870 of SEQ ID NO: 1885062
acauaacuuucuguaaguc

SEQ ID NO: 2313153 - RNA, 19 nt, Artificial Sequence
  Description of Artificial Sequence: Synthetic oligonucleotide
  Antisense strand to SEQ ID NO: 2313152
gacuuacagaaaguuaugu

SEQ ID NO: 2313154 - RNA, 19 nt, Artificial Sequence
  Description of Artificial Sequence: Synthetic oligonucleotide
  Sense strand starting at position 5 of SEQ ID NO: 1885063
ucaguugguguguagagaa

SEQ ID NO: 2313155 - RNA, 19 nt, Artificial Sequence
  Description of Artificial Sequence: Synthetic oligonucleotide
  Antisense strand to SEQ ID NO: 2313154
uucucuacacaccaacuga

SEQ ID NO: 2313156 - RNA, 19 nt, Artificial Sequence
  Description of Artificial Sequence: Synthetic oligonucleotide
  Sense strand starting at position 13 of SEQ ID NO: 1885063
uguguagagaaauguaauu

SEQ ID NO: 2313157 - RNA, 19 nt, Artificial Sequence
  Description of Artificial Sequence: Synthetic oligonucleotide
  Antisense strand to SEQ ID NO: 2313156
aauuacauuucucuacaca

SEQ ID NO: 2313158 - RNA, 19 nt, Artificial Sequence
  Description of Artificial Sequence: Synthetic oligonucleotide
  Sense strand starting at position 18 of SEQ ID NO: 1885063
agagaaauguaauuagcag

SEQ ID NO: 2313159 - RNA, 19 nt, Artificial Sequence
  Description of Artificial Sequence: Synthetic oligonucleotide
  Antisense strand to SEQ ID NO: 2313158
cugcuaauuacauuucucu

SEQ ID NO: 2313160 - RNA, 19 nt, Artificial Sequence
  Description of Artificial Sequence: Synthetic oligonucleotide
  Sense strand starting at position 24 of SEQ ID NO: 1885063
auguaauuagcagaucauu

SEQ ID NO: 2313161 - RNA, 19 nt, Artificial Sequence
  Description of Artificial Sequence: Synthetic oligonucleotide
  Antisense strand to SEQ ID NO: 2313160
aaugaucugcuaauuacau

SEQ ID NO: 2313162 - RNA, 19 nt, Artificial Sequence
  Description of Artificial Sequence: Synthetic oligonucleotide
  Sense strand starting at position 65 of SEQ ID NO: 1885063
gaaauauagcuaugggauu

SEQ ID NO: 2313163 - RNA, 19 nt, Artificial Sequence
  Description of Artificial Sequence: Synthetic oligonucleotide
  Antisense strand to SEQ ID NO: 2313162
aaucccauagcuauauuuc

SEQ ID NO: 2313164 - RNA, 19 nt, Artificial Sequence
  Description of Artificial Sequence: Synthetic oligonucleotide
  Sense strand starting at position 238 of SEQ ID NO: 1885063
guaugaauaguuuaucugu

SEQ ID NO: 2313165 - RNA, 19 nt, Artificial Sequence
  Description of Artificial Sequence: Synthetic oligonucleotide
  Antisense strand to SEQ ID NO: 2313164
acagauaaacuauucauac

SEQ ID NO: 2313166 - RNA, 19 nt, Artificial Sequence
  Description of Artificial Sequence: Synthetic oligonucleotide
  Sense strand starting at position 246 of SEQ ID NO: 1885063
aguuuaucuguauaggaca

SEQ ID NO: 2313167 - RNA, 19 nt, Artificial Sequence
  Description of Artificial Sequence: Synthetic oligonucleotide
  Antisense strand to SEQ ID NO: 2313166
uguccuauacagauaaacu

SEQ ID NO: 2313168 - RNA, 19 nt, Artificial Sequence
  Description of Artificial Sequence: Synthetic oligonucleotide
  Sense strand starting at position 254 of SEQ ID NO: 1885063
uguauaggacauugagcau

SEQ ID NO: 2313169 - RNA, 19 nt, Artificial Sequence
  Description of Artificial Sequence: Synthetic oligonucleotide
  Antisense strand to SEQ ID NO: 2313168
augcucaauguccuauaca

SEQ ID NO: 2313170 - RNA, 19 nt, Artificial Sequence
  Description of Artificial Sequence: Synthetic oligonucleotide
  Sense strand starting at position 280 of SEQ ID NO: 1885063
gugcuuauccgcuuaaagu

SEQ ID NO: 2313171 - RNA, 19 nt, Artificial Sequence
  Description of Artificial Sequence: Synthetic oligonucleotide
  Antisense strand to SEQ ID NO: 2313170
acuuuaagcggauaagcac

SEQ ID NO: 2313172 - RNA, 19 nt, Artificial Sequence
  Description of Artificial Sequence: Synthetic oligonucleotide
  Sense strand starting at position 288 of SEQ ID NO: 1885063
ccgcuuaaaguuuaaauua

SEQ ID NO: 2313173 - RNA, 19 nt, Artificial Sequence
  Description of Artificial Sequence: Synthetic oligonucleotide
  Antisense strand to SEQ ID NO: 2313172
uaauuuaaacuuuaagcgg

SEQ ID NO: 2313174 - RNA, 19 nt, Artificial Sequence
  Description of Artificial Sequence: Synthetic oligonucleotide
  Sense strand starting at position 345 of SEQ ID NO: 1885063
accguugauucuccauaaa

SEQ ID NO: 2313175 - RNA, 19 nt, Artificial Sequence
  Description of Artificial Sequence: Synthetic oligonucleotide
  Antisense strand to SEQ ID NO: 2313174
uuuauggagaaucaacggu

SEQ ID NO: 2313176 - RNA, 19 nt, Artificial Sequence
  Description of Artificial Sequence: Synthetic oligonucleotide
  Sense strand starting at position 372 of SEQ ID NO: 1885063
aguguaguggguuggaaga

SEQ ID NO: 2313177 - RNA, 19 nt, Artificial Sequence
  Description of Artificial Sequence: Synthetic oligonucleotide
  Antisense strand to SEQ ID NO: 2313176
ucuuccaacccacuacacu

SEQ ID NO: 2313178 - RNA, 19 nt, Artificial Sequence
  Description of Artificial Sequence: Synthetic oligonucleotide
  Sense strand starting at position 436 of SEQ ID NO: 1885063
augaaauuagcauguuaug

SEQ ID NO: 2313179 - RNA, 19 nt, Artificial Sequence
  Description of Artificial Sequence: Synthetic oligonucleotide
  Antisense strand to SEQ ID NO: 2313178
cauaacaugcuaauuucau

SEQ ID NO: 2313180 - RNA, 19 nt, Artificial Sequence
  Description of Artificial Sequence: Synthetic oligonucleotide
  Sense strand starting at position 445 of SEQ ID NO: 1885063
gcauguuaugauuaguuuc

SEQ ID NO: 2313181 - RNA, 19 nt, Artificial Sequence
  Description of Artificial Sequence: Synthetic oligonucleotide
  Antisense strand to SEQ ID NO: 2313180
gaaacuaaucauaacaugc

SEQ ID NO: 2313182 - RNA, 19 nt, Artificial Sequence
  Description of Artificial Sequence: Synthetic oligonucleotide
  Sense strand starting at position 534 of SEQ ID NO: 1885063
cccugaauuuacucugcgu

SEQ ID NO: 2313183 - RNA, 19 nt, Artificial Sequence
  Description of Artificial Sequence: Synthetic oligonucleotide
  Antisense strand to SEQ ID NO: 2313182
acgcagaguaaauucaggg

SEQ ID NO: 2313184 - RNA, 19 nt, Artificial Sequence
  Description of Artificial Sequence: Synthetic oligonucleotide
  Sense strand starting at position 538 of SEQ ID NO: 1885063
gaauuuacucugcguugcu

SEQ ID NO: 2313185 - RNA, 19 nt, Artificial Sequence
  Description of Artificial Sequence: Synthetic oligonucleotide
  Antisense strand to SEQ ID NO: 2313184
agcaacgcagaguaaauuc

SEQ ID NO: 2313186 - RNA, 19 nt, Artificial Sequence
  Description of Artificial Sequence: Synthetic oligonucleotide
  Sense strand starting at position 539 of SEQ ID NO: 1885063
aauuuacucugcguugcua

SEQ ID NO: 2313187 - RNA, 19 nt, Artificial Sequence
  Description of Artificial Sequence: Synthetic oligonucleotide
  Antisense strand to SEQ ID NO: 2313186
uagcaacgcagaguaaauu

SEQ ID NO: 2313188 - RNA, 19 nt, Artificial Sequence
  Description of Artificial Sequence: Synthetic oligonucleotide
  Sense strand starting at position 651 of SEQ ID NO: 1885063
cggcuccauccugaugaga

SEQ ID NO: 2313189 - RNA, 19 nt, Artificial Sequence
  Description of Artificial Sequence: Synthetic oligonucleotide
  Antisense strand to SEQ ID NO: 2313188
ucucaucaggauggagccg

SEQ ID NO: 2313190 - RNA, 19 nt, Artificial Sequence
  Description of Artificial Sequence: Synthetic oligonucleotide
  Sense strand starting at position 677 of SEQ ID NO: 1885063
aaguaagguuauucucaag

SEQ ID NO: 2313191 - RNA, 19 nt, Artificial Sequence
  Description of Artificial Sequence: Synthetic oligonucleotide
  Antisense strand to SEQ ID NO: 2313190
cuugagaauaaccuuacuu

SEQ ID NO: 2313192 - RNA, 19 nt, Artificial Sequence
  Description of Artificial Sequence: Synthetic oligonucleotide
  Sense strand starting at position 683 of SEQ ID NO: 1885063
gguuauucucaaggcuaaa

SEQ ID NO: 2313193 - RNA, 19 nt, Artificial Sequence
  Description of Artificial Sequence: Synthetic oligonucleotide
  Antisense strand to SEQ ID NO: 2313192
uuuagccuugagaauaacc

SEQ ID NO: 2313194 - RNA, 19 nt, Artificial Sequence
  Description of Artificial Sequence: Synthetic oligonucleotide
  Sense strand starting at position 767 of SEQ ID NO: 1885063
aaggguuugguugguuuaa

SEQ ID NO: 2313195 - RNA, 19 nt, Artificial Sequence
  Description of Artificial Sequence: Synthetic oligonucleotide
  Antisense strand to SEQ ID NO: 2313194
uuaaaccaaccaaacccuu

SEQ ID NO: 2313196 - RNA, 19 nt, Artificial Sequence
  Description of Artificial Sequence: Synthetic oligonucleotide
  Sense strand starting at position 768 of SEQ ID NO: 1885063
aggguuugguugguuuaaa

SEQ ID NO: 2313197 - RNA, 19 nt, Artificial Sequence
  Description of Artificial Sequence: Synthetic oligonucleotide
  Antisense strand to SEQ ID NO: 2313196
uuuaaaccaaccaaacccu

SEQ ID NO: 2313198 - RNA, 19 nt, Artificial Sequence
  Description of Artificial Sequence: Synthetic oligonucleotide
  Sense strand starting at position 769 of SEQ ID NO: 1885063
ggguuugguugguuuaaag

SEQ ID NO: 2313199 - RNA, 19 nt, Artificial Sequence
  Description of Artificial Sequence: Synthetic oligonucleotide
  Antisense strand to SEQ ID NO: 2313198
cuuuaaaccaaccaaaccc

SEQ ID NO: 2313200 - RNA, 19 nt, Artificial Sequence
  Description of Artificial Sequence: Synthetic oligonucleotide
  Sense strand starting at position 835 of SEQ ID NO: 1885063
cugcgauuacauuauauuc

SEQ ID NO: 2313201 - RNA, 19 nt, Artificial Sequence
  Description of Artificial Sequence: Synthetic oligonucleotide
  Antisense strand to SEQ ID NO: 2313200
gaauauaauguaaucgcag

SEQ ID NO: 2313202 - RNA, 19 nt, Artificial Sequence
  Description of Artificial Sequence: Synthetic oligonucleotide
  Sense strand starting at position 979 of SEQ ID NO: 1885063
guauuagagcacugaguau

SEQ ID NO: 2313203 - RNA, 19 nt, Artificial Sequence
  Description of Artificial Sequence: Synthetic oligonucleotide
  Antisense strand to SEQ ID NO: 2313202
auacucagugcucuaauac

SEQ ID NO: 2313204 - RNA, 19 nt, Artificial Sequence
  Description of Artificial Sequence: Synthetic oligonucleotide
  Sense strand starting at position 1077 of SEQ ID NO: 1885063
aaaugaguguuaguagauu

SEQ ID NO: 2313205 - RNA, 19 nt, Artificial Sequence
  Description of Artificial Sequence: Synthetic oligonucleotide
  Antisense strand to SEQ ID NO: 2313204
aaucuacuaacacucauuu

SEQ ID NO: 2313206 - RNA, 19 nt, Artificial Sequence
  Description of Artificial Sequence: Synthetic oligonucleotide
  Sense strand starting at position 1302 of SEQ ID NO: 1885063
uuuauuuguuugccucaua

SEQ ID NO: 2313207 - RNA, 19 nt, Artificial Sequence
  Description of Artificial Sequence: Synthetic oligonucleotide
  Antisense strand to SEQ ID NO: 2313206
uaugaggcaaacaaauaaa

SEQ ID NO: 2313208 - RNA, 19 nt, Artificial Sequence
  Description of Artificial Sequence: Synthetic oligonucleotide
  Sense strand starting at position 1368 of SEQ ID NO: 1885063
ucucauucgcgaguugcaa

SEQ ID NO: 2313209 - RNA, 19 nt, Artificial Sequence
  Description of Artificial Sequence: Synthetic oligonucleotide
  Antisense strand to SEQ ID NO: 2313208
uugcaacucgcgaaugaga

SEQ ID NO: 2313210 - RNA, 19 nt, Artificial Sequence
  Description of Artificial Sequence: Synthetic oligonucleotide
  Sense strand starting at position 1369 of SEQ ID NO: 1885063
cucauucgcgaguugcaaa

SEQ ID NO: 2313211 - RNA, 19 nt, Artificial Sequence
  Description of Artificial Sequence: Synthetic oligonucleotide
  Antisense strand to SEQ ID NO: 2313210
uuugcaacucgcgaaugag

SEQ ID NO: 2313212 - RNA, 19 nt, Artificial Sequence
  Description of Artificial Sequence: Synthetic oligonucleotide
  Sense strand starting at position 1566 of SEQ ID NO: 1885063
acagcuaaagaaugaagua

SEQ ID NO: 2313213 - RNA, 19 nt, Artificial Sequence
  Description of Artificial Sequence: Synthetic oligonucleotide
  Antisense strand to SEQ ID NO: 2313212
uacuucauucuuuagcugu

SEQ ID NO: 2313214 - RNA, 19 nt, Artificial Sequence
  Description of Artificial Sequence: Synthetic oligonucleotide
  Sense strand starting at position 1616 of SEQ ID NO: 1885063
ugcugaaagaaguguuaga

SEQ ID NO: 2313215 - RNA, 19 nt, Artificial Sequence
  Description of Artificial Sequence: Synthetic oligonucleotide
  Antisense strand to SEQ ID NO: 2313214
ucuaacacuucuuucagca

SEQ ID NO: 2313216 - RNA, 19 nt, Artificial Sequence
  Description of Artificial Sequence: Synthetic oligonucleotide
  Sense strand starting at position 2929 of SEQ ID NO: 1885063
aucuuacauccgggacaga

SEQ ID NO: 2313217 - RNA, 19 nt, Artificial Sequence
  Description of Artificial Sequence: Synthetic oligonucleotide
  Antisense strand to SEQ ID NO: 2313216
ucugucccggauguaagau

SEQ ID NO: 2313218 - RNA, 19 nt, Artificial Sequence
  Description of Artificial Sequence: Synthetic oligonucleotide
  Sense strand starting at position 3104 of SEQ ID NO: 1885063
cggccuuugcccgcaaaga

SEQ ID NO: 2313219 - RNA, 19 nt, Artificial Sequence
  Description of Artificial Sequence: Synthetic oligonucleotide
  Antisense strand to SEQ ID NO: 2313218
ucuuugcgggcaaaggccg

SEQ ID NO: 2313220 - RNA, 19 nt, Artificial Sequence
  Description of Artificial Sequence: Synthetic oligonucleotide
  Sense strand starting at position 3617 of SEQ ID NO: 1885063
uaaugacuguaucuggcaa

SEQ ID NO: 2313221 - RNA, 19 nt, Artificial Sequence
  Description of Artificial Sequence: Synthetic oligonucleotide
  Antisense strand to SEQ ID NO: 2313220
uugccagauacagucauua

SEQ ID NO: 2313222 - RNA, 19 nt, Artificial Sequence
  Description of Artificial Sequence: Synthetic oligonucleotide
  Sense strand starting at position 3725 of SEQ ID NO: 1885063
agaauugucuuugcccaga

SEQ ID NO: 2313223 - RNA, 19 nt, Artificial Sequence
  Description of Artificial Sequence: Synthetic oligonucleotide
  Antisense strand to SEQ ID NO: 2313222
ucugggcaaagacaauucu

SEQ ID NO: 2313224 - RNA, 19 nt, Artificial Sequence
  Description of Artificial Sequence: Synthetic oligonucleotide
  Sense strand starting at position 3769 of SEQ ID NO: 1885063
ggccguggucuagaacaaa

SEQ ID NO: 2313225 - RNA, 19 nt, Artificial Sequence
  Description of Artificial Sequence: Synthetic oligonucleotide
  Antisense strand to SEQ ID NO: 2313224
uuuguucuagaccacggcc

SEQ ID NO: 2313226 - RNA, 19 nt, Artificial Sequence
  Description of Artificial Sequence: Synthetic oligonucleotide
  Sense strand starting at position 3856 of SEQ ID NO: 1885063
uuaagcuaucacgauguaa

SEQ ID NO: 2313227 - RNA, 19 nt, Artificial Sequence
  Description of Artificial Sequence: Synthetic oligonucleotide
  Antisense strand to SEQ ID NO: 2313226
uuacaucgugauagcuuaa

SEQ ID NO: 2313228 - RNA, 19 nt, Artificial Sequence
  Description of Artificial Sequence: Synthetic oligonucleotide
  Sense strand starting at position 3887 of SEQ ID NO: 1885063
gauccucuuggccaagagu

SEQ ID NO: 2313229 - RNA, 19 nt, Artificial Sequence
  Description of Artificial Sequence: Synthetic oligonucleotide
  Antisense strand to SEQ ID NO: 2313228
acucuuggccaagaggauc

SEQ ID NO: 2313230 - RNA, 19 nt, Artificial Sequence
  Description of Artificial Sequence: Synthetic oligonucleotide
  Sense strand starting at position 3898 of SEQ ID NO: 1885063
ccaagaguuuaauugcaaa

SEQ ID NO: 2313231 - RNA, 19 nt, Artificial Sequence
  Description of Artificial Sequence: Synthetic oligonucleotide
  Antisense strand to SEQ ID NO: 2313230
uuugcaauuaaacucuugg

SEQ ID NO: 2313232 - RNA, 19 nt, Artificial Sequence
  Description of Artificial Sequence: Synthetic oligonucleotide
  Sense strand starting at position 3942 of SEQ ID NO: 1885063
guuucuauucuacauggua

SEQ ID NO: 2313233 - RNA, 19 nt, Artificial Sequence
  Description of Artificial Sequence: Synthetic oligonucleotide
  Antisense strand to SEQ ID NO: 2313232
uaccauguagaauagaaac

SEQ ID NO: 2313234 - RNA, 19 nt, Artificial Sequence
  Description of Artificial Sequence: Synthetic oligonucleotide
  Sense strand starting at position 444 of SEQ ID NO: 1885064
ugaaacaagucgcucucau

SEQ ID NO: 2313235 - RNA, 19 nt, Artificial Sequence
  Description of Artificial Sequence: Synthetic oligonucleotide
  Antisense strand to SEQ ID NO: 2313234
augagagcgacuuguuuca

SEQ ID NO: 2313236 - RNA, 19 nt, Artificial Sequence
  Description of Artificial Sequence: Synthetic oligonucleotide
  Sense strand starting at position 840 of SEQ ID NO: 1885064
uuagaugugauccgacauu

SEQ ID NO: 2313237 - RNA, 19 nt, Artificial Sequence
  Description of Artificial Sequence: Synthetic oligonucleotide
  Antisense strand to SEQ ID NO: 2313236
aaugucggaucacaucuaa

SEQ ID NO: 2313238 - RNA, 19 nt, Artificial Sequence
  Description of Artificial Sequence: Synthetic oligonucleotide
  Sense strand starting at position 1045 of SEQ ID NO: 1885064
augagagcucccugucuuu

SEQ ID NO: 2313239 - RNA, 19 nt, Artificial Sequence
  Description of Artificial Sequence: Synthetic oligonucleotide
  Antisense strand to SEQ ID NO: 2313238
aaagacagggagcucucau

SEQ ID NO: 2313240 - RNA, 19 nt, Artificial Sequence
  Description of Artificial Sequence: Synthetic oligonucleotide
  Sense strand starting at position 1094 of SEQ ID NO: 1885064
cugugaucucugggcagca

SEQ ID NO: 2313241 - RNA, 19 nt, Artificial Sequence
  Description of Artificial Sequence: Synthetic oligonucleotide
  Antisense strand to SEQ ID NO: 2313240
ugcugcccagagaucacag

SEQ ID NO: 2313242 - RNA, 19 nt, Artificial Sequence
  Description of Artificial Sequence: Synthetic oligonucleotide
  Sense strand starting at position 1095 of SEQ ID NO: 1885064
ugugaucucugggcagcau

SEQ ID NO: 2313243 - RNA, 19 nt, Artificial Sequence
  Description of Artificial Sequence: Synthetic oligonucleotide
  Antisense strand to SEQ ID NO: 2313242
augcugcccagagaucaca

SEQ ID NO: 2313244 - RNA, 19 nt, Artificial Sequence
  Description of Artificial Sequence: Synthetic oligonucleotide
  Sense strand starting at position 1425 of SEQ ID NO: 1885064
caacaagugguccgacuau

SEQ ID NO: 2313245 - RNA, 19 nt, Artificial Sequence
  Description of Artificial Sequence: Synthetic oligonucleotide
  Antisense strand to SEQ ID NO: 2313244
auagucggaccacuuguug

SEQ ID NO: 2313246 - RNA, 19 nt, Artificial Sequence
  Description of Artificial Sequence: Synthetic oligonucleotide
  Sense strand starting at position 1435 of SEQ ID NO: 1885064
uccgacuauccaugagaga

SEQ ID NO: 2313247 - RNA, 19 nt, Artificial Sequence
  Description of Artificial Sequence: Synthetic oligonucleotide
  Antisense strand to SEQ ID NO: 2313246
ucucucauggauagucgga

SEQ ID NO: 2313248 - RNA, 19 nt, Artificial Sequence
  Description of Artificial Sequence: Synthetic oligonucleotide
  Sense strand starting at position 1438 of SEQ ID NO: 1885064
gacuauccaugagagacuu

SEQ ID NO: 2313249 - RNA, 19 nt, Artificial Sequence
  Description of Artificial Sequence: Synthetic oligonucleotide
  Antisense strand to SEQ ID NO: 2313248
aagucucucauggauaguc

SEQ ID NO: 2313250 - RNA, 19 nt, Artificial Sequence
  Description of Artificial Sequence: Synthetic oligonucleotide
  Sense strand starting at position 1590 of SEQ ID NO: 1885064
cauuauacggacugucaga

SEQ ID NO: 2313251 - RNA, 19 nt, Artificial Sequence
  Description of Artificial Sequence: Synthetic oligonucleotide
  Antisense strand to SEQ ID NO: 2313250
ucugacaguccguauaaug

SEQ ID NO: 2313252 - RNA, 19 nt, Artificial Sequence
  Description of Artificial Sequence: Synthetic oligonucleotide
  Sense strand starting at position 1826 of SEQ ID NO: 1885064
gcuguuggucugagagcug

SEQ ID NO: 2313253 - RNA, 19 nt, Artificial Sequence
  Description of Artificial Sequence: Synthetic oligonucleotide
  Antisense strand to SEQ ID NO: 2313252
cagcucucagaccaacagc

SEQ ID NO: 2313254 - RNA, 19 nt, Artificial Sequence
  Description of Artificial Sequence: Synthetic oligonucleotide
  Sense strand starting at position 2075 of SEQ ID NO: 1885064
ugcauccaucaagauguuu

SEQ ID NO: 2313255 - RNA, 19 nt, Artificial Sequence
  Description of Artificial Sequence: Synthetic oligonucleotide
  Antisense strand to SEQ ID NO: 2313254
aaacaucuugauggaugca

SEQ ID NO: 2313256 - RNA, 19 nt, Artificial Sequence
  Description of Artificial Sequence: Synthetic oligonucleotide
  Sense strand starting at position 2167 of SEQ ID NO: 1885064
accuacauaguaugaucua

SEQ ID NO: 2313257 - RNA, 19 nt, Artificial Sequence
  Description of Artificial Sequence: Synthetic oligonucleotide
  Antisense strand to SEQ ID NO: 2313256
uagaucauacuauguaggu

SEQ ID NO: 2313258 - RNA, 19 nt, Artificial Sequence
  Description of Artificial Sequence: Synthetic oligonucleotide
  Sense strand starting at position 2174 of SEQ ID NO: 1885064
uaguaugaucuauguagua

SEQ ID NO: 2313259 - RNA, 19 nt, Artificial Sequence
  Description of Artificial Sequence: Synthetic oligonucleotide
  Antisense strand to SEQ ID NO: 2313258
uacuacauagaucauacua

SEQ ID NO: 2313260 - RNA, 19 nt, Artificial Sequence
  Description of Artificial Sequence: Synthetic oligonucleotide
  Sense strand starting at position 2176 of SEQ ID NO: 1885064
guaugaucuauguaguaua

SEQ ID NO: 2313261 - RNA, 19 nt, Artificial Sequence
  Description of Artificial Sequence: Synthetic oligonucleotide
  Antisense strand to SEQ ID NO: 2313260
uauacuacauagaucauac

SEQ ID NO: 2313262 - RNA, 19 nt, Artificial Sequence
  Description of Artificial Sequence: Synthetic oligonucleotide
  Sense strand starting at position 2289 of SEQ ID NO: 1885064
auaugaagaucacauuugu

SEQ ID NO: 2313263 - RNA, 19 nt, Artificial Sequence
  Description of Artificial Sequence: Synthetic oligonucleotide
  Antisense strand to SEQ ID NO: 2313262
acaaaugugaucuucauau

SEQ ID NO: 2313264 - RNA, 19 nt, Artificial Sequence
  Description of Artificial Sequence: Synthetic oligonucleotide
  Sense strand starting at position 2344 of SEQ ID NO: 1885064
ucaggauuaucuguucuua

SEQ ID NO: 2313265 - RNA, 19 nt, Artificial Sequence
  Description of Artificial Sequence: Synthetic oligonucleotide
  Antisense strand to SEQ ID NO: 2313264
uaagaacagauaauccuga

SEQ ID NO: 2313266 - RNA, 19 nt, Artificial Sequence
  Description of Artificial Sequence: Synthetic oligonucleotide
  Sense strand starting at position 2346 of SEQ ID NO: 1885064
aggauuaucuguucuuaga

SEQ ID NO: 2313267 - RNA, 19 nt, Artificial Sequence
  Description of Artificial Sequence: Synthetic oligonucleotide
  Antisense strand to SEQ ID NO: 2313266
ucuaagaacagauaauccu

SEQ ID NO: 2313268 - RNA, 19 nt, Artificial Sequence
  Description of Artificial Sequence: Synthetic oligonucleotide
  Sense strand starting at position 2396 of SEQ ID NO: 1885064
uucguauuaagauagcuag

SEQ ID NO: 2313269 - RNA, 19 nt, Artificial Sequence
  Description of Artificial Sequence: Synthetic oligonucleotide
  Antisense strand to SEQ ID NO: 2313268
cuagcuaucuuaauacgaa

SEQ ID NO: 2313270 - RNA, 19 nt, Artificial Sequence
  Description of Artificial Sequence: Synthetic oligonucleotide
  Sense strand starting at position 2399 of SEQ ID NO: 1885064
guauuaagauagcuaggaa

SEQ ID NO: 2313271 - RNA, 19 nt, Artificial Sequence
  Description of Artificial Sequence: Synthetic oligonucleotide
  Antisense strand to SEQ ID NO: 2313270
uuccuagcuaucuuaauac

SEQ ID NO: 2313272 - RNA, 19 nt, Artificial Sequence
  Description of Artificial Sequence: Synthetic oligonucleotide
  Sense strand starting at position 2403 of SEQ ID NO: 1885064
uaagauagcuaggaaggau

SEQ ID NO: 2313273 - RNA, 19 nt, Artificial Sequence
  Description of Artificial Sequence: Synthetic oligonucleotide
  Antisense strand to SEQ ID NO: 2313272
auccuuccuagcuaucuua

SEQ ID NO: 2313274 - RNA, 19 nt, Artificial Sequence
  Description of Artificial Sequence: Synthetic oligonucleotide
  Sense strand starting at position 2427 of SEQ ID NO: 1885064
gaugauaggcuugagcaga

SEQ ID NO: 2313275 - RNA, 19 nt, Artificial Sequence
  Description of Artificial Sequence: Synthetic oligonucleotide
  Antisense strand to SEQ ID NO: 2313274
ucugcucaagccuaucauc

SEQ ID NO: 2313276 - RNA, 19 nt, Artificial Sequence
  Description of Artificial Sequence: Synthetic oligonucleotide
  Sense strand starting at position 2594 of SEQ ID NO: 1885064
ccuguacuauaucuguaau

SEQ ID NO: 2313277 - RNA, 19 nt, Artificial Sequence
  Description of Artificial Sequence: Synthetic oligonucleotide
  Antisense strand to SEQ ID NO: 2313276
auuacagauauaguacagg

SEQ ID NO: 2313278 - RNA, 19 nt, Artificial Sequence
  Description of Artificial Sequence: Synthetic oligonucleotide
  Sense strand starting at position 2727 of SEQ ID NO: 1885064
guuccuguuuaacccuaua

SEQ ID NO: 2313279 - RNA, 19 nt, Artificial Sequence
  Description of Artificial Sequence: Synthetic oligonucleotide
  Antisense strand to SEQ ID NO: 2313278
uauaggguuaaacaggaac

SEQ ID NO: 2313280 - RNA, 19 nt, Artificial Sequence
  Description of Artificial Sequence: Synthetic oligonucleotide
  Sense strand starting at position 2842 of SEQ ID NO: 1885064
ucuuaaauugcauguguaa

SEQ ID NO: 2313281 - RNA, 19 nt, Artificial Sequence
  Description of Artificial Sequence: Synthetic oligonucleotide
  Antisense strand to SEQ ID NO: 2313280
uuacacaugcaauuuaaga

SEQ ID NO: 2313282 - RNA, 19 nt, Artificial Sequence
  Description of Artificial Sequence: Synthetic oligonucleotide
  Sense strand starting at position 3077 of SEQ ID NO: 1885064
agaguauguggagaguuau

SEQ ID NO: 2313283 - RNA, 19 nt, Artificial Sequence
  Description of Artificial Sequence: Synthetic oligonucleotide
  Antisense strand to SEQ ID NO: 2313282
auaacucuccacauacucu

SEQ ID NO: 2313284 - RNA, 19 nt, Artificial Sequence
  Description of Artificial Sequence: Synthetic oligonucleotide
  Sense strand starting at position 3134 of SEQ ID NO: 1885064
guaacuguugcauaguacu

SEQ ID NO: 2313285 - RNA, 19 nt, Artificial Sequence
  Description of Artificial Sequence: Synthetic oligonucleotide
  Antisense strand to SEQ ID NO: 2313284
aguacuaugcaacaguuac

SEQ ID NO: 2313286 - RNA, 19 nt, Artificial Sequence
  Description of Artificial Sequence: Synthetic oligonucleotide
  Sense strand starting at position 3140 of SEQ ID NO: 1885064
guugcauaguacuugggaa

SEQ ID NO: 2313287 - RNA, 19 nt, Artificial Sequence
  Description of Artificial Sequence: Synthetic oligonucleotide
  Antisense strand to SEQ ID NO: 2313286
uucccaaguacuaugcaac

SEQ ID NO: 2313288 - RNA, 19 nt, Artificial Sequence
  Description of Artificial Sequence: Synthetic oligonucleotide
  Sense strand starting at position 3141 of SEQ ID NO: 1885064
uugcauaguacuugggaag

SEQ ID NO: 2313289 - RNA, 19 nt, Artificial Sequence
  Description of Artificial Sequence: Synthetic oligonucleotide
  Antisense strand to SEQ ID NO: 2313288
cuucccaaguacuaugcaa

SEQ ID NO: 2313290 - RNA, 19 nt, Artificial Sequence
  Description of Artificial Sequence: Synthetic oligonucleotide
  Sense strand starting at position 3142 of SEQ ID NO: 1885064
ugcauaguacuugggaaga

SEQ ID NO: 2313291 - RNA, 19 nt, Artificial Sequence
  Description of Artificial Sequence: Synthetic oligonucleotide
  Antisense strand to SEQ ID NO: 2313290
ucuucccaaguacuaugca

SEQ ID NO: 2313292 - RNA, 19 nt, Artificial Sequence
  Description of Artificial Sequence: Synthetic oligonucleotide
  Sense strand starting at position 3144 of SEQ ID NO: 1885064
cauaguacuugggaagaua

SEQ ID NO: 2313293 - RNA, 19 nt, Artificial Sequence
  Description of Artificial Sequence: Synthetic oligonucleotide
  Antisense strand to SEQ ID NO: 2313292
uaucuucccaaguacuaug

SEQ ID NO: 2313294 - RNA, 19 nt, Artificial Sequence
  Description of Artificial Sequence: Synthetic oligonucleotide
  Sense strand starting at position 3169 of SEQ ID NO: 1885064
acauguguuagguauaugu

SEQ ID NO: 2313295 - RNA, 19 nt, Artificial Sequence
  Description of Artificial Sequence: Synthetic oligonucleotide
  Antisense strand to SEQ ID NO: 2313294
acauauaccuaacacaugu

SEQ ID NO: 2313296 - RNA, 19 nt, Artificial Sequence
  Description of Artificial Sequence: Synthetic oligonucleotide
  Sense strand starting at position 3173 of SEQ ID NO: 1885064
guguuagguauauguucua

SEQ ID NO: 2313297 - RNA, 19 nt, Artificial Sequence
  Description of Artificial Sequence: Synthetic oligonucleotide
  Antisense strand to SEQ ID NO: 2313296
uagaacauauaccuaacac

SEQ ID NO: 2313298 - RNA, 19 nt, Artificial Sequence
  Description of Artificial Sequence: Synthetic oligonucleotide
  Sense strand starting at position 3346 of SEQ ID NO: 1885064
ugauaugaguucucacaga

SEQ ID NO: 2313299 - RNA, 19 nt, Artificial Sequence
  Description of Artificial Sequence: Synthetic oligonucleotide
  Antisense strand to SEQ ID NO: 2313298
ucugugagaacucauauca

SEQ ID NO: 2313300 - RNA, 19 nt, Artificial Sequence
  Description of Artificial Sequence: Synthetic oligonucleotide
  Sense strand starting at position 3412 of SEQ ID NO: 1885064
cuuccugcuucuuugugaa

SEQ ID NO: 2313301 - RNA, 19 nt, Artificial Sequence
  Description of Artificial Sequence: Synthetic oligonucleotide
  Antisense strand to SEQ ID NO: 2313300
uucacaaagaagcaggaag

SEQ ID NO: 2313302 - RNA, 19 nt, Artificial Sequence
  Description of Artificial Sequence: Synthetic oligonucleotide
  Sense strand starting at position 3584 of SEQ ID NO: 1885064
acuaacucauaguuguauu

SEQ ID NO: 2313303 - RNA, 19 nt, Artificial Sequence
  Description of Artificial Sequence: Synthetic oligonucleotide
  Antisense strand to SEQ ID NO: 2313302
aauacaacuaugaguuagu

SEQ ID NO: 2313304 - RNA, 19 nt, Artificial Sequence
  Description of Artificial Sequence: Synthetic oligonucleotide
  Sense strand starting at position 3603 of SEQ ID NO: 1885064
uugcuaauuuggcaacuaa

SEQ ID NO: 2313305 - RNA, 19 nt, Artificial Sequence
  Description of Artificial Sequence: Synthetic oligonucleotide
  Antisense strand to SEQ ID NO: 2313304
uuaguugccaaauuagcaa

SEQ ID NO: 2313306 - RNA, 19 nt, Artificial Sequence
  Description of Artificial Sequence: Synthetic oligonucleotide
  Sense strand starting at position 3893 of SEQ ID NO: 1885064
gguguauuguuguucauuu

SEQ ID NO: 2313307 - RNA, 19 nt, Artificial Sequence
  Description of Artificial Sequence: Synthetic oligonucleotide
  Antisense strand to SEQ ID NO: 2313306
aaaugaacaacaauacacc

SEQ ID NO: 2313308 - RNA, 19 nt, Artificial Sequence
  Description of Artificial Sequence: Synthetic oligonucleotide
  Sense strand starting at position 3938 of SEQ ID NO: 1885064
uugggugauuguguuauua

SEQ ID NO: 2313309 - RNA, 19 nt, Artificial Sequence
  Description of Artificial Sequence: Synthetic oligonucleotide
  Antisense strand to SEQ ID NO: 2313308
uaauaacacaaucacccaa

SEQ ID NO: 2313310 - RNA, 19 nt, Artificial Sequence
  Description of Artificial Sequence: Synthetic oligonucleotide
  Sense strand starting at position 3942 of SEQ ID NO: 1885064
gugauuguguuauuacuuu

SEQ ID NO: 2313311 - RNA, 19 nt, Artificial Sequence
  Description of Artificial Sequence: Synthetic oligonucleotide
  Antisense strand to SEQ ID NO: 2313310
aaaguaauaacacaaucac

SEQ ID NO: 2313312 - RNA, 19 nt, Artificial Sequence
  Description of Artificial Sequence: Synthetic oligonucleotide
  Sense strand starting at position 3966 of SEQ ID NO: 1885064
auaccuugccucugaguuu

SEQ ID NO: 2313313 - RNA, 19 nt, Artificial Sequence
  Description of Artificial Sequence: Synthetic oligonucleotide
  Antisense strand to SEQ ID NO: 2313312
aaacucagaggcaagguau

SEQ ID NO: 2313314 - RNA, 19 nt, Artificial Sequence
  Description of Artificial Sequence: Synthetic oligonucleotide
  Sense strand starting at position 29 of SEQ ID NO: 1885065
ggcucagagcuuugugaau

SEQ ID NO: 2313315 - RNA, 19 nt, Artificial Sequence
  Description of Artificial Sequence: Synthetic oligonucleotide
  Antisense strand to SEQ ID NO: 2313314
auucacaaagcucugagcc

SEQ ID NO: 2313316 - RNA, 19 nt, Artificial Sequence
  Description of Artificial Sequence: Synthetic oligonucleotide
  Sense strand starting at position 35 of SEQ ID NO: 1885065
gagcuuugugaaugccaua

SEQ ID NO: 2313317 - RNA, 19 nt, Artificial Sequence
  Description of Artificial Sequence: Synthetic oligonucleotide
  Antisense strand to SEQ ID NO: 2313316
uauggcauucacaaagcuc

SEQ ID NO: 2313318 - RNA, 19 nt, Artificial Sequence
  Description of Artificial Sequence: Synthetic oligonucleotide
  Sense strand starting at position 95 of SEQ ID NO: 1885065
gaggcacauuugggaauaa

SEQ ID NO: 2313319 - RNA, 19 nt, Artificial Sequence
  Description of Artificial Sequence: Synthetic oligonucleotide
  Antisense strand to SEQ ID NO: 2313318
uuauucccaaaugugccuc

SEQ ID NO: 2313320 - RNA, 19 nt, Artificial Sequence
  Description of Artificial Sequence: Synthetic oligonucleotide
  Sense strand starting at position 96 of SEQ ID NO: 1885065
aggcacauuugggaauaau

SEQ ID NO: 2313321 - RNA, 19 nt, Artificial Sequence
  Description of Artificial Sequence: Synthetic oligonucleotide
  Antisense strand to SEQ ID NO: 2313320
auuauucccaaaugugccu

SEQ ID NO: 2313322 - RNA, 19 nt, Artificial Sequence
  Description of Artificial Sequence: Synthetic oligonucleotide
  Sense strand starting at position 124 of SEQ ID NO: 1885065
uagagagugugucugagau

SEQ ID NO: 2313323 - RNA, 19 nt, Artificial Sequence
  Description of Artificial Sequence: Synthetic oligonucleotide
  Antisense strand to SEQ ID NO: 2313322
aucucagacacacucucua

SEQ ID NO: 2313324 - RNA, 19 nt, Artificial Sequence
  Description of Artificial Sequence: Synthetic oligonucleotide
  Sense strand starting at position 370 of SEQ ID NO: 1885065
uuggcuguagugcaagaaa

SEQ ID NO: 2313325 - RNA, 19 nt, Artificial Sequence
  Description of Artificial Sequence: Synthetic oligonucleotide
  Antisense strand to SEQ ID NO: 2313324
uuucuugcacuacagccaa

SEQ ID NO: 2313326 - RNA, 19 nt, Artificial Sequence
  Description of Artificial Sequence: Synthetic oligonucleotide
  Sense strand starting at position 433 of SEQ ID NO: 1885065
aggugugucucagcaucau

SEQ ID NO: 2313327 - RNA, 19 nt, Artificial Sequence
  Description of Artificial Sequence: Synthetic oligonucleotide
  Antisense strand to SEQ ID NO: 2313326
augaugcugagacacaccu

SEQ ID NO: 2313328 - RNA, 19 nt, Artificial Sequence
  Description of Artificial Sequence: Synthetic oligonucleotide
  Sense strand starting at position 553 of SEQ ID NO: 1885065
ucauaugcugacggugaau

SEQ ID NO: 2313329 - RNA, 19 nt, Artificial Sequence
  Description of Artificial Sequence: Synthetic oligonucleotide
  Antisense strand to SEQ ID NO: 2313328
auucaccgucagcauauga

SEQ ID NO: 2313330 - RNA, 19 nt, Artificial Sequence
  Description of Artificial Sequence: Synthetic oligonucleotide
  Sense strand starting at position 599 of SEQ ID NO: 1885065
cauaguauggauggcagaa

SEQ ID NO: 2313331 - RNA, 19 nt, Artificial Sequence
  Description of Artificial Sequence: Synthetic oligonucleotide
  Antisense strand to SEQ ID NO: 2313330
uucugccauccauacuaug

SEQ ID NO: 2313332 - RNA, 19 nt, Artificial Sequence
  Description of Artificial Sequence: Synthetic oligonucleotide
  Sense strand starting at position 749 of SEQ ID NO: 1885065
cccgaugucugccugaacu

SEQ ID NO: 2313333 - RNA, 19 nt, Artificial Sequence
  Description of Artificial Sequence: Synthetic oligonucleotide
  Antisense strand to SEQ ID NO: 2313332
aguucaggcagacaucggg

SEQ ID NO: 2313334 - RNA, 19 nt, Artificial Sequence
  Description of Artificial Sequence: Synthetic oligonucleotide
  Sense strand starting at position 856 of SEQ ID NO: 1885065
gcggaacauccugaucuca

SEQ ID NO: 2313335 - RNA, 19 nt, Artificial Sequence
  Description of Artificial Sequence: Synthetic oligonucleotide
  Antisense strand to SEQ ID NO: 2313334
ugagaucaggauguuccgc

SEQ ID NO: 2313336 - RNA, 19 nt, Artificial Sequence
  Description of Artificial Sequence: Synthetic oligonucleotide
  Sense strand starting at position 966 of SEQ ID NO: 1885065
agagcacuguccuuuccaa

SEQ ID NO: 2313337 - RNA, 19 nt, Artificial Sequence
  Description of Artificial Sequence: Synthetic oligonucleotide
  Antisense strand to SEQ ID NO: 2313336
uuggaaaggacagugcucu

SEQ ID NO: 2313338 - RNA, 19 nt, Artificial Sequence
  Description of Artificial Sequence: Synthetic oligonucleotide
  Sense strand starting at position 1554 of SEQ ID NO: 1885065
gggauugguccgggcuuga

SEQ ID NO: 2313339 - RNA, 19 nt, Artificial Sequence
  Description of Artificial Sequence: Synthetic oligonucleotide
  Antisense strand to SEQ ID NO: 2313338
ucaagcccggaccaauccc

SEQ ID NO: 2313340 - RNA, 19 nt, Artificial Sequence
  Description of Artificial Sequence: Synthetic oligonucleotide
  Sense strand starting at position 1665 of SEQ ID NO: 1885065
cggaagugacgucacgaua

SEQ ID NO: 2313341 - RNA, 19 nt, Artificial Sequence
  Description of Artificial Sequence: Synthetic oligonucleotide
  Antisense strand to SEQ ID NO: 2313340
uaucgugacgucacuuccg

SEQ ID NO: 2313342 - RNA, 19 nt, Artificial Sequence
  Description of Artificial Sequence: Synthetic oligonucleotide
  Sense strand starting at position 1840 of SEQ ID NO: 1885065
gcucauuaguaaccucgau

SEQ ID NO: 2313343 - RNA, 19 nt, Artificial Sequence
  Description of Artificial Sequence: Synthetic oligonucleotide
  Antisense strand to SEQ ID NO: 2313342
aucgagguuacuaaugagc

SEQ ID NO: 2313344 - RNA, 19 nt, Artificial Sequence
  Description of Artificial Sequence: Synthetic oligonucleotide
  Sense strand starting at position 1862 of SEQ ID NO: 1885065
gguucuguggacuggaaga

SEQ ID NO: 2313345 - RNA, 19 nt, Artificial Sequence
  Description of Artificial Sequence: Synthetic oligonucleotide
  Antisense strand to SEQ ID NO: 2313344
ucuuccaguccacagaacc

SEQ ID NO: 2313346 - RNA, 19 nt, Artificial Sequence
  Description of Artificial Sequence: Synthetic oligonucleotide
  Sense strand starting at position 2079 of SEQ ID NO: 1885065
gagcuuuaagccgacucua

SEQ ID NO: 2313347 - RNA, 19 nt, Artificial Sequence
  Description of Artificial Sequence: Synthetic oligonucleotide
  Antisense strand to SEQ ID NO: 2313346
uagagucggcuuaaagcuc

SEQ ID NO: 2313348 - RNA, 19 nt, Artificial Sequence
  Description of Artificial Sequence: Synthetic oligonucleotide
  Sense strand starting at position 2100 of SEQ ID NO: 1885065
ggagaagcagucuacccua

SEQ ID NO: 2313349 - RNA, 19 nt, Artificial Sequence
  Description of Artificial Sequence: Synthetic oligonucleotide
  Antisense strand to SEQ ID NO: 2313348
uaggguagacugcuucucc

SEQ ID NO: 2313350 - RNA, 19 nt, Artificial Sequence
  Description of Artificial Sequence: Synthetic oligonucleotide
  Sense strand starting at position 2337 of SEQ ID NO: 1885065
gcccuugagaacucgcguu

SEQ ID NO: 2313351 - RNA, 19 nt, Artificial Sequence
  Description of Artificial Sequence: Synthetic oligonucleotide
  Antisense strand to SEQ ID NO: 2313350
aacgcgaguucucaagggc

SEQ ID NO: 2313352 - RNA, 19 nt, Artificial Sequence
  Description of Artificial Sequence: Synthetic oligonucleotide
  Sense strand starting at position 2378 of SEQ ID NO: 1885065
ccguuacccaucugugaag

SEQ ID NO: 2313353 - RNA, 19 nt, Artificial Sequence
  Description of Artificial Sequence: Synthetic oligonucleotide
  Antisense strand to SEQ ID NO: 2313352
cuucacagauggguaacgg

SEQ ID NO: 2313354 - RNA, 19 nt, Artificial Sequence
  Description of Artificial Sequence: Synthetic oligonucleotide
  Sense strand starting at position 2468 of SEQ ID NO: 1885065
auucuuguguccucaagag

SEQ ID NO: 2313355 - RNA, 19 nt, Artificial Sequence
  Description of Artificial Sequence: Synthetic oligonucleotide
  Antisense strand to SEQ ID NO: 2313354
cucuugaggacacaagaau

SEQ ID NO: 2313356 - RNA, 19 nt, Artificial Sequence
  Description of Artificial Sequence: Synthetic oligonucleotide
  Sense strand starting at position 2517 of SEQ ID NO: 1885065
gcuuucuuaggucaaaggu

SEQ ID NO: 2313357 - RNA, 19 nt, Artificial Sequence
  Description of Artificial Sequence: Synthetic oligonucleotide
  Antisense strand to SEQ ID NO: 2313356
accuuugaccuaagaaagc

SEQ ID NO: 2313358 - RNA, 19 nt, Artificial Sequence
  Description of Artificial Sequence: Synthetic oligonucleotide
  Sense strand starting at position 2525 of SEQ ID NO: 1885065
aggucaaaggucuaaaguu

SEQ ID NO: 2313359 - RNA, 19 nt, Artificial Sequence
  Description of Artificial Sequence: Synthetic oligonucleotide
  Antisense strand to SEQ ID NO: 2313358
aacuuuagaccuuugaccu

SEQ ID NO: 2313360 - RNA, 19 nt, Artificial Sequence
  Description of Artificial Sequence: Synthetic oligonucleotide
  Sense strand starting at position 2764 of SEQ ID NO: 1885065
agcuuucccugguucuuua

SEQ ID NO: 2313361 - RNA, 19 nt, Artificial Sequence
  Description of Artificial Sequence: Synthetic oligonucleotide
  Antisense strand to SEQ ID NO: 2313360
uaaagaaccagggaaagcu

SEQ ID NO: 2313362 - RNA, 19 nt, Artificial Sequence
  Description of Artificial Sequence: Synthetic oligonucleotide
  Sense strand starting at position 2798 of SEQ ID NO: 1885065
auauuagugcuguguggag

SEQ ID NO: 2313363 - RNA, 19 nt, Artificial Sequence
  Description of Artificial Sequence: Synthetic oligonucleotide
  Antisense strand to SEQ ID NO: 2313362
cuccacacagcacuaauau

SEQ ID NO: 2313364 - RNA, 19 nt, Artificial Sequence
  Description of Artificial Sequence: Synthetic oligonucleotide
  Sense strand starting at position 2919 of SEQ ID NO: 1885065
uucuuuggacuugaucauu

SEQ ID NO: 2313365 - RNA, 19 nt, Artificial Sequence
  Description of Artificial Sequence: Synthetic oligonucleotide
  Antisense strand to SEQ ID NO: 2313364
aaugaucaaguccaaagaa

SEQ ID NO: 2313366 - RNA, 19 nt, Artificial Sequence
  Description of Artificial Sequence: Synthetic oligonucleotide
  Sense strand starting at position 2928 of SEQ ID NO: 1885065
cuugaucauuauuaaagag

SEQ ID NO: 2313367 - RNA, 19 nt, Artificial Sequence
  Description of Artificial Sequence: Synthetic oligonucleotide
  Antisense strand to SEQ ID NO: 2313366
cucuuuaauaaugaucaag

SEQ ID NO: 2313368 - RNA, 19 nt, Artificial Sequence
  Description of Artificial Sequence: Synthetic oligonucleotide
  Sense strand starting at position 3089 of SEQ ID NO: 1885065
uucugucuuccagaucucu

SEQ ID NO: 2313369 - RNA, 19 nt, Artificial Sequence
  Description of Artificial Sequence: Synthetic oligonucleotide
  Antisense strand to SEQ ID NO: 2313368
agagaucuggaagacagaa

SEQ ID NO: 2313370 - RNA, 19 nt, Artificial Sequence
  Description of Artificial Sequence: Synthetic oligonucleotide
  Sense strand starting at position 3150 of SEQ ID NO: 1885065
augaaagcaguuugacaug

SEQ ID NO: 2313371 - RNA, 19 nt, Artificial Sequence
  Description of Artificial Sequence: Synthetic oligonucleotide
  Antisense strand to SEQ ID NO: 2313370
caugucaaacugcuuucau

SEQ ID NO: 2313372 - RNA, 19 nt, Artificial Sequence
  Description of Artificial Sequence: Synthetic oligonucleotide
  Sense strand starting at position 3155 of SEQ ID NO: 1885065
agcaguuugacaugugauc

SEQ ID NO: 2313373 - RNA, 19 nt, Artificial Sequence
  Description of Artificial Sequence: Synthetic oligonucleotide
  Antisense strand to SEQ ID NO: 2313372
gaucacaugucaaacugcu

SEQ ID NO: 2313374 - RNA, 19 nt, Artificial Sequence
  Description of Artificial Sequence: Synthetic oligonucleotide
  Sense strand starting at position 3160 of SEQ ID NO: 1885065
uuugacaugugaucaagag

SEQ ID NO: 2313375 - RNA, 19 nt, Artificial Sequence
  Description of Artificial Sequence: Synthetic oligonucleotide
  Antisense strand to SEQ ID NO: 2313374
cucuugaucacaugucaaa

SEQ ID NO: 2313376 - RNA, 19 nt, Artificial Sequence
  Description of Artificial Sequence: Synthetic oligonucleotide
  Sense strand starting at position 3164 of SEQ ID NO: 1885065
acaugugaucaagaguugu

SEQ ID NO: 2313377 - RNA, 19 nt, Artificial Sequence
  Description of Artificial Sequence: Synthetic oligonucleotide
  Antisense strand to SEQ ID NO: 2313376
acaacucuugaucacaugu

SEQ ID NO: 2313378 - RNA, 19 nt, Artificial Sequence
  Description of Artificial Sequence: Synthetic oligonucleotide
  Sense strand starting at position 3168 of SEQ ID NO: 1885065
gugaucaagaguuguccca

SEQ ID NO: 2313379 - RNA, 19 nt, Artificial Sequence
  Description of Artificial Sequence: Synthetic oligonucleotide
  Antisense strand to SEQ ID NO: 2313378
ugggacaacucuugaucac

SEQ ID NO: 2313380 - RNA, 19 nt, Artificial Sequence
  Description of Artificial Sequence: Synthetic oligonucleotide
  Sense strand starting at position 3170 of SEQ ID NO: 1885065
gaucaagaguugucccagu

SEQ ID NO: 2313381 - RNA, 19 nt, Artificial Sequence
  Description of Artificial Sequence: Synthetic oligonucleotide
  Antisense strand to SEQ ID NO: 2313380
acugggacaacucuugauc

SEQ ID NO: 2313382 - RNA, 19 nt, Artificial Sequence
  Description of Artificial Sequence: Synthetic oligonucleotide
  Sense strand starting at position 3191 of SEQ ID NO: 1885065
agguucuguggcugaaacu

SEQ ID NO: 2313383 - RNA, 19 nt, Artificial Sequence
  Description of Artificial Sequence: Synthetic oligonucleotide
  Antisense strand to SEQ ID NO: 2313382
aguuucagccacagaaccu

SEQ ID NO: 2313384 - RNA, 19 nt, Artificial Sequence
  Description of Artificial Sequence: Synthetic oligonucleotide
  Sense strand starting at position 3192 of SEQ ID NO: 1885065
gguucuguggcugaaacuu

SEQ ID NO: 2313385 - RNA, 19 nt, Artificial Sequence
  Description of Artificial Sequence: Synthetic oligonucleotide
  Antisense strand to SEQ ID NO: 2313384
aaguuucagccacagaacc

SEQ ID NO: 2313386 - RNA, 19 nt, Artificial Sequence
  Description of Artificial Sequence: Synthetic oligonucleotide
  Sense strand starting at position 3267 of SEQ ID NO: 1885065
guucuuuauuguccagcca

SEQ ID NO: 2313387 - RNA, 19 nt, Artificial Sequence
  Description of Artificial Sequence: Synthetic oligonucleotide
  Antisense strand to SEQ ID NO: 2313386
uggcuggacaauaaagaac

SEQ ID NO: 2313388 - RNA, 19 nt, Artificial Sequence
  Description of Artificial Sequence: Synthetic oligonucleotide
  Sense strand starting at position 3631 of SEQ ID NO: 1885065
ccuguaaucccacaaguag

SEQ ID NO: 2313389 - RNA, 19 nt, Artificial Sequence
  Description of Artificial Sequence: Synthetic oligonucleotide
  Antisense strand to SEQ ID NO: 2313388
cuacuugugggauuacagg

SEQ ID NO: 2313390 - RNA, 19 nt, Artificial Sequence
  Description of Artificial Sequence: Synthetic oligonucleotide
  Sense strand starting at position 3785 of SEQ ID NO: 1885065
uuuaaugaggccuggaacu

SEQ ID NO: 2313391 - RNA, 19 nt, Artificial Sequence
  Description of Artificial Sequence: Synthetic oligonucleotide
  Antisense strand to SEQ ID NO: 2313390
aguuccaggccucauuaaa

SEQ ID NO: 2313392 - RNA, 19 nt, Artificial Sequence
  Description of Artificial Sequence: Synthetic oligonucleotide
  Sense strand starting at position 3798 of SEQ ID NO: 1885065
ggaacuguccuagguacau

SEQ ID NO: 2313393 - RNA, 19 nt, Artificial Sequence
  Description of Artificial Sequence: Synthetic oligonucleotide
  Antisense strand to SEQ ID NO: 2313392
auguaccuaggacaguucc

SEQ ID NO: 2313394 - RNA, 19 nt, Artificial Sequence
  Description of Artificial Sequence: Synthetic oligonucleotide
  Sense strand starting at position 18 of SEQ ID NO: 1885066
ugcaaagaauuuggaagaa

SEQ ID NO: 2313395 - RNA, 19 nt, Artificial Sequence
  Description of Artificial Sequence: Synthetic oligonucleotide
  Antisense strand to SEQ ID NO: 2313394
uucuuccaaauucuuugca

SEQ ID NO: 2313396 - RNA, 19 nt, Artificial Sequence
  Description of Artificial Sequence: Synthetic oligonucleotide
  Sense strand starting at position 54 of SEQ ID NO: 1885066
ccaugaguauuucuuugca

SEQ ID NO: 2313397 - RNA, 19 nt, Artificial Sequence
  Description of Artificial Sequence: Synthetic oligonucleotide
  Antisense strand to SEQ ID NO: 2313396
ugcaaagaaauacucaugg

SEQ ID NO: 2313398 - RNA, 19 nt, Artificial Sequence
  Description of Artificial Sequence: Synthetic oligonucleotide
  Sense strand starting at position 56 of SEQ ID NO: 1885066
augaguauuucuuugcauu

SEQ ID NO: 2313399 - RNA, 19 nt, Artificial Sequence
  Description of Artificial Sequence: Synthetic oligonucleotide
  Antisense strand to SEQ ID NO: 2313398
aaugcaaagaaauacucau

SEQ ID NO: 2313400 - RNA, 19 nt, Artificial Sequence
  Description of Artificial Sequence: Synthetic oligonucleotide
  Sense strand starting at position 230 of SEQ ID NO: 1885066
cccagcuugcugcuuguaa

SEQ ID NO: 2313401 - RNA, 19 nt, Artificial Sequence
  Description of Artificial Sequence: Synthetic oligonucleotide
  Antisense strand to SEQ ID NO: 2313400
uuacaagcagcaagcuggg

SEQ ID NO: 2313402 - RNA, 19 nt, Artificial Sequence
  Description of Artificial Sequence: Synthetic oligonucleotide
  Sense strand starting at position 284 of SEQ ID NO: 1885066
ggucaucucuuguugauuu

SEQ ID NO: 2313403 - RNA, 19 nt, Artificial Sequence
  Description of Artificial Sequence: Synthetic oligonucleotide
  Antisense strand to SEQ ID NO: 2313402
aaaucaacaagagaugacc

SEQ ID NO: 2313404 - RNA, 19 nt, Artificial Sequence
  Description of Artificial Sequence: Synthetic oligonucleotide
  Sense strand starting at position 369 of SEQ ID NO: 1885066
uguagaguagcugauguaa

SEQ ID NO: 2313405 - RNA, 19 nt, Artificial Sequence
  Description of Artificial Sequence: Synthetic oligonucleotide
  Antisense strand to SEQ ID NO: 2313404
uuacaucagcuacucuaca

SEQ ID NO: 2313406 - RNA, 19 nt, Artificial Sequence
  Description of Artificial Sequence: Synthetic oligonucleotide
  Sense strand starting at position 388 of SEQ ID NO: 1885066
ugccuugcucaacaaagau

SEQ ID NO: 2313407 - RNA, 19 nt, Artificial Sequence
  Description of Artificial Sequence: Synthetic oligonucleotide
  Antisense strand to SEQ ID NO: 2313406
aucuuuguugagcaaggca

SEQ ID NO: 2313408 - RNA, 19 nt, Artificial Sequence
  Description of Artificial Sequence: Synthetic oligonucleotide
  Sense strand starting at position 421 of SEQ ID NO: 1885066
ugcugaaggacuugauuga

SEQ ID NO: 2313409 - RNA, 19 nt, Artificial Sequence
  Description of Artificial Sequence: Synthetic oligonucleotide
  Antisense strand to SEQ ID NO: 2313408
ucaaucaaguccuucagca

SEQ ID NO: 2313410 - RNA, 19 nt, Artificial Sequence
  Description of Artificial Sequence: Synthetic oligonucleotide
  Sense strand starting at position 428 of SEQ ID NO: 1885066
ggacuugauugauccuuug

SEQ ID NO: 2313411 - RNA, 19 nt, Artificial Sequence
  Description of Artificial Sequence: Synthetic oligonucleotide
  Antisense strand to SEQ ID NO: 2313410
caaaggaucaaucaagucc

SEQ ID NO: 2313412 - RNA, 19 nt, Artificial Sequence
  Description of Artificial Sequence: Synthetic oligonucleotide
  Sense strand starting at position 492 of SEQ ID NO: 1885066
uggaauuauccuggaaucu

SEQ ID NO: 2313413 - RNA, 19 nt, Artificial Sequence
  Description of Artificial Sequence: Synthetic oligonucleotide
  Antisense strand to SEQ ID NO: 2313412
agauuccaggauaauucca

SEQ ID NO: 2313414 - RNA, 19 nt, Artificial Sequence
  Description of Artificial Sequence: Synthetic oligonucleotide
  Sense strand starting at position 561 of SEQ ID NO: 1885066
aggaaacuauggcucagau

SEQ ID NO: 2313415 - RNA, 19 nt, Artificial Sequence
  Description of Artificial Sequence: Synthetic oligonucleotide
  Antisense strand to SEQ ID NO: 2313414
aucugagccauaguuuccu

SEQ ID NO: 2313416 - RNA, 19 nt, Artificial Sequence
  Description of Artificial Sequence: Synthetic oligonucleotide
  Sense strand starting at position 1213 of SEQ ID NO: 1885066
gagccacuuccauaguaug

SEQ ID NO: 2313417 - RNA, 19 nt, Artificial Sequence
  Description of Artificial Sequence: Synthetic oligonucleotide
  Antisense strand to SEQ ID NO: 2313416
cauacuauggaaguggcuc

SEQ ID NO: 2313418 - RNA, 19 nt, Artificial Sequence
  Description of Artificial Sequence: Synthetic oligonucleotide
  Sense strand starting at position 1397 of SEQ ID NO: 1885066
auuauuaauccacgguacu

SEQ ID NO: 2313419 - RNA, 19 nt, Artificial Sequence
  Description of Artificial Sequence: Synthetic oligonucleotide
  Antisense strand to SEQ ID NO: 2313418
aguaccguggauuaauaau

SEQ ID NO: 2313420 - RNA, 19 nt, Artificial Sequence
  Description of Artificial Sequence: Synthetic oligonucleotide
  Sense strand starting at position 1506 of SEQ ID NO: 1885066
ggaauaaacugcuuuggag

SEQ ID NO: 2313421 - RNA, 19 nt, Artificial Sequence
  Description of Artificial Sequence: Synthetic oligonucleotide
  Antisense strand to SEQ ID NO: 2313420
cuccaaagcaguuuauucc

SEQ ID NO: 2313422 - RNA, 19 nt, Artificial Sequence
  Description of Artificial Sequence: Synthetic oligonucleotide
  Sense strand starting at position 1518 of SEQ ID NO: 1885066
uuuggagauuggucacaau

SEQ ID NO: 2313423 - RNA, 19 nt, Artificial Sequence
  Description of Artificial Sequence: Synthetic oligonucleotide
  Antisense strand to SEQ ID NO: 2313422
auugugaccaaucuccaaa

SEQ ID NO: 2313424 - RNA, 19 nt, Artificial Sequence
  Description of Artificial Sequence: Synthetic oligonucleotide
  Sense strand starting at position 1529 of SEQ ID NO: 1885066
gucacaaucugagucgaga

SEQ ID NO: 2313425 - RNA, 19 nt, Artificial Sequence
  Description of Artificial Sequence: Synthetic oligonucleotide
  Antisense strand to SEQ ID NO: 2313424
ucucgacucagauugugac

SEQ ID NO: 2313426 - RNA, 19 nt, Artificial Sequence
  Description of Artificial Sequence: Synthetic oligonucleotide
  Sense strand starting at position 1585 of SEQ ID NO: 1885066
cgaugauagcgggacuuca

SEQ ID NO: 2313427 - RNA, 19 nt, Artificial Sequence
  Description of Artificial Sequence: Synthetic oligonucleotide
  Antisense strand to SEQ ID NO: 2313426
ugaagucccgcuaucaucg

SEQ ID NO: 2313428 - RNA, 19 nt, Artificial Sequence
  Description of Artificial Sequence: Synthetic oligonucleotide
  Sense strand starting at position 2560 of SEQ ID NO: 1885066
ugaaucuuagcguaaggua

SEQ ID NO: 2313429 - RNA, 19 nt, Artificial Sequence
  Description of Artificial Sequence: Synthetic oligonucleotide
  Antisense strand to SEQ ID NO: 2313428
uaccuuacgcuaagauuca

SEQ ID NO: 2313430 - RNA, 19 nt, Artificial Sequence
  Description of Artificial Sequence: Synthetic oligonucleotide
  Sense strand starting at position 2572 of SEQ ID NO: 1885066
uaagguaaucuacguaaag

SEQ ID NO: 2313431 - RNA, 19 nt, Artificial Sequence
  Description of Artificial Sequence: Synthetic oligonucleotide
  Antisense strand to SEQ ID NO: 2313430
cuuuacguagauuaccuua

SEQ ID NO: 2313432 - RNA, 19 nt, Artificial Sequence
  Description of Artificial Sequence: Synthetic oligonucleotide
  Sense strand starting at position 2588 of SEQ ID NO: 1885066
aagccuuaagcggaggaua

SEQ ID NO: 2313433 - RNA, 19 nt, Artificial Sequence
  Description of Artificial Sequence: Synthetic oligonucleotide
  Antisense strand to SEQ ID NO: 2313432
uauccuccgcuuaaggcuu

SEQ ID NO: 2313434 - RNA, 19 nt, Artificial Sequence
  Description of Artificial Sequence: Synthetic oligonucleotide
  Sense strand starting at position 2591 of SEQ ID NO: 1885066
ccuuaagcggaggauaauu

SEQ ID NO: 2313435 - RNA, 19 nt, Artificial Sequence
  Description of Artificial Sequence: Synthetic oligonucleotide
  Antisense strand to SEQ ID NO: 2313434
aauuauccuccgcuuaagg

SEQ ID NO: 2313436 - RNA, 19 nt, Artificial Sequence
  Description of Artificial Sequence: Synthetic oligonucleotide
  Sense strand starting at position 2671 of SEQ ID NO: 1885066
gacucuguccugcagaaau

SEQ ID NO: 2313437 - RNA, 19 nt, Artificial Sequence
  Description of Artificial Sequence: Synthetic oligonucleotide
  Antisense strand to SEQ ID NO: 2313436
auuucugcaggacagaguc

SEQ ID NO: 2313438 - RNA, 19 nt, Artificial Sequence
  Description of Artificial Sequence: Synthetic oligonucleotide
  Sense strand starting at position 2673 of SEQ ID NO: 1885066
cucuguccugcagaaauac

SEQ ID NO: 2313439 - RNA, 19 nt, Artificial Sequence
  Description of Artificial Sequence: Synthetic oligonucleotide
  Antisense strand to SEQ ID NO: 2313438
guauuucugcaggacagag

SEQ ID NO: 2313440 - RNA, 19 nt, Artificial Sequence
  Description of Artificial Sequence: Synthetic oligonucleotide
  Sense strand starting at position 2766 of SEQ ID NO: 1885066
agccuaaauguccagcaaa

SEQ ID NO: 2313441 - RNA, 19 nt, Artificial Sequence
  Description of Artificial Sequence: Synthetic oligonucleotide
  Antisense strand to SEQ ID NO: 2313440
uuugcuggacauuuaggcu

SEQ ID NO: 2313442 - RNA, 19 nt, Artificial Sequence
  Description of Artificial Sequence: Synthetic oligonucleotide
  Sense strand starting at position 2873 of SEQ ID NO: 1885066
aguagcucucaguaauuga

SEQ ID NO: 2313443 - RNA, 19 nt, Artificial Sequence
  Description of Artificial Sequence: Synthetic oligonucleotide
  Antisense strand to SEQ ID NO: 2313442
ucaauuacugagagcuacu

SEQ ID NO: 2313444 - RNA, 19 nt, Artificial Sequence
  Description of Artificial Sequence: Synthetic oligonucleotide
  Sense strand starting at position 2890 of SEQ ID NO: 1885066
gaaugauuaguaggugcca

SEQ ID NO: 2313445 - RNA, 19 nt, Artificial Sequence
  Description of Artificial Sequence: Synthetic oligonucleotide
  Antisense strand to SEQ ID NO: 2313444
uggcaccuacuaaucauuc

SEQ ID NO: 2313446 - RNA, 19 nt, Artificial Sequence
  Description of Artificial Sequence: Synthetic oligonucleotide
  Sense strand starting at position 2892 of SEQ ID NO: 1885066
augauuaguaggugccaga

SEQ ID NO: 2313447 - RNA, 19 nt, Artificial Sequence
  Description of Artificial Sequence: Synthetic oligonucleotide
  Antisense strand to SEQ ID NO: 2313446
ucuggcaccuacuaaucau

SEQ ID NO: 2313448 - RNA, 19 nt, Artificial Sequence
  Description of Artificial Sequence: Synthetic oligonucleotide
  Sense strand starting at position 2919 of SEQ ID NO: 1885066
aguguuucccuugcguuaa

SEQ ID NO: 2313449 - RNA, 19 nt, Artificial Sequence
  Description of Artificial Sequence: Synthetic oligonucleotide
  Antisense strand to SEQ ID NO: 2313448
uuaacgcaagggaaacacu

SEQ ID NO: 2313450 - RNA, 19 nt, Artificial Sequence
  Description of Artificial Sequence: Synthetic oligonucleotide
  Sense strand starting at position 2923 of SEQ ID NO: 1885066
uuucccuugcguuaauuua

SEQ ID NO: 2313451 - RNA, 19 nt, Artificial Sequence
  Description of Artificial Sequence: Synthetic oligonucleotide
  Antisense strand to SEQ ID NO: 2313450
uaaauuaacgcaagggaaa

SEQ ID NO: 2313452 - RNA, 19 nt, Artificial Sequence
  Description of Artificial Sequence: Synthetic oligonucleotide
  Sense strand starting at position 3005 of SEQ ID NO: 1885066
cgagguucuuagccauuua

SEQ ID NO: 2313453 - RNA, 19 nt, Artificial Sequence
  Description of Artificial Sequence: Synthetic oligonucleotide
  Antisense strand to SEQ ID NO: 2313452
uaaauggcuaagaaccucg

SEQ ID NO: 2313454 - RNA, 19 nt, Artificial Sequence
  Description of Artificial Sequence: Synthetic oligonucleotide
  Sense strand starting at position 3073 of SEQ ID NO: 1885066
gaacccagaucuguuggau

SEQ ID NO: 2313455 - RNA, 19 nt, Artificial Sequence
  Description of Artificial Sequence: Synthetic oligonucleotide
  Antisense strand to SEQ ID NO: 2313454
auccaacagaucuggguuc

SEQ ID NO: 2313456 - RNA, 19 nt, Artificial Sequence
  Description of Artificial Sequence: Synthetic oligonucleotide
  Sense strand starting at position 3160 of SEQ ID NO: 1885066
uuauuaugaugggcuugaa

SEQ ID NO: 2313457 - RNA, 19 nt, Artificial Sequence
  Description of Artificial Sequence: Synthetic oligonucleotide
  Antisense strand to SEQ ID NO: 2313456
uucaagcccaucauaauaa

SEQ ID NO: 2313458 - RNA, 19 nt, Artificial Sequence
  Description of Artificial Sequence: Synthetic oligonucleotide
  Sense strand starting at position 3163 of SEQ ID NO: 1885066
uuaugaugggcuugaacua

SEQ ID NO: 2313459 - RNA, 19 nt, Artificial Sequence
  Description of Artificial Sequence: Synthetic oligonucleotide
  Antisense strand to SEQ ID NO: 2313458
uaguucaagcccaucauaa

SEQ ID NO: 2313460 - RNA, 19 nt, Artificial Sequence
  Description of Artificial Sequence: Synthetic oligonucleotide
  Sense strand starting at position 3175 of SEQ ID NO: 1885066
ugaacuagguguucuaaga

SEQ ID NO: 2313461 - RNA, 19 nt, Artificial Sequence
  Description of Artificial Sequence: Synthetic oligonucleotide
  Antisense strand to SEQ ID NO: 2313460
ucuuagaacaccuaguuca

SEQ ID NO: 2313462 - RNA, 19 nt, Artificial Sequence
  Description of Artificial Sequence: Synthetic oligonucleotide
  Sense strand starting at position 3252 of SEQ ID NO: 1885066
uuaggauucccaggagcca

SEQ ID NO: 2313463 - RNA, 19 nt, Artificial Sequence
  Description of Artificial Sequence: Synthetic oligonucleotide
  Antisense strand to SEQ ID NO: 2313462
uggcuccugggaauccuaa

SEQ ID NO: 2313464 - RNA, 19 nt, Artificial Sequence
  Description of Artificial Sequence: Synthetic oligonucleotide
  Sense strand starting at position 3564 of SEQ ID NO: 1885066
cugugaguggaaugagauc

SEQ ID NO: 2313465 - RNA, 19 nt, Artificial Sequence
  Description of Artificial Sequence: Synthetic oligonucleotide
  Antisense strand to SEQ ID NO: 2313464
gaucucauuccacucacag

SEQ ID NO: 2313466 - RNA, 19 nt, Artificial Sequence
  Description of Artificial Sequence: Synthetic oligonucleotide
  Sense strand starting at position 3802 of SEQ ID NO: 1885066
uccuauauaccuugguaga

SEQ ID NO: 2313467 - RNA, 19 nt, Artificial Sequence
  Description of Artificial Sequence: Synthetic oligonucleotide
  Antisense strand to SEQ ID NO: 2313466
ucuaccaagguauauagga

SEQ ID NO: 2313468 - RNA, 19 nt, Artificial Sequence
  Description of Artificial Sequence: Synthetic oligonucleotide
  Sense strand starting at position 3803 of SEQ ID NO: 1885066
ccuauauaccuugguagag

SEQ ID NO: 2313469 - RNA, 19 nt, Artificial Sequence
  Description of Artificial Sequence: Synthetic oligonucleotide
  Antisense strand to SEQ ID NO: 2313468
cucuaccaagguauauagg

SEQ ID NO: 2313470 - RNA, 19 nt, Artificial Sequence
  Description of Artificial Sequence: Synthetic oligonucleotide
  Sense strand starting at position 3830 of SEQ ID NO: 1885066
gaaccuaagucugucugaa

SEQ ID NO: 2313471 - RNA, 19 nt, Artificial Sequence
  Description of Artificial Sequence: Synthetic oligonucleotide
  Antisense strand to SEQ ID NO: 2313470
uucagacagacuuagguuc

SEQ ID NO: 2313472 - RNA, 19 nt, Artificial Sequence
  Description of Artificial Sequence: Synthetic oligonucleotide
  Sense strand starting at position 3832 of SEQ ID NO: 1885066
accuaagucugucugaaac

SEQ ID NO: 2313473 - RNA, 19 nt, Artificial Sequence
  Description of Artificial Sequence: Synthetic oligonucleotide
  Antisense strand to SEQ ID NO: 2313472
guuucagacagacuuaggu

SEQ ID NO: 2313474 - RNA, 19 nt, Artificial Sequence
  Description of Artificial Sequence: Synthetic oligonucleotide
  Sense strand starting at position 2 of SEQ ID NO: 1885067
agguaaucaccaggugauu

SEQ ID NO: 2313475 - RNA, 19 nt, Artificial Sequence
  Description of Artificial Sequence: Synthetic oligonucleotide
  Antisense strand to SEQ ID NO: 2313474
aaucaccuggugauuaccu

SEQ ID NO: 2313476 - RNA, 19 nt, Artificial Sequence
  Description of Artificial Sequence: Synthetic oligonucleotide
  Sense strand starting at position 8 of SEQ ID NO: 1885067
ucaccaggugauuaucuau

SEQ ID NO: 2313477 - RNA, 19 nt, Artificial Sequence
  Description of Artificial Sequence: Synthetic oligonucleotide
  Antisense strand to SEQ ID NO: 2313476
auagauaaucaccugguga

SEQ ID NO: 2313478 - RNA, 19 nt, Artificial Sequence
  Description of Artificial Sequence: Synthetic oligonucleotide
  Sense strand starting at position 142 of SEQ ID NO: 1885067
ggucuucugguugaaggga

SEQ ID NO: 2313479 - RNA, 19 nt, Artificial Sequence
  Description of Artificial Sequence: Synthetic oligonucleotide
  Antisense strand to SEQ ID NO: 2313478
ucccuucaaccagaagacc

SEQ ID NO: 2313480 - RNA, 19 nt, Artificial Sequence
  Description of Artificial Sequence: Synthetic oligonucleotide
  Sense strand starting at position 215 of SEQ ID NO: 1885067
ugaccugagacuggaaguu

SEQ ID NO: 2313481 - RNA, 19 nt, Artificial Sequence
  Description of Artificial Sequence: Synthetic oligonucleotide
  Antisense strand to SEQ ID NO: 2313480
aacuuccagucucagguca

SEQ ID NO: 2313482 - RNA, 19 nt, Artificial Sequence
  Description of Artificial Sequence: Synthetic oligonucleotide
  Sense strand starting at position 304 of SEQ ID NO: 1885067
cugggagaugauugcucuu

SEQ ID NO: 2313483 - RNA, 19 nt, Artificial Sequence
  Description of Artificial Sequence: Synthetic oligonucleotide
  Antisense strand to SEQ ID NO: 2313482
aagagcaaucaucucccag

SEQ ID NO: 2313484 - RNA, 19 nt, Artificial Sequence
  Description of Artificial Sequence: Synthetic oligonucleotide
  Sense strand starting at position 306 of SEQ ID NO: 1885067
gggagaugauugcucuuug

SEQ ID NO: 2313485 - RNA, 19 nt, Artificial Sequence
  Description of Artificial Sequence: Synthetic oligonucleotide
  Antisense strand to SEQ ID NO: 2313484
caaagagcaaucaucuccc

SEQ ID NO: 2313486 - RNA, 19 nt, Artificial Sequence
  Description of Artificial Sequence: Synthetic oligonucleotide
  Sense strand starting at position 307 of SEQ ID NO: 1885067
ggagaugauugcucuuuga

SEQ ID NO: 2313487 - RNA, 19 nt, Artificial Sequence
  Description of Artificial Sequence: Synthetic oligonucleotide
  Antisense strand to SEQ ID NO: 2313486
ucaaagagcaaucaucucc

SEQ ID NO: 2313488 - RNA, 19 nt, Artificial Sequence
  Description of Artificial Sequence: Synthetic oligonucleotide
  Sense strand starting at position 310 of SEQ ID NO: 1885067
gaugauugcucuuugacuu

SEQ ID NO: 2313489 - RNA, 19 nt, Artificial Sequence
  Description of Artificial Sequence: Synthetic oligonucleotide
  Antisense strand to SEQ ID NO: 2313488
aagucaaagagcaaucauc

SEQ ID NO: 2313490 - RNA, 19 nt, Artificial Sequence
  Description of Artificial Sequence: Synthetic oligonucleotide
  Sense strand starting at position 400 of SEQ ID NO: 1885067
uccucauaacugggacuuu

SEQ ID NO: 2313491 - RNA, 19 nt, Artificial Sequence
  Description of Artificial Sequence: Synthetic oligonucleotide
  Antisense strand to SEQ ID NO: 2313490
aaagucccaguuaugagga

SEQ ID NO: 2313492 - RNA, 19 nt, Artificial Sequence
  Description of Artificial Sequence: Synthetic oligonucleotide
  Sense strand starting at position 420 of SEQ ID NO: 1885067
ucuucuguucugcagaaau

SEQ ID NO: 2313493 - RNA, 19 nt, Artificial Sequence
  Description of Artificial Sequence: Synthetic oligonucleotide
  Antisense strand to SEQ ID NO: 2313492
auuucugcagaacagaaga

SEQ ID NO: 2313494 - RNA, 19 nt, Artificial Sequence
  Description of Artificial Sequence: Synthetic oligonucleotide
  Sense strand starting at position 902 of SEQ ID NO: 1885067
ccaucuauggacugucaua

SEQ ID NO: 2313495 - RNA, 19 nt, Artificial Sequence
  Description of Artificial Sequence: Synthetic oligonucleotide
  Antisense strand to SEQ ID NO: 2313494
uaugacaguccauagaugg

SEQ ID NO: 2313496 - RNA, 19 nt, Artificial Sequence
  Description of Artificial Sequence: Synthetic oligonucleotide
  Sense strand starting at position 1042 of SEQ ID NO: 1885067
aagguaauagcaugucaac

SEQ ID NO: 2313497 - RNA, 19 nt, Artificial Sequence
  Description of Artificial Sequence: Synthetic oligonucleotide
  Antisense strand to SEQ ID NO: 2313496
guugacaugcuauuaccuu

SEQ ID NO: 2313498 - RNA, 19 nt, Artificial Sequence
  Description of Artificial Sequence: Synthetic oligonucleotide
  Sense strand starting at position 1090 of SEQ ID NO: 1885067
cuuuauguggacuauaacu

SEQ ID NO: 2313499 - RNA, 19 nt, Artificial Sequence
  Description of Artificial Sequence: Synthetic oligonucleotide
  Antisense strand to SEQ ID NO: 2313498
aguuauaguccacauaaag

SEQ ID NO: 2313500 - RNA, 19 nt, Artificial Sequence
  Description of Artificial Sequence: Synthetic oligonucleotide
  Sense strand starting at position 1122 of SEQ ID NO: 1885067
ugagauaugauguggguag

SEQ ID NO: 2313501 - RNA, 19 nt, Artificial Sequence
  Description of Artificial Sequence: Synthetic oligonucleotide
  Antisense strand to SEQ ID NO: 2313500
cuacccacaucauaucuca

SEQ ID NO: 2313502 - RNA, 19 nt, Artificial Sequence
  Description of Artificial Sequence: Synthetic oligonucleotide
  Sense strand starting at position 1152 of SEQ ID NO: 1885067
gaaugcuuauggccuagga

SEQ ID NO: 2313503 - RNA, 19 nt, Artificial Sequence
  Description of Artificial Sequence: Synthetic oligonucleotide
  Antisense strand to SEQ ID NO: 2313502
uccuaggccauaagcauuc

SEQ ID NO: 2313504 - RNA, 19 nt, Artificial Sequence
  Description of Artificial Sequence: Synthetic oligonucleotide
  Sense strand starting at position 1156 of SEQ ID NO: 1885067
gcuuauggccuaggaagau

SEQ ID NO: 2313505 - RNA, 19 nt, Artificial Sequence
  Description of Artificial Sequence: Synthetic oligonucleotide
  Antisense strand to SEQ ID NO: 2313504
aucuuccuaggccauaagc

SEQ ID NO: 2313506 - RNA, 19 nt, Artificial Sequence
  Description of Artificial Sequence: Synthetic oligonucleotide
  Sense strand starting at position 1327 of SEQ ID NO: 1885067
uugagaccuuagcccuaaa

SEQ ID NO: 2313507 - RNA, 19 nt, Artificial Sequence
  Description of Artificial Sequence: Synthetic oligonucleotide
  Antisense strand to SEQ ID NO: 2313506
uuuagggcuaaggucucaa

SEQ ID NO: 2313508 - RNA, 19 nt, Artificial Sequence
  Description of Artificial Sequence: Synthetic oligonucleotide
  Sense strand starting at position 1384 of SEQ ID NO: 1885067
gauaucuucuggcuugaag

SEQ ID NO: 2313509 - RNA, 19 nt, Artificial Sequence
  Description of Artificial Sequence: Synthetic oligonucleotide
  Antisense strand to SEQ ID NO: 2313508
cuucaagccagaagauauc

SEQ ID NO: 2313510 - RNA, 19 nt, Artificial Sequence
  Description of Artificial Sequence: Synthetic oligonucleotide
  Sense strand starting at position 1387 of SEQ ID NO: 1885067
aucuucuggcuugaaguua

SEQ ID NO: 2313511 - RNA, 19 nt, Artificial Sequence
  Description of Artificial Sequence: Synthetic oligonucleotide
  Antisense strand to SEQ ID NO: 2313510
uaacuucaagccagaagau

SEQ ID NO: 2313512 - RNA, 19 nt, Artificial Sequence
  Description of Artificial Sequence: Synthetic oligonucleotide
  Sense strand starting at position 1392 of SEQ ID NO: 1885067
cuggcuugaaguuauuaga

SEQ ID NO: 2313513 - RNA, 19 nt, Artificial Sequence
  Description of Artificial Sequence: Synthetic oligonucleotide
  Antisense strand to SEQ ID NO: 2313512
ucuaauaacuucaagccag

SEQ ID NO: 2313514 - RNA, 19 nt, Artificial Sequence
  Description of Artificial Sequence: Synthetic oligonucleotide
  Sense strand starting at position 1402 of SEQ ID NO: 1885067
guuauuagauccuucuaga

SEQ ID NO: 2313515 - RNA, 19 nt, Artificial Sequence
  Description of Artificial Sequence: Synthetic oligonucleotide
  Antisense strand to SEQ ID NO: 2313514
ucuagaaggaucuaauaac

SEQ ID NO: 2313516 - RNA, 19 nt, Artificial Sequence
  Description of Artificial Sequence: Synthetic oligonucleotide
  Sense strand starting at position 1493 of SEQ ID NO: 1885067
uuagucucagaguaaagcu

SEQ ID NO: 2313517 - RNA, 19 nt, Artificial Sequence
  Description of Artificial Sequence: Synthetic oligonucleotide
  Antisense strand to SEQ ID NO: 2313516
agcuuuacucugagacuaa

SEQ ID NO: 2313518 - RNA, 19 nt, Artificial Sequence
  Description of Artificial Sequence: Synthetic oligonucleotide
  Sense strand starting at position 1509 of SEQ ID NO: 1885067
gcuucuaagugaccuaaca

SEQ ID NO: 2313519 - RNA, 19 nt, Artificial Sequence
  Description of Artificial Sequence: Synthetic oligonucleotide
  Antisense strand to SEQ ID NO: 2313518
uguuaggucacuuagaagc

SEQ ID NO: 2313520 - RNA, 19 nt, Artificial Sequence
  Description of Artificial Sequence: Synthetic oligonucleotide
  Sense strand starting at position 1893 of SEQ ID NO: 1885067
ugagauuucugggagccuu

SEQ ID NO: 2313521 - RNA, 19 nt, Artificial Sequence
  Description of Artificial Sequence: Synthetic oligonucleotide
  Antisense strand to SEQ ID NO: 2313520
aaggcucccagaaaucuca

SEQ ID NO: 2313522 - RNA, 19 nt, Artificial Sequence
  Description of Artificial Sequence: Synthetic oligonucleotide
  Sense strand starting at position 2017 of SEQ ID NO: 1885067
ggaggugacucagccaaga

SEQ ID NO: 2313523 - RNA, 19 nt, Artificial Sequence
  Description of Artificial Sequence: Synthetic oligonucleotide
  Antisense strand to SEQ ID NO: 2313522
ucuuggcugagucaccucc

SEQ ID NO: 2313524 - RNA, 19 nt, Artificial Sequence
  Description of Artificial Sequence: Synthetic oligonucleotide
  Sense strand starting at position 2281 of SEQ ID NO: 1885067
accuuugagucucccuaga

SEQ ID NO: 2313525 - RNA, 19 nt, Artificial Sequence
  Description of Artificial Sequence: Synthetic oligonucleotide
  Antisense strand to SEQ ID NO: 2313524
ucuagggagacucaaaggu

SEQ ID NO: 2313526 - RNA, 19 nt, Artificial Sequence
  Description of Artificial Sequence: Synthetic oligonucleotide
  Sense strand starting at position 2283 of SEQ ID NO: 1885067
cuuugagucucccuagaau

SEQ ID NO: 2313527 - RNA, 19 nt, Artificial Sequence
  Description of Artificial Sequence: Synthetic oligonucleotide
  Antisense strand to SEQ ID NO: 2313526
auucuagggagacucaaag

SEQ ID NO: 2313528 - RNA, 19 nt, Artificial Sequence
  Description of Artificial Sequence: Synthetic oligonucleotide
  Sense strand starting at position 2312 of SEQ ID NO: 1885067
guaggaaacagcugaggua

SEQ ID NO: 2313529 - RNA, 19 nt, Artificial Sequence
  Description of Artificial Sequence: Synthetic oligonucleotide
  Antisense strand to SEQ ID NO: 2313528
uaccucagcuguuuccuac

SEQ ID NO: 2313530 - RNA, 19 nt, Artificial Sequence
  Description of Artificial Sequence: Synthetic oligonucleotide
  Sense strand starting at position 2346 of SEQ ID NO: 1885067
gaaggagucaagcgugaag

SEQ ID NO: 2313531 - RNA, 19 nt, Artificial Sequence
  Description of Artificial Sequence: Synthetic oligonucleotide
  Antisense strand to SEQ ID NO: 2313530
cuucacgcuugacuccuuc

SEQ ID NO: 2313532 - RNA, 19 nt, Artificial Sequence
  Description of Artificial Sequence: Synthetic oligonucleotide
  Sense strand starting at position 2458 of SEQ ID NO: 1885067
aucuaaugagccuggaaua

SEQ ID NO: 2313533 - RNA, 19 nt, Artificial Sequence
  Description of Artificial Sequence: Synthetic oligonucleotide
  Antisense strand to SEQ ID NO: 2313532
uauuccaggcucauuagau

SEQ ID NO: 2313534 - RNA, 19 nt, Artificial Sequence
  Description of Artificial Sequence: Synthetic oligonucleotide
  Sense strand starting at position 2459 of SEQ ID NO: 1885067
ucuaaugagccuggaauau

SEQ ID NO: 2313535 - RNA, 19 nt, Artificial Sequence
  Description of Artificial Sequence: Synthetic oligonucleotide
  Antisense strand to SEQ ID NO: 2313534
auauuccaggcucauuaga

SEQ ID NO: 2313536 - RNA, 19 nt, Artificial Sequence
  Description of Artificial Sequence: Synthetic oligonucleotide
  Sense strand starting at position 2471 of SEQ ID NO: 1885067
ggaauauguggguguaggu

SEQ ID NO: 2313537 - RNA, 19 nt, Artificial Sequence
  Description of Artificial Sequence: Synthetic oligonucleotide
  Antisense strand to SEQ ID NO: 2313536
accuacacccacauauucc

SEQ ID NO: 2313538 - RNA, 19 nt, Artificial Sequence
  Description of Artificial Sequence: Synthetic oligonucleotide
  Sense strand starting at position 2639 of SEQ ID NO: 1885067
gggagguuugcugagaagu

SEQ ID NO: 2313539 - RNA, 19 nt, Artificial Sequence
  Description of Artificial Sequence: Synthetic oligonucleotide
  Antisense strand to SEQ ID NO: 2313538
acuucucagcaaaccuccc

SEQ ID NO: 2313540 - RNA, 19 nt, Artificial Sequence
  Description of Artificial Sequence: Synthetic oligonucleotide
  Sense strand starting at position 2653 of SEQ ID NO: 1885067
gaagucaggcuuugagaug

SEQ ID NO: 2313541 - RNA, 19 nt, Artificial Sequence
  Description of Artificial Sequence: Synthetic oligonucleotide
  Antisense strand to SEQ ID NO: 2313540
caucucaaagccugacuuc

SEQ ID NO: 2313542 - RNA, 19 nt, Artificial Sequence
  Description of Artificial Sequence: Synthetic oligonucleotide
  Sense strand starting at position 3035 of SEQ ID NO: 1885067
agugcaggucuugaguaaa

SEQ ID NO: 2313543 - RNA, 19 nt, Artificial Sequence
  Description of Artificial Sequence: Synthetic oligonucleotide
  Antisense strand to SEQ ID NO: 2313542
uuuacucaagaccugcacu

SEQ ID NO: 2313544 - RNA, 19 nt, Artificial Sequence
  Description of Artificial Sequence: Synthetic oligonucleotide
  Sense strand starting at position 3075 of SEQ ID NO: 1885067
uguacucaguaagucagaa

SEQ ID NO: 2313545 - RNA, 19 nt, Artificial Sequence
  Description of Artificial Sequence: Synthetic oligonucleotide
  Antisense strand to SEQ ID NO: 2313544
uucugacuuacugaguaca

SEQ ID NO: 2313546 - RNA, 19 nt, Artificial Sequence
  Description of Artificial Sequence: Synthetic oligonucleotide
  Sense strand starting at position 3158 of SEQ ID NO: 1885067
cgaggcugugcuuaauaaa

SEQ ID NO: 2313547 - RNA, 19 nt, Artificial Sequence
  Description of Artificial Sequence: Synthetic oligonucleotide
  Antisense strand to SEQ ID NO: 2313546
uuuauuaagcacagccucg

SEQ ID NO: 2313548 - RNA, 19 nt, Artificial Sequence
  Description of Artificial Sequence: Synthetic oligonucleotide
  Sense strand starting at position 3200 of SEQ ID NO: 1885067
ugggaaagugguugggaga

SEQ ID NO: 2313549 - RNA, 19 nt, Artificial Sequence
  Description of Artificial Sequence: Synthetic oligonucleotide
  Antisense strand to SEQ ID NO: 2313548
ucucccaaccacuuuccca

SEQ ID NO: 2313550 - RNA, 19 nt, Artificial Sequence
  Description of Artificial Sequence: Synthetic oligonucleotide
  Sense strand starting at position 3236 of SEQ ID NO: 1885067
cuuaaaugcuaugcaagga

SEQ ID NO: 2313551 - RNA, 19 nt, Artificial Sequence
  Description of Artificial Sequence: Synthetic oligonucleotide
  Antisense strand to SEQ ID NO: 2313550
uccuugcauagcauuuaag

SEQ ID NO: 2313552 - RNA, 19 nt, Artificial Sequence
  Description of Artificial Sequence: Synthetic oligonucleotide
  Sense strand starting at position 3603 of SEQ ID NO: 1885067
cuauuauugggugaugggu

SEQ ID NO: 2313553 - RNA, 19 nt, Artificial Sequence
  Description of Artificial Sequence: Synthetic oligonucleotide
  Antisense strand to SEQ ID NO: 2313552
acccaucacccaauaauag

SEQ ID NO: 2313554 - RNA, 19 nt, Artificial Sequence
  Description of Artificial Sequence: Synthetic oligonucleotide
  Sense strand starting at position 2 of SEQ ID NO: 1885068
gggauuauagcgcaaacca

SEQ ID NO: 2313555 - RNA, 19 nt, Artificial Sequence
  Description of Artificial Sequence: Synthetic oligonucleotide
  Antisense strand to SEQ ID NO: 2313554
ugguuugcgcuauaauccc

SEQ ID NO: 2313556 - RNA, 19 nt, Artificial Sequence
  Description of Artificial Sequence: Synthetic oligonucleotide
  Sense strand starting at position 27 of SEQ ID NO: 1885068
caggcuuuacaaugaaagu

SEQ ID NO: 2313557 - RNA, 19 nt, Artificial Sequence
  Description of Artificial Sequence: Synthetic oligonucleotide
  Antisense strand to SEQ ID NO: 2313556
acuuucauuguaaagccug

SEQ ID NO: 2313558 - RNA, 19 nt, Artificial Sequence
  Description of Artificial Sequence: Synthetic oligonucleotide
  Sense strand starting at position 119 of SEQ ID NO: 1885068
aguauauauguuuguugac

SEQ ID NO: 2313559 - RNA, 19 nt, Artificial Sequence
  Description of Artificial Sequence: Synthetic oligonucleotide
  Antisense strand to SEQ ID NO: 2313558
gucaacaaacauauauacu

SEQ ID NO: 2313560 - RNA, 19 nt, Artificial Sequence
  Description of Artificial Sequence: Synthetic oligonucleotide
  Sense strand starting at position 120 of SEQ ID NO: 1885068
guauauauguuuguugacu

SEQ ID NO: 2313561 - RNA, 19 nt, Artificial Sequence
  Description of Artificial Sequence: Synthetic oligonucleotide
  Antisense strand to SEQ ID NO: 2313560
agucaacaaacauauauac

SEQ ID NO: 2313562 - RNA, 19 nt, Artificial Sequence
  Description of Artificial Sequence: Synthetic oligonucleotide
  Sense strand starting at position 271 of SEQ ID NO: 1885068
cugugcagcuauucuuaga

SEQ ID NO: 2313563 - RNA, 19 nt, Artificial Sequence
  Description of Artificial Sequence: Synthetic oligonucleotide
  Antisense strand to SEQ ID NO: 2313562
ucuaagaauagcugcacag

SEQ ID NO: 2313564 - RNA, 19 nt, Artificial Sequence
  Description of Artificial Sequence: Synthetic oligonucleotide
  Sense strand starting at position 522 of SEQ ID NO: 1885068
ggauauauaccauggcaaa

SEQ ID NO: 2313565 - RNA, 19 nt, Artificial Sequence
  Description of Artificial Sequence: Synthetic oligonucleotide
  Antisense strand to SEQ ID NO: 2313564
uuugccaugguauauaucc

SEQ ID NO: 2313566 - RNA, 19 nt, Artificial Sequence
  Description of Artificial Sequence: Synthetic oligonucleotide
  Sense strand starting at position 534 of SEQ ID NO: 1885068
uggcaaauuggcuguaaca

SEQ ID NO: 2313567 - RNA, 19 nt, Artificial Sequence
  Description of Artificial Sequence: Synthetic oligonucleotide
  Antisense strand to SEQ ID NO: 2313566
uguuacagccaauuugcca

SEQ ID NO: 2313568 - RNA, 19 nt, Artificial Sequence
  Description of Artificial Sequence: Synthetic oligonucleotide
  Sense strand starting at position 541 of SEQ ID NO: 1885068
uuggcuguaacaggucaaa

SEQ ID NO: 2313569 - RNA, 19 nt, Artificial Sequence
  Description of Artificial Sequence: Synthetic oligonucleotide
  Antisense strand to SEQ ID NO: 2313568
uuugaccuguuacagccaa

SEQ ID NO: 2313570 - RNA, 19 nt, Artificial Sequence
  Description of Artificial Sequence: Synthetic oligonucleotide
  Sense strand starting at position 544 of SEQ ID NO: 1885068
gcuguaacaggucaaacaa

SEQ ID NO: 2313571 - RNA, 19 nt, Artificial Sequence
  Description of Artificial Sequence: Synthetic oligonucleotide
  Antisense strand to SEQ ID NO: 2313570
uuguuugaccuguuacagc

SEQ ID NO: 2313572 - RNA, 19 nt, Artificial Sequence
  Description of Artificial Sequence: Synthetic oligonucleotide
  Sense strand starting at position 690 of SEQ ID NO: 1885068
cuaguauuccgcuucugcu

SEQ ID NO: 2313573 - RNA, 19 nt, Artificial Sequence
  Description of Artificial Sequence: Synthetic oligonucleotide
  Antisense strand to SEQ ID NO: 2313572
agcagaagcggaauacuag

SEQ ID NO: 2313574 - RNA, 19 nt, Artificial Sequence
  Description of Artificial Sequence: Synthetic oligonucleotide
  Sense strand starting at position 691 of SEQ ID NO: 1885068
uaguauuccgcuucugcua

SEQ ID NO: 2313575 - RNA, 19 nt, Artificial Sequence
  Description of Artificial Sequence: Synthetic oligonucleotide
  Antisense strand to SEQ ID NO: 2313574
uagcagaagcggaauacua

SEQ ID NO: 2313576 - RNA, 19 nt, Artificial Sequence
  Description of Artificial Sequence: Synthetic oligonucleotide
  Sense strand starting at position 945 of SEQ ID NO: 1885068
acaagcucuccagggagau

SEQ ID NO: 2313577 - RNA, 19 nt, Artificial Sequence
  Description of Artificial Sequence: Synthetic oligonucleotide
  Antisense strand to SEQ ID NO: 2313576
aucucccuggagagcuugu

SEQ ID NO: 2313578 - RNA, 19 nt, Artificial Sequence
  Description of Artificial Sequence: Synthetic oligonucleotide
  Sense strand starting at position 1164 of SEQ ID NO: 1885068
gaaugaauauaagagcaga

SEQ ID NO: 2313579 - RNA, 19 nt, Artificial Sequence
  Description of Artificial Sequence: Synthetic oligonucleotide
  Antisense strand to SEQ ID NO: 2313578
ucugcucuuauauucauuc

SEQ ID NO: 2313580 - RNA, 19 nt, Artificial Sequence
  Description of Artificial Sequence: Synthetic oligonucleotide
  Sense strand starting at position 1263 of SEQ ID NO: 1885068
aacgauugaugguuaugaa

SEQ ID NO: 2313581 - RNA, 19 nt, Artificial Sequence
  Description of Artificial Sequence: Synthetic oligonucleotide
  Antisense strand to SEQ ID NO: 2313580
uucauaaccaucaaucguu

SEQ ID NO: 2313582 - RNA, 19 nt, Artificial Sequence
  Description of Artificial Sequence: Synthetic oligonucleotide
  Sense strand starting at position 1267 of SEQ ID NO: 1885068
auugaugguuaugaaacau

SEQ ID NO: 2313583 - RNA, 19 nt, Artificial Sequence
  Description of Artificial Sequence: Synthetic oligonucleotide
  Antisense strand to SEQ ID NO: 2313582
auguuucauaaccaucaau

SEQ ID NO: 2313584 - RNA, 19 nt, Artificial Sequence
  Description of Artificial Sequence: Synthetic oligonucleotide
  Sense strand starting at position 1273 of SEQ ID NO: 1885068
gguuaugaaacaugaaagu

SEQ ID NO: 2313585 - RNA, 19 nt, Artificial Sequence
  Description of Artificial Sequence: Synthetic oligonucleotide
  Antisense strand to SEQ ID NO: 2313584
acuuucauguuucauaacc

SEQ ID NO: 2313586 - RNA, 19 nt, Artificial Sequence
  Description of Artificial Sequence: Synthetic oligonucleotide
  Sense strand starting at position 1364 of SEQ ID NO: 1885068
ccgacauucugagcucaca

SEQ ID NO: 2313587 - RNA, 19 nt, Artificial Sequence
  Description of Artificial Sequence: Synthetic oligonucleotide
  Antisense strand to SEQ ID NO: 2313586
ugugagcucagaaugucgg

SEQ ID NO: 2313588 - RNA, 19 nt, Artificial Sequence
  Description of Artificial Sequence: Synthetic oligonucleotide
  Sense strand starting at position 1404 of SEQ ID NO: 1885068
gcggcuaucgggucaaagu

SEQ ID NO: 2313589 - RNA, 19 nt, Artificial Sequence
  Description of Artificial Sequence: Synthetic oligonucleotide
  Antisense strand to SEQ ID NO: 2313588
acuuugacccgauagccgc

SEQ ID NO: 2313590 - RNA, 19 nt, Artificial Sequence
  Description of Artificial Sequence: Synthetic oligonucleotide
  Sense strand starting at position 1442 of SEQ ID NO: 1885068
uaugcagucgccuaagcua

SEQ ID NO: 2313591 - RNA, 19 nt, Artificial Sequence
  Description of Artificial Sequence: Synthetic oligonucleotide
  Antisense strand to SEQ ID NO: 2313590
uagcuuaggcgacugcaua

SEQ ID NO: 2313592 - RNA, 19 nt, Artificial Sequence
  Description of Artificial Sequence: Synthetic oligonucleotide
  Sense strand starting at position 1592 of SEQ ID NO: 1885068
ggaagagcgaucugcgauu

SEQ ID NO: 2313593 - RNA, 19 nt, Artificial Sequence
  Description of Artificial Sequence: Synthetic oligonucleotide
  Antisense strand to SEQ ID NO: 2313592
aaucgcagaucgcucuucc

SEQ ID NO: 2313594 - RNA, 19 nt, Artificial Sequence
  Description of Artificial Sequence: Synthetic oligonucleotide
  Sense strand starting at position 1762 of SEQ ID NO: 1885068
cuaagacagugucuccuaa

SEQ ID NO: 2313595 - RNA, 19 nt, Artificial Sequence
  Description of Artificial Sequence: Synthetic oligonucleotide
  Antisense strand to SEQ ID NO: 2313594
uuaggagacacugucuuag

SEQ ID NO: 2313596 - RNA, 19 nt, Artificial Sequence
  Description of Artificial Sequence: Synthetic oligonucleotide
  Sense strand starting at position 1764 of SEQ ID NO: 1885068
aagacagugucuccuaagu

SEQ ID NO: 2313597 - RNA, 19 nt, Artificial Sequence
  Description of Artificial Sequence: Synthetic oligonucleotide
  Antisense strand to SEQ ID NO: 2313596
acuuaggagacacugucuu

SEQ ID NO: 2313598 - RNA, 19 nt, Artificial Sequence
  Description of Artificial Sequence: Synthetic oligonucleotide
  Sense strand starting at position 1857 of SEQ ID NO: 1885068
cgaugucagggucaugcaa

SEQ ID NO: 2313599 - RNA, 19 nt, Artificial Sequence
  Description of Artificial Sequence: Synthetic oligonucleotide
  Antisense strand to SEQ ID NO: 2313598
uugcaugacccugacaucg

SEQ ID NO: 2313600 - RNA, 19 nt, Artificial Sequence
  Description of Artificial Sequence: Synthetic oligonucleotide
  Sense strand starting at position 2053 of SEQ ID NO: 1885068
gcgggauugcugugaaacu

SEQ ID NO: 2313601 - RNA, 19 nt, Artificial Sequence
  Description of Artificial Sequence: Synthetic oligonucleotide
  Antisense strand to SEQ ID NO: 2313600
aguuucacagcaaucccgc

SEQ ID NO: 2313602 - RNA, 19 nt, Artificial Sequence
  Description of Artificial Sequence: Synthetic oligonucleotide
  Sense strand starting at position 3058 of SEQ ID NO: 1885068
uggaucugcccuuggaaua

SEQ ID NO: 2313603 - RNA, 19 nt, Artificial Sequence
  Description of Artificial Sequence: Synthetic oligonucleotide
  Antisense strand to SEQ ID NO: 2313602
uauuccaagggcagaucca

SEQ ID NO: 2313604 - RNA, 19 nt, Artificial Sequence
  Description of Artificial Sequence: Synthetic oligonucleotide
  Sense strand starting at position 3059 of SEQ ID NO: 1885068
ggaucugcccuuggaauaa

SEQ ID NO: 2313605 - RNA, 19 nt, Artificial Sequence
  Description of Artificial Sequence: Synthetic oligonucleotide
  Antisense strand to SEQ ID NO: 2313604
uuauuccaagggcagaucc

SEQ ID NO: 2313606 - RNA, 19 nt, Artificial Sequence
  Description of Artificial Sequence: Synthetic oligonucleotide
  Sense strand starting at position 3095 of SEQ ID NO: 1885068
guuacaucucauuggagcu

SEQ ID NO: 2313607 - RNA, 19 nt, Artificial Sequence
  Description of Artificial Sequence: Synthetic oligonucleotide
  Antisense strand to SEQ ID NO: 2313606
agcuccaaugagauguaac

SEQ ID NO: 2313608 - RNA, 19 nt, Artificial Sequence
  Description of Artificial Sequence: Synthetic oligonucleotide
  Sense strand starting at position 3466 of SEQ ID NO: 1885068
aaggguaaauuugauguua

SEQ ID NO: 2313609 - RNA, 19 nt, Artificial Sequence
  Description of Artificial Sequence: Synthetic oligonucleotide
  Antisense strand to SEQ ID NO: 2313608
uaacaucaaauuuacccuu

SEQ ID NO: 2313610 - RNA, 19 nt, Artificial Sequence
  Description of Artificial Sequence: Synthetic oligonucleotide
  Sense strand starting at position 3468 of SEQ ID NO: 1885068
ggguaaauuugauguuauc

SEQ ID NO: 2313611 - RNA, 19 nt, Artificial Sequence
  Description of Artificial Sequence: Synthetic oligonucleotide
  Antisense strand to SEQ ID NO: 2313610
gauaacaucaaauuuaccc

SEQ ID NO: 2313612 - RNA, 19 nt, Artificial Sequence
  Description of Artificial Sequence: Synthetic oligonucleotide
  Sense strand starting at position 3538 of SEQ ID NO: 1885068
auguuuaaaccaggacuua

SEQ ID NO: 2313613 - RNA, 19 nt, Artificial Sequence
  Description of Artificial Sequence: Synthetic oligonucleotide
  Antisense strand to SEQ ID NO: 2313612
uaaguccugguuuaaacau

SEQ ID NO: 2313614 - RNA, 19 nt, Artificial Sequence
  Description of Artificial Sequence: Synthetic oligonucleotide
  Sense strand starting at position 3619 of SEQ ID NO: 1885068
gcaucacagugaucuccuu

SEQ ID NO: 2313615 - RNA, 19 nt, Artificial Sequence
  Description of Artificial Sequence: Synthetic oligonucleotide
  Antisense strand to SEQ ID NO: 2313614
aaggagaucacugugaugc

SEQ ID NO: 2313616 - RNA, 19 nt, Artificial Sequence
  Description of Artificial Sequence: Synthetic oligonucleotide
  Sense strand starting at position 3689 of SEQ ID NO: 1885068
caguaaugucauggcuuau

SEQ ID NO: 2313617 - RNA, 19 nt, Artificial Sequence
  Description of Artificial Sequence: Synthetic oligonucleotide
  Antisense strand to SEQ ID NO: 2313616
auaagccaugacauuacug

SEQ ID NO: 2313618 - RNA, 19 nt, Artificial Sequence
  Description of Artificial Sequence: Synthetic oligonucleotide
  Sense strand starting at position 3693 of SEQ ID NO: 1885068
aaugucauggcuuaucaag

SEQ ID NO: 2313619 - RNA, 19 nt, Artificial Sequence
  Description of Artificial Sequence: Synthetic oligonucleotide
  Antisense strand to SEQ ID NO: 2313618
cuugauaagccaugacauu

SEQ ID NO: 2313620 - RNA, 19 nt, Artificial Sequence
  Description of Artificial Sequence: Synthetic oligonucleotide
  Sense strand starting at position 3695 of SEQ ID NO: 1885068
ugucauggcuuaucaagua

SEQ ID NO: 2313621 - RNA, 19 nt, Artificial Sequence
  Description of Artificial Sequence: Synthetic oligonucleotide
  Antisense strand to SEQ ID NO: 2313620
uacuugauaagccaugaca

SEQ ID NO: 2313622 - RNA, 19 nt, Artificial Sequence
  Description of Artificial Sequence: Synthetic oligonucleotide
  Sense strand starting at position 3790 of SEQ ID NO: 1885068
aacaaaggccgaugaaaua

SEQ ID NO: 2313623 - RNA, 19 nt, Artificial Sequence
  Description of Artificial Sequence: Synthetic oligonucleotide
  Antisense strand to SEQ ID NO: 2313622
uauuucaucggccuuuguu

SEQ ID NO: 2313624 - RNA, 19 nt, Artificial Sequence
  Description of Artificial Sequence: Synthetic oligonucleotide
  Sense strand starting at position 3832 of SEQ ID NO: 1885068
gucauaagacaacagugua

SEQ ID NO: 2313625 - RNA, 19 nt, Artificial Sequence
  Description of Artificial Sequence: Synthetic oligonucleotide
  Antisense strand to SEQ ID NO: 2313624
uacacuguugucuuaugac

SEQ ID NO: 2313626 - RNA, 19 nt, Artificial Sequence
  Description of Artificial Sequence: Synthetic oligonucleotide
  Sense strand starting at position 3845 of SEQ ID NO: 1885068
aguguauguggugugucau

SEQ ID NO: 2313627 - RNA, 19 nt, Artificial Sequence
  Description of Artificial Sequence: Synthetic oligonucleotide
  Antisense strand to SEQ ID NO: 2313626
augacacaccacauacacu

SEQ ID NO: 2313628 - RNA, 19 nt, Artificial Sequence
  Description of Artificial Sequence: Synthetic oligonucleotide
  Sense strand starting at position 3876 of SEQ ID NO: 1885068
cagccuuguaguugagaga

SEQ ID NO: 2313629 - RNA, 19 nt, Artificial Sequence
  Description of Artificial Sequence: Synthetic oligonucleotide
  Antisense strand to SEQ ID NO: 2313628
ucucucaacuacaaggcug

SEQ ID NO: 2313630 - RNA, 19 nt, Artificial Sequence
  Description of Artificial Sequence: Synthetic oligonucleotide
  Sense strand starting at position 3877 of SEQ ID NO: 1885068
agccuuguaguugagagau

SEQ ID NO: 2313631 - RNA, 19 nt, Artificial Sequence
  Description of Artificial Sequence: Synthetic oligonucleotide
  Antisense strand to SEQ ID NO: 2313630
aucucucaacuacaaggcu

SEQ ID NO: 2313632 - RNA, 19 nt, Artificial Sequence
  Description of Artificial Sequence: Synthetic oligonucleotide
  Sense strand starting at position 3971 of SEQ ID NO: 1885068
guaguaguaucuccauucu

SEQ ID NO: 2313633 - RNA, 19 nt, Artificial Sequence
  Description of Artificial Sequence: Synthetic oligonucleotide
  Antisense strand to SEQ ID NO: 2313632
agaauggagauacuacuac

SEQ ID NO: 2313634 - RNA, 19 nt, Artificial Sequence
  Description of Artificial Sequence: Synthetic oligonucleotide
  Sense strand starting at position 131 of SEQ ID NO: 1885069
cuuacuuuggacuggaaau

SEQ ID NO: 2313635 - RNA, 19 nt, Artificial Sequence
  Description of Artificial Sequence: Synthetic oligonucleotide
  Antisense strand to SEQ ID NO: 2313634
auuuccaguccaaaguaag

SEQ ID NO: 2313636 - RNA, 19 nt, Artificial Sequence
  Description of Artificial Sequence: Synthetic oligonucleotide
  Sense strand starting at position 293 of SEQ ID NO: 1885069
ucuacuccugcugaagaga

SEQ ID NO: 2313637 - RNA, 19 nt, Artificial Sequence
  Description of Artificial Sequence: Synthetic oligonucleotide
  Antisense strand to SEQ ID NO: 2313636
ucucuucagcaggaguaga

SEQ ID NO: 2313638 - RNA, 19 nt, Artificial Sequence
  Description of Artificial Sequence: Synthetic oligonucleotide
  Sense strand starting at position 371 of SEQ ID NO: 1885069
agguaagaaucacugccua

SEQ ID NO: 2313639 - RNA, 19 nt, Artificial Sequence
  Description of Artificial Sequence: Synthetic oligonucleotide
  Antisense strand to SEQ ID NO: 2313638
uaggcagugauucuuaccu

SEQ ID NO: 2313640 - RNA, 19 nt, Artificial Sequence
  Description of Artificial Sequence: Synthetic oligonucleotide
  Sense strand starting at position 376 of SEQ ID NO: 1885069
agaaucacugccuagaagu

SEQ ID NO: 2313641 - RNA, 19 nt, Artificial Sequence
  Description of Artificial Sequence: Synthetic oligonucleotide
  Antisense strand to SEQ ID NO: 2313640
acuucuaggcagugauucu

SEQ ID NO: 2313642 - RNA, 19 nt, Artificial Sequence
  Description of Artificial Sequence: Synthetic oligonucleotide
  Sense strand starting at position 421 of SEQ ID NO: 1885069
uuggcaauuccacaugauu

SEQ ID NO: 2313643 - RNA, 19 nt, Artificial Sequence
  Description of Artificial Sequence: Synthetic oligonucleotide
  Antisense strand to SEQ ID NO: 2313642
aaucauguggaauugccaa

SEQ ID NO: 2313644 - RNA, 19 nt, Artificial Sequence
  Description of Artificial Sequence: Synthetic oligonucleotide
  Sense strand starting at position 489 of SEQ ID NO: 1885069
uggaacuauguccauuacu

SEQ ID NO: 2313645 - RNA, 19 nt, Artificial Sequence
  Description of Artificial Sequence: Synthetic oligonucleotide
  Antisense strand to SEQ ID NO: 2313644
aguaauggacauaguucca

SEQ ID NO: 2313646 - RNA, 19 nt, Artificial Sequence
  Description of Artificial Sequence: Synthetic oligonucleotide
  Sense strand starting at position 577 of SEQ ID NO: 1885069
auguguaauuacucuugaa

SEQ ID NO: 2313647 - RNA, 19 nt, Artificial Sequence
  Description of Artificial Sequence: Synthetic oligonucleotide
  Antisense strand to SEQ ID NO: 2313646
uucaagaguaauuacacau

SEQ ID NO: 2313648 - RNA, 19 nt, Artificial Sequence
  Description of Artificial Sequence: Synthetic oligonucleotide
  Sense strand starting at position 704 of SEQ ID NO: 1885069
uccuguuucugauuaaaug

SEQ ID NO: 2313649 - RNA, 19 nt, Artificial Sequence
  Description of Artificial Sequence: Synthetic oligonucleotide
  Antisense strand to SEQ ID NO: 2313648
cauuuaaucagaaacagga

SEQ ID NO: 2313650 - RNA, 19 nt, Artificial Sequence
  Description of Artificial Sequence: Synthetic oligonucleotide
  Sense strand starting at position 705 of SEQ ID NO: 1885069
ccuguuucugauuaaauga

SEQ ID NO: 2313651 - RNA, 19 nt, Artificial Sequence
  Description of Artificial Sequence: Synthetic oligonucleotide
  Antisense strand to SEQ ID NO: 2313650
ucauuuaaucagaaacagg

SEQ ID NO: 2313652 - RNA, 19 nt, Artificial Sequence
  Description of Artificial Sequence: Synthetic oligonucleotide
  Sense strand starting at position 854 of SEQ ID NO: 1885069
aucuuauauguguacaaag

SEQ ID NO: 2313653 - RNA, 19 nt, Artificial Sequence
  Description of Artificial Sequence: Synthetic oligonucleotide
  Antisense strand to SEQ ID NO: 2313652
cuuuguacacauauaagau

SEQ ID NO: 2313654 - RNA, 19 nt, Artificial Sequence
  Description of Artificial Sequence: Synthetic oligonucleotide
  Sense strand starting at position 865 of SEQ ID NO: 1885069
guacaaagucuuuaacuuu

SEQ ID NO: 2313655 - RNA, 19 nt, Artificial Sequence
  Description of Artificial Sequence: Synthetic oligonucleotide
  Antisense strand to SEQ ID NO: 2313654
aaaguuaaagacuuuguac

SEQ ID NO: 2313656 - RNA, 19 nt, Artificial Sequence
  Description of Artificial Sequence: Synthetic oligonucleotide
  Sense strand starting at position 932 of SEQ ID NO: 1885069
gagguaucuuuauucugau

SEQ ID NO: 2313657 - RNA, 19 nt, Artificial Sequence
  Description of Artificial Sequence: Synthetic oligonucleotide
  Antisense strand to SEQ ID NO: 2313656
aucagaauaaagauaccuc

SEQ ID NO: 2313658 - RNA, 19 nt, Artificial Sequence
  Description of Artificial Sequence: Synthetic oligonucleotide
  Sense strand starting at position 933 of SEQ ID NO: 1885069
agguaucuuuauucugauu

SEQ ID NO: 2313659 - RNA, 19 nt, Artificial Sequence
  Description of Artificial Sequence: Synthetic oligonucleotide
  Antisense strand to SEQ ID NO: 2313658
aaucagaauaaagauaccu

SEQ ID NO: 2313660 - RNA, 19 nt, Artificial Sequence
  Description of Artificial Sequence: Synthetic oligonucleotide
  Sense strand starting at position 1102 of SEQ ID NO: 1885069
gccuguugugaauaaauga

SEQ ID NO: 2313661 - RNA, 19 nt, Artificial Sequence
  Description of Artificial Sequence: Synthetic oligonucleotide
  Antisense strand to SEQ ID NO: 2313660
ucauuuauucacaacaggc

SEQ ID NO: 2313662 - RNA, 19 nt, Artificial Sequence
  Description of Artificial Sequence: Synthetic oligonucleotide
  Sense strand starting at position 1451 of SEQ ID NO: 1885069
gacguaaacccaugacuuc

SEQ ID NO: 2313663 - RNA, 19 nt, Artificial Sequence
  Description of Artificial Sequence: Synthetic oligonucleotide
  Antisense strand to SEQ ID NO: 2313662
gaagucauggguuuacguc

SEQ ID NO: 2313664 - RNA, 19 nt, Artificial Sequence
  Description of Artificial Sequence: Synthetic oligonucleotide
  Sense strand starting at position 1537 of SEQ ID NO: 1885069
ccugcugggagucagauua

SEQ ID NO: 2313665 - RNA, 19 nt, Artificial Sequence
  Description of Artificial Sequence: Synthetic oligonucleotide
  Antisense strand to SEQ ID NO: 2313664
uaaucugacucccagcagg

SEQ ID NO: 2313666 - RNA, 19 nt, Artificial Sequence
  Description of Artificial Sequence: Synthetic oligonucleotide
  Sense strand starting at position 1637 of SEQ ID NO: 1885069
gggucagagguuugaggaa

SEQ ID NO: 2313667 - RNA, 19 nt, Artificial Sequence
  Description of Artificial Sequence: Synthetic oligonucleotide
  Antisense strand to SEQ ID NO: 2313666
uuccucaaaccucugaccc

SEQ ID NO: 2313668 - RNA, 19 nt, Artificial Sequence
  Description of Artificial Sequence: Synthetic oligonucleotide
  Sense strand starting at position 1671 of SEQ ID NO: 1885069
accagaacucuucgaccua

SEQ ID NO: 2313669 - RNA, 19 nt, Artificial Sequence
  Description of Artificial Sequence: Synthetic oligonucleotide
  Antisense strand to SEQ ID NO: 2313668
uaggucgaagaguucuggu

SEQ ID NO: 2313670 - RNA, 19 nt, Artificial Sequence
  Description of Artificial Sequence: Synthetic oligonucleotide
  Sense strand starting at position 1847 of SEQ ID NO: 1885069
gcgggagaccucuacaacu

SEQ ID NO: 2313671 - RNA, 19 nt, Artificial Sequence
  Description of Artificial Sequence: Synthetic oligonucleotide
  Antisense strand to SEQ ID NO: 2313670
aguuguagaggucucccgc

SEQ ID NO: 2313672 - RNA, 19 nt, Artificial Sequence
  Description of Artificial Sequence: Synthetic oligonucleotide
  Sense strand starting at position 2075 of SEQ ID NO: 1885069
aagggaggauuguugcuau

SEQ ID NO: 2313673 - RNA, 19 nt, Artificial Sequence
  Description of Artificial Sequence: Synthetic oligonucleotide
  Antisense strand to SEQ ID NO: 2313672
auagcaacaauccucccuu

SEQ ID NO: 2313674 - RNA, 19 nt, Artificial Sequence
  Description of Artificial Sequence: Synthetic oligonucleotide
  Sense strand starting at position 2078 of SEQ ID NO: 1885069
ggaggauuguugcuaugga

SEQ ID NO: 2313675 - RNA, 19 nt, Artificial Sequence
  Description of Artificial Sequence: Synthetic oligonucleotide
  Antisense strand to SEQ ID NO: 2313674
uccauagcaacaauccucc

SEQ ID NO: 2313676 - RNA, 19 nt, Artificial Sequence
  Description of Artificial Sequence: Synthetic oligonucleotide
  Sense strand starting at position 2519 of SEQ ID NO: 1885069
agagaaaucguagauugcu

SEQ ID NO: 2313677 - RNA, 19 nt, Artificial Sequence
  Description of Artificial Sequence: Synthetic oligonucleotide
  Antisense strand to SEQ ID NO: 2313676
agcaaucuacgauuucucu

SEQ ID NO: 2313678 - RNA, 19 nt, Artificial Sequence
  Description of Artificial Sequence: Synthetic oligonucleotide
  Sense strand starting at position 2529 of SEQ ID NO: 1885069
uagauugcucuuuaguaga

SEQ ID NO: 2313679 - RNA, 19 nt, Artificial Sequence
  Description of Artificial Sequence: Synthetic oligonucleotide
  Antisense strand to SEQ ID NO: 2313678
ucuacuaaagagcaaucua

SEQ ID NO: 2313680 - RNA, 19 nt, Artificial Sequence
  Description of Artificial Sequence: Synthetic oligonucleotide
  Sense strand starting at position 2537 of SEQ ID NO: 1885069
ucuuuaguagaugaguuaa

SEQ ID NO: 2313681 - RNA, 19 nt, Artificial Sequence
  Description of Artificial Sequence: Synthetic oligonucleotide
  Antisense strand to SEQ ID NO: 2313680
uuaacucaucuacuaaaga

SEQ ID NO: 2313682 - RNA, 19 nt, Artificial Sequence
  Description of Artificial Sequence: Synthetic oligonucleotide
  Sense strand starting at position 2539 of SEQ ID NO: 1885069
uuuaguagaugaguuaaag

SEQ ID NO: 2313683 - RNA, 19 nt, Artificial Sequence
  Description of Artificial Sequence: Synthetic oligonucleotide
  Antisense strand to SEQ ID NO: 2313682
cuuuaacucaucuacuaaa

SEQ ID NO: 2313684 - RNA, 19 nt, Artificial Sequence
  Description of Artificial Sequence: Synthetic oligonucleotide
  Sense strand starting at position 2588 of SEQ ID NO: 1885069
cccugaaauguggaggcua

SEQ ID NO: 2313685 - RNA, 19 nt, Artificial Sequence
  Description of Artificial Sequence: Synthetic oligonucleotide
  Antisense strand to SEQ ID NO: 2313684
uagccuccacauuucaggg

SEQ ID NO: 2313686 - RNA, 19 nt, Artificial Sequence
  Description of Artificial Sequence: Synthetic oligonucleotide
  Sense strand starting at position 2702 of SEQ ID NO: 1885069
ggaaguaaauaugcagaau

SEQ ID NO: 2313687 - RNA, 19 nt, Artificial Sequence
  Description of Artificial Sequence: Synthetic oligonucleotide
  Antisense strand to SEQ ID NO: 2313686
auucugcauauuuacuucc

SEQ ID NO: 2313688 - RNA, 19 nt, Artificial Sequence
  Description of Artificial Sequence: Synthetic oligonucleotide
  Sense strand starting at position 3288 of SEQ ID NO: 1885069
ucucuuaugcuggauaaug

SEQ ID NO: 2313689 - RNA, 19 nt, Artificial Sequence
  Description of Artificial Sequence: Synthetic oligonucleotide
  Antisense strand to SEQ ID NO: 2313688
cauuauccagcauaagaga

SEQ ID NO: 2313690 - RNA, 19 nt, Artificial Sequence
  Description of Artificial Sequence: Synthetic oligonucleotide
  Sense strand starting at position 3290 of SEQ ID NO: 1885069
ucuuaugcuggauaaugua

SEQ ID NO: 2313691 - RNA, 19 nt, Artificial Sequence
  Description of Artificial Sequence: Synthetic oligonucleotide
  Antisense strand to SEQ ID NO: 2313690
uacauuauccagcauaaga

SEQ ID NO: 2313692 - RNA, 19 nt, Artificial Sequence
  Description of Artificial Sequence: Synthetic oligonucleotide
  Sense strand starting at position 3323 of SEQ ID NO: 1885069
agagacauaugucuaucuu

SEQ ID NO: 2313693 - RNA, 19 nt, Artificial Sequence
  Description of Artificial Sequence: Synthetic oligonucleotide
  Antisense strand to SEQ ID NO: 2313692
aagauagacauaugucucu

SEQ ID NO: 2313694 - RNA, 19 nt, Artificial Sequence
  Description of Artificial Sequence: Synthetic oligonucleotide
  Sense strand starting at position 3388 of SEQ ID NO: 1885069
cauuauaggucuccaggaa

SEQ ID NO: 2313695 - RNA, 19 nt, Artificial Sequence
  Description of Artificial Sequence: Synthetic oligonucleotide
  Antisense strand to SEQ ID NO: 2313694
uuccuggagaccuauaaug

SEQ ID NO: 2313696 - RNA, 19 nt, Artificial Sequence
  Description of Artificial Sequence: Synthetic oligonucleotide
  Sense strand starting at position 3392 of SEQ ID NO: 1885069
auaggucuccaggaagugu

SEQ ID NO: 2313697 - RNA, 19 nt, Artificial Sequence
  Description of Artificial Sequence: Synthetic oligonucleotide
  Antisense strand to SEQ ID NO: 2313696
acacuuccuggagaccuau

SEQ ID NO: 2313698 - RNA, 19 nt, Artificial Sequence
  Description of Artificial Sequence: Synthetic oligonucleotide
  Sense strand starting at position 3443 of SEQ ID NO: 1885069
gcaaguauccaagacagua

SEQ ID NO: 2313699 - RNA, 19 nt, Artificial Sequence
  Description of Artificial Sequence: Synthetic oligonucleotide
  Antisense strand to SEQ ID NO: 2313698
uacugucuuggauacuugc

SEQ ID NO: 2313700 - RNA, 19 nt, Artificial Sequence
  Description of Artificial Sequence: Synthetic oligonucleotide
  Sense strand starting at position 3461 of SEQ ID NO: 1885069
agaugauuggcugguaaag

SEQ ID NO: 2313701 - RNA, 19 nt, Artificial Sequence
  Description of Artificial Sequence: Synthetic oligonucleotide
  Antisense strand to SEQ ID NO: 2313700
cuuuaccagccaaucaucu

SEQ ID NO: 2313702 - RNA, 19 nt, Artificial Sequence
  Description of Artificial Sequence: Synthetic oligonucleotide
  Sense strand starting at position 3569 of SEQ ID NO: 1885069
uuauguauuccagggaauu

SEQ ID NO: 2313703 - RNA, 19 nt, Artificial Sequence
  Description of Artificial Sequence: Synthetic oligonucleotide
  Antisense strand to SEQ ID NO: 2313702
aauucccuggaauacauaa

SEQ ID NO: 2313704 - RNA, 19 nt, Artificial Sequence
  Description of Artificial Sequence: Synthetic oligonucleotide
  Sense strand starting at position 3570 of SEQ ID NO: 1885069
uauguauuccagggaauug

SEQ ID NO: 2313705 - RNA, 19 nt, Artificial Sequence
  Description of Artificial Sequence: Synthetic oligonucleotide
  Antisense strand to SEQ ID NO: 2313704
caauucccuggaauacaua

SEQ ID NO: 2313706 - RNA, 19 nt, Artificial Sequence
  Description of Artificial Sequence: Synthetic oligonucleotide
  Sense strand starting at position 3609 of SEQ ID NO: 1885069
agaaccauauuccugaagu

SEQ ID NO: 2313707 - RNA, 19 nt, Artificial Sequence
  Description of Artificial Sequence: Synthetic oligonucleotide
  Antisense strand to SEQ ID NO: 2313706
acuucaggaauaugguucu

SEQ ID NO: 2313708 - RNA, 19 nt, Artificial Sequence
  Description of Artificial Sequence: Synthetic oligonucleotide
  Sense strand starting at position 3619 of SEQ ID NO: 1885069
uccugaagugacuaguauu

SEQ ID NO: 2313709 - RNA, 19 nt, Artificial Sequence
  Description of Artificial Sequence: Synthetic oligonucleotide
  Antisense strand to SEQ ID NO: 2313708
aauacuagucacuucagga

SEQ ID NO: 2313710 - RNA, 19 nt, Artificial Sequence
  Description of Artificial Sequence: Synthetic oligonucleotide
  Sense strand starting at position 3626 of SEQ ID NO: 1885069
gugacuaguauugaaagua

SEQ ID NO: 2313711 - RNA, 19 nt, Artificial Sequence
  Description of Artificial Sequence: Synthetic oligonucleotide
  Antisense strand to SEQ ID NO: 2313710
uacuuucaauacuagucac

SEQ ID NO: 2313712 - RNA, 19 nt, Artificial Sequence
  Description of Artificial Sequence: Synthetic oligonucleotide
  Sense strand starting at position 3804 of SEQ ID NO: 1885069
caugaugucuuucuggacu

SEQ ID NO: 2313713 - RNA, 19 nt, Artificial Sequence
  Description of Artificial Sequence: Synthetic oligonucleotide
  Antisense strand to SEQ ID NO: 2313712
aguccagaaagacaucaug

SEQ ID NO: 2313714 - RNA, 19 nt, Artificial Sequence
  Description of Artificial Sequence: Synthetic oligonucleotide
  Sense strand starting at position 122 of SEQ ID NO: 1885070
ucaagugucugacuccaua

SEQ ID NO: 2313715 - RNA, 19 nt, Artificial Sequence
  Description of Artificial Sequence: Synthetic oligonucleotide
  Antisense strand to SEQ ID NO: 2313714
uauggagucagacacuuga

SEQ ID NO: 2313716 - RNA, 19 nt, Artificial Sequence
  Description of Artificial Sequence: Synthetic oligonucleotide
  Sense strand starting at position 125 of SEQ ID NO: 1885070
agugucugacuccauacaa

SEQ ID NO: 2313717 - RNA, 19 nt, Artificial Sequence
  Description of Artificial Sequence: Synthetic oligonucleotide
  Antisense strand to SEQ ID NO: 2313716
uuguauggagucagacacu

SEQ ID NO: 2313718 - RNA, 19 nt, Artificial Sequence
  Description of Artificial Sequence: Synthetic oligonucleotide
  Sense strand starting at position 159 of SEQ ID NO: 1885070
aucagaaguuaacugugau

SEQ ID NO: 2313719 - RNA, 19 nt, Artificial Sequence
  Description of Artificial Sequence: Synthetic oligonucleotide
  Antisense strand to SEQ ID NO: 2313718
aucacaguuaacuucugau

SEQ ID NO: 2313720 - RNA, 19 nt, Artificial Sequence
  Description of Artificial Sequence: Synthetic oligonucleotide
  Sense strand starting at position 162 of SEQ ID NO: 1885070
agaaguuaacugugauuau

SEQ ID NO: 2313721 - RNA, 19 nt, Artificial Sequence
  Description of Artificial Sequence: Synthetic oligonucleotide
  Antisense strand to SEQ ID NO: 2313720
auaaucacaguuaacuucu

SEQ ID NO: 2313722 - RNA, 19 nt, Artificial Sequence
  Description of Artificial Sequence: Synthetic oligonucleotide
  Sense strand starting at position 227 of SEQ ID NO: 1885070
aggguuguuccucaugguu

SEQ ID NO: 2313723 - RNA, 19 nt, Artificial Sequence
  Description of Artificial Sequence: Synthetic oligonucleotide
  Antisense strand to SEQ ID NO: 2313722
aaccaugaggaacaacccu

SEQ ID NO: 2313724 - RNA, 19 nt, Artificial Sequence
  Description of Artificial Sequence: Synthetic oligonucleotide
  Sense strand starting at position 236 of SEQ ID NO: 1885070
ccucaugguuuguuaggau

SEQ ID NO: 2313725 - RNA, 19 nt, Artificial Sequence
  Description of Artificial Sequence: Synthetic oligonucleotide
  Antisense strand to SEQ ID NO: 2313724
auccuaacaaaccaugagg

SEQ ID NO: 2313726 - RNA, 19 nt, Artificial Sequence
  Description of Artificial Sequence: Synthetic oligonucleotide
  Sense strand starting at position 367 of SEQ ID NO: 1885070
cuagcuguuguccaaggaa

SEQ ID NO: 2313727 - RNA, 19 nt, Artificial Sequence
  Description of Artificial Sequence: Synthetic oligonucleotide
  Antisense strand to SEQ ID NO: 2313726
uuccuuggacaacagcuag

SEQ ID NO: 2313728 - RNA, 19 nt, Artificial Sequence
  Description of Artificial Sequence: Synthetic oligonucleotide
  Sense strand starting at position 370 of SEQ ID NO: 1885070
gcuguuguccaaggaauga

SEQ ID NO: 2313729 - RNA, 19 nt, Artificial Sequence
  Description of Artificial Sequence: Synthetic oligonucleotide
  Antisense strand to SEQ ID NO: 2313728
ucauuccuuggacaacagc

SEQ ID NO: 2313730 - RNA, 19 nt, Artificial Sequence
  Description of Artificial Sequence: Synthetic oligonucleotide
  Sense strand starting at position 456 of SEQ ID NO: 1885070
gggccucuucaagggaaga

SEQ ID NO: 2313731 - RNA, 19 nt, Artificial Sequence
  Description of Artificial Sequence: Synthetic oligonucleotide
  Antisense strand to SEQ ID NO: 2313730
ucuucccuugaagaggccc

SEQ ID NO: 2313732 - RNA, 19 nt, Artificial Sequence
  Description of Artificial Sequence: Synthetic oligonucleotide
  Sense strand starting at position 522 of SEQ ID NO: 1885070
gagagaagguucuuauggu

SEQ ID NO: 2313733 - RNA, 19 nt, Artificial Sequence
  Description of Artificial Sequence: Synthetic oligonucleotide
  Antisense strand to SEQ ID NO: 2313732
accauaagaaccuucucuc

SEQ ID NO: 2313734 - RNA, 19 nt, Artificial Sequence
  Description of Artificial Sequence: Synthetic oligonucleotide
  Sense strand starting at position 573 of SEQ ID NO: 1885070
aguggcuguccagauugau

SEQ ID NO: 2313735 - RNA, 19 nt, Artificial Sequence
  Description of Artificial Sequence: Synthetic oligonucleotide
  Antisense strand to SEQ ID NO: 2313734
aucaaucuggacagccacu

SEQ ID NO: 2313736 - RNA, 19 nt, Artificial Sequence
  Description of Artificial Sequence: Synthetic oligonucleotide
  Sense strand starting at position 576 of SEQ ID NO: 1885070
ggcuguccagauugaugaa

SEQ ID NO: 2313737 - RNA, 19 nt, Artificial Sequence
  Description of Artificial Sequence: Synthetic oligonucleotide
  Antisense strand to SEQ ID NO: 2313736
uucaucaaucuggacagcc

SEQ ID NO: 2313738 - RNA, 19 nt, Artificial Sequence
  Description of Artificial Sequence: Synthetic oligonucleotide
  Sense strand starting at position 577 of SEQ ID NO: 1885070
gcuguccagauugaugaaa

SEQ ID NO: 2313739 - RNA, 19 nt, Artificial Sequence
  Description of Artificial Sequence: Synthetic oligonucleotide
  Antisense strand to SEQ ID NO: 2313738
uuucaucaaucuggacagc

SEQ ID NO: 2313740 - RNA, 19 nt, Artificial Sequence
  Description of Artificial Sequence: Synthetic oligonucleotide
  Sense strand starting at position 602 of SEQ ID NO: 1885070
cuuugugaaucaucaguca

SEQ ID NO: 2313741 - RNA, 19 nt, Artificial Sequence
  Description of Artificial Sequence: Synthetic oligonucleotide
  Antisense strand to SEQ ID NO: 2313740
ugacugaugauucacaaag

SEQ ID NO: 2313742 - RNA, 19 nt, Artificial Sequence
  Description of Artificial Sequence: Synthetic oligonucleotide
  Sense strand starting at position 605 of SEQ ID NO: 1885070
ugugaaucaucagucagua

SEQ ID NO: 2313743 - RNA, 19 nt, Artificial Sequence
  Description of Artificial Sequence: Synthetic oligonucleotide
  Antisense strand to SEQ ID NO: 2313742
uacugacugaugauucaca

SEQ ID NO: 2313744 - RNA, 19 nt, Artificial Sequence
  Description of Artificial Sequence: Synthetic oligonucleotide
  Sense strand starting at position 844 of SEQ ID NO: 1885070
uuugccauucuguaguaaa

SEQ ID NO: 2313745 - RNA, 19 nt, Artificial Sequence
  Description of Artificial Sequence: Synthetic oligonucleotide
  Antisense strand to SEQ ID NO: 2313744
uuuacuacagaauggcaaa

SEQ ID NO: 2313746 - RNA, 19 nt, Artificial Sequence
  Description of Artificial Sequence: Synthetic oligonucleotide
  Sense strand starting at position 871 of SEQ ID NO: 1885070
uuugcuucugucuauagaa

SEQ ID NO: 2313747 - RNA, 19 nt, Artificial Sequence
  Description of Artificial Sequence: Synthetic oligonucleotide
  Antisense strand to SEQ ID NO: 2313746
uucuauagacagaagcaaa

SEQ ID NO: 2313748 - RNA, 19 nt, Artificial Sequence
  Description of Artificial Sequence: Synthetic oligonucleotide
  Sense strand starting at position 873 of SEQ ID NO: 1885070
ugcuucugucuauagaaga

SEQ ID NO: 2313749 - RNA, 19 nt, Artificial Sequence
  Description of Artificial Sequence: Synthetic oligonucleotide
  Antisense strand to SEQ ID NO: 2313748
ucuucuauagacagaagca

SEQ ID NO: 2313750 - RNA, 19 nt, Artificial Sequence
  Description of Artificial Sequence: Synthetic oligonucleotide
  Sense strand starting at position 878 of SEQ ID NO: 1885070
cugucuauagaagaauguu

SEQ ID NO: 2313751 - RNA, 19 nt, Artificial Sequence
  Description of Artificial Sequence: Synthetic oligonucleotide
  Antisense strand to SEQ ID NO: 2313750
aacauucuucuauagacag

SEQ ID NO: 2313752 - RNA, 19 nt, Artificial Sequence
  Description of Artificial Sequence: Synthetic oligonucleotide
  Sense strand starting at position 925 of SEQ ID NO: 1885070
gaggaucaguggcuggaaa

SEQ ID NO: 2313753 - RNA, 19 nt, Artificial Sequence
  Description of Artificial Sequence: Synthetic oligonucleotide
  Antisense strand to SEQ ID NO: 2313752
uuuccagccacugauccuc

SEQ ID NO: 2313754 - RNA, 19 nt, Artificial Sequence
  Description of Artificial Sequence: Synthetic oligonucleotide
  Sense strand starting at position 1057 of SEQ ID NO: 1885070
aagagaguucccggaacag

SEQ ID NO: 2313755 - RNA, 19 nt, Artificial Sequence
  Description of Artificial Sequence: Synthetic oligonucleotide
  Antisense strand to SEQ ID NO: 2313754
cuguuccgggaacucucuu

SEQ ID NO: 2313756 - RNA, 19 nt, Artificial Sequence
  Description of Artificial Sequence: Synthetic oligonucleotide
  Sense strand starting at position 1072 of SEQ ID NO: 1885070
acagccaucgcugugaguu

SEQ ID NO: 2313757 - RNA, 19 nt, Artificial Sequence
  Description of Artificial Sequence: Synthetic oligonucleotide
  Antisense strand to SEQ ID NO: 2313756
aacucacagcgauggcugu

SEQ ID NO: 2313758 - RNA, 19 nt, Artificial Sequence
  Description of Artificial Sequence: Synthetic oligonucleotide
  Sense strand starting at position 1168 of SEQ ID NO: 1885070
uauuauuucuggcugugau

SEQ ID NO: 2313759 - RNA, 19 nt, Artificial Sequence
  Description of Artificial Sequence: Synthetic oligonucleotide
  Antisense strand to SEQ ID NO: 2313758
aucacagccagaaauaaua

SEQ ID NO: 2313760 - RNA, 19 nt, Artificial Sequence
  Description of Artificial Sequence: Synthetic oligonucleotide
  Sense strand starting at position 1171 of SEQ ID NO: 1885070
uauuucuggcugugauacu

SEQ ID NO: 2313761 - RNA, 19 nt, Artificial Sequence
  Description of Artificial Sequence: Synthetic oligonucleotide
  Antisense strand to SEQ ID NO: 2313760
aguaucacagccagaaaua

SEQ ID NO: 2313762 - RNA, 19 nt, Artificial Sequence
  Description of Artificial Sequence: Synthetic oligonucleotide
  Sense strand starting at position 1180 of SEQ ID NO: 1885070
cugugauacucauuacaua

SEQ ID NO: 2313763 - RNA, 19 nt, Artificial Sequence
  Description of Artificial Sequence: Synthetic oligonucleotide
  Antisense strand to SEQ ID NO: 2313762
uauguaaugaguaucacag

SEQ ID NO: 2313764 - RNA, 19 nt, Artificial Sequence
  Description of Artificial Sequence: Synthetic oligonucleotide
  Sense strand starting at position 1207 of SEQ ID NO: 1885070
ucaaaucucuggcuugaag

SEQ ID NO: 2313765 - RNA, 19 nt, Artificial Sequence
  Description of Artificial Sequence: Synthetic oligonucleotide
  Antisense strand to SEQ ID NO: 2313764
cuucaagccagagauuuga

SEQ ID NO: 2313766 - RNA, 19 nt, Artificial Sequence
  Description of Artificial Sequence: Synthetic oligonucleotide
  Sense strand starting at position 1317 of SEQ ID NO: 1885070
uggcuagagugguuugaaa

SEQ ID NO: 2313767 - RNA, 19 nt, Artificial Sequence
  Description of Artificial Sequence: Synthetic oligonucleotide
  Antisense strand to SEQ ID NO: 2313766
uuucaaaccacucuagcca

SEQ ID NO: 2313768 - RNA, 19 nt, Artificial Sequence
  Description of Artificial Sequence: Synthetic oligonucleotide
  Sense strand starting at position 1319 of SEQ ID NO: 1885070
gcuagagugguuugaaaga

SEQ ID NO: 2313769 - RNA, 19 nt, Artificial Sequence
  Description of Artificial Sequence: Synthetic oligonucleotide
  Antisense strand to SEQ ID NO: 2313768
ucuuucaaaccacucuagc

SEQ ID NO: 2313770 - RNA, 19 nt, Artificial Sequence
  Description of Artificial Sequence: Synthetic oligonucleotide
  Sense strand starting at position 1346 of SEQ ID NO: 1885070
guucuaaaccagugcauuu

SEQ ID NO: 2313771 - RNA, 19 nt, Artificial Sequence
  Description of Artificial Sequence: Synthetic oligonucleotide
  Antisense strand to SEQ ID NO: 2313770
aaaugcacugguuuagaac

SEQ ID NO: 2313772 - RNA, 19 nt, Artificial Sequence
  Description of Artificial Sequence: Synthetic oligonucleotide
  Sense strand starting at position 1803 of SEQ ID NO: 1885070
agaccaucuucggcaacau

SEQ ID NO: 2313773 - RNA, 19 nt, Artificial Sequence
  Description of Artificial Sequence: Synthetic oligonucleotide
  Antisense strand to SEQ ID NO: 2313772
auguugccgaagauggucu

SEQ ID NO: 2313774 - RNA, 19 nt, Artificial Sequence
  Description of Artificial Sequence: Synthetic oligonucleotide
  Sense strand starting at position 2276 of SEQ ID NO: 1885070
ucaagaguggaugguguua

SEQ ID NO: 2313775 - RNA, 19 nt, Artificial Sequence
  Description of Artificial Sequence: Synthetic oligonucleotide
  Antisense strand to SEQ ID NO: 2313774
uaacaccauccacucuuga

SEQ ID NO: 2313776 - RNA, 19 nt, Artificial Sequence
  Description of Artificial Sequence: Synthetic oligonucleotide
  Sense strand starting at position 2470 of SEQ ID NO: 1885070
ccaguagucccucaaaguc

SEQ ID NO: 2313777 - RNA, 19 nt, Artificial Sequence
  Description of Artificial Sequence: Synthetic oligonucleotide
  Antisense strand to SEQ ID NO: 2313776
gacuuugagggacuacugg

SEQ ID NO: 2313778 - RNA, 19 nt, Artificial Sequence
  Description of Artificial Sequence: Synthetic oligonucleotide
  Sense strand starting at position 2500 of SEQ ID NO: 1885070
ccggcauuaaaucagaagu

SEQ ID NO: 2313779 - RNA, 19 nt, Artificial Sequence
  Description of Artificial Sequence: Synthetic oligonucleotide
  Antisense strand to SEQ ID NO: 2313778
acuucugauuuaaugccgg

SEQ ID NO: 2313780 - RNA, 19 nt, Artificial Sequence
  Description of Artificial Sequence: Synthetic oligonucleotide
  Sense strand starting at position 3156 of SEQ ID NO: 1885070
uggaaacugcuauggcuua

SEQ ID NO: 2313781 - RNA, 19 nt, Artificial Sequence
  Description of Artificial Sequence: Synthetic oligonucleotide
  Antisense strand to SEQ ID NO: 2313780
uaagccauagcaguuucca

SEQ ID NO: 2313782 - RNA, 19 nt, Artificial Sequence
  Description of Artificial Sequence: Synthetic oligonucleotide
  Sense strand starting at position 3447 of SEQ ID NO: 1885070
augcaaauuucugcgguga

SEQ ID NO: 2313783 - RNA, 19 nt, Artificial Sequence
  Description of Artificial Sequence: Synthetic oligonucleotide
  Antisense strand to SEQ ID NO: 2313782
ucaccgcagaaauuugcau

SEQ ID NO: 2313784 - RNA, 19 nt, Artificial Sequence
  Description of Artificial Sequence: Synthetic oligonucleotide
  Sense strand starting at position 3448 of SEQ ID NO: 1885070
ugcaaauuucugcggugag

SEQ ID NO: 2313785 - RNA, 19 nt, Artificial Sequence
  Description of Artificial Sequence: Synthetic oligonucleotide
  Antisense strand to SEQ ID NO: 2313784
cucaccgcagaaauuugca

SEQ ID NO: 2313786 - RNA, 19 nt, Artificial Sequence
  Description of Artificial Sequence: Synthetic oligonucleotide
  Sense strand starting at position 3451 of SEQ ID NO: 1885070
aaauuucugcggugaguuu

SEQ ID NO: 2313787 - RNA, 19 nt, Artificial Sequence
  Description of Artificial Sequence: Synthetic oligonucleotide
  Antisense strand to SEQ ID NO: 2313786
aaacucaccgcagaaauuu

SEQ ID NO: 2313788 - RNA, 19 nt, Artificial Sequence
  Description of Artificial Sequence: Synthetic oligonucleotide
  Sense strand starting at position 3575 of SEQ ID NO: 1885070
caggucauuucuuugcgua

SEQ ID NO: 2313789 - RNA, 19 nt, Artificial Sequence
  Description of Artificial Sequence: Synthetic oligonucleotide
  Antisense strand to SEQ ID NO: 2313788
uacgcaaagaaaugaccug

SEQ ID NO: 2313790 - RNA, 19 nt, Artificial Sequence
  Description of Artificial Sequence: Synthetic oligonucleotide
  Sense strand starting at position 3579 of SEQ ID NO: 1885070
ucauuucuuugcguaugca

SEQ ID NO: 2313791 - RNA, 19 nt, Artificial Sequence
  Description of Artificial Sequence: Synthetic oligonucleotide
  Antisense strand to SEQ ID NO: 2313790
ugcauacgcaaagaaauga

SEQ ID NO: 2313792 - RNA, 19 nt, Artificial Sequence
  Description of Artificial Sequence: Synthetic oligonucleotide
  Sense strand starting at position 3580 of SEQ ID NO: 1885070
cauuucuuugcguaugcau

SEQ ID NO: 2313793 - RNA, 19 nt, Artificial Sequence
  Description of Artificial Sequence: Synthetic oligonucleotide
  Antisense strand to SEQ ID NO: 2313792
augcauacgcaaagaaaug

SEQ ID NO: 2313794 - RNA, 19 nt, Artificial Sequence
  Description of Artificial Sequence: Synthetic oligonucleotide
  Sense strand starting at position 147 of SEQ ID NO: 1885071
acagaaucuuuagagaaca

SEQ ID NO: 2313795 - RNA, 19 nt, Artificial Sequence
  Description of Artificial Sequence: Synthetic oligonucleotide
  Antisense strand to SEQ ID NO: 2313794
uguucucuaaagauucugu

SEQ ID NO: 2313796 - RNA, 19 nt, Artificial Sequence
  Description of Artificial Sequence: Synthetic oligonucleotide
  Sense strand starting at position 217 of SEQ ID NO: 1885071
uuguuuauacuccagcuua

SEQ ID NO: 2313797 - RNA, 19 nt, Artificial Sequence
  Description of Artificial Sequence: Synthetic oligonucleotide
  Antisense strand to SEQ ID NO: 2313796
uaagcuggaguauaaacaa

SEQ ID NO: 2313798 - RNA, 19 nt, Artificial Sequence
  Description of Artificial Sequence: Synthetic oligonucleotide
  Sense strand starting at position 556 of SEQ ID NO: 1885071
cguuaauuucgacgcugag

SEQ ID NO: 2313799 - RNA, 19 nt, Artificial Sequence
  Description of Artificial Sequence: Synthetic oligonucleotide
  Antisense strand to SEQ ID NO: 2313798
cucagcgucgaaauuaacg

SEQ ID NO: 2313800 - RNA, 19 nt, Artificial Sequence
  Description of Artificial Sequence: Synthetic oligonucleotide
  Sense strand starting at position 928 of SEQ ID NO: 1885071
aggcgacaggcauaacaua

SEQ ID NO: 2313801 - RNA, 19 nt, Artificial Sequence
  Description of Artificial Sequence: Synthetic oligonucleotide
  Antisense strand to SEQ ID NO: 2313800
uauguuaugccugucgccu

SEQ ID NO: 2313802 - RNA, 19 nt, Artificial Sequence
  Description of Artificial Sequence: Synthetic oligonucleotide
  Sense strand starting at position 1016 of SEQ ID NO: 1885071
gaaguaucuccaggauagu

SEQ ID NO: 2313803 - RNA, 19 nt, Artificial Sequence
  Description of Artificial Sequence: Synthetic oligonucleotide
  Antisense strand to SEQ ID NO: 2313802
acuauccuggagauacuuc

SEQ ID NO: 2313804 - RNA, 19 nt, Artificial Sequence
  Description of Artificial Sequence: Synthetic oligonucleotide
  Sense strand starting at position 1019 of SEQ ID NO: 1885071
guaucuccaggauaguaau

SEQ ID NO: 2313805 - RNA, 19 nt, Artificial Sequence
  Description of Artificial Sequence: Synthetic oligonucleotide
  Antisense strand to SEQ ID NO: 2313804
auuacuauccuggagauac

SEQ ID NO: 2313806 - RNA, 19 nt, Artificial Sequence
  Description of Artificial Sequence: Synthetic oligonucleotide
  Sense strand starting at position 1043 of SEQ ID NO: 1885071
ggucuauccuccuugguaa

SEQ ID NO: 2313807 - RNA, 19 nt, Artificial Sequence
  Description of Artificial Sequence: Synthetic oligonucleotide
  Antisense strand to SEQ ID NO: 2313806
uuaccaaggaggauagacc

SEQ ID NO: 2313808 - RNA, 19 nt, Artificial Sequence
  Description of Artificial Sequence: Synthetic oligonucleotide
  Sense strand starting at position 1044 of SEQ ID NO: 1885071
gucuauccuccuugguaaa

SEQ ID NO: 2313809 - RNA, 19 nt, Artificial Sequence
  Description of Artificial Sequence: Synthetic oligonucleotide
  Antisense strand to SEQ ID NO: 2313808
uuuaccaaggaggauagac

SEQ ID NO: 2313810 - RNA, 19 nt, Artificial Sequence
  Description of Artificial Sequence: Synthetic oligonucleotide
  Sense strand starting at position 1232 of SEQ ID NO: 1885071
ccgggcauuucugaaggaa

SEQ ID NO: 2313811 - RNA, 19 nt, Artificial Sequence
  Description of Artificial Sequence: Synthetic oligonucleotide
  Antisense strand to SEQ ID NO: 2313810
uuccuucagaaaugcccgg

SEQ ID NO: 2313812 - RNA, 19 nt, Artificial Sequence
  Description of Artificial Sequence: Synthetic oligonucleotide
  Sense strand starting at position 1265 of SEQ ID NO: 1885071
ggccuaaauugauugggau

SEQ ID NO: 2313813 - RNA, 19 nt, Artificial Sequence
  Description of Artificial Sequence: Synthetic oligonucleotide
  Antisense strand to SEQ ID NO: 2313812
aucccaaucaauuuaggcc

SEQ ID NO: 2313814 - RNA, 19 nt, Artificial Sequence
  Description of Artificial Sequence: Synthetic oligonucleotide
  Sense strand starting at position 1266 of SEQ ID NO: 1885071
gccuaaauugauugggaua

SEQ ID NO: 2313815 - RNA, 19 nt, Artificial Sequence
  Description of Artificial Sequence: Synthetic oligonucleotide
  Antisense strand to SEQ ID NO: 2313814
uaucccaaucaauuuaggc

SEQ ID NO: 2313816 - RNA, 19 nt, Artificial Sequence
  Description of Artificial Sequence: Synthetic oligonucleotide
  Sense strand starting at position 1268 of SEQ ID NO: 1885071
cuaaauugauugggauaca

SEQ ID NO: 2313817 - RNA, 19 nt, Artificial Sequence
  Description of Artificial Sequence: Synthetic oligonucleotide
  Antisense strand to SEQ ID NO: 2313816
uguaucccaaucaauuuag

SEQ ID NO: 2313818 - RNA, 19 nt, Artificial Sequence
  Description of Artificial Sequence: Synthetic oligonucleotide
  Sense strand starting at position 1300 of SEQ ID NO: 1885071
cccggagauaaguauucuu

SEQ ID NO: 2313819 - RNA, 19 nt, Artificial Sequence
  Description of Artificial Sequence: Synthetic oligonucleotide
  Antisense strand to SEQ ID NO: 2313818
aagaauacuuaucuccggg

SEQ ID NO: 2313820 - RNA, 19 nt, Artificial Sequence
  Description of Artificial Sequence: Synthetic oligonucleotide
  Sense strand starting at position 1396 of SEQ ID NO: 1885071
agagguaaauaugauguga

SEQ ID NO: 2313821 - RNA, 19 nt, Artificial Sequence
  Description of Artificial Sequence: Synthetic oligonucleotide
  Antisense strand to SEQ ID NO: 2313820
ucacaucauauuuaccucu

SEQ ID NO: 2313822 - RNA, 19 nt, Artificial Sequence
  Description of Artificial Sequence: Synthetic oligonucleotide
  Sense strand starting at position 1627 of SEQ ID NO: 1885071
uugcuugucacagggagaa

SEQ ID NO: 2313823 - RNA, 19 nt, Artificial Sequence
  Description of Artificial Sequence: Synthetic oligonucleotide
  Antisense strand to SEQ ID NO: 2313822
uucucccugugacaagcaa

SEQ ID NO: 2313824 - RNA, 19 nt, Artificial Sequence
  Description of Artificial Sequence: Synthetic oligonucleotide
  Sense strand starting at position 1637 of SEQ ID NO: 1885071
cagggagaacgguguuaca

SEQ ID NO: 2313825 - RNA, 19 nt, Artificial Sequence
  Description of Artificial Sequence: Synthetic oligonucleotide
  Antisense strand to SEQ ID NO: 2313824
uguaacaccguucucccug

SEQ ID NO: 2313826 - RNA, 19 nt, Artificial Sequence
  Description of Artificial Sequence: Synthetic oligonucleotide
  Sense strand starting at position 1644 of SEQ ID NO: 1885071
aacgguguuacagguucua

SEQ ID NO: 2313827 - RNA, 19 nt, Artificial Sequence
  Description of Artificial Sequence: Synthetic oligonucleotide
  Antisense strand to SEQ ID NO: 2313826
uagaaccuguaacaccguu

SEQ ID NO: 2313828 - RNA, 19 nt, Artificial Sequence
  Description of Artificial Sequence: Synthetic oligonucleotide
  Sense strand starting at position 1916 of SEQ ID NO: 1885071
gcggcuuagcccgaaagaa

SEQ ID NO: 2313829 - RNA, 19 nt, Artificial Sequence
  Description of Artificial Sequence: Synthetic oligonucleotide
  Antisense strand to SEQ ID NO: 2313828
uucuuucgggcuaagccgc

SEQ ID NO: 2313830 - RNA, 19 nt, Artificial Sequence
  Description of Artificial Sequence: Synthetic oligonucleotide
  Sense strand starting at position 2038 of SEQ ID NO: 1885071
acgccuguugcagaaggaa

SEQ ID NO: 2313831 - RNA, 19 nt, Artificial Sequence
  Description of Artificial Sequence: Synthetic oligonucleotide
  Antisense strand to SEQ ID NO: 2313830
uuccuucugcaacaggcgu

SEQ ID NO: 2313832 - RNA, 19 nt, Artificial Sequence
  Description of Artificial Sequence: Synthetic oligonucleotide
  Sense strand starting at position 2171 of SEQ ID NO: 1885071
acuaaaggguaagaauuua

SEQ ID NO: 2313833 - RNA, 19 nt, Artificial Sequence
  Description of Artificial Sequence: Synthetic oligonucleotide
  Antisense strand to SEQ ID NO: 2313832
uaaauucuuacccuuuagu

SEQ ID NO: 2313834 - RNA, 19 nt, Artificial Sequence
  Description of Artificial Sequence: Synthetic oligonucleotide
  Sense strand starting at position 2278 of SEQ ID NO: 1885071
guggcgacugcgguauuaa

SEQ ID NO: 2313835 - RNA, 19 nt, Artificial Sequence
  Description of Artificial Sequence: Synthetic oligonucleotide
  Antisense strand to SEQ ID NO: 2313834
uuaauaccgcagucgccac

SEQ ID NO: 2313836 - RNA, 19 nt, Artificial Sequence
  Description of Artificial Sequence: Synthetic oligonucleotide
  Sense strand starting at position 2279 of SEQ ID NO: 1885071
uggcgacugcgguauuaag

SEQ ID NO: 2313837 - RNA, 19 nt, Artificial Sequence
  Description of Artificial Sequence: Synthetic oligonucleotide
  Antisense strand to SEQ ID NO: 2313836
cuuaauaccgcagucgcca

SEQ ID NO: 2313838 - RNA, 19 nt, Artificial Sequence
  Description of Artificial Sequence: Synthetic oligonucleotide
  Sense strand starting at position 2302 of SEQ ID NO: 1885071
ccucgcgauuucucaaaua

SEQ ID NO: 2313839 - RNA, 19 nt, Artificial Sequence
  Description of Artificial Sequence: Synthetic oligonucleotide
  Antisense strand to SEQ ID NO: 2313838
uauuugagaaaucgcgagg

SEQ ID NO: 2313840 - RNA, 19 nt, Artificial Sequence
  Description of Artificial Sequence: Synthetic oligonucleotide
  Sense strand starting at position 2314 of SEQ ID NO: 1885071
ucaaauagugcaggaagaa

SEQ ID NO: 2313841 - RNA, 19 nt, Artificial Sequence
  Description of Artificial Sequence: Synthetic oligonucleotide
  Antisense strand to SEQ ID NO: 2313840
uucuuccugcacuauuuga

SEQ ID NO: 2313842 - RNA, 19 nt, Artificial Sequence
  Description of Artificial Sequence: Synthetic oligonucleotide
  Sense strand starting at position 2337 of SEQ ID NO: 1885071
uuaaauagcgaaugcuaga

SEQ ID NO: 2313843 - RNA, 19 nt, Artificial Sequence
  Description of Artificial Sequence: Synthetic oligonucleotide
  Antisense strand to SEQ ID NO: 2313842
ucuagcauucgcuauuuaa

SEQ ID NO: 2313844 - RNA, 19 nt, Artificial Sequence
  Description of Artificial Sequence: Synthetic oligonucleotide
  Sense strand starting at position 2379 of SEQ ID NO: 1885071
guggaagugacuuaggcua

SEQ ID NO: 2313845 - RNA, 19 nt, Artificial Sequence
  Description of Artificial Sequence: Synthetic oligonucleotide
  Antisense strand to SEQ ID NO: 2313844
uagccuaagucacuuccac

SEQ ID NO: 2313846 - RNA, 19 nt, Artificial Sequence
  Description of Artificial Sequence: Synthetic oligonucleotide
  Sense strand starting at position 2387 of SEQ ID NO: 1885071
gacuuaggcuaaccaguua

SEQ ID NO: 2313847 - RNA, 19 nt, Artificial Sequence
  Description of Artificial Sequence: Synthetic oligonucleotide
  Antisense strand to SEQ ID NO: 2313846
uaacugguuagccuaaguc

SEQ ID NO: 2313848 - RNA, 19 nt, Artificial Sequence
  Description of Artificial Sequence: Synthetic oligonucleotide
  Sense strand starting at position 2410 of SEQ ID NO: 1885071
uggaacacacgaugugaaa

SEQ ID NO: 2313849 - RNA, 19 nt, Artificial Sequence
  Description of Artificial Sequence: Synthetic oligonucleotide
  Antisense strand to SEQ ID NO: 2313848
uuucacaucguguguucca

SEQ ID NO: 2313850 - RNA, 19 nt, Artificial Sequence
  Description of Artificial Sequence: Synthetic oligonucleotide
  Sense strand starting at position 2497 of SEQ ID NO: 1885071
agagaugugaugggucaca

SEQ ID NO: 2313851 - RNA, 19 nt, Artificial Sequence
  Description of Artificial Sequence: Synthetic oligonucleotide
  Antisense strand to SEQ ID NO: 2313850
ugugacccaucacaucucu

SEQ ID NO: 2313852 - RNA, 19 nt, Artificial Sequence
  Description of Artificial Sequence: Synthetic oligonucleotide
  Sense strand starting at position 2604 of SEQ ID NO: 1885071
agcaacucaugcguguuaa

SEQ ID NO: 2313853 - RNA, 19 nt, Artificial Sequence
  Description of Artificial Sequence: Synthetic oligonucleotide
  Antisense strand to SEQ ID NO: 2313852
uuaacacgcaugaguugcu

SEQ ID NO: 2313854 - RNA, 19 nt, Artificial Sequence
  Description of Artificial Sequence: Synthetic oligonucleotide
  Sense strand starting at position 2614 of SEQ ID NO: 1885071
gcguguuaaacucuucgua

SEQ ID NO: 2313855 - RNA, 19 nt, Artificial Sequence
  Description of Artificial Sequence: Synthetic oligonucleotide
  Antisense strand to SEQ ID NO: 2313854
uacgaagaguuuaacacgc

SEQ ID NO: 2313856 - RNA, 19 nt, Artificial Sequence
  Description of Artificial Sequence: Synthetic oligonucleotide
  Sense strand starting at position 2616 of SEQ ID NO: 1885071
guguuaaacucuucguaaa

SEQ ID NO: 2313857 - RNA, 19 nt, Artificial Sequence
  Description of Artificial Sequence: Synthetic oligonucleotide
  Antisense strand to SEQ ID NO: 2313856
uuuacgaagaguuuaacac

SEQ ID NO: 2313858 - RNA, 19 nt, Artificial Sequence
  Description of Artificial Sequence: Synthetic oligonucleotide
  Sense strand starting at position 2691 of SEQ ID NO: 1885071
uucuguaauuauguuccaa

SEQ ID NO: 2313859 - RNA, 19 nt, Artificial Sequence
  Description of Artificial Sequence: Synthetic oligonucleotide
  Antisense strand to SEQ ID NO: 2313858
uuggaacauaauuacagaa

SEQ ID NO: 2313860 - RNA, 19 nt, Artificial Sequence
  Description of Artificial Sequence: Synthetic oligonucleotide
  Sense strand starting at position 2705 of SEQ ID NO: 1885071
uccaaccuuguauggauaa

SEQ ID NO: 2313861 - RNA, 19 nt, Artificial Sequence
  Description of Artificial Sequence: Synthetic oligonucleotide
  Antisense strand to SEQ ID NO: 2313860
uuauccauacaagguugga

SEQ ID NO: 2313862 - RNA, 19 nt, Artificial Sequence
  Description of Artificial Sequence: Synthetic oligonucleotide
  Sense strand starting at position 2893 of SEQ ID NO: 1885071
cgacaauuuagccgauguu

SEQ ID NO: 2313863 - RNA, 19 nt, Artificial Sequence
  Description of Artificial Sequence: Synthetic oligonucleotide
  Antisense strand to SEQ ID NO: 2313862
aacaucggcuaaauugucg

SEQ ID NO: 2313864 - RNA, 19 nt, Artificial Sequence
  Description of Artificial Sequence: Synthetic oligonucleotide
  Sense strand starting at position 3582 of SEQ ID NO: 1885071
cuggcacuucuuggauauu

SEQ ID NO: 2313865 - RNA, 19 nt, Artificial Sequence
  Description of Artificial Sequence: Synthetic oligonucleotide
  Antisense strand to SEQ ID NO: 2313864
aauauccaagaagugccag

SEQ ID NO: 2313866 - RNA, 19 nt, Artificial Sequence
  Description of Artificial Sequence: Synthetic oligonucleotide
  Sense strand starting at position 3585 of SEQ ID NO: 1885071
gcacuucuuggauauucua

SEQ ID NO: 2313867 - RNA, 19 nt, Artificial Sequence
  Description of Artificial Sequence: Synthetic oligonucleotide
  Antisense strand to SEQ ID NO: 2313866
uagaauauccaagaagugc

SEQ ID NO: 2313868 - RNA, 19 nt, Artificial Sequence
  Description of Artificial Sequence: Synthetic oligonucleotide
  Sense strand starting at position 3593 of SEQ ID NO: 1885071
uggauauucuaagcuuauu

SEQ ID NO: 2313869 - RNA, 19 nt, Artificial Sequence
  Description of Artificial Sequence: Synthetic oligonucleotide
  Antisense strand to SEQ ID NO: 2313868
aauaagcuuagaauaucca

SEQ ID NO: 2313870 - RNA, 19 nt, Artificial Sequence
  Description of Artificial Sequence: Synthetic oligonucleotide
  Sense strand starting at position 3607 of SEQ ID NO: 1885071
uuauuuauucuaggugucu

SEQ ID NO: 2313871 - RNA, 19 nt, Artificial Sequence
  Description of Artificial Sequence: Synthetic oligonucleotide
  Antisense strand to SEQ ID NO: 2313870
agacaccuagaauaaauaa

SEQ ID NO: 2313872 - RNA, 19 nt, Artificial Sequence
  Description of Artificial Sequence: Synthetic oligonucleotide
  Sense strand starting at position 3941 of SEQ ID NO: 1885071
gacuccugaccguagguua

SEQ ID NO: 2313873 - RNA, 19 nt, Artificial Sequence
  Description of Artificial Sequence: Synthetic oligonucleotide
  Antisense strand to SEQ ID NO: 2313872
uaaccuacggucaggaguc

SEQ ID NO: 2313874 - RNA, 19 nt, Artificial Sequence
  Description of Artificial Sequence: Synthetic oligonucleotide
  Sense strand starting at position 129 of SEQ ID NO: 1885072
aaugaugaugugggucaga

SEQ ID NO: 2313875 - RNA, 19 nt, Artificial Sequence
  Description of Artificial Sequence: Synthetic oligonucleotide
  Antisense strand to SEQ ID NO: 2313874
ucugacccacaucaucauu

SEQ ID NO: 2313876 - RNA, 19 nt, Artificial Sequence
  Description of Artificial Sequence: Synthetic oligonucleotide
  Sense strand starting at position 261 of SEQ ID NO: 1885072
ugggaaauauaucaagauc

SEQ ID NO: 2313877 - RNA, 19 nt, Artificial Sequence
  Description of Artificial Sequence: Synthetic oligonucleotide
  Antisense strand to SEQ ID NO: 2313876
gaucuugauauauuuccca

SEQ ID NO: 2313878 - RNA, 19 nt, Artificial Sequence
  Description of Artificial Sequence: Synthetic oligonucleotide
  Sense strand starting at position 494 of SEQ ID NO: 1885072
cguggugucacgccuguaa

SEQ ID NO: 2313879 - RNA, 19 nt, Artificial Sequence
  Description of Artificial Sequence: Synthetic oligonucleotide
  Antisense strand to SEQ ID NO: 2313878
uuacaggcgugacaccacg

SEQ ID NO: 2313880 - RNA, 19 nt, Artificial Sequence
  Description of Artificial Sequence: Synthetic oligonucleotide
  Sense strand starting at position 884 of SEQ ID NO: 1885072
uguuaagcacauuauaaga

SEQ ID NO: 2313881 - RNA, 19 nt, Artificial Sequence
  Description of Artificial Sequence: Synthetic oligonucleotide
  Antisense strand to SEQ ID NO: 2313880
ucuuauaaugugcuuaaca

SEQ ID NO: 2313882 - RNA, 19 nt, Artificial Sequence
  Description of Artificial Sequence: Synthetic oligonucleotide
  Sense strand starting at position 894 of SEQ ID NO: 1885072
auuauaagagcgcagguau

SEQ ID NO: 2313883 - RNA, 19 nt, Artificial Sequence
  Description of Artificial Sequence: Synthetic oligonucleotide
  Antisense strand to SEQ ID NO: 2313882
auaccugcgcucuuauaau

SEQ ID NO: 2313884 - RNA, 19 nt, Artificial Sequence
  Description of Artificial Sequence: Synthetic oligonucleotide
  Sense strand starting at position 1047 of SEQ ID NO: 1885072
accucacagucauuggauu

SEQ ID NO: 2313885 - RNA, 19 nt, Artificial Sequence
  Description of Artificial Sequence: Synthetic oligonucleotide
  Antisense strand to SEQ ID NO: 2313884
aauccaaugacugugaggu

SEQ ID NO: 2313886 - RNA, 19 nt, Artificial Sequence
  Description of Artificial Sequence: Synthetic oligonucleotide
  Sense strand starting at position 1048 of SEQ ID NO: 1885072
ccucacagucauuggauua

SEQ ID NO: 2313887 - RNA, 19 nt, Artificial Sequence
  Description of Artificial Sequence: Synthetic oligonucleotide
  Antisense strand to SEQ ID NO: 2313886
uaauccaaugacugugagg

SEQ ID NO: 2313888 - RNA, 19 nt, Artificial Sequence
  Description of Artificial Sequence: Synthetic oligonucleotide
  Sense strand starting at position 1074 of SEQ ID NO: 1885072
gguaguuaggcccaacaga

SEQ ID NO: 2313889 - RNA, 19 nt, Artificial Sequence
  Description of Artificial Sequence: Synthetic oligonucleotide
  Antisense strand to SEQ ID NO: 2313888
ucuguugggccuaacuacc

SEQ ID NO: 2313890 - RNA, 19 nt, Artificial Sequence
  Description of Artificial Sequence: Synthetic oligonucleotide
  Sense strand starting at position 1220 of SEQ ID NO: 1885072
cguuguaaagcuuaugauc

SEQ ID NO: 2313891 - RNA, 19 nt, Artificial Sequence
  Description of Artificial Sequence: Synthetic oligonucleotide
  Antisense strand to SEQ ID NO: 2313890
gaucauaagcuuuacaacg

SEQ ID NO: 2313892 - RNA, 19 nt, Artificial Sequence
  Description of Artificial Sequence: Synthetic oligonucleotide
  Sense strand starting at position 1291 of SEQ ID NO: 1885072
augacaguuggugacgaaa

SEQ ID NO: 2313893 - RNA, 19 nt, Artificial Sequence
  Description of Artificial Sequence: Synthetic oligonucleotide
  Antisense strand to SEQ ID NO: 2313892
uuucgucaccaacugucau

SEQ ID NO: 2313894 - RNA, 19 nt, Artificial Sequence
  Description of Artificial Sequence: Synthetic oligonucleotide
  Sense strand starting at position 1722 of SEQ ID NO: 1885072
ugacaauacagagguagua

SEQ ID NO: 2313895 - RNA, 19 nt, Artificial Sequence
  Description of Artificial Sequence: Synthetic oligonucleotide
  Antisense strand to SEQ ID NO: 2313894
uacuaccucuguauuguca

SEQ ID NO: 2313896 - RNA, 19 nt, Artificial Sequence
  Description of Artificial Sequence: Synthetic oligonucleotide
  Sense strand starting at position 1757 of SEQ ID NO: 1885072
gcgugcuagcugagaagga

SEQ ID NO: 2313897 - RNA, 19 nt, Artificial Sequence
  Description of Artificial Sequence: Synthetic oligonucleotide
  Antisense strand to SEQ ID NO: 2313896
uccuucucagcuagcacgc

SEQ ID NO: 2313898 - RNA, 19 nt, Artificial Sequence
  Description of Artificial Sequence: Synthetic oligonucleotide
  Sense strand starting at position 1779 of SEQ ID NO: 1885072
ugucaucugcgacagagua

SEQ ID NO: 2313899 - RNA, 19 nt, Artificial Sequence
  Description of Artificial Sequence: Synthetic oligonucleotide
  Antisense strand to SEQ ID NO: 2313898
uacucugucgcagaugaca

SEQ ID NO: 2313900 - RNA, 19 nt, Artificial Sequence
  Description of Artificial Sequence: Synthetic oligonucleotide
  Sense strand starting at position 2026 of SEQ ID NO: 1885072
gcgcgaguucaaguuaguu

SEQ ID NO: 2313901 - RNA, 19 nt, Artificial Sequence
  Description of Artificial Sequence: Synthetic oligonucleotide
  Antisense strand to SEQ ID NO: 2313900
aacuaacuugaacucgcgc

SEQ ID NO: 2313902 - RNA, 19 nt, Artificial Sequence
  Description of Artificial Sequence: Synthetic oligonucleotide
  Sense strand starting at position 2034 of SEQ ID NO: 1885072
ucaaguuaguuucugagau

SEQ ID NO: 2313903 - RNA, 19 nt, Artificial Sequence
  Description of Artificial Sequence: Synthetic oligonucleotide
  Antisense strand to SEQ ID NO: 2313902
aucucagaaacuaacuuga

SEQ ID NO: 2313904 - RNA, 19 nt, Artificial Sequence
  Description of Artificial Sequence: Synthetic oligonucleotide
  Sense strand starting at position 2041 of SEQ ID NO: 1885072
aguuucugagauuaaccuu

SEQ ID NO: 2313905 - RNA, 19 nt, Artificial Sequence
  Description of Artificial Sequence: Synthetic oligonucleotide
  Antisense strand to SEQ ID NO: 2313904
aagguuaaucucagaaacu

SEQ ID NO: 2313906 - RNA, 19 nt, Artificial Sequence
  Description of Artificial Sequence: Synthetic oligonucleotide
  Sense strand starting at position 2151 of SEQ ID NO: 1885072
cgugacucucguuauggaa

SEQ ID NO: 2313907 - RNA, 19 nt, Artificial Sequence
  Description of Artificial Sequence: Synthetic oligonucleotide
  Antisense strand to SEQ ID NO: 2313906
uuccauaacgagagucacg

SEQ ID NO: 2313908 - RNA, 19 nt, Artificial Sequence
  Description of Artificial Sequence: Synthetic oligonucleotide
  Sense strand starting at position 2166 of SEQ ID NO: 1885072
ggaaaucucuguccuggag

SEQ ID NO: 2313909 - RNA, 19 nt, Artificial Sequence
  Description of Artificial Sequence: Synthetic oligonucleotide
  Antisense strand to SEQ ID NO: 2313908
cuccaggacagagauuucc

SEQ ID NO: 2313910 - RNA, 19 nt, Artificial Sequence
  Description of Artificial Sequence: Synthetic oligonucleotide
  Sense strand starting at position 2180 of SEQ ID NO: 1885072
uggagaggugcuuacgaaa

SEQ ID NO: 2313911 - RNA, 19 nt, Artificial Sequence
  Description of Artificial Sequence: Synthetic oligonucleotide
  Antisense strand to SEQ ID NO: 2313910
uuucguaagcaccucucca

SEQ ID NO: 2313912 - RNA, 19 nt, Artificial Sequence
  Description of Artificial Sequence: Synthetic oligonucleotide
  Sense strand starting at position 2351 of SEQ ID NO: 1885072
ccugcagagaaugauguau

SEQ ID NO: 2313913 - RNA, 19 nt, Artificial Sequence
  Description of Artificial Sequence: Synthetic oligonucleotide
  Antisense strand to SEQ ID NO: 2313912
auacaucauucucugcagg

SEQ ID NO: 2313914 - RNA, 19 nt, Artificial Sequence
  Description of Artificial Sequence: Synthetic oligonucleotide
  Sense strand starting at position 2362 of SEQ ID NO: 1885072
ugauguaugaucuggucau

SEQ ID NO: 2313915 - RNA, 19 nt, Artificial Sequence
  Description of Artificial Sequence: Synthetic oligonucleotide
  Antisense strand to SEQ ID NO: 2313914
augaccagaucauacauca

SEQ ID NO: 2313916 - RNA, 19 nt, Artificial Sequence
  Description of Artificial Sequence: Synthetic oligonucleotide
  Sense strand starting at position 2366 of SEQ ID NO: 1885072
guaugaucuggucauagac

SEQ ID NO: 2313917 - RNA, 19 nt, Artificial Sequence
  Description of Artificial Sequence: Synthetic oligonucleotide
  Antisense strand to SEQ ID NO: 2313916
gucuaugaccagaucauac

SEQ ID NO: 2313918 - RNA, 19 nt, Artificial Sequence
  Description of Artificial Sequence: Synthetic oligonucleotide
  Sense strand starting at position 2497 of SEQ ID NO: 1885072
cacacuuucggcguguauu

SEQ ID NO: 2313919 - RNA, 19 nt, Artificial Sequence
  Description of Artificial Sequence: Synthetic oligonucleotide
  Antisense strand to SEQ ID NO: 2313918
aauacacgccgaaagugug

SEQ ID NO: 2313920 - RNA, 19 nt, Artificial Sequence
  Description of Artificial Sequence: Synthetic oligonucleotide
  Sense strand starting at position 2509 of SEQ ID NO: 1885072
guguauuccgauuaucuuu

SEQ ID NO: 2313921 - RNA, 19 nt, Artificial Sequence
  Description of Artificial Sequence: Synthetic oligonucleotide
  Antisense strand to SEQ ID NO: 2313920
aaagauaaucggaauacac

SEQ ID NO: 2313922 - RNA, 19 nt, Artificial Sequence
  Description of Artificial Sequence: Synthetic oligonucleotide
  Sense strand starting at position 2535 of SEQ ID NO: 1885072
auuugauccuguuaaauag

SEQ ID NO: 2313923 - RNA, 19 nt, Artificial Sequence
  Description of Artificial Sequence: Synthetic oligonucleotide
  Antisense strand to SEQ ID NO: 2313922
cuauuuaacaggaucaaau

SEQ ID NO: 2313924 - RNA, 19 nt, Artificial Sequence
  Description of Artificial Sequence: Synthetic oligonucleotide
  Sense strand starting at position 2544 of SEQ ID NO: 1885072
uguuaaauagacuauacgu

SEQ ID NO: 2313925 - RNA, 19 nt, Artificial Sequence
  Description of Artificial Sequence: Synthetic oligonucleotide
  Antisense strand to SEQ ID NO: 2313924
acguauagucuauuuaaca

SEQ ID NO: 2313926 - RNA, 19 nt, Artificial Sequence
  Description of Artificial Sequence: Synthetic oligonucleotide
  Sense strand starting at position 2551 of SEQ ID NO: 1885072
uagacuauacgugggauca

SEQ ID NO: 2313927 - RNA, 19 nt, Artificial Sequence
  Description of Artificial Sequence: Synthetic oligonucleotide
  Antisense strand to SEQ ID NO: 2313926
ugaucccacguauagucua

SEQ ID NO: 2313928 - RNA, 19 nt, Artificial Sequence
  Description of Artificial Sequence: Synthetic oligonucleotide
  Sense strand starting at position 2552 of SEQ ID NO: 1885072
agacuauacgugggaucaa

SEQ ID NO: 2313929 - RNA, 19 nt, Artificial Sequence
  Description of Artificial Sequence: Synthetic oligonucleotide
  Antisense strand to SEQ ID NO: 2313928
uugaucccacguauagucu

SEQ ID NO: 2313930 - RNA, 19 nt, Artificial Sequence
  Description of Artificial Sequence: Synthetic oligonucleotide
  Sense strand starting at position 3259 of SEQ ID NO: 1885072
ccacauuuaucccuggcga

SEQ ID NO: 2313931 - RNA, 19 nt, Artificial Sequence
  Description of Artificial Sequence: Synthetic oligonucleotide
  Antisense strand to SEQ ID NO: 2313930
ucgccagggauaaaugugg

SEQ ID NO: 2313932 - RNA, 19 nt, Artificial Sequence
  Description of Artificial Sequence: Synthetic oligonucleotide
  Sense strand starting at position 3286 of SEQ ID NO: 1885072
ggaacagucuaaucucaua

SEQ ID NO: 2313933 - RNA, 19 nt, Artificial Sequence
  Description of Artificial Sequence: Synthetic oligonucleotide
  Antisense strand to SEQ ID NO: 2313932
uaugagauuagacuguucc

SEQ ID NO: 2313934 - RNA, 19 nt, Artificial Sequence
  Description of Artificial Sequence: Synthetic oligonucleotide
  Sense strand starting at position 3321 of SEQ ID NO: 1885072
guaaauuggcacggcauuu

SEQ ID NO: 2313935 - RNA, 19 nt, Artificial Sequence
  Description of Artificial Sequence: Synthetic oligonucleotide
  Antisense strand to SEQ ID NO: 2313934
aaaugccgugccaauuuac

SEQ ID NO: 2313936 - RNA, 19 nt, Artificial Sequence
  Description of Artificial Sequence: Synthetic oligonucleotide
  Sense strand starting at position 3370 of SEQ ID NO: 1885072
auauuaauuggacguaauc

SEQ ID NO: 2313937 - RNA, 19 nt, Artificial Sequence
  Description of Artificial Sequence: Synthetic oligonucleotide
  Antisense strand to SEQ ID NO: 2313936
gauuacguccaauuaauau

SEQ ID NO: 2313938 - RNA, 19 nt, Artificial Sequence
  Description of Artificial Sequence: Synthetic oligonucleotide
  Sense strand starting at position 3524 of SEQ ID NO: 1885072
ugguuaaugguauaucuau

SEQ ID NO: 2313939 - RNA, 19 nt, Artificial Sequence
  Description of Artificial Sequence: Synthetic oligonucleotide
  Antisense strand to SEQ ID NO: 2313938
auagauauaccauuaacca

SEQ ID NO: 2313940 - RNA, 19 nt, Artificial Sequence
  Description of Artificial Sequence: Synthetic oligonucleotide
  Sense strand starting at position 3566 of SEQ ID NO: 1885072
aggguuagccauugaaaga

SEQ ID NO: 2313941 - RNA, 19 nt, Artificial Sequence
  Description of Artificial Sequence: Synthetic oligonucleotide
  Antisense strand to SEQ ID NO: 2313940
ucuuucaauggcuaacccu

SEQ ID NO: 2313942 - RNA, 19 nt, Artificial Sequence
  Description of Artificial Sequence: Synthetic oligonucleotide
  Sense strand starting at position 3655 of SEQ ID NO: 1885072
auuauauaugcaugcaugu

SEQ ID NO: 2313943 - RNA, 19 nt, Artificial Sequence
  Description of Artificial Sequence: Synthetic oligonucleotide
  Antisense strand to SEQ ID NO: 2313942
acaugcaugcauauauaau

SEQ ID NO: 2313944 - RNA, 19 nt, Artificial Sequence
  Description of Artificial Sequence: Synthetic oligonucleotide
  Sense strand starting at position 3670 of SEQ ID NO: 1885072
auguaaaugcauugagaag

SEQ ID NO: 2313945 - RNA, 19 nt, Artificial Sequence
  Description of Artificial Sequence: Synthetic oligonucleotide
  Antisense strand to SEQ ID NO: 2313944
cuucucaaugcauuuacau

SEQ ID NO: 2313946 - RNA, 19 nt, Artificial Sequence
  Description of Artificial Sequence: Synthetic oligonucleotide
  Sense strand starting at position 3739 of SEQ ID NO: 1885072
ccauauauuucucuguugu

SEQ ID NO: 2313947 - RNA, 19 nt, Artificial Sequence
  Description of Artificial Sequence: Synthetic oligonucleotide
  Antisense strand to SEQ ID NO: 2313946
acaacagagaaauauaugg

SEQ ID NO: 2313948 - RNA, 19 nt, Artificial Sequence
  Description of Artificial Sequence: Synthetic oligonucleotide
  Sense strand starting at position 3746 of SEQ ID NO: 1885072
uuucucuguuguuuaagau

SEQ ID NO: 2313949 - RNA, 19 nt, Artificial Sequence
  Description of Artificial Sequence: Synthetic oligonucleotide
  Antisense strand to SEQ ID NO: 2313948
aucuuaaacaacagagaaa

SEQ ID NO: 2313950 - RNA, 19 nt, Artificial Sequence
  Description of Artificial Sequence: Synthetic oligonucleotide
  Sense strand starting at position 3865 of SEQ ID NO: 1885072
aucugaagccuaggucaua

SEQ ID NO: 2313951 - RNA, 19 nt, Artificial Sequence
  Description of Artificial Sequence: Synthetic oligonucleotide
  Antisense strand to SEQ ID NO: 2313950
uaugaccuaggcuucagau

SEQ ID NO: 2313952 - RNA, 19 nt, Artificial Sequence
  Description of Artificial Sequence: Synthetic oligonucleotide
  Sense strand starting at position 3866 of SEQ ID NO: 1885072
ucugaagccuaggucauau

SEQ ID NO: 2313953 - RNA, 19 nt, Artificial Sequence
  Description of Artificial Sequence: Synthetic oligonucleotide
  Antisense strand to SEQ ID NO: 2313952
auaugaccuaggcuucaga

SEQ ID NO: 2313954 - RNA, 19 nt, Artificial Sequence
  Description of Artificial Sequence: Synthetic oligonucleotide
  Sense strand starting at position 6 of SEQ ID NO: 1885073
ggugaaaccggguacaauc

SEQ ID NO: 2313955 - RNA, 19 nt, Artificial Sequence
  Description of Artificial Sequence: Synthetic oligonucleotide
  Antisense strand to SEQ ID NO: 2313954
gauuguacccgguuucacc

SEQ ID NO: 2313956 - RNA, 19 nt, Artificial Sequence
  Description of Artificial Sequence: Synthetic oligonucleotide
  Sense strand starting at position 197 of SEQ ID NO: 1885073
gugagaagucccuggcuca

SEQ ID NO: 2313957 - RNA, 19 nt, Artificial Sequence
  Description of Artificial Sequence: Synthetic oligonucleotide
  Antisense strand to SEQ ID NO: 2313956
ugagccagggacuucucac

SEQ ID NO: 2313958 - RNA, 19 nt, Artificial Sequence
  Description of Artificial Sequence: Synthetic oligonucleotide
  Sense strand starting at position 358 of SEQ ID NO: 1885073
gacuccuuucucggaugga

SEQ ID NO: 2313959 - RNA, 19 nt, Artificial Sequence
  Description of Artificial Sequence: Synthetic oligonucleotide
  Antisense strand to SEQ ID NO: 2313958
uccauccgagaaaggaguc

SEQ ID NO: 2313960 - RNA, 19 nt, Artificial Sequence
  Description of Artificial Sequence: Synthetic oligonucleotide
  Sense strand starting at position 359 of SEQ ID NO: 1885073
acuccuuucucggauggaa

SEQ ID NO: 2313961 - RNA, 19 nt, Artificial Sequence
  Description of Artificial Sequence: Synthetic oligonucleotide
  Antisense strand to SEQ ID NO: 2313960
uuccauccgagaaaggagu

SEQ ID NO: 2313962 - RNA, 19 nt, Artificial Sequence
  Description of Artificial Sequence: Synthetic oligonucleotide
  Sense strand starting at position 361 of SEQ ID NO: 1885073
uccuuucucggauggaaac

SEQ ID NO: 2313963 - RNA, 19 nt, Artificial Sequence
  Description of Artificial Sequence: Synthetic oligonucleotide
  Antisense strand to SEQ ID NO: 2313962
guuuccauccgagaaagga

SEQ ID NO: 2313964 - RNA, 19 nt, Artificial Sequence
  Description of Artificial Sequence: Synthetic oligonucleotide
  Sense strand starting at position 362 of SEQ ID NO: 1885073
ccuuucucggauggaaacu

SEQ ID NO: 2313965 - RNA, 19 nt, Artificial Sequence
  Description of Artificial Sequence: Synthetic oligonucleotide
  Antisense strand to SEQ ID NO: 2313964
aguuuccauccgagaaagg

SEQ ID NO: 2313966 - RNA, 19 nt, Artificial Sequence
  Description of Artificial Sequence: Synthetic oligonucleotide
  Sense strand starting at position 567 of SEQ ID NO: 1885073
guggcuuucgccuguaguu

SEQ ID NO: 2313967 - RNA, 19 nt, Artificial Sequence
  Description of Artificial Sequence: Synthetic oligonucleotide
  Antisense strand to SEQ ID NO: 2313966
aacuacaggcgaaagccac

SEQ ID NO: 2313968 - RNA, 19 nt, Artificial Sequence
  Description of Artificial Sequence: Synthetic oligonucleotide
  Sense strand starting at position 568 of SEQ ID NO: 1885073
uggcuuucgccuguaguua

SEQ ID NO: 2313969 - RNA, 19 nt, Artificial Sequence
  Description of Artificial Sequence: Synthetic oligonucleotide
  Antisense strand to SEQ ID NO: 2313968
uaacuacaggcgaaagcca

SEQ ID NO: 2313970 - RNA, 19 nt, Artificial Sequence
  Description of Artificial Sequence: Synthetic oligonucleotide
  Sense strand starting at position 625 of SEQ ID NO: 1885073
gcuccuguccuuggagaga

SEQ ID NO: 2313971 - RNA, 19 nt, Artificial Sequence
  Description of Artificial Sequence: Synthetic oligonucleotide
  Antisense strand to SEQ ID NO: 2313970
ucucuccaaggacaggagc

SEQ ID NO: 2313972 - RNA, 19 nt, Artificial Sequence
  Description of Artificial Sequence: Synthetic oligonucleotide
  Sense strand starting at position 895 of SEQ ID NO: 1885073
uggaucugcccucaaacau

SEQ ID NO: 2313973 - RNA, 19 nt, Artificial Sequence
  Description of Artificial Sequence: Synthetic oligonucleotide
  Antisense strand to SEQ ID NO: 2313972
auguuugagggcagaucca

SEQ ID NO: 2313974 - RNA, 19 nt, Artificial Sequence
  Description of Artificial Sequence: Synthetic oligonucleotide
  Sense strand starting at position 1220 of SEQ ID NO: 1885073
gcagccucuguucguagaa

SEQ ID NO: 2313975 - RNA, 19 nt, Artificial Sequence
  Description of Artificial Sequence: Synthetic oligonucleotide
  Antisense strand to SEQ ID NO: 2313974
uucuacgaacagaggcugc

SEQ ID NO: 2313976 - RNA, 19 nt, Artificial Sequence
  Description of Artificial Sequence: Synthetic oligonucleotide
  Sense strand starting at position 1221 of SEQ ID NO: 1885073
cagccucuguucguagaaa

SEQ ID NO: 2313977 - RNA, 19 nt, Artificial Sequence
  Description of Artificial Sequence: Synthetic oligonucleotide
  Antisense strand to SEQ ID NO: 2313976
uuucuacgaacagaggcug

SEQ ID NO: 2313978 - RNA, 19 nt, Artificial Sequence
  Description of Artificial Sequence: Synthetic oligonucleotide
  Sense strand starting at position 1381 of SEQ ID NO: 1885073
gaaccugagucgcugaaga

SEQ ID NO: 2313979 - RNA, 19 nt, Artificial Sequence
  Description of Artificial Sequence: Synthetic oligonucleotide
  Antisense strand to SEQ ID NO: 2313978
ucuucagcgacucagguuc

SEQ ID NO: 2313980 - RNA, 19 nt, Artificial Sequence
  Description of Artificial Sequence: Synthetic oligonucleotide
  Sense strand starting at position 1400 of SEQ ID NO: 1885073
gcgacucauucuccaaaga

SEQ ID NO: 2313981 - RNA, 19 nt, Artificial Sequence
  Description of Artificial Sequence: Synthetic oligonucleotide
  Antisense strand to SEQ ID NO: 2313980
ucuuuggagaaugagucgc

SEQ ID NO: 2313982 - RNA, 19 nt, Artificial Sequence
  Description of Artificial Sequence: Synthetic oligonucleotide
  Sense strand starting at position 1441 of SEQ ID NO: 1885073
gaagccuccucaguaagga

SEQ ID NO: 2313983 - RNA, 19 nt, Artificial Sequence
  Description of Artificial Sequence: Synthetic oligonucleotide
  Antisense strand to SEQ ID NO: 2313982
uccuuacugaggaggcuuc

SEQ ID NO: 2313984 - RNA, 19 nt, Artificial Sequence
  Description of Artificial Sequence: Synthetic oligonucleotide
  Sense strand starting at position 2622 of SEQ ID NO: 1885073
caaggagagucacauuuac

SEQ ID NO: 2313985 - RNA, 19 nt, Artificial Sequence
  Description of Artificial Sequence: Synthetic oligonucleotide
  Antisense strand to SEQ ID NO: 2313984
guaaaugugacucuccuug

SEQ ID NO: 2313986 - RNA, 19 nt, Artificial Sequence
  Description of Artificial Sequence: Synthetic oligonucleotide
  Sense strand starting at position 2680 of SEQ ID NO: 1885073
caguccugacccuggauaa

SEQ ID NO: 2313987 - RNA, 19 nt, Artificial Sequence
  Description of Artificial Sequence: Synthetic oligonucleotide
  Antisense strand to SEQ ID NO: 2313986
uuauccagggucaggacug

SEQ ID NO: 2313988 - RNA, 19 nt, Artificial Sequence
  Description of Artificial Sequence: Synthetic oligonucleotide
  Sense strand starting at position 2681 of SEQ ID NO: 1885073
aguccugacccuggauaaa

SEQ ID NO: 2313989 - RNA, 19 nt, Artificial Sequence
  Description of Artificial Sequence: Synthetic oligonucleotide
  Antisense strand to SEQ ID NO: 2313988
uuuauccagggucaggacu

SEQ ID NO: 2313990 - RNA, 19 nt, Artificial Sequence
  Description of Artificial Sequence: Synthetic oligonucleotide
  Sense strand starting at position 2739 of SEQ ID NO: 1885073
agggaauguuacuguccca

SEQ ID NO: 2313991 - RNA, 19 nt, Artificial Sequence
  Description of Artificial Sequence: Synthetic oligonucleotide
  Antisense strand to SEQ ID NO: 2313990
ugggacaguaacauucccu

SEQ ID NO: 2313992 - RNA, 19 nt, Artificial Sequence
  Description of Artificial Sequence: Synthetic oligonucleotide
  Sense strand starting at position 2911 of SEQ ID NO: 1885073
agccuugaguccucuucua

SEQ ID NO: 2313993 - RNA, 19 nt, Artificial Sequence
  Description of Artificial Sequence: Synthetic oligonucleotide
  Antisense strand to SEQ ID NO: 2313992
uagaagaggacucaaggcu

SEQ ID NO: 2313994 - RNA, 19 nt, Artificial Sequence
  Description of Artificial Sequence: Synthetic oligonucleotide
  Sense strand starting at position 2994 of SEQ ID NO: 1885073
auggcugucugguaggaaa

SEQ ID NO: 2313995 - RNA, 19 nt, Artificial Sequence
  Description of Artificial Sequence: Synthetic oligonucleotide
  Antisense strand to SEQ ID NO: 2313994
uuuccuaccagacagccau

SEQ ID NO: 2313996 - RNA, 19 nt, Artificial Sequence
  Description of Artificial Sequence: Synthetic oligonucleotide
  Sense strand starting at position 3073 of SEQ ID NO: 1885073
gcuagaaauuggccuucuu

SEQ ID NO: 2313997 - RNA, 19 nt, Artificial Sequence
  Description of Artificial Sequence: Synthetic oligonucleotide
  Antisense strand to SEQ ID NO: 2313996
aagaaggccaauuucuagc

SEQ ID NO: 2313998 - RNA, 19 nt, Artificial Sequence
  Description of Artificial Sequence: Synthetic oligonucleotide
  Sense strand starting at position 3150 of SEQ ID NO: 1885073
agaaacaucacguggccaa

SEQ ID NO: 2313999 - RNA, 19 nt, Artificial Sequence
  Description of Artificial Sequence: Synthetic oligonucleotide
  Antisense strand to SEQ ID NO: 2313998
uuggccacgugauguuucu

SEQ ID NO: 2314000 - RNA, 19 nt, Artificial Sequence
  Description of Artificial Sequence: Synthetic oligonucleotide
  Sense strand starting at position 3170 of SEQ ID NO: 1885073
ggugacucggaaugggaaa

SEQ ID NO: 2314001 - RNA, 19 nt, Artificial Sequence
  Description of Artificial Sequence: Synthetic oligonucleotide
  Antisense strand to SEQ ID NO: 2314000
uuucccauuccgagucacc

SEQ ID NO: 2314002 - RNA, 19 nt, Artificial Sequence
  Description of Artificial Sequence: Synthetic oligonucleotide
  Sense strand starting at position 3190 of SEQ ID NO: 1885073
gcgcauuccaagugcaaac

SEQ ID NO: 2314003 - RNA, 19 nt, Artificial Sequence
  Description of Artificial Sequence: Synthetic oligonucleotide
  Antisense strand to SEQ ID NO: 2314002
guuugcacuuggaaugcgc

SEQ ID NO: 2314004 - RNA, 19 nt, Artificial Sequence
  Description of Artificial Sequence: Synthetic oligonucleotide
  Sense strand starting at position 3215 of SEQ ID NO: 1885073
uggucauccugacuaccua

SEQ ID NO: 2314005 - RNA, 19 nt, Artificial Sequence
  Description of Artificial Sequence: Synthetic oligonucleotide
  Antisense strand to SEQ ID NO: 2314004
uagguagucaggaugacca

SEQ ID NO: 2314006 - RNA, 19 nt, Artificial Sequence
  Description of Artificial Sequence: Synthetic oligonucleotide
  Sense strand starting at position 3367 of SEQ ID NO: 1885073
cuguauugaugagagcaua

SEQ ID NO: 2314007 - RNA, 19 nt, Artificial Sequence
  Description of Artificial Sequence: Synthetic oligonucleotide
  Antisense strand to SEQ ID NO: 2314006
uaugcucucaucaauacag

SEQ ID NO: 2314008 - RNA, 19 nt, Artificial Sequence
  Description of Artificial Sequence: Synthetic oligonucleotide
  Sense strand starting at position 3370 of SEQ ID NO: 1885073
uauugaugagagcauagca

SEQ ID NO: 2314009 - RNA, 19 nt, Artificial Sequence
  Description of Artificial Sequence: Synthetic oligonucleotide
  Antisense strand to SEQ ID NO: 2314008
ugcuaugcucucaucaaua

SEQ ID NO: 2314010 - RNA, 19 nt, Artificial Sequence
  Description of Artificial Sequence: Synthetic oligonucleotide
  Sense strand starting at position 3414 of SEQ ID NO: 1885073
uacagaaaugaaugugagu

SEQ ID NO: 2314011 - RNA, 19 nt, Artificial Sequence
  Description of Artificial Sequence: Synthetic oligonucleotide
  Antisense strand to SEQ ID NO: 2314010
acucacauucauuucugua

SEQ ID NO: 2314012 - RNA, 19 nt, Artificial Sequence
  Description of Artificial Sequence: Synthetic oligonucleotide
  Sense strand starting at position 3425 of SEQ ID NO: 1885073
augugaguuaccgaggcaa

SEQ ID NO: 2314013 - RNA, 19 nt, Artificial Sequence
  Description of Artificial Sequence: Synthetic oligonucleotide
  Antisense strand to SEQ ID NO: 2314012
uugccucgguaacucacau

SEQ ID NO: 2314014 - RNA, 19 nt, Artificial Sequence
  Description of Artificial Sequence: Synthetic oligonucleotide
  Sense strand starting at position 3427 of SEQ ID NO: 1885073
gugaguuaccgaggcaaug

SEQ ID NO: 2314015 - RNA, 19 nt, Artificial Sequence
  Description of Artificial Sequence: Synthetic oligonucleotide
  Antisense strand to SEQ ID NO: 2314014
cauugccucgguaacucac

SEQ ID NO: 2314016 - RNA, 19 nt, Artificial Sequence
  Description of Artificial Sequence: Synthetic oligonucleotide
  Sense strand starting at position 3466 of SEQ ID NO: 1885073
gaagaagugucaccagaug

SEQ ID NO: 2314017 - RNA, 19 nt, Artificial Sequence
  Description of Artificial Sequence: Synthetic oligonucleotide
  Antisense strand to SEQ ID NO: 2314016
caucuggugacacuucuuc

SEQ ID NO: 2314018 - RNA, 19 nt, Artificial Sequence
  Description of Artificial Sequence: Synthetic oligonucleotide
  Sense strand starting at position 3501 of SEQ ID NO: 1885073
uggccaaugugucuccaga

SEQ ID NO: 2314019 - RNA, 19 nt, Artificial Sequence
  Description of Artificial Sequence: Synthetic oligonucleotide
  Antisense strand to SEQ ID NO: 2314018
ucuggagacacauuggcca

SEQ ID NO: 2314020 - RNA, 19 nt, Artificial Sequence
  Description of Artificial Sequence: Synthetic oligonucleotide
  Sense strand starting at position 3503 of SEQ ID NO: 1885073
gccaaugugucuccagaca

SEQ ID NO: 2314021 - RNA, 19 nt, Artificial Sequence
  Description of Artificial Sequence: Synthetic oligonucleotide
  Antisense strand to SEQ ID NO: 2314020
ugucuggagacacauuggc

SEQ ID NO: 2314022 - RNA, 19 nt, Artificial Sequence
  Description of Artificial Sequence: Synthetic oligonucleotide
  Sense strand starting at position 3557 of SEQ ID NO: 1885073
ggaucuaugugcucuauga

SEQ ID NO: 2314023 - RNA, 19 nt, Artificial Sequence
  Description of Artificial Sequence: Synthetic oligonucleotide
  Antisense strand to SEQ ID NO: 2314022
ucauagagcacauagaucc

SEQ ID NO: 2314024 - RNA, 19 nt, Artificial Sequence
  Description of Artificial Sequence: Synthetic oligonucleotide
  Sense strand starting at position 3559 of SEQ ID NO: 1885073
aucuaugugcucuaugaag

SEQ ID NO: 2314025 - RNA, 19 nt, Artificial Sequence
  Description of Artificial Sequence: Synthetic oligonucleotide
  Antisense strand to SEQ ID NO: 2314024
cuucauagagcacauagau

SEQ ID NO: 2314026 - RNA, 19 nt, Artificial Sequence
  Description of Artificial Sequence: Synthetic oligonucleotide
  Sense strand starting at position 3561 of SEQ ID NO: 1885073
cuaugugcucuaugaagac

SEQ ID NO: 2314027 - RNA, 19 nt, Artificial Sequence
  Description of Artificial Sequence: Synthetic oligonucleotide
  Antisense strand to SEQ ID NO: 2314026
gucuucauagagcacauag

SEQ ID NO: 2314028 - RNA, 19 nt, Artificial Sequence
  Description of Artificial Sequence: Synthetic oligonucleotide
  Sense strand starting at position 3639 of SEQ ID NO: 1885073
ugucacagcuuccuuagaa

SEQ ID NO: 2314029 - RNA, 19 nt, Artificial Sequence
  Description of Artificial Sequence: Synthetic oligonucleotide
  Antisense strand to SEQ ID NO: 2314028
uucuaaggaagcugugaca

SEQ ID NO: 2314030 - RNA, 19 nt, Artificial Sequence
  Description of Artificial Sequence: Synthetic oligonucleotide
  Sense strand starting at position 3640 of SEQ ID NO: 1885073
gucacagcuuccuuagaaa

SEQ ID NO: 2314031 - RNA, 19 nt, Artificial Sequence
  Description of Artificial Sequence: Synthetic oligonucleotide
  Antisense strand to SEQ ID NO: 2314030
uuucuaaggaagcugugac

SEQ ID NO: 2314032 - RNA, 19 nt, Artificial Sequence
  Description of Artificial Sequence: Synthetic oligonucleotide
  Sense strand starting at position 3884 of SEQ ID NO: 1885073
ugaguuuggagguguugaa

SEQ ID NO: 2314033 - RNA, 19 nt, Artificial Sequence
  Description of Artificial Sequence: Synthetic oligonucleotide
  Antisense strand to SEQ ID NO: 2314032
uucaacaccuccaaacuca

SEQ ID NO: 2314034 - RNA, 19 nt, Artificial Sequence
  Description of Artificial Sequence: Synthetic oligonucleotide
  Sense strand starting at position 12 of SEQ ID NO: 1885074
gagugagcagguugaaaga

SEQ ID NO: 2314035 - RNA, 19 nt, Artificial Sequence
  Description of Artificial Sequence: Synthetic oligonucleotide
  Antisense strand to SEQ ID NO: 2314034
ucuuucaaccugcucacuc

SEQ ID NO: 2314036 - RNA, 19 nt, Artificial Sequence
  Description of Artificial Sequence: Synthetic oligonucleotide
  Sense strand starting at position 271 of SEQ ID NO: 1885074
ucuuauuaugccuagguga

SEQ ID NO: 2314037 - RNA, 19 nt, Artificial Sequence
  Description of Artificial Sequence: Synthetic oligonucleotide
  Antisense strand to SEQ ID NO: 2314036
ucaccuaggcauaauaaga

SEQ ID NO: 2314038 - RNA, 19 nt, Artificial Sequence
  Description of Artificial Sequence: Synthetic oligonucleotide
  Sense strand starting at position 273 of SEQ ID NO: 1885074
uuauuaugccuaggugaga

SEQ ID NO: 2314039 - RNA, 19 nt, Artificial Sequence
  Description of Artificial Sequence: Synthetic oligonucleotide
  Antisense strand to SEQ ID NO: 2314038
ucucaccuaggcauaauaa

SEQ ID NO: 2314040 - RNA, 19 nt, Artificial Sequence
  Description of Artificial Sequence: Synthetic oligonucleotide
  Sense strand starting at position 287 of SEQ ID NO: 1885074
ugagacaugugccugggau

SEQ ID NO: 2314041 - RNA, 19 nt, Artificial Sequence
  Description of Artificial Sequence: Synthetic oligonucleotide
  Antisense strand to SEQ ID NO: 2314040
aucccaggcacaugucuca

SEQ ID NO: 2314042 - RNA, 19 nt, Artificial Sequence
  Description of Artificial Sequence: Synthetic oligonucleotide
  Sense strand starting at position 288 of SEQ ID NO: 1885074
gagacaugugccugggaua

SEQ ID NO: 2314043 - RNA, 19 nt, Artificial Sequence
  Description of Artificial Sequence: Synthetic oligonucleotide
  Antisense strand to SEQ ID NO: 2314042
uaucccaggcacaugucuc

SEQ ID NO: 2314044 - RNA, 19 nt, Artificial Sequence
  Description of Artificial Sequence: Synthetic oligonucleotide
  Sense strand starting at position 289 of SEQ ID NO: 1885074
agacaugugccugggauag

SEQ ID NO: 2314045 - RNA, 19 nt, Artificial Sequence
  Description of Artificial Sequence: Synthetic oligonucleotide
  Antisense strand to SEQ ID NO: 2314044
cuaucccaggcacaugucu

SEQ ID NO: 2314046 - RNA, 19 nt, Artificial Sequence
  Description of Artificial Sequence: Synthetic oligonucleotide
  Sense strand starting at position 333 of SEQ ID NO: 1885074
uucuaauaagucuguucuu

SEQ ID NO: 2314047 - RNA, 19 nt, Artificial Sequence
  Description of Artificial Sequence: Synthetic oligonucleotide
  Antisense strand to SEQ ID NO: 2314046
aagaacagacuuauuagaa

SEQ ID NO: 2314048 - RNA, 19 nt, Artificial Sequence
  Description of Artificial Sequence: Synthetic oligonucleotide
  Sense strand starting at position 518 of SEQ ID NO: 1885074
cccagaacugcucagggua

SEQ ID NO: 2314049 - RNA, 19 nt, Artificial Sequence
  Description of Artificial Sequence: Synthetic oligonucleotide
  Antisense strand to SEQ ID NO: 2314048
uacccugagcaguucuggg

SEQ ID NO: 2314050 - RNA, 19 nt, Artificial Sequence
  Description of Artificial Sequence: Synthetic oligonucleotide
  Sense strand starting at position 650 of SEQ ID NO: 1885074
ccuuuaaguggugguccaa

SEQ ID NO: 2314051 - RNA, 19 nt, Artificial Sequence
  Description of Artificial Sequence: Synthetic oligonucleotide
  Antisense strand to SEQ ID NO: 2314050
uuggaccaccacuuaaagg

SEQ ID NO: 2314052 - RNA, 19 nt, Artificial Sequence
  Description of Artificial Sequence: Synthetic oligonucleotide
  Sense strand starting at position 710 of SEQ ID NO: 1885074
gaugcauuccugcagcuuu

SEQ ID NO: 2314053 - RNA, 19 nt, Artificial Sequence
  Description of Artificial Sequence: Synthetic oligonucleotide
  Antisense strand to SEQ ID NO: 2314052
aaagcugcaggaaugcauc

SEQ ID NO: 2314054 - RNA, 19 nt, Artificial Sequence
  Description of Artificial Sequence: Synthetic oligonucleotide
  Sense strand starting at position 878 of SEQ ID NO: 1885074
gcggacaugaguuaucuca

SEQ ID NO: 2314055 - RNA, 19 nt, Artificial Sequence
  Description of Artificial Sequence: Synthetic oligonucleotide
  Antisense strand to SEQ ID NO: 2314054
ugagauaacucauguccgc

SEQ ID NO: 2314056 - RNA, 19 nt, Artificial Sequence
  Description of Artificial Sequence: Synthetic oligonucleotide
  Sense strand starting at position 880 of SEQ ID NO: 1885074
ggacaugaguuaucucaug

SEQ ID NO: 2314057 - RNA, 19 nt, Artificial Sequence
  Description of Artificial Sequence: Synthetic oligonucleotide
  Antisense strand to SEQ ID NO: 2314056
caugagauaacucaugucc

SEQ ID NO: 2314058 - RNA, 19 nt, Artificial Sequence
  Description of Artificial Sequence: Synthetic oligonucleotide
  Sense strand starting at position 1070 of SEQ ID NO: 1885074
aggguuagcacagagucaa

SEQ ID NO: 2314059 - RNA, 19 nt, Artificial Sequence
  Description of Artificial Sequence: Synthetic oligonucleotide
  Antisense strand to SEQ ID NO: 2314058
uugacucugugcuaacccu

SEQ ID NO: 2314060 - RNA, 19 nt, Artificial Sequence
  Description of Artificial Sequence: Synthetic oligonucleotide
  Sense strand starting at position 1112 of SEQ ID NO: 1885074
caggguuuggcccaaguga

SEQ ID NO: 2314061 - RNA, 19 nt, Artificial Sequence
  Description of Artificial Sequence: Synthetic oligonucleotide
  Antisense strand to SEQ ID NO: 2314060
ucacuugggccaaacccug

SEQ ID NO: 2314062 - RNA, 19 nt, Artificial Sequence
  Description of Artificial Sequence: Synthetic oligonucleotide
  Sense strand starting at position 1121 of SEQ ID NO: 1885074
gcccaagugacaugugaga

SEQ ID NO: 2314063 - RNA, 19 nt, Artificial Sequence
  Description of Artificial Sequence: Synthetic oligonucleotide
  Antisense strand to SEQ ID NO: 2314062
ucucacaugucacuugggc

SEQ ID NO: 2314064 - RNA, 19 nt, Artificial Sequence
  Description of Artificial Sequence: Synthetic oligonucleotide
  Sense strand starting at position 1123 of SEQ ID NO: 1885074
ccaagugacaugugagaag

SEQ ID NO: 2314065 - RNA, 19 nt, Artificial Sequence
  Description of Artificial Sequence: Synthetic oligonucleotide
  Antisense strand to SEQ ID NO: 2314064
cuucucacaugucacuugg

SEQ ID NO: 2314066 - RNA, 19 nt, Artificial Sequence
  Description of Artificial Sequence: Synthetic oligonucleotide
  Sense strand starting at position 1150 of SEQ ID NO: 1885074
cuuuccugauagcuuugaa

SEQ ID NO: 2314067 - RNA, 19 nt, Artificial Sequence
  Description of Artificial Sequence: Synthetic oligonucleotide
  Antisense strand to SEQ ID NO: 2314066
uucaaagcuaucaggaaag

SEQ ID NO: 2314068 - RNA, 19 nt, Artificial Sequence
  Description of Artificial Sequence: Synthetic oligonucleotide
  Sense strand starting at position 1153 of SEQ ID NO: 1885074
uccugauagcuuugaaccu

SEQ ID NO: 2314069 - RNA, 19 nt, Artificial Sequence
  Description of Artificial Sequence: Synthetic oligonucleotide
  Antisense strand to SEQ ID NO: 2314068
agguucaaagcuaucagga

SEQ ID NO: 2314070 - RNA, 19 nt, Artificial Sequence
  Description of Artificial Sequence: Synthetic oligonucleotide
  Sense strand starting at position 1270 of SEQ ID NO: 1885074
acccuaaauguguggaucu

SEQ ID NO: 2314071 - RNA, 19 nt, Artificial Sequence
  Description of Artificial Sequence: Synthetic oligonucleotide
  Antisense strand to SEQ ID NO: 2314070
agauccacacauuuagggu

SEQ ID NO: 2314072 - RNA, 19 nt, Artificial Sequence
  Description of Artificial Sequence: Synthetic oligonucleotide
  Sense strand starting at position 1272 of SEQ ID NO: 1885074
ccuaaauguguggaucuca

SEQ ID NO: 2314073 - RNA, 19 nt, Artificial Sequence
  Description of Artificial Sequence: Synthetic oligonucleotide
  Antisense strand to SEQ ID NO: 2314072
ugagauccacacauuuagg

SEQ ID NO: 2314074 - RNA, 19 nt, Artificial Sequence
  Description of Artificial Sequence: Synthetic oligonucleotide
  Sense strand starting at position 1611 of SEQ ID NO: 1885074
ccuucugccugagccaaau

SEQ ID NO: 2314075 - RNA, 19 nt, Artificial Sequence
  Description of Artificial Sequence: Synthetic oligonucleotide
  Antisense strand to SEQ ID NO: 2314074
auuuggcucaggcagaagg

SEQ ID NO: 2314076 - RNA, 19 nt, Artificial Sequence
  Description of Artificial Sequence: Synthetic oligonucleotide
  Sense strand starting at position 1624 of SEQ ID NO: 1885074
ccaaauauaguuuggguuu

SEQ ID NO: 2314077 - RNA, 19 nt, Artificial Sequence
  Description of Artificial Sequence: Synthetic oligonucleotide
  Antisense strand to SEQ ID NO: 2314076
aaacccaaacuauauuugg

SEQ ID NO: 2314078 - RNA, 19 nt, Artificial Sequence
  Description of Artificial Sequence: Synthetic oligonucleotide
  Sense strand starting at position 1827 of SEQ ID NO: 1885074
gguccaggcgacuaucauu

SEQ ID NO: 2314079 - RNA, 19 nt, Artificial Sequence
  Description of Artificial Sequence: Synthetic oligonucleotide
  Antisense strand to SEQ ID NO: 2314078
aaugauagucgccuggacc

SEQ ID NO: 2314080 - RNA, 19 nt, Artificial Sequence
  Description of Artificial Sequence: Synthetic oligonucleotide
  Sense strand starting at position 2131 of SEQ ID NO: 1885074
cucuucuugccagguaaau

SEQ ID NO: 2314081 - RNA, 19 nt, Artificial Sequence
  Description of Artificial Sequence: Synthetic oligonucleotide
  Antisense strand to SEQ ID NO: 2314080
auuuaccuggcaagaagag

SEQ ID NO: 2314082 - RNA, 19 nt, Artificial Sequence
  Description of Artificial Sequence: Synthetic oligonucleotide
  Sense strand starting at position 2144 of SEQ ID NO: 1885074
guaaaugcccaguggugau

SEQ ID NO: 2314083 - RNA, 19 nt, Artificial Sequence
  Description of Artificial Sequence: Synthetic oligonucleotide
  Antisense strand to SEQ ID NO: 2314082
aucaccacugggcauuuac

SEQ ID NO: 2314084 - RNA, 19 nt, Artificial Sequence
  Description of Artificial Sequence: Synthetic oligonucleotide
  Sense strand starting at position 2175 of SEQ ID NO: 1885074
gugaguugugcuuugcuaa

SEQ ID NO: 2314085 - RNA, 19 nt, Artificial Sequence
  Description of Artificial Sequence: Synthetic oligonucleotide
  Antisense strand to SEQ ID NO: 2314084
uuagcaaagcacaacucac

SEQ ID NO: 2314086 - RNA, 19 nt, Artificial Sequence
  Description of Artificial Sequence: Synthetic oligonucleotide
  Sense strand starting at position 2712 of SEQ ID NO: 1885074
cucaguaaauacucaugga

SEQ ID NO: 2314087 - RNA, 19 nt, Artificial Sequence
  Description of Artificial Sequence: Synthetic oligonucleotide
  Antisense strand to SEQ ID NO: 2314086
uccaugaguauuuacugag

SEQ ID NO: 2314088 - RNA, 19 nt, Artificial Sequence
  Description of Artificial Sequence: Synthetic oligonucleotide
  Sense strand starting at position 2741 of SEQ ID NO: 1885074
aaaugaguguucccaggaa

SEQ ID NO: 2314089 - RNA, 19 nt, Artificial Sequence
  Description of Artificial Sequence: Synthetic oligonucleotide
  Antisense strand to SEQ ID NO: 2314088
uuccugggaacacucauuu

SEQ ID NO: 2314090 - RNA, 19 nt, Artificial Sequence
  Description of Artificial Sequence: Synthetic oligonucleotide
  Sense strand starting at position 2893 of SEQ ID NO: 1885074
ggaugauuacuaugcagaa

SEQ ID NO: 2314091 - RNA, 19 nt, Artificial Sequence
  Description of Artificial Sequence: Synthetic oligonucleotide
  Antisense strand to SEQ ID NO: 2314090
uucugcauaguaaucaucc

SEQ ID NO: 2314092 - RNA, 19 nt, Artificial Sequence
  Description of Artificial Sequence: Synthetic oligonucleotide
  Sense strand starting at position 2953 of SEQ ID NO: 1885074
ugacaaaccuaugauauug

SEQ ID NO: 2314093 - RNA, 19 nt, Artificial Sequence
  Description of Artificial Sequence: Synthetic oligonucleotide
  Antisense strand to SEQ ID NO: 2314092
caauaucauagguuuguca

SEQ ID NO: 2314094 - RNA, 19 nt, Artificial Sequence
  Description of Artificial Sequence: Synthetic oligonucleotide
  Sense strand starting at position 2963 of SEQ ID NO: 1885074
augauauugucaccuacau

SEQ ID NO: 2314095 - RNA, 19 nt, Artificial Sequence
  Description of Artificial Sequence: Synthetic oligonucleotide
  Antisense strand to SEQ ID NO: 2314094
auguaggugacaauaucau

SEQ ID NO: 2314096 - RNA, 19 nt, Artificial Sequence
  Description of Artificial Sequence: Synthetic oligonucleotide
  Sense strand starting at position 3103 of SEQ ID NO: 1885074
ccaacagugacugguugaa

SEQ ID NO: 2314097 - RNA, 19 nt, Artificial Sequence
  Description of Artificial Sequence: Synthetic oligonucleotide
  Antisense strand to SEQ ID NO: 2314096
uucaaccagucacuguugg

SEQ ID NO: 2314098 - RNA, 19 nt, Artificial Sequence
  Description of Artificial Sequence: Synthetic oligonucleotide
  Sense strand starting at position 3105 of SEQ ID NO: 1885074
aacagugacugguugaaug

SEQ ID NO: 2314099 - RNA, 19 nt, Artificial Sequence
  Description of Artificial Sequence: Synthetic oligonucleotide
  Antisense strand to SEQ ID NO: 2314098
cauucaaccagucacuguu

SEQ ID NO: 2314100 - RNA, 19 nt, Artificial Sequence
  Description of Artificial Sequence: Synthetic oligonucleotide
  Sense strand starting at position 3282 of SEQ ID NO: 1885074
gguugcuauaucugcuaga

SEQ ID NO: 2314101 - RNA, 19 nt, Artificial Sequence
  Description of Artificial Sequence: Synthetic oligonucleotide
  Antisense strand to SEQ ID NO: 2314100
ucuagcagauauagcaacc

SEQ ID NO: 2314102 - RNA, 19 nt, Artificial Sequence
  Description of Artificial Sequence: Synthetic oligonucleotide
  Sense strand starting at position 3283 of SEQ ID NO: 1885074
guugcuauaucugcuagaa

SEQ ID NO: 2314103 - RNA, 19 nt, Artificial Sequence
  Description of Artificial Sequence: Synthetic oligonucleotide
  Antisense strand to SEQ ID NO: 2314102
uucuagcagauauagcaac

SEQ ID NO: 2314104 - RNA, 19 nt, Artificial Sequence
  Description of Artificial Sequence: Synthetic oligonucleotide
  Sense strand starting at position 3423 of SEQ ID NO: 1885074
gaugcagcauuccuggauu

SEQ ID NO: 2314105 - RNA, 19 nt, Artificial Sequence
  Description of Artificial Sequence: Synthetic oligonucleotide
  Antisense strand to SEQ ID NO: 2314104
aauccaggaaugcugcauc

SEQ ID NO: 2314106 - RNA, 19 nt, Artificial Sequence
  Description of Artificial Sequence: Synthetic oligonucleotide
  Sense strand starting at position 3425 of SEQ ID NO: 1885074
ugcagcauuccuggauuga

SEQ ID NO: 2314107 - RNA, 19 nt, Artificial Sequence
  Description of Artificial Sequence: Synthetic oligonucleotide
  Antisense strand to SEQ ID NO: 2314106
ucaauccaggaaugcugca

SEQ ID NO: 2314108 - RNA, 19 nt, Artificial Sequence
  Description of Artificial Sequence: Synthetic oligonucleotide
  Sense strand starting at position 3426 of SEQ ID NO: 1885074
gcagcauuccuggauugag

SEQ ID NO: 2314109 - RNA, 19 nt, Artificial Sequence
  Description of Artificial Sequence: Synthetic oligonucleotide
  Antisense strand to SEQ ID NO: 2314108
cucaauccaggaaugcugc

SEQ ID NO: 2314110 - RNA, 19 nt, Artificial Sequence
  Description of Artificial Sequence: Synthetic oligonucleotide
  Sense strand starting at position 3789 of SEQ ID NO: 1885074
ugucaucugcagcaagaau

SEQ ID NO: 2314111 - RNA, 19 nt, Artificial Sequence
  Description of Artificial Sequence: Synthetic oligonucleotide
  Antisense strand to SEQ ID NO: 2314110
auucuugcugcagaugaca

SEQ ID NO: 2314112 - RNA, 19 nt, Artificial Sequence
  Description of Artificial Sequence: Synthetic oligonucleotide
  Sense strand starting at position 3800 of SEQ ID NO: 1885074
gcaagaaugggcugaaggu

SEQ ID NO: 2314113 - RNA, 19 nt, Artificial Sequence
  Description of Artificial Sequence: Synthetic oligonucleotide
  Antisense strand to SEQ ID NO: 2314112
accuucagcccauucuugc

SEQ ID NO: 2314114 - RNA, 19 nt, Artificial Sequence
  Description of Artificial Sequence: Synthetic oligonucleotide
  Sense strand starting at position 343 of SEQ ID NO: 1885075
gauuguaauauccagcggu

SEQ ID NO: 2314115 - RNA, 19 nt, Artificial Sequence
  Description of Artificial Sequence: Synthetic oligonucleotide
  Antisense strand to SEQ ID NO: 2314114
accgcuggauauuacaauc

SEQ ID NO: 2314116 - RNA, 19 nt, Artificial Sequence
  Description of Artificial Sequence: Synthetic oligonucleotide
  Sense strand starting at position 454 of SEQ ID NO: 1885075
uuaauuaagugggugugau

SEQ ID NO: 2314117 - RNA, 19 nt, Artificial Sequence
  Description of Artificial Sequence: Synthetic oligonucleotide
  Antisense strand to SEQ ID NO: 2314116
aucacacccacuuaauuaa

SEQ ID NO: 2314118 - RNA, 19 nt, Artificial Sequence
  Description of Artificial Sequence: Synthetic oligonucleotide
  Sense strand starting at position 455 of SEQ ID NO: 1885075
uaauuaagugggugugaug

SEQ ID NO: 2314119 - RNA, 19 nt, Artificial Sequence
  Description of Artificial Sequence: Synthetic oligonucleotide
  Antisense strand to SEQ ID NO: 2314118
caucacacccacuuaauua

SEQ ID NO: 2314120 - RNA, 19 nt, Artificial Sequence
  Description of Artificial Sequence: Synthetic oligonucleotide
  Sense strand starting at position 694 of SEQ ID NO: 1885075
cuuugaccauuggucauau

SEQ ID NO: 2314121 - RNA, 19 nt, Artificial Sequence
  Description of Artificial Sequence: Synthetic oligonucleotide
  Antisense strand to SEQ ID NO: 2314120
auaugaccaauggucaaag

SEQ ID NO: 2314122 - RNA, 19 nt, Artificial Sequence
  Description of Artificial Sequence: Synthetic oligonucleotide
  Sense strand starting at position 695 of SEQ ID NO: 1885075
uuugaccauuggucauauu

SEQ ID NO: 2314123 - RNA, 19 nt, Artificial Sequence
  Description of Artificial Sequence: Synthetic oligonucleotide
  Antisense strand to SEQ ID NO: 2314122
aauaugaccaauggucaaa

SEQ ID NO: 2314124 - RNA, 19 nt, Artificial Sequence
  Description of Artificial Sequence: Synthetic oligonucleotide
  Sense strand starting at position 696 of SEQ ID NO: 1885075
uugaccauuggucauauua

SEQ ID NO: 2314125 - RNA, 19 nt, Artificial Sequence
  Description of Artificial Sequence: Synthetic oligonucleotide
  Antisense strand to SEQ ID NO: 2314124
uaauaugaccaauggucaa

SEQ ID NO: 2314126 - RNA, 19 nt, Artificial Sequence
  Description of Artificial Sequence: Synthetic oligonucleotide
  Sense strand starting at position 756 of SEQ ID NO: 1885075
ugugaagacgcucaagcua

SEQ ID NO: 2314127 - RNA, 19 nt, Artificial Sequence
  Description of Artificial Sequence: Synthetic oligonucleotide
  Antisense strand to SEQ ID NO: 2314126
uagcuugagcgucuucaca

SEQ ID NO: 2314128 - RNA, 19 nt, Artificial Sequence
  Description of Artificial Sequence: Synthetic oligonucleotide
  Sense strand starting at position 763 of SEQ ID NO: 1885075
acgcucaagcuagacuuua

SEQ ID NO: 2314129 - RNA, 19 nt, Artificial Sequence
  Description of Artificial Sequence: Synthetic oligonucleotide
  Antisense strand to SEQ ID NO: 2314128
uaaagucuagcuugagcgu

SEQ ID NO: 2314130 - RNA, 19 nt, Artificial Sequence
  Description of Artificial Sequence: Synthetic oligonucleotide
  Sense strand starting at position 954 of SEQ ID NO: 1885075
gccauagcuugaccaacau

SEQ ID NO: 2314131 - RNA, 19 nt, Artificial Sequence
  Description of Artificial Sequence: Synthetic oligonucleotide
  Antisense strand to SEQ ID NO: 2314130
auguuggucaagcuauggc

SEQ ID NO: 2314132 - RNA, 19 nt, Artificial Sequence
  Description of Artificial Sequence: Synthetic oligonucleotide
  Sense strand starting at position 999 of SEQ ID NO: 1885075
ccuggaugugcauggaaga

SEQ ID NO: 2314133 - RNA, 19 nt, Artificial Sequence
  Description of Artificial Sequence: Synthetic oligonucleotide
  Antisense strand to SEQ ID NO: 2314132
ucuuccaugcacauccagg

SEQ ID NO: 2314134 - RNA, 19 nt, Artificial Sequence
  Description of Artificial Sequence: Synthetic oligonucleotide
  Sense strand starting at position 1002 of SEQ ID NO: 1885075
ggaugugcauggaagaguu

SEQ ID NO: 2314135 - RNA, 19 nt, Artificial Sequence
  Description of Artificial Sequence: Synthetic oligonucleotide
  Antisense strand to SEQ ID NO: 2314134
aacucuuccaugcacaucc

SEQ ID NO: 2314136 - RNA, 19 nt, Artificial Sequence
  Description of Artificial Sequence: Synthetic oligonucleotide
  Sense strand starting at position 1010 of SEQ ID NO: 1885075
auggaagaguuucccucuu

SEQ ID NO: 2314137 - RNA, 19 nt, Artificial Sequence
  Description of Artificial Sequence: Synthetic oligonucleotide
  Antisense strand to SEQ ID NO: 2314136
aagagggaaacucuuccau

SEQ ID NO: 2314138 - RNA, 19 nt, Artificial Sequence
  Description of Artificial Sequence: Synthetic oligonucleotide
  Sense strand starting at position 1012 of SEQ ID NO: 1885075
ggaagaguuucccucuuug

SEQ ID NO: 2314139 - RNA, 19 nt, Artificial Sequence
  Description of Artificial Sequence: Synthetic oligonucleotide
  Antisense strand to SEQ ID NO: 2314138
caaagagggaaacucuucc

SEQ ID NO: 2314140 - RNA, 19 nt, Artificial Sequence
  Description of Artificial Sequence: Synthetic oligonucleotide
  Sense strand starting at position 1016 of SEQ ID NO: 1885075
gaguuucccucuuugagug

SEQ ID NO: 2314141 - RNA, 19 nt, Artificial Sequence
  Description of Artificial Sequence: Synthetic oligonucleotide
  Antisense strand to SEQ ID NO: 2314140
cacucaaagagggaaacuc

SEQ ID NO: 2314142 - RNA, 19 nt, Artificial Sequence
  Description of Artificial Sequence: Synthetic oligonucleotide
  Sense strand starting at position 1024 of SEQ ID NO: 1885075
cucuuugagugagccuuaa

SEQ ID NO: 2314143 - RNA, 19 nt, Artificial Sequence
  Description of Artificial Sequence: Synthetic oligonucleotide
  Antisense strand to SEQ ID NO: 2314142
uuaaggcucacucaaagag

SEQ ID NO: 2314144 - RNA, 19 nt, Artificial Sequence
  Description of Artificial Sequence: Synthetic oligonucleotide
  Sense strand starting at position 1028 of SEQ ID NO: 1885075
uugagugagccuuaaucca

SEQ ID NO: 2314145 - RNA, 19 nt, Artificial Sequence
  Description of Artificial Sequence: Synthetic oligonucleotide
  Antisense strand to SEQ ID NO: 2314144
uggauuaaggcucacucaa

SEQ ID NO: 2314146 - RNA, 19 nt, Artificial Sequence
  Description of Artificial Sequence: Synthetic oligonucleotide
  Sense strand starting at position 1752 of SEQ ID NO: 1885075
guugaaugauaauccaauu

SEQ ID NO: 2314147 - RNA, 19 nt, Artificial Sequence
  Description of Artificial Sequence: Synthetic oligonucleotide
  Antisense strand to SEQ ID NO: 2314146
aauuggauuaucauucaac

SEQ ID NO: 2314148 - RNA, 19 nt, Artificial Sequence
  Description of Artificial Sequence: Synthetic oligonucleotide
  Sense strand starting at position 1797 of SEQ ID NO: 1885075
auguuaguccagcaauaga

SEQ ID NO: 2314149 - RNA, 19 nt, Artificial Sequence
  Description of Artificial Sequence: Synthetic oligonucleotide
  Antisense strand to SEQ ID NO: 2314148
ucuauugcuggacuaacau

SEQ ID NO: 2314150 - RNA, 19 nt, Artificial Sequence
  Description of Artificial Sequence: Synthetic oligonucleotide
  Sense strand starting at position 1876 of SEQ ID NO: 1885075
guuccaaauguauaacaug

SEQ ID NO: 2314151 - RNA, 19 nt, Artificial Sequence
  Description of Artificial Sequence: Synthetic oligonucleotide
  Antisense strand to SEQ ID NO: 2314150
cauguuauacauuuggaac

SEQ ID NO: 2314152 - RNA, 19 nt, Artificial Sequence
  Description of Artificial Sequence: Synthetic oligonucleotide
  Sense strand starting at position 1906 of SEQ ID NO: 1885075
ucaagauaagcuugauuaa

SEQ ID NO: 2314153 - RNA, 19 nt, Artificial Sequence
  Description of Artificial Sequence: Synthetic oligonucleotide
  Antisense strand to SEQ ID NO: 2314152
uuaaucaagcuuaucuuga

SEQ ID NO: 2314154 - RNA, 19 nt, Artificial Sequence
  Description of Artificial Sequence: Synthetic oligonucleotide
  Sense strand starting at position 2141 of SEQ ID NO: 1885075
acaggccuuccuugugaca

SEQ ID NO: 2314155 - RNA, 19 nt, Artificial Sequence
  Description of Artificial Sequence: Synthetic oligonucleotide
  Antisense strand to SEQ ID NO: 2314154
ugucacaaggaaggccugu

SEQ ID NO: 2314156 - RNA, 19 nt, Artificial Sequence
  Description of Artificial Sequence: Synthetic oligonucleotide
  Sense strand starting at position 2277 of SEQ ID NO: 1885075
auugaacauccuuggucaa

SEQ ID NO: 2314157 - RNA, 19 nt, Artificial Sequence
  Description of Artificial Sequence: Synthetic oligonucleotide
  Antisense strand to SEQ ID NO: 2314156
uugaccaaggauguucaau

SEQ ID NO: 2314158 - RNA, 19 nt, Artificial Sequence
  Description of Artificial Sequence: Synthetic oligonucleotide
  Sense strand starting at position 2279 of SEQ ID NO: 1885075
ugaacauccuuggucaaca

SEQ ID NO: 2314159 - RNA, 19 nt, Artificial Sequence
  Description of Artificial Sequence: Synthetic oligonucleotide
  Antisense strand to SEQ ID NO: 2314158
uguugaccaaggauguuca

SEQ ID NO: 2314160 - RNA, 19 nt, Artificial Sequence
  Description of Artificial Sequence: Synthetic oligonucleotide
  Sense strand starting at position 2290 of SEQ ID NO: 1885075
ggucaacacucucuguaga

SEQ ID NO: 2314161 - RNA, 19 nt, Artificial Sequence
  Description of Artificial Sequence: Synthetic oligonucleotide
  Antisense strand to SEQ ID NO: 2314160
ucuacagagaguguugacc

SEQ ID NO: 2314162 - RNA, 19 nt, Artificial Sequence
  Description of Artificial Sequence: Synthetic oligonucleotide
  Sense strand starting at position 2292 of SEQ ID NO: 1885075
ucaacacucucuguagaga

SEQ ID NO: 2314163 - RNA, 19 nt, Artificial Sequence
  Description of Artificial Sequence: Synthetic oligonucleotide
  Antisense strand to SEQ ID NO: 2314162
ucucuacagagaguguuga

SEQ ID NO: 2314164 - RNA, 19 nt, Artificial Sequence
  Description of Artificial Sequence: Synthetic oligonucleotide
  Sense strand starting at position 2752 of SEQ ID NO: 1885075
guaacauggcauuacaauc

SEQ ID NO: 2314165 - RNA, 19 nt, Artificial Sequence
  Description of Artificial Sequence: Synthetic oligonucleotide
  Antisense strand to SEQ ID NO: 2314164
gauuguaaugccauguuac

SEQ ID NO: 2314166 - RNA, 19 nt, Artificial Sequence
  Description of Artificial Sequence: Synthetic oligonucleotide
  Sense strand starting at position 2760 of SEQ ID NO: 1885075
gcauuacaauccuugggaa

SEQ ID NO: 2314167 - RNA, 19 nt, Artificial Sequence
  Description of Artificial Sequence: Synthetic oligonucleotide
  Antisense strand to SEQ ID NO: 2314166
uucccaaggauuguaaugc

SEQ ID NO: 2314168 - RNA, 19 nt, Artificial Sequence
  Description of Artificial Sequence: Synthetic oligonucleotide
  Sense strand starting at position 2793 of SEQ ID NO: 1885075
ugcuguuguccugacaaag

SEQ ID NO: 2314169 - RNA, 19 nt, Artificial Sequence
  Description of Artificial Sequence: Synthetic oligonucleotide
  Antisense strand to SEQ ID NO: 2314168
cuuugucaggacaacagca

SEQ ID NO: 2314170 - RNA, 19 nt, Artificial Sequence
  Description of Artificial Sequence: Synthetic oligonucleotide
  Sense strand starting at position 2815 of SEQ ID NO: 1885075
aggaaaugcaucugaagug

SEQ ID NO: 2314171 - RNA, 19 nt, Artificial Sequence
  Description of Artificial Sequence: Synthetic oligonucleotide
  Antisense strand to SEQ ID NO: 2314170
cacuucagaugcauuuccu

SEQ ID NO: 2314172 - RNA, 19 nt, Artificial Sequence
  Description of Artificial Sequence: Synthetic oligonucleotide
  Sense strand starting at position 2894 of SEQ ID NO: 1885075
uuuagaauguuucccaaag

SEQ ID NO: 2314173 - RNA, 19 nt, Artificial Sequence
  Description of Artificial Sequence: Synthetic oligonucleotide
  Antisense strand to SEQ ID NO: 2314172
cuuugggaaacauucuaaa

SEQ ID NO: 2314174 - RNA, 19 nt, Artificial Sequence
  Description of Artificial Sequence: Synthetic oligonucleotide
  Sense strand starting at position 2981 of SEQ ID NO: 1885075
ggccaaaucugcuuugaaa

SEQ ID NO: 2314175 - RNA, 19 nt, Artificial Sequence
  Description of Artificial Sequence: Synthetic oligonucleotide
  Antisense strand to SEQ ID NO: 2314174
uuucaaagcagauuuggcc

SEQ ID NO: 2314176 - RNA, 19 nt, Artificial Sequence
  Description of Artificial Sequence: Synthetic oligonucleotide
  Sense strand starting at position 3035 of SEQ ID NO: 1885075
aggaaugccucuuuaaaga

SEQ ID NO: 2314177 - RNA, 19 nt, Artificial Sequence
  Description of Artificial Sequence: Synthetic oligonucleotide
  Antisense strand to SEQ ID NO: 2314176
ucuuuaaagaggcauuccu

SEQ ID NO: 2314178 - RNA, 19 nt, Artificial Sequence
  Description of Artificial Sequence: Synthetic oligonucleotide
  Sense strand starting at position 3212 of SEQ ID NO: 1885075
ggacauaacucccugcuuu

SEQ ID NO: 2314179 - RNA, 19 nt, Artificial Sequence
  Description of Artificial Sequence: Synthetic oligonucleotide
  Antisense strand to SEQ ID NO: 2314178
aaagcagggaguuaugucc

SEQ ID NO: 2314180 - RNA, 19 nt, Artificial Sequence
  Description of Artificial Sequence: Synthetic oligonucleotide
  Sense strand starting at position 3560 of SEQ ID NO: 1885075
aacgcaaauccaugaaggu

SEQ ID NO: 2314181 - RNA, 19 nt, Artificial Sequence
  Description of Artificial Sequence: Synthetic oligonucleotide
  Antisense strand to SEQ ID NO: 2314180
accuucauggauuugcguu

SEQ ID NO: 2314182 - RNA, 19 nt, Artificial Sequence
  Description of Artificial Sequence: Synthetic oligonucleotide
  Sense strand starting at position 3569 of SEQ ID NO: 1885075
ccaugaaggugguauuuaa

SEQ ID NO: 2314183 - RNA, 19 nt, Artificial Sequence
  Description of Artificial Sequence: Synthetic oligonucleotide
  Antisense strand to SEQ ID NO: 2314182
uuaaauaccaccuucaugg

SEQ ID NO: 2314184 - RNA, 19 nt, Artificial Sequence
  Description of Artificial Sequence: Synthetic oligonucleotide
  Sense strand starting at position 3669 of SEQ ID NO: 1885075
cugacaauaucuguaaguc

SEQ ID NO: 2314185 - RNA, 19 nt, Artificial Sequence
  Description of Artificial Sequence: Synthetic oligonucleotide
  Antisense strand to SEQ ID NO: 2314184
gacuuacagauauugucag

SEQ ID NO: 2314186 - RNA, 19 nt, Artificial Sequence
  Description of Artificial Sequence: Synthetic oligonucleotide
  Sense strand starting at position 3670 of SEQ ID NO: 1885075
ugacaauaucuguaagucu

SEQ ID NO: 2314187 - RNA, 19 nt, Artificial Sequence
  Description of Artificial Sequence: Synthetic oligonucleotide
  Antisense strand to SEQ ID NO: 2314186
agacuuacagauauuguca

SEQ ID NO: 2314188 - RNA, 19 nt, Artificial Sequence
  Description of Artificial Sequence: Synthetic oligonucleotide
  Sense strand starting at position 3701 of SEQ ID NO: 1885075
ccuuaaacuuuguuguuaa

SEQ ID NO: 2314189 - RNA, 19 nt, Artificial Sequence
  Description of Artificial Sequence: Synthetic oligonucleotide
  Antisense strand to SEQ ID NO: 2314188
uuaacaacaaaguuuaagg

SEQ ID NO: 2314190 - RNA, 19 nt, Artificial Sequence
  Description of Artificial Sequence: Synthetic oligonucleotide
  Sense strand starting at position 3783 of SEQ ID NO: 1885075
guuagauucugggacauuu

SEQ ID NO: 2314191 - RNA, 19 nt, Artificial Sequence
  Description of Artificial Sequence: Synthetic oligonucleotide
  Antisense strand to SEQ ID NO: 2314190
aaaugucccagaaucuaac

SEQ ID NO: 2314192 - RNA, 19 nt, Artificial Sequence
  Description of Artificial Sequence: Synthetic oligonucleotide
  Sense strand starting at position 3794 of SEQ ID NO: 1885075
ggacauuucugggaguuca

SEQ ID NO: 2314193 - RNA, 19 nt, Artificial Sequence
  Description of Artificial Sequence: Synthetic oligonucleotide
  Antisense strand to SEQ ID NO: 2314192
ugaacucccagaaaugucc

SEQ ID NO: 2314194 - RNA, 19 nt, Artificial Sequence
  Description of Artificial Sequence: Synthetic oligonucleotide
  Sense strand starting at position 2083 of SEQ ID NO: 1885076
uucucauagcaucauguuu

SEQ ID NO: 2314195 - RNA, 19 nt, Artificial Sequence
  Description of Artificial Sequence: Synthetic oligonucleotide
  Antisense strand to SEQ ID NO: 2314194
aaacaugaugcuaugagaa

SEQ ID NO: 2314196 - RNA, 19 nt, Artificial Sequence
  Description of Artificial Sequence: Synthetic oligonucleotide
  Sense strand starting at position 2185 of SEQ ID NO: 1885076
ugucuuagauauucucuua

SEQ ID NO: 2314197 - RNA, 19 nt, Artificial Sequence
  Description of Artificial Sequence: Synthetic oligonucleotide
  Antisense strand to SEQ ID NO: 2314196
uaagagaauaucuaagaca

SEQ ID NO: 2314198 - RNA, 19 nt, Artificial Sequence
  Description of Artificial Sequence: Synthetic oligonucleotide
  Sense strand starting at position 2188 of SEQ ID NO: 1885076
cuuagauauucucuuaggu

SEQ ID NO: 2314199 - RNA, 19 nt, Artificial Sequence
  Description of Artificial Sequence: Synthetic oligonucleotide
  Antisense strand to SEQ ID NO: 2314198
accuaagagaauaucuaag

SEQ ID NO: 2314200 - RNA, 19 nt, Artificial Sequence
  Description of Artificial Sequence: Synthetic oligonucleotide
  Sense strand starting at position 2260 of SEQ ID NO: 1885076
uguuacaaggauuguuaua

SEQ ID NO: 2314201 - RNA, 19 nt, Artificial Sequence
  Description of Artificial Sequence: Synthetic oligonucleotide
  Antisense strand to SEQ ID NO: 2314200
uauaacaauccuuguaaca

SEQ ID NO: 2314202 - RNA, 19 nt, Artificial Sequence
  Description of Artificial Sequence: Synthetic oligonucleotide
  Sense strand starting at position 2262 of SEQ ID NO: 1885076
uuacaaggauuguuauaag

SEQ ID NO: 2314203 - RNA, 19 nt, Artificial Sequence
  Description of Artificial Sequence: Synthetic oligonucleotide
  Antisense strand to SEQ ID NO: 2314202
cuuauaacaauccuuguaa

SEQ ID NO: 2314204 - RNA, 19 nt, Artificial Sequence
  Description of Artificial Sequence: Synthetic oligonucleotide
  Sense strand starting at position 2272 of SEQ ID NO: 1885076
uguuauaaggccugucacu

SEQ ID NO: 2314205 - RNA, 19 nt, Artificial Sequence
  Description of Artificial Sequence: Synthetic oligonucleotide
  Antisense strand to SEQ ID NO: 2314204
agugacaggccuuauaaca

SEQ ID NO: 2314206 - RNA, 19 nt, Artificial Sequence
  Description of Artificial Sequence: Synthetic oligonucleotide
  Sense strand starting at position 2301 of SEQ ID NO: 1885076
acauuugugucuccaaagu

SEQ ID NO: 2314207 - RNA, 19 nt, Artificial Sequence
  Description of Artificial Sequence: Synthetic oligonucleotide
  Antisense strand to SEQ ID NO: 2314206
acuuuggagacacaaaugu

SEQ ID NO: 2314208 - RNA, 19 nt, Artificial Sequence
  Description of Artificial Sequence: Synthetic oligonucleotide
  Sense strand starting at position 2425 of SEQ ID NO: 1885076
uugucagcauuucugagua

SEQ ID NO: 2314209 - RNA, 19 nt, Artificial Sequence
  Description of Artificial Sequence: Synthetic oligonucleotide
  Antisense strand to SEQ ID NO: 2314208
uacucagaaaugcugacaa

SEQ ID NO: 2314210 - RNA, 19 nt, Artificial Sequence
  Description of Artificial Sequence: Synthetic oligonucleotide
  Sense strand starting at position 2475 of SEQ ID NO: 1885076
uugaccauagcaugugaau

SEQ ID NO: 2314211 - RNA, 19 nt, Artificial Sequence
  Description of Artificial Sequence: Synthetic oligonucleotide
  Antisense strand to SEQ ID NO: 2314210
auucacaugcuauggucaa

SEQ ID NO: 2314212 - RNA, 19 nt, Artificial Sequence
  Description of Artificial Sequence: Synthetic oligonucleotide
  Sense strand starting at position 2718 of SEQ ID NO: 1885076
gaaagaauauuuggaaaug

SEQ ID NO: 2314213 - RNA, 19 nt, Artificial Sequence
  Description of Artificial Sequence: Synthetic oligonucleotide
  Antisense strand to SEQ ID NO: 2314212
cauuuccaaauauucuuuc

SEQ ID NO: 2314214 - RNA, 19 nt, Artificial Sequence
  Description of Artificial Sequence: Synthetic oligonucleotide
  Sense strand starting at position 2823 of SEQ ID NO: 1885076
cugaaagauauugggccua

SEQ ID NO: 2314215 - RNA, 19 nt, Artificial Sequence
  Description of Artificial Sequence: Synthetic oligonucleotide
  Antisense strand to SEQ ID NO: 2314214
uaggcccaauaucuuucag

SEQ ID NO: 2314216 - RNA, 19 nt, Artificial Sequence
  Description of Artificial Sequence: Synthetic oligonucleotide
  Sense strand starting at position 2828 of SEQ ID NO: 1885076
agauauugggccuacggua

SEQ ID NO: 2314217 - RNA, 19 nt, Artificial Sequence
  Description of Artificial Sequence: Synthetic oligonucleotide
  Antisense strand to SEQ ID NO: 2314216
uaccguaggcccaauaucu

SEQ ID NO: 2314218 - RNA, 19 nt, Artificial Sequence
  Description of Artificial Sequence: Synthetic oligonucleotide
  Sense strand starting at position 2841 of SEQ ID NO: 1885076
acgguacaauauguuaaau

SEQ ID NO: 2314219 - RNA, 19 nt, Artificial Sequence
  Description of Artificial Sequence: Synthetic oligonucleotide
  Antisense strand to SEQ ID NO: 2314218
auuuaacauauuguaccgu

SEQ ID NO: 2314220 - RNA, 19 nt, Artificial Sequence
  Description of Artificial Sequence: Synthetic oligonucleotide
  Sense strand starting at position 2984 of SEQ ID NO: 1885076
guacaaauuccaugagggu

SEQ ID NO: 2314221 - RNA, 19 nt, Artificial Sequence
  Description of Artificial Sequence: Synthetic oligonucleotide
  Antisense strand to SEQ ID NO: 2314220
acccucauggaauuuguac

SEQ ID NO: 2314222 - RNA, 19 nt, Artificial Sequence
  Description of Artificial Sequence: Synthetic oligonucleotide
  Sense strand starting at position 2999 of SEQ ID NO: 1885076
ggguaagagugucugcuuu

SEQ ID NO: 2314223 - RNA, 19 nt, Artificial Sequence
  Description of Artificial Sequence: Synthetic oligonucleotide
  Antisense strand to SEQ ID NO: 2314222
aaagcagacacucuuaccc

SEQ ID NO: 2314224 - RNA, 19 nt, Artificial Sequence
  Description of Artificial Sequence: Synthetic oligonucleotide
  Sense strand starting at position 3011 of SEQ ID NO: 1885076
cugcuuugucacuaugaca

SEQ ID NO: 2314225 - RNA, 19 nt, Artificial Sequence
  Description of Artificial Sequence: Synthetic oligonucleotide
  Antisense strand to SEQ ID NO: 2314224
ugucauagugacaaagcag

SEQ ID NO: 2314226 - RNA, 19 nt, Artificial Sequence
  Description of Artificial Sequence: Synthetic oligonucleotide
  Sense strand starting at position 3026 of SEQ ID NO: 1885076
gacaaaguacuugguacuu

SEQ ID NO: 2314227 - RNA, 19 nt, Artificial Sequence
  Description of Artificial Sequence: Synthetic oligonucleotide
  Antisense strand to SEQ ID NO: 2314226
aaguaccaaguacuuuguc

SEQ ID NO: 2314228 - RNA, 19 nt, Artificial Sequence
  Description of Artificial Sequence: Synthetic oligonucleotide
  Sense strand starting at position 3037 of SEQ ID NO: 1885076
ugguacuuagcacaucauu

SEQ ID NO: 2314229 - RNA, 19 nt, Artificial Sequence
  Description of Artificial Sequence: Synthetic oligonucleotide
  Antisense strand to SEQ ID NO: 2314228
aaugaugugcuaaguacca

SEQ ID NO: 2314230 - RNA, 19 nt, Artificial Sequence
  Description of Artificial Sequence: Synthetic oligonucleotide
  Sense strand starting at position 3061 of SEQ ID NO: 1885076
uauuaaaggugcuuaauga

SEQ ID NO: 2314231 - RNA, 19 nt, Artificial Sequence
  Description of Artificial Sequence: Synthetic oligonucleotide
  Antisense strand to SEQ ID NO: 2314230
ucauuaagcaccuuuaaua

SEQ ID NO: 2314232 - RNA, 19 nt, Artificial Sequence
  Description of Artificial Sequence: Synthetic oligonucleotide
  Sense strand starting at position 3083 of SEQ ID NO: 1885076
gaauauuuguuacaagagu

SEQ ID NO: 2314233 - RNA, 19 nt, Artificial Sequence
  Description of Artificial Sequence: Synthetic oligonucleotide
  Antisense strand to SEQ ID NO: 2314232
acucuuguaacaaauauuc

SEQ ID NO: 2314234 - RNA, 19 nt, Artificial Sequence
  Description of Artificial Sequence: Synthetic oligonucleotide
  Sense strand starting at position 3119 of SEQ ID NO: 1885076
aguugacagaucugugguu

SEQ ID NO: 2314235 - RNA, 19 nt, Artificial Sequence
  Description of Artificial Sequence: Synthetic oligonucleotide
  Antisense strand to SEQ ID NO: 2314234
aaccacagaucugucaacu

SEQ ID NO: 2314236 - RNA, 19 nt, Artificial Sequence
  Description of Artificial Sequence: Synthetic oligonucleotide
  Sense strand starting at position 3193 of SEQ ID NO: 1885076
aagugauuaccuugcugaa

SEQ ID NO: 2314237 - RNA, 19 nt, Artificial Sequence
  Description of Artificial Sequence: Synthetic oligonucleotide
  Antisense strand to SEQ ID NO: 2314236
uucagcaagguaaucacuu

SEQ ID NO: 2314238 - RNA, 19 nt, Artificial Sequence
  Description of Artificial Sequence: Synthetic oligonucleotide
  Sense strand starting at position 3195 of SEQ ID NO: 1885076
gugauuaccuugcugaaac

SEQ ID NO: 2314239 - RNA, 19 nt, Artificial Sequence
  Description of Artificial Sequence: Synthetic oligonucleotide
  Antisense strand to SEQ ID NO: 2314238
guuucagcaagguaaucac

SEQ ID NO: 2314240 - RNA, 19 nt, Artificial Sequence
  Description of Artificial Sequence: Synthetic oligonucleotide
  Sense strand starting at position 3205 of SEQ ID NO: 1885076
ugcugaaacagagguauca

SEQ ID NO: 2314241 - RNA, 19 nt, Artificial Sequence
  Description of Artificial Sequence: Synthetic oligonucleotide
  Antisense strand to SEQ ID NO: 2314240
ugauaccucuguuucagca

SEQ ID NO: 2314242 - RNA, 19 nt, Artificial Sequence
  Description of Artificial Sequence: Synthetic oligonucleotide
  Sense strand starting at position 3214 of SEQ ID NO: 1885076
agagguaucagauggcaca

SEQ ID NO: 2314243 - RNA, 19 nt, Artificial Sequence
  Description of Artificial Sequence: Synthetic oligonucleotide
  Antisense strand to SEQ ID NO: 2314242
ugugccaucugauaccucu

SEQ ID NO: 2314244 - RNA, 19 nt, Artificial Sequence
  Description of Artificial Sequence: Synthetic oligonucleotide
  Sense strand starting at position 3236 of SEQ ID NO: 1885076
ugugcauggacugaaagua

SEQ ID NO: 2314245 - RNA, 19 nt, Artificial Sequence
  Description of Artificial Sequence: Synthetic oligonucleotide
  Antisense strand to SEQ ID NO: 2314244
uacuuucaguccaugcaca

SEQ ID NO: 2314246 - RNA, 19 nt, Artificial Sequence
  Description of Artificial Sequence: Synthetic oligonucleotide
  Sense strand starting at position 3662 of SEQ ID NO: 1885076
aguaaacuacaauguuuga

SEQ ID NO: 2314247 - RNA, 19 nt, Artificial Sequence
  Description of Artificial Sequence: Synthetic oligonucleotide
  Antisense strand to SEQ ID NO: 2314246
ucaaacauuguaguuuacu

SEQ ID NO: 2314248 - RNA, 19 nt, Artificial Sequence
  Description of Artificial Sequence: Synthetic oligonucleotide
  Sense strand starting at position 3712 of SEQ ID NO: 1885076
gaggaucaccugugguuga

SEQ ID NO: 2314249 - RNA, 19 nt, Artificial Sequence
  Description of Artificial Sequence: Synthetic oligonucleotide
  Antisense strand to SEQ ID NO: 2314248
ucaaccacaggugauccuc

SEQ ID NO: 2314250 - RNA, 19 nt, Artificial Sequence
  Description of Artificial Sequence: Synthetic oligonucleotide
  Sense strand starting at position 3725 of SEQ ID NO: 1885076
gguugaagcaagugauaau

SEQ ID NO: 2314251 - RNA, 19 nt, Artificial Sequence
  Description of Artificial Sequence: Synthetic oligonucleotide
  Antisense strand to SEQ ID NO: 2314250
auuaucacuugcuucaacc

SEQ ID NO: 2314252 - RNA, 19 nt, Artificial Sequence
  Description of Artificial Sequence: Synthetic oligonucleotide
  Sense strand starting at position 3726 of SEQ ID NO: 1885076
guugaagcaagugauaaug

SEQ ID NO: 2314253 - RNA, 19 nt, Artificial Sequence
  Description of Artificial Sequence: Synthetic oligonucleotide
  Antisense strand to SEQ ID NO: 2314252
cauuaucacuugcuucaac

SEQ ID NO: 2314254 - RNA, 19 nt, Artificial Sequence
  Description of Artificial Sequence: Synthetic oligonucleotide
  Sense strand starting at position 3740 of SEQ ID NO: 1885076
uaaugaaggccugguguau

SEQ ID NO: 2314255 - RNA, 19 nt, Artificial Sequence
  Description of Artificial Sequence: Synthetic oligonucleotide
  Antisense strand to SEQ ID NO: 2314254
auacaccaggccuucauua

SEQ ID NO: 2314256 - RNA, 19 nt, Artificial Sequence
  Description of Artificial Sequence: Synthetic oligonucleotide
  Sense strand starting at position 3751 of SEQ ID NO: 1885076
ugguguauagcaugagauc

SEQ ID NO: 2314257 - RNA, 19 nt, Artificial Sequence
  Description of Artificial Sequence: Synthetic oligonucleotide
  Antisense strand to SEQ ID NO: 2314256
gaucucaugcuauacacca

SEQ ID NO: 2314258 - RNA, 19 nt, Artificial Sequence
  Description of Artificial Sequence: Synthetic oligonucleotide
  Sense strand starting at position 3757 of SEQ ID NO: 1885076
auagcaugagaucgggaau

SEQ ID NO: 2314259 - RNA, 19 nt, Artificial Sequence
  Description of Artificial Sequence: Synthetic oligonucleotide
  Antisense strand to SEQ ID NO: 2314258
auucccgaucucaugcuau

SEQ ID NO: 2314260 - RNA, 19 nt, Artificial Sequence
  Description of Artificial Sequence: Synthetic oligonucleotide
  Sense strand starting at position 3758 of SEQ ID NO: 1885076
uagcaugagaucgggaaua

SEQ ID NO: 2314261 - RNA, 19 nt, Artificial Sequence
  Description of Artificial Sequence: Synthetic oligonucleotide
  Antisense strand to SEQ ID NO: 2314260
uauucccgaucucaugcua

SEQ ID NO: 2314262 - RNA, 19 nt, Artificial Sequence
  Description of Artificial Sequence: Synthetic oligonucleotide
  Sense strand starting at position 3769 of SEQ ID NO: 1885076
cgggaauagccucaugaau

SEQ ID NO: 2314263 - RNA, 19 nt, Artificial Sequence
  Description of Artificial Sequence: Synthetic oligonucleotide
  Antisense strand to SEQ ID NO: 2314262
auucaugaggcuauucccg

SEQ ID NO: 2314264 - RNA, 19 nt, Artificial Sequence
  Description of Artificial Sequence: Synthetic oligonucleotide
  Sense strand starting at position 3844 of SEQ ID NO: 1885076
auucuaaccugguuaaguu

SEQ ID NO: 2314265 - RNA, 19 nt, Artificial Sequence
  Description of Artificial Sequence: Synthetic oligonucleotide
  Antisense strand to SEQ ID NO: 2314264
aacuuaaccagguuagaau

SEQ ID NO: 2314266 - RNA, 19 nt, Artificial Sequence
  Description of Artificial Sequence: Synthetic oligonucleotide
  Sense strand starting at position 3845 of SEQ ID NO: 1885076
uucuaaccugguuaaguuu

SEQ ID NO: 2314267 - RNA, 19 nt, Artificial Sequence
  Description of Artificial Sequence: Synthetic oligonucleotide
  Antisense strand to SEQ ID NO: 2314266
aaacuuaaccagguuagaa

SEQ ID NO: 2314268 - RNA, 19 nt, Artificial Sequence
  Description of Artificial Sequence: Synthetic oligonucleotide
  Sense strand starting at position 3851 of SEQ ID NO: 1885076
ccugguuaaguuugagguu

SEQ ID NO: 2314269 - RNA, 19 nt, Artificial Sequence
  Description of Artificial Sequence: Synthetic oligonucleotide
  Antisense strand to SEQ ID NO: 2314268
aaccucaaacuuaaccagg

SEQ ID NO: 2314270 - RNA, 19 nt, Artificial Sequence
  Description of Artificial Sequence: Synthetic oligonucleotide
  Sense strand starting at position 3905 of SEQ ID NO: 1885076
agaaauagauuuggagaua

SEQ ID NO: 2314271 - RNA, 19 nt, Artificial Sequence
  Description of Artificial Sequence: Synthetic oligonucleotide
  Antisense strand to SEQ ID NO: 2314270
uaucuccaaaucuauuucu

SEQ ID NO: 2314272 - RNA, 19 nt, Artificial Sequence
  Description of Artificial Sequence: Synthetic oligonucleotide
  Sense strand starting at position 3917 of SEQ ID NO: 1885076
ggagauaaauuaugaaauc

SEQ ID NO: 2314273 - RNA, 19 nt, Artificial Sequence
  Description of Artificial Sequence: Synthetic oligonucleotide
  Antisense strand to SEQ ID NO: 2314272
gauuucauaauuuaucucc

SEQ ID NO: 2314274 - RNA, 19 nt, Artificial Sequence
  Description of Artificial Sequence: Synthetic oligonucleotide
  Sense strand starting at position 292 of SEQ ID NO: 1885077
cagguaagccuuuaaagug

SEQ ID NO: 2314275 - RNA, 19 nt, Artificial Sequence
  Description of Artificial Sequence: Synthetic oligonucleotide
  Antisense strand to SEQ ID NO: 2314274
cacuuuaaaggcuuaccug

SEQ ID NO: 2314276 - RNA, 19 nt, Artificial Sequence
  Description of Artificial Sequence: Synthetic oligonucleotide
  Sense strand starting at position 318 of SEQ ID NO: 1885077
guggcaagguaauuaucau

SEQ ID NO: 2314277 - RNA, 19 nt, Artificial Sequence
  Description of Artificial Sequence: Synthetic oligonucleotide
  Antisense strand to SEQ ID NO: 2314276
augauaauuaccuugccac

SEQ ID NO: 2314278 - RNA, 19 nt, Artificial Sequence
  Description of Artificial Sequence: Synthetic oligonucleotide
  Sense strand starting at position 1116 of SEQ ID NO: 1885077
aguuaaguggugugaucau

SEQ ID NO: 2314279 - RNA, 19 nt, Artificial Sequence
  Description of Artificial Sequence: Synthetic oligonucleotide
  Antisense strand to SEQ ID NO: 2314278
augaucacaccacuuaacu

SEQ ID NO: 2314280 - RNA, 19 nt, Artificial Sequence
  Description of Artificial Sequence: Synthetic oligonucleotide
  Sense strand starting at position 1260 of SEQ ID NO: 1885077
ccacgauguugcccaaauu

SEQ ID NO: 2314281 - RNA, 19 nt, Artificial Sequence
  Description of Artificial Sequence: Synthetic oligonucleotide
  Antisense strand to SEQ ID NO: 2314280
aauuugggcaacaucgugg

SEQ ID NO: 2314282 - RNA, 19 nt, Artificial Sequence
  Description of Artificial Sequence: Synthetic oligonucleotide
  Sense strand starting at position 1269 of SEQ ID NO: 1885077
ugcccaaauugguuucgaa

SEQ ID NO: 2314283 - RNA, 19 nt, Artificial Sequence
  Description of Artificial Sequence: Synthetic oligonucleotide
  Antisense strand to SEQ ID NO: 2314282
uucgaaaccaauuugggca

SEQ ID NO: 2314284 - RNA, 19 nt, Artificial Sequence
  Description of Artificial Sequence: Synthetic oligonucleotide
  Sense strand starting at position 2582 of SEQ ID NO: 1885077
cugugagcccugggugaga

SEQ ID NO: 2314285 - RNA, 19 nt, Artificial Sequence
  Description of Artificial Sequence: Synthetic oligonucleotide
  Antisense strand to SEQ ID NO: 2314284
ucucacccagggcucacag

SEQ ID NO: 2314286 - RNA, 19 nt, Artificial Sequence
  Description of Artificial Sequence: Synthetic oligonucleotide
  Sense strand starting at position 2632 of SEQ ID NO: 1885077
uuugaagccuggucgcauu

SEQ ID NO: 2314287 - RNA, 19 nt, Artificial Sequence
  Description of Artificial Sequence: Synthetic oligonucleotide
  Antisense strand to SEQ ID NO: 2314286
aaugcgaccaggcuucaaa

SEQ ID NO: 2314288 - RNA, 19 nt, Artificial Sequence
  Description of Artificial Sequence: Synthetic oligonucleotide
  Sense strand starting at position 2643 of SEQ ID NO: 1885077
gucgcauucucacuccaaa

SEQ ID NO: 2314289 - RNA, 19 nt, Artificial Sequence
  Description of Artificial Sequence: Synthetic oligonucleotide
  Antisense strand to SEQ ID NO: 2314288
uuuggagugagaaugcgac

SEQ ID NO: 2314290 - RNA, 19 nt, Artificial Sequence
  Description of Artificial Sequence: Synthetic oligonucleotide
  Sense strand starting at position 2684 of SEQ ID NO: 1885077
gggagauaauucugugguc

SEQ ID NO: 2314291 - RNA, 19 nt, Artificial Sequence
  Description of Artificial Sequence: Synthetic oligonucleotide
  Antisense strand to SEQ ID NO: 2314290
gaccacagaauuaucuccc

SEQ ID NO: 2314292 - RNA, 19 nt, Artificial Sequence
  Description of Artificial Sequence: Synthetic oligonucleotide
  Sense strand starting at position 2685 of SEQ ID NO: 1885077
ggagauaauucugugguca

SEQ ID NO: 2314293 - RNA, 19 nt, Artificial Sequence
  Description of Artificial Sequence: Synthetic oligonucleotide
  Antisense strand to SEQ ID NO: 2314292
ugaccacagaauuaucucc

SEQ ID NO: 2314294 - RNA, 19 nt, Artificial Sequence
  Description of Artificial Sequence: Synthetic oligonucleotide
  Sense strand starting at position 2686 of SEQ ID NO: 1885077
gagauaauucuguggucau

SEQ ID NO: 2314295 - RNA, 19 nt, Artificial Sequence
  Description of Artificial Sequence: Synthetic oligonucleotide
  Antisense strand to SEQ ID NO: 2314294
augaccacagaauuaucuc

SEQ ID NO: 2314296 - RNA, 19 nt, Artificial Sequence
  Description of Artificial Sequence: Synthetic oligonucleotide
  Sense strand starting at position 2687 of SEQ ID NO: 1885077
agauaauucuguggucauc

SEQ ID NO: 2314297 - RNA, 19 nt, Artificial Sequence
  Description of Artificial Sequence: Synthetic oligonucleotide
  Antisense strand to SEQ ID NO: 2314296
gaugaccacagaauuaucu

SEQ ID NO: 2314298 - RNA, 19 nt, Artificial Sequence
  Description of Artificial Sequence: Synthetic oligonucleotide
  Sense strand starting at position 2698 of SEQ ID NO: 1885077
uggucauccuuuccacuga

SEQ ID NO: 2314299 - RNA, 19 nt, Artificial Sequence
  Description of Artificial Sequence: Synthetic oligonucleotide
  Antisense strand to SEQ ID NO: 2314298
ucaguggaaaggaugacca

SEQ ID NO: 2314300 - RNA, 19 nt, Artificial Sequence
  Description of Artificial Sequence: Synthetic oligonucleotide
  Sense strand starting at position 2727 of SEQ ID NO: 1885077
ucacaacuuuaggagagaa

SEQ ID NO: 2314301 - RNA, 19 nt, Artificial Sequence
  Description of Artificial Sequence: Synthetic oligonucleotide
  Antisense strand to SEQ ID NO: 2314300
uucucuccuaaaguuguga

SEQ ID NO: 2314302 - RNA, 19 nt, Artificial Sequence
  Description of Artificial Sequence: Synthetic oligonucleotide
  Sense strand starting at position 2798 of SEQ ID NO: 1885077
ccgcauguguauuuguuca

SEQ ID NO: 2314303 - RNA, 19 nt, Artificial Sequence
  Description of Artificial Sequence: Synthetic oligonucleotide
  Antisense strand to SEQ ID NO: 2314302
ugaacaaauacacaugcgg

SEQ ID NO: 2314304 - RNA, 19 nt, Artificial Sequence
  Description of Artificial Sequence: Synthetic oligonucleotide
  Sense strand starting at position 3155 of SEQ ID NO: 1885077
acaggugaauguuauauuu

SEQ ID NO: 2314305 - RNA, 19 nt, Artificial Sequence
  Description of Artificial Sequence: Synthetic oligonucleotide
  Antisense strand to SEQ ID NO: 2314304
aaauauaacauucaccugu

SEQ ID NO: 2314306 - RNA, 19 nt, Artificial Sequence
  Description of Artificial Sequence: Synthetic oligonucleotide
  Sense strand starting at position 3157 of SEQ ID NO: 1885077
aggugaauguuauauuuag

SEQ ID NO: 2314307 - RNA, 19 nt, Artificial Sequence
  Description of Artificial Sequence: Synthetic oligonucleotide
  Antisense strand to SEQ ID NO: 2314306
cuaaauauaacauucaccu

SEQ ID NO: 2314308 - RNA, 19 nt, Artificial Sequence
  Description of Artificial Sequence: Synthetic oligonucleotide
  Sense strand starting at position 3211 of SEQ ID NO: 1885077
ccaaguacuguccagugaa

SEQ ID NO: 2314309 - RNA, 19 nt, Artificial Sequence
  Description of Artificial Sequence: Synthetic oligonucleotide
  Antisense strand to SEQ ID NO: 2314308
uucacuggacaguacuugg

SEQ ID NO: 2314310 - RNA, 19 nt, Artificial Sequence
  Description of Artificial Sequence: Synthetic oligonucleotide
  Sense strand starting at position 3214 of SEQ ID NO: 1885077
aguacuguccagugaacag

SEQ ID NO: 2314311 - RNA, 19 nt, Artificial Sequence
  Description of Artificial Sequence: Synthetic oligonucleotide
  Antisense strand to SEQ ID NO: 2314310
cuguucacuggacaguacu

SEQ ID NO: 2314312 - RNA, 19 nt, Artificial Sequence
  Description of Artificial Sequence: Synthetic oligonucleotide
  Sense strand starting at position 3273 of SEQ ID NO: 1885077
acagguaauugguauaaag

SEQ ID NO: 2314313 - RNA, 19 nt, Artificial Sequence
  Description of Artificial Sequence: Synthetic oligonucleotide
  Antisense strand to SEQ ID NO: 2314312
cuuuauaccaauuaccugu

SEQ ID NO: 2314314 - RNA, 19 nt, Artificial Sequence
  Description of Artificial Sequence: Synthetic oligonucleotide
  Sense strand starting at position 3275 of SEQ ID NO: 1885077
agguaauugguauaaaguu

SEQ ID NO: 2314315 - RNA, 19 nt, Artificial Sequence
  Description of Artificial Sequence: Synthetic oligonucleotide
  Antisense strand to SEQ ID NO: 2314314
aacuuuauaccaauuaccu

SEQ ID NO: 2314316 - RNA, 19 nt, Artificial Sequence
  Description of Artificial Sequence: Synthetic oligonucleotide
  Sense strand starting at position 3293 of SEQ ID NO: 1885077
uuugguuuguaaucauagu

SEQ ID NO: 2314317 - RNA, 19 nt, Artificial Sequence
  Description of Artificial Sequence: Synthetic oligonucleotide
  Antisense strand to SEQ ID NO: 2314316
acuaugauuacaaaccaaa

SEQ ID NO: 2314318 - RNA, 19 nt, Artificial Sequence
  Description of Artificial Sequence: Synthetic oligonucleotide
  Sense strand starting at position 3294 of SEQ ID NO: 1885077
uugguuuguaaucauaguc

SEQ ID NO: 2314319 - RNA, 19 nt, Artificial Sequence
  Description of Artificial Sequence: Synthetic oligonucleotide
  Antisense strand to SEQ ID NO: 2314318
gacuaugauuacaaaccaa

SEQ ID NO: 2314320 - RNA, 19 nt, Artificial Sequence
  Description of Artificial Sequence: Synthetic oligonucleotide
  Sense strand starting at position 3351 of SEQ ID NO: 1885077
guuucuguguuacugcaga

SEQ ID NO: 2314321 - RNA, 19 nt, Artificial Sequence
  Description of Artificial Sequence: Synthetic oligonucleotide
  Antisense strand to SEQ ID NO: 2314320
ucugcaguaacacagaaac

SEQ ID NO: 2314322 - RNA, 19 nt, Artificial Sequence
  Description of Artificial Sequence: Synthetic oligonucleotide
  Sense strand starting at position 3356 of SEQ ID NO: 1885077
uguguuacugcagacucau

SEQ ID NO: 2314323 - RNA, 19 nt, Artificial Sequence
  Description of Artificial Sequence: Synthetic oligonucleotide
  Antisense strand to SEQ ID NO: 2314322
augagucugcaguaacaca

SEQ ID NO: 2314324 - RNA, 19 nt, Artificial Sequence
  Description of Artificial Sequence: Synthetic oligonucleotide
  Sense strand starting at position 3461 of SEQ ID NO: 1885077
guuuguggauccuaugcau

SEQ ID NO: 2314325 - RNA, 19 nt, Artificial Sequence
  Description of Artificial Sequence: Synthetic oligonucleotide
  Antisense strand to SEQ ID NO: 2314324
augcauaggauccacaaac

SEQ ID NO: 2314326 - RNA, 19 nt, Artificial Sequence
  Description of Artificial Sequence: Synthetic oligonucleotide
  Sense strand starting at position 3464 of SEQ ID NO: 1885077
uguggauccuaugcauaau

SEQ ID NO: 2314327 - RNA, 19 nt, Artificial Sequence
  Description of Artificial Sequence: Synthetic oligonucleotide
  Antisense strand to SEQ ID NO: 2314326
auuaugcauaggauccaca

SEQ ID NO: 2314328 - RNA, 19 nt, Artificial Sequence
  Description of Artificial Sequence: Synthetic oligonucleotide
  Sense strand starting at position 3467 of SEQ ID NO: 1885077
ggauccuaugcauaaucuu

SEQ ID NO: 2314329 - RNA, 19 nt, Artificial Sequence
  Description of Artificial Sequence: Synthetic oligonucleotide
  Antisense strand to SEQ ID NO: 2314328
aagauuaugcauaggaucc

SEQ ID NO: 2314330 - RNA, 19 nt, Artificial Sequence
  Description of Artificial Sequence: Synthetic oligonucleotide
  Sense strand starting at position 3515 of SEQ ID NO: 1885077
auaugagauuccuaaguaa

SEQ ID NO: 2314331 - RNA, 19 nt, Artificial Sequence
  Description of Artificial Sequence: Synthetic oligonucleotide
  Antisense strand to SEQ ID NO: 2314330
uuacuuaggaaucucauau

SEQ ID NO: 2314332 - RNA, 19 nt, Artificial Sequence
  Description of Artificial Sequence: Synthetic oligonucleotide
  Sense strand starting at position 3596 of SEQ ID NO: 1885077
agcaucugccucuaagaga

SEQ ID NO: 2314333 - RNA, 19 nt, Artificial Sequence
  Description of Artificial Sequence: Synthetic oligonucleotide
  Antisense strand to SEQ ID NO: 2314332
ucucuuagaggcagaugcu

SEQ ID NO: 2314334 - RNA, 19 nt, Artificial Sequence
  Description of Artificial Sequence: Synthetic oligonucleotide
  Sense strand starting at position 3615 of SEQ ID NO: 1885077
uggaauucuuaaguuagag

SEQ ID NO: 2314335 - RNA, 19 nt, Artificial Sequence
  Description of Artificial Sequence: Synthetic oligonucleotide
  Antisense strand to SEQ ID NO: 2314334
cucuaacuuaagaauucca

SEQ ID NO: 2314336 - RNA, 19 nt, Artificial Sequence
  Description of Artificial Sequence: Synthetic oligonucleotide
  Sense strand starting at position 3780 of SEQ ID NO: 1885077
aggugagguaucugcccaa

SEQ ID NO: 2314337 - RNA, 19 nt, Artificial Sequence
  Description of Artificial Sequence: Synthetic oligonucleotide
  Antisense strand to SEQ ID NO: 2314336
uugggcagauaccucaccu

SEQ ID NO: 2314338 - RNA, 19 nt, Artificial Sequence
  Description of Artificial Sequence: Synthetic oligonucleotide
  Sense strand starting at position 3783 of SEQ ID NO: 1885077
ugagguaucugcccaaaug

SEQ ID NO: 2314339 - RNA, 19 nt, Artificial Sequence
  Description of Artificial Sequence: Synthetic oligonucleotide
  Antisense strand to SEQ ID NO: 2314338
cauuugggcagauaccuca

SEQ ID NO: 2314340 - RNA, 19 nt, Artificial Sequence
  Description of Artificial Sequence: Synthetic oligonucleotide
  Sense strand starting at position 3784 of SEQ ID NO: 1885077
gagguaucugcccaaaugg

SEQ ID NO: 2314341 - RNA, 19 nt, Artificial Sequence
  Description of Artificial Sequence: Synthetic oligonucleotide
  Antisense strand to SEQ ID NO: 2314340
ccauuugggcagauaccuc

SEQ ID NO: 2314342 - RNA, 19 nt, Artificial Sequence
  Description of Artificial Sequence: Synthetic oligonucleotide
  Sense strand starting at position 3798 of SEQ ID NO: 1885077
aauggaguuuggugcaauu

SEQ ID NO: 2314343 - RNA, 19 nt, Artificial Sequence
  Description of Artificial Sequence: Synthetic oligonucleotide
  Antisense strand to SEQ ID NO: 2314342
aauugcaccaaacuccauu

SEQ ID NO: 2314344 - RNA, 19 nt, Artificial Sequence
  Description of Artificial Sequence: Synthetic oligonucleotide
  Sense strand starting at position 3822 of SEQ ID NO: 1885077
gccucaaauuaucuguaga

SEQ ID NO: 2314345 - RNA, 19 nt, Artificial Sequence
  Description of Artificial Sequence: Synthetic oligonucleotide
  Antisense strand to SEQ ID NO: 2314344
ucuacagauaauuugaggc

SEQ ID NO: 2314346 - RNA, 19 nt, Artificial Sequence
  Description of Artificial Sequence: Synthetic oligonucleotide
  Sense strand starting at position 3824 of SEQ ID NO: 1885077
cucaaauuaucuguagaag

SEQ ID NO: 2314347 - RNA, 19 nt, Artificial Sequence
  Description of Artificial Sequence: Synthetic oligonucleotide
  Antisense strand to SEQ ID NO: 2314346
cuucuacagauaauuugag

SEQ ID NO: 2314348 - RNA, 19 nt, Artificial Sequence
  Description of Artificial Sequence: Synthetic oligonucleotide
  Sense strand starting at position 3855 of SEQ ID NO: 1885077
uugcuaaauccucauugga

SEQ ID NO: 2314349 - RNA, 19 nt, Artificial Sequence
  Description of Artificial Sequence: Synthetic oligonucleotide
  Antisense strand to SEQ ID NO: 2314348
uccaaugaggauuuagcaa

SEQ ID NO: 2314350 - RNA, 19 nt, Artificial Sequence
  Description of Artificial Sequence: Synthetic oligonucleotide
  Sense strand starting at position 3857 of SEQ ID NO: 1885077
gcuaaauccucauuggaag

SEQ ID NO: 2314351 - RNA, 19 nt, Artificial Sequence
  Description of Artificial Sequence: Synthetic oligonucleotide
  Antisense strand to SEQ ID NO: 2314350
cuuccaaugaggauuuagc

SEQ ID NO: 2314352 - RNA, 19 nt, Artificial Sequence
  Description of Artificial Sequence: Synthetic oligonucleotide
  Sense strand starting at position 3969 of SEQ ID NO: 1885077
ggaugaucaugugagguca

SEQ ID NO: 2314353 - RNA, 19 nt, Artificial Sequence
  Description of Artificial Sequence: Synthetic oligonucleotide
  Antisense strand to SEQ ID NO: 2314352
ugaccucacaugaucaucc

SEQ ID NO: 2314354 - RNA, 19 nt, Artificial Sequence
  Description of Artificial Sequence: Synthetic oligonucleotide
  Sense strand starting at position 574 of SEQ ID NO: 1885079
ggugaaacauaguuaacau

SEQ ID NO: 2314355 - RNA, 19 nt, Artificial Sequence
  Description of Artificial Sequence: Synthetic oligonucleotide
  Antisense strand to SEQ ID NO: 2314354
auguuaacuauguuucacc

SEQ ID NO: 2314356 - RNA, 19 nt, Artificial Sequence
  Description of Artificial Sequence: Synthetic oligonucleotide
  Sense strand starting at position 1097 of SEQ ID NO: 1885079
caguguuggaaaugauggu

SEQ ID NO: 2314357 - RNA, 19 nt, Artificial Sequence
  Description of Artificial Sequence: Synthetic oligonucleotide
  Antisense strand to SEQ ID NO: 2314356
accaucauuuccaacacug

SEQ ID NO: 2314358 - RNA, 19 nt, Artificial Sequence
  Description of Artificial Sequence: Synthetic oligonucleotide
  Sense strand starting at position 1101 of SEQ ID NO: 1885079
guuggaaaugauggugaag

SEQ ID NO: 2314359 - RNA, 19 nt, Artificial Sequence
  Description of Artificial Sequence: Synthetic oligonucleotide
  Antisense strand to SEQ ID NO: 2314358
cuucaccaucauuuccaac

SEQ ID NO: 2314360 - RNA, 19 nt, Artificial Sequence
  Description of Artificial Sequence: Synthetic oligonucleotide
  Sense strand starting at position 1113 of SEQ ID NO: 1885079
ggugaaggagugugggauu

SEQ ID NO: 2314361 - RNA, 19 nt, Artificial Sequence
  Description of Artificial Sequence: Synthetic oligonucleotide
  Antisense strand to SEQ ID NO: 2314360
aaucccacacuccuucacc

SEQ ID NO: 2314362 - RNA, 19 nt, Artificial Sequence
  Description of Artificial Sequence: Synthetic oligonucleotide
  Sense strand starting at position 1218 of SEQ ID NO: 1885079
cccuuuaaaugggucaauu

SEQ ID NO: 2314363 - RNA, 19 nt, Artificial Sequence
  Description of Artificial Sequence: Synthetic oligonucleotide
  Antisense strand to SEQ ID NO: 2314362
aauugacccauuuaaaggg

SEQ ID NO: 2314364 - RNA, 19 nt, Artificial Sequence
  Description of Artificial Sequence: Synthetic oligonucleotide
  Sense strand starting at position 1228 of SEQ ID NO: 1885079
gggucaauuguauggugua

SEQ ID NO: 2314365 - RNA, 19 nt, Artificial Sequence
  Description of Artificial Sequence: Synthetic oligonucleotide
  Antisense strand to SEQ ID NO: 2314364
uacaccauacaauugaccc

SEQ ID NO: 2314366 - RNA, 19 nt, Artificial Sequence
  Description of Artificial Sequence: Synthetic oligonucleotide
  Sense strand starting at position 1364 of SEQ ID NO: 1885079
caagcauggugacucagau

SEQ ID NO: 2314367 - RNA, 19 nt, Artificial Sequence
  Description of Artificial Sequence: Synthetic oligonucleotide
  Antisense strand to SEQ ID NO: 2314366
aucugagucaccaugcuug

SEQ ID NO: 2314368 - RNA, 19 nt, Artificial Sequence
  Description of Artificial Sequence: Synthetic oligonucleotide
  Sense strand starting at position 2195 of SEQ ID NO: 1885079
ggucucaugucucuuggga

SEQ ID NO: 2314369 - RNA, 19 nt, Artificial Sequence
  Description of Artificial Sequence: Synthetic oligonucleotide
  Antisense strand to SEQ ID NO: 2314368
ucccaagagacaugagacc

SEQ ID NO: 2314370 - RNA, 19 nt, Artificial Sequence
  Description of Artificial Sequence: Synthetic oligonucleotide
  Sense strand starting at position 2246 of SEQ ID NO: 1885079
gggagcuuccauuaugccu

SEQ ID NO: 2314371 - RNA, 19 nt, Artificial Sequence
  Description of Artificial Sequence: Synthetic oligonucleotide
  Antisense strand to SEQ ID NO: 2314370
aggcauaauggaagcuccc

SEQ ID NO: 2314372 - RNA, 19 nt, Artificial Sequence
  Description of Artificial Sequence: Synthetic oligonucleotide
  Sense strand starting at position 2278 of SEQ ID NO: 1885079
agaucuuuccauugccuga

SEQ ID NO: 2314373 - RNA, 19 nt, Artificial Sequence
  Description of Artificial Sequence: Synthetic oligonucleotide
  Antisense strand to SEQ ID NO: 2314372
ucaggcaauggaaagaucu

SEQ ID NO: 2314374 - RNA, 19 nt, Artificial Sequence
  Description of Artificial Sequence: Synthetic oligonucleotide
  Sense strand starting at position 2355 of SEQ ID NO: 1885079
auaggagcucuggguaaau

SEQ ID NO: 2314375 - RNA, 19 nt, Artificial Sequence
  Description of Artificial Sequence: Synthetic oligonucleotide
  Antisense strand to SEQ ID NO: 2314374
auuuacccagagcuccuau

SEQ ID NO: 2314376 - RNA, 19 nt, Artificial Sequence
  Description of Artificial Sequence: Synthetic oligonucleotide
  Sense strand starting at position 2545 of SEQ ID NO: 1885079
caggucgaucuaugaccua

SEQ ID NO: 2314377 - RNA, 19 nt, Artificial Sequence
  Description of Artificial Sequence: Synthetic oligonucleotide
  Antisense strand to SEQ ID NO: 2314376
uaggucauagaucgaccug

SEQ ID NO: 2314378 - RNA, 19 nt, Artificial Sequence
  Description of Artificial Sequence: Synthetic oligonucleotide
  Sense strand starting at position 2595 of SEQ ID NO: 1885079
guggcaguccaacaaaguu

SEQ ID NO: 2314379 - RNA, 19 nt, Artificial Sequence
  Description of Artificial Sequence: Synthetic oligonucleotide
  Antisense strand to SEQ ID NO: 2314378
aacuuuguuggacugccac

SEQ ID NO: 2314380 - RNA, 19 nt, Artificial Sequence
  Description of Artificial Sequence: Synthetic oligonucleotide
  Sense strand starting at position 2622 of SEQ ID NO: 1885079
ugaccuauucagugaggga

SEQ ID NO: 2314381 - RNA, 19 nt, Artificial Sequence
  Description of Artificial Sequence: Synthetic oligonucleotide
  Antisense strand to SEQ ID NO: 2314380
ucccucacugaauagguca

SEQ ID NO: 2314382 - RNA, 19 nt, Artificial Sequence
  Description of Artificial Sequence: Synthetic oligonucleotide
  Sense strand starting at position 2685 of SEQ ID NO: 1885079
acagcaauuuauuauagga

SEQ ID NO: 2314383 - RNA, 19 nt, Artificial Sequence
  Description of Artificial Sequence: Synthetic oligonucleotide
  Antisense strand to SEQ ID NO: 2314382
uccuauaauaaauugcugu

SEQ ID NO: 2314384 - RNA, 19 nt, Artificial Sequence
  Description of Artificial Sequence: Synthetic oligonucleotide
  Sense strand starting at position 2698 of SEQ ID NO: 1885079
auaggauuccgaggaaagu

SEQ ID NO: 2314385 - RNA, 19 nt, Artificial Sequence
  Description of Artificial Sequence: Synthetic oligonucleotide
  Antisense strand to SEQ ID NO: 2314384
acuuuccucggaauccuau

SEQ ID NO: 2314386 - RNA, 19 nt, Artificial Sequence
  Description of Artificial Sequence: Synthetic oligonucleotide
  Sense strand starting at position 2820 of SEQ ID NO: 1885079
gggcccuguuuccuaggaa

SEQ ID NO: 2314387 - RNA, 19 nt, Artificial Sequence
  Description of Artificial Sequence: Synthetic oligonucleotide
  Antisense strand to SEQ ID NO: 2314386
uuccuaggaaacagggccc

SEQ ID NO: 2314388 - RNA, 19 nt, Artificial Sequence
  Description of Artificial Sequence: Synthetic oligonucleotide
  Sense strand starting at position 2823 of SEQ ID NO: 1885079
cccuguuuccuaggaagca

SEQ ID NO: 2314389 - RNA, 19 nt, Artificial Sequence
  Description of Artificial Sequence: Synthetic oligonucleotide
  Antisense strand to SEQ ID NO: 2314388
ugcuuccuaggaaacaggg

SEQ ID NO: 2314390 - RNA, 19 nt, Artificial Sequence
  Description of Artificial Sequence: Synthetic oligonucleotide
  Sense strand starting at position 2858 of SEQ ID NO: 1885079
ugucaaauguguccagaaa

SEQ ID NO: 2314391 - RNA, 19 nt, Artificial Sequence
  Description of Artificial Sequence: Synthetic oligonucleotide
  Antisense strand to SEQ ID NO: 2314390
uuucuggacacauuugaca

SEQ ID NO: 2314392 - RNA, 19 nt, Artificial Sequence
  Description of Artificial Sequence: Synthetic oligonucleotide
  Sense strand starting at position 2925 of SEQ ID NO: 1885079
cugugucaagaugacuuaa

SEQ ID NO: 2314393 - RNA, 19 nt, Artificial Sequence
  Description of Artificial Sequence: Synthetic oligonucleotide
  Antisense strand to SEQ ID NO: 2314392
uuaagucaucuugacacag

SEQ ID NO: 2314394 - RNA, 19 nt, Artificial Sequence
  Description of Artificial Sequence: Synthetic oligonucleotide
  Sense strand starting at position 2927 of SEQ ID NO: 1885079
gugucaagaugacuuaaau

SEQ ID NO: 2314395 - RNA, 19 nt, Artificial Sequence
  Description of Artificial Sequence: Synthetic oligonucleotide
  Antisense strand to SEQ ID NO: 2314394
auuuaagucaucuugacac

SEQ ID NO: 2314396 - RNA, 19 nt, Artificial Sequence
  Description of Artificial Sequence: Synthetic oligonucleotide
  Sense strand starting at position 3057 of SEQ ID NO: 1885079
aggguuguauuaucacuuu

SEQ ID NO: 2314397 - RNA, 19 nt, Artificial Sequence
  Description of Artificial Sequence: Synthetic oligonucleotide
  Antisense strand to SEQ ID NO: 2314396
aaagugauaauacaacccu

SEQ ID NO: 2314398 - RNA, 19 nt, Artificial Sequence
  Description of Artificial Sequence: Synthetic oligonucleotide
  Sense strand starting at position 3060 of SEQ ID NO: 1885079
guuguauuaucacuuuaca

SEQ ID NO: 2314399 - RNA, 19 nt, Artificial Sequence
  Description of Artificial Sequence: Synthetic oligonucleotide
  Antisense strand to SEQ ID NO: 2314398
uguaaagugauaauacaac

SEQ ID NO: 2314400 - RNA, 19 nt, Artificial Sequence
  Description of Artificial Sequence: Synthetic oligonucleotide
  Sense strand starting at position 3063 of SEQ ID NO: 1885079
guauuaucacuuuacagcu

SEQ ID NO: 2314401 - RNA, 19 nt, Artificial Sequence
  Description of Artificial Sequence: Synthetic oligonucleotide
  Antisense strand to SEQ ID NO: 2314400
agcuguaaagugauaauac

SEQ ID NO: 2314402 - RNA, 19 nt, Artificial Sequence
  Description of Artificial Sequence: Synthetic oligonucleotide
  Sense strand starting at position 3084 of SEQ ID NO: 1885079
agagaauuauuguucccug

SEQ ID NO: 2314403 - RNA, 19 nt, Artificial Sequence
  Description of Artificial Sequence: Synthetic oligonucleotide
  Antisense strand to SEQ ID NO: 2314402
cagggaacaauaauucucu

SEQ ID NO: 2314404 - RNA, 19 nt, Artificial Sequence
  Description of Artificial Sequence: Synthetic oligonucleotide
  Sense strand starting at position 3085 of SEQ ID NO: 1885079
gagaauuauuguucccugu

SEQ ID NO: 2314405 - RNA, 19 nt, Artificial Sequence
  Description of Artificial Sequence: Synthetic oligonucleotide
  Antisense strand to SEQ ID NO: 2314404
acagggaacaauaauucuc

SEQ ID NO: 2314406 - RNA, 19 nt, Artificial Sequence
  Description of Artificial Sequence: Synthetic oligonucleotide
  Sense strand starting at position 3098 of SEQ ID NO: 1885079
cccuguuaucuuuacagcu

SEQ ID NO: 2314407 - RNA, 19 nt, Artificial Sequence
  Description of Artificial Sequence: Synthetic oligonucleotide
  Antisense strand to SEQ ID NO: 2314406
agcuguaaagauaacaggg

SEQ ID NO: 2314408 - RNA, 19 nt, Artificial Sequence
  Description of Artificial Sequence: Synthetic oligonucleotide
  Sense strand starting at position 3119 of SEQ ID NO: 1885079
cuugaucccuuucuguuau

SEQ ID NO: 2314409 - RNA, 19 nt, Artificial Sequence
  Description of Artificial Sequence: Synthetic oligonucleotide
  Antisense strand to SEQ ID NO: 2314408
auaacagaaagggaucaag

SEQ ID NO: 2314410 - RNA, 19 nt, Artificial Sequence
  Description of Artificial Sequence: Synthetic oligonucleotide
  Sense strand starting at position 3177 of SEQ ID NO: 1885079
agucuaaacuaauuguacu

SEQ ID NO: 2314411 - RNA, 19 nt, Artificial Sequence
  Description of Artificial Sequence: Synthetic oligonucleotide
  Antisense strand to SEQ ID NO: 2314410
aguacaauuaguuuagacu

SEQ ID NO: 2314412 - RNA, 19 nt, Artificial Sequence
  Description of Artificial Sequence: Synthetic oligonucleotide
  Sense strand starting at position 3440 of SEQ ID NO: 1885079
augguuccaucauuaguua

SEQ ID NO: 2314413 - RNA, 19 nt, Artificial Sequence
  Description of Artificial Sequence: Synthetic oligonucleotide
  Antisense strand to SEQ ID NO: 2314412
uaacuaaugauggaaccau

SEQ ID NO: 2314414 - RNA, 19 nt, Artificial Sequence
  Description of Artificial Sequence: Synthetic oligonucleotide
  Sense strand starting at position 3488 of SEQ ID NO: 1885079
ccgggaaucugagugauac

SEQ ID NO: 2314415 - RNA, 19 nt, Artificial Sequence
  Description of Artificial Sequence: Synthetic oligonucleotide
  Antisense strand to SEQ ID NO: 2314414
guaucacucagauucccgg

SEQ ID NO: 2314416 - RNA, 19 nt, Artificial Sequence
  Description of Artificial Sequence: Synthetic oligonucleotide
  Sense strand starting at position 3489 of SEQ ID NO: 1885079
cgggaaucugagugauacg

SEQ ID NO: 2314417 - RNA, 19 nt, Artificial Sequence
  Description of Artificial Sequence: Synthetic oligonucleotide
  Antisense strand to SEQ ID NO: 2314416
cguaucacucagauucccg

SEQ ID NO: 2314418 - RNA, 19 nt, Artificial Sequence
  Description of Artificial Sequence: Synthetic oligonucleotide
  Sense strand starting at position 3494 of SEQ ID NO: 1885079
aucugagugauacggucau

SEQ ID NO: 2314419 - RNA, 19 nt, Artificial Sequence
  Description of Artificial Sequence: Synthetic oligonucleotide
  Antisense strand to SEQ ID NO: 2314418
augaccguaucacucagau

SEQ ID NO: 2314420 - RNA, 19 nt, Artificial Sequence
  Description of Artificial Sequence: Synthetic oligonucleotide
  Sense strand starting at position 3498 of SEQ ID NO: 1885079
gagugauacggucaucuuc

SEQ ID NO: 2314421 - RNA, 19 nt, Artificial Sequence
  Description of Artificial Sequence: Synthetic oligonucleotide
  Antisense strand to SEQ ID NO: 2314420
gaagaugaccguaucacuc

SEQ ID NO: 2314422 - RNA, 19 nt, Artificial Sequence
  Description of Artificial Sequence: Synthetic oligonucleotide
  Sense strand starting at position 3527 of SEQ ID NO: 1885079
agaggagauucacagguaa

SEQ ID NO: 2314423 - RNA, 19 nt, Artificial Sequence
  Description of Artificial Sequence: Synthetic oligonucleotide
  Antisense strand to SEQ ID NO: 2314422
uuaccugugaaucuccucu

SEQ ID NO: 2314424 - RNA, 19 nt, Artificial Sequence
  Description of Artificial Sequence: Synthetic oligonucleotide
  Sense strand starting at position 3539 of SEQ ID NO: 1885079
cagguaaagccugaugcuu

SEQ ID NO: 2314425 - RNA, 19 nt, Artificial Sequence
  Description of Artificial Sequence: Synthetic oligonucleotide
  Antisense strand to SEQ ID NO: 2314424
aagcaucaggcuuuaccug

SEQ ID NO: 2314426 - RNA, 19 nt, Artificial Sequence
  Description of Artificial Sequence: Synthetic oligonucleotide
  Sense strand starting at position 3628 of SEQ ID NO: 1885079
ccuggacagcucuguuuau

SEQ ID NO: 2314427 - RNA, 19 nt, Artificial Sequence
  Description of Artificial Sequence: Synthetic oligonucleotide
  Antisense strand to SEQ ID NO: 2314426
auaaacagagcuguccagg

SEQ ID NO: 2314428 - RNA, 19 nt, Artificial Sequence
  Description of Artificial Sequence: Synthetic oligonucleotide
  Sense strand starting at position 3685 of SEQ ID NO: 1885079
uagauauggcagugaacag

SEQ ID NO: 2314429 - RNA, 19 nt, Artificial Sequence
  Description of Artificial Sequence: Synthetic oligonucleotide
  Antisense strand to SEQ ID NO: 2314428
cuguucacugccauaucua

SEQ ID NO: 2314430 - RNA, 19 nt, Artificial Sequence
  Description of Artificial Sequence: Synthetic oligonucleotide
  Sense strand starting at position 3834 of SEQ ID NO: 1885079
aaacacuacgcuuaaguga

SEQ ID NO: 2314431 - RNA, 19 nt, Artificial Sequence
  Description of Artificial Sequence: Synthetic oligonucleotide
  Antisense strand to SEQ ID NO: 2314430
ucacuuaagcguaguguuu

SEQ ID NO: 2314432 - RNA, 19 nt, Artificial Sequence
  Description of Artificial Sequence: Synthetic oligonucleotide
  Sense strand starting at position 3885 of SEQ ID NO: 1885079
cgacuccauuuauaggaaa

SEQ ID NO: 2314433 - RNA, 19 nt, Artificial Sequence
  Description of Artificial Sequence: Synthetic oligonucleotide
  Antisense strand to SEQ ID NO: 2314432
uuuccuauaaauggagucg

SEQ ID NO: 2314434 - RNA, 19 nt, Artificial Sequence
  Description of Artificial Sequence: Synthetic oligonucleotide
  Sense strand starting at position 565 of SEQ ID NO: 1885078
ggugaaacauaguuaacau

SEQ ID NO: 2314435 - RNA, 19 nt, Artificial Sequence
  Description of Artificial Sequence: Synthetic oligonucleotide
  Antisense strand to SEQ ID NO: 2314434
auguuaacuauguuucacc

SEQ ID NO: 2314436 - RNA, 19 nt, Artificial Sequence
  Description of Artificial Sequence: Synthetic oligonucleotide
  Sense strand starting at position 1088 of SEQ ID NO: 1885078
caguguuggaaaugauggu

SEQ ID NO: 2314437 - RNA, 19 nt, Artificial Sequence
  Description of Artificial Sequence: Synthetic oligonucleotide
  Antisense strand to SEQ ID NO: 2314436
accaucauuuccaacacug

SEQ ID NO: 2314438 - RNA, 19 nt, Artificial Sequence
  Description of Artificial Sequence: Synthetic oligonucleotide
  Sense strand starting at position 1092 of SEQ ID NO: 1885078
guuggaaaugauggugaag

SEQ ID NO: 2314439 - RNA, 19 nt, Artificial Sequence
  Description of Artificial Sequence: Synthetic oligonucleotide
  Antisense strand to SEQ ID NO: 2314438
cuucaccaucauuuccaac

SEQ ID NO: 2314440 - RNA, 19 nt, Artificial Sequence
  Description of Artificial Sequence: Synthetic oligonucleotide
  Sense strand starting at position 1104 of SEQ ID NO: 1885078
ggugaaggagugugggauu

SEQ ID NO: 2314441 - RNA, 19 nt, Artificial Sequence
  Description of Artificial Sequence: Synthetic oligonucleotide
  Antisense strand to SEQ ID NO: 2314440
aaucccacacuccuucacc

SEQ ID NO: 2314442 - RNA, 19 nt, Artificial Sequence
  Description of Artificial Sequence: Synthetic oligonucleotide
  Sense strand starting at position 1209 of SEQ ID NO: 1885078
cccuuuaaaugggucaauu

SEQ ID NO: 2314443 - RNA, 19 nt, Artificial Sequence
  Description of Artificial Sequence: Synthetic oligonucleotide
  Antisense strand to SEQ ID NO: 2314442
aauugacccauuuaaaggg

SEQ ID NO: 2314444 - RNA, 19 nt, Artificial Sequence
  Description of Artificial Sequence: Synthetic oligonucleotide
  Sense strand starting at position 1219 of SEQ ID NO: 1885078
gggucaauuguauggugua

SEQ ID NO: 2314445 - RNA, 19 nt, Artificial Sequence
  Description of Artificial Sequence: Synthetic oligonucleotide
  Antisense strand to SEQ ID NO: 2314444
uacaccauacaauugaccc

SEQ ID NO: 2314446 - RNA, 19 nt, Artificial Sequence
  Description of Artificial Sequence: Synthetic oligonucleotide
  Sense strand starting at position 1355 of SEQ ID NO: 1885078
caagcauggugacucagau

SEQ ID NO: 2314447 - RNA, 19 nt, Artificial Sequence
  Description of Artificial Sequence: Synthetic oligonucleotide
  Antisense strand to SEQ ID NO: 2314446
aucugagucaccaugcuug

SEQ ID NO: 2314448 - RNA, 19 nt, Artificial Sequence
  Description of Artificial Sequence: Synthetic oligonucleotide
  Sense strand starting at position 2186 of SEQ ID NO: 1885078
ggucucaugucucuuggga

SEQ ID NO: 2314449 - RNA, 19 nt, Artificial Sequence
  Description of Artificial Sequence: Synthetic oligonucleotide
  Antisense strand to SEQ ID NO: 2314448
ucccaagagacaugagacc

SEQ ID NO: 2314450 - RNA, 19 nt, Artificial Sequence
  Description of Artificial Sequence: Synthetic oligonucleotide
  Sense strand starting at position 2237 of SEQ ID NO: 1885078
gggagcuuccauuaugccu

SEQ ID NO: 2314451 - RNA, 19 nt, Artificial Sequence
  Description of Artificial Sequence: Synthetic oligonucleotide
  Antisense strand to SEQ ID NO: 2314450
aggcauaauggaagcuccc

SEQ ID NO: 2314452 - RNA, 19 nt, Artificial Sequence
  Description of Artificial Sequence: Synthetic oligonucleotide
  Sense strand starting at position 2269 of SEQ ID NO: 1885078
agaucuuuccauugccuga

SEQ ID NO: 2314453 - RNA, 19 nt, Artificial Sequence
  Description of Artificial Sequence: Synthetic oligonucleotide
  Antisense strand to SEQ ID NO: 2314452
ucaggcaauggaaagaucu

SEQ ID NO: 2314454 - RNA, 19 nt, Artificial Sequence
  Description of Artificial Sequence: Synthetic oligonucleotide
  Sense strand starting at position 2346 of SEQ ID NO: 1885078
auaggagcucuggguaaau

SEQ ID NO: 2314455 - RNA, 19 nt, Artificial Sequence
  Description of Artificial Sequence: Synthetic oligonucleotide
  Antisense strand to SEQ ID NO: 2314454
auuuacccagagcuccuau

SEQ ID NO: 2314456 - RNA, 19 nt, Artificial Sequence
  Description of Artificial Sequence: Synthetic oligonucleotide
  Sense strand starting at position 2536 of SEQ ID NO: 1885078
caggucgaucuaugaccua

SEQ ID NO: 2314457 - RNA, 19 nt, Artificial Sequence
  Description of Artificial Sequence: Synthetic oligonucleotide
  Antisense strand to SEQ ID NO: 2314456
uaggucauagaucgaccug

SEQ ID NO: 2314458 - RNA, 19 nt, Artificial Sequence
  Description of Artificial Sequence: Synthetic oligonucleotide
  Sense strand starting at position 2586 of SEQ ID NO: 1885078
guggcaguccaacaaaguu

SEQ ID NO: 2314459 - RNA, 19 nt, Artificial Sequence
  Description of Artificial Sequence: Synthetic oligonucleotide
  Antisense strand to SEQ ID NO: 2314458
aacuuuguuggacugccac

SEQ ID NO: 2314460 - RNA, 19 nt, Artificial Sequence
  Description of Artificial Sequence: Synthetic oligonucleotide
  Sense strand starting at position 2613 of SEQ ID NO: 1885078
ugaccuauucagugaggga

SEQ ID NO: 2314461 - RNA, 19 nt, Artificial Sequence
  Description of Artificial Sequence: Synthetic oligonucleotide
  Antisense strand to SEQ ID NO: 2314460
ucccucacugaauagguca

SEQ ID NO: 2314462 - RNA, 19 nt, Artificial Sequence
  Description of Artificial Sequence: Synthetic oligonucleotide
  Sense strand starting at position 2676 of SEQ ID NO: 1885078
acagcaauuuauuauagga

SEQ ID NO: 2314463 - RNA, 19 nt, Artificial Sequence
  Description of Artificial Sequence: Synthetic oligonucleotide
  Antisense strand to SEQ ID NO: 2314462
uccuauaauaaauugcugu

SEQ ID NO: 2314464 - RNA, 19 nt, Artificial Sequence
  Description of Artificial Sequence: Synthetic oligonucleotide
  Sense strand starting at position 2689 of SEQ ID NO: 1885078
auaggauuccgaggaaagu

SEQ ID NO: 2314465 - RNA, 19 nt, Artificial Sequence
  Description of Artificial Sequence: Synthetic oligonucleotide
  Antisense strand to SEQ ID NO: 2314464
acuuuccucggaauccuau

SEQ ID NO: 2314466 - RNA, 19 nt, Artificial Sequence
  Description of Artificial Sequence: Synthetic oligonucleotide
  Sense strand starting at position 2811 of SEQ ID NO: 1885078
gggcccuguuuccuaggaa

SEQ ID NO: 2314467 - RNA, 19 nt, Artificial Sequence
  Description of Artificial Sequence: Synthetic oligonucleotide
  Antisense strand to SEQ ID NO: 2314466
uuccuaggaaacagggccc

SEQ ID NO: 2314468 - RNA, 19 nt, Artificial Sequence
  Description of Artificial Sequence: Synthetic oligonucleotide
  Sense strand starting at position 2814 of SEQ ID NO: 1885078
cccuguuuccuaggaagca

SEQ ID NO: 2314469 - RNA, 19 nt, Artificial Sequence
  Description of Artificial Sequence: Synthetic oligonucleotide
  Antisense strand to SEQ ID NO: 2314468
ugcuuccuaggaaacaggg

SEQ ID NO: 2314470 - RNA, 19 nt, Artificial Sequence
  Description of Artificial Sequence: Synthetic oligonucleotide
  Sense strand starting at position 2849 of SEQ ID NO: 1885078
ugucaaauguguccagaaa

SEQ ID NO: 2314471 - RNA, 19 nt, Artificial Sequence
  Description of Artificial Sequence: Synthetic oligonucleotide
  Antisense strand to SEQ ID NO: 2314470
uuucuggacacauuugaca

SEQ ID NO: 2314472 - RNA, 19 nt, Artificial Sequence
  Description of Artificial Sequence: Synthetic oligonucleotide
  Sense strand starting at position 2916 of SEQ ID NO: 1885078
cugugucaagaugacuuaa

SEQ ID NO: 2314473 - RNA, 19 nt, Artificial Sequence
  Description of Artificial Sequence: Synthetic oligonucleotide
  Antisense strand to SEQ ID NO: 2314472
uuaagucaucuugacacag

SEQ ID NO: 2314474 - RNA, 19 nt, Artificial Sequence
  Description of Artificial Sequence: Synthetic oligonucleotide
  Sense strand starting at position 2918 of SEQ ID NO: 1885078
gugucaagaugacuuaaau

SEQ ID NO: 2314475 - RNA, 19 nt, Artificial Sequence
  Description of Artificial Sequence: Synthetic oligonucleotide
  Antisense strand to SEQ ID NO: 2314474
auuuaagucaucuugacac

SEQ ID NO: 2314476 - RNA, 19 nt, Artificial Sequence
  Description of Artificial Sequence: Synthetic oligonucleotide
  Sense strand starting at position 3048 of SEQ ID NO: 1885078
aggguuguauuaucacuuu

SEQ ID NO: 2314477 - RNA, 19 nt, Artificial Sequence
  Description of Artificial Sequence: Synthetic oligonucleotide
  Antisense strand to SEQ ID NO: 2314476
aaagugauaauacaacccu

SEQ ID NO: 2314478 - RNA, 19 nt, Artificial Sequence
  Description of Artificial Sequence: Synthetic oligonucleotide
  Sense strand starting at position 3051 of SEQ ID NO: 1885078
guuguauuaucacuuuaca

SEQ ID NO: 2314479 - RNA, 19 nt, Artificial Sequence
  Description of Artificial Sequence: Synthetic oligonucleotide
  Antisense strand to SEQ ID NO: 2314478
uguaaagugauaauacaac

SEQ ID NO: 2314480 - RNA, 19 nt, Artificial Sequence
  Description of Artificial Sequence: Synthetic oligonucleotide
  Sense strand starting at position 3054 of SEQ ID NO: 1885078
guauuaucacuuuacagcu

SEQ ID NO: 2314481 - RNA, 19 nt, Artificial Sequence
  Description of Artificial Sequence: Synthetic oligonucleotide
  Antisense strand to SEQ ID NO: 2314480
agcuguaaagugauaauac

SEQ ID NO: 2314482 - RNA, 19 nt, Artificial Sequence
  Description of Artificial Sequence: Synthetic oligonucleotide
  Sense strand starting at position 3075 of SEQ ID NO: 1885078
agagaauuauuguucccug

SEQ ID NO: 2314483 - RNA, 19 nt, Artificial Sequence
  Description of Artificial Sequence: Synthetic oligonucleotide
  Antisense strand to SEQ ID NO: 2314482
cagggaacaauaauucucu

SEQ ID NO: 2314484 - RNA, 19 nt, Artificial Sequence
  Description of Artificial Sequence: Synthetic oligonucleotide
  Sense strand starting at position 3076 of SEQ ID NO: 1885078
gagaauuauuguucccugu

SEQ ID NO: 2314485 - RNA, 19 nt, Artificial Sequence
  Description of Artificial Sequence: Synthetic oligonucleotide
  Antisense strand to SEQ ID NO: 2314484
acagggaacaauaauucuc

SEQ ID NO: 2314486 - RNA, 19 nt, Artificial Sequence
  Description of Artificial Sequence: Synthetic oligonucleotide
  Sense strand starting at position 3089 of SEQ ID NO: 1885078
cccuguuaucuuuacagcu

SEQ ID NO: 2314487 - RNA, 19 nt, Artificial Sequence
  Description of Artificial Sequence: Synthetic oligonucleotide
  Antisense strand to SEQ ID NO: 2314486
agcuguaaagauaacaggg

SEQ ID NO: 2314488 - RNA, 19 nt, Artificial Sequence
  Description of Artificial Sequence: Synthetic oligonucleotide
  Sense strand starting at position 3110 of SEQ ID NO: 1885078
cuugaucccuuucuguuau

SEQ ID NO: 2314489 - RNA, 19 nt, Artificial Sequence
  Description of Artificial Sequence: Synthetic oligonucleotide
  Antisense strand to SEQ ID NO: 2314488
auaacagaaagggaucaag

SEQ ID NO: 2314490 - RNA, 19 nt, Artificial Sequence
  Description of Artificial Sequence: Synthetic oligonucleotide
  Sense strand starting at position 3168 of SEQ ID NO: 1885078
agucuaaacuaauuguacu

SEQ ID NO: 2314491 - RNA, 19 nt, Artificial Sequence
  Description of Artificial Sequence: Synthetic oligonucleotide
  Antisense strand to SEQ ID NO: 2314490
aguacaauuaguuuagacu

SEQ ID NO: 2314492 - RNA, 19 nt, Artificial Sequence
  Description of Artificial Sequence: Synthetic oligonucleotide
  Sense strand starting at position 3431 of SEQ ID NO: 1885078
augguuccaucauuaguua

SEQ ID NO: 2314493 - RNA, 19 nt, Artificial Sequence
  Description of Artificial Sequence: Synthetic oligonucleotide
  Antisense strand to SEQ ID NO: 2314492
uaacuaaugauggaaccau

SEQ ID NO: 2314494 - RNA, 19 nt, Artificial Sequence
  Description of Artificial Sequence: Synthetic oligonucleotide
  Sense strand starting at position 3479 of SEQ ID NO: 1885078
ccgggaaucugagugauac

SEQ ID NO: 2314495 - RNA, 19 nt, Artificial Sequence
  Description of Artificial Sequence: Synthetic oligonucleotide
  Antisense strand to SEQ ID NO: 2314494
guaucacucagauucccgg

SEQ ID NO: 2314496 - RNA, 19 nt, Artificial Sequence
  Description of Artificial Sequence: Synthetic oligonucleotide
  Sense strand starting at position 3480 of SEQ ID NO: 1885078
cgggaaucugagugauacg

SEQ ID NO: 2314497 - RNA, 19 nt, Artificial Sequence
  Description of Artificial Sequence: Synthetic oligonucleotide
  Antisense strand to SEQ ID NO: 2314496
cguaucacucagauucccg

SEQ ID NO: 2314498 - RNA, 19 nt, Artificial Sequence
  Description of Artificial Sequence: Synthetic oligonucleotide
  Sense strand starting at position 3485 of SEQ ID NO: 1885078
aucugagugauacggucau

SEQ ID NO: 2314499 - RNA, 19 nt, Artificial Sequence
  Description of Artificial Sequence: Synthetic oligonucleotide
  Antisense strand to SEQ ID NO: 2314498
augaccguaucacucagau

SEQ ID NO: 2314500 - RNA, 19 nt, Artificial Sequence
  Description of Artificial Sequence: Synthetic oligonucleotide
  Sense strand starting at position 3489 of SEQ ID NO: 1885078
gagugauacggucaucuuc

SEQ ID NO: 2314501 - RNA, 19 nt, Artificial Sequence
  Description of Artificial Sequence: Synthetic oligonucleotide
  Antisense strand to SEQ ID NO: 2314500
gaagaugaccguaucacuc

SEQ ID NO: 2314502 - RNA, 19 nt, Artificial Sequence
  Description of Artificial Sequence: Synthetic oligonucleotide
  Sense strand starting at position 3518 of SEQ ID NO: 1885078
agaggagauucacagguaa

SEQ ID NO: 2314503 - RNA, 19 nt, Artificial Sequence
  Description of Artificial Sequence: Synthetic oligonucleotide
  Antisense strand to SEQ ID NO: 2314502
uuaccugugaaucuccucu

SEQ ID NO: 2314504 - RNA, 19 nt, Artificial Sequence
  Description of Artificial Sequence: Synthetic oligonucleotide
  Sense strand starting at position 3530 of SEQ ID NO: 1885078
cagguaaagccugaugcuu

SEQ ID NO: 2314505 - RNA, 19 nt, Artificial Sequence
  Description of Artificial Sequence: Synthetic oligonucleotide
  Antisense strand to SEQ ID NO: 2314504
aagcaucaggcuuuaccug

SEQ ID NO: 2314506 - RNA, 19 nt, Artificial Sequence
  Description of Artificial Sequence: Synthetic oligonucleotide
  Sense strand starting at position 3619 of SEQ ID NO: 1885078
ccuggacagcucuguuuau

SEQ ID NO: 2314507 - RNA, 19 nt, Artificial Sequence
  Description of Artificial Sequence: Synthetic oligonucleotide
  Antisense strand to SEQ ID NO: 2314506
auaaacagagcuguccagg

SEQ ID NO: 2314508 - RNA, 19 nt, Artificial Sequence
  Description of Artificial Sequence: Synthetic oligonucleotide
  Sense strand starting at position 3676 of SEQ ID NO: 1885078
uagauauggcagugaacag

SEQ ID NO: 2314509 - RNA, 19 nt, Artificial Sequence
  Description of Artificial Sequence: Synthetic oligonucleotide
  Antisense strand to SEQ ID NO: 2314508
cuguucacugccauaucua

SEQ ID NO: 2314510 - RNA, 19 nt, Artificial Sequence
  Description of Artificial Sequence: Synthetic oligonucleotide
  Sense strand starting at position 3825 of SEQ ID NO: 1885078
aaacacuacgcuuaaguga

SEQ ID NO: 2314511 - RNA, 19 nt, Artificial Sequence
  Description of Artificial Sequence: Synthetic oligonucleotide
  Antisense strand to SEQ ID NO: 2314510
ucacuuaagcguaguguuu

SEQ ID NO: 2314512 - RNA, 19 nt, Artificial Sequence
  Description of Artificial Sequence: Synthetic oligonucleotide
  Sense strand starting at position 3876 of SEQ ID NO: 1885078
cgacuccauuuauaggaaa

SEQ ID NO: 2314513 - RNA, 19 nt, Artificial Sequence
  Description of Artificial Sequence: Synthetic oligonucleotide
  Antisense strand to SEQ ID NO: 2314512
uuuccuauaaauggagucg

SEQ ID NO: 2314514 - RNA, 19 nt, Artificial Sequence
  Description of Artificial Sequence: Synthetic oligonucleotide
  Sense strand starting at position 21 of SEQ ID NO: 1885080
gguuaagagcaauaggcua

SEQ ID NO: 2314515 - RNA, 19 nt, Artificial Sequence
  Description of Artificial Sequence: Synthetic oligonucleotide
  Antisense strand to SEQ ID NO: 2314514
uagccuauugcucuuaacc

SEQ ID NO: 2314516 - RNA, 19 nt, Artificial Sequence
  Description of Artificial Sequence: Synthetic oligonucleotide
  Sense strand starting at position 184 of SEQ ID NO: 1885080
gcugaaaugugauucuacc

SEQ ID NO: 2314517 - RNA, 19 nt, Artificial Sequence
  Description of Artificial Sequence: Synthetic oligonucleotide
  Antisense strand to SEQ ID NO: 2314516
gguagaaucacauuucagc

SEQ ID NO: 2314518 - RNA, 19 nt, Artificial Sequence
  Description of Artificial Sequence: Synthetic oligonucleotide
  Sense strand starting at position 280 of SEQ ID NO: 1885080
agaauacucuuggcaaaua

SEQ ID NO: 2314519 - RNA, 19 nt, Artificial Sequence
  Description of Artificial Sequence: Synthetic oligonucleotide
  Antisense strand to SEQ ID NO: 2314518
uauuugccaagaguauucu

SEQ ID NO: 2314520 - RNA, 19 nt, Artificial Sequence
  Description of Artificial Sequence: Synthetic oligonucleotide
  Sense strand starting at position 462 of SEQ ID NO: 1885080
ucuuucgucccagaaguga

SEQ ID NO: 2314521 - RNA, 19 nt, Artificial Sequence
  Description of Artificial Sequence: Synthetic oligonucleotide
  Antisense strand to SEQ ID NO: 2314520
ucacuucugggacgaaaga

SEQ ID NO: 2314522 - RNA, 19 nt, Artificial Sequence
  Description of Artificial Sequence: Synthetic oligonucleotide
  Sense strand starting at position 577 of SEQ ID NO: 1885080
ccugccauugucuauagga

SEQ ID NO: 2314523 - RNA, 19 nt, Artificial Sequence
  Description of Artificial Sequence: Synthetic oligonucleotide
  Antisense strand to SEQ ID NO: 2314522
uccuauagacaauggcagg

SEQ ID NO: 2314524 - RNA, 19 nt, Artificial Sequence
  Description of Artificial Sequence: Synthetic oligonucleotide
  Sense strand starting at position 579 of SEQ ID NO: 1885080
ugccauugucuauaggaac

SEQ ID NO: 2314525 - RNA, 19 nt, Artificial Sequence
  Description of Artificial Sequence: Synthetic oligonucleotide
  Antisense strand to SEQ ID NO: 2314524
guuccuauagacaauggca

SEQ ID NO: 2314526 - RNA, 19 nt, Artificial Sequence
  Description of Artificial Sequence: Synthetic oligonucleotide
  Sense strand starting at position 620 of SEQ ID NO: 1885080
ucuaccuugccugauagua

SEQ ID NO: 2314527 - RNA, 19 nt, Artificial Sequence
  Description of Artificial Sequence: Synthetic oligonucleotide
  Antisense strand to SEQ ID NO: 2314526
uacuaucaggcaagguaga

SEQ ID NO: 2314528 - RNA, 19 nt, Artificial Sequence
  Description of Artificial Sequence: Synthetic oligonucleotide
  Sense strand starting at position 769 of SEQ ID NO: 1885080
gaguauauccuuuguccag

SEQ ID NO: 2314529 - RNA, 19 nt, Artificial Sequence
  Description of Artificial Sequence: Synthetic oligonucleotide
  Antisense strand to SEQ ID NO: 2314528
cuggacaaaggauauacuc

SEQ ID NO: 2314530 - RNA, 19 nt, Artificial Sequence
  Description of Artificial Sequence: Synthetic oligonucleotide
  Sense strand starting at position 837 of SEQ ID NO: 1885080
uagagaucucccuggucuc

SEQ ID NO: 2314531 - RNA, 19 nt, Artificial Sequence
  Description of Artificial Sequence: Synthetic oligonucleotide
  Antisense strand to SEQ ID NO: 2314530
gagaccagggagaucucua

SEQ ID NO: 2314532 - RNA, 19 nt, Artificial Sequence
  Description of Artificial Sequence: Synthetic oligonucleotide
  Sense strand starting at position 938 of SEQ ID NO: 1885080
ggcugugauccuuacaaug

SEQ ID NO: 2314533 - RNA, 19 nt, Artificial Sequence
  Description of Artificial Sequence: Synthetic oligonucleotide
  Antisense strand to SEQ ID NO: 2314532
cauuguaaggaucacagcc

SEQ ID NO: 2314534 - RNA, 19 nt, Artificial Sequence
  Description of Artificial Sequence: Synthetic oligonucleotide
  Sense strand starting at position 1096 of SEQ ID NO: 1885080
guugaaaugcuccagauca

SEQ ID NO: 2314535 - RNA, 19 nt, Artificial Sequence
  Description of Artificial Sequence: Synthetic oligonucleotide
  Antisense strand to SEQ ID NO: 2314534
ugaucuggagcauuucaac

SEQ ID NO: 2314536 - RNA, 19 nt, Artificial Sequence
  Description of Artificial Sequence: Synthetic oligonucleotide
  Sense strand starting at position 1098 of SEQ ID NO: 1885080
ugaaaugcuccagaucacu

SEQ ID NO: 2314537 - RNA, 19 nt, Artificial Sequence
  Description of Artificial Sequence: Synthetic oligonucleotide
  Antisense strand to SEQ ID NO: 2314536
agugaucuggagcauuuca

SEQ ID NO: 2314538 - RNA, 19 nt, Artificial Sequence
  Description of Artificial Sequence: Synthetic oligonucleotide
  Sense strand starting at position 1250 of SEQ ID NO: 1885080
uugcuuuagacugguggga

SEQ ID NO: 2314539 - RNA, 19 nt, Artificial Sequence
  Description of Artificial Sequence: Synthetic oligonucleotide
  Antisense strand to SEQ ID NO: 2314538
ucccaccagucuaaagcaa

SEQ ID NO: 2314540 - RNA, 19 nt, Artificial Sequence
  Description of Artificial Sequence: Synthetic oligonucleotide
  Sense strand starting at position 1272 of SEQ ID NO: 1885080
gcagguaaaccugaggcaa

SEQ ID NO: 2314541 - RNA, 19 nt, Artificial Sequence
  Description of Artificial Sequence: Synthetic oligonucleotide
  Antisense strand to SEQ ID NO: 2314540
uugccucagguuuaccugc

SEQ ID NO: 2314542 - RNA, 19 nt, Artificial Sequence
  Description of Artificial Sequence: Synthetic oligonucleotide
  Sense strand starting at position 1515 of SEQ ID NO: 1885080
cugaaacaucacgggaagu

SEQ ID NO: 2314543 - RNA, 19 nt, Artificial Sequence
  Description of Artificial Sequence: Synthetic oligonucleotide
  Antisense strand to SEQ ID NO: 2314542
acuucccgugauguuucag

SEQ ID NO: 2314544 - RNA, 19 nt, Artificial Sequence
  Description of Artificial Sequence: Synthetic oligonucleotide
  Sense strand starting at position 1516 of SEQ ID NO: 1885080
ugaaacaucacgggaagua

SEQ ID NO: 2314545 - RNA, 19 nt, Artificial Sequence
  Description of Artificial Sequence: Synthetic oligonucleotide
  Antisense strand to SEQ ID NO: 2314544
uacuucccgugauguuuca

SEQ ID NO: 2314546 - RNA, 19 nt, Artificial Sequence
  Description of Artificial Sequence: Synthetic oligonucleotide
  Sense strand starting at position 1775 of SEQ ID NO: 1885080
cccacauaacggugacaaa

SEQ ID NO: 2314547 - RNA, 19 nt, Artificial Sequence
  Description of Artificial Sequence: Synthetic oligonucleotide
  Antisense strand to SEQ ID NO: 2314546
uuugucaccguuauguggg

SEQ ID NO: 2314548 - RNA, 19 nt, Artificial Sequence
  Description of Artificial Sequence: Synthetic oligonucleotide
  Sense strand starting at position 2194 of SEQ ID NO: 1885080
ccguguaacgaccaagagu

SEQ ID NO: 2314549 - RNA, 19 nt, Artificial Sequence
  Description of Artificial Sequence: Synthetic oligonucleotide
  Antisense strand to SEQ ID NO: 2314548
acucuuggucguuacacgg

SEQ ID NO: 2314550 - RNA, 19 nt, Artificial Sequence
  Description of Artificial Sequence: Synthetic oligonucleotide
  Sense strand starting at position 2286 of SEQ ID NO: 1885080
guaguaauaucucccuaug

SEQ ID NO: 2314551 - RNA, 19 nt, Artificial Sequence
  Description of Artificial Sequence: Synthetic oligonucleotide
  Antisense strand to SEQ ID NO: 2314550
cauagggagauauuacuac

SEQ ID NO: 2314552 - RNA, 19 nt, Artificial Sequence
  Description of Artificial Sequence: Synthetic oligonucleotide
  Sense strand starting at position 2289 of SEQ ID NO: 1885080
guaauaucucccuaugagu

SEQ ID NO: 2314553 - RNA, 19 nt, Artificial Sequence
  Description of Artificial Sequence: Synthetic oligonucleotide
  Antisense strand to SEQ ID NO: 2314552
acucauagggagauauuac

SEQ ID NO: 2314554 - RNA, 19 nt, Artificial Sequence
  Description of Artificial Sequence: Synthetic oligonucleotide
  Sense strand starting at position 2295 of SEQ ID NO: 1885080
ucucccuaugagugagauu

SEQ ID NO: 2314555 - RNA, 19 nt, Artificial Sequence
  Description of Artificial Sequence: Synthetic oligonucleotide
  Antisense strand to SEQ ID NO: 2314554
aaucucacucauagggaga

SEQ ID NO: 2314556 - RNA, 19 nt, Artificial Sequence
  Description of Artificial Sequence: Synthetic oligonucleotide
  Sense strand starting at position 2351 of SEQ ID NO: 1885080
ucaauaagugacgguuauu

SEQ ID NO: 2314557 - RNA, 19 nt, Artificial Sequence
  Description of Artificial Sequence: Synthetic oligonucleotide
  Antisense strand to SEQ ID NO: 2314556
aauaaccgucacuuauuga

SEQ ID NO: 2314558 - RNA, 19 nt, Artificial Sequence
  Description of Artificial Sequence: Synthetic oligonucleotide
  Sense strand starting at position 2360 of SEQ ID NO: 1885080
gacgguuauuugcucacaa

SEQ ID NO: 2314559 - RNA, 19 nt, Artificial Sequence
  Description of Artificial Sequence: Synthetic oligonucleotide
  Antisense strand to SEQ ID NO: 2314558
uugugagcaaauaaccguc

SEQ ID NO: 2314560 - RNA, 19 nt, Artificial Sequence
  Description of Artificial Sequence: Synthetic oligonucleotide
  Sense strand starting at position 2361 of SEQ ID NO: 1885080
acgguuauuugcucacaag

SEQ ID NO: 2314561 - RNA, 19 nt, Artificial Sequence
  Description of Artificial Sequence: Synthetic oligonucleotide
  Antisense strand to SEQ ID NO: 2314560
cuugugagcaaauaaccgu

SEQ ID NO: 2314562 - RNA, 19 nt, Artificial Sequence
  Description of Artificial Sequence: Synthetic oligonucleotide
  Sense strand starting at position 2497 of SEQ ID NO: 1885080
agugcuaugcgagcauauu

SEQ ID NO: 2314563 - RNA, 19 nt, Artificial Sequence
  Description of Artificial Sequence: Synthetic oligonucleotide
  Antisense strand to SEQ ID NO: 2314562
aauaugcucgcauagcacu

SEQ ID NO: 2314564 - RNA, 19 nt, Artificial Sequence
  Description of Artificial Sequence: Synthetic oligonucleotide
  Sense strand starting at position 2498 of SEQ ID NO: 1885080
gugcuaugcgagcauauuu

SEQ ID NO: 2314565 - RNA, 19 nt, Artificial Sequence
  Description of Artificial Sequence: Synthetic oligonucleotide
  Antisense strand to SEQ ID NO: 2314564
aaauaugcucgcauagcac

SEQ ID NO: 2314566 - RNA, 19 nt, Artificial Sequence
  Description of Artificial Sequence: Synthetic oligonucleotide
  Sense strand starting at position 2503 of SEQ ID NO: 1885080
augcgagcauauuuaccua

SEQ ID NO: 2314567 - RNA, 19 nt, Artificial Sequence
  Description of Artificial Sequence: Synthetic oligonucleotide
  Antisense strand to SEQ ID NO: 2314566
uagguaaauaugcucgcau

SEQ ID NO: 2314568 - RNA, 19 nt, Artificial Sequence
  Description of Artificial Sequence: Synthetic oligonucleotide
  Sense strand starting at position 2565 of SEQ ID NO: 1885080
gaggauguauuccuacuga

SEQ ID NO: 2314569 - RNA, 19 nt, Artificial Sequence
  Description of Artificial Sequence: Synthetic oligonucleotide
  Antisense strand to SEQ ID NO: 2314568
ucaguaggaauacauccuc

SEQ ID NO: 2314570 - RNA, 19 nt, Artificial Sequence
  Description of Artificial Sequence: Synthetic oligonucleotide
  Sense strand starting at position 2592 of SEQ ID NO: 1885080
gagcuaacagagugaaaua

SEQ ID NO: 2314571 - RNA, 19 nt, Artificial Sequence
  Description of Artificial Sequence: Synthetic oligonucleotide
  Antisense strand to SEQ ID NO: 2314570
uauuucacucuguuagcuc

SEQ ID NO: 2314572 - RNA, 19 nt, Artificial Sequence
  Description of Artificial Sequence: Synthetic oligonucleotide
  Sense strand starting at position 2759 of SEQ ID NO: 1885080
uuuaaagauuauguggcua

SEQ ID NO: 2314573 - RNA, 19 nt, Artificial Sequence
  Description of Artificial Sequence: Synthetic oligonucleotide
  Antisense strand to SEQ ID NO: 2314572
uagccacauaaucuuuaaa

SEQ ID NO: 2314574 - RNA, 19 nt, Artificial Sequence
  Description of Artificial Sequence: Synthetic oligonucleotide
  Sense strand starting at position 2764 of SEQ ID NO: 1885080
agauuauguggcuauccuu

SEQ ID NO: 2314575 - RNA, 19 nt, Artificial Sequence
  Description of Artificial Sequence: Synthetic oligonucleotide
  Antisense strand to SEQ ID NO: 2314574
aaggauagccacauaaucu

SEQ ID NO: 2314576 - RNA, 19 nt, Artificial Sequence
  Description of Artificial Sequence: Synthetic oligonucleotide
  Sense strand starting at position 3141 of SEQ ID NO: 1885080
auaacuuaugcguauacua

SEQ ID NO: 2314577 - RNA, 19 nt, Artificial Sequence
  Description of Artificial Sequence: Synthetic oligonucleotide
  Antisense strand to SEQ ID NO: 2314576
uaguauacgcauaaguuau

SEQ ID NO: 2314578 - RNA, 19 nt, Artificial Sequence
  Description of Artificial Sequence: Synthetic oligonucleotide
  Sense strand starting at position 3455 of SEQ ID NO: 1885080
guauauaucuguuucugaa

SEQ ID NO: 2314579 - RNA, 19 nt, Artificial Sequence
  Description of Artificial Sequence: Synthetic oligonucleotide
  Antisense strand to SEQ ID NO: 2314578
uucagaaacagauauauac

SEQ ID NO: 2314580 - RNA, 19 nt, Artificial Sequence
  Description of Artificial Sequence: Synthetic oligonucleotide
  Sense strand starting at position 3704 of SEQ ID NO: 1885080
ucacauagguuugcauaau

SEQ ID NO: 2314581 - RNA, 19 nt, Artificial Sequence
  Description of Artificial Sequence: Synthetic oligonucleotide
  Antisense strand to SEQ ID NO: 2314580
auuaugcaaaccuauguga

SEQ ID NO: 2314582 - RNA, 19 nt, Artificial Sequence
  Description of Artificial Sequence: Synthetic oligonucleotide
  Sense strand starting at position 3713 of SEQ ID NO: 1885080
uuugcauaauccuugggaa

SEQ ID NO: 2314583 - RNA, 19 nt, Artificial Sequence
  Description of Artificial Sequence: Synthetic oligonucleotide
  Antisense strand to SEQ ID NO: 2314582
uucccaaggauuaugcaaa

SEQ ID NO: 2314584 - RNA, 19 nt, Artificial Sequence
  Description of Artificial Sequence: Synthetic oligonucleotide
  Sense strand starting at position 3714 of SEQ ID NO: 1885080
uugcauaauccuugggaag

SEQ ID NO: 2314585 - RNA, 19 nt, Artificial Sequence
  Description of Artificial Sequence: Synthetic oligonucleotide
  Antisense strand to SEQ ID NO: 2314584
cuucccaaggauuaugcaa

SEQ ID NO: 2314586 - RNA, 19 nt, Artificial Sequence
  Description of Artificial Sequence: Synthetic oligonucleotide
  Sense strand starting at position 3715 of SEQ ID NO: 1885080
ugcauaauccuugggaagu

SEQ ID NO: 2314587 - RNA, 19 nt, Artificial Sequence
  Description of Artificial Sequence: Synthetic oligonucleotide
  Antisense strand to SEQ ID NO: 2314586
acuucccaaggauuaugca

SEQ ID NO: 2314588 - RNA, 19 nt, Artificial Sequence
  Description of Artificial Sequence: Synthetic oligonucleotide
  Sense strand starting at position 3726 of SEQ ID NO: 1885080
ugggaaguuuguuccuaga

SEQ ID NO: 2314589 - RNA, 19 nt, Artificial Sequence
  Description of Artificial Sequence: Synthetic oligonucleotide
  Antisense strand to SEQ ID NO: 2314588
ucuaggaacaaacuuccca

SEQ ID NO: 2314590 - RNA, 19 nt, Artificial Sequence
  Description of Artificial Sequence: Synthetic oligonucleotide
  Sense strand starting at position 3728 of SEQ ID NO: 1885080
ggaaguuuguuccuagaua

SEQ ID NO: 2314591 - RNA, 19 nt, Artificial Sequence
  Description of Artificial Sequence: Synthetic oligonucleotide
  Antisense strand to SEQ ID NO: 2314590
uaucuaggaacaaacuucc

SEQ ID NO: 2314592 - RNA, 19 nt, Artificial Sequence
  Description of Artificial Sequence: Synthetic oligonucleotide
  Sense strand starting at position 3769 of SEQ ID NO: 1885080
agauauuucuuauugcugu

SEQ ID NO: 2314593 - RNA, 19 nt, Artificial Sequence
  Description of Artificial Sequence: Synthetic oligonucleotide
  Antisense strand to SEQ ID NO: 2314592
acagcaauaagaaauaucu

SEQ ID NO: 2314594 - RNA, 19 nt, Artificial Sequence
  Description of Artificial Sequence: Synthetic oligonucleotide
  Sense strand starting at position 23 of SEQ ID NO: 1885081
ccuaucccucucuguguaa

SEQ ID NO: 2314595 - RNA, 19 nt, Artificial Sequence
  Description of Artificial Sequence: Synthetic oligonucleotide
  Antisense strand to SEQ ID NO: 2314594
uuacacagagagggauagg

SEQ ID NO: 2314596 - RNA, 19 nt, Artificial Sequence
  Description of Artificial Sequence: Synthetic oligonucleotide
  Sense strand starting at position 26 of SEQ ID NO: 1885081
aucccucucuguguaacau

SEQ ID NO: 2314597 - RNA, 19 nt, Artificial Sequence
  Description of Artificial Sequence: Synthetic oligonucleotide
  Antisense strand to SEQ ID NO: 2314596
auguuacacagagagggau

SEQ ID NO: 2314598 - RNA, 19 nt, Artificial Sequence
  Description of Artificial Sequence: Synthetic oligonucleotide
  Sense strand starting at position 27 of SEQ ID NO: 1885081
ucccucucuguguaacaua

SEQ ID NO: 2314599 - RNA, 19 nt, Artificial Sequence
  Description of Artificial Sequence: Synthetic oligonucleotide
  Antisense strand to SEQ ID NO: 2314598
uauguuacacagagaggga

SEQ ID NO: 2314600 - RNA, 19 nt, Artificial Sequence
  Description of Artificial Sequence: Synthetic oligonucleotide
  Sense strand starting at position 96 of SEQ ID NO: 1885081
aggaguucccaagggcaaa

SEQ ID NO: 2314601 - RNA, 19 nt, Artificial Sequence
  Description of Artificial Sequence: Synthetic oligonucleotide
  Antisense strand to SEQ ID NO: 2314600
uuugcccuugggaacuccu

SEQ ID NO: 2314602 - RNA, 19 nt, Artificial Sequence
  Description of Artificial Sequence: Synthetic oligonucleotide
  Sense strand starting at position 180 of SEQ ID NO: 1885081
uuuaaacuaugcccugaga

SEQ ID NO: 2314603 - RNA, 19 nt, Artificial Sequence
  Description of Artificial Sequence: Synthetic oligonucleotide
  Antisense strand to SEQ ID NO: 2314602
ucucagggcauaguuuaaa

SEQ ID NO: 2314604 - RNA, 19 nt, Artificial Sequence
  Description of Artificial Sequence: Synthetic oligonucleotide
  Sense strand starting at position 273 of SEQ ID NO: 1885081
agcuaaugugcugaauuaa

SEQ ID NO: 2314605 - RNA, 19 nt, Artificial Sequence
  Description of Artificial Sequence: Synthetic oligonucleotide
  Antisense strand to SEQ ID NO: 2314604
uuaauucagcacauuagcu

SEQ ID NO: 2314606 - RNA, 19 nt, Artificial Sequence
  Description of Artificial Sequence: Synthetic oligonucleotide
  Sense strand starting at position 325 of SEQ ID NO: 1885081
gcauuacccugauuaaagg

SEQ ID NO: 2314607 - RNA, 19 nt, Artificial Sequence
  Description of Artificial Sequence: Synthetic oligonucleotide
  Antisense strand to SEQ ID NO: 2314606
ccuuuaaucaggguaaugc

SEQ ID NO: 2314608 - RNA, 19 nt, Artificial Sequence
  Description of Artificial Sequence: Synthetic oligonucleotide
  Sense strand starting at position 353 of SEQ ID NO: 1885081
ugggauugaccuugugaag

SEQ ID NO: 2314609 - RNA, 19 nt, Artificial Sequence
  Description of Artificial Sequence: Synthetic oligonucleotide
  Antisense strand to SEQ ID NO: 2314608
cuucacaaggucaauccca

SEQ ID NO: 2314610 - RNA, 19 nt, Artificial Sequence
  Description of Artificial Sequence: Synthetic oligonucleotide
  Sense strand starting at position 356 of SEQ ID NO: 1885081
gauugaccuugugaagaaa

SEQ ID NO: 2314611 - RNA, 19 nt, Artificial Sequence
  Description of Artificial Sequence: Synthetic oligonucleotide
  Antisense strand to SEQ ID NO: 2314610
uuucuucacaaggucaauc

SEQ ID NO: 2314612 - RNA, 19 nt, Artificial Sequence
  Description of Artificial Sequence: Synthetic oligonucleotide
  Sense strand starting at position 491 of SEQ ID NO: 1885081
cuuacaucuggcuguggaa

SEQ ID NO: 2314613 - RNA, 19 nt, Artificial Sequence
  Description of Artificial Sequence: Synthetic oligonucleotide
  Antisense strand to SEQ ID NO: 2314612
uuccacagccagauguaag

SEQ ID NO: 2314614 - RNA, 19 nt, Artificial Sequence
  Description of Artificial Sequence: Synthetic oligonucleotide
  Sense strand starting at position 622 of SEQ ID NO: 1885081
ggaagccagaguugaacua

SEQ ID NO: 2314615 - RNA, 19 nt, Artificial Sequence
  Description of Artificial Sequence: Synthetic oligonucleotide
  Antisense strand to SEQ ID NO: 2314614
uaguucaacucuggcuucc

SEQ ID NO: 2314616 - RNA, 19 nt, Artificial Sequence
  Description of Artificial Sequence: Synthetic oligonucleotide
  Sense strand starting at position 811 of SEQ ID NO: 1885081
aaaugugggaagugagauu

SEQ ID NO: 2314617 - RNA, 19 nt, Artificial Sequence
  Description of Artificial Sequence: Synthetic oligonucleotide
  Antisense strand to SEQ ID NO: 2314616
aaucucacuucccacauuu

SEQ ID NO: 2314618 - RNA, 19 nt, Artificial Sequence
  Description of Artificial Sequence: Synthetic oligonucleotide
  Sense strand starting at position 828 of SEQ ID NO: 1885081
uuagcaaugccucgacuga

SEQ ID NO: 2314619 - RNA, 19 nt, Artificial Sequence
  Description of Artificial Sequence: Synthetic oligonucleotide
  Antisense strand to SEQ ID NO: 2314618
ucagucgaggcauugcuaa

SEQ ID NO: 2314620 - RNA, 19 nt, Artificial Sequence
  Description of Artificial Sequence: Synthetic oligonucleotide
  Sense strand starting at position 875 of SEQ ID NO: 1885081
aagauagccuaggaggaau

SEQ ID NO: 2314621 - RNA, 19 nt, Artificial Sequence
  Description of Artificial Sequence: Synthetic oligonucleotide
  Antisense strand to SEQ ID NO: 2314620
auuccuccuaggcuaucuu

SEQ ID NO: 2314622 - RNA, 19 nt, Artificial Sequence
  Description of Artificial Sequence: Synthetic oligonucleotide
  Sense strand starting at position 941 of SEQ ID NO: 1885081
uguggaagaucucuaacug

SEQ ID NO: 2314623 - RNA, 19 nt, Artificial Sequence
  Description of Artificial Sequence: Synthetic oligonucleotide
  Antisense strand to SEQ ID NO: 2314622
caguuagagaucuuccaca

SEQ ID NO: 2314624 - RNA, 19 nt, Artificial Sequence
  Description of Artificial Sequence: Synthetic oligonucleotide
  Sense strand starting at position 1067 of SEQ ID NO: 1885081
gggagcugaucacagguaa

SEQ ID NO: 2314625 - RNA, 19 nt, Artificial Sequence
  Description of Artificial Sequence: Synthetic oligonucleotide
  Antisense strand to SEQ ID NO: 2314624
uuaccugugaucagcuccc

SEQ ID NO: 2314626 - RNA, 19 nt, Artificial Sequence
  Description of Artificial Sequence: Synthetic oligonucleotide
  Sense strand starting at position 1264 of SEQ ID NO: 1885081
gaaggaguggcugguuaac

SEQ ID NO: 2314627 - RNA, 19 nt, Artificial Sequence
  Description of Artificial Sequence: Synthetic oligonucleotide
  Antisense strand to SEQ ID NO: 2314626
guuaaccagccacuccuuc

SEQ ID NO: 2314628 - RNA, 19 nt, Artificial Sequence
  Description of Artificial Sequence: Synthetic oligonucleotide
  Sense strand starting at position 1286 of SEQ ID NO: 1885081
augugaaguuucucacauc

SEQ ID NO: 2314629 - RNA, 19 nt, Artificial Sequence
  Description of Artificial Sequence: Synthetic oligonucleotide
  Antisense strand to SEQ ID NO: 2314628
gaugugagaaacuucacau

SEQ ID NO: 2314630 - RNA, 19 nt, Artificial Sequence
  Description of Artificial Sequence: Synthetic oligonucleotide
  Sense strand starting at position 2032 of SEQ ID NO: 1885081
aucuguggacauuguauau

SEQ ID NO: 2314631 - RNA, 19 nt, Artificial Sequence
  Description of Artificial Sequence: Synthetic oligonucleotide
  Antisense strand to SEQ ID NO: 2314630
auauacaauguccacagau

SEQ ID NO: 2314632 - RNA, 19 nt, Artificial Sequence
  Description of Artificial Sequence: Synthetic oligonucleotide
  Sense strand starting at position 2080 of SEQ ID NO: 1885081
cagggccacucauagaaga

SEQ ID NO: 2314633 - RNA, 19 nt, Artificial Sequence
  Description of Artificial Sequence: Synthetic oligonucleotide
  Antisense strand to SEQ ID NO: 2314632
ucuucuaugaguggcccug

SEQ ID NO: 2314634 - RNA, 19 nt, Artificial Sequence
  Description of Artificial Sequence: Synthetic oligonucleotide
  Sense strand starting at position 2114 of SEQ ID NO: 1885081
gacgguggucaucaacuaa

SEQ ID NO: 2314635 - RNA, 19 nt, Artificial Sequence
  Description of Artificial Sequence: Synthetic oligonucleotide
  Antisense strand to SEQ ID NO: 2314634
uuaguugaugaccaccguc

SEQ ID NO: 2314636 - RNA, 19 nt, Artificial Sequence
  Description of Artificial Sequence: Synthetic oligonucleotide
  Sense strand starting at position 2313 of SEQ ID NO: 1885081
uggaguuccugggaaagaa

SEQ ID NO: 2314637 - RNA, 19 nt, Artificial Sequence
  Description of Artificial Sequence: Synthetic oligonucleotide
  Antisense strand to SEQ ID NO: 2314636
uucuuucccaggaacucca

SEQ ID NO: 2314638 - RNA, 19 nt, Artificial Sequence
  Description of Artificial Sequence: Synthetic oligonucleotide
  Sense strand starting at position 2409 of SEQ ID NO: 1885081
cugagagcccuuugaacaa

SEQ ID NO: 2314639 - RNA, 19 nt, Artificial Sequence
  Description of Artificial Sequence: Synthetic oligonucleotide
  Antisense strand to SEQ ID NO: 2314638
uuguucaaagggcucucag

SEQ ID NO: 2314640 - RNA, 19 nt, Artificial Sequence
  Description of Artificial Sequence: Synthetic oligonucleotide
  Sense strand starting at position 2469 of SEQ ID NO: 1885081
caagguuaacacugugaca

SEQ ID NO: 2314641 - RNA, 19 nt, Artificial Sequence
  Description of Artificial Sequence: Synthetic oligonucleotide
  Antisense strand to SEQ ID NO: 2314640
ugucacaguguuaaccuug

SEQ ID NO: 2314642 - RNA, 19 nt, Artificial Sequence
  Description of Artificial Sequence: Synthetic oligonucleotide
  Sense strand starting at position 2471 of SEQ ID NO: 1885081
agguuaacacugugacaua

SEQ ID NO: 2314643 - RNA, 19 nt, Artificial Sequence
  Description of Artificial Sequence: Synthetic oligonucleotide
  Antisense strand to SEQ ID NO: 2314642
uaugucacaguguuaaccu

SEQ ID NO: 2314644 - RNA, 19 nt, Artificial Sequence
  Description of Artificial Sequence: Synthetic oligonucleotide
  Sense strand starting at position 2596 of SEQ ID NO: 1885081
aguuuaugcuugcccucua

SEQ ID NO: 2314645 - RNA, 19 nt, Artificial Sequence
  Description of Artificial Sequence: Synthetic oligonucleotide
  Antisense strand to SEQ ID NO: 2314644
uagagggcaagcauaaacu

SEQ ID NO: 2314646 - RNA, 19 nt, Artificial Sequence
  Description of Artificial Sequence: Synthetic oligonucleotide
  Sense strand starting at position 2597 of SEQ ID NO: 1885081
guuuaugcuugcccucuaa

SEQ ID NO: 2314647 - RNA, 19 nt, Artificial Sequence
  Description of Artificial Sequence: Synthetic oligonucleotide
  Antisense strand to SEQ ID NO: 2314646
uuagagggcaagcauaaac

SEQ ID NO: 2314648 - RNA, 19 nt, Artificial Sequence
  Description of Artificial Sequence: Synthetic oligonucleotide
  Sense strand starting at position 2752 of SEQ ID NO: 1885081
ccugaaucccaaugcaguu

SEQ ID NO: 2314649 - RNA, 19 nt, Artificial Sequence
  Description of Artificial Sequence: Synthetic oligonucleotide
  Antisense strand to SEQ ID NO: 2314648
aacugcauugggauucagg

SEQ ID NO: 2314650 - RNA, 19 nt, Artificial Sequence
  Description of Artificial Sequence: Synthetic oligonucleotide
  Sense strand starting at position 2764 of SEQ ID NO: 1885081
ugcaguugucccuaggugu

SEQ ID NO: 2314651 - RNA, 19 nt, Artificial Sequence
  Description of Artificial Sequence: Synthetic oligonucleotide
  Antisense strand to SEQ ID NO: 2314650
acaccuagggacaacugca

SEQ ID NO: 2314652 - RNA, 19 nt, Artificial Sequence
  Description of Artificial Sequence: Synthetic oligonucleotide
  Sense strand starting at position 2786 of SEQ ID NO: 1885081
uacguuauuggugggagau

SEQ ID NO: 2314653 - RNA, 19 nt, Artificial Sequence
  Description of Artificial Sequence: Synthetic oligonucleotide
  Antisense strand to SEQ ID NO: 2314652
aucucccaccaauaacgua

SEQ ID NO: 2314654 - RNA, 19 nt, Artificial Sequence
  Description of Artificial Sequence: Synthetic oligonucleotide
  Sense strand starting at position 2787 of SEQ ID NO: 1885081
acguuauuggugggagauu

SEQ ID NO: 2314655 - RNA, 19 nt, Artificial Sequence
  Description of Artificial Sequence: Synthetic oligonucleotide
  Antisense strand to SEQ ID NO: 2314654
aaucucccaccaauaacgu

SEQ ID NO: 2314656 - RNA, 19 nt, Artificial Sequence
  Description of Artificial Sequence: Synthetic oligonucleotide
  Sense strand starting at position 2799 of SEQ ID NO: 1885081
ggagauuaguccuaggauu

SEQ ID NO: 2314657 - RNA, 19 nt, Artificial Sequence
  Description of Artificial Sequence: Synthetic oligonucleotide
  Antisense strand to SEQ ID NO: 2314656
aauccuaggacuaaucucc

SEQ ID NO: 2314658 - RNA, 19 nt, Artificial Sequence
  Description of Artificial Sequence: Synthetic oligonucleotide
  Sense strand starting at position 2968 of SEQ ID NO: 1885081
cuuguuauacucuauuguu

SEQ ID NO: 2314659 - RNA, 19 nt, Artificial Sequence
  Description of Artificial Sequence: Synthetic oligonucleotide
  Antisense strand to SEQ ID NO: 2314658
aacaauagaguauaacaag

SEQ ID NO: 2314660 - RNA, 19 nt, Artificial Sequence
  Description of Artificial Sequence: Synthetic oligonucleotide
  Sense strand starting at position 3192 of SEQ ID NO: 1885081
cagaauaguccacgugcca

SEQ ID NO: 2314661 - RNA, 19 nt, Artificial Sequence
  Description of Artificial Sequence: Synthetic oligonucleotide
  Antisense strand to SEQ ID NO: 2314660
uggcacguggacuauucug

SEQ ID NO: 2314662 - RNA, 19 nt, Artificial Sequence
  Description of Artificial Sequence: Synthetic oligonucleotide
  Sense strand starting at position 3217 of SEQ ID NO: 1885081
aagaguuuagguugaugag

SEQ ID NO: 2314663 - RNA, 19 nt, Artificial Sequence
  Description of Artificial Sequence: Synthetic oligonucleotide
  Antisense strand to SEQ ID NO: 2314662
cucaucaaccuaaacucuu

SEQ ID NO: 2314664 - RNA, 19 nt, Artificial Sequence
  Description of Artificial Sequence: Synthetic oligonucleotide
  Sense strand starting at position 3265 of SEQ ID NO: 1885081
ugguguucuuacucuaaca

SEQ ID NO: 2314665 - RNA, 19 nt, Artificial Sequence
  Description of Artificial Sequence: Synthetic oligonucleotide
  Antisense strand to SEQ ID NO: 2314664
uguuagaguaagaacacca

SEQ ID NO: 2314666 - RNA, 19 nt, Artificial Sequence
  Description of Artificial Sequence: Synthetic oligonucleotide
  Sense strand starting at position 3362 of SEQ ID NO: 1885081
ucaguuaugccaugugggu

SEQ ID NO: 2314667 - RNA, 19 nt, Artificial Sequence
  Description of Artificial Sequence: Synthetic oligonucleotide
  Antisense strand to SEQ ID NO: 2314666
acccacauggcauaacuga

SEQ ID NO: 2314668 - RNA, 19 nt, Artificial Sequence
  Description of Artificial Sequence: Synthetic oligonucleotide
  Sense strand starting at position 3634 of SEQ ID NO: 1885081
uagagacaguaagucaauu

SEQ ID NO: 2314669 - RNA, 19 nt, Artificial Sequence
  Description of Artificial Sequence: Synthetic oligonucleotide
  Antisense strand to SEQ ID NO: 2314668
aauugacuuacugucucua

SEQ ID NO: 2314670 - RNA, 19 nt, Artificial Sequence
  Description of Artificial Sequence: Synthetic oligonucleotide
  Sense strand starting at position 3683 of SEQ ID NO: 1885081
uaaguuaccucuuccgagu

SEQ ID NO: 2314671 - RNA, 19 nt, Artificial Sequence
  Description of Artificial Sequence: Synthetic oligonucleotide
  Antisense strand to SEQ ID NO: 2314670
acucggaagagguaacuua

SEQ ID NO: 2314672 - RNA, 19 nt, Artificial Sequence
  Description of Artificial Sequence: Synthetic oligonucleotide
  Sense strand starting at position 3779 of SEQ ID NO: 1885081
ucaaacuauggccagagua

SEQ ID NO: 2314673 - RNA, 19 nt, Artificial Sequence
  Description of Artificial Sequence: Synthetic oligonucleotide
  Antisense strand to SEQ ID NO: 2314672
uacucuggccauaguuuga

SEQ ID NO: 2314674 - RNA, 19 nt, Artificial Sequence
  Description of Artificial Sequence: Synthetic oligonucleotide
  Sense strand starting at position 16 of SEQ ID NO: 1885082
agguucuuuggcugggaua

SEQ ID NO: 2314675 - RNA, 19 nt, Artificial Sequence
  Description of Artificial Sequence: Synthetic oligonucleotide
  Antisense strand to SEQ ID NO: 2314674
uaucccagccaaagaaccu

SEQ ID NO: 2314676 - RNA, 19 nt, Artificial Sequence
  Description of Artificial Sequence: Synthetic oligonucleotide
  Sense strand starting at position 17 of SEQ ID NO: 1885082
gguucuuuggcugggauac

SEQ ID NO: 2314677 - RNA, 19 nt, Artificial Sequence
  Description of Artificial Sequence: Synthetic oligonucleotide
  Antisense strand to SEQ ID NO: 2314676
guaucccagccaaagaacc

SEQ ID NO: 2314678 - RNA, 19 nt, Artificial Sequence
  Description of Artificial Sequence: Synthetic oligonucleotide
  Sense strand starting at position 18 of SEQ ID NO: 1885082
guucuuuggcugggauaca

SEQ ID NO: 2314679 - RNA, 19 nt, Artificial Sequence
  Description of Artificial Sequence: Synthetic oligonucleotide
  Antisense strand to SEQ ID NO: 2314678
uguaucccagccaaagaac

SEQ ID NO: 2314680 - RNA, 19 nt, Artificial Sequence
  Description of Artificial Sequence: Synthetic oligonucleotide
  Sense strand starting at position 176 of SEQ ID NO: 1885082
gcaacauauugagaccaaa

SEQ ID NO: 2314681 - RNA, 19 nt, Artificial Sequence
  Description of Artificial Sequence: Synthetic oligonucleotide
  Antisense strand to SEQ ID NO: 2314680
uuuggucucaauauguugc

SEQ ID NO: 2314682 - RNA, 19 nt, Artificial Sequence
  Description of Artificial Sequence: Synthetic oligonucleotide
  Sense strand starting at position 289 of SEQ ID NO: 1885082
gcaggacucuuccugauac

SEQ ID NO: 2314683 - RNA, 19 nt, Artificial Sequence
  Description of Artificial Sequence: Synthetic oligonucleotide
  Antisense strand to SEQ ID NO: 2314682
guaucaggaagaguccugc

SEQ ID NO: 2314684 - RNA, 19 nt, Artificial Sequence
  Description of Artificial Sequence: Synthetic oligonucleotide
  Sense strand starting at position 388 of SEQ ID NO: 1885082
gucugcaguugcucagaau

SEQ ID NO: 2314685 - RNA, 19 nt, Artificial Sequence
  Description of Artificial Sequence: Synthetic oligonucleotide
  Antisense strand to SEQ ID NO: 2314684
auucugagcaacugcagac

SEQ ID NO: 2314686 - RNA, 19 nt, Artificial Sequence
  Description of Artificial Sequence: Synthetic oligonucleotide
  Sense strand starting at position 389 of SEQ ID NO: 1885082
ucugcaguugcucagaaua

SEQ ID NO: 2314687 - RNA, 19 nt, Artificial Sequence
  Description of Artificial Sequence: Synthetic oligonucleotide
  Antisense strand to SEQ ID NO: 2314686
uauucugagcaacugcaga

SEQ ID NO: 2314688 - RNA, 19 nt, Artificial Sequence
  Description of Artificial Sequence: Synthetic oligonucleotide
  Sense strand starting at position 400 of SEQ ID NO: 1885082
ucagaauaaucagcucgaa

SEQ ID NO: 2314689 - RNA, 19 nt, Artificial Sequence
  Description of Artificial Sequence: Synthetic oligonucleotide
  Antisense strand to SEQ ID NO: 2314688
uucgagcugauuauucuga

SEQ ID NO: 2314690 - RNA, 19 nt, Artificial Sequence
  Description of Artificial Sequence: Synthetic oligonucleotide
  Sense strand starting at position 413 of SEQ ID NO: 1885082
cucgaaauaugccaaauaa

SEQ ID NO: 2314691 - RNA, 19 nt, Artificial Sequence
  Description of Artificial Sequence: Synthetic oligonucleotide
  Antisense strand to SEQ ID NO: 2314690
uuauuuggcauauuucgag

SEQ ID NO: 2314692 - RNA, 19 nt, Artificial Sequence
  Description of Artificial Sequence: Synthetic oligonucleotide
  Sense strand starting at position 599 of SEQ ID NO: 1885082
gguauauucugaucuucug

SEQ ID NO: 2314693 - RNA, 19 nt, Artificial Sequence
  Description of Artificial Sequence: Synthetic oligonucleotide
  Antisense strand to SEQ ID NO: 2314692
cagaagaucagaauauacc

SEQ ID NO: 2314694 - RNA, 19 nt, Artificial Sequence
  Description of Artificial Sequence: Synthetic oligonucleotide
  Sense strand starting at position 605 of SEQ ID NO: 1885082
uucugaucuucuguaguca

SEQ ID NO: 2314695 - RNA, 19 nt, Artificial Sequence
  Description of Artificial Sequence: Synthetic oligonucleotide
  Antisense strand to SEQ ID NO: 2314694
ugacuacagaagaucagaa

SEQ ID NO: 2314696 - RNA, 19 nt, Artificial Sequence
  Description of Artificial Sequence: Synthetic oligonucleotide
  Sense strand starting at position 606 of SEQ ID NO: 1885082
ucugaucuucuguagucau

SEQ ID NO: 2314697 - RNA, 19 nt, Artificial Sequence
  Description of Artificial Sequence: Synthetic oligonucleotide
  Antisense strand to SEQ ID NO: 2314696
augacuacagaagaucaga

SEQ ID NO: 2314698 - RNA, 19 nt, Artificial Sequence
  Description of Artificial Sequence: Synthetic oligonucleotide
  Sense strand starting at position 609 of SEQ ID NO: 1885082
gaucuucuguagucaugca

SEQ ID NO: 2314699 - RNA, 19 nt, Artificial Sequence
  Description of Artificial Sequence: Synthetic oligonucleotide
  Antisense strand to SEQ ID NO: 2314698
ugcaugacuacagaagauc

SEQ ID NO: 2314700 - RNA, 19 nt, Artificial Sequence
  Description of Artificial Sequence: Synthetic oligonucleotide
  Sense strand starting at position 632 of SEQ ID NO: 1885082
gaccuucuguagucaugca

SEQ ID NO: 2314701 - RNA, 19 nt, Artificial Sequence
  Description of Artificial Sequence: Synthetic oligonucleotide
  Antisense strand to SEQ ID NO: 2314700
ugcaugacuacagaagguc

SEQ ID NO: 2314702 - RNA, 19 nt, Artificial Sequence
  Description of Artificial Sequence: Synthetic oligonucleotide
  Sense strand starting at position 703 of SEQ ID NO: 1885082
ugguauuuguagggaaagu

SEQ ID NO: 2314703 - RNA, 19 nt, Artificial Sequence
  Description of Artificial Sequence: Synthetic oligonucleotide
  Antisense strand to SEQ ID NO: 2314702
acuuucccuacaaauacca

SEQ ID NO: 2314704 - RNA, 19 nt, Artificial Sequence
  Description of Artificial Sequence: Synthetic oligonucleotide
  Sense strand starting at position 712 of SEQ ID NO: 1885082
uagggaaagugauauuccu

SEQ ID NO: 2314705 - RNA, 19 nt, Artificial Sequence
  Description of Artificial Sequence: Synthetic oligonucleotide
  Antisense strand to SEQ ID NO: 2314704
aggaauaucacuuucccua

SEQ ID NO: 2314706 - RNA, 19 nt, Artificial Sequence
  Description of Artificial Sequence: Synthetic oligonucleotide
  Sense strand starting at position 1182 of SEQ ID NO: 1885082
agcagaaaguucuuaucuu

SEQ ID NO: 2314707 - RNA, 19 nt, Artificial Sequence
  Description of Artificial Sequence: Synthetic oligonucleotide
  Antisense strand to SEQ ID NO: 2314706
aagauaagaacuuucugcu

SEQ ID NO: 2314708 - RNA, 19 nt, Artificial Sequence
  Description of Artificial Sequence: Synthetic oligonucleotide
  Sense strand starting at position 1639 of SEQ ID NO: 1885082
cgguuuguaaacuguaaca

SEQ ID NO: 2314709 - RNA, 19 nt, Artificial Sequence
  Description of Artificial Sequence: Synthetic oligonucleotide
  Antisense strand to SEQ ID NO: 2314708
uguuacaguuuacaaaccg

SEQ ID NO: 2314710 - RNA, 19 nt, Artificial Sequence
  Description of Artificial Sequence: Synthetic oligonucleotide
  Sense strand starting at position 2398 of SEQ ID NO: 1885082
acaacuggugcuuggcaau

SEQ ID NO: 2314711 - RNA, 19 nt, Artificial Sequence
  Description of Artificial Sequence: Synthetic oligonucleotide
  Antisense strand to SEQ ID NO: 2314710
auugccaagcaccaguugu

SEQ ID NO: 2314712 - RNA, 19 nt, Artificial Sequence
  Description of Artificial Sequence: Synthetic oligonucleotide
  Sense strand starting at position 2404 of SEQ ID NO: 1885082
ggugcuuggcaauaacaaa

SEQ ID NO: 2314713 - RNA, 19 nt, Artificial Sequence
  Description of Artificial Sequence: Synthetic oligonucleotide
  Antisense strand to SEQ ID NO: 2314712
uuuguuauugccaagcacc

SEQ ID NO: 2314714 - RNA, 19 nt, Artificial Sequence
  Description of Artificial Sequence: Synthetic oligonucleotide
  Sense strand starting at position 2480 of SEQ ID NO: 1885082
ccaauuuaguugugaacug

SEQ ID NO: 2314715 - RNA, 19 nt, Artificial Sequence
  Description of Artificial Sequence: Synthetic oligonucleotide
  Antisense strand to SEQ ID NO: 2314714
caguucacaacuaaauugg

SEQ ID NO: 2314716 - RNA, 19 nt, Artificial Sequence
  Description of Artificial Sequence: Synthetic oligonucleotide
  Sense strand starting at position 2485 of SEQ ID NO: 1885082
uuaguugugaacuggagaa

SEQ ID NO: 2314717 - RNA, 19 nt, Artificial Sequence
  Description of Artificial Sequence: Synthetic oligonucleotide
  Antisense strand to SEQ ID NO: 2314716
uucuccaguucacaacuaa

SEQ ID NO: 2314718 - RNA, 19 nt, Artificial Sequence
  Description of Artificial Sequence: Synthetic oligonucleotide
  Sense strand starting at position 2512 of SEQ ID NO: 1885082
aggcaucuguugucugcaa

SEQ ID NO: 2314719 - RNA, 19 nt, Artificial Sequence
  Description of Artificial Sequence: Synthetic oligonucleotide
  Antisense strand to SEQ ID NO: 2314718
uugcagacaacagaugccu

SEQ ID NO: 2314720 - RNA, 19 nt, Artificial Sequence
  Description of Artificial Sequence: Synthetic oligonucleotide
  Sense strand starting at position 2513 of SEQ ID NO: 1885082
ggcaucuguugucugcaau

SEQ ID NO: 2314721 - RNA, 19 nt, Artificial Sequence
  Description of Artificial Sequence: Synthetic oligonucleotide
  Antisense strand to SEQ ID NO: 2314720
auugcagacaacagaugcc

SEQ ID NO: 2314722 - RNA, 19 nt, Artificial Sequence
  Description of Artificial Sequence: Synthetic oligonucleotide
  Sense strand starting at position 2516 of SEQ ID NO: 1885082
aucuguugucugcaaucuu

SEQ ID NO: 2314723 - RNA, 19 nt, Artificial Sequence
  Description of Artificial Sequence: Synthetic oligonucleotide
  Antisense strand to SEQ ID NO: 2314722
aagauugcagacaacagau

SEQ ID NO: 2314724 - RNA, 19 nt, Artificial Sequence
  Description of Artificial Sequence: Synthetic oligonucleotide
  Sense strand starting at position 2601 of SEQ ID NO: 1885082
ggaugaccuugggcagauu

SEQ ID NO: 2314725 - RNA, 19 nt, Artificial Sequence
  Description of Artificial Sequence: Synthetic oligonucleotide
  Antisense strand to SEQ ID NO: 2314724
aaucugcccaaggucaucc

SEQ ID NO: 2314726 - RNA, 19 nt, Artificial Sequence
  Description of Artificial Sequence: Synthetic oligonucleotide
  Sense strand starting at position 2610 of SEQ ID NO: 1885082
ugggcagauuacucaaucu

SEQ ID NO: 2314727 - RNA, 19 nt, Artificial Sequence
  Description of Artificial Sequence: Synthetic oligonucleotide
  Antisense strand to SEQ ID NO: 2314726
agauugaguaaucugccca

SEQ ID NO: 2314728 - RNA, 19 nt, Artificial Sequence
  Description of Artificial Sequence: Synthetic oligonucleotide
  Sense strand starting at position 2667 of SEQ ID NO: 1885082
uagaauauguaguccaggu

SEQ ID NO: 2314729 - RNA, 19 nt, Artificial Sequence
  Description of Artificial Sequence: Synthetic oligonucleotide
  Antisense strand to SEQ ID NO: 2314728
accuggacuacauauucua

SEQ ID NO: 2314730 - RNA, 19 nt, Artificial Sequence
  Description of Artificial Sequence: Synthetic oligonucleotide
  Sense strand starting at position 2906 of SEQ ID NO: 1885082
ugauuucgccacugaauuc

SEQ ID NO: 2314731 - RNA, 19 nt, Artificial Sequence
  Description of Artificial Sequence: Synthetic oligonucleotide
  Antisense strand to SEQ ID NO: 2314730
gaauucaguggcgaaauca

SEQ ID NO: 2314732 - RNA, 19 nt, Artificial Sequence
  Description of Artificial Sequence: Synthetic oligonucleotide
  Sense strand starting at position 3486 of SEQ ID NO: 1885082
uuuggaggguaugcuaaau

SEQ ID NO: 2314733 - RNA, 19 nt, Artificial Sequence
  Description of Artificial Sequence: Synthetic oligonucleotide
  Antisense strand to SEQ ID NO: 2314732
auuuagcauacccuccaaa

SEQ ID NO: 2314734 - RNA, 19 nt, Artificial Sequence
  Description of Artificial Sequence: Synthetic oligonucleotide
  Sense strand starting at position 3601 of SEQ ID NO: 1885082
uaagguggcucagaauaac

SEQ ID NO: 2314735 - RNA, 19 nt, Artificial Sequence
  Description of Artificial Sequence: Synthetic oligonucleotide
  Antisense strand to SEQ ID NO: 2314734
guuauucugagccaccuua

SEQ ID NO: 2314736 - RNA, 19 nt, Artificial Sequence
  Description of Artificial Sequence: Synthetic oligonucleotide
  Sense strand starting at position 3625 of SEQ ID NO: 1885082
cagcgaacaucuguagagu

SEQ ID NO: 2314737 - RNA, 19 nt, Artificial Sequence
  Description of Artificial Sequence: Synthetic oligonucleotide
  Antisense strand to SEQ ID NO: 2314736
acucuacagauguucgcug

SEQ ID NO: 2314738 - RNA, 19 nt, Artificial Sequence
  Description of Artificial Sequence: Synthetic oligonucleotide
  Sense strand starting at position 3626 of SEQ ID NO: 1885082
agcgaacaucuguagaguu

SEQ ID NO: 2314739 - RNA, 19 nt, Artificial Sequence
  Description of Artificial Sequence: Synthetic oligonucleotide
  Antisense strand to SEQ ID NO: 2314738
aacucuacagauguucgcu

SEQ ID NO: 2314740 - RNA, 19 nt, Artificial Sequence
  Description of Artificial Sequence: Synthetic oligonucleotide
  Sense strand starting at position 3628 of SEQ ID NO: 1885082
cgaacaucuguagaguuua

SEQ ID NO: 2314741 - RNA, 19 nt, Artificial Sequence
  Description of Artificial Sequence: Synthetic oligonucleotide
  Antisense strand to SEQ ID NO: 2314740
uaaacucuacagauguucg

SEQ ID NO: 2314742 - RNA, 19 nt, Artificial Sequence
  Description of Artificial Sequence: Synthetic oligonucleotide
  Sense strand starting at position 3692 of SEQ ID NO: 1885082
ugcagagcuguugacuuau

SEQ ID NO: 2314743 - RNA, 19 nt, Artificial Sequence
  Description of Artificial Sequence: Synthetic oligonucleotide
  Antisense strand to SEQ ID NO: 2314742
auaagucaacagcucugca

SEQ ID NO: 2314744 - RNA, 19 nt, Artificial Sequence
  Description of Artificial Sequence: Synthetic oligonucleotide
  Sense strand starting at position 3834 of SEQ ID NO: 1885082
gugagaaguuagucggugu

SEQ ID NO: 2314745 - RNA, 19 nt, Artificial Sequence
  Description of Artificial Sequence: Synthetic oligonucleotide
  Antisense strand to SEQ ID NO: 2314744
acaccgacuaacuucucac

SEQ ID NO: 2314746 - RNA, 19 nt, Artificial Sequence
  Description of Artificial Sequence: Synthetic oligonucleotide
  Sense strand starting at position 3837 of SEQ ID NO: 1885082
agaaguuagucggugugca

SEQ ID NO: 2314747 - RNA, 19 nt, Artificial Sequence
  Description of Artificial Sequence: Synthetic oligonucleotide
  Antisense strand to SEQ ID NO: 2314746
ugcacaccgacuaacuucu

SEQ ID NO: 2314748 - RNA, 19 nt, Artificial Sequence
  Description of Artificial Sequence: Synthetic oligonucleotide
  Sense strand starting at position 3851 of SEQ ID NO: 1885082
gugcauaggcaguaugaca

SEQ ID NO: 2314749 - RNA, 19 nt, Artificial Sequence
  Description of Artificial Sequence: Synthetic oligonucleotide
  Antisense strand to SEQ ID NO: 2314748
ugucauacugccuaugcac

SEQ ID NO: 2314750 - RNA, 19 nt, Artificial Sequence
  Description of Artificial Sequence: Synthetic oligonucleotide
  Sense strand starting at position 3929 of SEQ ID NO: 1885082
guccuuucuuccgcuccaa

SEQ ID NO: 2314751 - RNA, 19 nt, Artificial Sequence
  Description of Artificial Sequence: Synthetic oligonucleotide
  Antisense strand to SEQ ID NO: 2314750
uuggagcggaagaaaggac

SEQ ID NO: 2314752 - RNA, 19 nt, Artificial Sequence
  Description of Artificial Sequence: Synthetic oligonucleotide
  Sense strand starting at position 3947 of SEQ ID NO: 1885082
agccguagagcuugaaacu

SEQ ID NO: 2314753 - RNA, 19 nt, Artificial Sequence
  Description of Artificial Sequence: Synthetic oligonucleotide
  Antisense strand to SEQ ID NO: 2314752
aguuucaagcucuacggcu

SEQ ID NO: 2314754 - RNA, 19 nt, Artificial Sequence
  Description of Artificial Sequence: Synthetic oligonucleotide
  Sense strand starting at position 57 of SEQ ID NO: 1885083
auugcuagacaccaugauu

SEQ ID NO: 2314755 - RNA, 19 nt, Artificial Sequence
  Description of Artificial Sequence: Synthetic oligonucleotide
  Antisense strand to SEQ ID NO: 2314754
aaucauggugucuagcaau

SEQ ID NO: 2314756 - RNA, 19 nt, Artificial Sequence
  Description of Artificial Sequence: Synthetic oligonucleotide
  Sense strand starting at position 131 of SEQ ID NO: 1885083
uguuaauuguguuugaaga

SEQ ID NO: 2314757 - RNA, 19 nt, Artificial Sequence
  Description of Artificial Sequence: Synthetic oligonucleotide
  Antisense strand to SEQ ID NO: 2314756
ucuucaaacacaauuaaca

SEQ ID NO: 2314758 - RNA, 19 nt, Artificial Sequence
  Description of Artificial Sequence: Synthetic oligonucleotide
  Sense strand starting at position 132 of SEQ ID NO: 1885083
guuaauuguguuugaagag

SEQ ID NO: 2314759 - RNA, 19 nt, Artificial Sequence
  Description of Artificial Sequence: Synthetic oligonucleotide
  Antisense strand to SEQ ID NO: 2314758
cucuucaaacacaauuaac

SEQ ID NO: 2314760 - RNA, 19 nt, Artificial Sequence
  Description of Artificial Sequence: Synthetic oligonucleotide
  Sense strand starting at position 581 of SEQ ID NO: 1885083
cagagagucuuguuuccaa

SEQ ID NO: 2314761 - RNA, 19 nt, Artificial Sequence
  Description of Artificial Sequence: Synthetic oligonucleotide
  Antisense strand to SEQ ID NO: 2314760
uuggaaacaagacucucug

SEQ ID NO: 2314762 - RNA, 19 nt, Artificial Sequence
  Description of Artificial Sequence: Synthetic oligonucleotide
  Sense strand starting at position 650 of SEQ ID NO: 1885083
cucagauagagguggucua

SEQ ID NO: 2314763 - RNA, 19 nt, Artificial Sequence
  Description of Artificial Sequence: Synthetic oligonucleotide
  Antisense strand to SEQ ID NO: 2314762
uagaccaccucuaucugag

SEQ ID NO: 2314764 - RNA, 19 nt, Artificial Sequence
  Description of Artificial Sequence: Synthetic oligonucleotide
  Sense strand starting at position 731 of SEQ ID NO: 1885083
uuggauuugucggauauga

SEQ ID NO: 2314765 - RNA, 19 nt, Artificial Sequence
  Description of Artificial Sequence: Synthetic oligonucleotide
  Antisense strand to SEQ ID NO: 2314764
ucauauccgacaaauccaa

SEQ ID NO: 2314766 - RNA, 19 nt, Artificial Sequence
  Description of Artificial Sequence: Synthetic oligonucleotide
  Sense strand starting at position 892 of SEQ ID NO: 1885083
uccuuaaagucagucagaa

SEQ ID NO: 2314767 - RNA, 19 nt, Artificial Sequence
  Description of Artificial Sequence: Synthetic oligonucleotide
  Antisense strand to SEQ ID NO: 2314766
uucugacugacuuuaagga

SEQ ID NO: 2314768 - RNA, 19 nt, Artificial Sequence
  Description of Artificial Sequence: Synthetic oligonucleotide
  Sense strand starting at position 900 of SEQ ID NO: 1885083
gucagucagaaaggagauu

SEQ ID NO: 2314769 - RNA, 19 nt, Artificial Sequence
  Description of Artificial Sequence: Synthetic oligonucleotide
  Antisense strand to SEQ ID NO: 2314768
aaucuccuuucugacugac

SEQ ID NO: 2314770 - RNA, 19 nt, Artificial Sequence
  Description of Artificial Sequence: Synthetic oligonucleotide
  Sense strand starting at position 909 of SEQ ID NO: 1885083
aaaggagauuccucuggca

SEQ ID NO: 2314771 - RNA, 19 nt, Artificial Sequence
  Description of Artificial Sequence: Synthetic oligonucleotide
  Antisense strand to SEQ ID NO: 2314770
ugccagaggaaucuccuuu

SEQ ID NO: 2314772 - RNA, 19 nt, Artificial Sequence
  Description of Artificial Sequence: Synthetic oligonucleotide
  Sense strand starting at position 911 of SEQ ID NO: 1885083
aggagauuccucuggcaau

SEQ ID NO: 2314773 - RNA, 19 nt, Artificial Sequence
  Description of Artificial Sequence: Synthetic oligonucleotide
  Antisense strand to SEQ ID NO: 2314772
auugccagaggaaucuccu

SEQ ID NO: 2314774 - RNA, 19 nt, Artificial Sequence
  Description of Artificial Sequence: Synthetic oligonucleotide
  Sense strand starting at position 958 of SEQ ID NO: 1885083
uguauagaccugugaaaua

SEQ ID NO: 2314775 - RNA, 19 nt, Artificial Sequence
  Description of Artificial Sequence: Synthetic oligonucleotide
  Antisense strand to SEQ ID NO: 2314774
uauuucacaggucuauaca

SEQ ID NO: 2314776 - RNA, 19 nt, Artificial Sequence
  Description of Artificial Sequence: Synthetic oligonucleotide
  Sense strand starting at position 1131 of SEQ ID NO: 1885083
ucaagauguuacucuugac

SEQ ID NO: 2314777 - RNA, 19 nt, Artificial Sequence
  Description of Artificial Sequence: Synthetic oligonucleotide
  Antisense strand to SEQ ID NO: 2314776
gucaagaguaacaucuuga

SEQ ID NO: 2314778 - RNA, 19 nt, Artificial Sequence
  Description of Artificial Sequence: Synthetic oligonucleotide
  Sense strand starting at position 1256 of SEQ ID NO: 1885083
caggcaugucugcaaacuu

SEQ ID NO: 2314779 - RNA, 19 nt, Artificial Sequence
  Description of Artificial Sequence: Synthetic oligonucleotide
  Antisense strand to SEQ ID NO: 2314778
aaguuugcagacaugccug

SEQ ID NO: 2314780 - RNA, 19 nt, Artificial Sequence
  Description of Artificial Sequence: Synthetic oligonucleotide
  Sense strand starting at position 1601 of SEQ ID NO: 1885083
uuuaaugggugauucuaau

SEQ ID NO: 2314781 - RNA, 19 nt, Artificial Sequence
  Description of Artificial Sequence: Synthetic oligonucleotide
  Antisense strand to SEQ ID NO: 2314780
auuagaaucacccauuaaa

SEQ ID NO: 2314782 - RNA, 19 nt, Artificial Sequence
  Description of Artificial Sequence: Synthetic oligonucleotide
  Sense strand starting at position 1607 of SEQ ID NO: 1885083
gggugauucuaaucauagg

SEQ ID NO: 2314783 - RNA, 19 nt, Artificial Sequence
  Description of Artificial Sequence: Synthetic oligonucleotide
  Antisense strand to SEQ ID NO: 2314782
ccuaugauuagaaucaccc

SEQ ID NO: 2314784 - RNA, 19 nt, Artificial Sequence
  Description of Artificial Sequence: Synthetic oligonucleotide
  Sense strand starting at position 1608 of SEQ ID NO: 1885083
ggugauucuaaucauaggu

SEQ ID NO: 2314785 - RNA, 19 nt, Artificial Sequence
  Description of Artificial Sequence: Synthetic oligonucleotide
  Antisense strand to SEQ ID NO: 2314784
accuaugauuagaaucacc

SEQ ID NO: 2314786 - RNA, 19 nt, Artificial Sequence
  Description of Artificial Sequence: Synthetic oligonucleotide
  Sense strand starting at position 1707 of SEQ ID NO: 1885083
cuaggcagcuuuguaauuu

SEQ ID NO: 2314787 - RNA, 19 nt, Artificial Sequence
  Description of Artificial Sequence: Synthetic oligonucleotide
  Antisense strand to SEQ ID NO: 2314786
aaauuacaaagcugccuag

SEQ ID NO: 2314788 - RNA, 19 nt, Artificial Sequence
  Description of Artificial Sequence: Synthetic oligonucleotide
  Sense strand starting at position 1806 of SEQ ID NO: 1885083
aaguaacauugagaaagga

SEQ ID NO: 2314789 - RNA, 19 nt, Artificial Sequence
  Description of Artificial Sequence: Synthetic oligonucleotide
  Antisense strand to SEQ ID NO: 2314788
uccuuucucaauguuacuu

SEQ ID NO: 2314790 - RNA, 19 nt, Artificial Sequence
  Description of Artificial Sequence: Synthetic oligonucleotide
  Sense strand starting at position 2346 of SEQ ID NO: 1885083
cgagguuauuauccuacca

SEQ ID NO: 2314791 - RNA, 19 nt, Artificial Sequence
  Description of Artificial Sequence: Synthetic oligonucleotide
  Antisense strand to SEQ ID NO: 2314790
ugguaggauaauaaccucg

SEQ ID NO: 2314792 - RNA, 19 nt, Artificial Sequence
  Description of Artificial Sequence: Synthetic oligonucleotide
  Sense strand starting at position 2370 of SEQ ID NO: 1885083
ggcuaaggcucuuugagaa

SEQ ID NO: 2314793 - RNA, 19 nt, Artificial Sequence
  Description of Artificial Sequence: Synthetic oligonucleotide
  Antisense strand to SEQ ID NO: 2314792
uucucaaagagccuuagcc

SEQ ID NO: 2314794 - RNA, 19 nt, Artificial Sequence
  Description of Artificial Sequence: Synthetic oligonucleotide
  Sense strand starting at position 2378 of SEQ ID NO: 1885083
cucuuugagaaguaguguu

SEQ ID NO: 2314795 - RNA, 19 nt, Artificial Sequence
  Description of Artificial Sequence: Synthetic oligonucleotide
  Antisense strand to SEQ ID NO: 2314794
aacacuacuucucaaagag

SEQ ID NO: 2314796 - RNA, 19 nt, Artificial Sequence
  Description of Artificial Sequence: Synthetic oligonucleotide
  Sense strand starting at position 2393 of SEQ ID NO: 1885083
uguuuaaagccucauauug

SEQ ID NO: 2314797 - RNA, 19 nt, Artificial Sequence
  Description of Artificial Sequence: Synthetic oligonucleotide
  Antisense strand to SEQ ID NO: 2314796
caauaugaggcuuuaaaca

SEQ ID NO: 2314798 - RNA, 19 nt, Artificial Sequence
  Description of Artificial Sequence: Synthetic oligonucleotide
  Sense strand starting at position 2801 of SEQ ID NO: 1885083
accuuaagacaucacgagu

SEQ ID NO: 2314799 - RNA, 19 nt, Artificial Sequence
  Description of Artificial Sequence: Synthetic oligonucleotide
  Antisense strand to SEQ ID NO: 2314798
acucgugaugucuuaaggu

SEQ ID NO: 2314800 - RNA, 19 nt, Artificial Sequence
  Description of Artificial Sequence: Synthetic oligonucleotide
  Sense strand starting at position 2828 of SEQ ID NO: 1885083
aucuacagaucuguaaaug

SEQ ID NO: 2314801 - RNA, 19 nt, Artificial Sequence
  Description of Artificial Sequence: Synthetic oligonucleotide
  Antisense strand to SEQ ID NO: 2314800
cauuuacagaucuguagau

SEQ ID NO: 2314802 - RNA, 19 nt, Artificial Sequence
  Description of Artificial Sequence: Synthetic oligonucleotide
  Sense strand starting at position 2896 of SEQ ID NO: 1885083
cuaucaucuugauuggaau

SEQ ID NO: 2314803 - RNA, 19 nt, Artificial Sequence
  Description of Artificial Sequence: Synthetic oligonucleotide
  Antisense strand to SEQ ID NO: 2314802
auuccaaucaagaugauag

SEQ ID NO: 2314804 - RNA, 19 nt, Artificial Sequence
  Description of Artificial Sequence: Synthetic oligonucleotide
  Sense strand starting at position 3038 of SEQ ID NO: 1885083
agauauagguucucccuau

SEQ ID NO: 2314805 - RNA, 19 nt, Artificial Sequence
  Description of Artificial Sequence: Synthetic oligonucleotide
  Antisense strand to SEQ ID NO: 2314804
auagggagaaccuauaucu

SEQ ID NO: 2314806 - RNA, 19 nt, Artificial Sequence
  Description of Artificial Sequence: Synthetic oligonucleotide
  Sense strand starting at position 3039 of SEQ ID NO: 1885083
gauauagguucucccuaug

SEQ ID NO: 2314807 - RNA, 19 nt, Artificial Sequence
  Description of Artificial Sequence: Synthetic oligonucleotide
  Antisense strand to SEQ ID NO: 2314806
cauagggagaaccuauauc

SEQ ID NO: 2314808 - RNA, 19 nt, Artificial Sequence
  Description of Artificial Sequence: Synthetic oligonucleotide
  Sense strand starting at position 3245 of SEQ ID NO: 1885083
ucagaacaacuuugaaguu

SEQ ID NO: 2314809 - RNA, 19 nt, Artificial Sequence
  Description of Artificial Sequence: Synthetic oligonucleotide
  Antisense strand to SEQ ID NO: 2314808
aacuucaaaguuguucuga

SEQ ID NO: 2314810 - RNA, 19 nt, Artificial Sequence
  Description of Artificial Sequence: Synthetic oligonucleotide
  Sense strand starting at position 3396 of SEQ ID NO: 1885083
gugcuaaaugagcaaauga

SEQ ID NO: 2314811 - RNA, 19 nt, Artificial Sequence
  Description of Artificial Sequence: Synthetic oligonucleotide
  Antisense strand to SEQ ID NO: 2314810
ucauuugcucauuuagcac

SEQ ID NO: 2314812 - RNA, 19 nt, Artificial Sequence
  Description of Artificial Sequence: Synthetic oligonucleotide
  Sense strand starting at position 3493 of SEQ ID NO: 1885083
cucugagcucccgaacagu

SEQ ID NO: 2314813 - RNA, 19 nt, Artificial Sequence
  Description of Artificial Sequence: Synthetic oligonucleotide
  Antisense strand to SEQ ID NO: 2314812
acuguucgggagcucagag

SEQ ID NO: 2314814 - RNA, 19 nt, Artificial Sequence
  Description of Artificial Sequence: Synthetic oligonucleotide
  Sense strand starting at position 3504 of SEQ ID NO: 1885083
cgaacagugucauuuguug

SEQ ID NO: 2314815 - RNA, 19 nt, Artificial Sequence
  Description of Artificial Sequence: Synthetic oligonucleotide
  Antisense strand to SEQ ID NO: 2314814
caacaaaugacacuguucg

SEQ ID NO: 2314816 - RNA, 19 nt, Artificial Sequence
  Description of Artificial Sequence: Synthetic oligonucleotide
  Sense strand starting at position 3508 of SEQ ID NO: 1885083
cagugucauuuguuggauu

SEQ ID NO: 2314817 - RNA, 19 nt, Artificial Sequence
  Description of Artificial Sequence: Synthetic oligonucleotide
  Antisense strand to SEQ ID NO: 2314816
aauccaacaaaugacacug

SEQ ID NO: 2314818 - RNA, 19 nt, Artificial Sequence
  Description of Artificial Sequence: Synthetic oligonucleotide
  Sense strand starting at position 3510 of SEQ ID NO: 1885083
gugucauuuguuggauugu

SEQ ID NO: 2314819 - RNA, 19 nt, Artificial Sequence
  Description of Artificial Sequence: Synthetic oligonucleotide
  Antisense strand to SEQ ID NO: 2314818
acaauccaacaaaugacac

SEQ ID NO: 2314820 - RNA, 19 nt, Artificial Sequence
  Description of Artificial Sequence: Synthetic oligonucleotide
  Sense strand starting at position 3698 of SEQ ID NO: 1885083
gcucuuucucuccauugua

SEQ ID NO: 2314821 - RNA, 19 nt, Artificial Sequence
  Description of Artificial Sequence: Synthetic oligonucleotide
  Antisense strand to SEQ ID NO: 2314820
uacaauggagagaaagagc

SEQ ID NO: 2314822 - RNA, 19 nt, Artificial Sequence
  Description of Artificial Sequence: Synthetic oligonucleotide
  Sense strand starting at position 3817 of SEQ ID NO: 1885083
gaucguauugaauacuguu

SEQ ID NO: 2314823 - RNA, 19 nt, Artificial Sequence
  Description of Artificial Sequence: Synthetic oligonucleotide
  Antisense strand to SEQ ID NO: 2314822
aacaguauucaauacgauc

SEQ ID NO: 2314824 - RNA, 19 nt, Artificial Sequence
  Description of Artificial Sequence: Synthetic oligonucleotide
  Sense strand starting at position 3845 of SEQ ID NO: 1885083
gugacuugaaagcagucaa

SEQ ID NO: 2314825 - RNA, 19 nt, Artificial Sequence
  Description of Artificial Sequence: Synthetic oligonucleotide
  Antisense strand to SEQ ID NO: 2314824
uugacugcuuucaagucac

SEQ ID NO: 2314826 - RNA, 19 nt, Artificial Sequence
  Description of Artificial Sequence: Synthetic oligonucleotide
  Sense strand starting at position 3855 of SEQ ID NO: 1885083
agcagucaaugacuaaauu

SEQ ID NO: 2314827 - RNA, 19 nt, Artificial Sequence
  Description of Artificial Sequence: Synthetic oligonucleotide
  Antisense strand to SEQ ID NO: 2314826
aauuuagucauugacugcu

SEQ ID NO: 2314828 - RNA, 19 nt, Artificial Sequence
  Description of Artificial Sequence: Synthetic oligonucleotide
  Sense strand starting at position 3864 of SEQ ID NO: 1885083
ugacuaaauucuccagagu

SEQ ID NO: 2314829 - RNA, 19 nt, Artificial Sequence
  Description of Artificial Sequence: Synthetic oligonucleotide
  Antisense strand to SEQ ID NO: 2314828
acucuggagaauuuaguca

SEQ ID NO: 2314830 - RNA, 19 nt, Artificial Sequence
  Description of Artificial Sequence: Synthetic oligonucleotide
  Sense strand starting at position 3878 of SEQ ID NO: 1885083
agaguagaaagcuguuaua

SEQ ID NO: 2314831 - RNA, 19 nt, Artificial Sequence
  Description of Artificial Sequence: Synthetic oligonucleotide
  Antisense strand to SEQ ID NO: 2314830
uauaacagcuuucuacucu

SEQ ID NO: 2314832 - RNA, 19 nt, Artificial Sequence
  Description of Artificial Sequence: Synthetic oligonucleotide
  Sense strand starting at position 3935 of SEQ ID NO: 1885083
acuuaaugcccaggaggaa

SEQ ID NO: 2314833 - RNA, 19 nt, Artificial Sequence
  Description of Artificial Sequence: Synthetic oligonucleotide
  Antisense strand to SEQ ID NO: 2314832
uuccuccugggcauuaagu

SEQ ID NO: 2314834 - RNA, 19 nt, Artificial Sequence
  Description of Artificial Sequence: Synthetic oligonucleotide
  Sense strand starting at position 4 of SEQ ID NO: 1885084
ggguuaguaaggugaagga

SEQ ID NO: 2314835 - RNA, 19 nt, Artificial Sequence
  Description of Artificial Sequence: Synthetic oligonucleotide
  Antisense strand to SEQ ID NO: 2314834
uccuucaccuuacuaaccc

SEQ ID NO: 2314836 - RNA, 19 nt, Artificial Sequence
  Description of Artificial Sequence: Synthetic oligonucleotide
  Sense strand starting at position 14 of SEQ ID NO: 1885084
ggugaaggagggugguaua

SEQ ID NO: 2314837 - RNA, 19 nt, Artificial Sequence
  Description of Artificial Sequence: Synthetic oligonucleotide
  Antisense strand to SEQ ID NO: 2314836
uauaccacccuccuucacc

SEQ ID NO: 2314838 - RNA, 19 nt, Artificial Sequence
  Description of Artificial Sequence: Synthetic oligonucleotide
  Sense strand starting at position 86 of SEQ ID NO: 1885084
gugguucucuucccaucau

SEQ ID NO: 2314839 - RNA, 19 nt, Artificial Sequence
  Description of Artificial Sequence: Synthetic oligonucleotide
  Antisense strand to SEQ ID NO: 2314838
augaugggaagagaaccac

SEQ ID NO: 2314840 - RNA, 19 nt, Artificial Sequence
  Description of Artificial Sequence: Synthetic oligonucleotide
  Sense strand starting at position 318 of SEQ ID NO: 1885084
uuuacaauguccucgaugu

SEQ ID NO: 2314841 - RNA, 19 nt, Artificial Sequence
  Description of Artificial Sequence: Synthetic oligonucleotide
  Antisense strand to SEQ ID NO: 2314840
acaucgaggacauuguaaa

SEQ ID NO: 2314842 - RNA, 19 nt, Artificial Sequence
  Description of Artificial Sequence: Synthetic oligonucleotide
  Sense strand starting at position 319 of SEQ ID NO: 1885084
uuacaauguccucgauguc

SEQ ID NO: 2314843 - RNA, 19 nt, Artificial Sequence
  Description of Artificial Sequence: Synthetic oligonucleotide
  Antisense strand to SEQ ID NO: 2314842
gacaucgaggacauuguaa

SEQ ID NO: 2314844 - RNA, 19 nt, Artificial Sequence
  Description of Artificial Sequence: Synthetic oligonucleotide
  Sense strand starting at position 416 of SEQ ID NO: 1885084
ggcacaggcuugucuugaa

SEQ ID NO: 2314845 - RNA, 19 nt, Artificial Sequence
  Description of Artificial Sequence: Synthetic oligonucleotide
  Antisense strand to SEQ ID NO: 2314844
uucaagacaagccugugcc

SEQ ID NO: 2314846 - RNA, 19 nt, Artificial Sequence
  Description of Artificial Sequence: Synthetic oligonucleotide
  Sense strand starting at position 757 of SEQ ID NO: 1885084
gcucuaacacaguagaaug

SEQ ID NO: 2314847 - RNA, 19 nt, Artificial Sequence
  Description of Artificial Sequence: Synthetic oligonucleotide
  Antisense strand to SEQ ID NO: 2314846
cauucuacuguguuagagc

SEQ ID NO: 2314848 - RNA, 19 nt, Artificial Sequence
  Description of Artificial Sequence: Synthetic oligonucleotide
  Sense strand starting at position 784 of SEQ ID NO: 1885084
uguguacuuguuuaucuau

SEQ ID NO: 2314849 - RNA, 19 nt, Artificial Sequence
  Description of Artificial Sequence: Synthetic oligonucleotide
  Antisense strand to SEQ ID NO: 2314848
auagauaaacaaguacaca

SEQ ID NO: 2314850 - RNA, 19 nt, Artificial Sequence
  Description of Artificial Sequence: Synthetic oligonucleotide
  Sense strand starting at position 787 of SEQ ID NO: 1885084
guacuuguuuaucuauaug

SEQ ID NO: 2314851 - RNA, 19 nt, Artificial Sequence
  Description of Artificial Sequence: Synthetic oligonucleotide
  Antisense strand to SEQ ID NO: 2314850
cauauagauaaacaaguac

SEQ ID NO: 2314852 - RNA, 19 nt, Artificial Sequence
  Description of Artificial Sequence: Synthetic oligonucleotide
  Sense strand starting at position 795 of SEQ ID NO: 1885084
uuaucuauauggcuuaguu

SEQ ID NO: 2314853 - RNA, 19 nt, Artificial Sequence
  Description of Artificial Sequence: Synthetic oligonucleotide
  Antisense strand to SEQ ID NO: 2314852
aacuaagccauauagauaa

SEQ ID NO: 2314854 - RNA, 19 nt, Artificial Sequence
  Description of Artificial Sequence: Synthetic oligonucleotide
  Sense strand starting at position 1171 of SEQ ID NO: 1885084
cuuagcugucuuuauauca

SEQ ID NO: 2314855 - RNA, 19 nt, Artificial Sequence
  Description of Artificial Sequence: Synthetic oligonucleotide
  Antisense strand to SEQ ID NO: 2314854
ugauauaaagacagcuaag

SEQ ID NO: 2314856 - RNA, 19 nt, Artificial Sequence
  Description of Artificial Sequence: Synthetic oligonucleotide
  Sense strand starting at position 1178 of SEQ ID NO: 1885084
gucuuuauaucacugguau

SEQ ID NO: 2314857 - RNA, 19 nt, Artificial Sequence
  Description of Artificial Sequence: Synthetic oligonucleotide
  Antisense strand to SEQ ID NO: 2314856
auaccagugauauaaagac

SEQ ID NO: 2314858 - RNA, 19 nt, Artificial Sequence
  Description of Artificial Sequence: Synthetic oligonucleotide
  Sense strand starting at position 1179 of SEQ ID NO: 1885084
ucuuuauaucacugguauc

SEQ ID NO: 2314859 - RNA, 19 nt, Artificial Sequence
  Description of Artificial Sequence: Synthetic oligonucleotide
  Antisense strand to SEQ ID NO: 2314858
gauaccagugauauaaaga

SEQ ID NO: 2314860 - RNA, 19 nt, Artificial Sequence
  Description of Artificial Sequence: Synthetic oligonucleotide
  Sense strand starting at position 1186 of SEQ ID NO: 1885084
aucacugguaucuggagua

SEQ ID NO: 2314861 - RNA, 19 nt, Artificial Sequence
  Description of Artificial Sequence: Synthetic oligonucleotide
  Antisense strand to SEQ ID NO: 2314860
uacuccagauaccagugau

SEQ ID NO: 2314862 - RNA, 19 nt, Artificial Sequence
  Description of Artificial Sequence: Synthetic oligonucleotide
  Sense strand starting at position 1217 of SEQ ID NO: 1885084
agccaaugcugagugaaug

SEQ ID NO: 2314863 - RNA, 19 nt, Artificial Sequence
  Description of Artificial Sequence: Synthetic oligonucleotide
  Antisense strand to SEQ ID NO: 2314862
cauucacucagcauuggcu

SEQ ID NO: 2314864 - RNA, 19 nt, Artificial Sequence
  Description of Artificial Sequence: Synthetic oligonucleotide
  Sense strand starting at position 1218 of SEQ ID NO: 1885084
gccaaugcugagugaauga

SEQ ID NO: 2314865 - RNA, 19 nt, Artificial Sequence
  Description of Artificial Sequence: Synthetic oligonucleotide
  Antisense strand to SEQ ID NO: 2314864
ucauucacucagcauuggc

SEQ ID NO: 2314866 - RNA, 19 nt, Artificial Sequence
  Description of Artificial Sequence: Synthetic oligonucleotide
  Sense strand starting at position 1490 of SEQ ID NO: 1885084
gguuaaacagccugggaau

SEQ ID NO: 2314867 - RNA, 19 nt, Artificial Sequence
  Description of Artificial Sequence: Synthetic oligonucleotide
  Antisense strand to SEQ ID NO: 2314866
auucccaggcuguuuaacc

SEQ ID NO: 2314868 - RNA, 19 nt, Artificial Sequence
  Description of Artificial Sequence: Synthetic oligonucleotide
  Sense strand starting at position 1516 of SEQ ID NO: 1885084
acgcuaaucgcugaggaaa

SEQ ID NO: 2314869 - RNA, 19 nt, Artificial Sequence
  Description of Artificial Sequence: Synthetic oligonucleotide
  Antisense strand to SEQ ID NO: 2314868
uuuccucagcgauuagcgu

SEQ ID NO: 2314870 - RNA, 19 nt, Artificial Sequence
  Description of Artificial Sequence: Synthetic oligonucleotide
  Sense strand starting at position 2252 of SEQ ID NO: 1885084
ucugguuccugggugaacu

SEQ ID NO: 2314871 - RNA, 19 nt, Artificial Sequence
  Description of Artificial Sequence: Synthetic oligonucleotide
  Antisense strand to SEQ ID NO: 2314870
aguucacccaggaaccaga

SEQ ID NO: 2314872 - RNA, 19 nt, Artificial Sequence
  Description of Artificial Sequence: Synthetic oligonucleotide
  Sense strand starting at position 2379 of SEQ ID NO: 1885084
cccgaauucuuggccaaca

SEQ ID NO: 2314873 - RNA, 19 nt, Artificial Sequence
  Description of Artificial Sequence: Synthetic oligonucleotide
  Antisense strand to SEQ ID NO: 2314872
uguuggccaagaauucggg

SEQ ID NO: 2314874 - RNA, 19 nt, Artificial Sequence
  Description of Artificial Sequence: Synthetic oligonucleotide
  Sense strand starting at position 2380 of SEQ ID NO: 1885084
ccgaauucuuggccaacaa

SEQ ID NO: 2314875 - RNA, 19 nt, Artificial Sequence
  Description of Artificial Sequence: Synthetic oligonucleotide
  Antisense strand to SEQ ID NO: 2314874
uuguuggccaagaauucgg

SEQ ID NO: 2314876 - RNA, 19 nt, Artificial Sequence
  Description of Artificial Sequence: Synthetic oligonucleotide
  Sense strand starting at position 2381 of SEQ ID NO: 1885084
cgaauucuuggccaacaaa

SEQ ID NO: 2314877 - RNA, 19 nt, Artificial Sequence
  Description of Artificial Sequence: Synthetic oligonucleotide
  Antisense strand to SEQ ID NO: 2314876
uuuguuggccaagaauucg

SEQ ID NO: 2314878 - RNA, 19 nt, Artificial Sequence
  Description of Artificial Sequence: Synthetic oligonucleotide
  Sense strand starting at position 2541 of SEQ ID NO: 1885084
uuacauugacuuuggcuua

SEQ ID NO: 2314879 - RNA, 19 nt, Artificial Sequence
  Description of Artificial Sequence: Synthetic oligonucleotide
  Antisense strand to SEQ ID NO: 2314878
uaagccaaagucaauguaa

SEQ ID NO: 2314880 - RNA, 19 nt, Artificial Sequence
  Description of Artificial Sequence: Synthetic oligonucleotide
  Sense strand starting at position 2583 of SEQ ID NO: 1885084
guuugauacgugccuggca

SEQ ID NO: 2314881 - RNA, 19 nt, Artificial Sequence
  Description of Artificial Sequence: Synthetic oligonucleotide
  Antisense strand to SEQ ID NO: 2314880
ugccaggcacguaucaaac

SEQ ID NO: 2314882 - RNA, 19 nt, Artificial Sequence
  Description of Artificial Sequence: Synthetic oligonucleotide
  Sense strand starting at position 2790 of SEQ ID NO: 1885084
ugugcauuauuaguagaga

SEQ ID NO: 2314883 - RNA, 19 nt, Artificial Sequence
  Description of Artificial Sequence: Synthetic oligonucleotide
  Antisense strand to SEQ ID NO: 2314882
ucucuacuaauaaugcaca

SEQ ID NO: 2314884 - RNA, 19 nt, Artificial Sequence
  Description of Artificial Sequence: Synthetic oligonucleotide
  Sense strand starting at position 2990 of SEQ ID NO: 1885084
ugagauugaucagaaguaa

SEQ ID NO: 2314885 - RNA, 19 nt, Artificial Sequence
  Description of Artificial Sequence: Synthetic oligonucleotide
  Antisense strand to SEQ ID NO: 2314884
uuacuucugaucaaucuca

SEQ ID NO: 2314886 - RNA, 19 nt, Artificial Sequence
  Description of Artificial Sequence: Synthetic oligonucleotide
  Sense strand starting at position 3287 of SEQ ID NO: 1885084
cugugcugaccuuguacaa

SEQ ID NO: 2314887 - RNA, 19 nt, Artificial Sequence
  Description of Artificial Sequence: Synthetic oligonucleotide
  Antisense strand to SEQ ID NO: 2314886
uuguacaaggucagcacag

SEQ ID NO: 2314888 - RNA, 19 nt, Artificial Sequence
  Description of Artificial Sequence: Synthetic oligonucleotide
  Sense strand starting at position 3338 of SEQ ID NO: 1885084
uccuaaauauguguacuga

SEQ ID NO: 2314889 - RNA, 19 nt, Artificial Sequence
  Description of Artificial Sequence: Synthetic oligonucleotide
  Antisense strand to SEQ ID NO: 2314888
ucaguacacauauuuagga

SEQ ID NO: 2314890 - RNA, 19 nt, Artificial Sequence
  Description of Artificial Sequence: Synthetic oligonucleotide
  Sense strand starting at position 3339 of SEQ ID NO: 1885084
ccuaaauauguguacugau

SEQ ID NO: 2314891 - RNA, 19 nt, Artificial Sequence
  Description of Artificial Sequence: Synthetic oligonucleotide
  Antisense strand to SEQ ID NO: 2314890
aucaguacacauauuuagg

SEQ ID NO: 2314892 - RNA, 19 nt, Artificial Sequence
  Description of Artificial Sequence: Synthetic oligonucleotide
  Sense strand starting at position 3348 of SEQ ID NO: 1885084
guguacugauucuuauuac

SEQ ID NO: 2314893 - RNA, 19 nt, Artificial Sequence
  Description of Artificial Sequence: Synthetic oligonucleotide
  Antisense strand to SEQ ID NO: 2314892
guaauaagaaucaguacac

SEQ ID NO: 2314894 - RNA, 19 nt, Artificial Sequence
  Description of Artificial Sequence: Synthetic oligonucleotide
  Sense strand starting at position 3397 of SEQ ID NO: 1885084
uugagacuugcuuaguuau

SEQ ID NO: 2314895 - RNA, 19 nt, Artificial Sequence
  Description of Artificial Sequence: Synthetic oligonucleotide
  Antisense strand to SEQ ID NO: 2314894
auaacuaagcaagucucaa

SEQ ID NO: 2314896 - RNA, 19 nt, Artificial Sequence
  Description of Artificial Sequence: Synthetic oligonucleotide
  Sense strand starting at position 3399 of SEQ ID NO: 1885084
gagacuugcuuaguuauca

SEQ ID NO: 2314897 - RNA, 19 nt, Artificial Sequence
  Description of Artificial Sequence: Synthetic oligonucleotide
  Antisense strand to SEQ ID NO: 2314896
ugauaacuaagcaagucuc

SEQ ID NO: 2314898 - RNA, 19 nt, Artificial Sequence
  Description of Artificial Sequence: Synthetic oligonucleotide
  Sense strand starting at position 3488 of SEQ ID NO: 1885084
guguucuuugccuaaacua

SEQ ID NO: 2314899 - RNA, 19 nt, Artificial Sequence
  Description of Artificial Sequence: Synthetic oligonucleotide
  Antisense strand to SEQ ID NO: 2314898
uaguuuaggcaaagaacac

SEQ ID NO: 2314900 - RNA, 19 nt, Artificial Sequence
  Description of Artificial Sequence: Synthetic oligonucleotide
  Sense strand starting at position 3748 of SEQ ID NO: 1885084
aagguaccaccuuguaaga

SEQ ID NO: 2314901 - RNA, 19 nt, Artificial Sequence
  Description of Artificial Sequence: Synthetic oligonucleotide
  Antisense strand to SEQ ID NO: 2314900
ucuuacaaggugguaccuu

SEQ ID NO: 2314902 - RNA, 19 nt, Artificial Sequence
  Description of Artificial Sequence: Synthetic oligonucleotide
  Sense strand starting at position 3840 of SEQ ID NO: 1885084
uaaggacauuucugagaug

SEQ ID NO: 2314903 - RNA, 19 nt, Artificial Sequence
  Description of Artificial Sequence: Synthetic oligonucleotide
  Antisense strand to SEQ ID NO: 2314902
caucucagaaauguccuua

SEQ ID NO: 2314904 - RNA, 19 nt, Artificial Sequence
  Description of Artificial Sequence: Synthetic oligonucleotide
  Sense strand starting at position 3843 of SEQ ID NO: 1885084
ggacauuucugagaugaag

SEQ ID NO: 2314905 - RNA, 19 nt, Artificial Sequence
  Description of Artificial Sequence: Synthetic oligonucleotide
  Antisense strand to SEQ ID NO: 2314904
cuucaucucagaaaugucc

SEQ ID NO: 2314906 - RNA, 19 nt, Artificial Sequence
  Description of Artificial Sequence: Synthetic oligonucleotide
  Sense strand starting at position 3857 of SEQ ID NO: 1885084
ugaagugauccugacagca

SEQ ID NO: 2314907 - RNA, 19 nt, Artificial Sequence
  Description of Artificial Sequence: Synthetic oligonucleotide
  Antisense strand to SEQ ID NO: 2314906
ugcugucaggaucacuuca

SEQ ID NO: 2314908 - RNA, 19 nt, Artificial Sequence
  Description of Artificial Sequence: Synthetic oligonucleotide
  Sense strand starting at position 3902 of SEQ ID NO: 1885084
cuuacuuaccuagguguua

SEQ ID NO: 2314909 - RNA, 19 nt, Artificial Sequence
  Description of Artificial Sequence: Synthetic oligonucleotide
  Antisense strand to SEQ ID NO: 2314908
uaacaccuagguaaguaag

SEQ ID NO: 2314910 - RNA, 19 nt, Artificial Sequence
  Description of Artificial Sequence: Synthetic oligonucleotide
  Sense strand starting at position 3903 of SEQ ID NO: 1885084
uuacuuaccuagguguuaa

SEQ ID NO: 2314911 - RNA, 19 nt, Artificial Sequence
  Description of Artificial Sequence: Synthetic oligonucleotide
  Antisense strand to SEQ ID NO: 2314910
uuaacaccuagguaaguaa

SEQ ID NO: 2314912 - RNA, 19 nt, Artificial Sequence
  Description of Artificial Sequence: Synthetic oligonucleotide
  Sense strand starting at position 3955 of SEQ ID NO: 1885084
ugagaucucuguuuccuuu

SEQ ID NO: 2314913 - RNA, 19 nt, Artificial Sequence
  Description of Artificial Sequence: Synthetic oligonucleotide
  Antisense strand to SEQ ID NO: 2314912
aaaggaaacagagaucuca

SEQ ID NO: 2314914 - RNA, 19 nt, Artificial Sequence
  Description of Artificial Sequence: Synthetic oligonucleotide
  Sense strand starting at position 23 of SEQ ID NO: 1885085
gcucuccaucuugauugua

SEQ ID NO: 2314915 - RNA, 19 nt, Artificial Sequence
  Description of Artificial Sequence: Synthetic oligonucleotide
  Antisense strand to SEQ ID NO: 2314914
uacaaucaagauggagagc

SEQ ID NO: 2314916 - RNA, 19 nt, Artificial Sequence
  Description of Artificial Sequence: Synthetic oligonucleotide
  Sense strand starting at position 181 of SEQ ID NO: 1885085
ugaauauaacugcaccgaa

SEQ ID NO: 2314917 - RNA, 19 nt, Artificial Sequence
  Description of Artificial Sequence: Synthetic oligonucleotide
  Antisense strand to SEQ ID NO: 2314916
uucggugcaguuauauuca

SEQ ID NO: 2314918 - RNA, 19 nt, Artificial Sequence
  Description of Artificial Sequence: Synthetic oligonucleotide
  Sense strand starting at position 184 of SEQ ID NO: 1885085
auauaacugcaccgaauau

SEQ ID NO: 2314919 - RNA, 19 nt, Artificial Sequence
  Description of Artificial Sequence: Synthetic oligonucleotide
  Antisense strand to SEQ ID NO: 2314918
auauucggugcaguuauau

SEQ ID NO: 2314920 - RNA, 19 nt, Artificial Sequence
  Description of Artificial Sequence: Synthetic oligonucleotide
  Sense strand starting at position 211 of SEQ ID NO: 1885085
ucaaguaaccucugaguuu

SEQ ID NO: 2314921 - RNA, 19 nt, Artificial Sequence
  Description of Artificial Sequence: Synthetic oligonucleotide
  Antisense strand to SEQ ID NO: 2314920
aaacucagagguuacuuga

SEQ ID NO: 2314922 - RNA, 19 nt, Artificial Sequence
  Description of Artificial Sequence: Synthetic oligonucleotide
  Sense strand starting at position 254 of SEQ ID NO: 1885085
ugaagucauccugaaucuu

SEQ ID NO: 2314923 - RNA, 19 nt, Artificial Sequence
  Description of Artificial Sequence: Synthetic oligonucleotide
  Antisense strand to SEQ ID NO: 2314922
aagauucaggaugacuuca

SEQ ID NO: 2314924 - RNA, 19 nt, Artificial Sequence
  Description of Artificial Sequence: Synthetic oligonucleotide
  Sense strand starting at position 306 of SEQ ID NO: 1885085
aggaaauucucacagaaag

SEQ ID NO: 2314925 - RNA, 19 nt, Artificial Sequence
  Description of Artificial Sequence: Synthetic oligonucleotide
  Antisense strand to SEQ ID NO: 2314924
cuuucugugagaauuuccu

SEQ ID NO: 2314926 - RNA, 19 nt, Artificial Sequence
  Description of Artificial Sequence: Synthetic oligonucleotide
  Sense strand starting at position 454 of SEQ ID NO: 1885085
guuacuaugcuaugguaaa

SEQ ID NO: 2314927 - RNA, 19 nt, Artificial Sequence
  Description of Artificial Sequence: Synthetic oligonucleotide
  Antisense strand to SEQ ID NO: 2314926
uuuaccauagcauaguaac

SEQ ID NO: 2314928 - RNA, 19 nt, Artificial Sequence
  Description of Artificial Sequence: Synthetic oligonucleotide
  Sense strand starting at position 536 of SEQ ID NO: 1885085
ugaagucauuacuuagaac

SEQ ID NO: 2314929 - RNA, 19 nt, Artificial Sequence
  Description of Artificial Sequence: Synthetic oligonucleotide
  Antisense strand to SEQ ID NO: 2314928
guucuaaguaaugacuuca

SEQ ID NO: 2314930 - RNA, 19 nt, Artificial Sequence
  Description of Artificial Sequence: Synthetic oligonucleotide
  Sense strand starting at position 652 of SEQ ID NO: 1885085
uucucucuuccagaaaggu

SEQ ID NO: 2314931 - RNA, 19 nt, Artificial Sequence
  Description of Artificial Sequence: Synthetic oligonucleotide
  Antisense strand to SEQ ID NO: 2314930
accuuucuggaagagagaa

SEQ ID NO: 2314932 - RNA, 19 nt, Artificial Sequence
  Description of Artificial Sequence: Synthetic oligonucleotide
  Sense strand starting at position 661 of SEQ ID NO: 1885085
ccagaaaggugagcaaauu

SEQ ID NO: 2314933 - RNA, 19 nt, Artificial Sequence
  Description of Artificial Sequence: Synthetic oligonucleotide
  Antisense strand to SEQ ID NO: 2314932
aauuugcucaccuuucugg

SEQ ID NO: 2314934 - RNA, 19 nt, Artificial Sequence
  Description of Artificial Sequence: Synthetic oligonucleotide
  Sense strand starting at position 855 of SEQ ID NO: 1885085
cagaaauaccauggugagu

SEQ ID NO: 2314935 - RNA, 19 nt, Artificial Sequence
  Description of Artificial Sequence: Synthetic oligonucleotide
  Antisense strand to SEQ ID NO: 2314934
acucaccaugguauuucug

SEQ ID NO: 2314936 - RNA, 19 nt, Artificial Sequence
  Description of Artificial Sequence: Synthetic oligonucleotide
  Sense strand starting at position 860 of SEQ ID NO: 1885085
auaccauggugaguguaua

SEQ ID NO: 2314937 - RNA, 19 nt, Artificial Sequence
  Description of Artificial Sequence: Synthetic oligonucleotide
  Antisense strand to SEQ ID NO: 2314936
uauacacucaccaugguau

SEQ ID NO: 2314938 - RNA, 19 nt, Artificial Sequence
  Description of Artificial Sequence: Synthetic oligonucleotide
  Sense strand starting at position 861 of SEQ ID NO: 1885085
uaccauggugaguguauau

SEQ ID NO: 2314939 - RNA, 19 nt, Artificial Sequence
  Description of Artificial Sequence: Synthetic oligonucleotide
  Antisense strand to SEQ ID NO: 2314938
auauacacucaccauggua

SEQ ID NO: 2314940 - RNA, 19 nt, Artificial Sequence
  Description of Artificial Sequence: Synthetic oligonucleotide
  Sense strand starting at position 868 of SEQ ID NO: 1885085
gugaguguauauuugguau

SEQ ID NO: 2314941 - RNA, 19 nt, Artificial Sequence
  Description of Artificial Sequence: Synthetic oligonucleotide
  Antisense strand to SEQ ID NO: 2314940
auaccaaauauacacucac

SEQ ID NO: 2314942 - RNA, 19 nt, Artificial Sequence
  Description of Artificial Sequence: Synthetic oligonucleotide
  Sense strand starting at position 940 of SEQ ID NO: 1885085
cuaggacacuuccauuuga

SEQ ID NO: 2314943 - RNA, 19 nt, Artificial Sequence
  Description of Artificial Sequence: Synthetic oligonucleotide
  Antisense strand to SEQ ID NO: 2314942
ucaaauggaaguguccuag

SEQ ID NO: 2314944 - RNA, 19 nt, Artificial Sequence
  Description of Artificial Sequence: Synthetic oligonucleotide
  Sense strand starting at position 1133 of SEQ ID NO: 1885085
accagaaugcagggaaagu

SEQ ID NO: 2314945 - RNA, 19 nt, Artificial Sequence
  Description of Artificial Sequence: Synthetic oligonucleotide
  Antisense strand to SEQ ID NO: 2314944
acuuucccugcauucuggu

SEQ ID NO: 2314946 - RNA, 19 nt, Artificial Sequence
  Description of Artificial Sequence: Synthetic oligonucleotide
  Sense strand starting at position 1283 of SEQ ID NO: 1885085
agaagcucucaauggauau

SEQ ID NO: 2314947 - RNA, 19 nt, Artificial Sequence
  Description of Artificial Sequence: Synthetic oligonucleotide
  Antisense strand to SEQ ID NO: 2314946
auauccauugagagcuucu

SEQ ID NO: 2314948 - RNA, 19 nt, Artificial Sequence
  Description of Artificial Sequence: Synthetic oligonucleotide
  Sense strand starting at position 1287 of SEQ ID NO: 1885085
gcucucaauggauaucuca

SEQ ID NO: 2314949 - RNA, 19 nt, Artificial Sequence
  Description of Artificial Sequence: Synthetic oligonucleotide
  Antisense strand to SEQ ID NO: 2314948
ugagauauccauugagagc

SEQ ID NO: 2314950 - RNA, 19 nt, Artificial Sequence
  Description of Artificial Sequence: Synthetic oligonucleotide
  Sense strand starting at position 1424 of SEQ ID NO: 1885085
ugauacucaucagcuguua

SEQ ID NO: 2314951 - RNA, 19 nt, Artificial Sequence
  Description of Artificial Sequence: Synthetic oligonucleotide
  Antisense strand to SEQ ID NO: 2314950
uaacagcugaugaguauca

SEQ ID NO: 2314952 - RNA, 19 nt, Artificial Sequence
  Description of Artificial Sequence: Synthetic oligonucleotide
  Sense strand starting at position 1538 of SEQ ID NO: 1885085
agaugugguaccugcacua

SEQ ID NO: 2314953 - RNA, 19 nt, Artificial Sequence
  Description of Artificial Sequence: Synthetic oligonucleotide
  Antisense strand to SEQ ID NO: 2314952
uagugcagguaccacaucu

SEQ ID NO: 2314954 - RNA, 19 nt, Artificial Sequence
  Description of Artificial Sequence: Synthetic oligonucleotide
  Sense strand starting at position 1567 of SEQ ID NO: 1885085
gaaacuguuuggcuucuua

SEQ ID NO: 2314955 - RNA, 19 nt, Artificial Sequence
  Description of Artificial Sequence: Synthetic oligonucleotide
  Antisense strand to SEQ ID NO: 2314954
uaagaagccaaacaguuuc

SEQ ID NO: 2314956 - RNA, 19 nt, Artificial Sequence
  Description of Artificial Sequence: Synthetic oligonucleotide
  Sense strand starting at position 1623 of SEQ ID NO: 1885085
acagcuuucccugaugucu

SEQ ID NO: 2314957 - RNA, 19 nt, Artificial Sequence
  Description of Artificial Sequence: Synthetic oligonucleotide
  Antisense strand to SEQ ID NO: 2314956
agacaucagggaaagcugu

SEQ ID NO: 2314958 - RNA, 19 nt, Artificial Sequence
  Description of Artificial Sequence: Synthetic oligonucleotide
  Sense strand starting at position 1749 of SEQ ID NO: 1885085
cucugagagccugaguaua

SEQ ID NO: 2314959 - RNA, 19 nt, Artificial Sequence
  Description of Artificial Sequence: Synthetic oligonucleotide
  Antisense strand to SEQ ID NO: 2314958
uauacucaggcucucagag

SEQ ID NO: 2314960 - RNA, 19 nt, Artificial Sequence
  Description of Artificial Sequence: Synthetic oligonucleotide
  Sense strand starting at position 1751 of SEQ ID NO: 1885085
cugagagccugaguauaaa

SEQ ID NO: 2314961 - RNA, 19 nt, Artificial Sequence
  Description of Artificial Sequence: Synthetic oligonucleotide
  Antisense strand to SEQ ID NO: 2314960
uuuauacucaggcucucag

SEQ ID NO: 2314962 - RNA, 19 nt, Artificial Sequence
  Description of Artificial Sequence: Synthetic oligonucleotide
  Sense strand starting at position 1773 of SEQ ID NO: 1885085
acaccauugugauuccuga

SEQ ID NO: 2314963 - RNA, 19 nt, Artificial Sequence
  Description of Artificial Sequence: Synthetic oligonucleotide
  Antisense strand to SEQ ID NO: 2314962
ucaggaaucacaauggugu

SEQ ID NO: 2314964 - RNA, 19 nt, Artificial Sequence
  Description of Artificial Sequence: Synthetic oligonucleotide
  Sense strand starting at position 1803 of SEQ ID NO: 1885085
gcugucacucuugaaacuu

SEQ ID NO: 2314965 - RNA, 19 nt, Artificial Sequence
  Description of Artificial Sequence: Synthetic oligonucleotide
  Antisense strand to SEQ ID NO: 2314964
aaguuucaagagugacagc

SEQ ID NO: 2314966 - RNA, 19 nt, Artificial Sequence
  Description of Artificial Sequence: Synthetic oligonucleotide
  Sense strand starting at position 1830 of SEQ ID NO: 1885085
uucucuagaucguugacaa

SEQ ID NO: 2314967 - RNA, 19 nt, Artificial Sequence
  Description of Artificial Sequence: Synthetic oligonucleotide
  Antisense strand to SEQ ID NO: 2314966
uugucaacgaucuagagaa

SEQ ID NO: 2314968 - RNA, 19 nt, Artificial Sequence
  Description of Artificial Sequence: Synthetic oligonucleotide
  Sense strand starting at position 1831 of SEQ ID NO: 1885085
ucucuagaucguugacaac

SEQ ID NO: 2314969 - RNA, 19 nt, Artificial Sequence
  Description of Artificial Sequence: Synthetic oligonucleotide
  Antisense strand to SEQ ID NO: 2314968
guugucaacgaucuagaga

SEQ ID NO: 2314970 - RNA, 19 nt, Artificial Sequence
  Description of Artificial Sequence: Synthetic oligonucleotide
  Sense strand starting at position 1892 of SEQ ID NO: 1885085
ucaggaggcuaaguucuua

SEQ ID NO: 2314971 - RNA, 19 nt, Artificial Sequence
  Description of Artificial Sequence: Synthetic oligonucleotide
  Antisense strand to SEQ ID NO: 2314970
uaagaacuuagccuccuga

SEQ ID NO: 2314972 - RNA, 19 nt, Artificial Sequence
  Description of Artificial Sequence: Synthetic oligonucleotide
  Sense strand starting at position 1984 of SEQ ID NO: 1885085
cugaauucccauugugaua

SEQ ID NO: 2314973 - RNA, 19 nt, Artificial Sequence
  Description of Artificial Sequence: Synthetic oligonucleotide
  Antisense strand to SEQ ID NO: 2314972
uaucacaaugggaauucag

SEQ ID NO: 2314974 - RNA, 19 nt, Artificial Sequence
  Description of Artificial Sequence: Synthetic oligonucleotide
  Sense strand starting at position 1995 of SEQ ID NO: 1885085
uugugauaucaucagaggu

SEQ ID NO: 2314975 - RNA, 19 nt, Artificial Sequence
  Description of Artificial Sequence: Synthetic oligonucleotide
  Antisense strand to SEQ ID NO: 2314974
accucugaugauaucacaa

SEQ ID NO: 2314976 - RNA, 19 nt, Artificial Sequence
  Description of Artificial Sequence: Synthetic oligonucleotide
  Sense strand starting at position 3119 of SEQ ID NO: 1885085
ccugguaacuaucuugauu

SEQ ID NO: 2314977 - RNA, 19 nt, Artificial Sequence
  Description of Artificial Sequence: Synthetic oligonucleotide
  Antisense strand to SEQ ID NO: 2314976
aaucaagauaguuaccagg

SEQ ID NO: 2314978 - RNA, 19 nt, Artificial Sequence
  Description of Artificial Sequence: Synthetic oligonucleotide
  Sense strand starting at position 3133 of SEQ ID NO: 1885085
ugauuugacuuguuugugu

SEQ ID NO: 2314979 - RNA, 19 nt, Artificial Sequence
  Description of Artificial Sequence: Synthetic oligonucleotide
  Antisense strand to SEQ ID NO: 2314978
acacaaacaagucaaauca

SEQ ID NO: 2314980 - RNA, 19 nt, Artificial Sequence
  Description of Artificial Sequence: Synthetic oligonucleotide
  Sense strand starting at position 3135 of SEQ ID NO: 1885085
auuugacuuguuuguguuu

SEQ ID NO: 2314981 - RNA, 19 nt, Artificial Sequence
  Description of Artificial Sequence: Synthetic oligonucleotide
  Antisense strand to SEQ ID NO: 2314980
aaacacaaacaagucaaau

SEQ ID NO: 2314982 - RNA, 19 nt, Artificial Sequence
  Description of Artificial Sequence: Synthetic oligonucleotide
  Sense strand starting at position 3150 of SEQ ID NO: 1885085
guuucuugggaaugguuau

SEQ ID NO: 2314983 - RNA, 19 nt, Artificial Sequence
  Description of Artificial Sequence: Synthetic oligonucleotide
  Antisense strand to SEQ ID NO: 2314982
auaaccauucccaagaaac

SEQ ID NO: 2314984 - RNA, 19 nt, Artificial Sequence
  Description of Artificial Sequence: Synthetic oligonucleotide
  Sense strand starting at position 3151 of SEQ ID NO: 1885085
uuucuugggaaugguuauu

SEQ ID NO: 2314985 - RNA, 19 nt, Artificial Sequence
  Description of Artificial Sequence: Synthetic oligonucleotide
  Antisense strand to SEQ ID NO: 2314984
aauaaccauucccaagaaa

SEQ ID NO: 2314986 - RNA, 19 nt, Artificial Sequence
  Description of Artificial Sequence: Synthetic oligonucleotide
  Sense strand starting at position 3179 of SEQ ID NO: 1885085
uugagcaaucuguagagau

SEQ ID NO: 2314987 - RNA, 19 nt, Artificial Sequence
  Description of Artificial Sequence: Synthetic oligonucleotide
  Antisense strand to SEQ ID NO: 2314986
aucucuacagauugcucaa

SEQ ID NO: 2314988 - RNA, 19 nt, Artificial Sequence
  Description of Artificial Sequence: Synthetic oligonucleotide
  Sense strand starting at position 3183 of SEQ ID NO: 1885085
gcaaucuguagagaugucu

SEQ ID NO: 2314989 - RNA, 19 nt, Artificial Sequence
  Description of Artificial Sequence: Synthetic oligonucleotide
  Antisense strand to SEQ ID NO: 2314988
agacaucucuacagauugc

SEQ ID NO: 2314990 - RNA, 19 nt, Artificial Sequence
  Description of Artificial Sequence: Synthetic oligonucleotide
  Sense strand starting at position 3303 of SEQ ID NO: 1885085
caugguggugaccaucaua

SEQ ID NO: 2314991 - RNA, 19 nt, Artificial Sequence
  Description of Artificial Sequence: Synthetic oligonucleotide
  Antisense strand to SEQ ID NO: 2314990
uaugauggucaccaccaug

SEQ ID NO: 2314992 - RNA, 19 nt, Artificial Sequence
  Description of Artificial Sequence: Synthetic oligonucleotide
  Sense strand starting at position 3329 of SEQ ID NO: 1885085
agacauuuguuagaaacua

SEQ ID NO: 2314993 - RNA, 19 nt, Artificial Sequence
  Description of Artificial Sequence: Synthetic oligonucleotide
  Antisense strand to SEQ ID NO: 2314992
uaguuucuaacaaaugucu

SEQ ID NO: 2314994 - RNA, 19 nt, Artificial Sequence
  Description of Artificial Sequence: Synthetic oligonucleotide
  Sense strand starting at position 86 of SEQ ID NO: 1885086
gagagaacauuugguuaaa

SEQ ID NO: 2314995 - RNA, 19 nt, Artificial Sequence
  Description of Artificial Sequence: Synthetic oligonucleotide
  Antisense strand to SEQ ID NO: 2314994
uuuaaccaaauguucucuc

SEQ ID NO: 2314996 - RNA, 19 nt, Artificial Sequence
  Description of Artificial Sequence: Synthetic oligonucleotide
  Sense strand starting at position 104 of SEQ ID NO: 1885086
agaacuauggcagggaguu

SEQ ID NO: 2314997 - RNA, 19 nt, Artificial Sequence
  Description of Artificial Sequence: Synthetic oligonucleotide
  Antisense strand to SEQ ID NO: 2314996
aacucccugccauaguucu

SEQ ID NO: 2314998 - RNA, 19 nt, Artificial Sequence
  Description of Artificial Sequence: Synthetic oligonucleotide
  Sense strand starting at position 182 of SEQ ID NO: 1885086
gggacaugucucuggaggu

SEQ ID NO: 2314999 - RNA, 19 nt, Artificial Sequence
  Description of Artificial Sequence: Synthetic oligonucleotide
  Antisense strand to SEQ ID NO: 2314998
accuccagagacauguccc

SEQ ID NO: 2315000 - RNA, 19 nt, Artificial Sequence
  Description of Artificial Sequence: Synthetic oligonucleotide
  Sense strand starting at position 199 of SEQ ID NO: 1885086
gugguuuaugaagaggcua

SEQ ID NO: 2315001 - RNA, 19 nt, Artificial Sequence
  Description of Artificial Sequence: Synthetic oligonucleotide
  Antisense strand to SEQ ID NO: 2315000
uagccucuucauaaaccac

SEQ ID NO: 2315002 - RNA, 19 nt, Artificial Sequence
  Description of Artificial Sequence: Synthetic oligonucleotide
  Sense strand starting at position 266 of SEQ ID NO: 1885086
cuauuuauucccuguguga

SEQ ID NO: 2315003 - RNA, 19 nt, Artificial Sequence
  Description of Artificial Sequence: Synthetic oligonucleotide
  Antisense strand to SEQ ID NO: 2315002
ucacacagggaauaaauag

SEQ ID NO: 2315004 - RNA, 19 nt, Artificial Sequence
  Description of Artificial Sequence: Synthetic oligonucleotide
  Sense strand starting at position 268 of SEQ ID NO: 1885086
auuuauucccugugugauu

SEQ ID NO: 2315005 - RNA, 19 nt, Artificial Sequence
  Description of Artificial Sequence: Synthetic oligonucleotide
  Antisense strand to SEQ ID NO: 2315004
aaucacacagggaauaaau

SEQ ID NO: 2315006 - RNA, 19 nt, Artificial Sequence
  Description of Artificial Sequence: Synthetic oligonucleotide
  Sense strand starting at position 269 of SEQ ID NO: 1885086
uuuauucccugugugauuu

SEQ ID NO: 2315007 - RNA, 19 nt, Artificial Sequence
  Description of Artificial Sequence: Synthetic oligonucleotide
  Antisense strand to SEQ ID NO: 2315006
aaaucacacagggaauaaa

SEQ ID NO: 2315008 - RNA, 19 nt, Artificial Sequence
  Description of Artificial Sequence: Synthetic oligonucleotide
  Sense strand starting at position 289 of SEQ ID NO: 1885086
ggacaaguugcucaaguug

SEQ ID NO: 2315009 - RNA, 19 nt, Artificial Sequence
  Description of Artificial Sequence: Synthetic oligonucleotide
  Antisense strand to SEQ ID NO: 2315008
caacuugagcaacuugucc

SEQ ID NO: 2315010 - RNA, 19 nt, Artificial Sequence
  Description of Artificial Sequence: Synthetic oligonucleotide
  Sense strand starting at position 343 of SEQ ID NO: 1885086
gguuguuaugaggguugaa

SEQ ID NO: 2315011 - RNA, 19 nt, Artificial Sequence
  Description of Artificial Sequence: Synthetic oligonucleotide
  Antisense strand to SEQ ID NO: 2315010
uucaacccucauaacaacc

SEQ ID NO: 2315012 - RNA, 19 nt, Artificial Sequence
  Description of Artificial Sequence: Synthetic oligonucleotide
  Sense strand starting at position 346 of SEQ ID NO: 1885086
uguuaugaggguugaauga

SEQ ID NO: 2315013 - RNA, 19 nt, Artificial Sequence
  Description of Artificial Sequence: Synthetic oligonucleotide
  Antisense strand to SEQ ID NO: 2315012
ucauucaacccucauaaca

SEQ ID NO: 2315014 - RNA, 19 nt, Artificial Sequence
  Description of Artificial Sequence: Synthetic oligonucleotide
  Sense strand starting at position 355 of SEQ ID NO: 1885086
gguugaaugacuggaugcu

SEQ ID NO: 2315015 - RNA, 19 nt, Artificial Sequence
  Description of Artificial Sequence: Synthetic oligonucleotide
  Antisense strand to SEQ ID NO: 2315014
agcauccagucauucaacc

SEQ ID NO: 2315016 - RNA, 19 nt, Artificial Sequence
  Description of Artificial Sequence: Synthetic oligonucleotide
  Sense strand starting at position 361 of SEQ ID NO: 1885086
augacuggaugcuuauaaa

SEQ ID NO: 2315017 - RNA, 19 nt, Artificial Sequence
  Description of Artificial Sequence: Synthetic oligonucleotide
  Antisense strand to SEQ ID NO: 2315016
uuuauaagcauccagucau

SEQ ID NO: 2315018 - RNA, 19 nt, Artificial Sequence
  Description of Artificial Sequence: Synthetic oligonucleotide
  Sense strand starting at position 510 of SEQ ID NO: 1885086
gagaguguucagugaaagg

SEQ ID NO: 2315019 - RNA, 19 nt, Artificial Sequence
  Description of Artificial Sequence: Synthetic oligonucleotide
  Antisense strand to SEQ ID NO: 2315018
ccuuucacugaacacucuc

SEQ ID NO: 2315020 - RNA, 19 nt, Artificial Sequence
  Description of Artificial Sequence: Synthetic oligonucleotide
  Sense strand starting at position 655 of SEQ ID NO: 1885086
uaguguuucccagguauuu

SEQ ID NO: 2315021 - RNA, 19 nt, Artificial Sequence
  Description of Artificial Sequence: Synthetic oligonucleotide
  Antisense strand to SEQ ID NO: 2315020
aaauaccugggaaacacua

SEQ ID NO: 2315022 - RNA, 19 nt, Artificial Sequence
  Description of Artificial Sequence: Synthetic oligonucleotide
  Sense strand starting at position 729 of SEQ ID NO: 1885086
acuuaagauuggucccaau

SEQ ID NO: 2315023 - RNA, 19 nt, Artificial Sequence
  Description of Artificial Sequence: Synthetic oligonucleotide
  Antisense strand to SEQ ID NO: 2315022
auugggaccaaucuuaagu

SEQ ID NO: 2315024 - RNA, 19 nt, Artificial Sequence
  Description of Artificial Sequence: Synthetic oligonucleotide
  Sense strand starting at position 901 of SEQ ID NO: 1885086
ccgcuuguaguucuaguua

SEQ ID NO: 2315025 - RNA, 19 nt, Artificial Sequence
  Description of Artificial Sequence: Synthetic oligonucleotide
  Antisense strand to SEQ ID NO: 2315024
uaacuagaacuacaagcgg

SEQ ID NO: 2315026 - RNA, 19 nt, Artificial Sequence
  Description of Artificial Sequence: Synthetic oligonucleotide
  Sense strand starting at position 906 of SEQ ID NO: 1885086
uguaguucuaguuacugaa

SEQ ID NO: 2315027 - RNA, 19 nt, Artificial Sequence
  Description of Artificial Sequence: Synthetic oligonucleotide
  Antisense strand to SEQ ID NO: 2315026
uucaguaacuagaacuaca

SEQ ID NO: 2315028 - RNA, 19 nt, Artificial Sequence
  Description of Artificial Sequence: Synthetic oligonucleotide
  Sense strand starting at position 1004 of SEQ ID NO: 1885086
uugugauaacccuagcacu

SEQ ID NO: 2315029 - RNA, 19 nt, Artificial Sequence
  Description of Artificial Sequence: Synthetic oligonucleotide
  Antisense strand to SEQ ID NO: 2315028
agugcuaggguuaucacaa

SEQ ID NO: 2315030 - RNA, 19 nt, Artificial Sequence
  Description of Artificial Sequence: Synthetic oligonucleotide
  Sense strand starting at position 1196 of SEQ ID NO: 1885086
cuccaagggucuuuaaagu

SEQ ID NO: 2315031 - RNA, 19 nt, Artificial Sequence
  Description of Artificial Sequence: Synthetic oligonucleotide
  Antisense strand to SEQ ID NO: 2315030
acuuuaaagacccuuggag

SEQ ID NO: 2315032 - RNA, 19 nt, Artificial Sequence
  Description of Artificial Sequence: Synthetic oligonucleotide
  Sense strand starting at position 1212 of SEQ ID NO: 1885086
aguacuaaaucccuuugua

SEQ ID NO: 2315033 - RNA, 19 nt, Artificial Sequence
  Description of Artificial Sequence: Synthetic oligonucleotide
  Antisense strand to SEQ ID NO: 2315032
uacaaagggauuuaguacu

SEQ ID NO: 2315034 - RNA, 19 nt, Artificial Sequence
  Description of Artificial Sequence: Synthetic oligonucleotide
  Sense strand starting at position 1244 of SEQ ID NO: 1885086
ucccuuugguuuccaggaa

SEQ ID NO: 2315035 - RNA, 19 nt, Artificial Sequence
  Description of Artificial Sequence: Synthetic oligonucleotide
  Antisense strand to SEQ ID NO: 2315034
uuccuggaaaccaaaggga

SEQ ID NO: 2315036 - RNA, 19 nt, Artificial Sequence
  Description of Artificial Sequence: Synthetic oligonucleotide
  Sense strand starting at position 1248 of SEQ ID NO: 1885086
uuugguuuccaggaaagca

SEQ ID NO: 2315037 - RNA, 19 nt, Artificial Sequence
  Description of Artificial Sequence: Synthetic oligonucleotide
  Antisense strand to SEQ ID NO: 2315036
ugcuuuccuggaaaccaaa

SEQ ID NO: 2315038 - RNA, 19 nt, Artificial Sequence
  Description of Artificial Sequence: Synthetic oligonucleotide
  Sense strand starting at position 1336 of SEQ ID NO: 1885086
uccacauugcuuuagaaga

SEQ ID NO: 2315039 - RNA, 19 nt, Artificial Sequence
  Description of Artificial Sequence: Synthetic oligonucleotide
  Antisense strand to SEQ ID NO: 2315038
ucuucuaaagcaaugugga

SEQ ID NO: 2315040 - RNA, 19 nt, Artificial Sequence
  Description of Artificial Sequence: Synthetic oligonucleotide
  Sense strand starting at position 1341 of SEQ ID NO: 1885086
auugcuuuagaagaguuua

SEQ ID NO: 2315041 - RNA, 19 nt, Artificial Sequence
  Description of Artificial Sequence: Synthetic oligonucleotide
  Antisense strand to SEQ ID NO: 2315040
uaaacucuucuaaagcaau

SEQ ID NO: 2315042 - RNA, 19 nt, Artificial Sequence
  Description of Artificial Sequence: Synthetic oligonucleotide
  Sense strand starting at position 1515 of SEQ ID NO: 1885086
accucaauguaugcggaaa

SEQ ID NO: 2315043 - RNA, 19 nt, Artificial Sequence
  Description of Artificial Sequence: Synthetic oligonucleotide
  Antisense strand to SEQ ID NO: 2315042
uuuccgcauacauugaggu

SEQ ID NO: 2315044 - RNA, 19 nt, Artificial Sequence
  Description of Artificial Sequence: Synthetic oligonucleotide
  Sense strand starting at position 1663 of SEQ ID NO: 1885086
uuaaccuacccguacagau

SEQ ID NO: 2315045 - RNA, 19 nt, Artificial Sequence
  Description of Artificial Sequence: Synthetic oligonucleotide
  Antisense strand to SEQ ID NO: 2315044
aucuguacggguagguuaa

SEQ ID NO: 2315046 - RNA, 19 nt, Artificial Sequence
  Description of Artificial Sequence: Synthetic oligonucleotide
  Sense strand starting at position 1691 of SEQ ID NO: 1885086
ccacuucggagcuagagua

SEQ ID NO: 2315047 - RNA, 19 nt, Artificial Sequence
  Description of Artificial Sequence: Synthetic oligonucleotide
  Antisense strand to SEQ ID NO: 2315046
uacucuagcuccgaagugg

SEQ ID NO: 2315048 - RNA, 19 nt, Artificial Sequence
  Description of Artificial Sequence: Synthetic oligonucleotide
  Sense strand starting at position 1732 of SEQ ID NO: 1885086
gcuccacgucgccuuuaaa

SEQ ID NO: 2315049 - RNA, 19 nt, Artificial Sequence
  Description of Artificial Sequence: Synthetic oligonucleotide
  Antisense strand to SEQ ID NO: 2315048
uuuaaaggcgacguggagc

SEQ ID NO: 2315050 - RNA, 19 nt, Artificial Sequence
  Description of Artificial Sequence: Synthetic oligonucleotide
  Sense strand starting at position 1808 of SEQ ID NO: 1885086
ccuccucuccaguaucaga

SEQ ID NO: 2315051 - RNA, 19 nt, Artificial Sequence
  Description of Artificial Sequence: Synthetic oligonucleotide
  Antisense strand to SEQ ID NO: 2315050
ucugauacuggagaggagg

SEQ ID NO: 2315052 - RNA, 19 nt, Artificial Sequence
  Description of Artificial Sequence: Synthetic oligonucleotide
  Sense strand starting at position 2821 of SEQ ID NO: 1885086
cugaauccucguuaaagua

SEQ ID NO: 2315053 - RNA, 19 nt, Artificial Sequence
  Description of Artificial Sequence: Synthetic oligonucleotide
  Antisense strand to SEQ ID NO: 2315052
uacuuuaacgaggauucag

SEQ ID NO: 2315054 - RNA, 19 nt, Artificial Sequence
  Description of Artificial Sequence: Synthetic oligonucleotide
  Sense strand starting at position 2954 of SEQ ID NO: 1885086
gcugugaucggaggaggaa

SEQ ID NO: 2315055 - RNA, 19 nt, Artificial Sequence
  Description of Artificial Sequence: Synthetic oligonucleotide
  Antisense strand to SEQ ID NO: 2315054
uuccuccuccgaucacagc

SEQ ID NO: 2315056 - RNA, 19 nt, Artificial Sequence
  Description of Artificial Sequence: Synthetic oligonucleotide
  Sense strand starting at position 3442 of SEQ ID NO: 1885086
acggaauauuucgaucaaa

SEQ ID NO: 2315057 - RNA, 19 nt, Artificial Sequence
  Description of Artificial Sequence: Synthetic oligonucleotide
  Antisense strand to SEQ ID NO: 2315056
uuugaucgaaauauuccgu

SEQ ID NO: 2315058 - RNA, 19 nt, Artificial Sequence
  Description of Artificial Sequence: Synthetic oligonucleotide
  Sense strand starting at position 3476 of SEQ ID NO: 1885086
cuugguuguccagggacaa

SEQ ID NO: 2315059 - RNA, 19 nt, Artificial Sequence
  Description of Artificial Sequence: Synthetic oligonucleotide
  Antisense strand to SEQ ID NO: 2315058
uugucccuggacaaccaag

SEQ ID NO: 2315060 - RNA, 19 nt, Artificial Sequence
  Description of Artificial Sequence: Synthetic oligonucleotide
  Sense strand starting at position 3477 of SEQ ID NO: 1885086
uugguuguccagggacaaa

SEQ ID NO: 2315061 - RNA, 19 nt, Artificial Sequence
  Description of Artificial Sequence: Synthetic oligonucleotide
  Antisense strand to SEQ ID NO: 2315060
uuugucccuggacaaccaa

SEQ ID NO: 2315062 - RNA, 19 nt, Artificial Sequence
  Description of Artificial Sequence: Synthetic oligonucleotide
  Sense strand starting at position 3734 of SEQ ID NO: 1885086
acuguuuagcaagauuaag

SEQ ID NO: 2315063 - RNA, 19 nt, Artificial Sequence
  Description of Artificial Sequence: Synthetic oligonucleotide
  Antisense strand to SEQ ID NO: 2315062
cuuaaucuugcuaaacagu

SEQ ID NO: 2315064 - RNA, 19 nt, Artificial Sequence
  Description of Artificial Sequence: Synthetic oligonucleotide
  Sense strand starting at position 3749 of SEQ ID NO: 1885086
uaaguaguaccugaugauu

SEQ ID NO: 2315065 - RNA, 19 nt, Artificial Sequence
  Description of Artificial Sequence: Synthetic oligonucleotide
  Antisense strand to SEQ ID NO: 2315064
aaucaucagguacuacuua

SEQ ID NO: 2315066 - RNA, 19 nt, Artificial Sequence
  Description of Artificial Sequence: Synthetic oligonucleotide
  Sense strand starting at position 3752 of SEQ ID NO: 1885086
guaguaccugaugauuaca

SEQ ID NO: 2315067 - RNA, 19 nt, Artificial Sequence
  Description of Artificial Sequence: Synthetic oligonucleotide
  Antisense strand to SEQ ID NO: 2315066
uguaaucaucagguacuac

SEQ ID NO: 2315068 - RNA, 19 nt, Artificial Sequence
  Description of Artificial Sequence: Synthetic oligonucleotide
  Sense strand starting at position 3754 of SEQ ID NO: 1885086
aguaccugaugauuacaua

SEQ ID NO: 2315069 - RNA, 19 nt, Artificial Sequence
  Description of Artificial Sequence: Synthetic oligonucleotide
  Antisense strand to SEQ ID NO: 2315068
uauguaaucaucagguacu

SEQ ID NO: 2315070 - RNA, 19 nt, Artificial Sequence
  Description of Artificial Sequence: Synthetic oligonucleotide
  Sense strand starting at position 3815 of SEQ ID NO: 1885086
acagucuguuucccaggaa

SEQ ID NO: 2315071 - RNA, 19 nt, Artificial Sequence
  Description of Artificial Sequence: Synthetic oligonucleotide
  Antisense strand to SEQ ID NO: 2315070
uuccugggaaacagacugu

SEQ ID NO: 2315072 - RNA, 19 nt, Artificial Sequence
  Description of Artificial Sequence: Synthetic oligonucleotide
  Sense strand starting at position 3829 of SEQ ID NO: 1885086
aggaaaguauuauugucuu

SEQ ID NO: 2315073 - RNA, 19 nt, Artificial Sequence
  Description of Artificial Sequence: Synthetic oligonucleotide
  Antisense strand to SEQ ID NO: 2315072
aagacaauaauacuuuccu

SEQ ID NO: 2315074 - RNA, 19 nt, Artificial Sequence
  Description of Artificial Sequence: Synthetic oligonucleotide
  Sense strand starting at position 353 of SEQ ID NO: 1885087
gcuguagaguauuugcuaa

SEQ ID NO: 2315075 - RNA, 19 nt, Artificial Sequence
  Description of Artificial Sequence: Synthetic oligonucleotide
  Antisense strand to SEQ ID NO: 2315074
uuagcaaauacucuacagc

SEQ ID NO: 2315076 - RNA, 19 nt, Artificial Sequence
  Description of Artificial Sequence: Synthetic oligonucleotide
  Sense strand starting at position 375 of SEQ ID NO: 1885087
acgaaccuuccguaaucaa

SEQ ID NO: 2315077 - RNA, 19 nt, Artificial Sequence
  Description of Artificial Sequence: Synthetic oligonucleotide
  Antisense strand to SEQ ID NO: 2315076
uugauuacggaagguucgu

SEQ ID NO: 2315078 - RNA, 19 nt, Artificial Sequence
  Description of Artificial Sequence: Synthetic oligonucleotide
  Sense strand starting at position 382 of SEQ ID NO: 1885087
uuccguaaucaauggacau

SEQ ID NO: 2315079 - RNA, 19 nt, Artificial Sequence
  Description of Artificial Sequence: Synthetic oligonucleotide
  Antisense strand to SEQ ID NO: 2315078
auguccauugauuacggaa

SEQ ID NO: 2315080 - RNA, 19 nt, Artificial Sequence
  Description of Artificial Sequence: Synthetic oligonucleotide
  Sense strand starting at position 445 of SEQ ID NO: 1885087
ugccuuagugaugacgaaa

SEQ ID NO: 2315081 - RNA, 19 nt, Artificial Sequence
  Description of Artificial Sequence: Synthetic oligonucleotide
  Antisense strand to SEQ ID NO: 2315080
uuucgucaucacuaaggca

SEQ ID NO: 2315082 - RNA, 19 nt, Artificial Sequence
  Description of Artificial Sequence: Synthetic oligonucleotide
  Sense strand starting at position 499 of SEQ ID NO: 1885087
aagagucaagcuugacaag

SEQ ID NO: 2315083 - RNA, 19 nt, Artificial Sequence
  Description of Artificial Sequence: Synthetic oligonucleotide
  Antisense strand to SEQ ID NO: 2315082
cuugucaagcuugacucuu

SEQ ID NO: 2315084 - RNA, 19 nt, Artificial Sequence
  Description of Artificial Sequence: Synthetic oligonucleotide
  Sense strand starting at position 538 of SEQ ID NO: 1885087
ggaggauuccacugggucu

SEQ ID NO: 2315085 - RNA, 19 nt, Artificial Sequence
  Description of Artificial Sequence: Synthetic oligonucleotide
  Antisense strand to SEQ ID NO: 2315084
agacccaguggaauccucc

SEQ ID NO: 2315086 - RNA, 19 nt, Artificial Sequence
  Description of Artificial Sequence: Synthetic oligonucleotide
  Sense strand starting at position 637 of SEQ ID NO: 1885087
uuauacuugcugcaggaau

SEQ ID NO: 2315087 - RNA, 19 nt, Artificial Sequence
  Description of Artificial Sequence: Synthetic oligonucleotide
  Antisense strand to SEQ ID NO: 2315086
auuccugcagcaaguauaa

SEQ ID NO: 2315088 - RNA, 19 nt, Artificial Sequence
  Description of Artificial Sequence: Synthetic oligonucleotide
  Sense strand starting at position 639 of SEQ ID NO: 1885087
auacuugcugcaggaauau

SEQ ID NO: 2315089 - RNA, 19 nt, Artificial Sequence
  Description of Artificial Sequence: Synthetic oligonucleotide
  Antisense strand to SEQ ID NO: 2315088
auauuccugcagcaaguau

SEQ ID NO: 2315090 - RNA, 19 nt, Artificial Sequence
  Description of Artificial Sequence: Synthetic oligonucleotide
  Sense strand starting at position 801 of SEQ ID NO: 1885087
aggacuagugcaugacauu

SEQ ID NO: 2315091 - RNA, 19 nt, Artificial Sequence
  Description of Artificial Sequence: Synthetic oligonucleotide
  Antisense strand to SEQ ID NO: 2315090
aaugucaugcacuaguccu

SEQ ID NO: 2315092 - RNA, 19 nt, Artificial Sequence
  Description of Artificial Sequence: Synthetic oligonucleotide
  Sense strand starting at position 1071 of SEQ ID NO: 1885087
gaggccuguggucaggaau

SEQ ID NO: 2315093 - RNA, 19 nt, Artificial Sequence
  Description of Artificial Sequence: Synthetic oligonucleotide
  Antisense strand to SEQ ID NO: 2315092
auuccugaccacaggccuc

SEQ ID NO: 2315094 - RNA, 19 nt, Artificial Sequence
  Description of Artificial Sequence: Synthetic oligonucleotide
  Sense strand starting at position 1113 of SEQ ID NO: 1885087
gcuagacugagcuaaguaa

SEQ ID NO: 2315095 - RNA, 19 nt, Artificial Sequence
  Description of Artificial Sequence: Synthetic oligonucleotide
  Antisense strand to SEQ ID NO: 2315094
uuacuuagcucagucuagc

SEQ ID NO: 2315096 - RNA, 19 nt, Artificial Sequence
  Description of Artificial Sequence: Synthetic oligonucleotide
  Sense strand starting at position 1171 of SEQ ID NO: 1885087
ccuggcuaaucaccagaau

SEQ ID NO: 2315097 - RNA, 19 nt, Artificial Sequence
  Description of Artificial Sequence: Synthetic oligonucleotide
  Antisense strand to SEQ ID NO: 2315096
auucuggugauuagccagg

SEQ ID NO: 2315098 - RNA, 19 nt, Artificial Sequence
  Description of Artificial Sequence: Synthetic oligonucleotide
  Sense strand starting at position 1262 of SEQ ID NO: 1885087
aagaaugaggccuggguau

SEQ ID NO: 2315099 - RNA, 19 nt, Artificial Sequence
  Description of Artificial Sequence: Synthetic oligonucleotide
  Antisense strand to SEQ ID NO: 2315098
auacccaggccucauucuu

SEQ ID NO: 2315100 - RNA, 19 nt, Artificial Sequence
  Description of Artificial Sequence: Synthetic oligonucleotide
  Sense strand starting at position 1339 of SEQ ID NO: 1885087
ucugauguguggcugauuu

SEQ ID NO: 2315101 - RNA, 19 nt, Artificial Sequence
  Description of Artificial Sequence: Synthetic oligonucleotide
  Antisense strand to SEQ ID NO: 2315100
aaaucagccacacaucaga

SEQ ID NO: 2315102 - RNA, 19 nt, Artificial Sequence
  Description of Artificial Sequence: Synthetic oligonucleotide
  Sense strand starting at position 1681 of SEQ ID NO: 1885087
gcaugcugucuggcacauu

SEQ ID NO: 2315103 - RNA, 19 nt, Artificial Sequence
  Description of Artificial Sequence: Synthetic oligonucleotide
  Antisense strand to SEQ ID NO: 2315102
aaugugccagacagcaugc

SEQ ID NO: 2315104 - RNA, 19 nt, Artificial Sequence
  Description of Artificial Sequence: Synthetic oligonucleotide
  Sense strand starting at position 1737 of SEQ ID NO: 1885087
gugucuuggaagggaaagu

SEQ ID NO: 2315105 - RNA, 19 nt, Artificial Sequence
  Description of Artificial Sequence: Synthetic oligonucleotide
  Antisense strand to SEQ ID NO: 2315104
acuuucccuuccaagacac

SEQ ID NO: 2315106 - RNA, 19 nt, Artificial Sequence
  Description of Artificial Sequence: Synthetic oligonucleotide
  Sense strand starting at position 1987 of SEQ ID NO: 1885087
uugaaucagcacugugaag

SEQ ID NO: 2315107 - RNA, 19 nt, Artificial Sequence
  Description of Artificial Sequence: Synthetic oligonucleotide
  Antisense strand to SEQ ID NO: 2315106
cuucacagugcugauucaa

SEQ ID NO: 2315108 - RNA, 19 nt, Artificial Sequence
  Description of Artificial Sequence: Synthetic oligonucleotide
  Sense strand starting at position 2004 of SEQ ID NO: 1885087
agucuugacccagaaugcu

SEQ ID NO: 2315109 - RNA, 19 nt, Artificial Sequence
  Description of Artificial Sequence: Synthetic oligonucleotide
  Antisense strand to SEQ ID NO: 2315108
agcauucugggucaagacu

SEQ ID NO: 2315110 - RNA, 19 nt, Artificial Sequence
  Description of Artificial Sequence: Synthetic oligonucleotide
  Sense strand starting at position 2016 of SEQ ID NO: 1885087
gaaugcuuugcucaaggag

SEQ ID NO: 2315111 - RNA, 19 nt, Artificial Sequence
  Description of Artificial Sequence: Synthetic oligonucleotide
  Antisense strand to SEQ ID NO: 2315110
cuccuugagcaaagcauuc

SEQ ID NO: 2315112 - RNA, 19 nt, Artificial Sequence
  Description of Artificial Sequence: Synthetic oligonucleotide
  Sense strand starting at position 2175 of SEQ ID NO: 1885087
gccugucauuugguggauu

SEQ ID NO: 2315113 - RNA, 19 nt, Artificial Sequence
  Description of Artificial Sequence: Synthetic oligonucleotide
  Antisense strand to SEQ ID NO: 2315112
aauccaccaaaugacaggc

SEQ ID NO: 2315114 - RNA, 19 nt, Artificial Sequence
  Description of Artificial Sequence: Synthetic oligonucleotide
  Sense strand starting at position 2312 of SEQ ID NO: 1885087
ucuacuaucccagggacuu

SEQ ID NO: 2315115 - RNA, 19 nt, Artificial Sequence
  Description of Artificial Sequence: Synthetic oligonucleotide
  Antisense strand to SEQ ID NO: 2315114
aagucccugggauaguaga

SEQ ID NO: 2315116 - RNA, 19 nt, Artificial Sequence
  Description of Artificial Sequence: Synthetic oligonucleotide
  Sense strand starting at position 2318 of SEQ ID NO: 1885087
aucccagggacuugugaaa

SEQ ID NO: 2315117 - RNA, 19 nt, Artificial Sequence
  Description of Artificial Sequence: Synthetic oligonucleotide
  Antisense strand to SEQ ID NO: 2315116
uuucacaagucccugggau

SEQ ID NO: 2315118 - RNA, 19 nt, Artificial Sequence
  Description of Artificial Sequence: Synthetic oligonucleotide
  Sense strand starting at position 2397 of SEQ ID NO: 1885087
ggaguuggccuuugaagac

SEQ ID NO: 2315119 - RNA, 19 nt, Artificial Sequence
  Description of Artificial Sequence: Synthetic oligonucleotide
  Antisense strand to SEQ ID NO: 2315118
gucuucaaaggccaacucc

SEQ ID NO: 2315120 - RNA, 19 nt, Artificial Sequence
  Description of Artificial Sequence: Synthetic oligonucleotide
  Sense strand starting at position 2601 of SEQ ID NO: 1885087
uggguauugccuuagggag

SEQ ID NO: 2315121 - RNA, 19 nt, Artificial Sequence
  Description of Artificial Sequence: Synthetic oligonucleotide
  Antisense strand to SEQ ID NO: 2315120
cucccuaaggcaauaccca

SEQ ID NO: 2315122 - RNA, 19 nt, Artificial Sequence
  Description of Artificial Sequence: Synthetic oligonucleotide
  Sense strand starting at position 2669 of SEQ ID NO: 1885087
guaagauugcauuaaacau

SEQ ID NO: 2315123 - RNA, 19 nt, Artificial Sequence
  Description of Artificial Sequence: Synthetic oligonucleotide
  Antisense strand to SEQ ID NO: 2315122
auguuuaaugcaaucuuac

SEQ ID NO: 2315124 - RNA, 19 nt, Artificial Sequence
  Description of Artificial Sequence: Synthetic oligonucleotide
  Sense strand starting at position 2830 of SEQ ID NO: 1885087
ugcugaaaucuggauggcu

SEQ ID NO: 2315125 - RNA, 19 nt, Artificial Sequence
  Description of Artificial Sequence: Synthetic oligonucleotide
  Antisense strand to SEQ ID NO: 2315124
agccauccagauuucagca

SEQ ID NO: 2315126 - RNA, 19 nt, Artificial Sequence
  Description of Artificial Sequence: Synthetic oligonucleotide
  Sense strand starting at position 2861 of SEQ ID NO: 1885087
ggauaagaaucuucuguac

SEQ ID NO: 2315127 - RNA, 19 nt, Artificial Sequence
  Description of Artificial Sequence: Synthetic oligonucleotide
  Antisense strand to SEQ ID NO: 2315126
guacagaagauucuuaucc

SEQ ID NO: 2315128 - RNA, 19 nt, Artificial Sequence
  Description of Artificial Sequence: Synthetic oligonucleotide
  Sense strand starting at position 2950 of SEQ ID NO: 1885087
aaucguaacggccaacauu

SEQ ID NO: 2315129 - RNA, 19 nt, Artificial Sequence
  Description of Artificial Sequence: Synthetic oligonucleotide
  Antisense strand to SEQ ID NO: 2315128
aauguuggccguuacgauu

SEQ ID NO: 2315130 - RNA, 19 nt, Artificial Sequence
  Description of Artificial Sequence: Synthetic oligonucleotide
  Sense strand starting at position 2977 of SEQ ID NO: 1885087
cuuccuuagggcuaagcaa

SEQ ID NO: 2315131 - RNA, 19 nt, Artificial Sequence
  Description of Artificial Sequence: Synthetic oligonucleotide
  Antisense strand to SEQ ID NO: 2315130
uugcuuagcccuaaggaag

SEQ ID NO: 2315132 - RNA, 19 nt, Artificial Sequence
  Description of Artificial Sequence: Synthetic oligonucleotide
  Sense strand starting at position 3073 of SEQ ID NO: 1885087
aguggugaagucuagauuc

SEQ ID NO: 2315133 - RNA, 19 nt, Artificial Sequence
  Description of Artificial Sequence: Synthetic oligonucleotide
  Antisense strand to SEQ ID NO: 2315132
gaaucuagacuucaccacu

SEQ ID NO: 2315134 - RNA, 19 nt, Artificial Sequence
  Description of Artificial Sequence: Synthetic oligonucleotide
  Sense strand starting at position 3075 of SEQ ID NO: 1885087
uggugaagucuagauucag

SEQ ID NO: 2315135 - RNA, 19 nt, Artificial Sequence
  Description of Artificial Sequence: Synthetic oligonucleotide
  Antisense strand to SEQ ID NO: 2315134
cugaaucuagacuucacca

SEQ ID NO: 2315136 - RNA, 19 nt, Artificial Sequence
  Description of Artificial Sequence: Synthetic oligonucleotide
  Sense strand starting at position 3093 of SEQ ID NO: 1885087
gaucaaguagcagacuuua

SEQ ID NO: 2315137 - RNA, 19 nt, Artificial Sequence
  Description of Artificial Sequence: Synthetic oligonucleotide
  Antisense strand to SEQ ID NO: 2315136
uaaagucugcuacuugauc

SEQ ID NO: 2315138 - RNA, 19 nt, Artificial Sequence
  Description of Artificial Sequence: Synthetic oligonucleotide
  Sense strand starting at position 3227 of SEQ ID NO: 1885087
ggaggcagcucuuuggaga

SEQ ID NO: 2315139 - RNA, 19 nt, Artificial Sequence
  Description of Artificial Sequence: Synthetic oligonucleotide
  Antisense strand to SEQ ID NO: 2315138
ucuccaaagagcugccucc

SEQ ID NO: 2315140 - RNA, 19 nt, Artificial Sequence
  Description of Artificial Sequence: Synthetic oligonucleotide
  Sense strand starting at position 3269 of SEQ ID NO: 1885087
guaggaauugacugcaauu

SEQ ID NO: 2315141 - RNA, 19 nt, Artificial Sequence
  Description of Artificial Sequence: Synthetic oligonucleotide
  Antisense strand to SEQ ID NO: 2315140
aauugcagucaauuccuac

SEQ ID NO: 2315142 - RNA, 19 nt, Artificial Sequence
  Description of Artificial Sequence: Synthetic oligonucleotide
  Sense strand starting at position 3420 of SEQ ID NO: 1885087
ugugaauugacgugagaag

SEQ ID NO: 2315143 - RNA, 19 nt, Artificial Sequence
  Description of Artificial Sequence: Synthetic oligonucleotide
  Antisense strand to SEQ ID NO: 2315142
cuucucacgucaauucaca

SEQ ID NO: 2315144 - RNA, 19 nt, Artificial Sequence
  Description of Artificial Sequence: Synthetic oligonucleotide
  Sense strand starting at position 3555 of SEQ ID NO: 1885087
gacgaaacaugguuaagug

SEQ ID NO: 2315145 - RNA, 19 nt, Artificial Sequence
  Description of Artificial Sequence: Synthetic oligonucleotide
  Antisense strand to SEQ ID NO: 2315144
cacuuaaccauguuucguc

SEQ ID NO: 2315146 - RNA, 19 nt, Artificial Sequence
  Description of Artificial Sequence: Synthetic oligonucleotide
  Sense strand starting at position 3652 of SEQ ID NO: 1885087
ucugacauugcugagggau

SEQ ID NO: 2315147 - RNA, 19 nt, Artificial Sequence
  Description of Artificial Sequence: Synthetic oligonucleotide
  Antisense strand to SEQ ID NO: 2315146
aucccucagcaaugucaga

SEQ ID NO: 2315148 - RNA, 19 nt, Artificial Sequence
  Description of Artificial Sequence: Synthetic oligonucleotide
  Sense strand starting at position 3671 of SEQ ID NO: 1885087
gugacacuuacccggagaa

SEQ ID NO: 2315149 - RNA, 19 nt, Artificial Sequence
  Description of Artificial Sequence: Synthetic oligonucleotide
  Antisense strand to SEQ ID NO: 2315148
uucuccggguaagugucac

SEQ ID NO: 2315150 - RNA, 19 nt, Artificial Sequence
  Description of Artificial Sequence: Synthetic oligonucleotide
  Sense strand starting at position 3672 of SEQ ID NO: 1885087
ugacacuuacccggagaaa

SEQ ID NO: 2315151 - RNA, 19 nt, Artificial Sequence
  Description of Artificial Sequence: Synthetic oligonucleotide
  Antisense strand to SEQ ID NO: 2315150
uuucuccggguaaguguca

SEQ ID NO: 2315152 - RNA, 19 nt, Artificial Sequence
  Description of Artificial Sequence: Synthetic oligonucleotide
  Sense strand starting at position 3937 of SEQ ID NO: 1885087
gggaguuuccauggaagcu

SEQ ID NO: 2315153 - RNA, 19 nt, Artificial Sequence
  Description of Artificial Sequence: Synthetic oligonucleotide
  Antisense strand to SEQ ID NO: 2315152
agcuuccauggaaacuccc

SEQ ID NO: 2315154 - RNA, 19 nt, Artificial Sequence
  Description of Artificial Sequence: Synthetic oligonucleotide
  Sense strand starting at position 97 of SEQ ID NO: 1885089
uaaagcggucgagacaaau

SEQ ID NO: 2315155 - RNA, 19 nt, Artificial Sequence
  Description of Artificial Sequence: Synthetic oligonucleotide
  Antisense strand to SEQ ID NO: 2315154
auuugucucgaccgcuuua

SEQ ID NO: 2315156 - RNA, 19 nt, Artificial Sequence
  Description of Artificial Sequence: Synthetic oligonucleotide
  Sense strand starting at position 203 of SEQ ID NO: 1885089
ccaagagcuccacgaagau

SEQ ID NO: 2315157 - RNA, 19 nt, Artificial Sequence
  Description of Artificial Sequence: Synthetic oligonucleotide
  Antisense strand to SEQ ID NO: 2315156
aucuucguggagcucuugg

SEQ ID NO: 2315158 - RNA, 19 nt, Artificial Sequence
  Description of Artificial Sequence: Synthetic oligonucleotide
  Sense strand starting at position 219 of SEQ ID NO: 1885089
gauauaggccacuguuaaa

SEQ ID NO: 2315159 - RNA, 19 nt, Artificial Sequence
  Description of Artificial Sequence: Synthetic oligonucleotide
  Antisense strand to SEQ ID NO: 2315158
uuuaacaguggccuauauc

SEQ ID NO: 2315160 - RNA, 19 nt, Artificial Sequence
  Description of Artificial Sequence: Synthetic oligonucleotide
  Sense strand starting at position 604 of SEQ ID NO: 1885089
guuaguuugcgaaagucgu

SEQ ID NO: 2315161 - RNA, 19 nt, Artificial Sequence
  Description of Artificial Sequence: Synthetic oligonucleotide
  Antisense strand to SEQ ID NO: 2315160
acgacuuucgcaaacuaac

SEQ ID NO: 2315162 - RNA, 19 nt, Artificial Sequence
  Description of Artificial Sequence: Synthetic oligonucleotide
  Sense strand starting at position 756 of SEQ ID NO: 1885089
gcccuuagccguucuccua

SEQ ID NO: 2315163 - RNA, 19 nt, Artificial Sequence
  Description of Artificial Sequence: Synthetic oligonucleotide
  Antisense strand to SEQ ID NO: 2315162
uaggagaacggcuaagggc

SEQ ID NO: 2315164 - RNA, 19 nt, Artificial Sequence
  Description of Artificial Sequence: Synthetic oligonucleotide
  Sense strand starting at position 816 of SEQ ID NO: 1885089
aguuuagucucauuacaaa

SEQ ID NO: 2315165 - RNA, 19 nt, Artificial Sequence
  Description of Artificial Sequence: Synthetic oligonucleotide
  Antisense strand to SEQ ID NO: 2315164
uuuguaaugagacuaaacu

SEQ ID NO: 2315166 - RNA, 19 nt, Artificial Sequence
  Description of Artificial Sequence: Synthetic oligonucleotide
  Sense strand starting at position 947 of SEQ ID NO: 1885089
aaaggaaaguugucaaguu

SEQ ID NO: 2315167 - RNA, 19 nt, Artificial Sequence
  Description of Artificial Sequence: Synthetic oligonucleotide
  Antisense strand to SEQ ID NO: 2315166
aacuugacaacuuuccuuu

SEQ ID NO: 2315168 - RNA, 19 nt, Artificial Sequence
  Description of Artificial Sequence: Synthetic oligonucleotide
  Sense strand starting at position 1337 of SEQ ID NO: 1885089
acggaaacccuccgagaau

SEQ ID NO: 2315169 - RNA, 19 nt, Artificial Sequence
  Description of Artificial Sequence: Synthetic oligonucleotide
  Antisense strand to SEQ ID NO: 2315168
auucucggaggguuuccgu

SEQ ID NO: 2315170 - RNA, 19 nt, Artificial Sequence
  Description of Artificial Sequence: Synthetic oligonucleotide
  Sense strand starting at position 1908 of SEQ ID NO: 1885089
gcguucucccugguuugau

SEQ ID NO: 2315171 - RNA, 19 nt, Artificial Sequence
  Description of Artificial Sequence: Synthetic oligonucleotide
  Antisense strand to SEQ ID NO: 2315170
aucaaaccagggagaacgc

SEQ ID NO: 2315172 - RNA, 19 nt, Artificial Sequence
  Description of Artificial Sequence: Synthetic oligonucleotide
  Sense strand starting at position 1953 of SEQ ID NO: 1885089
cuggaauaagagcgaugaa

SEQ ID NO: 2315173 - RNA, 19 nt, Artificial Sequence
  Description of Artificial Sequence: Synthetic oligonucleotide
  Antisense strand to SEQ ID NO: 2315172
uucaucgcucuuauuccag

SEQ ID NO: 2315174 - RNA, 19 nt, Artificial Sequence
  Description of Artificial Sequence: Synthetic oligonucleotide
  Sense strand starting at position 1978 of SEQ ID NO: 1885089
ggcguugugagccugugau

SEQ ID NO: 2315175 - RNA, 19 nt, Artificial Sequence
  Description of Artificial Sequence: Synthetic oligonucleotide
  Antisense strand to SEQ ID NO: 2315174
aucacaggcucacaacgcc

SEQ ID NO: 2315176 - RNA, 19 nt, Artificial Sequence
  Description of Artificial Sequence: Synthetic oligonucleotide
  Sense strand starting at position 2306 of SEQ ID NO: 1885089
ugcuuauuugcguauaccu

SEQ ID NO: 2315177 - RNA, 19 nt, Artificial Sequence
  Description of Artificial Sequence: Synthetic oligonucleotide
  Antisense strand to SEQ ID NO: 2315176
agguauacgcaaauaagca

SEQ ID NO: 2315178 - RNA, 19 nt, Artificial Sequence
  Description of Artificial Sequence: Synthetic oligonucleotide
  Sense strand starting at position 2308 of SEQ ID NO: 1885089
cuuauuugcguauaccuua

SEQ ID NO: 2315179 - RNA, 19 nt, Artificial Sequence
  Description of Artificial Sequence: Synthetic oligonucleotide
  Antisense strand to SEQ ID NO: 2315178
uaagguauacgcaaauaag

SEQ ID NO: 2315180 - RNA, 19 nt, Artificial Sequence
  Description of Artificial Sequence: Synthetic oligonucleotide
  Sense strand starting at position 2342 of SEQ ID NO: 1885089
acagcuggauacuuaaagu

SEQ ID NO: 2315181 - RNA, 19 nt, Artificial Sequence
  Description of Artificial Sequence: Synthetic oligonucleotide
  Antisense strand to SEQ ID NO: 2315180
acuuuaaguauccagcugu

SEQ ID NO: 2315182 - RNA, 19 nt, Artificial Sequence
  Description of Artificial Sequence: Synthetic oligonucleotide
  Sense strand starting at position 2523 of SEQ ID NO: 1885089
ccuagauauuggucuuaga

SEQ ID NO: 2315183 - RNA, 19 nt, Artificial Sequence
  Description of Artificial Sequence: Synthetic oligonucleotide
  Antisense strand to SEQ ID NO: 2315182
ucuaagaccaauaucuagg

SEQ ID NO: 2315184 - RNA, 19 nt, Artificial Sequence
  Description of Artificial Sequence: Synthetic oligonucleotide
  Sense strand starting at position 2530 of SEQ ID NO: 1885089
auuggucuuagaggucaca

SEQ ID NO: 2315185 - RNA, 19 nt, Artificial Sequence
  Description of Artificial Sequence: Synthetic oligonucleotide
  Antisense strand to SEQ ID NO: 2315184
ugugaccucuaagaccaau

SEQ ID NO: 2315186 - RNA, 19 nt, Artificial Sequence
  Description of Artificial Sequence: Synthetic oligonucleotide
  Sense strand starting at position 2642 of SEQ ID NO: 1885089
uguaaagauccuuagcaac

SEQ ID NO: 2315187 - RNA, 19 nt, Artificial Sequence
  Description of Artificial Sequence: Synthetic oligonucleotide
  Antisense strand to SEQ ID NO: 2315186
guugcuaaggaucuuuaca

SEQ ID NO: 2315188 - RNA, 19 nt, Artificial Sequence
  Description of Artificial Sequence: Synthetic oligonucleotide
  Sense strand starting at position 2706 of SEQ ID NO: 1885089
gcaaaugaaagguaugcua

SEQ ID NO: 2315189 - RNA, 19 nt, Artificial Sequence
  Description of Artificial Sequence: Synthetic oligonucleotide
  Antisense strand to SEQ ID NO: 2315188
uagcauaccuuucauuugc

SEQ ID NO: 2315190 - RNA, 19 nt, Artificial Sequence
  Description of Artificial Sequence: Synthetic oligonucleotide
  Sense strand starting at position 2708 of SEQ ID NO: 1885089
aaaugaaagguaugcuaca

SEQ ID NO: 2315191 - RNA, 19 nt, Artificial Sequence
  Description of Artificial Sequence: Synthetic oligonucleotide
  Antisense strand to SEQ ID NO: 2315190
uguagcauaccuuucauuu

SEQ ID NO: 2315192 - RNA, 19 nt, Artificial Sequence
  Description of Artificial Sequence: Synthetic oligonucleotide
  Sense strand starting at position 2751 of SEQ ID NO: 1885089
ugucuagugauugaguuua

SEQ ID NO: 2315193 - RNA, 19 nt, Artificial Sequence
  Description of Artificial Sequence: Synthetic oligonucleotide
  Antisense strand to SEQ ID NO: 2315192
uaaacucaaucacuagaca

SEQ ID NO: 2315194 - RNA, 19 nt, Artificial Sequence
  Description of Artificial Sequence: Synthetic oligonucleotide
  Sense strand starting at position 2753 of SEQ ID NO: 1885089
ucuagugauugaguuuaau

SEQ ID NO: 2315195 - RNA, 19 nt, Artificial Sequence
  Description of Artificial Sequence: Synthetic oligonucleotide
  Antisense strand to SEQ ID NO: 2315194
auuaaacucaaucacuaga

SEQ ID NO: 2315196 - RNA, 19 nt, Artificial Sequence
  Description of Artificial Sequence: Synthetic oligonucleotide
  Sense strand starting at position 2800 of SEQ ID NO: 1885089
acagguaggcuuuagauua

SEQ ID NO: 2315197 - RNA, 19 nt, Artificial Sequence
  Description of Artificial Sequence: Synthetic oligonucleotide
  Antisense strand to SEQ ID NO: 2315196
uaaucuaaagccuaccugu

SEQ ID NO: 2315198 - RNA, 19 nt, Artificial Sequence
  Description of Artificial Sequence: Synthetic oligonucleotide
  Sense strand starting at position 2805 of SEQ ID NO: 1885089
uaggcuuuagauuacagua

SEQ ID NO: 2315199 - RNA, 19 nt, Artificial Sequence
  Description of Artificial Sequence: Synthetic oligonucleotide
  Antisense strand to SEQ ID NO: 2315198
uacuguaaucuaaagccua

SEQ ID NO: 2315200 - RNA, 19 nt, Artificial Sequence
  Description of Artificial Sequence: Synthetic oligonucleotide
  Sense strand starting at position 2948 of SEQ ID NO: 1885089
gcuuuagcauuuguaaugu

SEQ ID NO: 2315201 - RNA, 19 nt, Artificial Sequence
  Description of Artificial Sequence: Synthetic oligonucleotide
  Antisense strand to SEQ ID NO: 2315200
acauuacaaaugcuaaagc

SEQ ID NO: 2315202 - RNA, 19 nt, Artificial Sequence
  Description of Artificial Sequence: Synthetic oligonucleotide
  Sense strand starting at position 3036 of SEQ ID NO: 1885089
uguaacaagcuccauagau

SEQ ID NO: 2315203 - RNA, 19 nt, Artificial Sequence
  Description of Artificial Sequence: Synthetic oligonucleotide
  Antisense strand to SEQ ID NO: 2315202
aucuauggagcuuguuaca

SEQ ID NO: 2315204 - RNA, 19 nt, Artificial Sequence
  Description of Artificial Sequence: Synthetic oligonucleotide
  Sense strand starting at position 3053 of SEQ ID NO: 1885089
augauuacuaugggagucu

SEQ ID NO: 2315205 - RNA, 19 nt, Artificial Sequence
  Description of Artificial Sequence: Synthetic oligonucleotide
  Antisense strand to SEQ ID NO: 2315204
agacucccauaguaaucau

SEQ ID NO: 2315206 - RNA, 19 nt, Artificial Sequence
  Description of Artificial Sequence: Synthetic oligonucleotide
  Sense strand starting at position 3074 of SEQ ID NO: 1885089
gcugucuauguugagaaac

SEQ ID NO: 2315207 - RNA, 19 nt, Artificial Sequence
  Description of Artificial Sequence: Synthetic oligonucleotide
  Antisense strand to SEQ ID NO: 2315206
guuucucaacauagacagc

SEQ ID NO: 2315208 - RNA, 19 nt, Artificial Sequence
  Description of Artificial Sequence: Synthetic oligonucleotide
  Sense strand starting at position 3093 of SEQ ID NO: 1885089
acugcauuagucuaggaga

SEQ ID NO: 2315209 - RNA, 19 nt, Artificial Sequence
  Description of Artificial Sequence: Synthetic oligonucleotide
  Antisense strand to SEQ ID NO: 2315208
ucuccuagacuaaugcagu

SEQ ID NO: 2315210 - RNA, 19 nt, Artificial Sequence
  Description of Artificial Sequence: Synthetic oligonucleotide
  Sense strand starting at position 3095 of SEQ ID NO: 1885089
ugcauuagucuaggagaug

SEQ ID NO: 2315211 - RNA, 19 nt, Artificial Sequence
  Description of Artificial Sequence: Synthetic oligonucleotide
  Antisense strand to SEQ ID NO: 2315210
caucuccuagacuaaugca

SEQ ID NO: 2315212 - RNA, 19 nt, Artificial Sequence
  Description of Artificial Sequence: Synthetic oligonucleotide
  Sense strand starting at position 3114 of SEQ ID NO: 1885089
auauguuaagaguguugau

SEQ ID NO: 2315213 - RNA, 19 nt, Artificial Sequence
  Description of Artificial Sequence: Synthetic oligonucleotide
  Antisense strand to SEQ ID NO: 2315212
aucaacacucuuaacauau

SEQ ID NO: 2315214 - RNA, 19 nt, Artificial Sequence
  Description of Artificial Sequence: Synthetic oligonucleotide
  Sense strand starting at position 3126 of SEQ ID NO: 1885089
uguugauaucagcaacuug

SEQ ID NO: 2315215 - RNA, 19 nt, Artificial Sequence
  Description of Artificial Sequence: Synthetic oligonucleotide
  Antisense strand to SEQ ID NO: 2315214
caaguugcugauaucaaca

SEQ ID NO: 2315216 - RNA, 19 nt, Artificial Sequence
  Description of Artificial Sequence: Synthetic oligonucleotide
  Sense strand starting at position 3137 of SEQ ID NO: 1885089
gcaacuugucagcaaacug

SEQ ID NO: 2315217 - RNA, 19 nt, Artificial Sequence
  Description of Artificial Sequence: Synthetic oligonucleotide
  Antisense strand to SEQ ID NO: 2315216
caguuugcugacaaguugc

SEQ ID NO: 2315218 - RNA, 19 nt, Artificial Sequence
  Description of Artificial Sequence: Synthetic oligonucleotide
  Sense strand starting at position 3341 of SEQ ID NO: 1885089
agguauaucccauaaguau

SEQ ID NO: 2315219 - RNA, 19 nt, Artificial Sequence
  Description of Artificial Sequence: Synthetic oligonucleotide
  Antisense strand to SEQ ID NO: 2315218
auacuuaugggauauaccu

SEQ ID NO: 2315220 - RNA, 19 nt, Artificial Sequence
  Description of Artificial Sequence: Synthetic oligonucleotide
  Sense strand starting at position 3488 of SEQ ID NO: 1885089
aggaaauauuauccugcca

SEQ ID NO: 2315221 - RNA, 19 nt, Artificial Sequence
  Description of Artificial Sequence: Synthetic oligonucleotide
  Antisense strand to SEQ ID NO: 2315220
uggcaggauaauauuuccu

SEQ ID NO: 2315222 - RNA, 19 nt, Artificial Sequence
  Description of Artificial Sequence: Synthetic oligonucleotide
  Sense strand starting at position 3623 of SEQ ID NO: 1885089
guaccuagaauaggugaau

SEQ ID NO: 2315223 - RNA, 19 nt, Artificial Sequence
  Description of Artificial Sequence: Synthetic oligonucleotide
  Antisense strand to SEQ ID NO: 2315222
auucaccuauucuagguac

SEQ ID NO: 2315224 - RNA, 19 nt, Artificial Sequence
  Description of Artificial Sequence: Synthetic oligonucleotide
  Sense strand starting at position 3624 of SEQ ID NO: 1885089
uaccuagaauaggugaauu

SEQ ID NO: 2315225 - RNA, 19 nt, Artificial Sequence
  Description of Artificial Sequence: Synthetic oligonucleotide
  Antisense strand to SEQ ID NO: 2315224
aauucaccuauucuaggua

SEQ ID NO: 2315226 - RNA, 19 nt, Artificial Sequence
  Description of Artificial Sequence: Synthetic oligonucleotide
  Sense strand starting at position 3753 of SEQ ID NO: 1885089
auagauaguggugauguuu

SEQ ID NO: 2315227 - RNA, 19 nt, Artificial Sequence
  Description of Artificial Sequence: Synthetic oligonucleotide
  Antisense strand to SEQ ID NO: 2315226
aaacaucaccacuaucuau

SEQ ID NO: 2315228 - RNA, 19 nt, Artificial Sequence
  Description of Artificial Sequence: Synthetic oligonucleotide
  Sense strand starting at position 3908 of SEQ ID NO: 1885089
ggauuacucauagguaugu

SEQ ID NO: 2315229 - RNA, 19 nt, Artificial Sequence
  Description of Artificial Sequence: Synthetic oligonucleotide
  Antisense strand to SEQ ID NO: 2315228
acauaccuaugaguaaucc

SEQ ID NO: 2315230 - RNA, 19 nt, Artificial Sequence
  Description of Artificial Sequence: Synthetic oligonucleotide
  Sense strand starting at position 3909 of SEQ ID NO: 1885089
gauuacucauagguauguu

SEQ ID NO: 2315231 - RNA, 19 nt, Artificial Sequence
  Description of Artificial Sequence: Synthetic oligonucleotide
  Antisense strand to SEQ ID NO: 2315230
aacauaccuaugaguaauc

SEQ ID NO: 2315232 - RNA, 19 nt, Artificial Sequence
  Description of Artificial Sequence: Synthetic oligonucleotide
  Sense strand starting at position 3969 of SEQ ID NO: 1885089
guuggagauuuagaaacua

SEQ ID NO: 2315233 - RNA, 19 nt, Artificial Sequence
  Description of Artificial Sequence: Synthetic oligonucleotide
  Antisense strand to SEQ ID NO: 2315232
uaguuucuaaaucuccaac

SEQ ID NO: 2315234 - RNA, 19 nt, Artificial Sequence
  Description of Artificial Sequence: Synthetic oligonucleotide
  Sense strand starting at position 132 of SEQ ID NO: 1885088
aauguuaaacgccagucaa

SEQ ID NO: 2315235 - RNA, 19 nt, Artificial Sequence
  Description of Artificial Sequence: Synthetic oligonucleotide
  Antisense strand to SEQ ID NO: 2315234
uugacuggcguuuaacauu

SEQ ID NO: 2315236 - RNA, 19 nt, Artificial Sequence
  Description of Artificial Sequence: Synthetic oligonucleotide
  Sense strand starting at position 203 of SEQ ID NO: 1885088
aucaauugugucuauaaca

SEQ ID NO: 2315237 - RNA, 19 nt, Artificial Sequence
  Description of Artificial Sequence: Synthetic oligonucleotide
  Antisense strand to SEQ ID NO: 2315236
uguuauagacacaauugau

SEQ ID NO: 2315238 - RNA, 19 nt, Artificial Sequence
  Description of Artificial Sequence: Synthetic oligonucleotide
  Sense strand starting at position 295 of SEQ ID NO: 1885088
agugacaauccaggaaagu

SEQ ID NO: 2315239 - RNA, 19 nt, Artificial Sequence
  Description of Artificial Sequence: Synthetic oligonucleotide
  Antisense strand to SEQ ID NO: 2315238
acuuuccuggauugucacu

SEQ ID NO: 2315240 - RNA, 19 nt, Artificial Sequence
  Description of Artificial Sequence: Synthetic oligonucleotide
  Sense strand starting at position 394 of SEQ ID NO: 1885088
guacucuaucaagauugcu

SEQ ID NO: 2315241 - RNA, 19 nt, Artificial Sequence
  Description of Artificial Sequence: Synthetic oligonucleotide
  Antisense strand to SEQ ID NO: 2315240
agcaaucuugauagaguac

SEQ ID NO: 2315242 - RNA, 19 nt, Artificial Sequence
  Description of Artificial Sequence: Synthetic oligonucleotide
  Sense strand starting at position 397 of SEQ ID NO: 1885088
cucuaucaagauugcugau

SEQ ID NO: 2315243 - RNA, 19 nt, Artificial Sequence
  Description of Artificial Sequence: Synthetic oligonucleotide
  Antisense strand to SEQ ID NO: 2315242
aucagcaaucuugauagag

SEQ ID NO: 2315244 - RNA, 19 nt, Artificial Sequence
  Description of Artificial Sequence: Synthetic oligonucleotide
  Sense strand starting at position 515 of SEQ ID NO: 1885088
gugaaugguacggagcaaa

SEQ ID NO: 2315245 - RNA, 19 nt, Artificial Sequence
  Description of Artificial Sequence: Synthetic oligonucleotide
  Antisense strand to SEQ ID NO: 2315244
uuugcuccguaccauucac

SEQ ID NO: 2315246 - RNA, 19 nt, Artificial Sequence
  Description of Artificial Sequence: Synthetic oligonucleotide
  Sense strand starting at position 547 of SEQ ID NO: 1885088
cguuauagaaagcaaugau

SEQ ID NO: 2315247 - RNA, 19 nt, Artificial Sequence
  Description of Artificial Sequence: Synthetic oligonucleotide
  Antisense strand to SEQ ID NO: 2315246
aucauugcuuucuauaacg

SEQ ID NO: 2315248 - RNA, 19 nt, Artificial Sequence
  Description of Artificial Sequence: Synthetic oligonucleotide
  Sense strand starting at position 579 of SEQ ID NO: 1885088
ggaaguguccuauaguuga

SEQ ID NO: 2315249 - RNA, 19 nt, Artificial Sequence
  Description of Artificial Sequence: Synthetic oligonucleotide
  Antisense strand to SEQ ID NO: 2315248
ucaacuauaggacacuucc

SEQ ID NO: 2315250 - RNA, 19 nt, Artificial Sequence
  Description of Artificial Sequence: Synthetic oligonucleotide
  Sense strand starting at position 593 of SEQ ID NO: 1885088
guugaacuucugggacuua

SEQ ID NO: 2315251 - RNA, 19 nt, Artificial Sequence
  Description of Artificial Sequence: Synthetic oligonucleotide
  Antisense strand to SEQ ID NO: 2315250
uaagucccagaaguucaac

SEQ ID NO: 2315252 - RNA, 19 nt, Artificial Sequence
  Description of Artificial Sequence: Synthetic oligonucleotide
  Sense strand starting at position 652 of SEQ ID NO: 1885088
aaauccugucacugaggua

SEQ ID NO: 2315253 - RNA, 19 nt, Artificial Sequence
  Description of Artificial Sequence: Synthetic oligonucleotide
  Antisense strand to SEQ ID NO: 2315252
uaccucagugacaggauuu

SEQ ID NO: 2315254 - RNA, 19 nt, Artificial Sequence
  Description of Artificial Sequence: Synthetic oligonucleotide
  Sense strand starting at position 792 of SEQ ID NO: 1885088
uaaagcggucgagacaaau

SEQ ID NO: 2315255 - RNA, 19 nt, Artificial Sequence
  Description of Artificial Sequence: Synthetic oligonucleotide
  Antisense strand to SEQ ID NO: 2315254
auuugucucgaccgcuuua

SEQ ID NO: 2315256 - RNA, 19 nt, Artificial Sequence
  Description of Artificial Sequence: Synthetic oligonucleotide
  Sense strand starting at position 898 of SEQ ID NO: 1885088
ccaagagcuccacgaagau

SEQ ID NO: 2315257 - RNA, 19 nt, Artificial Sequence
  Description of Artificial Sequence: Synthetic oligonucleotide
  Antisense strand to SEQ ID NO: 2315256
aucuucguggagcucuugg

SEQ ID NO: 2315258 - RNA, 19 nt, Artificial Sequence
  Description of Artificial Sequence: Synthetic oligonucleotide
  Sense strand starting at position 914 of SEQ ID NO: 1885088
gauauaggccacuguuaaa

SEQ ID NO: 2315259 - RNA, 19 nt, Artificial Sequence
  Description of Artificial Sequence: Synthetic oligonucleotide
  Antisense strand to SEQ ID NO: 2315258
uuuaacaguggccuauauc

SEQ ID NO: 2315260 - RNA, 19 nt, Artificial Sequence
  Description of Artificial Sequence: Synthetic oligonucleotide
  Sense strand starting at position 1299 of SEQ ID NO: 1885088
guuaguuugcgaaagucgu

SEQ ID NO: 2315261 - RNA, 19 nt, Artificial Sequence
  Description of Artificial Sequence: Synthetic oligonucleotide
  Antisense strand to SEQ ID NO: 2315260
acgacuuucgcaaacuaac

SEQ ID NO: 2315262 - RNA, 19 nt, Artificial Sequence
  Description of Artificial Sequence: Synthetic oligonucleotide
  Sense strand starting at position 1451 of SEQ ID NO: 1885088
gcccuuagccguucuccua

SEQ ID NO: 2315263 - RNA, 19 nt, Artificial Sequence
  Description of Artificial Sequence: Synthetic oligonucleotide
  Antisense strand to SEQ ID NO: 2315262
uaggagaacggcuaagggc

SEQ ID NO: 2315264 - RNA, 19 nt, Artificial Sequence
  Description of Artificial Sequence: Synthetic oligonucleotide
  Sense strand starting at position 1511 of SEQ ID NO: 1885088
aguuuagucucauuacaaa

SEQ ID NO: 2315265 - RNA, 19 nt, Artificial Sequence
  Description of Artificial Sequence: Synthetic oligonucleotide
  Antisense strand to SEQ ID NO: 2315264
uuuguaaugagacuaaacu

SEQ ID NO: 2315266 - RNA, 19 nt, Artificial Sequence
  Description of Artificial Sequence: Synthetic oligonucleotide
  Sense strand starting at position 1642 of SEQ ID NO: 1885088
aaaggaaaguugucaaguu

SEQ ID NO: 2315267 - RNA, 19 nt, Artificial Sequence
  Description of Artificial Sequence: Synthetic oligonucleotide
  Antisense strand to SEQ ID NO: 2315266
aacuugacaacuuuccuuu

SEQ ID NO: 2315268 - RNA, 19 nt, Artificial Sequence
  Description of Artificial Sequence: Synthetic oligonucleotide
  Sense strand starting at position 2032 of SEQ ID NO: 1885088
acggaaacccuccgagaau

SEQ ID NO: 2315269 - RNA, 19 nt, Artificial Sequence
  Description of Artificial Sequence: Synthetic oligonucleotide
  Antisense strand to SEQ ID NO: 2315268
auucucggaggguuuccgu

SEQ ID NO: 2315270 - RNA, 19 nt, Artificial Sequence
  Description of Artificial Sequence: Synthetic oligonucleotide
  Sense strand starting at position 2603 of SEQ ID NO: 1885088
gcguucucccugguuugau

SEQ ID NO: 2315271 - RNA, 19 nt, Artificial Sequence
  Description of Artificial Sequence: Synthetic oligonucleotide
  Antisense strand to SEQ ID NO: 2315270
aucaaaccagggagaacgc

SEQ ID NO: 2315272 - RNA, 19 nt, Artificial Sequence
  Description of Artificial Sequence: Synthetic oligonucleotide
  Sense strand starting at position 2648 of SEQ ID NO: 1885088
cuggaauaagagcgaugaa

SEQ ID NO: 2315273 - RNA, 19 nt, Artificial Sequence
  Description of Artificial Sequence: Synthetic oligonucleotide
  Antisense strand to SEQ ID NO: 2315272
uucaucgcucuuauuccag

SEQ ID NO: 2315274 - RNA, 19 nt, Artificial Sequence
  Description of Artificial Sequence: Synthetic oligonucleotide
  Sense strand starting at position 2673 of SEQ ID NO: 1885088
ggcguugugagccugugau

SEQ ID NO: 2315275 - RNA, 19 nt, Artificial Sequence
  Description of Artificial Sequence: Synthetic oligonucleotide
  Antisense strand to SEQ ID NO: 2315274
aucacaggcucacaacgcc

SEQ ID NO: 2315276 - RNA, 19 nt, Artificial Sequence
  Description of Artificial Sequence: Synthetic oligonucleotide
  Sense strand starting at position 3001 of SEQ ID NO: 1885088
ugcuuauuugcguauaccu

SEQ ID NO: 2315277 - RNA, 19 nt, Artificial Sequence
  Description of Artificial Sequence: Synthetic oligonucleotide
  Antisense strand to SEQ ID NO: 2315276
agguauacgcaaauaagca

SEQ ID NO: 2315278 - RNA, 19 nt, Artificial Sequence
  Description of Artificial Sequence: Synthetic oligonucleotide
  Sense strand starting at position 3003 of SEQ ID NO: 1885088
cuuauuugcguauaccuua

SEQ ID NO: 2315279 - RNA, 19 nt, Artificial Sequence
  Description of Artificial Sequence: Synthetic oligonucleotide
  Antisense strand to SEQ ID NO: 2315278
uaagguauacgcaaauaag

SEQ ID NO: 2315280 - RNA, 19 nt, Artificial Sequence
  Description of Artificial Sequence: Synthetic oligonucleotide
  Sense strand starting at position 3037 of SEQ ID NO: 1885088
acagcuggauacuuaaagu

SEQ ID NO: 2315281 - RNA, 19 nt, Artificial Sequence
  Description of Artificial Sequence: Synthetic oligonucleotide
  Antisense strand to SEQ ID NO: 2315280
acuuuaaguauccagcugu

SEQ ID NO: 2315282 - RNA, 19 nt, Artificial Sequence
  Description of Artificial Sequence: Synthetic oligonucleotide
  Sense strand starting at position 3218 of SEQ ID NO: 1885088
ccuagauauuggucuuaga

SEQ ID NO: 2315283 - RNA, 19 nt, Artificial Sequence
  Description of Artificial Sequence: Synthetic oligonucleotide
  Antisense strand to SEQ ID NO: 2315282
ucuaagaccaauaucuagg

SEQ ID NO: 2315284 - RNA, 19 nt, Artificial Sequence
  Description of Artificial Sequence: Synthetic oligonucleotide
  Sense strand starting at position 3225 of SEQ ID NO: 1885088
auuggucuuagaggucaca

SEQ ID NO: 2315285 - RNA, 19 nt, Artificial Sequence
  Description of Artificial Sequence: Synthetic oligonucleotide
  Antisense strand to SEQ ID NO: 2315284
ugugaccucuaagaccaau

SEQ ID NO: 2315286 - RNA, 19 nt, Artificial Sequence
  Description of Artificial Sequence: Synthetic oligonucleotide
  Sense strand starting at position 3337 of SEQ ID NO: 1885088
uguaaagauccuuagcaac

SEQ ID NO: 2315287 - RNA, 19 nt, Artificial Sequence
  Description of Artificial Sequence: Synthetic oligonucleotide
  Antisense strand to SEQ ID NO: 2315286
guugcuaaggaucuuuaca

SEQ ID NO: 2315288 - RNA, 19 nt, Artificial Sequence
  Description of Artificial Sequence: Synthetic oligonucleotide
  Sense strand starting at position 3401 of SEQ ID NO: 1885088
gcaaaugaaagguaugcua

SEQ ID NO: 2315289 - RNA, 19 nt, Artificial Sequence
  Description of Artificial Sequence: Synthetic oligonucleotide
  Antisense strand to SEQ ID NO: 2315288
uagcauaccuuucauuugc

SEQ ID NO: 2315290 - RNA, 19 nt, Artificial Sequence
  Description of Artificial Sequence: Synthetic oligonucleotide
  Sense strand starting at position 3403 of SEQ ID NO: 1885088
aaaugaaagguaugcuaca

SEQ ID NO: 2315291 - RNA, 19 nt, Artificial Sequence
  Description of Artificial Sequence: Synthetic oligonucleotide
  Antisense strand to SEQ ID NO: 2315290
uguagcauaccuuucauuu

SEQ ID NO: 2315292 - RNA, 19 nt, Artificial Sequence
  Description of Artificial Sequence: Synthetic oligonucleotide
  Sense strand starting at position 3446 of SEQ ID NO: 1885088
ugucuagugauugaguuua

SEQ ID NO: 2315293 - RNA, 19 nt, Artificial Sequence
  Description of Artificial Sequence: Synthetic oligonucleotide
  Antisense strand to SEQ ID NO: 2315292
uaaacucaaucacuagaca

SEQ ID NO: 2315294 - RNA, 19 nt, Artificial Sequence
  Description of Artificial Sequence: Synthetic oligonucleotide
  Sense strand starting at position 3448 of SEQ ID NO: 1885088
ucuagugauugaguuuaau

SEQ ID NO: 2315295 - RNA, 19 nt, Artificial Sequence
  Description of Artificial Sequence: Synthetic oligonucleotide
  Antisense strand to SEQ ID NO: 2315294
auuaaacucaaucacuaga

SEQ ID NO: 2315296 - RNA, 19 nt, Artificial Sequence
  Description of Artificial Sequence: Synthetic oligonucleotide
  Sense strand starting at position 3495 of SEQ ID NO: 1885088
acagguaggcuuuagauua

SEQ ID NO: 2315297 - RNA, 19 nt, Artificial Sequence
  Description of Artificial Sequence: Synthetic oligonucleotide
  Antisense strand to SEQ ID NO: 2315296
uaaucuaaagccuaccugu

SEQ ID NO: 2315298 - RNA, 19 nt, Artificial Sequence
  Description of Artificial Sequence: Synthetic oligonucleotide
  Sense strand starting at position 3500 of SEQ ID NO: 1885088
uaggcuuuagauuacagua

SEQ ID NO: 2315299 - RNA, 19 nt, Artificial Sequence
  Description of Artificial Sequence: Synthetic oligonucleotide
  Antisense strand to SEQ ID NO: 2315298
uacuguaaucuaaagccua

SEQ ID NO: 2315300 - RNA, 19 nt, Artificial Sequence
  Description of Artificial Sequence: Synthetic oligonucleotide
  Sense strand starting at position 3643 of SEQ ID NO: 1885088
gcuuuagcauuuguaaugu

SEQ ID NO: 2315301 - RNA, 19 nt, Artificial Sequence
  Description of Artificial Sequence: Synthetic oligonucleotide
  Antisense strand to SEQ ID NO: 2315300
acauuacaaaugcuaaagc

SEQ ID NO: 2315302 - RNA, 19 nt, Artificial Sequence
  Description of Artificial Sequence: Synthetic oligonucleotide
  Sense strand starting at position 3731 of SEQ ID NO: 1885088
uguaacaagcuccauagau

SEQ ID NO: 2315303 - RNA, 19 nt, Artificial Sequence
  Description of Artificial Sequence: Synthetic oligonucleotide
  Antisense strand to SEQ ID NO: 2315302
aucuauggagcuuguuaca

SEQ ID NO: 2315304 - RNA, 19 nt, Artificial Sequence
  Description of Artificial Sequence: Synthetic oligonucleotide
  Sense strand starting at position 3748 of SEQ ID NO: 1885088
augauuacuaugggagucu

SEQ ID NO: 2315305 - RNA, 19 nt, Artificial Sequence
  Description of Artificial Sequence: Synthetic oligonucleotide
  Antisense strand to SEQ ID NO: 2315304
agacucccauaguaaucau

SEQ ID NO: 2315306 - RNA, 19 nt, Artificial Sequence
  Description of Artificial Sequence: Synthetic oligonucleotide
  Sense strand starting at position 3769 of SEQ ID NO: 1885088
gcugucuauguugagaaac

SEQ ID NO: 2315307 - RNA, 19 nt, Artificial Sequence
  Description of Artificial Sequence: Synthetic oligonucleotide
  Antisense strand to SEQ ID NO: 2315306
guuucucaacauagacagc

SEQ ID NO: 2315308 - RNA, 19 nt, Artificial Sequence
  Description of Artificial Sequence: Synthetic oligonucleotide
  Sense strand starting at position 3788 of SEQ ID NO: 1885088
acugcauuagucuaggaga

SEQ ID NO: 2315309 - RNA, 19 nt, Artificial Sequence
  Description of Artificial Sequence: Synthetic oligonucleotide
  Antisense strand to SEQ ID NO: 2315308
ucuccuagacuaaugcagu

SEQ ID NO: 2315310 - RNA, 19 nt, Artificial Sequence
  Description of Artificial Sequence: Synthetic oligonucleotide
  Sense strand starting at position 3790 of SEQ ID NO: 1885088
ugcauuagucuaggagaug

SEQ ID NO: 2315311 - RNA, 19 nt, Artificial Sequence
  Description of Artificial Sequence: Synthetic oligonucleotide
  Antisense strand to SEQ ID NO: 2315310
caucuccuagacuaaugca

SEQ ID NO: 2315312 - RNA, 19 nt, Artificial Sequence
  Description of Artificial Sequence: Synthetic oligonucleotide
  Sense strand starting at position 3821 of SEQ ID NO: 1885088
uguugauaucagcaacuug

SEQ ID NO: 2315313 - RNA, 19 nt, Artificial Sequence
  Description of Artificial Sequence: Synthetic oligonucleotide
  Antisense strand to SEQ ID NO: 2315312
caaguugcugauaucaaca

SEQ ID NO: 2315314 - RNA, 19 nt, Artificial Sequence
  Description of Artificial Sequence: Synthetic oligonucleotide
  Sense strand starting at position 514 of SEQ ID NO: 1885090
guuucuguugcucaguuga

SEQ ID NO: 2315315 - RNA, 19 nt, Artificial Sequence
  Description of Artificial Sequence: Synthetic oligonucleotide
  Antisense strand to SEQ ID NO: 2315314
ucaacugagcaacagaaac

SEQ ID NO: 2315316 - RNA, 19 nt, Artificial Sequence
  Description of Artificial Sequence: Synthetic oligonucleotide
  Sense strand starting at position 516 of SEQ ID NO: 1885090
uucuguugcucaguugaca

SEQ ID NO: 2315317 - RNA, 19 nt, Artificial Sequence
  Description of Artificial Sequence: Synthetic oligonucleotide
  Antisense strand to SEQ ID NO: 2315316
ugucaacugagcaacagaa

SEQ ID NO: 2315318 - RNA, 19 nt, Artificial Sequence
  Description of Artificial Sequence: Synthetic oligonucleotide
  Sense strand starting at position 590 of SEQ ID NO: 1885090
gaguccauccacugagcuu

SEQ ID NO: 2315319 - RNA, 19 nt, Artificial Sequence
  Description of Artificial Sequence: Synthetic oligonucleotide
  Antisense strand to SEQ ID NO: 2315318
aagcucaguggauggacuc

SEQ ID NO: 2315320 - RNA, 19 nt, Artificial Sequence
  Description of Artificial Sequence: Synthetic oligonucleotide
  Sense strand starting at position 675 of SEQ ID NO: 1885090
uguugaggcuucuuuauuu

SEQ ID NO: 2315321 - RNA, 19 nt, Artificial Sequence
  Description of Artificial Sequence: Synthetic oligonucleotide
  Antisense strand to SEQ ID NO: 2315320
aaauaaagaagccucaaca

SEQ ID NO: 2315322 - RNA, 19 nt, Artificial Sequence
  Description of Artificial Sequence: Synthetic oligonucleotide
  Sense strand starting at position 1338 of SEQ ID NO: 1885090
ugcauaucuccugaagauu

SEQ ID NO: 2315323 - RNA, 19 nt, Artificial Sequence
  Description of Artificial Sequence: Synthetic oligonucleotide
  Antisense strand to SEQ ID NO: 2315322
aaucuucaggagauaugca

SEQ ID NO: 2315324 - RNA, 19 nt, Artificial Sequence
  Description of Artificial Sequence: Synthetic oligonucleotide
  Sense strand starting at position 1404 of SEQ ID NO: 1885090
gcucacacauguucuugaa

SEQ ID NO: 2315325 - RNA, 19 nt, Artificial Sequence
  Description of Artificial Sequence: Synthetic oligonucleotide
  Antisense strand to SEQ ID NO: 2315324
uucaagaacaugugugagc

SEQ ID NO: 2315326 - RNA, 19 nt, Artificial Sequence
  Description of Artificial Sequence: Synthetic oligonucleotide
  Sense strand starting at position 2050 of SEQ ID NO: 1885090
cuucuaguucuuugcugaa

SEQ ID NO: 2315327 - RNA, 19 nt, Artificial Sequence
  Description of Artificial Sequence: Synthetic oligonucleotide
  Antisense strand to SEQ ID NO: 2315326
uucagcaaagaacuagaag

SEQ ID NO: 2315328 - RNA, 19 nt, Artificial Sequence
  Description of Artificial Sequence: Synthetic oligonucleotide
  Sense strand starting at position 2091 of SEQ ID NO: 1885090
ucaagcaugucuguaucuu

SEQ ID NO: 2315329 - RNA, 19 nt, Artificial Sequence
  Description of Artificial Sequence: Synthetic oligonucleotide
  Antisense strand to SEQ ID NO: 2315328
aagauacagacaugcuuga

SEQ ID NO: 2315330 - RNA, 19 nt, Artificial Sequence
  Description of Artificial Sequence: Synthetic oligonucleotide
  Sense strand starting at position 2099 of SEQ ID NO: 1885090
gucuguaucuucuuguuga

SEQ ID NO: 2315331 - RNA, 19 nt, Artificial Sequence
  Description of Artificial Sequence: Synthetic oligonucleotide
  Antisense strand to SEQ ID NO: 2315330
ucaacaagaagauacagac

SEQ ID NO: 2315332 - RNA, 19 nt, Artificial Sequence
  Description of Artificial Sequence: Synthetic oligonucleotide
  Sense strand starting at position 2346 of SEQ ID NO: 1885090
ucuugauuguaggcaucua

SEQ ID NO: 2315333 - RNA, 19 nt, Artificial Sequence
  Description of Artificial Sequence: Synthetic oligonucleotide
  Antisense strand to SEQ ID NO: 2315332
uagaugccuacaaucaaga

SEQ ID NO: 2315334 - RNA, 19 nt, Artificial Sequence
  Description of Artificial Sequence: Synthetic oligonucleotide
  Sense strand starting at position 2357 of SEQ ID NO: 1885090
ggcaucuauugauuauuau

SEQ ID NO: 2315335 - RNA, 19 nt, Artificial Sequence
  Description of Artificial Sequence: Synthetic oligonucleotide
  Antisense strand to SEQ ID NO: 2315334
auaauaaucaauagaugcc

SEQ ID NO: 2315336 - RNA, 19 nt, Artificial Sequence
  Description of Artificial Sequence: Synthetic oligonucleotide
  Sense strand starting at position 2425 of SEQ ID NO: 1885090
ucuauugaacucuggauau

SEQ ID NO: 2315337 - RNA, 19 nt, Artificial Sequence
  Description of Artificial Sequence: Synthetic oligonucleotide
  Antisense strand to SEQ ID NO: 2315336
auauccagaguucaauaga

SEQ ID NO: 2315338 - RNA, 19 nt, Artificial Sequence
  Description of Artificial Sequence: Synthetic oligonucleotide
  Sense strand starting at position 2447 of SEQ ID NO: 1885090
ugcauuauauucucagagu

SEQ ID NO: 2315339 - RNA, 19 nt, Artificial Sequence
  Description of Artificial Sequence: Synthetic oligonucleotide
  Antisense strand to SEQ ID NO: 2315338
acucugagaauauaaugca

SEQ ID NO: 2315340 - RNA, 19 nt, Artificial Sequence
  Description of Artificial Sequence: Synthetic oligonucleotide
  Sense strand starting at position 2462 of SEQ ID NO: 1885090
gagucuggaucuuauuuaa

SEQ ID NO: 2315341 - RNA, 19 nt, Artificial Sequence
  Description of Artificial Sequence: Synthetic oligonucleotide
  Antisense strand to SEQ ID NO: 2315340
uuaaauaagauccagacuc

SEQ ID NO: 2315342 - RNA, 19 nt, Artificial Sequence
  Description of Artificial Sequence: Synthetic oligonucleotide
  Sense strand starting at position 2543 of SEQ ID NO: 1885090
cucauuacugccugauuga

SEQ ID NO: 2315343 - RNA, 19 nt, Artificial Sequence
  Description of Artificial Sequence: Synthetic oligonucleotide
  Antisense strand to SEQ ID NO: 2315342
ucaaucaggcaguaaugag

SEQ ID NO: 2315344 - RNA, 19 nt, Artificial Sequence
  Description of Artificial Sequence: Synthetic oligonucleotide
  Sense strand starting at position 2544 of SEQ ID NO: 1885090
ucauuacugccugauugag

SEQ ID NO: 2315345 - RNA, 19 nt, Artificial Sequence
  Description of Artificial Sequence: Synthetic oligonucleotide
  Antisense strand to SEQ ID NO: 2315344
cucaaucaggcaguaauga

SEQ ID NO: 2315346 - RNA, 19 nt, Artificial Sequence
  Description of Artificial Sequence: Synthetic oligonucleotide
  Sense strand starting at position 2552 of SEQ ID NO: 1885090
gccugauugagguagacuu

SEQ ID NO: 2315347 - RNA, 19 nt, Artificial Sequence
  Description of Artificial Sequence: Synthetic oligonucleotide
  Antisense strand to SEQ ID NO: 2315346
aagucuaccucaaucaggc

SEQ ID NO: 2315348 - RNA, 19 nt, Artificial Sequence
  Description of Artificial Sequence: Synthetic oligonucleotide
  Sense strand starting at position 2565 of SEQ ID NO: 1885090
agacuuggcuuccuugaca

SEQ ID NO: 2315349 - RNA, 19 nt, Artificial Sequence
  Description of Artificial Sequence: Synthetic oligonucleotide
  Antisense strand to SEQ ID NO: 2315348
ugucaaggaagccaagucu

SEQ ID NO: 2315350 - RNA, 19 nt, Artificial Sequence
  Description of Artificial Sequence: Synthetic oligonucleotide
  Sense strand starting at position 2695 of SEQ ID NO: 1885090
auuuauauugcacguaugu

SEQ ID NO: 2315351 - RNA, 19 nt, Artificial Sequence
  Description of Artificial Sequence: Synthetic oligonucleotide
  Antisense strand to SEQ ID NO: 2315350
acauacgugcaauauaaau

SEQ ID NO: 2315352 - RNA, 19 nt, Artificial Sequence
  Description of Artificial Sequence: Synthetic oligonucleotide
  Sense strand starting at position 2877 of SEQ ID NO: 1885090
aagagcagguacuuucuaa

SEQ ID NO: 2315353 - RNA, 19 nt, Artificial Sequence
  Description of Artificial Sequence: Synthetic oligonucleotide
  Antisense strand to SEQ ID NO: 2315352
uuagaaaguaccugcucuu

SEQ ID NO: 2315354 - RNA, 19 nt, Artificial Sequence
  Description of Artificial Sequence: Synthetic oligonucleotide
  Sense strand starting at position 2884 of SEQ ID NO: 1885090
gguacuuucuaauagauaa

SEQ ID NO: 2315355 - RNA, 19 nt, Artificial Sequence
  Description of Artificial Sequence: Synthetic oligonucleotide
  Antisense strand to SEQ ID NO: 2315354
uuaucuauuagaaaguacc

SEQ ID NO: 2315356 - RNA, 19 nt, Artificial Sequence
  Description of Artificial Sequence: Synthetic oligonucleotide
  Sense strand starting at position 2916 of SEQ ID NO: 1885090
ccugccugaucuuuguaua

SEQ ID NO: 2315357 - RNA, 19 nt, Artificial Sequence
  Description of Artificial Sequence: Synthetic oligonucleotide
  Antisense strand to SEQ ID NO: 2315356
uauacaaagaucaggcagg

SEQ ID NO: 2315358 - RNA, 19 nt, Artificial Sequence
  Description of Artificial Sequence: Synthetic oligonucleotide
  Sense strand starting at position 2932 of SEQ ID NO: 1885090
auaucucucuuggcuaaga

SEQ ID NO: 2315359 - RNA, 19 nt, Artificial Sequence
  Description of Artificial Sequence: Synthetic oligonucleotide
  Antisense strand to SEQ ID NO: 2315358
ucuuagccaagagagauau

SEQ ID NO: 2315360 - RNA, 19 nt, Artificial Sequence
  Description of Artificial Sequence: Synthetic oligonucleotide
  Sense strand starting at position 2960 of SEQ ID NO: 1885090
uuguuacuuugggauauuu

SEQ ID NO: 2315361 - RNA, 19 nt, Artificial Sequence
  Description of Artificial Sequence: Synthetic oligonucleotide
  Antisense strand to SEQ ID NO: 2315360
aaauaucccaaaguaacaa

SEQ ID NO: 2315362 - RNA, 19 nt, Artificial Sequence
  Description of Artificial Sequence: Synthetic oligonucleotide
  Sense strand starting at position 2971 of SEQ ID NO: 1885090
ggauauuugcgcuguggca

SEQ ID NO: 2315363 - RNA, 19 nt, Artificial Sequence
  Description of Artificial Sequence: Synthetic oligonucleotide
  Antisense strand to SEQ ID NO: 2315362
ugccacagcgcaaauaucc

SEQ ID NO: 2315364 - RNA, 19 nt, Artificial Sequence
  Description of Artificial Sequence: Synthetic oligonucleotide
  Sense strand starting at position 2973 of SEQ ID NO: 1885090
auauuugcgcuguggcaga

SEQ ID NO: 2315365 - RNA, 19 nt, Artificial Sequence
  Description of Artificial Sequence: Synthetic oligonucleotide
  Antisense strand to SEQ ID NO: 2315364
ucugccacagcgcaaauau

SEQ ID NO: 2315366 - RNA, 19 nt, Artificial Sequence
  Description of Artificial Sequence: Synthetic oligonucleotide
  Sense strand starting at position 3073 of SEQ ID NO: 1885090
cccggaagaaauugugaca

SEQ ID NO: 2315367 - RNA, 19 nt, Artificial Sequence
  Description of Artificial Sequence: Synthetic oligonucleotide
  Antisense strand to SEQ ID NO: 2315366
ugucacaauuucuuccggg

SEQ ID NO: 2315368 - RNA, 19 nt, Artificial Sequence
  Description of Artificial Sequence: Synthetic oligonucleotide
  Sense strand starting at position 3076 of SEQ ID NO: 1885090
ggaagaaauugugacauua

SEQ ID NO: 2315369 - RNA, 19 nt, Artificial Sequence
  Description of Artificial Sequence: Synthetic oligonucleotide
  Antisense strand to SEQ ID NO: 2315368
uaaugucacaauuucuucc

SEQ ID NO: 2315370 - RNA, 19 nt, Artificial Sequence
  Description of Artificial Sequence: Synthetic oligonucleotide
  Sense strand starting at position 3286 of SEQ ID NO: 1885090
cccugaaguuaugaaagga

SEQ ID NO: 2315371 - RNA, 19 nt, Artificial Sequence
  Description of Artificial Sequence: Synthetic oligonucleotide
  Antisense strand to SEQ ID NO: 2315370
uccuuucauaacuucaggg

SEQ ID NO: 2315372 - RNA, 19 nt, Artificial Sequence
  Description of Artificial Sequence: Synthetic oligonucleotide
  Sense strand starting at position 3333 of SEQ ID NO: 1885090
auguacaacuuugaagaau

SEQ ID NO: 2315373 - RNA, 19 nt, Artificial Sequence
  Description of Artificial Sequence: Synthetic oligonucleotide
  Antisense strand to SEQ ID NO: 2315372
auucuucaaaguuguacau

SEQ ID NO: 2315374 - RNA, 19 nt, Artificial Sequence
  Description of Artificial Sequence: Synthetic oligonucleotide
  Sense strand starting at position 3344 of SEQ ID NO: 1885090
ugaagaauguaaucccuua

SEQ ID NO: 2315375 - RNA, 19 nt, Artificial Sequence
  Description of Artificial Sequence: Synthetic oligonucleotide
  Antisense strand to SEQ ID NO: 2315374
uaagggauuacauucuuca

SEQ ID NO: 2315376 - RNA, 19 nt, Artificial Sequence
  Description of Artificial Sequence: Synthetic oligonucleotide
  Sense strand starting at position 3351 of SEQ ID NO: 1885090
uguaaucccuuagugaaga

SEQ ID NO: 2315377 - RNA, 19 nt, Artificial Sequence
  Description of Artificial Sequence: Synthetic oligonucleotide
  Antisense strand to SEQ ID NO: 2315376
ucuucacuaagggauuaca

SEQ ID NO: 2315378 - RNA, 19 nt, Artificial Sequence
  Description of Artificial Sequence: Synthetic oligonucleotide
  Sense strand starting at position 3379 of SEQ ID NO: 1885090
aaguaaaccugagaugaga

SEQ ID NO: 2315379 - RNA, 19 nt, Artificial Sequence
  Description of Artificial Sequence: Synthetic oligonucleotide
  Antisense strand to SEQ ID NO: 2315378
ucucaucucagguuuacuu

SEQ ID NO: 2315380 - RNA, 19 nt, Artificial Sequence
  Description of Artificial Sequence: Synthetic oligonucleotide
  Sense strand starting at position 3759 of SEQ ID NO: 1885090
gcuuacaagcgaugucuuu

SEQ ID NO: 2315381 - RNA, 19 nt, Artificial Sequence
  Description of Artificial Sequence: Synthetic oligonucleotide
  Antisense strand to SEQ ID NO: 2315380
aaagacaucgcuuguaagc

SEQ ID NO: 2315382 - RNA, 19 nt, Artificial Sequence
  Description of Artificial Sequence: Synthetic oligonucleotide
  Sense strand starting at position 3765 of SEQ ID NO: 1885090
aagcgaugucuuugauucu

SEQ ID NO: 2315383 - RNA, 19 nt, Artificial Sequence
  Description of Artificial Sequence: Synthetic oligonucleotide
  Antisense strand to SEQ ID NO: 2315382
agaaucaaagacaucgcuu

SEQ ID NO: 2315384 - RNA, 19 nt, Artificial Sequence
  Description of Artificial Sequence: Synthetic oligonucleotide
  Sense strand starting at position 3812 of SEQ ID NO: 1885090
uacguagagcucuaaugca

SEQ ID NO: 2315385 - RNA, 19 nt, Artificial Sequence
  Description of Artificial Sequence: Synthetic oligonucleotide
  Antisense strand to SEQ ID NO: 2315384
ugcauuagagcucuacgua

SEQ ID NO: 2315386 - RNA, 19 nt, Artificial Sequence
  Description of Artificial Sequence: Synthetic oligonucleotide
  Sense strand starting at position 3855 of SEQ ID NO: 1885090
cuucuuguuucucuaaggu

SEQ ID NO: 2315387 - RNA, 19 nt, Artificial Sequence
  Description of Artificial Sequence: Synthetic oligonucleotide
  Antisense strand to SEQ ID NO: 2315386
accuuagagaaacaagaag

SEQ ID NO: 2315388 - RNA, 19 nt, Artificial Sequence
  Description of Artificial Sequence: Synthetic oligonucleotide
  Sense strand starting at position 3864 of SEQ ID NO: 1885090
ucucuaagguauuaagaau

SEQ ID NO: 2315389 - RNA, 19 nt, Artificial Sequence
  Description of Artificial Sequence: Synthetic oligonucleotide
  Antisense strand to SEQ ID NO: 2315388
auucuuaauaccuuagaga

SEQ ID NO: 2315390 - RNA, 19 nt, Artificial Sequence
  Description of Artificial Sequence: Synthetic oligonucleotide
  Sense strand starting at position 3883 of SEQ ID NO: 1885090
ucaguuuaagcugaauacu

SEQ ID NO: 2315391 - RNA, 19 nt, Artificial Sequence
  Description of Artificial Sequence: Synthetic oligonucleotide
  Antisense strand to SEQ ID NO: 2315390
aguauucagcuuaaacuga

SEQ ID NO: 2315392 - RNA, 19 nt, Artificial Sequence
  Description of Artificial Sequence: Synthetic oligonucleotide
  Sense strand starting at position 3886 of SEQ ID NO: 1885090
guuuaagcugaauacugua

SEQ ID NO: 2315393 - RNA, 19 nt, Artificial Sequence
  Description of Artificial Sequence: Synthetic oligonucleotide
  Antisense strand to SEQ ID NO: 2315392
uacaguauucagcuuaaac

SEQ ID NO: 2315394 - RNA, 19 nt, Artificial Sequence
  Description of Artificial Sequence: Synthetic oligonucleotide
  Sense strand starting at position 48 of SEQ ID NO: 1885091
gggucaaaggcagguuuaa

SEQ ID NO: 2315395 - RNA, 19 nt, Artificial Sequence
  Description of Artificial Sequence: Synthetic oligonucleotide
  Antisense strand to SEQ ID NO: 2315394
uuaaaccugccuuugaccc

SEQ ID NO: 2315396 - RNA, 19 nt, Artificial Sequence
  Description of Artificial Sequence: Synthetic oligonucleotide
  Sense strand starting at position 90 of SEQ ID NO: 1885091
cugcuucuacuagagguaa

SEQ ID NO: 2315397 - RNA, 19 nt, Artificial Sequence
  Description of Artificial Sequence: Synthetic oligonucleotide
  Antisense strand to SEQ ID NO: 2315396
uuaccucuaguagaagcag

SEQ ID NO: 2315398 - RNA, 19 nt, Artificial Sequence
  Description of Artificial Sequence: Synthetic oligonucleotide
  Sense strand starting at position 101 of SEQ ID NO: 1885091
agagguaaucccuauaagc

SEQ ID NO: 2315399 - RNA, 19 nt, Artificial Sequence
  Description of Artificial Sequence: Synthetic oligonucleotide
  Antisense strand to SEQ ID NO: 2315398
gcuuauagggauuaccucu

SEQ ID NO: 2315400 - RNA, 19 nt, Artificial Sequence
  Description of Artificial Sequence: Synthetic oligonucleotide
  Sense strand starting at position 103 of SEQ ID NO: 1885091
agguaaucccuauaagccu

SEQ ID NO: 2315401 - RNA, 19 nt, Artificial Sequence
  Description of Artificial Sequence: Synthetic oligonucleotide
  Antisense strand to SEQ ID NO: 2315400
aggcuuauagggauuaccu

SEQ ID NO: 2315402 - RNA, 19 nt, Artificial Sequence
  Description of Artificial Sequence: Synthetic oligonucleotide
  Sense strand starting at position 281 of SEQ ID NO: 1885091
ugaaguaaagcaugcauau

SEQ ID NO: 2315403 - RNA, 19 nt, Artificial Sequence
  Description of Artificial Sequence: Synthetic oligonucleotide
  Antisense strand to SEQ ID NO: 2315402
auaugcaugcuuuacuuca

SEQ ID NO: 2315404 - RNA, 19 nt, Artificial Sequence
  Description of Artificial Sequence: Synthetic oligonucleotide
  Sense strand starting at position 397 of SEQ ID NO: 1885091
guuggauugccugagcuaa

SEQ ID NO: 2315405 - RNA, 19 nt, Artificial Sequence
  Description of Artificial Sequence: Synthetic oligonucleotide
  Antisense strand to SEQ ID NO: 2315404
uuagcucaggcaauccaac

SEQ ID NO: 2315406 - RNA, 19 nt, Artificial Sequence
  Description of Artificial Sequence: Synthetic oligonucleotide
  Sense strand starting at position 559 of SEQ ID NO: 1885091
auaugagcuuaucccaagu

SEQ ID NO: 2315407 - RNA, 19 nt, Artificial Sequence
  Description of Artificial Sequence: Synthetic oligonucleotide
  Antisense strand to SEQ ID NO: 2315406
acuugggauaagcucauau

SEQ ID NO: 2315408 - RNA, 19 nt, Artificial Sequence
  Description of Artificial Sequence: Synthetic oligonucleotide
  Sense strand starting at position 644 of SEQ ID NO: 1885091
cuaguacuuccaggaacaa

SEQ ID NO: 2315409 - RNA, 19 nt, Artificial Sequence
  Description of Artificial Sequence: Synthetic oligonucleotide
  Antisense strand to SEQ ID NO: 2315408
uuguuccuggaaguacuag

SEQ ID NO: 2315410 - RNA, 19 nt, Artificial Sequence
  Description of Artificial Sequence: Synthetic oligonucleotide
  Sense strand starting at position 881 of SEQ ID NO: 1885091
acagaaguaucacuuugag

SEQ ID NO: 2315411 - RNA, 19 nt, Artificial Sequence
  Description of Artificial Sequence: Synthetic oligonucleotide
  Antisense strand to SEQ ID NO: 2315410
cucaaagugauacuucugu

SEQ ID NO: 2315412 - RNA, 19 nt, Artificial Sequence
  Description of Artificial Sequence: Synthetic oligonucleotide
  Sense strand starting at position 884 of SEQ ID NO: 1885091
gaaguaucacuuugaggac

SEQ ID NO: 2315413 - RNA, 19 nt, Artificial Sequence
  Description of Artificial Sequence: Synthetic oligonucleotide
  Antisense strand to SEQ ID NO: 2315412
guccucaaagugauacuuc

SEQ ID NO: 2315414 - RNA, 19 nt, Artificial Sequence
  Description of Artificial Sequence: Synthetic oligonucleotide
  Sense strand starting at position 970 of SEQ ID NO: 1885091
ugccuuagauugcuaaaua

SEQ ID NO: 2315415 - RNA, 19 nt, Artificial Sequence
  Description of Artificial Sequence: Synthetic oligonucleotide
  Antisense strand to SEQ ID NO: 2315414
uauuuagcaaucuaaggca

SEQ ID NO: 2315416 - RNA, 19 nt, Artificial Sequence
  Description of Artificial Sequence: Synthetic oligonucleotide
  Sense strand starting at position 991 of SEQ ID NO: 1885091
gggcaugggacacauguau

SEQ ID NO: 2315417 - RNA, 19 nt, Artificial Sequence
  Description of Artificial Sequence: Synthetic oligonucleotide
  Antisense strand to SEQ ID NO: 2315416
auacaugugucccaugccc

SEQ ID NO: 2315418 - RNA, 19 nt, Artificial Sequence
  Description of Artificial Sequence: Synthetic oligonucleotide
  Sense strand starting at position 1108 of SEQ ID NO: 1885091
caggaaugcuucccgaacu

SEQ ID NO: 2315419 - RNA, 19 nt, Artificial Sequence
  Description of Artificial Sequence: Synthetic oligonucleotide
  Antisense strand to SEQ ID NO: 2315418
aguucgggaagcauuccug

SEQ ID NO: 2315420 - RNA, 19 nt, Artificial Sequence
  Description of Artificial Sequence: Synthetic oligonucleotide
  Sense strand starting at position 1154 of SEQ ID NO: 1885091
gaggcuauucugugaaggu

SEQ ID NO: 2315421 - RNA, 19 nt, Artificial Sequence
  Description of Artificial Sequence: Synthetic oligonucleotide
  Antisense strand to SEQ ID NO: 2315420
accuucacagaauagccuc

SEQ ID NO: 2315422 - RNA, 19 nt, Artificial Sequence
  Description of Artificial Sequence: Synthetic oligonucleotide
  Sense strand starting at position 1436 of SEQ ID NO: 1885091
ggaguuuguucauucggga

SEQ ID NO: 2315423 - RNA, 19 nt, Artificial Sequence
  Description of Artificial Sequence: Synthetic oligonucleotide
  Antisense strand to SEQ ID NO: 2315422
ucccgaaugaacaaacucc

SEQ ID NO: 2315424 - RNA, 19 nt, Artificial Sequence
  Description of Artificial Sequence: Synthetic oligonucleotide
  Sense strand starting at position 1517 of SEQ ID NO: 1885091
guguucuccagagaggcaa

SEQ ID NO: 2315425 - RNA, 19 nt, Artificial Sequence
  Description of Artificial Sequence: Synthetic oligonucleotide
  Antisense strand to SEQ ID NO: 2315424
uugccucucuggagaacac

SEQ ID NO: 2315426 - RNA, 19 nt, Artificial Sequence
  Description of Artificial Sequence: Synthetic oligonucleotide
  Sense strand starting at position 2711 of SEQ ID NO: 1885091
gucaacuguccucaauguu

SEQ ID NO: 2315427 - RNA, 19 nt, Artificial Sequence
  Description of Artificial Sequence: Synthetic oligonucleotide
  Antisense strand to SEQ ID NO: 2315426
aacauugaggacaguugac

SEQ ID NO: 2315428 - RNA, 19 nt, Artificial Sequence
  Description of Artificial Sequence: Synthetic oligonucleotide
  Sense strand starting at position 2779 of SEQ ID NO: 1885091
ucagacaucgcucagccaa

SEQ ID NO: 2315429 - RNA, 19 nt, Artificial Sequence
  Description of Artificial Sequence: Synthetic oligonucleotide
  Antisense strand to SEQ ID NO: 2315428
uuggcugagcgaugucuga

SEQ ID NO: 2315430 - RNA, 19 nt, Artificial Sequence
  Description of Artificial Sequence: Synthetic oligonucleotide
  Sense strand starting at position 2949 of SEQ ID NO: 1885091
aguucaguggaauggugaa

SEQ ID NO: 2315431 - RNA, 19 nt, Artificial Sequence
  Description of Artificial Sequence: Synthetic oligonucleotide
  Antisense strand to SEQ ID NO: 2315430
uucaccauuccacugaacu

SEQ ID NO: 2315432 - RNA, 19 nt, Artificial Sequence
  Description of Artificial Sequence: Synthetic oligonucleotide
  Sense strand starting at position 3125 of SEQ ID NO: 1885091
gaaggaggcucuguaaauc

SEQ ID NO: 2315433 - RNA, 19 nt, Artificial Sequence
  Description of Artificial Sequence: Synthetic oligonucleotide
  Antisense strand to SEQ ID NO: 2315432
gauuuacagagccuccuuc

SEQ ID NO: 2315434 - RNA, 19 nt, Artificial Sequence
  Description of Artificial Sequence: Synthetic oligonucleotide
  Sense strand starting at position 3135 of SEQ ID NO: 1885091
cuguaaauccagugaaugu

SEQ ID NO: 2315435 - RNA, 19 nt, Artificial Sequence
  Description of Artificial Sequence: Synthetic oligonucleotide
  Antisense strand to SEQ ID NO: 2315434
acauucacuggauuuacag

SEQ ID NO: 2315436 - RNA, 19 nt, Artificial Sequence
  Description of Artificial Sequence: Synthetic oligonucleotide
  Sense strand starting at position 3136 of SEQ ID NO: 1885091
uguaaauccagugaaugug

SEQ ID NO: 2315437 - RNA, 19 nt, Artificial Sequence
  Description of Artificial Sequence: Synthetic oligonucleotide
  Antisense strand to SEQ ID NO: 2315436
cacauucacuggauuuaca

SEQ ID NO: 2315438 - RNA, 19 nt, Artificial Sequence
  Description of Artificial Sequence: Synthetic oligonucleotide
  Sense strand starting at position 3213 of SEQ ID NO: 1885091
ccgauauuugguggucuga

SEQ ID NO: 2315439 - RNA, 19 nt, Artificial Sequence
  Description of Artificial Sequence: Synthetic oligonucleotide
  Antisense strand to SEQ ID NO: 2315438
ucagaccaccaaauaucgg

SEQ ID NO: 2315440 - RNA, 19 nt, Artificial Sequence
  Description of Artificial Sequence: Synthetic oligonucleotide
  Sense strand starting at position 3231 of SEQ ID NO: 1885091
aggauagcuagagguagau

SEQ ID NO: 2315441 - RNA, 19 nt, Artificial Sequence
  Description of Artificial Sequence: Synthetic oligonucleotide
  Antisense strand to SEQ ID NO: 2315440
aucuaccucuagcuauccu

SEQ ID NO: 2315442 - RNA, 19 nt, Artificial Sequence
  Description of Artificial Sequence: Synthetic oligonucleotide
  Sense strand starting at position 3237 of SEQ ID NO: 1885091
gcuagagguagauggguua

SEQ ID NO: 2315443 - RNA, 19 nt, Artificial Sequence
  Description of Artificial Sequence: Synthetic oligonucleotide
  Antisense strand to SEQ ID NO: 2315442
uaacccaucuaccucuagc

SEQ ID NO: 2315444 - RNA, 19 nt, Artificial Sequence
  Description of Artificial Sequence: Synthetic oligonucleotide
  Sense strand starting at position 3374 of SEQ ID NO: 1885091
gcuguuaucagcuugcugu

SEQ ID NO: 2315445 - RNA, 19 nt, Artificial Sequence
  Description of Artificial Sequence: Synthetic oligonucleotide
  Antisense strand to SEQ ID NO: 2315444
acagcaagcugauaacagc

SEQ ID NO: 2315446 - RNA, 19 nt, Artificial Sequence
  Description of Artificial Sequence: Synthetic oligonucleotide
  Sense strand starting at position 3433 of SEQ ID NO: 1885091
augaguaaccaauguauua

SEQ ID NO: 2315447 - RNA, 19 nt, Artificial Sequence
  Description of Artificial Sequence: Synthetic oligonucleotide
  Antisense strand to SEQ ID NO: 2315446
uaauacauugguuacucau

SEQ ID NO: 2315448 - RNA, 19 nt, Artificial Sequence
  Description of Artificial Sequence: Synthetic oligonucleotide
  Sense strand starting at position 3615 of SEQ ID NO: 1885091
agcugcaagcucuauacaa

SEQ ID NO: 2315449 - RNA, 19 nt, Artificial Sequence
  Description of Artificial Sequence: Synthetic oligonucleotide
  Antisense strand to SEQ ID NO: 2315448
uuguauagagcuugcagcu

SEQ ID NO: 2315450 - RNA, 19 nt, Artificial Sequence
  Description of Artificial Sequence: Synthetic oligonucleotide
  Sense strand starting at position 3737 of SEQ ID NO: 1885091
ccgguagucccuguaguuu

SEQ ID NO: 2315451 - RNA, 19 nt, Artificial Sequence
  Description of Artificial Sequence: Synthetic oligonucleotide
  Antisense strand to SEQ ID NO: 2315450
aaacuacagggacuaccgg

SEQ ID NO: 2315452 - RNA, 19 nt, Artificial Sequence
  Description of Artificial Sequence: Synthetic oligonucleotide
  Sense strand starting at position 3765 of SEQ ID NO: 1885091
gacugugaauucuuugaga

SEQ ID NO: 2315453 - RNA, 19 nt, Artificial Sequence
  Description of Artificial Sequence: Synthetic oligonucleotide
  Antisense strand to SEQ ID NO: 2315452
ucucaaagaauucacaguc

SEQ ID NO: 2315454 - RNA, 19 nt, Artificial Sequence
  Description of Artificial Sequence: Synthetic oligonucleotide
  Sense strand starting at position 3767 of SEQ ID NO: 1885091
cugugaauucuuugagagc

SEQ ID NO: 2315455 - RNA, 19 nt, Artificial Sequence
  Description of Artificial Sequence: Synthetic oligonucleotide
  Antisense strand to SEQ ID NO: 2315454
gcucucaaagaauucacag

SEQ ID NO: 2315456 - RNA, 19 nt, Artificial Sequence
  Description of Artificial Sequence: Synthetic oligonucleotide
  Sense strand starting at position 3780 of SEQ ID NO: 1885091
gagagcacugguugugacu

SEQ ID NO: 2315457 - RNA, 19 nt, Artificial Sequence
  Description of Artificial Sequence: Synthetic oligonucleotide
  Antisense strand to SEQ ID NO: 2315456
agucacaaccagugcucuc

SEQ ID NO: 2315458 - RNA, 19 nt, Artificial Sequence
  Description of Artificial Sequence: Synthetic oligonucleotide
  Sense strand starting at position 3797 of SEQ ID NO: 1885091
cuuacucauguuuguauuu

SEQ ID NO: 2315459 - RNA, 19 nt, Artificial Sequence
  Description of Artificial Sequence: Synthetic oligonucleotide
  Antisense strand to SEQ ID NO: 2315458
aaauacaaacaugaguaag

SEQ ID NO: 2315460 - RNA, 19 nt, Artificial Sequence
  Description of Artificial Sequence: Synthetic oligonucleotide
  Sense strand starting at position 3816 of SEQ ID NO: 1885091
cccacuacucuuuauguga

SEQ ID NO: 2315461 - RNA, 19 nt, Artificial Sequence
  Description of Artificial Sequence: Synthetic oligonucleotide
  Antisense strand to SEQ ID NO: 2315460
ucacauaaagaguaguggg

SEQ ID NO: 2315462 - RNA, 19 nt, Artificial Sequence
  Description of Artificial Sequence: Synthetic oligonucleotide
  Sense strand starting at position 3866 of SEQ ID NO: 1885091
ucacaugaagguugaaacu

SEQ ID NO: 2315463 - RNA, 19 nt, Artificial Sequence
  Description of Artificial Sequence: Synthetic oligonucleotide
  Antisense strand to SEQ ID NO: 2315462
aguuucaaccuucauguga

SEQ ID NO: 2315464 - RNA, 19 nt, Artificial Sequence
  Description of Artificial Sequence: Synthetic oligonucleotide
  Sense strand starting at position 3887 of SEQ ID NO: 1885091
ucauuuaugucacuugguu

SEQ ID NO: 2315465 - RNA, 19 nt, Artificial Sequence
  Description of Artificial Sequence: Synthetic oligonucleotide
  Antisense strand to SEQ ID NO: 2315464
aaccaagugacauaaauga

SEQ ID NO: 2315466 - RNA, 19 nt, Artificial Sequence
  Description of Artificial Sequence: Synthetic oligonucleotide
  Sense strand starting at position 3920 of SEQ ID NO: 1885091
gaucaaaggcuuuggauag

SEQ ID NO: 2315467 - RNA, 19 nt, Artificial Sequence
  Description of Artificial Sequence: Synthetic oligonucleotide
  Antisense strand to SEQ ID NO: 2315466
cuauccaaagccuuugauc

SEQ ID NO: 2315468 - RNA, 19 nt, Artificial Sequence
  Description of Artificial Sequence: Synthetic oligonucleotide
  Sense strand starting at position 3939 of SEQ ID NO: 1885091
cauggauaucagcgacagu

SEQ ID NO: 2315469 - RNA, 19 nt, Artificial Sequence
  Description of Artificial Sequence: Synthetic oligonucleotide
  Antisense strand to SEQ ID NO: 2315468
acugucgcugauauccaug

SEQ ID NO: 2315470 - RNA, 19 nt, Artificial Sequence
  Description of Artificial Sequence: Synthetic oligonucleotide
  Sense strand starting at position 3940 of SEQ ID NO: 1885091
auggauaucagcgacaguu

SEQ ID NO: 2315471 - RNA, 19 nt, Artificial Sequence
  Description of Artificial Sequence: Synthetic oligonucleotide
  Antisense strand to SEQ ID NO: 2315470
aacugucgcugauauccau

SEQ ID NO: 2315472 - RNA, 19 nt, Artificial Sequence
  Description of Artificial Sequence: Synthetic oligonucleotide
  Sense strand starting at position 3942 of SEQ ID NO: 1885091
ggauaucagcgacaguuug

SEQ ID NO: 2315473 - RNA, 19 nt, Artificial Sequence
  Description of Artificial Sequence: Synthetic oligonucleotide
  Antisense strand to SEQ ID NO: 2315472
caaacugucgcugauaucc

SEQ ID NO: 2315474 - RNA, 19 nt, Artificial Sequence
  Description of Artificial Sequence: Synthetic oligonucleotide
  Sense strand starting at position 26 of SEQ ID NO: 1885092
ucugaauggcucuguguau

SEQ ID NO: 2315475 - RNA, 19 nt, Artificial Sequence
  Description of Artificial Sequence: Synthetic oligonucleotide
  Antisense strand to SEQ ID NO: 2315474
auacacagagccauucaga

SEQ ID NO: 2315476 - RNA, 19 nt, Artificial Sequence
  Description of Artificial Sequence: Synthetic oligonucleotide
  Sense strand starting at position 27 of SEQ ID NO: 1885092
cugaauggcucuguguauu

SEQ ID NO: 2315477 - RNA, 19 nt, Artificial Sequence
  Description of Artificial Sequence: Synthetic oligonucleotide
  Antisense strand to SEQ ID NO: 2315476
aauacacagagccauucag

SEQ ID NO: 2315478 - RNA, 19 nt, Artificial Sequence
  Description of Artificial Sequence: Synthetic oligonucleotide
  Sense strand starting at position 30 of SEQ ID NO: 1885092
aauggcucuguguauuagu

SEQ ID NO: 2315479 - RNA, 19 nt, Artificial Sequence
  Description of Artificial Sequence: Synthetic oligonucleotide
  Antisense strand to SEQ ID NO: 2315478
acuaauacacagagccauu

SEQ ID NO: 2315480 - RNA, 19 nt, Artificial Sequence
  Description of Artificial Sequence: Synthetic oligonucleotide
  Sense strand starting at position 64 of SEQ ID NO: 1885092
gggaguaaauuauaugugu

SEQ ID NO: 2315481 - RNA, 19 nt, Artificial Sequence
  Description of Artificial Sequence: Synthetic oligonucleotide
  Antisense strand to SEQ ID NO: 2315480
acacauauaauuuacuccc

SEQ ID NO: 2315482 - RNA, 19 nt, Artificial Sequence
  Description of Artificial Sequence: Synthetic oligonucleotide
  Sense strand starting at position 70 of SEQ ID NO: 1885092
aaauuauaugugugaacug

SEQ ID NO: 2315483 - RNA, 19 nt, Artificial Sequence
  Description of Artificial Sequence: Synthetic oligonucleotide
  Antisense strand to SEQ ID NO: 2315482
caguucacacauauaauuu

SEQ ID NO: 2315484 - RNA, 19 nt, Artificial Sequence
  Description of Artificial Sequence: Synthetic oligonucleotide
  Sense strand starting at position 71 of SEQ ID NO: 1885092
aauuauaugugugaacuga

SEQ ID NO: 2315485 - RNA, 19 nt, Artificial Sequence
  Description of Artificial Sequence: Synthetic oligonucleotide
  Antisense strand to SEQ ID NO: 2315484
ucaguucacacauauaauu

SEQ ID NO: 2315486 - RNA, 19 nt, Artificial Sequence
  Description of Artificial Sequence: Synthetic oligonucleotide
  Sense strand starting at position 273 of SEQ ID NO: 1885092
auuuaucaguggcacguua

SEQ ID NO: 2315487 - RNA, 19 nt, Artificial Sequence
  Description of Artificial Sequence: Synthetic oligonucleotide
  Antisense strand to SEQ ID NO: 2315486
uaacgugccacugauaaau

SEQ ID NO: 2315488 - RNA, 19 nt, Artificial Sequence
  Description of Artificial Sequence: Synthetic oligonucleotide
  Sense strand starting at position 275 of SEQ ID NO: 1885092
uuaucaguggcacguuauu

SEQ ID NO: 2315489 - RNA, 19 nt, Artificial Sequence
  Description of Artificial Sequence: Synthetic oligonucleotide
  Antisense strand to SEQ ID NO: 2315488
aauaacgugccacugauaa

SEQ ID NO: 2315490 - RNA, 19 nt, Artificial Sequence
  Description of Artificial Sequence: Synthetic oligonucleotide
  Sense strand starting at position 284 of SEQ ID NO: 1885092
gcacguuauuucuaccagu

SEQ ID NO: 2315491 - RNA, 19 nt, Artificial Sequence
  Description of Artificial Sequence: Synthetic oligonucleotide
  Antisense strand to SEQ ID NO: 2315490
acugguagaaauaacgugc

SEQ ID NO: 2315492 - RNA, 19 nt, Artificial Sequence
  Description of Artificial Sequence: Synthetic oligonucleotide
  Sense strand starting at position 287 of SEQ ID NO: 1885092
cguuauuucuaccagucau

SEQ ID NO: 2315493 - RNA, 19 nt, Artificial Sequence
  Description of Artificial Sequence: Synthetic oligonucleotide
  Antisense strand to SEQ ID NO: 2315492
augacugguagaaauaacg

SEQ ID NO: 2315494 - RNA, 19 nt, Artificial Sequence
  Description of Artificial Sequence: Synthetic oligonucleotide
  Sense strand starting at position 301 of SEQ ID NO: 1885092
gucauauaaucaguagacu

SEQ ID NO: 2315495 - RNA, 19 nt, Artificial Sequence
  Description of Artificial Sequence: Synthetic oligonucleotide
  Antisense strand to SEQ ID NO: 2315494
agucuacugauuauaugac

SEQ ID NO: 2315496 - RNA, 19 nt, Artificial Sequence
  Description of Artificial Sequence: Synthetic oligonucleotide
  Sense strand starting at position 347 of SEQ ID NO: 1885092
ccguacuugugcucugaau

SEQ ID NO: 2315497 - RNA, 19 nt, Artificial Sequence
  Description of Artificial Sequence: Synthetic oligonucleotide
  Antisense strand to SEQ ID NO: 2315496
auucagagcacaaguacgg

SEQ ID NO: 2315498 - RNA, 19 nt, Artificial Sequence
  Description of Artificial Sequence: Synthetic oligonucleotide
  Sense strand starting at position 349 of SEQ ID NO: 1885092
guacuugugcucugaauag

SEQ ID NO: 2315499 - RNA, 19 nt, Artificial Sequence
  Description of Artificial Sequence: Synthetic oligonucleotide
  Antisense strand to SEQ ID NO: 2315498
cuauucagagcacaaguac

SEQ ID NO: 2315500 - RNA, 19 nt, Artificial Sequence
  Description of Artificial Sequence: Synthetic oligonucleotide
  Sense strand starting at position 398 of SEQ ID NO: 1885092
gugguaucucaacaaugcu

SEQ ID NO: 2315501 - RNA, 19 nt, Artificial Sequence
  Description of Artificial Sequence: Synthetic oligonucleotide
  Antisense strand to SEQ ID NO: 2315500
agcauuguugagauaccac

SEQ ID NO: 2315502 - RNA, 19 nt, Artificial Sequence
  Description of Artificial Sequence: Synthetic oligonucleotide
  Sense strand starting at position 441 of SEQ ID NO: 1885092
aggucaugaucagaaauca

SEQ ID NO: 2315503 - RNA, 19 nt, Artificial Sequence
  Description of Artificial Sequence: Synthetic oligonucleotide
  Antisense strand to SEQ ID NO: 2315502
ugauuucugaucaugaccu

SEQ ID NO: 2315504 - RNA, 19 nt, Artificial Sequence
  Description of Artificial Sequence: Synthetic oligonucleotide
  Sense strand starting at position 573 of SEQ ID NO: 1885092
aaaguauuguggcuauuag

SEQ ID NO: 2315505 - RNA, 19 nt, Artificial Sequence
  Description of Artificial Sequence: Synthetic oligonucleotide
  Antisense strand to SEQ ID NO: 2315504
cuaauagccacaauacuuu

SEQ ID NO: 2315506 - RNA, 19 nt, Artificial Sequence
  Description of Artificial Sequence: Synthetic oligonucleotide
  Sense strand starting at position 574 of SEQ ID NO: 1885092
aaguauuguggcuauuaga

SEQ ID NO: 2315507 - RNA, 19 nt, Artificial Sequence
  Description of Artificial Sequence: Synthetic oligonucleotide
  Antisense strand to SEQ ID NO: 2315506
ucuaauagccacaauacuu

SEQ ID NO: 2315508 - RNA, 19 nt, Artificial Sequence
  Description of Artificial Sequence: Synthetic oligonucleotide
  Sense strand starting at position 610 of SEQ ID NO: 1885092
cucuaaugguauuaagagu

SEQ ID NO: 2315509 - RNA, 19 nt, Artificial Sequence
  Description of Artificial Sequence: Synthetic oligonucleotide
  Antisense strand to SEQ ID NO: 2315508
acucuuaauaccauuagag

SEQ ID NO: 2315510 - RNA, 19 nt, Artificial Sequence
  Description of Artificial Sequence: Synthetic oligonucleotide
  Sense strand starting at position 618 of SEQ ID NO: 1885092
guauuaagaguuuggaagu

SEQ ID NO: 2315511 - RNA, 19 nt, Artificial Sequence
  Description of Artificial Sequence: Synthetic oligonucleotide
  Antisense strand to SEQ ID NO: 2315510
acuuccaaacucuuaauac

SEQ ID NO: 2315512 - RNA, 19 nt, Artificial Sequence
  Description of Artificial Sequence: Synthetic oligonucleotide
  Sense strand starting at position 948 of SEQ ID NO: 1885092
ggaaguacagaguaguauu

SEQ ID NO: 2315513 - RNA, 19 nt, Artificial Sequence
  Description of Artificial Sequence: Synthetic oligonucleotide
  Antisense strand to SEQ ID NO: 2315512
aauacuacucuguacuucc

SEQ ID NO: 2315514 - RNA, 19 nt, Artificial Sequence
  Description of Artificial Sequence: Synthetic oligonucleotide
  Sense strand starting at position 1012 of SEQ ID NO: 1885092
gcagaaauggcugaagcuu

SEQ ID NO: 2315515 - RNA, 19 nt, Artificial Sequence
  Description of Artificial Sequence: Synthetic oligonucleotide
  Antisense strand to SEQ ID NO: 2315514
aagcuucagccauuucugc

SEQ ID NO: 2315516 - RNA, 19 nt, Artificial Sequence
  Description of Artificial Sequence: Synthetic oligonucleotide
  Sense strand starting at position 1055 of SEQ ID NO: 1885092
ggguuuacauggcugggaa

SEQ ID NO: 2315517 - RNA, 19 nt, Artificial Sequence
  Description of Artificial Sequence: Synthetic oligonucleotide
  Antisense strand to SEQ ID NO: 2315516
uucccagccauguaaaccc

SEQ ID NO: 2315518 - RNA, 19 nt, Artificial Sequence
  Description of Artificial Sequence: Synthetic oligonucleotide
  Sense strand starting at position 1056 of SEQ ID NO: 1885092
gguuuacauggcugggaau

SEQ ID NO: 2315519 - RNA, 19 nt, Artificial Sequence
  Description of Artificial Sequence: Synthetic oligonucleotide
  Antisense strand to SEQ ID NO: 2315518
auucccagccauguaaacc

SEQ ID NO: 2315520 - RNA, 19 nt, Artificial Sequence
  Description of Artificial Sequence: Synthetic oligonucleotide
  Sense strand starting at position 1057 of SEQ ID NO: 1885092
guuuacauggcugggaaua

SEQ ID NO: 2315521 - RNA, 19 nt, Artificial Sequence
  Description of Artificial Sequence: Synthetic oligonucleotide
  Antisense strand to SEQ ID NO: 2315520
uauucccagccauguaaac

SEQ ID NO: 2315522 - RNA, 19 nt, Artificial Sequence
  Description of Artificial Sequence: Synthetic oligonucleotide
  Sense strand starting at position 1059 of SEQ ID NO: 1885092
uuacauggcugggaauaua

SEQ ID NO: 2315523 - RNA, 19 nt, Artificial Sequence
  Description of Artificial Sequence: Synthetic oligonucleotide
  Antisense strand to SEQ ID NO: 2315522
uauauucccagccauguaa

SEQ ID NO: 2315524 - RNA, 19 nt, Artificial Sequence
  Description of Artificial Sequence: Synthetic oligonucleotide
  Sense strand starting at position 1083 of SEQ ID NO: 1885092
guauguauguccuuaugua

SEQ ID NO: 2315525 - RNA, 19 nt, Artificial Sequence
  Description of Artificial Sequence: Synthetic oligonucleotide
  Antisense strand to SEQ ID NO: 2315524
uacauaaggacauacauac

SEQ ID NO: 2315526 - RNA, 19 nt, Artificial Sequence
  Description of Artificial Sequence: Synthetic oligonucleotide
  Sense strand starting at position 1084 of SEQ ID NO: 1885092
uauguauguccuuauguau

SEQ ID NO: 2315527 - RNA, 19 nt, Artificial Sequence
  Description of Artificial Sequence: Synthetic oligonucleotide
  Antisense strand to SEQ ID NO: 2315526
auacauaaggacauacaua

SEQ ID NO: 2315528 - RNA, 19 nt, Artificial Sequence
  Description of Artificial Sequence: Synthetic oligonucleotide
  Sense strand starting at position 1087 of SEQ ID NO: 1885092
guauguccuuauguauaua

SEQ ID NO: 2315529 - RNA, 19 nt, Artificial Sequence
  Description of Artificial Sequence: Synthetic oligonucleotide
  Antisense strand to SEQ ID NO: 2315528
uauauacauaaggacauac

SEQ ID NO: 2315530 - RNA, 19 nt, Artificial Sequence
  Description of Artificial Sequence: Synthetic oligonucleotide
  Sense strand starting at position 1128 of SEQ ID NO: 1885092
uugcuugaauguuuaucau

SEQ ID NO: 2315531 - RNA, 19 nt, Artificial Sequence
  Description of Artificial Sequence: Synthetic oligonucleotide
  Antisense strand to SEQ ID NO: 2315530
augauaaacauucaagcaa

SEQ ID NO: 2315532 - RNA, 19 nt, Artificial Sequence
  Description of Artificial Sequence: Synthetic oligonucleotide
  Sense strand starting at position 1194 of SEQ ID NO: 1885092
agacuaagauugugauccu

SEQ ID NO: 2315533 - RNA, 19 nt, Artificial Sequence
  Description of Artificial Sequence: Synthetic oligonucleotide
  Antisense strand to SEQ ID NO: 2315532
aggaucacaaucuuagucu

SEQ ID NO: 2315534 - RNA, 19 nt, Artificial Sequence
  Description of Artificial Sequence: Synthetic oligonucleotide
  Sense strand starting at position 1195 of SEQ ID NO: 1885092
gacuaagauugugauccuu

SEQ ID NO: 2315535 - RNA, 19 nt, Artificial Sequence
  Description of Artificial Sequence: Synthetic oligonucleotide
  Antisense strand to SEQ ID NO: 2315534
aaggaucacaaucuuaguc

SEQ ID NO: 2315536 - RNA, 19 nt, Artificial Sequence
  Description of Artificial Sequence: Synthetic oligonucleotide
  Sense strand starting at position 1255 of SEQ ID NO: 1885092
uuuauuggcguaggaauca

SEQ ID NO: 2315537 - RNA, 19 nt, Artificial Sequence
  Description of Artificial Sequence: Synthetic oligonucleotide
  Antisense strand to SEQ ID NO: 2315536
ugauuccuacgccaauaaa

SEQ ID NO: 2315538 - RNA, 19 nt, Artificial Sequence
  Description of Artificial Sequence: Synthetic oligonucleotide
  Sense strand starting at position 1267 of SEQ ID NO: 1885092
ggaaucaucuugcccuaau

SEQ ID NO: 2315539 - RNA, 19 nt, Artificial Sequence
  Description of Artificial Sequence: Synthetic oligonucleotide
  Antisense strand to SEQ ID NO: 2315538
auuagggcaagaugauucc

SEQ ID NO: 2315540 - RNA, 19 nt, Artificial Sequence
  Description of Artificial Sequence: Synthetic oligonucleotide
  Sense strand starting at position 1306 of SEQ ID NO: 1885092
aggguaagauuccuaacau

SEQ ID NO: 2315541 - RNA, 19 nt, Artificial Sequence
  Description of Artificial Sequence: Synthetic oligonucleotide
  Antisense strand to SEQ ID NO: 2315540
auguuaggaaucuuacccu

SEQ ID NO: 2315542 - RNA, 19 nt, Artificial Sequence
  Description of Artificial Sequence: Synthetic oligonucleotide
  Sense strand starting at position 1307 of SEQ ID NO: 1885092
ggguaagauuccuaacauc

SEQ ID NO: 2315543 - RNA, 19 nt, Artificial Sequence
  Description of Artificial Sequence: Synthetic oligonucleotide
  Antisense strand to SEQ ID NO: 2315542
gauguuaggaaucuuaccc

SEQ ID NO: 2315544 - RNA, 19 nt, Artificial Sequence
  Description of Artificial Sequence: Synthetic oligonucleotide
  Sense strand starting at position 1362 of SEQ ID NO: 1885092
agcuuuggcccuuacaaau

SEQ ID NO: 2315545 - RNA, 19 nt, Artificial Sequence
  Description of Artificial Sequence: Synthetic oligonucleotide
  Antisense strand to SEQ ID NO: 2315544
auuuguaagggccaaagcu

SEQ ID NO: 2315546 - RNA, 19 nt, Artificial Sequence
  Description of Artificial Sequence: Synthetic oligonucleotide
  Sense strand starting at position 1397 of SEQ ID NO: 1885092
aguuacaucucgcuuagau

SEQ ID NO: 2315547 - RNA, 19 nt, Artificial Sequence
  Description of Artificial Sequence: Synthetic oligonucleotide
  Antisense strand to SEQ ID NO: 2315546
aucuaagcgagauguaacu

SEQ ID NO: 2315548 - RNA, 19 nt, Artificial Sequence
  Description of Artificial Sequence: Synthetic oligonucleotide
  Sense strand starting at position 1433 of SEQ ID NO: 1885092
gaacuaucugcauggaugu

SEQ ID NO: 2315549 - RNA, 19 nt, Artificial Sequence
  Description of Artificial Sequence: Synthetic oligonucleotide
  Antisense strand to SEQ ID NO: 2315548
acauccaugcagauaguuc

SEQ ID NO: 2315550 - RNA, 19 nt, Artificial Sequence
  Description of Artificial Sequence: Synthetic oligonucleotide
  Sense strand starting at position 1452 of SEQ ID NO: 1885092
ucguacaugcuauauaaca

SEQ ID NO: 2315551 - RNA, 19 nt, Artificial Sequence
  Description of Artificial Sequence: Synthetic oligonucleotide
  Antisense strand to SEQ ID NO: 2315550
uguuauauagcauguacga

SEQ ID NO: 2315552 - RNA, 19 nt, Artificial Sequence
  Description of Artificial Sequence: Synthetic oligonucleotide
  Sense strand starting at position 1492 of SEQ ID NO: 1885092
accaucaguugagcucuaa

SEQ ID NO: 2315553 - RNA, 19 nt, Artificial Sequence
  Description of Artificial Sequence: Synthetic oligonucleotide
  Antisense strand to SEQ ID NO: 2315552
uuagagcucaacugauggu

SEQ ID NO: 2315554 - RNA, 19 nt, Artificial Sequence
  Description of Artificial Sequence: Synthetic oligonucleotide
  Sense strand starting at position 325 of SEQ ID NO: 1885093
acacaagugguauaugcau

SEQ ID NO: 2315555 - RNA, 19 nt, Artificial Sequence
  Description of Artificial Sequence: Synthetic oligonucleotide
  Antisense strand to SEQ ID NO: 2315554
augcauauaccacuugugu

SEQ ID NO: 2315556 - RNA, 19 nt, Artificial Sequence
  Description of Artificial Sequence: Synthetic oligonucleotide
  Sense strand starting at position 347 of SEQ ID NO: 1885093
guauacugcaugugguaga

SEQ ID NO: 2315557 - RNA, 19 nt, Artificial Sequence
  Description of Artificial Sequence: Synthetic oligonucleotide
  Antisense strand to SEQ ID NO: 2315556
ucuaccacaugcaguauac

SEQ ID NO: 2315558 - RNA, 19 nt, Artificial Sequence
  Description of Artificial Sequence: Synthetic oligonucleotide
  Sense strand starting at position 352 of SEQ ID NO: 1885093
cugcaugugguagaaagua

SEQ ID NO: 2315559 - RNA, 19 nt, Artificial Sequence
  Description of Artificial Sequence: Synthetic oligonucleotide
  Antisense strand to SEQ ID NO: 2315558
uacuuucuaccacaugcag

SEQ ID NO: 2315560 - RNA, 19 nt, Artificial Sequence
  Description of Artificial Sequence: Synthetic oligonucleotide
  Sense strand starting at position 372 of SEQ ID NO: 1885093
acuaaaguuugagaaauug

SEQ ID NO: 2315561 - RNA, 19 nt, Artificial Sequence
  Description of Artificial Sequence: Synthetic oligonucleotide
  Antisense strand to SEQ ID NO: 2315560
caauuucucaaacuuuagu

SEQ ID NO: 2315562 - RNA, 19 nt, Artificial Sequence
  Description of Artificial Sequence: Synthetic oligonucleotide
  Sense strand starting at position 381 of SEQ ID NO: 1885093
ugagaaauugcugguaauu

SEQ ID NO: 2315563 - RNA, 19 nt, Artificial Sequence
  Description of Artificial Sequence: Synthetic oligonucleotide
  Antisense strand to SEQ ID NO: 2315562
aauuaccagcaauuucuca

SEQ ID NO: 2315564 - RNA, 19 nt, Artificial Sequence
  Description of Artificial Sequence: Synthetic oligonucleotide
  Sense strand starting at position 383 of SEQ ID NO: 1885093
agaaauugcugguaauuug

SEQ ID NO: 2315565 - RNA, 19 nt, Artificial Sequence
  Description of Artificial Sequence: Synthetic oligonucleotide
  Antisense strand to SEQ ID NO: 2315564
caaauuaccagcaauuucu

SEQ ID NO: 2315566 - RNA, 19 nt, Artificial Sequence
  Description of Artificial Sequence: Synthetic oligonucleotide
  Sense strand starting at position 390 of SEQ ID NO: 1885093
gcugguaauuugcuugaaa

SEQ ID NO: 2315567 - RNA, 19 nt, Artificial Sequence
  Description of Artificial Sequence: Synthetic oligonucleotide
  Antisense strand to SEQ ID NO: 2315566
uuucaagcaaauuaccagc

SEQ ID NO: 2315568 - RNA, 19 nt, Artificial Sequence
  Description of Artificial Sequence: Synthetic oligonucleotide
  Sense strand starting at position 392 of SEQ ID NO: 1885093
ugguaauuugcuugaaagc

SEQ ID NO: 2315569 - RNA, 19 nt, Artificial Sequence
  Description of Artificial Sequence: Synthetic oligonucleotide
  Antisense strand to SEQ ID NO: 2315568
gcuuucaagcaaauuacca

SEQ ID NO: 2315570 - RNA, 19 nt, Artificial Sequence
  Description of Artificial Sequence: Synthetic oligonucleotide
  Sense strand starting at position 411 of SEQ ID NO: 1885093
acagguucugaauguaaca

SEQ ID NO: 2315571 - RNA, 19 nt, Artificial Sequence
  Description of Artificial Sequence: Synthetic oligonucleotide
  Antisense strand to SEQ ID NO: 2315570
uguuacauucagaaccugu

SEQ ID NO: 2315572 - RNA, 19 nt, Artificial Sequence
  Description of Artificial Sequence: Synthetic oligonucleotide
  Sense strand starting at position 486 of SEQ ID NO: 1885093
ucuggcccuccguaugaaa

SEQ ID NO: 2315573 - RNA, 19 nt, Artificial Sequence
  Description of Artificial Sequence: Synthetic oligonucleotide
  Antisense strand to SEQ ID NO: 2315572
uuucauacggagggccaga

SEQ ID NO: 2315574 - RNA, 19 nt, Artificial Sequence
  Description of Artificial Sequence: Synthetic oligonucleotide
  Sense strand starting at position 850 of SEQ ID NO: 1885093
acccuacuugggcauaauu

SEQ ID NO: 2315575 - RNA, 19 nt, Artificial Sequence
  Description of Artificial Sequence: Synthetic oligonucleotide
  Antisense strand to SEQ ID NO: 2315574
aauuaugcccaaguagggu

SEQ ID NO: 2315576 - RNA, 19 nt, Artificial Sequence
  Description of Artificial Sequence: Synthetic oligonucleotide
  Sense strand starting at position 852 of SEQ ID NO: 1885093
ccuacuugggcauaauuaa

SEQ ID NO: 2315577 - RNA, 19 nt, Artificial Sequence
  Description of Artificial Sequence: Synthetic oligonucleotide
  Antisense strand to SEQ ID NO: 2315576
uuaauuaugcccaaguagg

SEQ ID NO: 2315578 - RNA, 19 nt, Artificial Sequence
  Description of Artificial Sequence: Synthetic oligonucleotide
  Sense strand starting at position 882 of SEQ ID NO: 1885093
ucugcaaacugaucuguga

SEQ ID NO: 2315579 - RNA, 19 nt, Artificial Sequence
  Description of Artificial Sequence: Synthetic oligonucleotide
  Antisense strand to SEQ ID NO: 2315578
ucacagaucaguuugcaga

SEQ ID NO: 2315580 - RNA, 19 nt, Artificial Sequence
  Description of Artificial Sequence: Synthetic oligonucleotide
  Sense strand starting at position 1009 of SEQ ID NO: 1885093
ucaguuuccuccuuaugca

SEQ ID NO: 2315581 - RNA, 19 nt, Artificial Sequence
  Description of Artificial Sequence: Synthetic oligonucleotide
  Antisense strand to SEQ ID NO: 2315580
ugcauaaggaggaaacuga

SEQ ID NO: 2315582 - RNA, 19 nt, Artificial Sequence
  Description of Artificial Sequence: Synthetic oligonucleotide
  Sense strand starting at position 1017 of SEQ ID NO: 1885093
cuccuuaugcaauaaggau

SEQ ID NO: 2315583 - RNA, 19 nt, Artificial Sequence
  Description of Artificial Sequence: Synthetic oligonucleotide
  Antisense strand to SEQ ID NO: 2315582
auccuuauugcauaaggag

SEQ ID NO: 2315584 - RNA, 19 nt, Artificial Sequence
  Description of Artificial Sequence: Synthetic oligonucleotide
  Sense strand starting at position 1029 of SEQ ID NO: 1885093
uaaggaugaugagccuuau

SEQ ID NO: 2315585 - RNA, 19 nt, Artificial Sequence
  Description of Artificial Sequence: Synthetic oligonucleotide
  Antisense strand to SEQ ID NO: 2315584
auaaggcucaucauccuua

SEQ ID NO: 2315586 - RNA, 19 nt, Artificial Sequence
  Description of Artificial Sequence: Synthetic oligonucleotide
  Sense strand starting at position 1053 of SEQ ID NO: 1885093
acucaaaguucgguccuua

SEQ ID NO: 2315587 - RNA, 19 nt, Artificial Sequence
  Description of Artificial Sequence: Synthetic oligonucleotide
  Antisense strand to SEQ ID NO: 2315586
uaaggaccgaacuuugagu

SEQ ID NO: 2315588 - RNA, 19 nt, Artificial Sequence
  Description of Artificial Sequence: Synthetic oligonucleotide
  Sense strand starting at position 1094 of SEQ ID NO: 1885093
gggaguuugcuacaaaugc

SEQ ID NO: 2315589 - RNA, 19 nt, Artificial Sequence
  Description of Artificial Sequence: Synthetic oligonucleotide
  Antisense strand to SEQ ID NO: 2315588
gcauuuguagcaaacuccc

SEQ ID NO: 2315590 - RNA, 19 nt, Artificial Sequence
  Description of Artificial Sequence: Synthetic oligonucleotide
  Sense strand starting at position 1285 of SEQ ID NO: 1885093
ccaugaguucgauaccaac

SEQ ID NO: 2315591 - RNA, 19 nt, Artificial Sequence
  Description of Artificial Sequence: Synthetic oligonucleotide
  Antisense strand to SEQ ID NO: 2315590
guugguaucgaacucaugg

SEQ ID NO: 2315592 - RNA, 19 nt, Artificial Sequence
  Description of Artificial Sequence: Synthetic oligonucleotide
  Sense strand starting at position 1379 of SEQ ID NO: 1885093
gcuguuuaaucaccaagua

SEQ ID NO: 2315593 - RNA, 19 nt, Artificial Sequence
  Description of Artificial Sequence: Synthetic oligonucleotide
  Antisense strand to SEQ ID NO: 2315592
uacuuggugauuaaacagc

SEQ ID NO: 2315594 - RNA, 19 nt, Artificial Sequence
  Description of Artificial Sequence: Synthetic oligonucleotide
  Sense strand starting at position 1444 of SEQ ID NO: 1885093
cucaaaggguuguugcaaa

SEQ ID NO: 2315595 - RNA, 19 nt, Artificial Sequence
  Description of Artificial Sequence: Synthetic oligonucleotide
  Antisense strand to SEQ ID NO: 2315594
uuugcaacaacccuuugag

SEQ ID NO: 2315596 - RNA, 19 nt, Artificial Sequence
  Description of Artificial Sequence: Synthetic oligonucleotide
  Sense strand starting at position 1528 of SEQ ID NO: 1885093
acucuugcuggauaucaau

SEQ ID NO: 2315597 - RNA, 19 nt, Artificial Sequence
  Description of Artificial Sequence: Synthetic oligonucleotide
  Antisense strand to SEQ ID NO: 2315596
auugauauccagcaagagu

SEQ ID NO: 2315598 - RNA, 19 nt, Artificial Sequence
  Description of Artificial Sequence: Synthetic oligonucleotide
  Sense strand starting at position 1534 of SEQ ID NO: 1885093
gcuggauaucaauauggcu

SEQ ID NO: 2315599 - RNA, 19 nt, Artificial Sequence
  Description of Artificial Sequence: Synthetic oligonucleotide
  Antisense strand to SEQ ID NO: 2315598
agccauauugauauccagc

SEQ ID NO: 2315600 - RNA, 19 nt, Artificial Sequence
  Description of Artificial Sequence: Synthetic oligonucleotide
  Sense strand starting at position 2172 of SEQ ID NO: 1885093
uucucauucgugcagcaga

SEQ ID NO: 2315601 - RNA, 19 nt, Artificial Sequence
  Description of Artificial Sequence: Synthetic oligonucleotide
  Antisense strand to SEQ ID NO: 2315600
ucugcugcacgaaugagaa

SEQ ID NO: 2315602 - RNA, 19 nt, Artificial Sequence
  Description of Artificial Sequence: Synthetic oligonucleotide
  Sense strand starting at position 2179 of SEQ ID NO: 1885093
ucgugcagcagacauuuau

SEQ ID NO: 2315603 - RNA, 19 nt, Artificial Sequence
  Description of Artificial Sequence: Synthetic oligonucleotide
  Antisense strand to SEQ ID NO: 2315602
auaaaugucugcugcacga

SEQ ID NO: 2315604 - RNA, 19 nt, Artificial Sequence
  Description of Artificial Sequence: Synthetic oligonucleotide
  Sense strand starting at position 2219 of SEQ ID NO: 1885093
gauacuguacgccagagaa

SEQ ID NO: 2315605 - RNA, 19 nt, Artificial Sequence
  Description of Artificial Sequence: Synthetic oligonucleotide
  Antisense strand to SEQ ID NO: 2315604
uucucuggcguacaguauc

SEQ ID NO: 2315606 - RNA, 19 nt, Artificial Sequence
  Description of Artificial Sequence: Synthetic oligonucleotide
  Sense strand starting at position 2331 of SEQ ID NO: 1885093
auccgauaugccugaguac

SEQ ID NO: 2315607 - RNA, 19 nt, Artificial Sequence
  Description of Artificial Sequence: Synthetic oligonucleotide
  Antisense strand to SEQ ID NO: 2315606
guacucaggcauaucggau

SEQ ID NO: 2315608 - RNA, 19 nt, Artificial Sequence
  Description of Artificial Sequence: Synthetic oligonucleotide
  Sense strand starting at position 2332 of SEQ ID NO: 1885093
uccgauaugccugaguaca

SEQ ID NO: 2315609 - RNA, 19 nt, Artificial Sequence
  Description of Artificial Sequence: Synthetic oligonucleotide
  Antisense strand to SEQ ID NO: 2315608
uguacucaggcauaucgga

SEQ ID NO: 2315610 - RNA, 19 nt, Artificial Sequence
  Description of Artificial Sequence: Synthetic oligonucleotide
  Sense strand starting at position 2334 of SEQ ID NO: 1885093
cgauaugccugaguacaca

SEQ ID NO: 2315611 - RNA, 19 nt, Artificial Sequence
  Description of Artificial Sequence: Synthetic oligonucleotide
  Antisense strand to SEQ ID NO: 2315610
uguguacucaggcauaucg

SEQ ID NO: 2315612 - RNA, 19 nt, Artificial Sequence
  Description of Artificial Sequence: Synthetic oligonucleotide
  Sense strand starting at position 2504 of SEQ ID NO: 1885093
ugauuccuaugagccauau

SEQ ID NO: 2315613 - RNA, 19 nt, Artificial Sequence
  Description of Artificial Sequence: Synthetic oligonucleotide
  Antisense strand to SEQ ID NO: 2315612
auauggcucauaggaauca

SEQ ID NO: 2315614 - RNA, 19 nt, Artificial Sequence
  Description of Artificial Sequence: Synthetic oligonucleotide
  Sense strand starting at position 2574 of SEQ ID NO: 1885093
uaauaauaacgguaacagu

SEQ ID NO: 2315615 - RNA, 19 nt, Artificial Sequence
  Description of Artificial Sequence: Synthetic oligonucleotide
  Antisense strand to SEQ ID NO: 2315614
acuguuaccguuauuauua

SEQ ID NO: 2315616 - RNA, 19 nt, Artificial Sequence
  Description of Artificial Sequence: Synthetic oligonucleotide
  Sense strand starting at position 2583 of SEQ ID NO: 1885093
cgguaacaguguuuauuua

SEQ ID NO: 2315617 - RNA, 19 nt, Artificial Sequence
  Description of Artificial Sequence: Synthetic oligonucleotide
  Antisense strand to SEQ ID NO: 2315616
uaaauaaacacuguuaccg

SEQ ID NO: 2315618 - RNA, 19 nt, Artificial Sequence
  Description of Artificial Sequence: Synthetic oligonucleotide
  Sense strand starting at position 2855 of SEQ ID NO: 1885093
acauguuugcccugaaucu

SEQ ID NO: 2315619 - RNA, 19 nt, Artificial Sequence
  Description of Artificial Sequence: Synthetic oligonucleotide
  Antisense strand to SEQ ID NO: 2315618
agauucagggcaaacaugu

SEQ ID NO: 2315620 - RNA, 19 nt, Artificial Sequence
  Description of Artificial Sequence: Synthetic oligonucleotide
  Sense strand starting at position 3005 of SEQ ID NO: 1885093
auaugcaauugccuagauu

SEQ ID NO: 2315621 - RNA, 19 nt, Artificial Sequence
  Description of Artificial Sequence: Synthetic oligonucleotide
  Antisense strand to SEQ ID NO: 2315620
aaucuaggcaauugcauau

SEQ ID NO: 2315622 - RNA, 19 nt, Artificial Sequence
  Description of Artificial Sequence: Synthetic oligonucleotide
  Sense strand starting at position 3409 of SEQ ID NO: 1885093
ucccauuaugcugggagau

SEQ ID NO: 2315623 - RNA, 19 nt, Artificial Sequence
  Description of Artificial Sequence: Synthetic oligonucleotide
  Antisense strand to SEQ ID NO: 2315622
aucucccagcauaauggga

SEQ ID NO: 2315624 - RNA, 19 nt, Artificial Sequence
  Description of Artificial Sequence: Synthetic oligonucleotide
  Sense strand starting at position 3410 of SEQ ID NO: 1885093
cccauuaugcugggagauc

SEQ ID NO: 2315625 - RNA, 19 nt, Artificial Sequence
  Description of Artificial Sequence: Synthetic oligonucleotide
  Antisense strand to SEQ ID NO: 2315624
gaucucccagcauaauggg

SEQ ID NO: 2315626 - RNA, 19 nt, Artificial Sequence
  Description of Artificial Sequence: Synthetic oligonucleotide
  Sense strand starting at position 3442 of SEQ ID NO: 1885093
cccuuagguccaggaguuu

SEQ ID NO: 2315627 - RNA, 19 nt, Artificial Sequence
  Description of Artificial Sequence: Synthetic oligonucleotide
  Antisense strand to SEQ ID NO: 2315626
aaacuccuggaccuaaggg

SEQ ID NO: 2315628 - RNA, 19 nt, Artificial Sequence
  Description of Artificial Sequence: Synthetic oligonucleotide
  Sense strand starting at position 3516 of SEQ ID NO: 1885093
auaauuaauuagcagagga

SEQ ID NO: 2315629 - RNA, 19 nt, Artificial Sequence
  Description of Artificial Sequence: Synthetic oligonucleotide
  Antisense strand to SEQ ID NO: 2315628
uccucugcuaauuaauuau

SEQ ID NO: 2315630 - RNA, 19 nt, Artificial Sequence
  Description of Artificial Sequence: Synthetic oligonucleotide
  Sense strand starting at position 3913 of SEQ ID NO: 1885093
gcagcuuuacaagacuuau

SEQ ID NO: 2315631 - RNA, 19 nt, Artificial Sequence
  Description of Artificial Sequence: Synthetic oligonucleotide
  Antisense strand to SEQ ID NO: 2315630
auaagucuuguaaagcugc

SEQ ID NO: 2315632 - RNA, 19 nt, Artificial Sequence
  Description of Artificial Sequence: Synthetic oligonucleotide
  Sense strand starting at position 3933 of SEQ ID NO: 1885093
gggccaacuggugaaaucu

SEQ ID NO: 2315633 - RNA, 19 nt, Artificial Sequence
  Description of Artificial Sequence: Synthetic oligonucleotide
  Antisense strand to SEQ ID NO: 2315632
agauuucaccaguuggccc

SEQ ID NO: 2315634 - RNA, 19 nt, Artificial Sequence
  Description of Artificial Sequence: Synthetic oligonucleotide
  Sense strand starting at position 125 of SEQ ID NO: 1885094
gccguuccuuaccuauuua

SEQ ID NO: 2315635 - RNA, 19 nt, Artificial Sequence
  Description of Artificial Sequence: Synthetic oligonucleotide
  Antisense strand to SEQ ID NO: 2315634
uaaauagguaaggaacggc

SEQ ID NO: 2315636 - RNA, 19 nt, Artificial Sequence
  Description of Artificial Sequence: Synthetic oligonucleotide
  Sense strand starting at position 150 of SEQ ID NO: 1885094
ucauguggccuccaucaaa

SEQ ID NO: 2315637 - RNA, 19 nt, Artificial Sequence
  Description of Artificial Sequence: Synthetic oligonucleotide
  Antisense strand to SEQ ID NO: 2315636
uuugauggaggccacauga

SEQ ID NO: 2315638 - RNA, 19 nt, Artificial Sequence
  Description of Artificial Sequence: Synthetic oligonucleotide
  Sense strand starting at position 209 of SEQ ID NO: 1885094
aaagauauguuguuuggcu

SEQ ID NO: 2315639 - RNA, 19 nt, Artificial Sequence
  Description of Artificial Sequence: Synthetic oligonucleotide
  Antisense strand to SEQ ID NO: 2315638
agccaaacaacauaucuuu

SEQ ID NO: 2315640 - RNA, 19 nt, Artificial Sequence
  Description of Artificial Sequence: Synthetic oligonucleotide
  Sense strand starting at position 217 of SEQ ID NO: 1885094
guuguuuggcucuauuauu

SEQ ID NO: 2315641 - RNA, 19 nt, Artificial Sequence
  Description of Artificial Sequence: Synthetic oligonucleotide
  Antisense strand to SEQ ID NO: 2315640
aauaauagagccaaacaac

SEQ ID NO: 2315642 - RNA, 19 nt, Artificial Sequence
  Description of Artificial Sequence: Synthetic oligonucleotide
  Sense strand starting at position 242 of SEQ ID NO: 1885094
ugcuuaaugccucaucuga

SEQ ID NO: 2315643 - RNA, 19 nt, Artificial Sequence
  Description of Artificial Sequence: Synthetic oligonucleotide
  Antisense strand to SEQ ID NO: 2315642
ucagaugaggcauuaagca

SEQ ID NO: 2315644 - RNA, 19 nt, Artificial Sequence
  Description of Artificial Sequence: Synthetic oligonucleotide
  Sense strand starting at position 761 of SEQ ID NO: 1885094
agaagcuuguucccaguga

SEQ ID NO: 2315645 - RNA, 19 nt, Artificial Sequence
  Description of Artificial Sequence: Synthetic oligonucleotide
  Antisense strand to SEQ ID NO: 2315644
ucacugggaacaagcuucu

SEQ ID NO: 2315646 - RNA, 19 nt, Artificial Sequence
  Description of Artificial Sequence: Synthetic oligonucleotide
  Sense strand starting at position 765 of SEQ ID NO: 1885094
gcuuguucccagugauaaa

SEQ ID NO: 2315647 - RNA, 19 nt, Artificial Sequence
  Description of Artificial Sequence: Synthetic oligonucleotide
  Antisense strand to SEQ ID NO: 2315646
uuuaucacugggaacaagc

SEQ ID NO: 2315648 - RNA, 19 nt, Artificial Sequence
  Description of Artificial Sequence: Synthetic oligonucleotide
  Sense strand starting at position 835 of SEQ ID NO: 1885094
ucaguaucaugacuugaau

SEQ ID NO: 2315649 - RNA, 19 nt, Artificial Sequence
  Description of Artificial Sequence: Synthetic oligonucleotide
  Antisense strand to SEQ ID NO: 2315648
auucaagucaugauacuga

SEQ ID NO: 2315650 - RNA, 19 nt, Artificial Sequence
  Description of Artificial Sequence: Synthetic oligonucleotide
  Sense strand starting at position 976 of SEQ ID NO: 1885094
cguaguuaguaccuugaaa

SEQ ID NO: 2315651 - RNA, 19 nt, Artificial Sequence
  Description of Artificial Sequence: Synthetic oligonucleotide
  Antisense strand to SEQ ID NO: 2315650
uuucaagguacuaacuacg

SEQ ID NO: 2315652 - RNA, 19 nt, Artificial Sequence
  Description of Artificial Sequence: Synthetic oligonucleotide
  Sense strand starting at position 1073 of SEQ ID NO: 1885094
caagaauucuuaccgguua

SEQ ID NO: 2315653 - RNA, 19 nt, Artificial Sequence
  Description of Artificial Sequence: Synthetic oligonucleotide
  Antisense strand to SEQ ID NO: 2315652
uaaccgguaagaauucuug

SEQ ID NO: 2315654 - RNA, 19 nt, Artificial Sequence
  Description of Artificial Sequence: Synthetic oligonucleotide
  Sense strand starting at position 1169 of SEQ ID NO: 1885094
gaucuuugggacgacugua

SEQ ID NO: 2315655 - RNA, 19 nt, Artificial Sequence
  Description of Artificial Sequence: Synthetic oligonucleotide
  Antisense strand to SEQ ID NO: 2315654
uacagucgucccaaagauc

SEQ ID NO: 2315656 - RNA, 19 nt, Artificial Sequence
  Description of Artificial Sequence: Synthetic oligonucleotide
  Sense strand starting at position 1177 of SEQ ID NO: 1885094
ggacgacuguagguuaauu

SEQ ID NO: 2315657 - RNA, 19 nt, Artificial Sequence
  Description of Artificial Sequence: Synthetic oligonucleotide
  Antisense strand to SEQ ID NO: 2315656
aauuaaccuacagucgucc

SEQ ID NO: 2315658 - RNA, 19 nt, Artificial Sequence
  Description of Artificial Sequence: Synthetic oligonucleotide
  Sense strand starting at position 1179 of SEQ ID NO: 1885094
acgacuguagguuaauuaa

SEQ ID NO: 2315659 - RNA, 19 nt, Artificial Sequence
  Description of Artificial Sequence: Synthetic oligonucleotide
  Antisense strand to SEQ ID NO: 2315658
uuaauuaaccuacagucgu

SEQ ID NO: 2315660 - RNA, 19 nt, Artificial Sequence
  Description of Artificial Sequence: Synthetic oligonucleotide
  Sense strand starting at position 1240 of SEQ ID NO: 1885094
agugaaaccucaccucaag

SEQ ID NO: 2315661 - RNA, 19 nt, Artificial Sequence
  Description of Artificial Sequence: Synthetic oligonucleotide
  Antisense strand to SEQ ID NO: 2315660
cuugaggugagguuucacu

SEQ ID NO: 2315662 - RNA, 19 nt, Artificial Sequence
  Description of Artificial Sequence: Synthetic oligonucleotide
  Sense strand starting at position 1279 of SEQ ID NO: 1885094
auguccguaucuuuccaaa

SEQ ID NO: 2315663 - RNA, 19 nt, Artificial Sequence
  Description of Artificial Sequence: Synthetic oligonucleotide
  Antisense strand to SEQ ID NO: 2315662
uuuggaaagauacggacau

SEQ ID NO: 2315664 - RNA, 19 nt, Artificial Sequence
  Description of Artificial Sequence: Synthetic oligonucleotide
  Sense strand starting at position 1346 of SEQ ID NO: 1885094
cagggaagcggcugaguuu

SEQ ID NO: 2315665 - RNA, 19 nt, Artificial Sequence
  Description of Artificial Sequence: Synthetic oligonucleotide
  Antisense strand to SEQ ID NO: 2315664
aaacucagccgcuucccug

SEQ ID NO: 2315666 - RNA, 19 nt, Artificial Sequence
  Description of Artificial Sequence: Synthetic oligonucleotide
  Sense strand starting at position 2367 of SEQ ID NO: 1885094
cgcggcuuucuagagauau

SEQ ID NO: 2315667 - RNA, 19 nt, Artificial Sequence
  Description of Artificial Sequence: Synthetic oligonucleotide
  Antisense strand to SEQ ID NO: 2315666
auaucucuagaaagccgcg

SEQ ID NO: 2315668 - RNA, 19 nt, Artificial Sequence
  Description of Artificial Sequence: Synthetic oligonucleotide
  Sense strand starting at position 2369 of SEQ ID NO: 1885094
cggcuuucuagagauaucu

SEQ ID NO: 2315669 - RNA, 19 nt, Artificial Sequence
  Description of Artificial Sequence: Synthetic oligonucleotide
  Antisense strand to SEQ ID NO: 2315668
agauaucucuagaaagccg

SEQ ID NO: 2315670 - RNA, 19 nt, Artificial Sequence
  Description of Artificial Sequence: Synthetic oligonucleotide
  Sense strand starting at position 2514 of SEQ ID NO: 1885094
cugucuucucgcguuagaa

SEQ ID NO: 2315671 - RNA, 19 nt, Artificial Sequence
  Description of Artificial Sequence: Synthetic oligonucleotide
  Antisense strand to SEQ ID NO: 2315670
uucuaacgcgagaagacag

SEQ ID NO: 2315672 - RNA, 19 nt, Artificial Sequence
  Description of Artificial Sequence: Synthetic oligonucleotide
  Sense strand starting at position 2515 of SEQ ID NO: 1885094
ugucuucucgcguuagaaa

SEQ ID NO: 2315673 - RNA, 19 nt, Artificial Sequence
  Description of Artificial Sequence: Synthetic oligonucleotide
  Antisense strand to SEQ ID NO: 2315672
uuucuaacgcgagaagaca

SEQ ID NO: 2315674 - RNA, 19 nt, Artificial Sequence
  Description of Artificial Sequence: Synthetic oligonucleotide
  Sense strand starting at position 2567 of SEQ ID NO: 1885094
uucggcgauuucucugaga

SEQ ID NO: 2315675 - RNA, 19 nt, Artificial Sequence
  Description of Artificial Sequence: Synthetic oligonucleotide
  Antisense strand to SEQ ID NO: 2315674
ucucagagaaaucgccgaa

SEQ ID NO: 2315676 - RNA, 19 nt, Artificial Sequence
  Description of Artificial Sequence: Synthetic oligonucleotide
  Sense strand starting at position 2570 of SEQ ID NO: 1885094
ggcgauuucucugagaaac

SEQ ID NO: 2315677 - RNA, 19 nt, Artificial Sequence
  Description of Artificial Sequence: Synthetic oligonucleotide
  Antisense strand to SEQ ID NO: 2315676
guuucucagagaaaucgcc

SEQ ID NO: 2315678 - RNA, 19 nt, Artificial Sequence
  Description of Artificial Sequence: Synthetic oligonucleotide
  Sense strand starting at position 2572 of SEQ ID NO: 1885094
cgauuucucugagaaacgg

SEQ ID NO: 2315679 - RNA, 19 nt, Artificial Sequence
  Description of Artificial Sequence: Synthetic oligonucleotide
  Antisense strand to SEQ ID NO: 2315678
ccguuucucagagaaaucg

SEQ ID NO: 2315680 - RNA, 19 nt, Artificial Sequence
  Description of Artificial Sequence: Synthetic oligonucleotide
  Sense strand starting at position 2653 of SEQ ID NO: 1885094
ugaaauggcgcguugguua

SEQ ID NO: 2315681 - RNA, 19 nt, Artificial Sequence
  Description of Artificial Sequence: Synthetic oligonucleotide
  Antisense strand to SEQ ID NO: 2315680
uaaccaacgcgccauuuca

SEQ ID NO: 2315682 - RNA, 19 nt, Artificial Sequence
  Description of Artificial Sequence: Synthetic oligonucleotide
  Sense strand starting at position 2668 of SEQ ID NO: 1885094
guuacucuugagggaguaa

SEQ ID NO: 2315683 - RNA, 19 nt, Artificial Sequence
  Description of Artificial Sequence: Synthetic oligonucleotide
  Antisense strand to SEQ ID NO: 2315682
uuacucccucaagaguaac

SEQ ID NO: 2315684 - RNA, 19 nt, Artificial Sequence
  Description of Artificial Sequence: Synthetic oligonucleotide
  Sense strand starting at position 2679 of SEQ ID NO: 1885094
gggaguaaaucagcucacu

SEQ ID NO: 2315685 - RNA, 19 nt, Artificial Sequence
  Description of Artificial Sequence: Synthetic oligonucleotide
  Antisense strand to SEQ ID NO: 2315684
agugagcugauuuacuccc

SEQ ID NO: 2315686 - RNA, 19 nt, Artificial Sequence
  Description of Artificial Sequence: Synthetic oligonucleotide
  Sense strand starting at position 2893 of SEQ ID NO: 1885094
accuuagugcuguagauga

SEQ ID NO: 2315687 - RNA, 19 nt, Artificial Sequence
  Description of Artificial Sequence: Synthetic oligonucleotide
  Antisense strand to SEQ ID NO: 2315686
ucaucuacagcacuaaggu

SEQ ID NO: 2315688 - RNA, 19 nt, Artificial Sequence
  Description of Artificial Sequence: Synthetic oligonucleotide
  Sense strand starting at position 2931 of SEQ ID NO: 1885094
gggagagucuagguuucug

SEQ ID NO: 2315689 - RNA, 19 nt, Artificial Sequence
  Description of Artificial Sequence: Synthetic oligonucleotide
  Antisense strand to SEQ ID NO: 2315688
cagaaaccuagacucuccc

SEQ ID NO: 2315690 - RNA, 19 nt, Artificial Sequence
  Description of Artificial Sequence: Synthetic oligonucleotide
  Sense strand starting at position 2935 of SEQ ID NO: 1885094
gagucuagguuucugggaa

SEQ ID NO: 2315691 - RNA, 19 nt, Artificial Sequence
  Description of Artificial Sequence: Synthetic oligonucleotide
  Antisense strand to SEQ ID NO: 2315690
uucccagaaaccuagacuc

SEQ ID NO: 2315692 - RNA, 19 nt, Artificial Sequence
  Description of Artificial Sequence: Synthetic oligonucleotide
  Sense strand starting at position 2964 of SEQ ID NO: 1885094
aggacauuguguguuucca

SEQ ID NO: 2315693 - RNA, 19 nt, Artificial Sequence
  Description of Artificial Sequence: Synthetic oligonucleotide
  Antisense strand to SEQ ID NO: 2315692
uggaaacacacaauguccu

SEQ ID NO: 2315694 - RNA, 19 nt, Artificial Sequence
  Description of Artificial Sequence: Synthetic oligonucleotide
  Sense strand starting at position 2972 of SEQ ID NO: 1885094
guguguuuccacgcacauc

SEQ ID NO: 2315695 - RNA, 19 nt, Artificial Sequence
  Description of Artificial Sequence: Synthetic oligonucleotide
  Antisense strand to SEQ ID NO: 2315694
gaugugcguggaaacacac

SEQ ID NO: 2315696 - RNA, 19 nt, Artificial Sequence
  Description of Artificial Sequence: Synthetic oligonucleotide
  Sense strand starting at position 3016 of SEQ ID NO: 1885094
cgcuuugugcaacauauua

SEQ ID NO: 2315697 - RNA, 19 nt, Artificial Sequence
  Description of Artificial Sequence: Synthetic oligonucleotide
  Antisense strand to SEQ ID NO: 2315696
uaauauguugcacaaagcg

SEQ ID NO: 2315698 - RNA, 19 nt, Artificial Sequence
  Description of Artificial Sequence: Synthetic oligonucleotide
  Sense strand starting at position 3029 of SEQ ID NO: 1885094
auauuaguaggguguagua

SEQ ID NO: 2315699 - RNA, 19 nt, Artificial Sequence
  Description of Artificial Sequence: Synthetic oligonucleotide
  Antisense strand to SEQ ID NO: 2315698
uacuacacccuacuaauau

SEQ ID NO: 2315700 - RNA, 19 nt, Artificial Sequence
  Description of Artificial Sequence: Synthetic oligonucleotide
  Sense strand starting at position 3153 of SEQ ID NO: 1885094
guuuaacgaaagugcuaua

SEQ ID NO: 2315701 - RNA, 19 nt, Artificial Sequence
  Description of Artificial Sequence: Synthetic oligonucleotide
  Antisense strand to SEQ ID NO: 2315700
uauagcacuuucguuaaac

SEQ ID NO: 2315702 - RNA, 19 nt, Artificial Sequence
  Description of Artificial Sequence: Synthetic oligonucleotide
  Sense strand starting at position 3204 of SEQ ID NO: 1885094
gcacuaagguauuuagugu

SEQ ID NO: 2315703 - RNA, 19 nt, Artificial Sequence
  Description of Artificial Sequence: Synthetic oligonucleotide
  Antisense strand to SEQ ID NO: 2315702
acacuaaauaccuuagugc

SEQ ID NO: 2315704 - RNA, 19 nt, Artificial Sequence
  Description of Artificial Sequence: Synthetic oligonucleotide
  Sense strand starting at position 3211 of SEQ ID NO: 1885094
gguauuuagugucuguguu

SEQ ID NO: 2315705 - RNA, 19 nt, Artificial Sequence
  Description of Artificial Sequence: Synthetic oligonucleotide
  Antisense strand to SEQ ID NO: 2315704
aacacagacacuaaauacc

SEQ ID NO: 2315706 - RNA, 19 nt, Artificial Sequence
  Description of Artificial Sequence: Synthetic oligonucleotide
  Sense strand starting at position 3212 of SEQ ID NO: 1885094
guauuuagugucuguguug

SEQ ID NO: 2315707 - RNA, 19 nt, Artificial Sequence
  Description of Artificial Sequence: Synthetic oligonucleotide
  Antisense strand to SEQ ID NO: 2315706
caacacagacacuaaauac

SEQ ID NO: 2315708 - RNA, 19 nt, Artificial Sequence
  Description of Artificial Sequence: Synthetic oligonucleotide
  Sense strand starting at position 3240 of SEQ ID NO: 1885094
gguagugggagcuacgaaa

SEQ ID NO: 2315709 - RNA, 19 nt, Artificial Sequence
  Description of Artificial Sequence: Synthetic oligonucleotide
  Antisense strand to SEQ ID NO: 2315708
uuucguagcucccacuacc

SEQ ID NO: 2315710 - RNA, 19 nt, Artificial Sequence
  Description of Artificial Sequence: Synthetic oligonucleotide
  Sense strand starting at position 3460 of SEQ ID NO: 1885094
gccaaauacuagcuaguau

SEQ ID NO: 2315711 - RNA, 19 nt, Artificial Sequence
  Description of Artificial Sequence: Synthetic oligonucleotide
  Antisense strand to SEQ ID NO: 2315710
auacuagcuaguauuuggc

SEQ ID NO: 2315712 - RNA, 19 nt, Artificial Sequence
  Description of Artificial Sequence: Synthetic oligonucleotide
  Sense strand starting at position 3857 of SEQ ID NO: 1885094
gagugagucugggucucaa

SEQ ID NO: 2315713 - RNA, 19 nt, Artificial Sequence
  Description of Artificial Sequence: Synthetic oligonucleotide
  Antisense strand to SEQ ID NO: 2315712
uugagacccagacucacuc

SEQ ID NO: 2315714 - RNA, 19 nt, Artificial Sequence
  Description of Artificial Sequence: Synthetic oligonucleotide
  Sense strand starting at position 153 of SEQ ID NO: 1885095
cccuaauugugacugacaa

SEQ ID NO: 2315715 - RNA, 19 nt, Artificial Sequence
  Description of Artificial Sequence: Synthetic oligonucleotide
  Antisense strand to SEQ ID NO: 2315714
uugucagucacaauuaggg

SEQ ID NO: 2315716 - RNA, 19 nt, Artificial Sequence
  Description of Artificial Sequence: Synthetic oligonucleotide
  Sense strand starting at position 154 of SEQ ID NO: 1885095
ccuaauugugacugacaag

SEQ ID NO: 2315717 - RNA, 19 nt, Artificial Sequence
  Description of Artificial Sequence: Synthetic oligonucleotide
  Antisense strand to SEQ ID NO: 2315716
cuugucagucacaauuagg

SEQ ID NO: 2315718 - RNA, 19 nt, Artificial Sequence
  Description of Artificial Sequence: Synthetic oligonucleotide
  Sense strand starting at position 176 of SEQ ID NO: 1885095
gggaacagcacuugagauu

SEQ ID NO: 2315719 - RNA, 19 nt, Artificial Sequence
  Description of Artificial Sequence: Synthetic oligonucleotide
  Antisense strand to SEQ ID NO: 2315718
aaucucaagugcuguuccc

SEQ ID NO: 2315720 - RNA, 19 nt, Artificial Sequence
  Description of Artificial Sequence: Synthetic oligonucleotide
  Sense strand starting at position 393 of SEQ ID NO: 1885095
uuuguuuauugagucacaa

SEQ ID NO: 2315721 - RNA, 19 nt, Artificial Sequence
  Description of Artificial Sequence: Synthetic oligonucleotide
  Antisense strand to SEQ ID NO: 2315720
uugugacucaauaaacaaa

SEQ ID NO: 2315722 - RNA, 19 nt, Artificial Sequence
  Description of Artificial Sequence: Synthetic oligonucleotide
  Sense strand starting at position 449 of SEQ ID NO: 1885095
aggagcuaccucugaauuc

SEQ ID NO: 2315723 - RNA, 19 nt, Artificial Sequence
  Description of Artificial Sequence: Synthetic oligonucleotide
  Antisense strand to SEQ ID NO: 2315722
gaauucagagguagcuccu

SEQ ID NO: 2315724 - RNA, 19 nt, Artificial Sequence
  Description of Artificial Sequence: Synthetic oligonucleotide
  Sense strand starting at position 1070 of SEQ ID NO: 1885095
uuaguagucuaccuaacuu

SEQ ID NO: 2315725 - RNA, 19 nt, Artificial Sequence
  Description of Artificial Sequence: Synthetic oligonucleotide
  Antisense strand to SEQ ID NO: 2315724
aaguuagguagacuacuaa

SEQ ID NO: 2315726 - RNA, 19 nt, Artificial Sequence
  Description of Artificial Sequence: Synthetic oligonucleotide
  Sense strand starting at position 1083 of SEQ ID NO: 1885095
uaacuuagccuuugagggu

SEQ ID NO: 2315727 - RNA, 19 nt, Artificial Sequence
  Description of Artificial Sequence: Synthetic oligonucleotide
  Antisense strand to SEQ ID NO: 2315726
acccucaaaggcuaaguua

SEQ ID NO: 2315728 - RNA, 19 nt, Artificial Sequence
  Description of Artificial Sequence: Synthetic oligonucleotide
  Sense strand starting at position 1087 of SEQ ID NO: 1885095
uuagccuuugaggguauaa

SEQ ID NO: 2315729 - RNA, 19 nt, Artificial Sequence
  Description of Artificial Sequence: Synthetic oligonucleotide
  Antisense strand to SEQ ID NO: 2315728
uuauacccucaaaggcuaa

SEQ ID NO: 2315730 - RNA, 19 nt, Artificial Sequence
  Description of Artificial Sequence: Synthetic oligonucleotide
  Sense strand starting at position 1089 of SEQ ID NO: 1885095
agccuuugaggguauaauc

SEQ ID NO: 2315731 - RNA, 19 nt, Artificial Sequence
  Description of Artificial Sequence: Synthetic oligonucleotide
  Antisense strand to SEQ ID NO: 2315730
gauuauacccucaaaggcu

SEQ ID NO: 2315732 - RNA, 19 nt, Artificial Sequence
  Description of Artificial Sequence: Synthetic oligonucleotide
  Sense strand starting at position 1097 of SEQ ID NO: 1885095
aggguauaaucaucuccuu

SEQ ID NO: 2315733 - RNA, 19 nt, Artificial Sequence
  Description of Artificial Sequence: Synthetic oligonucleotide
  Antisense strand to SEQ ID NO: 2315732
aaggagaugauuauacccu

SEQ ID NO: 2315734 - RNA, 19 nt, Artificial Sequence
  Description of Artificial Sequence: Synthetic oligonucleotide
  Sense strand starting at position 1162 of SEQ ID NO: 1885095
uuccuuagggaguaaucuu

SEQ ID NO: 2315735 - RNA, 19 nt, Artificial Sequence
  Description of Artificial Sequence: Synthetic oligonucleotide
  Antisense strand to SEQ ID NO: 2315734
aagauuacucccuaaggaa

SEQ ID NO: 2315736 - RNA, 19 nt, Artificial Sequence
  Description of Artificial Sequence: Synthetic oligonucleotide
  Sense strand starting at position 1170 of SEQ ID NO: 1885095
ggaguaaucuugucucaaa

SEQ ID NO: 2315737 - RNA, 19 nt, Artificial Sequence
  Description of Artificial Sequence: Synthetic oligonucleotide
  Antisense strand to SEQ ID NO: 2315736
uuugagacaagauuacucc

SEQ ID NO: 2315738 - RNA, 19 nt, Artificial Sequence
  Description of Artificial Sequence: Synthetic oligonucleotide
  Sense strand starting at position 1171 of SEQ ID NO: 1885095
gaguaaucuugucucaaag

SEQ ID NO: 2315739 - RNA, 19 nt, Artificial Sequence
  Description of Artificial Sequence: Synthetic oligonucleotide
  Antisense strand to SEQ ID NO: 2315738
cuuugagacaagauuacuc

SEQ ID NO: 2315740 - RNA, 19 nt, Artificial Sequence
  Description of Artificial Sequence: Synthetic oligonucleotide
  Sense strand starting at position 1304 of SEQ ID NO: 1885095
cucaguaaaucacugucua

SEQ ID NO: 2315741 - RNA, 19 nt, Artificial Sequence
  Description of Artificial Sequence: Synthetic oligonucleotide
  Antisense strand to SEQ ID NO: 2315740
uagacagugauuuacugag

SEQ ID NO: 2315742 - RNA, 19 nt, Artificial Sequence
  Description of Artificial Sequence: Synthetic oligonucleotide
  Sense strand starting at position 1305 of SEQ ID NO: 1885095
ucaguaaaucacugucuaa

SEQ ID NO: 2315743 - RNA, 19 nt, Artificial Sequence
  Description of Artificial Sequence: Synthetic oligonucleotide
  Antisense strand to SEQ ID NO: 2315742
uuagacagugauuuacuga

SEQ ID NO: 2315744 - RNA, 19 nt, Artificial Sequence
  Description of Artificial Sequence: Synthetic oligonucleotide
  Sense strand starting at position 1333 of SEQ ID NO: 1885095
cucagaguugaucaaguua

SEQ ID NO: 2315745 - RNA, 19 nt, Artificial Sequence
  Description of Artificial Sequence: Synthetic oligonucleotide
  Antisense strand to SEQ ID NO: 2315744
uaacuugaucaacucugag

SEQ ID NO: 2315746 - RNA, 19 nt, Artificial Sequence
  Description of Artificial Sequence: Synthetic oligonucleotide
  Sense strand starting at position 1453 of SEQ ID NO: 1885095
ccuaaucuagcaggaucau

SEQ ID NO: 2315747 - RNA, 19 nt, Artificial Sequence
  Description of Artificial Sequence: Synthetic oligonucleotide
  Antisense strand to SEQ ID NO: 2315746
augauccugcuagauuagg

SEQ ID NO: 2315748 - RNA, 19 nt, Artificial Sequence
  Description of Artificial Sequence: Synthetic oligonucleotide
  Sense strand starting at position 1465 of SEQ ID NO: 1885095
ggaucauagucuuccuucu

SEQ ID NO: 2315749 - RNA, 19 nt, Artificial Sequence
  Description of Artificial Sequence: Synthetic oligonucleotide
  Antisense strand to SEQ ID NO: 2315748
agaaggaagacuaugaucc

SEQ ID NO: 2315750 - RNA, 19 nt, Artificial Sequence
  Description of Artificial Sequence: Synthetic oligonucleotide
  Sense strand starting at position 1708 of SEQ ID NO: 1885095
cagaaaguccgacguuaaa

SEQ ID NO: 2315751 - RNA, 19 nt, Artificial Sequence
  Description of Artificial Sequence: Synthetic oligonucleotide
  Antisense strand to SEQ ID NO: 2315750
uuuaacgucggacuuucug

SEQ ID NO: 2315752 - RNA, 19 nt, Artificial Sequence
  Description of Artificial Sequence: Synthetic oligonucleotide
  Sense strand starting at position 1931 of SEQ ID NO: 1885095
gucccaggcuuucuaaaca

SEQ ID NO: 2315753 - RNA, 19 nt, Artificial Sequence
  Description of Artificial Sequence: Synthetic oligonucleotide
  Antisense strand to SEQ ID NO: 2315752
uguuuagaaagccugggac

SEQ ID NO: 2315754 - RNA, 19 nt, Artificial Sequence
  Description of Artificial Sequence: Synthetic oligonucleotide
  Sense strand starting at position 2015 of SEQ ID NO: 1885095
ggaggaaauuguuucugau

SEQ ID NO: 2315755 - RNA, 19 nt, Artificial Sequence
  Description of Artificial Sequence: Synthetic oligonucleotide
  Antisense strand to SEQ ID NO: 2315754
aucagaaacaauuuccucc

SEQ ID NO: 2315756 - RNA, 19 nt, Artificial Sequence
  Description of Artificial Sequence: Synthetic oligonucleotide
  Sense strand starting at position 2418 of SEQ ID NO: 1885095
augaauaaagugugcauga

SEQ ID NO: 2315757 - RNA, 19 nt, Artificial Sequence
  Description of Artificial Sequence: Synthetic oligonucleotide
  Antisense strand to SEQ ID NO: 2315756
ucaugcacacuuuauucau

SEQ ID NO: 2315758 - RNA, 19 nt, Artificial Sequence
  Description of Artificial Sequence: Synthetic oligonucleotide
  Sense strand starting at position 2420 of SEQ ID NO: 1885095
gaauaaagugugcaugacu

SEQ ID NO: 2315759 - RNA, 19 nt, Artificial Sequence
  Description of Artificial Sequence: Synthetic oligonucleotide
  Antisense strand to SEQ ID NO: 2315758
agucaugcacacuuuauuc

SEQ ID NO: 2315760 - RNA, 19 nt, Artificial Sequence
  Description of Artificial Sequence: Synthetic oligonucleotide
  Sense strand starting at position 2423 of SEQ ID NO: 1885095
uaaagugugcaugacucua

SEQ ID NO: 2315761 - RNA, 19 nt, Artificial Sequence
  Description of Artificial Sequence: Synthetic oligonucleotide
  Antisense strand to SEQ ID NO: 2315760
uagagucaugcacacuuua

SEQ ID NO: 2315762 - RNA, 19 nt, Artificial Sequence
  Description of Artificial Sequence: Synthetic oligonucleotide
  Sense strand starting at position 2428 of SEQ ID NO: 1885095
ugugcaugacucuauuaau

SEQ ID NO: 2315763 - RNA, 19 nt, Artificial Sequence
  Description of Artificial Sequence: Synthetic oligonucleotide
  Antisense strand to SEQ ID NO: 2315762
auuaauagagucaugcaca

SEQ ID NO: 2315764 - RNA, 19 nt, Artificial Sequence
  Description of Artificial Sequence: Synthetic oligonucleotide
  Sense strand starting at position 2709 of SEQ ID NO: 1885095
uuaagaaggccuggaguaa

SEQ ID NO: 2315765 - RNA, 19 nt, Artificial Sequence
  Description of Artificial Sequence: Synthetic oligonucleotide
  Antisense strand to SEQ ID NO: 2315764
uuacuccaggccuucuuaa

SEQ ID NO: 2315766 - RNA, 19 nt, Artificial Sequence
  Description of Artificial Sequence: Synthetic oligonucleotide
  Sense strand starting at position 2742 of SEQ ID NO: 1885095
gugucugaacuuugaaauc

SEQ ID NO: 2315767 - RNA, 19 nt, Artificial Sequence
  Description of Artificial Sequence: Synthetic oligonucleotide
  Antisense strand to SEQ ID NO: 2315766
gauuucaaaguucagacac

SEQ ID NO: 2315768 - RNA, 19 nt, Artificial Sequence
  Description of Artificial Sequence: Synthetic oligonucleotide
  Sense strand starting at position 2969 of SEQ ID NO: 1885095
augcuaacguaaucaggau

SEQ ID NO: 2315769 - RNA, 19 nt, Artificial Sequence
  Description of Artificial Sequence: Synthetic oligonucleotide
  Antisense strand to SEQ ID NO: 2315768
auccugauuacguuagcau

SEQ ID NO: 2315770 - RNA, 19 nt, Artificial Sequence
  Description of Artificial Sequence: Synthetic oligonucleotide
  Sense strand starting at position 2970 of SEQ ID NO: 1885095
ugcuaacguaaucaggauu

SEQ ID NO: 2315771 - RNA, 19 nt, Artificial Sequence
  Description of Artificial Sequence: Synthetic oligonucleotide
  Antisense strand to SEQ ID NO: 2315770
aauccugauuacguuagca

SEQ ID NO: 2315772 - RNA, 19 nt, Artificial Sequence
  Description of Artificial Sequence: Synthetic oligonucleotide
  Sense strand starting at position 2973 of SEQ ID NO: 1885095
uaacguaaucaggauucua

SEQ ID NO: 2315773 - RNA, 19 nt, Artificial Sequence
  Description of Artificial Sequence: Synthetic oligonucleotide
  Antisense strand to SEQ ID NO: 2315772
uagaauccugauuacguua

SEQ ID NO: 2315774 - RNA, 19 nt, Artificial Sequence
  Description of Artificial Sequence: Synthetic oligonucleotide
  Sense strand starting at position 3013 of SEQ ID NO: 1885095
cgaugugcucacuaauuau

SEQ ID NO: 2315775 - RNA, 19 nt, Artificial Sequence
  Description of Artificial Sequence: Synthetic oligonucleotide
  Antisense strand to SEQ ID NO: 2315774
auaauuagugagcacaucg

SEQ ID NO: 2315776 - RNA, 19 nt, Artificial Sequence
  Description of Artificial Sequence: Synthetic oligonucleotide
  Sense strand starting at position 3395 of SEQ ID NO: 1885095
ucaaguaggcagcauaaau

SEQ ID NO: 2315777 - RNA, 19 nt, Artificial Sequence
  Description of Artificial Sequence: Synthetic oligonucleotide
  Antisense strand to SEQ ID NO: 2315776
auuuaugcugccuacuuga

SEQ ID NO: 2315778 - RNA, 19 nt, Artificial Sequence
  Description of Artificial Sequence: Synthetic oligonucleotide
  Sense strand starting at position 3426 of SEQ ID NO: 1885095
aguauaaggaguugagcuu

SEQ ID NO: 2315779 - RNA, 19 nt, Artificial Sequence
  Description of Artificial Sequence: Synthetic oligonucleotide
  Antisense strand to SEQ ID NO: 2315778
aagcucaacuccuuauacu

SEQ ID NO: 2315780 - RNA, 19 nt, Artificial Sequence
  Description of Artificial Sequence: Synthetic oligonucleotide
  Sense strand starting at position 3427 of SEQ ID NO: 1885095
guauaaggaguugagcuua

SEQ ID NO: 2315781 - RNA, 19 nt, Artificial Sequence
  Description of Artificial Sequence: Synthetic oligonucleotide
  Antisense strand to SEQ ID NO: 2315780
uaagcucaacuccuuauac

SEQ ID NO: 2315782 - RNA, 19 nt, Artificial Sequence
  Description of Artificial Sequence: Synthetic oligonucleotide
  Sense strand starting at position 3438 of SEQ ID NO: 1885095
ugagcuuaagcccauguaa

SEQ ID NO: 2315783 - RNA, 19 nt, Artificial Sequence
  Description of Artificial Sequence: Synthetic oligonucleotide
  Antisense strand to SEQ ID NO: 2315782
uuacaugggcuuaagcuca

SEQ ID NO: 2315784 - RNA, 19 nt, Artificial Sequence
  Description of Artificial Sequence: Synthetic oligonucleotide
  Sense strand starting at position 3761 of SEQ ID NO: 1885095
cuacuauauuuguacagag

SEQ ID NO: 2315785 - RNA, 19 nt, Artificial Sequence
  Description of Artificial Sequence: Synthetic oligonucleotide
  Antisense strand to SEQ ID NO: 2315784
cucuguacaaauauaguag

SEQ ID NO: 2315786 - RNA, 19 nt, Artificial Sequence
  Description of Artificial Sequence: Synthetic oligonucleotide
  Sense strand starting at position 3791 of SEQ ID NO: 1885095
uugauaagggcaggguaau

SEQ ID NO: 2315787 - RNA, 19 nt, Artificial Sequence
  Description of Artificial Sequence: Synthetic oligonucleotide
  Antisense strand to SEQ ID NO: 2315786
auuacccugcccuuaucaa

SEQ ID NO: 2315788 - RNA, 19 nt, Artificial Sequence
  Description of Artificial Sequence: Synthetic oligonucleotide
  Sense strand starting at position 3792 of SEQ ID NO: 1885095
ugauaagggcaggguaaua

SEQ ID NO: 2315789 - RNA, 19 nt, Artificial Sequence
  Description of Artificial Sequence: Synthetic oligonucleotide
  Antisense strand to SEQ ID NO: 2315788
uauuacccugcccuuauca

SEQ ID NO: 2315790 - RNA, 19 nt, Artificial Sequence
  Description of Artificial Sequence: Synthetic oligonucleotide
  Sense strand starting at position 3812 of SEQ ID NO: 1885095
auggacaaguuuguaguua

SEQ ID NO: 2315791 - RNA, 19 nt, Artificial Sequence
  Description of Artificial Sequence: Synthetic oligonucleotide
  Antisense strand to SEQ ID NO: 2315790
uaacuacaaacuuguccau

SEQ ID NO: 2315792 - RNA, 19 nt, Artificial Sequence
  Description of Artificial Sequence: Synthetic oligonucleotide
  Sense strand starting at position 3816 of SEQ ID NO: 1885095
acaaguuuguaguuaagag

SEQ ID NO: 2315793 - RNA, 19 nt, Artificial Sequence
  Description of Artificial Sequence: Synthetic oligonucleotide
  Antisense strand to SEQ ID NO: 2315792
cucuuaacuacaaacuugu

SEQ ID NO: 2315794 - RNA, 19 nt, Artificial Sequence
  Description of Artificial Sequence: Synthetic oligonucleotide
  Sense strand starting at position 62 of SEQ ID NO: 1885096
gugaaaucgagcuacuucu

SEQ ID NO: 2315795 - RNA, 19 nt, Artificial Sequence
  Description of Artificial Sequence: Synthetic oligonucleotide
  Antisense strand to SEQ ID NO: 2315794
agaaguagcucgauuucac

SEQ ID NO: 2315796 - RNA, 19 nt, Artificial Sequence
  Description of Artificial Sequence: Synthetic oligonucleotide
  Sense strand starting at position 399 of SEQ ID NO: 1885096
uggugugugauauaggaua

SEQ ID NO: 2315797 - RNA, 19 nt, Artificial Sequence
  Description of Artificial Sequence: Synthetic oligonucleotide
  Antisense strand to SEQ ID NO: 2315796
uauccuauaucacacacca

SEQ ID NO: 2315798 - RNA, 19 nt, Artificial Sequence
  Description of Artificial Sequence: Synthetic oligonucleotide
  Sense strand starting at position 401 of SEQ ID NO: 1885096
gugugugauauaggauaua

SEQ ID NO: 2315799 - RNA, 19 nt, Artificial Sequence
  Description of Artificial Sequence: Synthetic oligonucleotide
  Antisense strand to SEQ ID NO: 2315798
uauauccuauaucacacac

SEQ ID NO: 2315800 - RNA, 19 nt, Artificial Sequence
  Description of Artificial Sequence: Synthetic oligonucleotide
  Sense strand starting at position 613 of SEQ ID NO: 1885096
gaaguuugacaucagccua

SEQ ID NO: 2315801 - RNA, 19 nt, Artificial Sequence
  Description of Artificial Sequence: Synthetic oligonucleotide
  Antisense strand to SEQ ID NO: 2315800
uaggcugaugucaaacuuc

SEQ ID NO: 2315802 - RNA, 19 nt, Artificial Sequence
  Description of Artificial Sequence: Synthetic oligonucleotide
  Sense strand starting at position 865 of SEQ ID NO: 1885096
ggaggugaauuauucuaug

SEQ ID NO: 2315803 - RNA, 19 nt, Artificial Sequence
  Description of Artificial Sequence: Synthetic oligonucleotide
  Antisense strand to SEQ ID NO: 2315802
cauagaauaauucaccucc

SEQ ID NO: 2315804 - RNA, 19 nt, Artificial Sequence
  Description of Artificial Sequence: Synthetic oligonucleotide
  Sense strand starting at position 870 of SEQ ID NO: 1885096
ugaauuauucuauggaugu

SEQ ID NO: 2315805 - RNA, 19 nt, Artificial Sequence
  Description of Artificial Sequence: Synthetic oligonucleotide
  Antisense strand to SEQ ID NO: 2315804
acauccauagaauaauuca

SEQ ID NO: 2315806 - RNA, 19 nt, Artificial Sequence
  Description of Artificial Sequence: Synthetic oligonucleotide
  Sense strand starting at position 880 of SEQ ID NO: 1885096
uauggauguuuguuggcua

SEQ ID NO: 2315807 - RNA, 19 nt, Artificial Sequence
  Description of Artificial Sequence: Synthetic oligonucleotide
  Antisense strand to SEQ ID NO: 2315806
uagccaacaaacauccaua

SEQ ID NO: 2315808 - RNA, 19 nt, Artificial Sequence
  Description of Artificial Sequence: Synthetic oligonucleotide
  Sense strand starting at position 939 of SEQ ID NO: 1885096
aguaaagccugcucuggaa

SEQ ID NO: 2315809 - RNA, 19 nt, Artificial Sequence
  Description of Artificial Sequence: Synthetic oligonucleotide
  Antisense strand to SEQ ID NO: 2315808
uuccagagcaggcuuuacu

SEQ ID NO: 2315810 - RNA, 19 nt, Artificial Sequence
  Description of Artificial Sequence: Synthetic oligonucleotide
  Sense strand starting at position 966 of SEQ ID NO: 1885096
gagcaucaucuggguagaa

SEQ ID NO: 2315811 - RNA, 19 nt, Artificial Sequence
  Description of Artificial Sequence: Synthetic oligonucleotide
  Antisense strand to SEQ ID NO: 2315810
uucuacccagaugaugcuc

SEQ ID NO: 2315812 - RNA, 19 nt, Artificial Sequence
  Description of Artificial Sequence: Synthetic oligonucleotide
  Sense strand starting at position 967 of SEQ ID NO: 1885096
agcaucaucuggguagaaa

SEQ ID NO: 2315813 - RNA, 19 nt, Artificial Sequence
  Description of Artificial Sequence: Synthetic oligonucleotide
  Antisense strand to SEQ ID NO: 2315812
uuucuacccagaugaugcu

SEQ ID NO: 2315814 - RNA, 19 nt, Artificial Sequence
  Description of Artificial Sequence: Synthetic oligonucleotide
  Sense strand starting at position 1826 of SEQ ID NO: 1885096
uucuaagcaugugcaauua

SEQ ID NO: 2315815 - RNA, 19 nt, Artificial Sequence
  Description of Artificial Sequence: Synthetic oligonucleotide
  Antisense strand to SEQ ID NO: 2315814
uaauugcacaugcuuagaa

SEQ ID NO: 2315816 - RNA, 19 nt, Artificial Sequence
  Description of Artificial Sequence: Synthetic oligonucleotide
  Sense strand starting at position 2032 of SEQ ID NO: 1885096
uggaguggcagcgauauua

SEQ ID NO: 2315817 - RNA, 19 nt, Artificial Sequence
  Description of Artificial Sequence: Synthetic oligonucleotide
  Antisense strand to SEQ ID NO: 2315816
uaauaucgcugccacucca

SEQ ID NO: 2315818 - RNA, 19 nt, Artificial Sequence
  Description of Artificial Sequence: Synthetic oligonucleotide
  Sense strand starting at position 2041 of SEQ ID NO: 1885096
agcgauauuauccaauggu

SEQ ID NO: 2315819 - RNA, 19 nt, Artificial Sequence
  Description of Artificial Sequence: Synthetic oligonucleotide
  Antisense strand to SEQ ID NO: 2315818
accauuggauaauaucgcu

SEQ ID NO: 2315820 - RNA, 19 nt, Artificial Sequence
  Description of Artificial Sequence: Synthetic oligonucleotide
  Sense strand starting at position 2207 of SEQ ID NO: 1885096
aagguucgugugcuaguua

SEQ ID NO: 2315821 - RNA, 19 nt, Artificial Sequence
  Description of Artificial Sequence: Synthetic oligonucleotide
  Antisense strand to SEQ ID NO: 2315820
uaacuagcacacgaaccuu

SEQ ID NO: 2315822 - RNA, 19 nt, Artificial Sequence
  Description of Artificial Sequence: Synthetic oligonucleotide
  Sense strand starting at position 2210 of SEQ ID NO: 1885096
guucgugugcuaguuagau

SEQ ID NO: 2315823 - RNA, 19 nt, Artificial Sequence
  Description of Artificial Sequence: Synthetic oligonucleotide
  Antisense strand to SEQ ID NO: 2315822
aucuaacuagcacacgaac

SEQ ID NO: 2315824 - RNA, 19 nt, Artificial Sequence
  Description of Artificial Sequence: Synthetic oligonucleotide
  Sense strand starting at position 2381 of SEQ ID NO: 1885096
gcguguccugcuccucuua

SEQ ID NO: 2315825 - RNA, 19 nt, Artificial Sequence
  Description of Artificial Sequence: Synthetic oligonucleotide
  Antisense strand to SEQ ID NO: 2315824
uaagaggagcaggacacgc

SEQ ID NO: 2315826 - RNA, 19 nt, Artificial Sequence
  Description of Artificial Sequence: Synthetic oligonucleotide
  Sense strand starting at position 2448 of SEQ ID NO: 1885096
ugucucuccucagugacau

SEQ ID NO: 2315827 - RNA, 19 nt, Artificial Sequence
  Description of Artificial Sequence: Synthetic oligonucleotide
  Antisense strand to SEQ ID NO: 2315826
augucacugaggagagaca

SEQ ID NO: 2315828 - RNA, 19 nt, Artificial Sequence
  Description of Artificial Sequence: Synthetic oligonucleotide
  Sense strand starting at position 2449 of SEQ ID NO: 1885096
gucucuccucagugacauc

SEQ ID NO: 2315829 - RNA, 19 nt, Artificial Sequence
  Description of Artificial Sequence: Synthetic oligonucleotide
  Antisense strand to SEQ ID NO: 2315828
gaugucacugaggagagac

SEQ ID NO: 2315830 - RNA, 19 nt, Artificial Sequence
  Description of Artificial Sequence: Synthetic oligonucleotide
  Sense strand starting at position 2460 of SEQ ID NO: 1885096
gugacaucgucuuuaaacc

SEQ ID NO: 2315831 - RNA, 19 nt, Artificial Sequence
  Description of Artificial Sequence: Synthetic oligonucleotide
  Antisense strand to SEQ ID NO: 2315830
gguuuaaagacgaugucac

SEQ ID NO: 2315832 - RNA, 19 nt, Artificial Sequence
  Description of Artificial Sequence: Synthetic oligonucleotide
  Sense strand starting at position 2547 of SEQ ID NO: 1885096
cuuccuuaagaucaucgua

SEQ ID NO: 2315833 - RNA, 19 nt, Artificial Sequence
  Description of Artificial Sequence: Synthetic oligonucleotide
  Antisense strand to SEQ ID NO: 2315832
uacgaugaucuuaaggaag

SEQ ID NO: 2315834 - RNA, 19 nt, Artificial Sequence
  Description of Artificial Sequence: Synthetic oligonucleotide
  Sense strand starting at position 2549 of SEQ ID NO: 1885096
uccuuaagaucaucguaag

SEQ ID NO: 2315835 - RNA, 19 nt, Artificial Sequence
  Description of Artificial Sequence: Synthetic oligonucleotide
  Antisense strand to SEQ ID NO: 2315834
cuuacgaugaucuuaagga

SEQ ID NO: 2315836 - RNA, 19 nt, Artificial Sequence
  Description of Artificial Sequence: Synthetic oligonucleotide
  Sense strand starting at position 2550 of SEQ ID NO: 1885096
ccuuaagaucaucguaagu

SEQ ID NO: 2315837 - RNA, 19 nt, Artificial Sequence
  Description of Artificial Sequence: Synthetic oligonucleotide
  Antisense strand to SEQ ID NO: 2315836
acuuacgaugaucuuaagg

SEQ ID NO: 2315838 - RNA, 19 nt, Artificial Sequence
  Description of Artificial Sequence: Synthetic oligonucleotide
  Sense strand starting at position 2706 of SEQ ID NO: 1885096
ugagauaggucccuucugu

SEQ ID NO: 2315839 - RNA, 19 nt, Artificial Sequence
  Description of Artificial Sequence: Synthetic oligonucleotide
  Antisense strand to SEQ ID NO: 2315838
acagaagggaccuaucuca

SEQ ID NO: 2315840 - RNA, 19 nt, Artificial Sequence
  Description of Artificial Sequence: Synthetic oligonucleotide
  Sense strand starting at position 2717 of SEQ ID NO: 1885096
ccuucuguugcagauaaac

SEQ ID NO: 2315841 - RNA, 19 nt, Artificial Sequence
  Description of Artificial Sequence: Synthetic oligonucleotide
  Antisense strand to SEQ ID NO: 2315840
guuuaucugcaacagaagg

SEQ ID NO: 2315842 - RNA, 19 nt, Artificial Sequence
  Description of Artificial Sequence: Synthetic oligonucleotide
  Sense strand starting at position 2744 of SEQ ID NO: 1885096
gcaaguuaaguggguccua

SEQ ID NO: 2315843 - RNA, 19 nt, Artificial Sequence
  Description of Artificial Sequence: Synthetic oligonucleotide
  Antisense strand to SEQ ID NO: 2315842
uaggacccacuuaacuugc

SEQ ID NO: 2315844 - RNA, 19 nt, Artificial Sequence
  Description of Artificial Sequence: Synthetic oligonucleotide
  Sense strand starting at position 2745 of SEQ ID NO: 1885096
caaguuaaguggguccuaa

SEQ ID NO: 2315845 - RNA, 19 nt, Artificial Sequence
  Description of Artificial Sequence: Synthetic oligonucleotide
  Antisense strand to SEQ ID NO: 2315844
uuaggacccacuuaacuug

SEQ ID NO: 2315846 - RNA, 19 nt, Artificial Sequence
  Description of Artificial Sequence: Synthetic oligonucleotide
  Sense strand starting at position 3213 of SEQ ID NO: 1885096
uuaaguguccaaugacuuu

SEQ ID NO: 2315847 - RNA, 19 nt, Artificial Sequence
  Description of Artificial Sequence: Synthetic oligonucleotide
  Antisense strand to SEQ ID NO: 2315846
aaagucauuggacacuuaa

SEQ ID NO: 2315848 - RNA, 19 nt, Artificial Sequence
  Description of Artificial Sequence: Synthetic oligonucleotide
  Sense strand starting at position 3251 of SEQ ID NO: 1885096
gucucccuugcccagaaau

SEQ ID NO: 2315849 - RNA, 19 nt, Artificial Sequence
  Description of Artificial Sequence: Synthetic oligonucleotide
  Antisense strand to SEQ ID NO: 2315848
auuucugggcaagggagac

SEQ ID NO: 2315850 - RNA, 19 nt, Artificial Sequence
  Description of Artificial Sequence: Synthetic oligonucleotide
  Sense strand starting at position 3261 of SEQ ID NO: 1885096
cccagaaaugcugacugua

SEQ ID NO: 2315851 - RNA, 19 nt, Artificial Sequence
  Description of Artificial Sequence: Synthetic oligonucleotide
  Antisense strand to SEQ ID NO: 2315850
uacagucagcauuucuggg

SEQ ID NO: 2315852 - RNA, 19 nt, Artificial Sequence
  Description of Artificial Sequence: Synthetic oligonucleotide
  Sense strand starting at position 3290 of SEQ ID NO: 1885096
gcaauuaggcagcauugua

SEQ ID NO: 2315853 - RNA, 19 nt, Artificial Sequence
  Description of Artificial Sequence: Synthetic oligonucleotide
  Antisense strand to SEQ ID NO: 2315852
uacaaugcugccuaauugc

SEQ ID NO: 2315854 - RNA, 19 nt, Artificial Sequence
  Description of Artificial Sequence: Synthetic oligonucleotide
  Sense strand starting at position 3297 of SEQ ID NO: 1885096
ggcagcauuguagagcaua

SEQ ID NO: 2315855 - RNA, 19 nt, Artificial Sequence
  Description of Artificial Sequence: Synthetic oligonucleotide
  Antisense strand to SEQ ID NO: 2315854
uaugcucuacaaugcugcc

SEQ ID NO: 2315856 - RNA, 19 nt, Artificial Sequence
  Description of Artificial Sequence: Synthetic oligonucleotide
  Sense strand starting at position 3307 of SEQ ID NO: 1885096
uagagcauagcuuguauua

SEQ ID NO: 2315857 - RNA, 19 nt, Artificial Sequence
  Description of Artificial Sequence: Synthetic oligonucleotide
  Antisense strand to SEQ ID NO: 2315856
uaauacaagcuaugcucua

SEQ ID NO: 2315858 - RNA, 19 nt, Artificial Sequence
  Description of Artificial Sequence: Synthetic oligonucleotide
  Sense strand starting at position 3373 of SEQ ID NO: 1885096
uguguaacaauccggauaa

SEQ ID NO: 2315859 - RNA, 19 nt, Artificial Sequence
  Description of Artificial Sequence: Synthetic oligonucleotide
  Antisense strand to SEQ ID NO: 2315858
uuauccggauuguuacaca

SEQ ID NO: 2315860 - RNA, 19 nt, Artificial Sequence
  Description of Artificial Sequence: Synthetic oligonucleotide
  Sense strand starting at position 3425 of SEQ ID NO: 1885096
ugcuauauuugcuuaacgu

SEQ ID NO: 2315861 - RNA, 19 nt, Artificial Sequence
  Description of Artificial Sequence: Synthetic oligonucleotide
  Antisense strand to SEQ ID NO: 2315860
acguuaagcaaauauagca

SEQ ID NO: 2315862 - RNA, 19 nt, Artificial Sequence
  Description of Artificial Sequence: Synthetic oligonucleotide
  Sense strand starting at position 3426 of SEQ ID NO: 1885096
gcuauauuugcuuaacgug

SEQ ID NO: 2315863 - RNA, 19 nt, Artificial Sequence
  Description of Artificial Sequence: Synthetic oligonucleotide
  Antisense strand to SEQ ID NO: 2315862
cacguuaagcaaauauagc

SEQ ID NO: 2315864 - RNA, 19 nt, Artificial Sequence
  Description of Artificial Sequence: Synthetic oligonucleotide
  Sense strand starting at position 3533 of SEQ ID NO: 1885096
agaagcaugccugguaauu

SEQ ID NO: 2315865 - RNA, 19 nt, Artificial Sequence
  Description of Artificial Sequence: Synthetic oligonucleotide
  Antisense strand to SEQ ID NO: 2315864
aauuaccaggcaugcuucu

SEQ ID NO: 2315866 - RNA, 19 nt, Artificial Sequence
  Description of Artificial Sequence: Synthetic oligonucleotide
  Sense strand starting at position 3539 of SEQ ID NO: 1885096
augccugguaauugggaaa

SEQ ID NO: 2315867 - RNA, 19 nt, Artificial Sequence
  Description of Artificial Sequence: Synthetic oligonucleotide
  Antisense strand to SEQ ID NO: 2315866
uuucccaauuaccaggcau

SEQ ID NO: 2315868 - RNA, 19 nt, Artificial Sequence
  Description of Artificial Sequence: Synthetic oligonucleotide
  Sense strand starting at position 3803 of SEQ ID NO: 1885096
guagcaacuauuggaugau

SEQ ID NO: 2315869 - RNA, 19 nt, Artificial Sequence
  Description of Artificial Sequence: Synthetic oligonucleotide
  Antisense strand to SEQ ID NO: 2315868
aucauccaauaguugcuac

SEQ ID NO: 2315870 - RNA, 19 nt, Artificial Sequence
  Description of Artificial Sequence: Synthetic oligonucleotide
  Sense strand starting at position 3806 of SEQ ID NO: 1885096
gcaacuauuggaugauuau

SEQ ID NO: 2315871 - RNA, 19 nt, Artificial Sequence
  Description of Artificial Sequence: Synthetic oligonucleotide
  Antisense strand to SEQ ID NO: 2315870
auaaucauccaauaguugc

SEQ ID NO: 2315872 - RNA, 19 nt, Artificial Sequence
  Description of Artificial Sequence: Synthetic oligonucleotide
  Sense strand starting at position 3812 of SEQ ID NO: 1885096
auuggaugauuauccgaaa

SEQ ID NO: 2315873 - RNA, 19 nt, Artificial Sequence
  Description of Artificial Sequence: Synthetic oligonucleotide
  Antisense strand to SEQ ID NO: 2315872
uuucggauaaucauccaau

SEQ ID NO: 2315874 - RNA, 19 nt, Artificial Sequence
  Description of Artificial Sequence: Synthetic oligonucleotide
  Sense strand starting at position 74 of SEQ ID NO: 1885097
aauggccauccuggugaaa

SEQ ID NO: 2315875 - RNA, 19 nt, Artificial Sequence
  Description of Artificial Sequence: Synthetic oligonucleotide
  Antisense strand to SEQ ID NO: 2315874
uuucaccaggauggccauu

SEQ ID NO: 2315876 - RNA, 19 nt, Artificial Sequence
  Description of Artificial Sequence: Synthetic oligonucleotide
  Sense strand starting at position 77 of SEQ ID NO: 1885097
ggccauccuggugaaagau

SEQ ID NO: 2315877 - RNA, 19 nt, Artificial Sequence
  Description of Artificial Sequence: Synthetic oligonucleotide
  Antisense strand to SEQ ID NO: 2315876
aucuuucaccaggauggcc

SEQ ID NO: 2315878 - RNA, 19 nt, Artificial Sequence
  Description of Artificial Sequence: Synthetic oligonucleotide
  Sense strand starting at position 117 of SEQ ID NO: 1885097
augaguuguuuaccaaaca

SEQ ID NO: 2315879 - RNA, 19 nt, Artificial Sequence
  Description of Artificial Sequence: Synthetic oligonucleotide
  Antisense strand to SEQ ID NO: 2315878
uguuugguaaacaacucau

SEQ ID NO: 2315880 - RNA, 19 nt, Artificial Sequence
  Description of Artificial Sequence: Synthetic oligonucleotide
  Sense strand starting at position 245 of SEQ ID NO: 1885097
uggacuacuuaauuguaua

SEQ ID NO: 2315881 - RNA, 19 nt, Artificial Sequence
  Description of Artificial Sequence: Synthetic oligonucleotide
  Antisense strand to SEQ ID NO: 2315880
uauacaauuaaguagucca

SEQ ID NO: 2315882 - RNA, 19 nt, Artificial Sequence
  Description of Artificial Sequence: Synthetic oligonucleotide
  Sense strand starting at position 448 of SEQ ID NO: 1885097
uacuacgauuggucuacaa

SEQ ID NO: 2315883 - RNA, 19 nt, Artificial Sequence
  Description of Artificial Sequence: Synthetic oligonucleotide
  Antisense strand to SEQ ID NO: 2315882
uuguagaccaaucguagua

SEQ ID NO: 2315884 - RNA, 19 nt, Artificial Sequence
  Description of Artificial Sequence: Synthetic oligonucleotide
  Sense strand starting at position 557 of SEQ ID NO: 1885097
gaacaagaacugggucuuu

SEQ ID NO: 2315885 - RNA, 19 nt, Artificial Sequence
  Description of Artificial Sequence: Synthetic oligonucleotide
  Antisense strand to SEQ ID NO: 2315884
aaagacccaguucuuguuc

SEQ ID NO: 2315886 - RNA, 19 nt, Artificial Sequence
  Description of Artificial Sequence: Synthetic oligonucleotide
  Sense strand starting at position 575 of SEQ ID NO: 1885097
ucaacugauuuacaaugga

SEQ ID NO: 2315887 - RNA, 19 nt, Artificial Sequence
  Description of Artificial Sequence: Synthetic oligonucleotide
  Antisense strand to SEQ ID NO: 2315886
uccauuguaaaucaguuga

SEQ ID NO: 2315888 - RNA, 19 nt, Artificial Sequence
  Description of Artificial Sequence: Synthetic oligonucleotide
  Sense strand starting at position 737 of SEQ ID NO: 1885097
aggcaacauuuccaugaaa

SEQ ID NO: 2315889 - RNA, 19 nt, Artificial Sequence
  Description of Artificial Sequence: Synthetic oligonucleotide
  Antisense strand to SEQ ID NO: 2315888
uuucauggaaauguugccu

SEQ ID NO: 2315890 - RNA, 19 nt, Artificial Sequence
  Description of Artificial Sequence: Synthetic oligonucleotide
  Sense strand starting at position 767 of SEQ ID NO: 1885097
cucaguaaucaguacuaac

SEQ ID NO: 2315891 - RNA, 19 nt, Artificial Sequence
  Description of Artificial Sequence: Synthetic oligonucleotide
  Antisense strand to SEQ ID NO: 2315890
guuaguacugauuacugag

SEQ ID NO: 2315892 - RNA, 19 nt, Artificial Sequence
  Description of Artificial Sequence: Synthetic oligonucleotide
  Sense strand starting at position 2397 of SEQ ID NO: 1885097
uuaggucuuccagguagga

SEQ ID NO: 2315893 - RNA, 19 nt, Artificial Sequence
  Description of Artificial Sequence: Synthetic oligonucleotide
  Antisense strand to SEQ ID NO: 2315892
uccuaccuggaagaccuaa

SEQ ID NO: 2315894 - RNA, 19 nt, Artificial Sequence
  Description of Artificial Sequence: Synthetic oligonucleotide
  Sense strand starting at position 2485 of SEQ ID NO: 1885097
ugucucuauguuuagcaaa

SEQ ID NO: 2315895 - RNA, 19 nt, Artificial Sequence
  Description of Artificial Sequence: Synthetic oligonucleotide
  Antisense strand to SEQ ID NO: 2315894
uuugcuaaacauagagaca

SEQ ID NO: 2315896 - RNA, 19 nt, Artificial Sequence
  Description of Artificial Sequence: Synthetic oligonucleotide
  Sense strand starting at position 2511 of SEQ ID NO: 1885097
cgugcauuugugugauaca

SEQ ID NO: 2315897 - RNA, 19 nt, Artificial Sequence
  Description of Artificial Sequence: Synthetic oligonucleotide
  Antisense strand to SEQ ID NO: 2315896
uguaucacacaaaugcacg

SEQ ID NO: 2315898 - RNA, 19 nt, Artificial Sequence
  Description of Artificial Sequence: Synthetic oligonucleotide
  Sense strand starting at position 2522 of SEQ ID NO: 1885097
gugauacacuuauugaaua

SEQ ID NO: 2315899 - RNA, 19 nt, Artificial Sequence
  Description of Artificial Sequence: Synthetic oligonucleotide
  Antisense strand to SEQ ID NO: 2315898
uauucaauaaguguaucac

SEQ ID NO: 2315900 - RNA, 19 nt, Artificial Sequence
  Description of Artificial Sequence: Synthetic oligonucleotide
  Sense strand starting at position 2543 of SEQ ID NO: 1885097
accaucauucuggguauua

SEQ ID NO: 2315901 - RNA, 19 nt, Artificial Sequence
  Description of Artificial Sequence: Synthetic oligonucleotide
  Antisense strand to SEQ ID NO: 2315900
uaauacccagaaugauggu

SEQ ID NO: 2315902 - RNA, 19 nt, Artificial Sequence
  Description of Artificial Sequence: Synthetic oligonucleotide
  Sense strand starting at position 2544 of SEQ ID NO: 1885097
ccaucauucuggguauuaa

SEQ ID NO: 2315903 - RNA, 19 nt, Artificial Sequence
  Description of Artificial Sequence: Synthetic oligonucleotide
  Antisense strand to SEQ ID NO: 2315902
uuaauacccagaaugaugg

SEQ ID NO: 2315904 - RNA, 19 nt, Artificial Sequence
  Description of Artificial Sequence: Synthetic oligonucleotide
  Sense strand starting at position 2591 of SEQ ID NO: 1885097
guagacuauauguaugguu

SEQ ID NO: 2315905 - RNA, 19 nt, Artificial Sequence
  Description of Artificial Sequence: Synthetic oligonucleotide
  Antisense strand to SEQ ID NO: 2315904
aaccauacauauagucuac

SEQ ID NO: 2315906 - RNA, 19 nt, Artificial Sequence
  Description of Artificial Sequence: Synthetic oligonucleotide
  Sense strand starting at position 2606 of SEQ ID NO: 1885097
gguuguuggagucagaauu

SEQ ID NO: 2315907 - RNA, 19 nt, Artificial Sequence
  Description of Artificial Sequence: Synthetic oligonucleotide
  Antisense strand to SEQ ID NO: 2315906
aauucugacuccaacaacc

SEQ ID NO: 2315908 - RNA, 19 nt, Artificial Sequence
  Description of Artificial Sequence: Synthetic oligonucleotide
  Sense strand starting at position 2616 of SEQ ID NO: 1885097
gucagaauuacugggcuug

SEQ ID NO: 2315909 - RNA, 19 nt, Artificial Sequence
  Description of Artificial Sequence: Synthetic oligonucleotide
  Antisense strand to SEQ ID NO: 2315908
caagcccaguaauucugac

SEQ ID NO: 2315910 - RNA, 19 nt, Artificial Sequence
  Description of Artificial Sequence: Synthetic oligonucleotide
  Sense strand starting at position 2617 of SEQ ID NO: 1885097
ucagaauuacugggcuuga

SEQ ID NO: 2315911 - RNA, 19 nt, Artificial Sequence
  Description of Artificial Sequence: Synthetic oligonucleotide
  Antisense strand to SEQ ID NO: 2315910
ucaagcccaguaauucuga

SEQ ID NO: 2315912 - RNA, 19 nt, Artificial Sequence
  Description of Artificial Sequence: Synthetic oligonucleotide
  Sense strand starting at position 2694 of SEQ ID NO: 1885097
cucaucagugaaugaguau

SEQ ID NO: 2315913 - RNA, 19 nt, Artificial Sequence
  Description of Artificial Sequence: Synthetic oligonucleotide
  Antisense strand to SEQ ID NO: 2315912
auacucauucacugaugag

SEQ ID NO: 2315914 - RNA, 19 nt, Artificial Sequence
  Description of Artificial Sequence: Synthetic oligonucleotide
  Sense strand starting at position 2697 of SEQ ID NO: 1885097
aucagugaaugaguauaca

SEQ ID NO: 2315915 - RNA, 19 nt, Artificial Sequence
  Description of Artificial Sequence: Synthetic oligonucleotide
  Antisense strand to SEQ ID NO: 2315914
uguauacucauucacugau

SEQ ID NO: 2315916 - RNA, 19 nt, Artificial Sequence
  Description of Artificial Sequence: Synthetic oligonucleotide
  Sense strand starting at position 2724 of SEQ ID NO: 1885097
cucacugagucauuaagag

SEQ ID NO: 2315917 - RNA, 19 nt, Artificial Sequence
  Description of Artificial Sequence: Synthetic oligonucleotide
  Antisense strand to SEQ ID NO: 2315916
cucuuaaugacucagugag

SEQ ID NO: 2315918 - RNA, 19 nt, Artificial Sequence
  Description of Artificial Sequence: Synthetic oligonucleotide
  Sense strand starting at position 2740 of SEQ ID NO: 1885097
gaguuuaaauggcuuaauu

SEQ ID NO: 2315919 - RNA, 19 nt, Artificial Sequence
  Description of Artificial Sequence: Synthetic oligonucleotide
  Antisense strand to SEQ ID NO: 2315918
aauuaagccauuuaaacuc

SEQ ID NO: 2315920 - RNA, 19 nt, Artificial Sequence
  Description of Artificial Sequence: Synthetic oligonucleotide
  Sense strand starting at position 2841 of SEQ ID NO: 1885097
augcaucuguaauccagaa

SEQ ID NO: 2315921 - RNA, 19 nt, Artificial Sequence
  Description of Artificial Sequence: Synthetic oligonucleotide
  Antisense strand to SEQ ID NO: 2315920
uucuggauuacagaugcau

SEQ ID NO: 2315922 - RNA, 19 nt, Artificial Sequence
  Description of Artificial Sequence: Synthetic oligonucleotide
  Sense strand starting at position 3019 of SEQ ID NO: 1885097
ccucauagcuggucauuua

SEQ ID NO: 2315923 - RNA, 19 nt, Artificial Sequence
  Description of Artificial Sequence: Synthetic oligonucleotide
  Antisense strand to SEQ ID NO: 2315922
uaaaugaccagcuaugagg

SEQ ID NO: 2315924 - RNA, 19 nt, Artificial Sequence
  Description of Artificial Sequence: Synthetic oligonucleotide
  Sense strand starting at position 3063 of SEQ ID NO: 1885097
aucugugugccuccuguua

SEQ ID NO: 2315925 - RNA, 19 nt, Artificial Sequence
  Description of Artificial Sequence: Synthetic oligonucleotide
  Antisense strand to SEQ ID NO: 2315924
uaacaggaggcacacagau

SEQ ID NO: 2315926 - RNA, 19 nt, Artificial Sequence
  Description of Artificial Sequence: Synthetic oligonucleotide
  Sense strand starting at position 3142 of SEQ ID NO: 1885097
gggagacaaguaugucaau

SEQ ID NO: 2315927 - RNA, 19 nt, Artificial Sequence
  Description of Artificial Sequence: Synthetic oligonucleotide
  Antisense strand to SEQ ID NO: 2315926
auugacauacuugucuccc

SEQ ID NO: 2315928 - RNA, 19 nt, Artificial Sequence
  Description of Artificial Sequence: Synthetic oligonucleotide
  Sense strand starting at position 3143 of SEQ ID NO: 1885097
ggagacaaguaugucaaua

SEQ ID NO: 2315929 - RNA, 19 nt, Artificial Sequence
  Description of Artificial Sequence: Synthetic oligonucleotide
  Antisense strand to SEQ ID NO: 2315928
uauugacauacuugucucc

SEQ ID NO: 2315930 - RNA, 19 nt, Artificial Sequence
  Description of Artificial Sequence: Synthetic oligonucleotide
  Sense strand starting at position 3164 of SEQ ID NO: 1885097
agcuacgugaaaugaauaa

SEQ ID NO: 2315931 - RNA, 19 nt, Artificial Sequence
  Description of Artificial Sequence: Synthetic oligonucleotide
  Antisense strand to SEQ ID NO: 2315930
uuauucauuucacguagcu

SEQ ID NO: 2315932 - RNA, 19 nt, Artificial Sequence
  Description of Artificial Sequence: Synthetic oligonucleotide
  Sense strand starting at position 3470 of SEQ ID NO: 1885097
guaucuguauuucuccauu

SEQ ID NO: 2315933 - RNA, 19 nt, Artificial Sequence
  Description of Artificial Sequence: Synthetic oligonucleotide
  Antisense strand to SEQ ID NO: 2315932
aauggagaaauacagauac

SEQ ID NO: 2315934 - RNA, 19 nt, Artificial Sequence
  Description of Artificial Sequence: Synthetic oligonucleotide
  Sense strand starting at position 3551 of SEQ ID NO: 1885097
guaaaugcagaaugaguga

SEQ ID NO: 2315935 - RNA, 19 nt, Artificial Sequence
  Description of Artificial Sequence: Synthetic oligonucleotide
  Antisense strand to SEQ ID NO: 2315934
ucacucauucugcauuuac

SEQ ID NO: 2315936 - RNA, 19 nt, Artificial Sequence
  Description of Artificial Sequence: Synthetic oligonucleotide
  Sense strand starting at position 3614 of SEQ ID NO: 1885097
ggacaaguccuaugauaua

SEQ ID NO: 2315937 - RNA, 19 nt, Artificial Sequence
  Description of Artificial Sequence: Synthetic oligonucleotide
  Antisense strand to SEQ ID NO: 2315936
uauaucauaggacuugucc

SEQ ID NO: 2315938 - RNA, 19 nt, Artificial Sequence
  Description of Artificial Sequence: Synthetic oligonucleotide
  Sense strand starting at position 3665 of SEQ ID NO: 1885097
aggaaauaguaagcaguaa

SEQ ID NO: 2315939 - RNA, 19 nt, Artificial Sequence
  Description of Artificial Sequence: Synthetic oligonucleotide
  Antisense strand to SEQ ID NO: 2315938
uuacugcuuacuauuuccu

SEQ ID NO: 2315940 - RNA, 19 nt, Artificial Sequence
  Description of Artificial Sequence: Synthetic oligonucleotide
  Sense strand starting at position 3684 of SEQ ID NO: 1885097
ccauauaugccugaguccu

SEQ ID NO: 2315941 - RNA, 19 nt, Artificial Sequence
  Description of Artificial Sequence: Synthetic oligonucleotide
  Antisense strand to SEQ ID NO: 2315940
aggacucaggcauauaugg

SEQ ID NO: 2315942 - RNA, 19 nt, Artificial Sequence
  Description of Artificial Sequence: Synthetic oligonucleotide
  Sense strand starting at position 3757 of SEQ ID NO: 1885097
gaaagauguuccucuugaa

SEQ ID NO: 2315943 - RNA, 19 nt, Artificial Sequence
  Description of Artificial Sequence: Synthetic oligonucleotide
  Antisense strand to SEQ ID NO: 2315942
uucaagaggaacaucuuuc

SEQ ID NO: 2315944 - RNA, 19 nt, Artificial Sequence
  Description of Artificial Sequence: Synthetic oligonucleotide
  Sense strand starting at position 3784 of SEQ ID NO: 1885097
cuguuagcgcuguuugaga

SEQ ID NO: 2315945 - RNA, 19 nt, Artificial Sequence
  Description of Artificial Sequence: Synthetic oligonucleotide
  Antisense strand to SEQ ID NO: 2315944
ucucaaacagcgcuaacag

SEQ ID NO: 2315946 - RNA, 19 nt, Artificial Sequence
  Description of Artificial Sequence: Synthetic oligonucleotide
  Sense strand starting at position 3792 of SEQ ID NO: 1885097
gcuguuugagaagagugau

SEQ ID NO: 2315947 - RNA, 19 nt, Artificial Sequence
  Description of Artificial Sequence: Synthetic oligonucleotide
  Antisense strand to SEQ ID NO: 2315946
aucacucuucucaaacagc

SEQ ID NO: 2315948 - RNA, 19 nt, Artificial Sequence
  Description of Artificial Sequence: Synthetic oligonucleotide
  Sense strand starting at position 3795 of SEQ ID NO: 1885097
guuugagaagagugauaua

SEQ ID NO: 2315949 - RNA, 19 nt, Artificial Sequence
  Description of Artificial Sequence: Synthetic oligonucleotide
  Antisense strand to SEQ ID NO: 2315948
uauaucacucuucucaaac

SEQ ID NO: 2315950 - RNA, 19 nt, Artificial Sequence
  Description of Artificial Sequence: Synthetic oligonucleotide
  Sense strand starting at position 3807 of SEQ ID NO: 1885097
ugauauagauuguuaccua

SEQ ID NO: 2315951 - RNA, 19 nt, Artificial Sequence
  Description of Artificial Sequence: Synthetic oligonucleotide
  Antisense strand to SEQ ID NO: 2315950
uagguaacaaucuauauca

SEQ ID NO: 2315952 - RNA, 19 nt, Artificial Sequence
  Description of Artificial Sequence: Synthetic oligonucleotide
  Sense strand starting at position 3922 of SEQ ID NO: 1885097
ugagcaucuuaaguuugau

SEQ ID NO: 2315953 - RNA, 19 nt, Artificial Sequence
  Description of Artificial Sequence: Synthetic oligonucleotide
  Antisense strand to SEQ ID NO: 2315952
aucaaacuuaagaugcuca

SEQ ID NO: 2315954 - RNA, 19 nt, Artificial Sequence
  Description of Artificial Sequence: Synthetic oligonucleotide
  Sense strand starting at position 142 of SEQ ID NO: 1885098
caccuauaucccgggaaug

SEQ ID NO: 2315955 - RNA, 19 nt, Artificial Sequence
  Description of Artificial Sequence: Synthetic oligonucleotide
  Antisense strand to SEQ ID NO: 2315954
cauucccgggauauaggug

SEQ ID NO: 2315956 - RNA, 19 nt, Artificial Sequence
  Description of Artificial Sequence: Synthetic oligonucleotide
  Sense strand starting at position 143 of SEQ ID NO: 1885098
accuauaucccgggaaugu

SEQ ID NO: 2315957 - RNA, 19 nt, Artificial Sequence
  Description of Artificial Sequence: Synthetic oligonucleotide
  Antisense strand to SEQ ID NO: 2315956
acauucccgggauauaggu

SEQ ID NO: 2315958 - RNA, 19 nt, Artificial Sequence
  Description of Artificial Sequence: Synthetic oligonucleotide
  Sense strand starting at position 256 of SEQ ID NO: 1885098
ucucuaauggaguauguua

SEQ ID NO: 2315959 - RNA, 19 nt, Artificial Sequence
  Description of Artificial Sequence: Synthetic oligonucleotide
  Antisense strand to SEQ ID NO: 2315958
uaacauacuccauuagaga

SEQ ID NO: 2315960 - RNA, 19 nt, Artificial Sequence
  Description of Artificial Sequence: Synthetic oligonucleotide
  Sense strand starting at position 258 of SEQ ID NO: 1885098
ucuaauggaguauguuauu

SEQ ID NO: 2315961 - RNA, 19 nt, Artificial Sequence
  Description of Artificial Sequence: Synthetic oligonucleotide
  Antisense strand to SEQ ID NO: 2315960
aauaacauacuccauuaga

SEQ ID NO: 2315962 - RNA, 19 nt, Artificial Sequence
  Description of Artificial Sequence: Synthetic oligonucleotide
  Sense strand starting at position 263 of SEQ ID NO: 1885098
uggaguauguuauuaaauc

SEQ ID NO: 2315963 - RNA, 19 nt, Artificial Sequence
  Description of Artificial Sequence: Synthetic oligonucleotide
  Antisense strand to SEQ ID NO: 2315962
gauuuaauaacauacucca

SEQ ID NO: 2315964 - RNA, 19 nt, Artificial Sequence
  Description of Artificial Sequence: Synthetic oligonucleotide
  Sense strand starting at position 387 of SEQ ID NO: 1885098
gcucaaacagguuaaaugu

SEQ ID NO: 2315965 - RNA, 19 nt, Artificial Sequence
  Description of Artificial Sequence: Synthetic oligonucleotide
  Antisense strand to SEQ ID NO: 2315964
acauuuaaccuguuugagc

SEQ ID NO: 2315966 - RNA, 19 nt, Artificial Sequence
  Description of Artificial Sequence: Synthetic oligonucleotide
  Sense strand starting at position 593 of SEQ ID NO: 1885098
gugaaacauuucuaagaac

SEQ ID NO: 2315967 - RNA, 19 nt, Artificial Sequence
  Description of Artificial Sequence: Synthetic oligonucleotide
  Antisense strand to SEQ ID NO: 2315966
guucuuagaaauguuucac

SEQ ID NO: 2315968 - RNA, 19 nt, Artificial Sequence
  Description of Artificial Sequence: Synthetic oligonucleotide
  Sense strand starting at position 683 of SEQ ID NO: 1885098
gguaaagaauauuaaagga

SEQ ID NO: 2315969 - RNA, 19 nt, Artificial Sequence
  Description of Artificial Sequence: Synthetic oligonucleotide
  Antisense strand to SEQ ID NO: 2315968
uccuuuaauauucuuuacc

SEQ ID NO: 2315970 - RNA, 19 nt, Artificial Sequence
  Description of Artificial Sequence: Synthetic oligonucleotide
  Sense strand starting at position 778 of SEQ ID NO: 1885098
aauggccauccuggugaaa

SEQ ID NO: 2315971 - RNA, 19 nt, Artificial Sequence
  Description of Artificial Sequence: Synthetic oligonucleotide
  Antisense strand to SEQ ID NO: 2315970
uuucaccaggauggccauu

SEQ ID NO: 2315972 - RNA, 19 nt, Artificial Sequence
  Description of Artificial Sequence: Synthetic oligonucleotide
  Sense strand starting at position 781 of SEQ ID NO: 1885098
ggccauccuggugaaagau

SEQ ID NO: 2315973 - RNA, 19 nt, Artificial Sequence
  Description of Artificial Sequence: Synthetic oligonucleotide
  Antisense strand to SEQ ID NO: 2315972
aucuuucaccaggauggcc

SEQ ID NO: 2315974 - RNA, 19 nt, Artificial Sequence
  Description of Artificial Sequence: Synthetic oligonucleotide
  Sense strand starting at position 821 of SEQ ID NO: 1885098
augaguuguuuaccaaaca

SEQ ID NO: 2315975 - RNA, 19 nt, Artificial Sequence
  Description of Artificial Sequence: Synthetic oligonucleotide
  Antisense strand to SEQ ID NO: 2315974
uguuugguaaacaacucau

SEQ ID NO: 2315976 - RNA, 19 nt, Artificial Sequence
  Description of Artificial Sequence: Synthetic oligonucleotide
  Sense strand starting at position 949 of SEQ ID NO: 1885098
uggacuacuuaauuguaua

SEQ ID NO: 2315977 - RNA, 19 nt, Artificial Sequence
  Description of Artificial Sequence: Synthetic oligonucleotide
  Antisense strand to SEQ ID NO: 2315976
uauacaauuaaguagucca

SEQ ID NO: 2315978 - RNA, 19 nt, Artificial Sequence
  Description of Artificial Sequence: Synthetic oligonucleotide
  Sense strand starting at position 1152 of SEQ ID NO: 1885098
uacuacgauuggucuacaa

SEQ ID NO: 2315979 - RNA, 19 nt, Artificial Sequence
  Description of Artificial Sequence: Synthetic oligonucleotide
  Antisense strand to SEQ ID NO: 2315978
uuguagaccaaucguagua

SEQ ID NO: 2315980 - RNA, 19 nt, Artificial Sequence
  Description of Artificial Sequence: Synthetic oligonucleotide
  Sense strand starting at position 1261 of SEQ ID NO: 1885098
gaacaagaacugggucuuu

SEQ ID NO: 2315981 - RNA, 19 nt, Artificial Sequence
  Description of Artificial Sequence: Synthetic oligonucleotide
  Antisense strand to SEQ ID NO: 2315980
aaagacccaguucuuguuc

SEQ ID NO: 2315982 - RNA, 19 nt, Artificial Sequence
  Description of Artificial Sequence: Synthetic oligonucleotide
  Sense strand starting at position 1279 of SEQ ID NO: 1885098
ucaacugauuuacaaugga

SEQ ID NO: 2315983 - RNA, 19 nt, Artificial Sequence
  Description of Artificial Sequence: Synthetic oligonucleotide
  Antisense strand to SEQ ID NO: 2315982
uccauuguaaaucaguuga

SEQ ID NO: 2315984 - RNA, 19 nt, Artificial Sequence
  Description of Artificial Sequence: Synthetic oligonucleotide
  Sense strand starting at position 1441 of SEQ ID NO: 1885098
aggcaacauuuccaugaaa

SEQ ID NO: 2315985 - RNA, 19 nt, Artificial Sequence
  Description of Artificial Sequence: Synthetic oligonucleotide
  Antisense strand to SEQ ID NO: 2315984
uuucauggaaauguugccu

SEQ ID NO: 2315986 - RNA, 19 nt, Artificial Sequence
  Description of Artificial Sequence: Synthetic oligonucleotide
  Sense strand starting at position 1471 of SEQ ID NO: 1885098
cucaguaaucaguacuaac

SEQ ID NO: 2315987 - RNA, 19 nt, Artificial Sequence
  Description of Artificial Sequence: Synthetic oligonucleotide
  Antisense strand to SEQ ID NO: 2315986
guuaguacugauuacugag

SEQ ID NO: 2315988 - RNA, 19 nt, Artificial Sequence
  Description of Artificial Sequence: Synthetic oligonucleotide
  Sense strand starting at position 3101 of SEQ ID NO: 1885098
uuaggucuuccagguagga

SEQ ID NO: 2315989 - RNA, 19 nt, Artificial Sequence
  Description of Artificial Sequence: Synthetic oligonucleotide
  Antisense strand to SEQ ID NO: 2315988
uccuaccuggaagaccuaa

SEQ ID NO: 2315990 - RNA, 19 nt, Artificial Sequence
  Description of Artificial Sequence: Synthetic oligonucleotide
  Sense strand starting at position 3189 of SEQ ID NO: 1885098
ugucucuauguuuagcaaa

SEQ ID NO: 2315991 - RNA, 19 nt, Artificial Sequence
  Description of Artificial Sequence: Synthetic oligonucleotide
  Antisense strand to SEQ ID NO: 2315990
uuugcuaaacauagagaca

SEQ ID NO: 2315992 - RNA, 19 nt, Artificial Sequence
  Description of Artificial Sequence: Synthetic oligonucleotide
  Sense strand starting at position 3215 of SEQ ID NO: 1885098
cgugcauuugugugauaca

SEQ ID NO: 2315993 - RNA, 19 nt, Artificial Sequence
  Description of Artificial Sequence: Synthetic oligonucleotide
  Antisense strand to SEQ ID NO: 2315992
uguaucacacaaaugcacg

SEQ ID NO: 2315994 - RNA, 19 nt, Artificial Sequence
  Description of Artificial Sequence: Synthetic oligonucleotide
  Sense strand starting at position 3226 of SEQ ID NO: 1885098
gugauacacuuauugaaua

SEQ ID NO: 2315995 - RNA, 19 nt, Artificial Sequence
  Description of Artificial Sequence: Synthetic oligonucleotide
  Antisense strand to SEQ ID NO: 2315994
uauucaauaaguguaucac

SEQ ID NO: 2315996 - RNA, 19 nt, Artificial Sequence
  Description of Artificial Sequence: Synthetic oligonucleotide
  Sense strand starting at position 3247 of SEQ ID NO: 1885098
accaucauucuggguauua

SEQ ID NO: 2315997 - RNA, 19 nt, Artificial Sequence
  Description of Artificial Sequence: Synthetic oligonucleotide
  Antisense strand to SEQ ID NO: 2315996
uaauacccagaaugauggu

SEQ ID NO: 2315998 - RNA, 19 nt, Artificial Sequence
  Description of Artificial Sequence: Synthetic oligonucleotide
  Sense strand starting at position 3248 of SEQ ID NO: 1885098
ccaucauucuggguauuaa

SEQ ID NO: 2315999 - RNA, 19 nt, Artificial Sequence
  Description of Artificial Sequence: Synthetic oligonucleotide
  Antisense strand to SEQ ID NO: 2315998
uuaauacccagaaugaugg

SEQ ID NO: 2316000 - RNA, 19 nt, Artificial Sequence
  Description of Artificial Sequence: Synthetic oligonucleotide
  Sense strand starting at position 3295 of SEQ ID NO: 1885098
guagacuauauguaugguu

SEQ ID NO: 2316001 - RNA, 19 nt, Artificial Sequence
  Description of Artificial Sequence: Synthetic oligonucleotide
  Antisense strand to SEQ ID NO: 2316000
aaccauacauauagucuac

SEQ ID NO: 2316002 - RNA, 19 nt, Artificial Sequence
  Description of Artificial Sequence: Synthetic oligonucleotide
  Sense strand starting at position 3297 of SEQ ID NO: 1885098
agacuauauguaugguugu

SEQ ID NO: 2316003 - RNA, 19 nt, Artificial Sequence
  Description of Artificial Sequence: Synthetic oligonucleotide
  Antisense strand to SEQ ID NO: 2316002
acaaccauacauauagucu

SEQ ID NO: 2316004 - RNA, 19 nt, Artificial Sequence
  Description of Artificial Sequence: Synthetic oligonucleotide
  Sense strand starting at position 3310 of SEQ ID NO: 1885098
gguuguuggagucagaauu

SEQ ID NO: 2316005 - RNA, 19 nt, Artificial Sequence
  Description of Artificial Sequence: Synthetic oligonucleotide
  Antisense strand to SEQ ID NO: 2316004
aauucugacuccaacaacc

SEQ ID NO: 2316006 - RNA, 19 nt, Artificial Sequence
  Description of Artificial Sequence: Synthetic oligonucleotide
  Sense strand starting at position 3320 of SEQ ID NO: 1885098
gucagaauuacugggcuug

SEQ ID NO: 2316007 - RNA, 19 nt, Artificial Sequence
  Description of Artificial Sequence: Synthetic oligonucleotide
  Antisense strand to SEQ ID NO: 2316006
caagcccaguaauucugac

SEQ ID NO: 2316008 - RNA, 19 nt, Artificial Sequence
  Description of Artificial Sequence: Synthetic oligonucleotide
  Sense strand starting at position 3321 of SEQ ID NO: 1885098
ucagaauuacugggcuuga

SEQ ID NO: 2316009 - RNA, 19 nt, Artificial Sequence
  Description of Artificial Sequence: Synthetic oligonucleotide
  Antisense strand to SEQ ID NO: 2316008
ucaagcccaguaauucuga

SEQ ID NO: 2316010 - RNA, 19 nt, Artificial Sequence
  Description of Artificial Sequence: Synthetic oligonucleotide
  Sense strand starting at position 3398 of SEQ ID NO: 1885098
cucaucagugaaugaguau

SEQ ID NO: 2316011 - RNA, 19 nt, Artificial Sequence
  Description of Artificial Sequence: Synthetic oligonucleotide
  Antisense strand to SEQ ID NO: 2316010
auacucauucacugaugag

SEQ ID NO: 2316012 - RNA, 19 nt, Artificial Sequence
  Description of Artificial Sequence: Synthetic oligonucleotide
  Sense strand starting at position 3401 of SEQ ID NO: 1885098
aucagugaaugaguauaca

SEQ ID NO: 2316013 - RNA, 19 nt, Artificial Sequence
  Description of Artificial Sequence: Synthetic oligonucleotide
  Antisense strand to SEQ ID NO: 2316012
uguauacucauucacugau

SEQ ID NO: 2316014 - RNA, 19 nt, Artificial Sequence
  Description of Artificial Sequence: Synthetic oligonucleotide
  Sense strand starting at position 3428 of SEQ ID NO: 1885098
cucacugagucauuaagag

SEQ ID NO: 2316015 - RNA, 19 nt, Artificial Sequence
  Description of Artificial Sequence: Synthetic oligonucleotide
  Antisense strand to SEQ ID NO: 2316014
cucuuaaugacucagugag

SEQ ID NO: 2316016 - RNA, 19 nt, Artificial Sequence
  Description of Artificial Sequence: Synthetic oligonucleotide
  Sense strand starting at position 3444 of SEQ ID NO: 1885098
gaguuuaaauggcuuaauu

SEQ ID NO: 2316017 - RNA, 19 nt, Artificial Sequence
  Description of Artificial Sequence: Synthetic oligonucleotide
  Antisense strand to SEQ ID NO: 2316016
aauuaagccauuuaaacuc

SEQ ID NO: 2316018 - RNA, 19 nt, Artificial Sequence
  Description of Artificial Sequence: Synthetic oligonucleotide
  Sense strand starting at position 3545 of SEQ ID NO: 1885098
augcaucuguaauccagaa

SEQ ID NO: 2316019 - RNA, 19 nt, Artificial Sequence
  Description of Artificial Sequence: Synthetic oligonucleotide
  Antisense strand to SEQ ID NO: 2316018
uucuggauuacagaugcau

SEQ ID NO: 2316020 - RNA, 19 nt, Artificial Sequence
  Description of Artificial Sequence: Synthetic oligonucleotide
  Sense strand starting at position 3723 of SEQ ID NO: 1885098
ccucauagcuggucauuua

SEQ ID NO: 2316021 - RNA, 19 nt, Artificial Sequence
  Description of Artificial Sequence: Synthetic oligonucleotide
  Antisense strand to SEQ ID NO: 2316020
uaaaugaccagcuaugagg

SEQ ID NO: 2316022 - RNA, 19 nt, Artificial Sequence
  Description of Artificial Sequence: Synthetic oligonucleotide
  Sense strand starting at position 3767 of SEQ ID NO: 1885098
aucugugugccuccuguua

SEQ ID NO: 2316023 - RNA, 19 nt, Artificial Sequence
  Description of Artificial Sequence: Synthetic oligonucleotide
  Antisense strand to SEQ ID NO: 2316022
uaacaggaggcacacagau

SEQ ID NO: 2316024 - RNA, 19 nt, Artificial Sequence
  Description of Artificial Sequence: Synthetic oligonucleotide
  Sense strand starting at position 3846 of SEQ ID NO: 1885098
gggagacaaguaugucaau

SEQ ID NO: 2316025 - RNA, 19 nt, Artificial Sequence
  Description of Artificial Sequence: Synthetic oligonucleotide
  Antisense strand to SEQ ID NO: 2316024
auugacauacuugucuccc

SEQ ID NO: 2316026 - RNA, 19 nt, Artificial Sequence
  Description of Artificial Sequence: Synthetic oligonucleotide
  Sense strand starting at position 3847 of SEQ ID NO: 1885098
ggagacaaguaugucaaua

SEQ ID NO: 2316027 - RNA, 19 nt, Artificial Sequence
  Description of Artificial Sequence: Synthetic oligonucleotide
  Antisense strand to SEQ ID NO: 2316026
uauugacauacuugucucc

SEQ ID NO: 2316028 - RNA, 19 nt, Artificial Sequence
  Description of Artificial Sequence: Synthetic oligonucleotide
  Sense strand starting at position 3862 of SEQ ID NO: 1885098
aauaguagcuacgugaaau

SEQ ID NO: 2316029 - RNA, 19 nt, Artificial Sequence
  Description of Artificial Sequence: Synthetic oligonucleotide
  Antisense strand to SEQ ID NO: 2316028
auuucacguagcuacuauu

SEQ ID NO: 2316030 - RNA, 19 nt, Artificial Sequence
  Description of Artificial Sequence: Synthetic oligonucleotide
  Sense strand starting at position 3863 of SEQ ID NO: 1885098
auaguagcuacgugaaaug

SEQ ID NO: 2316031 - RNA, 19 nt, Artificial Sequence
  Description of Artificial Sequence: Synthetic oligonucleotide
  Antisense strand to SEQ ID NO: 2316030
cauuucacguagcuacuau

SEQ ID NO: 2316032 - RNA, 19 nt, Artificial Sequence
  Description of Artificial Sequence: Synthetic oligonucleotide
  Sense strand starting at position 3868 of SEQ ID NO: 1885098
agcuacgugaaaugaauaa

SEQ ID NO: 2316033 - RNA, 19 nt, Artificial Sequence
  Description of Artificial Sequence: Synthetic oligonucleotide
  Antisense strand to SEQ ID NO: 2316032
uuauucauuucacguagcu

SEQ ID NO: 2316034 - RNA, 19 nt, Artificial Sequence
  Description of Artificial Sequence: Synthetic oligonucleotide
  Sense strand starting at position 27 of SEQ ID NO: 1885099
ucaaucaaugcugggagua

SEQ ID NO: 2316035 - RNA, 19 nt, Artificial Sequence
  Description of Artificial Sequence: Synthetic oligonucleotide
  Antisense strand to SEQ ID NO: 2316034
uacucccagcauugauuga

SEQ ID NO: 2316036 - RNA, 19 nt, Artificial Sequence
  Description of Artificial Sequence: Synthetic oligonucleotide
  Sense strand starting at position 37 of SEQ ID NO: 1885099
cugggaguaauagguagau

SEQ ID NO: 2316037 - RNA, 19 nt, Artificial Sequence
  Description of Artificial Sequence: Synthetic oligonucleotide
  Antisense strand to SEQ ID NO: 2316036
aucuaccuauuacucccag

SEQ ID NO: 2316038 - RNA, 19 nt, Artificial Sequence
  Description of Artificial Sequence: Synthetic oligonucleotide
  Sense strand starting at position 43 of SEQ ID NO: 1885099
guaauagguagaugugacu

SEQ ID NO: 2316039 - RNA, 19 nt, Artificial Sequence
  Description of Artificial Sequence: Synthetic oligonucleotide
  Antisense strand to SEQ ID NO: 2316038
agucacaucuaccuauuac

SEQ ID NO: 2316040 - RNA, 19 nt, Artificial Sequence
  Description of Artificial Sequence: Synthetic oligonucleotide
  Sense strand starting at position 62 of SEQ ID NO: 1885099
ucacuugagcauugaagaa

SEQ ID NO: 2316041 - RNA, 19 nt, Artificial Sequence
  Description of Artificial Sequence: Synthetic oligonucleotide
  Antisense strand to SEQ ID NO: 2316040
uucuucaaugcucaaguga

SEQ ID NO: 2316042 - RNA, 19 nt, Artificial Sequence
  Description of Artificial Sequence: Synthetic oligonucleotide
  Sense strand starting at position 385 of SEQ ID NO: 1885099
cuugauguccuguaacauc

SEQ ID NO: 2316043 - RNA, 19 nt, Artificial Sequence
  Description of Artificial Sequence: Synthetic oligonucleotide
  Antisense strand to SEQ ID NO: 2316042
gauguuacaggacaucaag

SEQ ID NO: 2316044 - RNA, 19 nt, Artificial Sequence
  Description of Artificial Sequence: Synthetic oligonucleotide
  Sense strand starting at position 434 of SEQ ID NO: 1885099
gccacuauuguagagccaa

SEQ ID NO: 2316045 - RNA, 19 nt, Artificial Sequence
  Description of Artificial Sequence: Synthetic oligonucleotide
  Antisense strand to SEQ ID NO: 2316044
uuggcucuacaauaguggc

SEQ ID NO: 2316046 - RNA, 19 nt, Artificial Sequence
  Description of Artificial Sequence: Synthetic oligonucleotide
  Sense strand starting at position 621 of SEQ ID NO: 1885099
ccauaaaggcuuuguuuag

SEQ ID NO: 2316047 - RNA, 19 nt, Artificial Sequence
  Description of Artificial Sequence: Synthetic oligonucleotide
  Antisense strand to SEQ ID NO: 2316046
cuaaacaaagccuuuaugg

SEQ ID NO: 2316048 - RNA, 19 nt, Artificial Sequence
  Description of Artificial Sequence: Synthetic oligonucleotide
  Sense strand starting at position 630 of SEQ ID NO: 1885099
cuuuguuuaggcgaaaggu

SEQ ID NO: 2316049 - RNA, 19 nt, Artificial Sequence
  Description of Artificial Sequence: Synthetic oligonucleotide
  Antisense strand to SEQ ID NO: 2316048
accuuucgccuaaacaaag

SEQ ID NO: 2316050 - RNA, 19 nt, Artificial Sequence
  Description of Artificial Sequence: Synthetic oligonucleotide
  Sense strand starting at position 650 of SEQ ID NO: 1885099
agaagagguucuuugaagu

SEQ ID NO: 2316051 - RNA, 19 nt, Artificial Sequence
  Description of Artificial Sequence: Synthetic oligonucleotide
  Antisense strand to SEQ ID NO: 2316050
acuucaaagaaccucuucu

SEQ ID NO: 2316052 - RNA, 19 nt, Artificial Sequence
  Description of Artificial Sequence: Synthetic oligonucleotide
  Sense strand starting at position 663 of SEQ ID NO: 1885099
ugaaguuucgaagaaaguc

SEQ ID NO: 2316053 - RNA, 19 nt, Artificial Sequence
  Description of Artificial Sequence: Synthetic oligonucleotide
  Antisense strand to SEQ ID NO: 2316052
gacuuucuucgaaacuuca

SEQ ID NO: 2316054 - RNA, 19 nt, Artificial Sequence
  Description of Artificial Sequence: Synthetic oligonucleotide
  Sense strand starting at position 678 of SEQ ID NO: 1885099
agucuuuaagaaggcuaca

SEQ ID NO: 2316055 - RNA, 19 nt, Artificial Sequence
  Description of Artificial Sequence: Synthetic oligonucleotide
  Antisense strand to SEQ ID NO: 2316054
uguagccuucuuaaagacu

SEQ ID NO: 2316056 - RNA, 19 nt, Artificial Sequence
  Description of Artificial Sequence: Synthetic oligonucleotide
  Sense strand starting at position 813 of SEQ ID NO: 1885099
guaagaccucucugcucaa

SEQ ID NO: 2316057 - RNA, 19 nt, Artificial Sequence
  Description of Artificial Sequence: Synthetic oligonucleotide
  Antisense strand to SEQ ID NO: 2316056
uugagcagagaggucuuac

SEQ ID NO: 2316058 - RNA, 19 nt, Artificial Sequence
  Description of Artificial Sequence: Synthetic oligonucleotide
  Sense strand starting at position 955 of SEQ ID NO: 1885099
gacaguggucccgacauuc

SEQ ID NO: 2316059 - RNA, 19 nt, Artificial Sequence
  Description of Artificial Sequence: Synthetic oligonucleotide
  Antisense strand to SEQ ID NO: 2316058
gaaugucgggaccacuguc

SEQ ID NO: 2316060 - RNA, 19 nt, Artificial Sequence
  Description of Artificial Sequence: Synthetic oligonucleotide
  Sense strand starting at position 966 of SEQ ID NO: 1885099
cgacauucuggacgagaga

SEQ ID NO: 2316061 - RNA, 19 nt, Artificial Sequence
  Description of Artificial Sequence: Synthetic oligonucleotide
  Antisense strand to SEQ ID NO: 2316060
ucucucguccagaaugucg

SEQ ID NO: 2316062 - RNA, 19 nt, Artificial Sequence
  Description of Artificial Sequence: Synthetic oligonucleotide
  Sense strand starting at position 1008 of SEQ ID NO: 1885099
agagauaguuucccaaauu

SEQ ID NO: 2316063 - RNA, 19 nt, Artificial Sequence
  Description of Artificial Sequence: Synthetic oligonucleotide
  Antisense strand to SEQ ID NO: 2316062
aauuugggaaacuaucucu

SEQ ID NO: 2316064 - RNA, 19 nt, Artificial Sequence
  Description of Artificial Sequence: Synthetic oligonucleotide
  Sense strand starting at position 1029 of SEQ ID NO: 1885099
aucugcuuuccacauggaa

SEQ ID NO: 2316065 - RNA, 19 nt, Artificial Sequence
  Description of Artificial Sequence: Synthetic oligonucleotide
  Antisense strand to SEQ ID NO: 2316064
uuccauguggaaagcagau

SEQ ID NO: 2316066 - RNA, 19 nt, Artificial Sequence
  Description of Artificial Sequence: Synthetic oligonucleotide
  Sense strand starting at position 1032 of SEQ ID NO: 1885099
ugcuuuccacauggaacau

SEQ ID NO: 2316067 - RNA, 19 nt, Artificial Sequence
  Description of Artificial Sequence: Synthetic oligonucleotide
  Antisense strand to SEQ ID NO: 2316066
auguuccauguggaaagca

SEQ ID NO: 2316068 - RNA, 19 nt, Artificial Sequence
  Description of Artificial Sequence: Synthetic oligonucleotide
  Sense strand starting at position 1338 of SEQ ID NO: 1885099
gaacgaguuuccuuuacag

SEQ ID NO: 2316069 - RNA, 19 nt, Artificial Sequence
  Description of Artificial Sequence: Synthetic oligonucleotide
  Antisense strand to SEQ ID NO: 2316068
cuguaaaggaaacucguuc

SEQ ID NO: 2316070 - RNA, 19 nt, Artificial Sequence
  Description of Artificial Sequence: Synthetic oligonucleotide
  Sense strand starting at position 1340 of SEQ ID NO: 1885099
acgaguuuccuuuacaggu

SEQ ID NO: 2316071 - RNA, 19 nt, Artificial Sequence
  Description of Artificial Sequence: Synthetic oligonucleotide
  Antisense strand to SEQ ID NO: 2316070
accuguaaaggaaacucgu

SEQ ID NO: 2316072 - RNA, 19 nt, Artificial Sequence
  Description of Artificial Sequence: Synthetic oligonucleotide
  Sense strand starting at position 1375 of SEQ ID NO: 1885099
caaacugucggcuacuaga

SEQ ID NO: 2316073 - RNA, 19 nt, Artificial Sequence
  Description of Artificial Sequence: Synthetic oligonucleotide
  Antisense strand to SEQ ID NO: 2316072
ucuaguagccgacaguuug

SEQ ID NO: 2316074 - RNA, 19 nt, Artificial Sequence
  Description of Artificial Sequence: Synthetic oligonucleotide
  Sense strand starting at position 1863 of SEQ ID NO: 1885099
guuuccuuccuugagaauc

SEQ ID NO: 2316075 - RNA, 19 nt, Artificial Sequence
  Description of Artificial Sequence: Synthetic oligonucleotide
  Antisense strand to SEQ ID NO: 2316074
gauucucaaggaaggaaac

SEQ ID NO: 2316076 - RNA, 19 nt, Artificial Sequence
  Description of Artificial Sequence: Synthetic oligonucleotide
  Sense strand starting at position 2231 of SEQ ID NO: 1885099
agauuuguaugggaacaca

SEQ ID NO: 2316077 - RNA, 19 nt, Artificial Sequence
  Description of Artificial Sequence: Synthetic oligonucleotide
  Antisense strand to SEQ ID NO: 2316076
uguguucccauacaaaucu

SEQ ID NO: 2316078 - RNA, 19 nt, Artificial Sequence
  Description of Artificial Sequence: Synthetic oligonucleotide
  Sense strand starting at position 2409 of SEQ ID NO: 1885099
agugacauuucugcaggca

SEQ ID NO: 2316079 - RNA, 19 nt, Artificial Sequence
  Description of Artificial Sequence: Synthetic oligonucleotide
  Antisense strand to SEQ ID NO: 2316078
ugccugcagaaaugucacu

SEQ ID NO: 2316080 - RNA, 19 nt, Artificial Sequence
  Description of Artificial Sequence: Synthetic oligonucleotide
  Sense strand starting at position 2449 of SEQ ID NO: 1885099
gaacaaugagcaugaguaa

SEQ ID NO: 2316081 - RNA, 19 nt, Artificial Sequence
  Description of Artificial Sequence: Synthetic oligonucleotide
  Antisense strand to SEQ ID NO: 2316080
uuacucaugcucauuguuc

SEQ ID NO: 2316082 - RNA, 19 nt, Artificial Sequence
  Description of Artificial Sequence: Synthetic oligonucleotide
  Sense strand starting at position 2452 of SEQ ID NO: 1885099
caaugagcaugaguaaaga

SEQ ID NO: 2316083 - RNA, 19 nt, Artificial Sequence
  Description of Artificial Sequence: Synthetic oligonucleotide
  Antisense strand to SEQ ID NO: 2316082
ucuuuacucaugcucauug

SEQ ID NO: 2316084 - RNA, 19 nt, Artificial Sequence
  Description of Artificial Sequence: Synthetic oligonucleotide
  Sense strand starting at position 2532 of SEQ ID NO: 1885099
ccagcaaucucaguagggu

SEQ ID NO: 2316085 - RNA, 19 nt, Artificial Sequence
  Description of Artificial Sequence: Synthetic oligonucleotide
  Antisense strand to SEQ ID NO: 2316084
acccuacugagauugcugg

SEQ ID NO: 2316086 - RNA, 19 nt, Artificial Sequence
  Description of Artificial Sequence: Synthetic oligonucleotide
  Sense strand starting at position 2533 of SEQ ID NO: 1885099
cagcaaucucaguagggua

SEQ ID NO: 2316087 - RNA, 19 nt, Artificial Sequence
  Description of Artificial Sequence: Synthetic oligonucleotide
  Antisense strand to SEQ ID NO: 2316086
uacccuacugagauugcug

SEQ ID NO: 2316088 - RNA, 19 nt, Artificial Sequence
  Description of Artificial Sequence: Synthetic oligonucleotide
  Sense strand starting at position 2535 of SEQ ID NO: 1885099
gcaaucucaguaggguaua

SEQ ID NO: 2316089 - RNA, 19 nt, Artificial Sequence
  Description of Artificial Sequence: Synthetic oligonucleotide
  Antisense strand to SEQ ID NO: 2316088
uauacccuacugagauugc

SEQ ID NO: 2316090 - RNA, 19 nt, Artificial Sequence
  Description of Artificial Sequence: Synthetic oligonucleotide
  Sense strand starting at position 2577 of SEQ ID NO: 1885099
aagugagagcacuggugaa

SEQ ID NO: 2316091 - RNA, 19 nt, Artificial Sequence
  Description of Artificial Sequence: Synthetic oligonucleotide
  Antisense strand to SEQ ID NO: 2316090
uucaccagugcucucacuu

SEQ ID NO: 2316092 - RNA, 19 nt, Artificial Sequence
  Description of Artificial Sequence: Synthetic oligonucleotide
  Sense strand starting at position 2589 of SEQ ID NO: 1885099
uggugaaagaaaugauugu

SEQ ID NO: 2316093 - RNA, 19 nt, Artificial Sequence
  Description of Artificial Sequence: Synthetic oligonucleotide
  Antisense strand to SEQ ID NO: 2316092
acaaucauuucuuucacca

SEQ ID NO: 2316094 - RNA, 19 nt, Artificial Sequence
  Description of Artificial Sequence: Synthetic oligonucleotide
  Sense strand starting at position 2598 of SEQ ID NO: 1885099
aaaugauugugaucaguga

SEQ ID NO: 2316095 - RNA, 19 nt, Artificial Sequence
  Description of Artificial Sequence: Synthetic oligonucleotide
  Antisense strand to SEQ ID NO: 2316094
ucacugaucacaaucauuu

SEQ ID NO: 2316096 - RNA, 19 nt, Artificial Sequence
  Description of Artificial Sequence: Synthetic oligonucleotide
  Sense strand starting at position 2602 of SEQ ID NO: 1885099
gauugugaucagugaggug

SEQ ID NO: 2316097 - RNA, 19 nt, Artificial Sequence
  Description of Artificial Sequence: Synthetic oligonucleotide
  Antisense strand to SEQ ID NO: 2316096
caccucacugaucacaauc

SEQ ID NO: 2316098 - RNA, 19 nt, Artificial Sequence
  Description of Artificial Sequence: Synthetic oligonucleotide
  Sense strand starting at position 2740 of SEQ ID NO: 1885099
guuagagauaucugaggua

SEQ ID NO: 2316099 - RNA, 19 nt, Artificial Sequence
  Description of Artificial Sequence: Synthetic oligonucleotide
  Antisense strand to SEQ ID NO: 2316098
uaccucagauaucucuaac

SEQ ID NO: 2316100 - RNA, 19 nt, Artificial Sequence
  Description of Artificial Sequence: Synthetic oligonucleotide
  Sense strand starting at position 3211 of SEQ ID NO: 1885099
agauauuauggcugaugga

SEQ ID NO: 2316101 - RNA, 19 nt, Artificial Sequence
  Description of Artificial Sequence: Synthetic oligonucleotide
  Antisense strand to SEQ ID NO: 2316100
uccaucagccauaauaucu

SEQ ID NO: 2316102 - RNA, 19 nt, Artificial Sequence
  Description of Artificial Sequence: Synthetic oligonucleotide
  Sense strand starting at position 3314 of SEQ ID NO: 1885099
ugacaugcuuaugcuuaga

SEQ ID NO: 2316103 - RNA, 19 nt, Artificial Sequence
  Description of Artificial Sequence: Synthetic oligonucleotide
  Antisense strand to SEQ ID NO: 2316102
ucuaagcauaagcauguca

SEQ ID NO: 2316104 - RNA, 19 nt, Artificial Sequence
  Description of Artificial Sequence: Synthetic oligonucleotide
  Sense strand starting at position 3402 of SEQ ID NO: 1885099
augaaaugcuguucccaga

SEQ ID NO: 2316105 - RNA, 19 nt, Artificial Sequence
  Description of Artificial Sequence: Synthetic oligonucleotide
  Antisense strand to SEQ ID NO: 2316104
ucugggaacagcauuucau

SEQ ID NO: 2316106 - RNA, 19 nt, Artificial Sequence
  Description of Artificial Sequence: Synthetic oligonucleotide
  Sense strand starting at position 3419 of SEQ ID NO: 1885099
gaagaaugaagcggaaguu

SEQ ID NO: 2316107 - RNA, 19 nt, Artificial Sequence
  Description of Artificial Sequence: Synthetic oligonucleotide
  Antisense strand to SEQ ID NO: 2316106
aacuuccgcuucauucuuc

SEQ ID NO: 2316108 - RNA, 19 nt, Artificial Sequence
  Description of Artificial Sequence: Synthetic oligonucleotide
  Sense strand starting at position 3554 of SEQ ID NO: 1885099
uugugcagucuuuaaauau

SEQ ID NO: 2316109 - RNA, 19 nt, Artificial Sequence
  Description of Artificial Sequence: Synthetic oligonucleotide
  Antisense strand to SEQ ID NO: 2316108
auauuuaaagacugcacaa

SEQ ID NO: 2316110 - RNA, 19 nt, Artificial Sequence
  Description of Artificial Sequence: Synthetic oligonucleotide
  Sense strand starting at position 3628 of SEQ ID NO: 1885099
gcaggaugagcuuggaaga

SEQ ID NO: 2316111 - RNA, 19 nt, Artificial Sequence
  Description of Artificial Sequence: Synthetic oligonucleotide
  Antisense strand to SEQ ID NO: 2316110
ucuuccaagcucauccugc

SEQ ID NO: 2316112 - RNA, 19 nt, Artificial Sequence
  Description of Artificial Sequence: Synthetic oligonucleotide
  Sense strand starting at position 3629 of SEQ ID NO: 1885099
caggaugagcuuggaagau

SEQ ID NO: 2316113 - RNA, 19 nt, Artificial Sequence
  Description of Artificial Sequence: Synthetic oligonucleotide
  Antisense strand to SEQ ID NO: 2316112
aucuuccaagcucauccug

SEQ ID NO: 2316114 - RNA, 19 nt, Artificial Sequence
  Description of Artificial Sequence: Synthetic oligonucleotide
  Sense strand starting at position 211 of SEQ ID NO: 1885100
accugaggccacugaauua

SEQ ID NO: 2316115 - RNA, 19 nt, Artificial Sequence
  Description of Artificial Sequence: Synthetic oligonucleotide
  Antisense strand to SEQ ID NO: 2316114
uaauucaguggccucaggu

SEQ ID NO: 2316116 - RNA, 19 nt, Artificial Sequence
  Description of Artificial Sequence: Synthetic oligonucleotide
  Sense strand starting at position 247 of SEQ ID NO: 1885100
guuaaaugcuaguuuccaa

SEQ ID NO: 2316117 - RNA, 19 nt, Artificial Sequence
  Description of Artificial Sequence: Synthetic oligonucleotide
  Antisense strand to SEQ ID NO: 2316116
uuggaaacuagcauuuaac

SEQ ID NO: 2316118 - RNA, 19 nt, Artificial Sequence
  Description of Artificial Sequence: Synthetic oligonucleotide
  Sense strand starting at position 276 of SEQ ID NO: 1885100
uuuaaaugucugugccuca

SEQ ID NO: 2316119 - RNA, 19 nt, Artificial Sequence
  Description of Artificial Sequence: Synthetic oligonucleotide
  Antisense strand to SEQ ID NO: 2316118
ugaggcacagacauuuaaa

SEQ ID NO: 2316120 - RNA, 19 nt, Artificial Sequence
  Description of Artificial Sequence: Synthetic oligonucleotide
  Sense strand starting at position 297 of SEQ ID NO: 1885100
cugcgaguucuguggagga

SEQ ID NO: 2316121 - RNA, 19 nt, Artificial Sequence
  Description of Artificial Sequence: Synthetic oligonucleotide
  Antisense strand to SEQ ID NO: 2316120
uccuccacagaacucgcag

SEQ ID NO: 2316122 - RNA, 19 nt, Artificial Sequence
  Description of Artificial Sequence: Synthetic oligonucleotide
  Sense strand starting at position 299 of SEQ ID NO: 1885100
gcgaguucuguggaggacu

SEQ ID NO: 2316123 - RNA, 19 nt, Artificial Sequence
  Description of Artificial Sequence: Synthetic oligonucleotide
  Antisense strand to SEQ ID NO: 2316122
aguccuccacagaacucgc

SEQ ID NO: 2316124 - RNA, 19 nt, Artificial Sequence
  Description of Artificial Sequence: Synthetic oligonucleotide
  Sense strand starting at position 300 of SEQ ID NO: 1885100
cgaguucuguggaggacua

SEQ ID NO: 2316125 - RNA, 19 nt, Artificial Sequence
  Description of Artificial Sequence: Synthetic oligonucleotide
  Antisense strand to SEQ ID NO: 2316124
uaguccuccacagaacucg

SEQ ID NO: 2316126 - RNA, 19 nt, Artificial Sequence
  Description of Artificial Sequence: Synthetic oligonucleotide
  Sense strand starting at position 447 of SEQ ID NO: 1885100
gacuuugaaucaugaagug

SEQ ID NO: 2316127 - RNA, 19 nt, Artificial Sequence
  Description of Artificial Sequence: Synthetic oligonucleotide
  Antisense strand to SEQ ID NO: 2316126
cacuucaugauucaaaguc

SEQ ID NO: 2316128 - RNA, 19 nt, Artificial Sequence
  Description of Artificial Sequence: Synthetic oligonucleotide
  Sense strand starting at position 498 of SEQ ID NO: 1885100
auaauacaguacugagaau

SEQ ID NO: 2316129 - RNA, 19 nt, Artificial Sequence
  Description of Artificial Sequence: Synthetic oligonucleotide
  Antisense strand to SEQ ID NO: 2316128
auucucaguacuguauuau

SEQ ID NO: 2316130 - RNA, 19 nt, Artificial Sequence
  Description of Artificial Sequence: Synthetic oligonucleotide
  Sense strand starting at position 504 of SEQ ID NO: 1885100
caguacugagaauggguaa

SEQ ID NO: 2316131 - RNA, 19 nt, Artificial Sequence
  Description of Artificial Sequence: Synthetic oligonucleotide
  Antisense strand to SEQ ID NO: 2316130
uuacccauucucaguacug

SEQ ID NO: 2316132 - RNA, 19 nt, Artificial Sequence
  Description of Artificial Sequence: Synthetic oligonucleotide
  Sense strand starting at position 531 of SEQ ID NO: 1885100
auuagugcugcugggagua

SEQ ID NO: 2316133 - RNA, 19 nt, Artificial Sequence
  Description of Artificial Sequence: Synthetic oligonucleotide
  Antisense strand to SEQ ID NO: 2316132
uacucccagcagcacuaau

SEQ ID NO: 2316134 - RNA, 19 nt, Artificial Sequence
  Description of Artificial Sequence: Synthetic oligonucleotide
  Sense strand starting at position 551 of SEQ ID NO: 1885100
gaggaaauaaugggugucu

SEQ ID NO: 2316135 - RNA, 19 nt, Artificial Sequence
  Description of Artificial Sequence: Synthetic oligonucleotide
  Antisense strand to SEQ ID NO: 2316134
agacacccauuauuuccuc

SEQ ID NO: 2316136 - RNA, 19 nt, Artificial Sequence
  Description of Artificial Sequence: Synthetic oligonucleotide
  Sense strand starting at position 556 of SEQ ID NO: 1885100
aauaaugggugucugcuaa

SEQ ID NO: 2316137 - RNA, 19 nt, Artificial Sequence
  Description of Artificial Sequence: Synthetic oligonucleotide
  Antisense strand to SEQ ID NO: 2316136
uuagcagacacccauuauu

SEQ ID NO: 2316138 - RNA, 19 nt, Artificial Sequence
  Description of Artificial Sequence: Synthetic oligonucleotide
  Sense strand starting at position 617 of SEQ ID NO: 1885100
auuagauaauaguggugau

SEQ ID NO: 2316139 - RNA, 19 nt, Artificial Sequence
  Description of Artificial Sequence: Synthetic oligonucleotide
  Antisense strand to SEQ ID NO: 2316138
aucaccacuauuaucuaau

SEQ ID NO: 2316140 - RNA, 19 nt, Artificial Sequence
  Description of Artificial Sequence: Synthetic oligonucleotide
  Sense strand starting at position 618 of SEQ ID NO: 1885100
uuagauaauaguggugauu

SEQ ID NO: 2316141 - RNA, 19 nt, Artificial Sequence
  Description of Artificial Sequence: Synthetic oligonucleotide
  Antisense strand to SEQ ID NO: 2316140
aaucaccacuauuaucuaa

SEQ ID NO: 2316142 - RNA, 19 nt, Artificial Sequence
  Description of Artificial Sequence: Synthetic oligonucleotide
  Sense strand starting at position 621 of SEQ ID NO: 1885100
gauaauaguggugauugca

SEQ ID NO: 2316143 - RNA, 19 nt, Artificial Sequence
  Description of Artificial Sequence: Synthetic oligonucleotide
  Antisense strand to SEQ ID NO: 2316142
ugcaaucaccacuauuauc

SEQ ID NO: 2316144 - RNA, 19 nt, Artificial Sequence
  Description of Artificial Sequence: Synthetic oligonucleotide
  Sense strand starting at position 921 of SEQ ID NO: 1885100
gcgagacuaugucuccacu

SEQ ID NO: 2316145 - RNA, 19 nt, Artificial Sequence
  Description of Artificial Sequence: Synthetic oligonucleotide
  Antisense strand to SEQ ID NO: 2316144
aguggagacauagucucgc

SEQ ID NO: 2316146 - RNA, 19 nt, Artificial Sequence
  Description of Artificial Sequence: Synthetic oligonucleotide
  Sense strand starting at position 956 of SEQ ID NO: 1885100
agugaauuuaauuguacgu

SEQ ID NO: 2316147 - RNA, 19 nt, Artificial Sequence
  Description of Artificial Sequence: Synthetic oligonucleotide
  Antisense strand to SEQ ID NO: 2316146
acguacaauuaaauucacu

SEQ ID NO: 2316148 - RNA, 19 nt, Artificial Sequence
  Description of Artificial Sequence: Synthetic oligonucleotide
  Sense strand starting at position 958 of SEQ ID NO: 1885100
ugaauuuaauuguacguga

SEQ ID NO: 2316149 - RNA, 19 nt, Artificial Sequence
  Description of Artificial Sequence: Synthetic oligonucleotide
  Antisense strand to SEQ ID NO: 2316148
ucacguacaauuaaauuca

SEQ ID NO: 2316150 - RNA, 19 nt, Artificial Sequence
  Description of Artificial Sequence: Synthetic oligonucleotide
  Sense strand starting at position 1267 of SEQ ID NO: 1885100
gcgccagaccucuaucuca

SEQ ID NO: 2316151 - RNA, 19 nt, Artificial Sequence
  Description of Artificial Sequence: Synthetic oligonucleotide
  Antisense strand to SEQ ID NO: 2316150
ugagauagaggucuggcgc

SEQ ID NO: 2316152 - RNA, 19 nt, Artificial Sequence
  Description of Artificial Sequence: Synthetic oligonucleotide
  Sense strand starting at position 1286 of SEQ ID NO: 1885100
auguuauaacaaggcucaa

SEQ ID NO: 2316153 - RNA, 19 nt, Artificial Sequence
  Description of Artificial Sequence: Synthetic oligonucleotide
  Antisense strand to SEQ ID NO: 2316152
uugagccuuguuauaacau

SEQ ID NO: 2316154 - RNA, 19 nt, Artificial Sequence
  Description of Artificial Sequence: Synthetic oligonucleotide
  Sense strand starting at position 1299 of SEQ ID NO: 1885100
gcucaauacucagcuaaag

SEQ ID NO: 2316155 - RNA, 19 nt, Artificial Sequence
  Description of Artificial Sequence: Synthetic oligonucleotide
  Antisense strand to SEQ ID NO: 2316154
cuuuagcugaguauugagc

SEQ ID NO: 2316156 - RNA, 19 nt, Artificial Sequence
  Description of Artificial Sequence: Synthetic oligonucleotide
  Sense strand starting at position 1310 of SEQ ID NO: 1885100
agcuaaagugagcgucaaa

SEQ ID NO: 2316157 - RNA, 19 nt, Artificial Sequence
  Description of Artificial Sequence: Synthetic oligonucleotide
  Antisense strand to SEQ ID NO: 2316156
uuugacgcucacuuuagcu

SEQ ID NO: 2316158 - RNA, 19 nt, Artificial Sequence
  Description of Artificial Sequence: Synthetic oligonucleotide
  Sense strand starting at position 1421 of SEQ ID NO: 1885100
gcuugaccuccagggaaca

SEQ ID NO: 2316159 - RNA, 19 nt, Artificial Sequence
  Description of Artificial Sequence: Synthetic oligonucleotide
  Antisense strand to SEQ ID NO: 2316158
uguucccuggaggucaagc

SEQ ID NO: 2316160 - RNA, 19 nt, Artificial Sequence
  Description of Artificial Sequence: Synthetic oligonucleotide
  Sense strand starting at position 1521 of SEQ ID NO: 1885100
cucaacuucguuuagcuau

SEQ ID NO: 2316161 - RNA, 19 nt, Artificial Sequence
  Description of Artificial Sequence: Synthetic oligonucleotide
  Antisense strand to SEQ ID NO: 2316160
auagcuaaacgaaguugag

SEQ ID NO: 2316162 - RNA, 19 nt, Artificial Sequence
  Description of Artificial Sequence: Synthetic oligonucleotide
  Sense strand starting at position 2259 of SEQ ID NO: 1885100
ggcgguuucgucaggccuu

SEQ ID NO: 2316163 - RNA, 19 nt, Artificial Sequence
  Description of Artificial Sequence: Synthetic oligonucleotide
  Antisense strand to SEQ ID NO: 2316162
aaggccugacgaaaccgcc

SEQ ID NO: 2316164 - RNA, 19 nt, Artificial Sequence
  Description of Artificial Sequence: Synthetic oligonucleotide
  Sense strand starting at position 2272 of SEQ ID NO: 1885100
ggccuucagcggcuaguua

SEQ ID NO: 2316165 - RNA, 19 nt, Artificial Sequence
  Description of Artificial Sequence: Synthetic oligonucleotide
  Antisense strand to SEQ ID NO: 2316164
uaacuagccgcugaaggcc

SEQ ID NO: 2316166 - RNA, 19 nt, Artificial Sequence
  Description of Artificial Sequence: Synthetic oligonucleotide
  Sense strand starting at position 2375 of SEQ ID NO: 1885100
gaugaaugguugucagaga

SEQ ID NO: 2316167 - RNA, 19 nt, Artificial Sequence
  Description of Artificial Sequence: Synthetic oligonucleotide
  Antisense strand to SEQ ID NO: 2316166
ucucugacaaccauucauc

SEQ ID NO: 2316168 - RNA, 19 nt, Artificial Sequence
  Description of Artificial Sequence: Synthetic oligonucleotide
  Sense strand starting at position 2376 of SEQ ID NO: 1885100
augaaugguugucagagac

SEQ ID NO: 2316169 - RNA, 19 nt, Artificial Sequence
  Description of Artificial Sequence: Synthetic oligonucleotide
  Antisense strand to SEQ ID NO: 2316168
gucucugacaaccauucau

SEQ ID NO: 2316170 - RNA, 19 nt, Artificial Sequence
  Description of Artificial Sequence: Synthetic oligonucleotide
  Sense strand starting at position 3112 of SEQ ID NO: 1885100
ccuccuguuuaacuguuaa

SEQ ID NO: 2316171 - RNA, 19 nt, Artificial Sequence
  Description of Artificial Sequence: Synthetic oligonucleotide
  Antisense strand to SEQ ID NO: 2316170
uuaacaguuaaacaggagg

SEQ ID NO: 2316172 - RNA, 19 nt, Artificial Sequence
  Description of Artificial Sequence: Synthetic oligonucleotide
  Sense strand starting at position 3127 of SEQ ID NO: 1885100
uuaacuuuguacccugaga

SEQ ID NO: 2316173 - RNA, 19 nt, Artificial Sequence
  Description of Artificial Sequence: Synthetic oligonucleotide
  Antisense strand to SEQ ID NO: 2316172
ucucaggguacaaaguuaa

SEQ ID NO: 2316174 - RNA, 19 nt, Artificial Sequence
  Description of Artificial Sequence: Synthetic oligonucleotide
  Sense strand starting at position 3344 of SEQ ID NO: 1885100
uuaugaaccuguugaucau

SEQ ID NO: 2316175 - RNA, 19 nt, Artificial Sequence
  Description of Artificial Sequence: Synthetic oligonucleotide
  Antisense strand to SEQ ID NO: 2316174
augaucaacagguucauaa

SEQ ID NO: 2316176 - RNA, 19 nt, Artificial Sequence
  Description of Artificial Sequence: Synthetic oligonucleotide
  Sense strand starting at position 3354 of SEQ ID NO: 1885100
guugaucauuuguauguca

SEQ ID NO: 2316177 - RNA, 19 nt, Artificial Sequence
  Description of Artificial Sequence: Synthetic oligonucleotide
  Antisense strand to SEQ ID NO: 2316176
ugacauacaaaugaucaac

SEQ ID NO: 2316178 - RNA, 19 nt, Artificial Sequence
  Description of Artificial Sequence: Synthetic oligonucleotide
  Sense strand starting at position 3401 of SEQ ID NO: 1885100
gagucagggucucaagcua

SEQ ID NO: 2316179 - RNA, 19 nt, Artificial Sequence
  Description of Artificial Sequence: Synthetic oligonucleotide
  Antisense strand to SEQ ID NO: 2316178
uagcuugagacccugacuc

SEQ ID NO: 2316180 - RNA, 19 nt, Artificial Sequence
  Description of Artificial Sequence: Synthetic oligonucleotide
  Sense strand starting at position 3423 of SEQ ID NO: 1885100
agcuguugcccagacugua

SEQ ID NO: 2316181 - RNA, 19 nt, Artificial Sequence
  Description of Artificial Sequence: Synthetic oligonucleotide
  Antisense strand to SEQ ID NO: 2316180
uacagucugggcaacagcu

SEQ ID NO: 2316182 - RNA, 19 nt, Artificial Sequence
  Description of Artificial Sequence: Synthetic oligonucleotide
  Sense strand starting at position 3441 of SEQ ID NO: 1885100
acugcagugcugcaaucau

SEQ ID NO: 2316183 - RNA, 19 nt, Artificial Sequence
  Description of Artificial Sequence: Synthetic oligonucleotide
  Antisense strand to SEQ ID NO: 2316182
augauugcagcacugcagu

SEQ ID NO: 2316184 - RNA, 19 nt, Artificial Sequence
  Description of Artificial Sequence: Synthetic oligonucleotide
  Sense strand starting at position 3705 of SEQ ID NO: 1885100
uuagucgugugaucugauu

SEQ ID NO: 2316185 - RNA, 19 nt, Artificial Sequence
  Description of Artificial Sequence: Synthetic oligonucleotide
  Antisense strand to SEQ ID NO: 2316184
aaucagaucacacgacuaa

SEQ ID NO: 2316186 - RNA, 19 nt, Artificial Sequence
  Description of Artificial Sequence: Synthetic oligonucleotide
  Sense strand starting at position 3725 of SEQ ID NO: 1885100
ugcuaugaguuguuugcuu

SEQ ID NO: 2316187 - RNA, 19 nt, Artificial Sequence
  Description of Artificial Sequence: Synthetic oligonucleotide
  Antisense strand to SEQ ID NO: 2316186
aagcaaacaacucauagca

SEQ ID NO: 2316188 - RNA, 19 nt, Artificial Sequence
  Description of Artificial Sequence: Synthetic oligonucleotide
  Sense strand starting at position 3727 of SEQ ID NO: 1885100
cuaugaguuguuugcuuuc

SEQ ID NO: 2316189 - RNA, 19 nt, Artificial Sequence
  Description of Artificial Sequence: Synthetic oligonucleotide
  Antisense strand to SEQ ID NO: 2316188
gaaagcaaacaacucauag

SEQ ID NO: 2316190 - RNA, 19 nt, Artificial Sequence
  Description of Artificial Sequence: Synthetic oligonucleotide
  Sense strand starting at position 3729 of SEQ ID NO: 1885100
augaguuguuugcuuucuu

SEQ ID NO: 2316191 - RNA, 19 nt, Artificial Sequence
  Description of Artificial Sequence: Synthetic oligonucleotide
  Antisense strand to SEQ ID NO: 2316190
aagaaagcaaacaacucau

SEQ ID NO: 2316192 - RNA, 19 nt, Artificial Sequence
  Description of Artificial Sequence: Synthetic oligonucleotide
  Sense strand starting at position 3884 of SEQ ID NO: 1885100
ccagcuagauguuuauuaa

SEQ ID NO: 2316193 - RNA, 19 nt, Artificial Sequence
  Description of Artificial Sequence: Synthetic oligonucleotide
  Antisense strand to SEQ ID NO: 2316192
uuaauaaacaucuagcugg

SEQ ID NO: 2316194 - RNA, 19 nt, Artificial Sequence
  Description of Artificial Sequence: Synthetic oligonucleotide
  Sense strand starting at position 38 of SEQ ID NO: 1885101
acgcuaaaugcauauaaac

SEQ ID NO: 2316195 - RNA, 19 nt, Artificial Sequence
  Description of Artificial Sequence: Synthetic oligonucleotide
  Antisense strand to SEQ ID NO: 2316194
guuuauaugcauuuagcgu

SEQ ID NO: 2316196 - RNA, 19 nt, Artificial Sequence
  Description of Artificial Sequence: Synthetic oligonucleotide
  Sense strand starting at position 187 of SEQ ID NO: 1885101
agcagacaccucuggaaua

SEQ ID NO: 2316197 - RNA, 19 nt, Artificial Sequence
  Description of Artificial Sequence: Synthetic oligonucleotide
  Antisense strand to SEQ ID NO: 2316196
uauuccagaggugucugcu

SEQ ID NO: 2316198 - RNA, 19 nt, Artificial Sequence
  Description of Artificial Sequence: Synthetic oligonucleotide
  Sense strand starting at position 413 of SEQ ID NO: 1885101
gcaaucucaugcucucaga

SEQ ID NO: 2316199 - RNA, 19 nt, Artificial Sequence
  Description of Artificial Sequence: Synthetic oligonucleotide
  Antisense strand to SEQ ID NO: 2316198
ucugagagcaugagauugc

SEQ ID NO: 2316200 - RNA, 19 nt, Artificial Sequence
  Description of Artificial Sequence: Synthetic oligonucleotide
  Sense strand starting at position 429 of SEQ ID NO: 1885101
agaacacacucugcugaaa

SEQ ID NO: 2316201 - RNA, 19 nt, Artificial Sequence
  Description of Artificial Sequence: Synthetic oligonucleotide
  Antisense strand to SEQ ID NO: 2316200
uuucagcagaguguguucu

SEQ ID NO: 2316202 - RNA, 19 nt, Artificial Sequence
  Description of Artificial Sequence: Synthetic oligonucleotide
  Sense strand starting at position 432 of SEQ ID NO: 1885101
acacacucugcugaaagua

SEQ ID NO: 2316203 - RNA, 19 nt, Artificial Sequence
  Description of Artificial Sequence: Synthetic oligonucleotide
  Antisense strand to SEQ ID NO: 2316202
uacuuucagcagagugugu

SEQ ID NO: 2316204 - RNA, 19 nt, Artificial Sequence
  Description of Artificial Sequence: Synthetic oligonucleotide
  Sense strand starting at position 459 of SEQ ID NO: 1885101
cacucaaagugacucguaa

SEQ ID NO: 2316205 - RNA, 19 nt, Artificial Sequence
  Description of Artificial Sequence: Synthetic oligonucleotide
  Antisense strand to SEQ ID NO: 2316204
uuacgagucacuuugagug

SEQ ID NO: 2316206 - RNA, 19 nt, Artificial Sequence
  Description of Artificial Sequence: Synthetic oligonucleotide
  Sense strand starting at position 485 of SEQ ID NO: 1885101
ggccuuaagccuuagaaac

SEQ ID NO: 2316207 - RNA, 19 nt, Artificial Sequence
  Description of Artificial Sequence: Synthetic oligonucleotide
  Antisense strand to SEQ ID NO: 2316206
guuucuaaggcuuaaggcc

SEQ ID NO: 2316208 - RNA, 19 nt, Artificial Sequence
  Description of Artificial Sequence: Synthetic oligonucleotide
  Sense strand starting at position 669 of SEQ ID NO: 1885101
ucagaaaguggcuaaacuu

SEQ ID NO: 2316209 - RNA, 19 nt, Artificial Sequence
  Description of Artificial Sequence: Synthetic oligonucleotide
  Antisense strand to SEQ ID NO: 2316208
aaguuuagccacuuucuga

SEQ ID NO: 2316210 - RNA, 19 nt, Artificial Sequence
  Description of Artificial Sequence: Synthetic oligonucleotide
  Sense strand starting at position 684 of SEQ ID NO: 1885101
acuuaagaggucuggcaag

SEQ ID NO: 2316211 - RNA, 19 nt, Artificial Sequence
  Description of Artificial Sequence: Synthetic oligonucleotide
  Antisense strand to SEQ ID NO: 2316210
cuugccagaccucuuaagu

SEQ ID NO: 2316212 - RNA, 19 nt, Artificial Sequence
  Description of Artificial Sequence: Synthetic oligonucleotide
  Sense strand starting at position 791 of SEQ ID NO: 1885101
gucucaguccgguauuaau

SEQ ID NO: 2316213 - RNA, 19 nt, Artificial Sequence
  Description of Artificial Sequence: Synthetic oligonucleotide
  Antisense strand to SEQ ID NO: 2316212
auuaauaccggacugagac

SEQ ID NO: 2316214 - RNA, 19 nt, Artificial Sequence
  Description of Artificial Sequence: Synthetic oligonucleotide
  Sense strand starting at position 799 of SEQ ID NO: 1885101
ccgguauuaauagaaaugu

SEQ ID NO: 2316215 - RNA, 19 nt, Artificial Sequence
  Description of Artificial Sequence: Synthetic oligonucleotide
  Antisense strand to SEQ ID NO: 2316214
acauuucuauuaauaccgg

SEQ ID NO: 2316216 - RNA, 19 nt, Artificial Sequence
  Description of Artificial Sequence: Synthetic oligonucleotide
  Sense strand starting at position 807 of SEQ ID NO: 1885101
aauagaaauguuuggcgaa

SEQ ID NO: 2316217 - RNA, 19 nt, Artificial Sequence
  Description of Artificial Sequence: Synthetic oligonucleotide
  Antisense strand to SEQ ID NO: 2316216
uucgccaaacauuucuauu

SEQ ID NO: 2316218 - RNA, 19 nt, Artificial Sequence
  Description of Artificial Sequence: Synthetic oligonucleotide
  Sense strand starting at position 1124 of SEQ ID NO: 1885101
gcuaguauuuagcauagga

SEQ ID NO: 2316219 - RNA, 19 nt, Artificial Sequence
  Description of Artificial Sequence: Synthetic oligonucleotide
  Antisense strand to SEQ ID NO: 2316218
uccuaugcuaaauacuagc

SEQ ID NO: 2316220 - RNA, 19 nt, Artificial Sequence
  Description of Artificial Sequence: Synthetic oligonucleotide
  Sense strand starting at position 1128 of SEQ ID NO: 1885101
guauuuagcauaggagcuu

SEQ ID NO: 2316221 - RNA, 19 nt, Artificial Sequence
  Description of Artificial Sequence: Synthetic oligonucleotide
  Antisense strand to SEQ ID NO: 2316220
aagcuccuaugcuaaauac

SEQ ID NO: 2316222 - RNA, 19 nt, Artificial Sequence
  Description of Artificial Sequence: Synthetic oligonucleotide
  Sense strand starting at position 1137 of SEQ ID NO: 1885101
auaggagcuuguuugcaaa

SEQ ID NO: 2316223 - RNA, 19 nt, Artificial Sequence
  Description of Artificial Sequence: Synthetic oligonucleotide
  Antisense strand to SEQ ID NO: 2316222
uuugcaaacaagcuccuau

SEQ ID NO: 2316224 - RNA, 19 nt, Artificial Sequence
  Description of Artificial Sequence: Synthetic oligonucleotide
  Sense strand starting at position 1216 of SEQ ID NO: 1885101
gagauuuagugagagccua

SEQ ID NO: 2316225 - RNA, 19 nt, Artificial Sequence
  Description of Artificial Sequence: Synthetic oligonucleotide
  Antisense strand to SEQ ID NO: 2316224
uaggcucucacuaaaucuc

SEQ ID NO: 2316226 - RNA, 19 nt, Artificial Sequence
  Description of Artificial Sequence: Synthetic oligonucleotide
  Sense strand starting at position 1363 of SEQ ID NO: 1885101
agaugaguaagcugacuaa

SEQ ID NO: 2316227 - RNA, 19 nt, Artificial Sequence
  Description of Artificial Sequence: Synthetic oligonucleotide
  Antisense strand to SEQ ID NO: 2316226
uuagucagcuuacucaucu

SEQ ID NO: 2316228 - RNA, 19 nt, Artificial Sequence
  Description of Artificial Sequence: Synthetic oligonucleotide
  Sense strand starting at position 2306 of SEQ ID NO: 1885101
acugcaaauuccucugcga

SEQ ID NO: 2316229 - RNA, 19 nt, Artificial Sequence
  Description of Artificial Sequence: Synthetic oligonucleotide
  Antisense strand to SEQ ID NO: 2316228
ucgcagaggaauuugcagu

SEQ ID NO: 2316230 - RNA, 19 nt, Artificial Sequence
  Description of Artificial Sequence: Synthetic oligonucleotide
  Sense strand starting at position 2576 of SEQ ID NO: 1885101
cuggguugaguuuauucga

SEQ ID NO: 2316231 - RNA, 19 nt, Artificial Sequence
  Description of Artificial Sequence: Synthetic oligonucleotide
  Antisense strand to SEQ ID NO: 2316230
ucgaauaaacucaacccag

SEQ ID NO: 2316232 - RNA, 19 nt, Artificial Sequence
  Description of Artificial Sequence: Synthetic oligonucleotide
  Sense strand starting at position 2579 of SEQ ID NO: 1885101
gguugaguuuauucgaaug

SEQ ID NO: 2316233 - RNA, 19 nt, Artificial Sequence
  Description of Artificial Sequence: Synthetic oligonucleotide
  Antisense strand to SEQ ID NO: 2316232
cauucgaauaaacucaacc

SEQ ID NO: 2316234 - RNA, 19 nt, Artificial Sequence
  Description of Artificial Sequence: Synthetic oligonucleotide
  Sense strand starting at position 2671 of SEQ ID NO: 1885101
uccaaauaagaucguuauc

SEQ ID NO: 2316235 - RNA, 19 nt, Artificial Sequence
  Description of Artificial Sequence: Synthetic oligonucleotide
  Antisense strand to SEQ ID NO: 2316234
gauaacgaucuuauuugga

SEQ ID NO: 2316236 - RNA, 19 nt, Artificial Sequence
  Description of Artificial Sequence: Synthetic oligonucleotide
  Sense strand starting at position 2676 of SEQ ID NO: 1885101
auaagaucguuaucuuagg

SEQ ID NO: 2316237 - RNA, 19 nt, Artificial Sequence
  Description of Artificial Sequence: Synthetic oligonucleotide
  Antisense strand to SEQ ID NO: 2316236
ccuaagauaacgaucuuau

SEQ ID NO: 2316238 - RNA, 19 nt, Artificial Sequence
  Description of Artificial Sequence: Synthetic oligonucleotide
  Sense strand starting at position 2705 of SEQ ID NO: 1885101
gcaacugaaaggugaacua

SEQ ID NO: 2316239 - RNA, 19 nt, Artificial Sequence
  Description of Artificial Sequence: Synthetic oligonucleotide
  Antisense strand to SEQ ID NO: 2316238
uaguucaccuuucaguugc

SEQ ID NO: 2316240 - RNA, 19 nt, Artificial Sequence
  Description of Artificial Sequence: Synthetic oligonucleotide
  Sense strand starting at position 2721 of SEQ ID NO: 1885101
cuaguucuauaguuacaga

SEQ ID NO: 2316241 - RNA, 19 nt, Artificial Sequence
  Description of Artificial Sequence: Synthetic oligonucleotide
  Antisense strand to SEQ ID NO: 2316240
ucuguaacuauagaacuag

SEQ ID NO: 2316242 - RNA, 19 nt, Artificial Sequence
  Description of Artificial Sequence: Synthetic oligonucleotide
  Sense strand starting at position 2737 of SEQ ID NO: 1885101
agaacaaucgagugcuuau

SEQ ID NO: 2316243 - RNA, 19 nt, Artificial Sequence
  Description of Artificial Sequence: Synthetic oligonucleotide
  Antisense strand to SEQ ID NO: 2316242
auaagcacucgauuguucu

SEQ ID NO: 2316244 - RNA, 19 nt, Artificial Sequence
  Description of Artificial Sequence: Synthetic oligonucleotide
  Sense strand starting at position 2740 of SEQ ID NO: 1885101
acaaucgagugcuuaucaa

SEQ ID NO: 2316245 - RNA, 19 nt, Artificial Sequence
  Description of Artificial Sequence: Synthetic oligonucleotide
  Antisense strand to SEQ ID NO: 2316244
uugauaagcacucgauugu

SEQ ID NO: 2316246 - RNA, 19 nt, Artificial Sequence
  Description of Artificial Sequence: Synthetic oligonucleotide
  Sense strand starting at position 2808 of SEQ ID NO: 1885101
cccacaaggcaugguuuaa

SEQ ID NO: 2316247 - RNA, 19 nt, Artificial Sequence
  Description of Artificial Sequence: Synthetic oligonucleotide
  Antisense strand to SEQ ID NO: 2316246
uuaaaccaugccuuguggg

SEQ ID NO: 2316248 - RNA, 19 nt, Artificial Sequence
  Description of Artificial Sequence: Synthetic oligonucleotide
  Sense strand starting at position 2955 of SEQ ID NO: 1885101
guguuacugcacugauuua

SEQ ID NO: 2316249 - RNA, 19 nt, Artificial Sequence
  Description of Artificial Sequence: Synthetic oligonucleotide
  Antisense strand to SEQ ID NO: 2316248
uaaaucagugcaguaacac

SEQ ID NO: 2316250 - RNA, 19 nt, Artificial Sequence
  Description of Artificial Sequence: Synthetic oligonucleotide
  Sense strand starting at position 3035 of SEQ ID NO: 1885101
guuagcgagcuucagaaga

SEQ ID NO: 2316251 - RNA, 19 nt, Artificial Sequence
  Description of Artificial Sequence: Synthetic oligonucleotide
  Antisense strand to SEQ ID NO: 2316250
ucuucugaagcucgcuaac

SEQ ID NO: 2316252 - RNA, 19 nt, Artificial Sequence
  Description of Artificial Sequence: Synthetic oligonucleotide
  Sense strand starting at position 3154 of SEQ ID NO: 1885101
cgagcaacucugcaaggua

SEQ ID NO: 2316253 - RNA, 19 nt, Artificial Sequence
  Description of Artificial Sequence: Synthetic oligonucleotide
  Antisense strand to SEQ ID NO: 2316252
uaccuugcagaguugcucg

SEQ ID NO: 2316254 - RNA, 19 nt, Artificial Sequence
  Description of Artificial Sequence: Synthetic oligonucleotide
  Sense strand starting at position 3210 of SEQ ID NO: 1885101
gcagcugaggcuuaaagaa

SEQ ID NO: 2316255 - RNA, 19 nt, Artificial Sequence
  Description of Artificial Sequence: Synthetic oligonucleotide
  Antisense strand to SEQ ID NO: 2316254
uucuuuaagccucagcugc

SEQ ID NO: 2316256 - RNA, 19 nt, Artificial Sequence
  Description of Artificial Sequence: Synthetic oligonucleotide
  Sense strand starting at position 3283 of SEQ ID NO: 1885101
aucugaacguggucacaua

SEQ ID NO: 2316257 - RNA, 19 nt, Artificial Sequence
  Description of Artificial Sequence: Synthetic oligonucleotide
  Antisense strand to SEQ ID NO: 2316256
uaugugaccacguucagau

SEQ ID NO: 2316258 - RNA, 19 nt, Artificial Sequence
  Description of Artificial Sequence: Synthetic oligonucleotide
  Sense strand starting at position 3361 of SEQ ID NO: 1885101
aagaguuggacccgaaaug

SEQ ID NO: 2316259 - RNA, 19 nt, Artificial Sequence
  Description of Artificial Sequence: Synthetic oligonucleotide
  Antisense strand to SEQ ID NO: 2316258
cauuucggguccaacucuu

SEQ ID NO: 2316260 - RNA, 19 nt, Artificial Sequence
  Description of Artificial Sequence: Synthetic oligonucleotide
  Sense strand starting at position 3401 of SEQ ID NO: 1885101
acucaugagucauccuacu

SEQ ID NO: 2316261 - RNA, 19 nt, Artificial Sequence
  Description of Artificial Sequence: Synthetic oligonucleotide
  Antisense strand to SEQ ID NO: 2316260
aguaggaugacucaugagu

SEQ ID NO: 2316262 - RNA, 19 nt, Artificial Sequence
  Description of Artificial Sequence: Synthetic oligonucleotide
  Sense strand starting at position 3662 of SEQ ID NO: 1885101
gugugugccaugcacauaa

SEQ ID NO: 2316263 - RNA, 19 nt, Artificial Sequence
  Description of Artificial Sequence: Synthetic oligonucleotide
  Antisense strand to SEQ ID NO: 2316262
uuaugugcauggcacacac

SEQ ID NO: 2316264 - RNA, 19 nt, Artificial Sequence
  Description of Artificial Sequence: Synthetic oligonucleotide
  Sense strand starting at position 3697 of SEQ ID NO: 1885101
agggcuuuaugacaaauuu

SEQ ID NO: 2316265 - RNA, 19 nt, Artificial Sequence
  Description of Artificial Sequence: Synthetic oligonucleotide
  Antisense strand to SEQ ID NO: 2316264
aaauuugucauaaagcccu

SEQ ID NO: 2316266 - RNA, 19 nt, Artificial Sequence
  Description of Artificial Sequence: Synthetic oligonucleotide
  Sense strand starting at position 3778 of SEQ ID NO: 1885101
auuccaagguaagaauaau

SEQ ID NO: 2316267 - RNA, 19 nt, Artificial Sequence
  Description of Artificial Sequence: Synthetic oligonucleotide
  Antisense strand to SEQ ID NO: 2316266
auuauucuuaccuuggaau

SEQ ID NO: 2316268 - RNA, 19 nt, Artificial Sequence
  Description of Artificial Sequence: Synthetic oligonucleotide
  Sense strand starting at position 3786 of SEQ ID NO: 1885101
guaagaauaauguguaggu

SEQ ID NO: 2316269 - RNA, 19 nt, Artificial Sequence
  Description of Artificial Sequence: Synthetic oligonucleotide
  Antisense strand to SEQ ID NO: 2316268
accuacacauuauucuuac

SEQ ID NO: 2316270 - RNA, 19 nt, Artificial Sequence
  Description of Artificial Sequence: Synthetic oligonucleotide
  Sense strand starting at position 3787 of SEQ ID NO: 1885101
uaagaauaauguguagguu

SEQ ID NO: 2316271 - RNA, 19 nt, Artificial Sequence
  Description of Artificial Sequence: Synthetic oligonucleotide
  Antisense strand to SEQ ID NO: 2316270
aaccuacacauuauucuua

SEQ ID NO: 2316272 - RNA, 19 nt, Artificial Sequence
  Description of Artificial Sequence: Synthetic oligonucleotide
  Sense strand starting at position 3790 of SEQ ID NO: 1885101
gaauaauguguagguuaag

SEQ ID NO: 2316273 - RNA, 19 nt, Artificial Sequence
  Description of Artificial Sequence: Synthetic oligonucleotide
  Antisense strand to SEQ ID NO: 2316272
cuuaaccuacacauuauuc

SEQ ID NO: 2316274 - RNA, 19 nt, Artificial Sequence
  Description of Artificial Sequence: Synthetic oligonucleotide
  Sense strand starting at position 63 of SEQ ID NO: 1885102
gggucaccagauugauaca

SEQ ID NO: 2316275 - RNA, 19 nt, Artificial Sequence
  Description of Artificial Sequence: Synthetic oligonucleotide
  Antisense strand to SEQ ID NO: 2316274
uguaucaaucuggugaccc

SEQ ID NO: 2316276 - RNA, 19 nt, Artificial Sequence
  Description of Artificial Sequence: Synthetic oligonucleotide
  Sense strand starting at position 127 of SEQ ID NO: 1885102
caagucaguuaucuaacga

SEQ ID NO: 2316277 - RNA, 19 nt, Artificial Sequence
  Description of Artificial Sequence: Synthetic oligonucleotide
  Antisense strand to SEQ ID NO: 2316276
ucguuagauaacugacuug

SEQ ID NO: 2316278 - RNA, 19 nt, Artificial Sequence
  Description of Artificial Sequence: Synthetic oligonucleotide
  Sense strand starting at position 140 of SEQ ID NO: 1885102
uaacgaugauuugacaagu

SEQ ID NO: 2316279 - RNA, 19 nt, Artificial Sequence
  Description of Artificial Sequence: Synthetic oligonucleotide
  Antisense strand to SEQ ID NO: 2316278
acuugucaaaucaucguua

SEQ ID NO: 2316280 - RNA, 19 nt, Artificial Sequence
  Description of Artificial Sequence: Synthetic oligonucleotide
  Sense strand starting at position 455 of SEQ ID NO: 1885102
uucugaccuccaggucuau

SEQ ID NO: 2316281 - RNA, 19 nt, Artificial Sequence
  Description of Artificial Sequence: Synthetic oligonucleotide
  Antisense strand to SEQ ID NO: 2316280
auagaccuggaggucagaa

SEQ ID NO: 2316282 - RNA, 19 nt, Artificial Sequence
  Description of Artificial Sequence: Synthetic oligonucleotide
  Sense strand starting at position 533 of SEQ ID NO: 1885102
uuuagacucucccuuggau

SEQ ID NO: 2316283 - RNA, 19 nt, Artificial Sequence
  Description of Artificial Sequence: Synthetic oligonucleotide
  Antisense strand to SEQ ID NO: 2316282
auccaagggagagucuaaa

SEQ ID NO: 2316284 - RNA, 19 nt, Artificial Sequence
  Description of Artificial Sequence: Synthetic oligonucleotide
  Sense strand starting at position 615 of SEQ ID NO: 1885102
caggguuugaagugcauga

SEQ ID NO: 2316285 - RNA, 19 nt, Artificial Sequence
  Description of Artificial Sequence: Synthetic oligonucleotide
  Antisense strand to SEQ ID NO: 2316284
ucaugcacuucaaacccug

SEQ ID NO: 2316286 - RNA, 19 nt, Artificial Sequence
  Description of Artificial Sequence: Synthetic oligonucleotide
  Sense strand starting at position 617 of SEQ ID NO: 1885102
ggguuugaagugcaugaau

SEQ ID NO: 2316287 - RNA, 19 nt, Artificial Sequence
  Description of Artificial Sequence: Synthetic oligonucleotide
  Antisense strand to SEQ ID NO: 2316286
auucaugcacuucaaaccc

SEQ ID NO: 2316288 - RNA, 19 nt, Artificial Sequence
  Description of Artificial Sequence: Synthetic oligonucleotide
  Sense strand starting at position 620 of SEQ ID NO: 1885102
uuugaagugcaugaauacu

SEQ ID NO: 2316289 - RNA, 19 nt, Artificial Sequence
  Description of Artificial Sequence: Synthetic oligonucleotide
  Antisense strand to SEQ ID NO: 2316288
aguauucaugcacuucaaa

SEQ ID NO: 2316290 - RNA, 19 nt, Artificial Sequence
  Description of Artificial Sequence: Synthetic oligonucleotide
  Sense strand starting at position 626 of SEQ ID NO: 1885102
gugcaugaauacucacuga

SEQ ID NO: 2316291 - RNA, 19 nt, Artificial Sequence
  Description of Artificial Sequence: Synthetic oligonucleotide
  Antisense strand to SEQ ID NO: 2316290
ucagugaguauucaugcac

SEQ ID NO: 2316292 - RNA, 19 nt, Artificial Sequence
  Description of Artificial Sequence: Synthetic oligonucleotide
  Sense strand starting at position 655 of SEQ ID NO: 1885102
gcuccuuuccuggaauauc

SEQ ID NO: 2316293 - RNA, 19 nt, Artificial Sequence
  Description of Artificial Sequence: Synthetic oligonucleotide
  Antisense strand to SEQ ID NO: 2316292
gauauuccaggaaaggagc

SEQ ID NO: 2316294 - RNA, 19 nt, Artificial Sequence
  Description of Artificial Sequence: Synthetic oligonucleotide
  Sense strand starting at position 681 of SEQ ID NO: 1885102
accagaaguaaggguuguu

SEQ ID NO: 2316295 - RNA, 19 nt, Artificial Sequence
  Description of Artificial Sequence: Synthetic oligonucleotide
  Antisense strand to SEQ ID NO: 2316294
aacaacccuuacuucuggu

SEQ ID NO: 2316296 - RNA, 19 nt, Artificial Sequence
  Description of Artificial Sequence: Synthetic oligonucleotide
  Sense strand starting at position 684 of SEQ ID NO: 1885102
agaaguaaggguuguuuac

SEQ ID NO: 2316297 - RNA, 19 nt, Artificial Sequence
  Description of Artificial Sequence: Synthetic oligonucleotide
  Antisense strand to SEQ ID NO: 2316296
guaaacaacccuuacuucu

SEQ ID NO: 2316298 - RNA, 19 nt, Artificial Sequence
  Description of Artificial Sequence: Synthetic oligonucleotide
  Sense strand starting at position 686 of SEQ ID NO: 1885102
aaguaaggguuguuuacaa

SEQ ID NO: 2316299 - RNA, 19 nt, Artificial Sequence
  Description of Artificial Sequence: Synthetic oligonucleotide
  Antisense strand to SEQ ID NO: 2316298
uuguaaacaacccuuacuu

SEQ ID NO: 2316300 - RNA, 19 nt, Artificial Sequence
  Description of Artificial Sequence: Synthetic oligonucleotide
  Sense strand starting at position 724 of SEQ ID NO: 1885102
gugugaucucaggaaggcu

SEQ ID NO: 2316301 - RNA, 19 nt, Artificial Sequence
  Description of Artificial Sequence: Synthetic oligonucleotide
  Antisense strand to SEQ ID NO: 2316300
agccuuccugagaucacac

SEQ ID NO: 2316302 - RNA, 19 nt, Artificial Sequence
  Description of Artificial Sequence: Synthetic oligonucleotide
  Sense strand starting at position 740 of SEQ ID NO: 1885102
gcuuaacagggaugugauu

SEQ ID NO: 2316303 - RNA, 19 nt, Artificial Sequence
  Description of Artificial Sequence: Synthetic oligonucleotide
  Antisense strand to SEQ ID NO: 2316302
aaucacaucccuguuaagc

SEQ ID NO: 2316304 - RNA, 19 nt, Artificial Sequence
  Description of Artificial Sequence: Synthetic oligonucleotide
  Sense strand starting at position 742 of SEQ ID NO: 1885102
uuaacagggaugugauuau

SEQ ID NO: 2316305 - RNA, 19 nt, Artificial Sequence
  Description of Artificial Sequence: Synthetic oligonucleotide
  Antisense strand to SEQ ID NO: 2316304
auaaucacaucccuguuaa

SEQ ID NO: 2316306 - RNA, 19 nt, Artificial Sequence
  Description of Artificial Sequence: Synthetic oligonucleotide
  Sense strand starting at position 746 of SEQ ID NO: 1885102
cagggaugugauuauagcu

SEQ ID NO: 2316307 - RNA, 19 nt, Artificial Sequence
  Description of Artificial Sequence: Synthetic oligonucleotide
  Antisense strand to SEQ ID NO: 2316306
agcuauaaucacaucccug

SEQ ID NO: 2316308 - RNA, 19 nt, Artificial Sequence
  Description of Artificial Sequence: Synthetic oligonucleotide
  Sense strand starting at position 751 of SEQ ID NO: 1885102
augugauuauagcuaccaa

SEQ ID NO: 2316309 - RNA, 19 nt, Artificial Sequence
  Description of Artificial Sequence: Synthetic oligonucleotide
  Antisense strand to SEQ ID NO: 2316308
uugguagcuauaaucacau

SEQ ID NO: 2316310 - RNA, 19 nt, Artificial Sequence
  Description of Artificial Sequence: Synthetic oligonucleotide
  Sense strand starting at position 795 of SEQ ID NO: 1885102
uguacuacacucugaagaa

SEQ ID NO: 2316311 - RNA, 19 nt, Artificial Sequence
  Description of Artificial Sequence: Synthetic oligonucleotide
  Antisense strand to SEQ ID NO: 2316310
uucuucagaguguaguaca

SEQ ID NO: 2316312 - RNA, 19 nt, Artificial Sequence
  Description of Artificial Sequence: Synthetic oligonucleotide
  Sense strand starting at position 858 of SEQ ID NO: 1885102
gcacuuauccagcacugaa

SEQ ID NO: 2316313 - RNA, 19 nt, Artificial Sequence
  Description of Artificial Sequence: Synthetic oligonucleotide
  Antisense strand to SEQ ID NO: 2316312
uucagugcuggauaagugc

SEQ ID NO: 2316314 - RNA, 19 nt, Artificial Sequence
  Description of Artificial Sequence: Synthetic oligonucleotide
  Sense strand starting at position 899 of SEQ ID NO: 1885102
ggcagccaucaguaagacu

SEQ ID NO: 2316315 - RNA, 19 nt, Artificial Sequence
  Description of Artificial Sequence: Synthetic oligonucleotide
  Antisense strand to SEQ ID NO: 2316314
agucuuacugauggcugcc

SEQ ID NO: 2316316 - RNA, 19 nt, Artificial Sequence
  Description of Artificial Sequence: Synthetic oligonucleotide
  Sense strand starting at position 965 of SEQ ID NO: 1885102
agguauuguuauccaauca

SEQ ID NO: 2316317 - RNA, 19 nt, Artificial Sequence
  Description of Artificial Sequence: Synthetic oligonucleotide
  Antisense strand to SEQ ID NO: 2316316
ugauuggauaacaauaccu

SEQ ID NO: 2316318 - RNA, 19 nt, Artificial Sequence
  Description of Artificial Sequence: Synthetic oligonucleotide
  Sense strand starting at position 981 of SEQ ID NO: 1885102
ucaggaaguucuguccuga

SEQ ID NO: 2316319 - RNA, 19 nt, Artificial Sequence
  Description of Artificial Sequence: Synthetic oligonucleotide
  Antisense strand to SEQ ID NO: 2316318
ucaggacagaacuuccuga

SEQ ID NO: 2316320 - RNA, 19 nt, Artificial Sequence
  Description of Artificial Sequence: Synthetic oligonucleotide
  Sense strand starting at position 1018 of SEQ ID NO: 1885102
aagaguuaguuaucaagag

SEQ ID NO: 2316321 - RNA, 19 nt, Artificial Sequence
  Description of Artificial Sequence: Synthetic oligonucleotide
  Antisense strand to SEQ ID NO: 2316320
cucuugauaacuaacucuu

SEQ ID NO: 2316322 - RNA, 19 nt, Artificial Sequence
  Description of Artificial Sequence: Synthetic oligonucleotide
  Sense strand starting at position 1022 of SEQ ID NO: 1885102
guuaguuaucaagagucag

SEQ ID NO: 2316323 - RNA, 19 nt, Artificial Sequence
  Description of Artificial Sequence: Synthetic oligonucleotide
  Antisense strand to SEQ ID NO: 2316322
cugacucuugauaacuaac

SEQ ID NO: 2316324 - RNA, 19 nt, Artificial Sequence
  Description of Artificial Sequence: Synthetic oligonucleotide
  Sense strand starting at position 1108 of SEQ ID NO: 1885102
gauuaagagucagcuacuc

SEQ ID NO: 2316325 - RNA, 19 nt, Artificial Sequence
  Description of Artificial Sequence: Synthetic oligonucleotide
  Antisense strand to SEQ ID NO: 2316324
gaguagcugacucuuaauc

SEQ ID NO: 2316326 - RNA, 19 nt, Artificial Sequence
  Description of Artificial Sequence: Synthetic oligonucleotide
  Sense strand starting at position 1568 of SEQ ID NO: 1885102
agaggucaacauuggcaaa

SEQ ID NO: 2316327 - RNA, 19 nt, Artificial Sequence
  Description of Artificial Sequence: Synthetic oligonucleotide
  Antisense strand to SEQ ID NO: 2316326
uuugccaauguugaccucu

SEQ ID NO: 2316328 - RNA, 19 nt, Artificial Sequence
  Description of Artificial Sequence: Synthetic oligonucleotide
  Sense strand starting at position 1653 of SEQ ID NO: 1885102
uguuguucaguggagugaa

SEQ ID NO: 2316329 - RNA, 19 nt, Artificial Sequence
  Description of Artificial Sequence: Synthetic oligonucleotide
  Antisense strand to SEQ ID NO: 2316328
uucacuccacugaacaaca

SEQ ID NO: 2316330 - RNA, 19 nt, Artificial Sequence
  Description of Artificial Sequence: Synthetic oligonucleotide
  Sense strand starting at position 1716 of SEQ ID NO: 1885102
cuaggcaacuccuuugaaa

SEQ ID NO: 2316331 - RNA, 19 nt, Artificial Sequence
  Description of Artificial Sequence: Synthetic oligonucleotide
  Antisense strand to SEQ ID NO: 2316330
uuucaaaggaguugccuag

SEQ ID NO: 2316332 - RNA, 19 nt, Artificial Sequence
  Description of Artificial Sequence: Synthetic oligonucleotide
  Sense strand starting at position 1734 of SEQ ID NO: 1885102
aagagucaaguaggguuaa

SEQ ID NO: 2316333 - RNA, 19 nt, Artificial Sequence
  Description of Artificial Sequence: Synthetic oligonucleotide
  Antisense strand to SEQ ID NO: 2316332
uuaacccuacuugacucuu

SEQ ID NO: 2316334 - RNA, 19 nt, Artificial Sequence
  Description of Artificial Sequence: Synthetic oligonucleotide
  Sense strand starting at position 1809 of SEQ ID NO: 1885102
uuugaaucacagugaacuu

SEQ ID NO: 2316335 - RNA, 19 nt, Artificial Sequence
  Description of Artificial Sequence: Synthetic oligonucleotide
  Antisense strand to SEQ ID NO: 2316334
aaguucacugugauucaaa

SEQ ID NO: 2316336 - RNA, 19 nt, Artificial Sequence
  Description of Artificial Sequence: Synthetic oligonucleotide
  Sense strand starting at position 1902 of SEQ ID NO: 1885102
gaacuaaugagguguggag

SEQ ID NO: 2316337 - RNA, 19 nt, Artificial Sequence
  Description of Artificial Sequence: Synthetic oligonucleotide
  Antisense strand to SEQ ID NO: 2316336
cuccacaccucauuaguuc

SEQ ID NO: 2316338 - RNA, 19 nt, Artificial Sequence
  Description of Artificial Sequence: Synthetic oligonucleotide
  Sense strand starting at position 1904 of SEQ ID NO: 1885102
acuaaugagguguggagua

SEQ ID NO: 2316339 - RNA, 19 nt, Artificial Sequence
  Description of Artificial Sequence: Synthetic oligonucleotide
  Antisense strand to SEQ ID NO: 2316338
uacuccacaccucauuagu

SEQ ID NO: 2316340 - RNA, 19 nt, Artificial Sequence
  Description of Artificial Sequence: Synthetic oligonucleotide
  Sense strand starting at position 1909 of SEQ ID NO: 1885102
ugagguguggaguaacuaa

SEQ ID NO: 2316341 - RNA, 19 nt, Artificial Sequence
  Description of Artificial Sequence: Synthetic oligonucleotide
  Antisense strand to SEQ ID NO: 2316340
uuaguuacuccacaccuca

SEQ ID NO: 2316342 - RNA, 19 nt, Artificial Sequence
  Description of Artificial Sequence: Synthetic oligonucleotide
  Sense strand starting at position 1993 of SEQ ID NO: 1885102
ucagauacgcuguaacaaa

SEQ ID NO: 2316343 - RNA, 19 nt, Artificial Sequence
  Description of Artificial Sequence: Synthetic oligonucleotide
  Antisense strand to SEQ ID NO: 2316342
uuuguuacagcguaucuga

SEQ ID NO: 2316344 - RNA, 19 nt, Artificial Sequence
  Description of Artificial Sequence: Synthetic oligonucleotide
  Sense strand starting at position 2190 of SEQ ID NO: 1885102
ggguaugugugaccacaaa

SEQ ID NO: 2316345 - RNA, 19 nt, Artificial Sequence
  Description of Artificial Sequence: Synthetic oligonucleotide
  Antisense strand to SEQ ID NO: 2316344
uuuguggucacacauaccc

SEQ ID NO: 2316346 - RNA, 19 nt, Artificial Sequence
  Description of Artificial Sequence: Synthetic oligonucleotide
  Sense strand starting at position 2497 of SEQ ID NO: 1885102
cugucauugccugcugcua

SEQ ID NO: 2316347 - RNA, 19 nt, Artificial Sequence
  Description of Artificial Sequence: Synthetic oligonucleotide
  Antisense strand to SEQ ID NO: 2316346
uagcagcaggcaaugacag

SEQ ID NO: 2316348 - RNA, 19 nt, Artificial Sequence
  Description of Artificial Sequence: Synthetic oligonucleotide
  Sense strand starting at position 2498 of SEQ ID NO: 1885102
ugucauugccugcugcuaa

SEQ ID NO: 2316349 - RNA, 19 nt, Artificial Sequence
  Description of Artificial Sequence: Synthetic oligonucleotide
  Antisense strand to SEQ ID NO: 2316348
uuagcagcaggcaaugaca

SEQ ID NO: 2316350 - RNA, 19 nt, Artificial Sequence
  Description of Artificial Sequence: Synthetic oligonucleotide
  Sense strand starting at position 3553 of SEQ ID NO: 1885102
ugcgaaacugaguaaguau

SEQ ID NO: 2316351 - RNA, 19 nt, Artificial Sequence
  Description of Artificial Sequence: Synthetic oligonucleotide
  Antisense strand to SEQ ID NO: 2316350
auacuuacucaguuucgca

SEQ ID NO: 2316352 - RNA, 19 nt, Artificial Sequence
  Description of Artificial Sequence: Synthetic oligonucleotide
  Sense strand starting at position 3948 of SEQ ID NO: 1885102
ggcgguuuggugaacgcuu

SEQ ID NO: 2316353 - RNA, 19 nt, Artificial Sequence
  Description of Artificial Sequence: Synthetic oligonucleotide
  Antisense strand to SEQ ID NO: 2316352
aagcguucaccaaaccgcc

SEQ ID NO: 2316354 - RNA, 19 nt, Artificial Sequence
  Description of Artificial Sequence: Synthetic oligonucleotide
  Sense strand starting at position 45 of SEQ ID NO: 1885103
gaacuaaugagguguggag

SEQ ID NO: 2316355 - RNA, 19 nt, Artificial Sequence
  Description of Artificial Sequence: Synthetic oligonucleotide
  Antisense strand to SEQ ID NO: 2316354
cuccacaccucauuaguuc

SEQ ID NO: 2316356 - RNA, 19 nt, Artificial Sequence
  Description of Artificial Sequence: Synthetic oligonucleotide
  Sense strand starting at position 47 of SEQ ID NO: 1885103
acuaaugagguguggagua

SEQ ID NO: 2316357 - RNA, 19 nt, Artificial Sequence
  Description of Artificial Sequence: Synthetic oligonucleotide
  Antisense strand to SEQ ID NO: 2316356
uacuccacaccucauuagu

SEQ ID NO: 2316358 - RNA, 19 nt, Artificial Sequence
  Description of Artificial Sequence: Synthetic oligonucleotide
  Sense strand starting at position 52 of SEQ ID NO: 1885103
ugagguguggaguaacuaa

SEQ ID NO: 2316359 - RNA, 19 nt, Artificial Sequence
  Description of Artificial Sequence: Synthetic oligonucleotide
  Antisense strand to SEQ ID NO: 2316358
uuaguuacuccacaccuca

SEQ ID NO: 2316360 - RNA, 19 nt, Artificial Sequence
  Description of Artificial Sequence: Synthetic oligonucleotide
  Sense strand starting at position 136 of SEQ ID NO: 1885103
ucagauacgcuguaacaaa

SEQ ID NO: 2316361 - RNA, 19 nt, Artificial Sequence
  Description of Artificial Sequence: Synthetic oligonucleotide
  Antisense strand to SEQ ID NO: 2316360
uuuguuacagcguaucuga

SEQ ID NO: 2316362 - RNA, 19 nt, Artificial Sequence
  Description of Artificial Sequence: Synthetic oligonucleotide
  Sense strand starting at position 333 of SEQ ID NO: 1885103
ggguaugugugaccacaaa

SEQ ID NO: 2316363 - RNA, 19 nt, Artificial Sequence
  Description of Artificial Sequence: Synthetic oligonucleotide
  Antisense strand to SEQ ID NO: 2316362
uuuguggucacacauaccc

SEQ ID NO: 2316364 - RNA, 19 nt, Artificial Sequence
  Description of Artificial Sequence: Synthetic oligonucleotide
  Sense strand starting at position 640 of SEQ ID NO: 1885103
cugucauugccugcugcua

SEQ ID NO: 2316365 - RNA, 19 nt, Artificial Sequence
  Description of Artificial Sequence: Synthetic oligonucleotide
  Antisense strand to SEQ ID NO: 2316364
uagcagcaggcaaugacag

SEQ ID NO: 2316366 - RNA, 19 nt, Artificial Sequence
  Description of Artificial Sequence: Synthetic oligonucleotide
  Sense strand starting at position 641 of SEQ ID NO: 1885103
ugucauugccugcugcuaa

SEQ ID NO: 2316367 - RNA, 19 nt, Artificial Sequence
  Description of Artificial Sequence: Synthetic oligonucleotide
  Antisense strand to SEQ ID NO: 2316366
uuagcagcaggcaaugaca

SEQ ID NO: 2316368 - RNA, 19 nt, Artificial Sequence
  Description of Artificial Sequence: Synthetic oligonucleotide
  Sense strand starting at position 1696 of SEQ ID NO: 1885103
ugcgaaacugaguaaguau

SEQ ID NO: 2316369 - RNA, 19 nt, Artificial Sequence
  Description of Artificial Sequence: Synthetic oligonucleotide
  Antisense strand to SEQ ID NO: 2316368
auacuuacucaguuucgca

SEQ ID NO: 2316370 - RNA, 19 nt, Artificial Sequence
  Description of Artificial Sequence: Synthetic oligonucleotide
  Sense strand starting at position 2091 of SEQ ID NO: 1885103
ggcgguuuggugaacgcuu

SEQ ID NO: 2316371 - RNA, 19 nt, Artificial Sequence
  Description of Artificial Sequence: Synthetic oligonucleotide
  Antisense strand to SEQ ID NO: 2316370
aagcguucaccaaaccgcc

SEQ ID NO: 2316372 - RNA, 19 nt, Artificial Sequence
  Description of Artificial Sequence: Synthetic oligonucleotide
  Sense strand starting at position 2278 of SEQ ID NO: 1885103
cgcacaaagccggaagauu

SEQ ID NO: 2316373 - RNA, 19 nt, Artificial Sequence
  Description of Artificial Sequence: Synthetic oligonucleotide
  Antisense strand to SEQ ID NO: 2316372
aaucuuccggcuuugugcg

SEQ ID NO: 2316374 - RNA, 19 nt, Artificial Sequence
  Description of Artificial Sequence: Synthetic oligonucleotide
  Sense strand starting at position 2352 of SEQ ID NO: 1885103
aaagaugaguacuuggguu

SEQ ID NO: 2316375 - RNA, 19 nt, Artificial Sequence
  Description of Artificial Sequence: Synthetic oligonucleotide
  Antisense strand to SEQ ID NO: 2316374
aacccaaguacucaucuuu

SEQ ID NO: 2316376 - RNA, 19 nt, Artificial Sequence
  Description of Artificial Sequence: Synthetic oligonucleotide
  Sense strand starting at position 2356 of SEQ ID NO: 1885103
augaguacuuggguucgga

SEQ ID NO: 2316377 - RNA, 19 nt, Artificial Sequence
  Description of Artificial Sequence: Synthetic oligonucleotide
  Antisense strand to SEQ ID NO: 2316376
uccgaacccaaguacucau

SEQ ID NO: 2316378 - RNA, 19 nt, Artificial Sequence
  Description of Artificial Sequence: Synthetic oligonucleotide
  Sense strand starting at position 2376 of SEQ ID NO: 1885103
uccaguguugcguuguuau

SEQ ID NO: 2316379 - RNA, 19 nt, Artificial Sequence
  Description of Artificial Sequence: Synthetic oligonucleotide
  Antisense strand to SEQ ID NO: 2316378
auaacaacgcaacacugga

SEQ ID NO: 2316380 - RNA, 19 nt, Artificial Sequence
  Description of Artificial Sequence: Synthetic oligonucleotide
  Sense strand starting at position 2465 of SEQ ID NO: 1885103
ugcaacguaggauauauaa

SEQ ID NO: 2316381 - RNA, 19 nt, Artificial Sequence
  Description of Artificial Sequence: Synthetic oligonucleotide
  Antisense strand to SEQ ID NO: 2316380
uuauauauccuacguugca

SEQ ID NO: 2316382 - RNA, 19 nt, Artificial Sequence
  Description of Artificial Sequence: Synthetic oligonucleotide
  Sense strand starting at position 2480 of SEQ ID NO: 1885103
auaauugcgggucaauauu

SEQ ID NO: 2316383 - RNA, 19 nt, Artificial Sequence
  Description of Artificial Sequence: Synthetic oligonucleotide
  Antisense strand to SEQ ID NO: 2316382
aauauugacccgcaauuau

SEQ ID NO: 2316384 - RNA, 19 nt, Artificial Sequence
  Description of Artificial Sequence: Synthetic oligonucleotide
  Sense strand starting at position 2498 of SEQ ID NO: 1885103
uguugcugaucuuuaggga

SEQ ID NO: 2316385 - RNA, 19 nt, Artificial Sequence
  Description of Artificial Sequence: Synthetic oligonucleotide
  Antisense strand to SEQ ID NO: 2316384
ucccuaaagaucagcaaca

SEQ ID NO: 2316386 - RNA, 19 nt, Artificial Sequence
  Description of Artificial Sequence: Synthetic oligonucleotide
  Sense strand starting at position 2499 of SEQ ID NO: 1885103
guugcugaucuuuagggau

SEQ ID NO: 2316387 - RNA, 19 nt, Artificial Sequence
  Description of Artificial Sequence: Synthetic oligonucleotide
  Antisense strand to SEQ ID NO: 2316386
aucccuaaagaucagcaac

SEQ ID NO: 2316388 - RNA, 19 nt, Artificial Sequence
  Description of Artificial Sequence: Synthetic oligonucleotide
  Sense strand starting at position 2522 of SEQ ID NO: 1885103
aagcgaaaugaaugcaaau

SEQ ID NO: 2316389 - RNA, 19 nt, Artificial Sequence
  Description of Artificial Sequence: Synthetic oligonucleotide
  Antisense strand to SEQ ID NO: 2316388
auuugcauucauuucgcuu

SEQ ID NO: 2316390 - RNA, 19 nt, Artificial Sequence
  Description of Artificial Sequence: Synthetic oligonucleotide
  Sense strand starting at position 2543 of SEQ ID NO: 1885103
cgucucauagcugacuuaa

SEQ ID NO: 2316391 - RNA, 19 nt, Artificial Sequence
  Description of Artificial Sequence: Synthetic oligonucleotide
  Antisense strand to SEQ ID NO: 2316390
uuaagucagcuaugagacg

SEQ ID NO: 2316392 - RNA, 19 nt, Artificial Sequence
  Description of Artificial Sequence: Synthetic oligonucleotide
  Sense strand starting at position 2581 of SEQ ID NO: 1885103
ucagguuagcauuaaagca

SEQ ID NO: 2316393 - RNA, 19 nt, Artificial Sequence
  Description of Artificial Sequence: Synthetic oligonucleotide
  Antisense strand to SEQ ID NO: 2316392
ugcuuuaaugcuaaccuga

SEQ ID NO: 2316394 - RNA, 19 nt, Artificial Sequence
  Description of Artificial Sequence: Synthetic oligonucleotide
  Sense strand starting at position 2665 of SEQ ID NO: 1885103
uagauuguggcucagcaau

SEQ ID NO: 2316395 - RNA, 19 nt, Artificial Sequence
  Description of Artificial Sequence: Synthetic oligonucleotide
  Antisense strand to SEQ ID NO: 2316394
auugcugagccacaaucua

SEQ ID NO: 2316396 - RNA, 19 nt, Artificial Sequence
  Description of Artificial Sequence: Synthetic oligonucleotide
  Sense strand starting at position 2827 of SEQ ID NO: 1885103
aggaguugccaucauguua

SEQ ID NO: 2316397 - RNA, 19 nt, Artificial Sequence
  Description of Artificial Sequence: Synthetic oligonucleotide
  Antisense strand to SEQ ID NO: 2316396
uaacaugauggcaacuccu

SEQ ID NO: 2316398 - RNA, 19 nt, Artificial Sequence
  Description of Artificial Sequence: Synthetic oligonucleotide
  Sense strand starting at position 2860 of SEQ ID NO: 1885103
augagaagcuuucuuaaug

SEQ ID NO: 2316399 - RNA, 19 nt, Artificial Sequence
  Description of Artificial Sequence: Synthetic oligonucleotide
  Antisense strand to SEQ ID NO: 2316398
cauuaagaaagcuucucau

SEQ ID NO: 2316400 - RNA, 19 nt, Artificial Sequence
  Description of Artificial Sequence: Synthetic oligonucleotide
  Sense strand starting at position 2861 of SEQ ID NO: 1885103
ugagaagcuuucuuaaugg

SEQ ID NO: 2316401 - RNA, 19 nt, Artificial Sequence
  Description of Artificial Sequence: Synthetic oligonucleotide
  Antisense strand to SEQ ID NO: 2316400
ccauuaagaaagcuucuca

SEQ ID NO: 2316402 - RNA, 19 nt, Artificial Sequence
  Description of Artificial Sequence: Synthetic oligonucleotide
  Sense strand starting at position 3125 of SEQ ID NO: 1885103
gacugaacauaguuugaug

SEQ ID NO: 2316403 - RNA, 19 nt, Artificial Sequence
  Description of Artificial Sequence: Synthetic oligonucleotide
  Antisense strand to SEQ ID NO: 2316402
caucaaacuauguucaguc

SEQ ID NO: 2316404 - RNA, 19 nt, Artificial Sequence
  Description of Artificial Sequence: Synthetic oligonucleotide
  Sense strand starting at position 3127 of SEQ ID NO: 1885103
cugaacauaguuugaugau

SEQ ID NO: 2316405 - RNA, 19 nt, Artificial Sequence
  Description of Artificial Sequence: Synthetic oligonucleotide
  Antisense strand to SEQ ID NO: 2316404
aucaucaaacuauguucag

SEQ ID NO: 2316406 - RNA, 19 nt, Artificial Sequence
  Description of Artificial Sequence: Synthetic oligonucleotide
  Sense strand starting at position 3252 of SEQ ID NO: 1885103
ugguacuuucugugaugga

SEQ ID NO: 2316407 - RNA, 19 nt, Artificial Sequence
  Description of Artificial Sequence: Synthetic oligonucleotide
  Antisense strand to SEQ ID NO: 2316406
uccaucacagaaaguacca

SEQ ID NO: 2316408 - RNA, 19 nt, Artificial Sequence
  Description of Artificial Sequence: Synthetic oligonucleotide
  Sense strand starting at position 3256 of SEQ ID NO: 1885103
acuuucugugauggacaca

SEQ ID NO: 2316409 - RNA, 19 nt, Artificial Sequence
  Description of Artificial Sequence: Synthetic oligonucleotide
  Antisense strand to SEQ ID NO: 2316408
uguguccaucacagaaagu

SEQ ID NO: 2316410 - RNA, 19 nt, Artificial Sequence
  Description of Artificial Sequence: Synthetic oligonucleotide
  Sense strand starting at position 3271 of SEQ ID NO: 1885103
cacaauuggcaguaaugca

SEQ ID NO: 2316411 - RNA, 19 nt, Artificial Sequence
  Description of Artificial Sequence: Synthetic oligonucleotide
  Antisense strand to SEQ ID NO: 2316410
ugcauuacugccaauugug

SEQ ID NO: 2316412 - RNA, 19 nt, Artificial Sequence
  Description of Artificial Sequence: Synthetic oligonucleotide
  Sense strand starting at position 3296 of SEQ ID NO: 1885103
ucuuucuagguuuauugau

SEQ ID NO: 2316413 - RNA, 19 nt, Artificial Sequence
  Description of Artificial Sequence: Synthetic oligonucleotide
  Antisense strand to SEQ ID NO: 2316412
aucaauaaaccuagaaaga

SEQ ID NO: 2316414 - RNA, 19 nt, Artificial Sequence
  Description of Artificial Sequence: Synthetic oligonucleotide
  Sense strand starting at position 3298 of SEQ ID NO: 1885103
uuucuagguuuauugauca

SEQ ID NO: 2316415 - RNA, 19 nt, Artificial Sequence
  Description of Artificial Sequence: Synthetic oligonucleotide
  Antisense strand to SEQ ID NO: 2316414
ugaucaauaaaccuagaaa

SEQ ID NO: 2316416 - RNA, 19 nt, Artificial Sequence
  Description of Artificial Sequence: Synthetic oligonucleotide
  Sense strand starting at position 3456 of SEQ ID NO: 1885103
aacagagaguguuuaaguu

SEQ ID NO: 2316417 - RNA, 19 nt, Artificial Sequence
  Description of Artificial Sequence: Synthetic oligonucleotide
  Antisense strand to SEQ ID NO: 2316416
aacuuaaacacucucuguu

SEQ ID NO: 2316418 - RNA, 19 nt, Artificial Sequence
  Description of Artificial Sequence: Synthetic oligonucleotide
  Sense strand starting at position 3466 of SEQ ID NO: 1885103
guuuaaguuguuuauagga

SEQ ID NO: 2316419 - RNA, 19 nt, Artificial Sequence
  Description of Artificial Sequence: Synthetic oligonucleotide
  Antisense strand to SEQ ID NO: 2316418
uccuauaaacaacuuaaac

SEQ ID NO: 2316420 - RNA, 19 nt, Artificial Sequence
  Description of Artificial Sequence: Synthetic oligonucleotide
  Sense strand starting at position 3483 of SEQ ID NO: 1885103
gaugcauguuuccugaauu

SEQ ID NO: 2316421 - RNA, 19 nt, Artificial Sequence
  Description of Artificial Sequence: Synthetic oligonucleotide
  Antisense strand to SEQ ID NO: 2316420
aauucaggaaacaugcauc

SEQ ID NO: 2316422 - RNA, 19 nt, Artificial Sequence
  Description of Artificial Sequence: Synthetic oligonucleotide
  Sense strand starting at position 3513 of SEQ ID NO: 1885103
ucagauauuugguaauuac

SEQ ID NO: 2316423 - RNA, 19 nt, Artificial Sequence
  Description of Artificial Sequence: Synthetic oligonucleotide
  Antisense strand to SEQ ID NO: 2316422
guaauuaccaaauaucuga

SEQ ID NO: 2316424 - RNA, 19 nt, Artificial Sequence
  Description of Artificial Sequence: Synthetic oligonucleotide
  Sense strand starting at position 3541 of SEQ ID NO: 1885103
auucgacaugguuguauaa

SEQ ID NO: 2316425 - RNA, 19 nt, Artificial Sequence
  Description of Artificial Sequence: Synthetic oligonucleotide
  Antisense strand to SEQ ID NO: 2316424
uuauacaaccaugucgaau

SEQ ID NO: 2316426 - RNA, 19 nt, Artificial Sequence
  Description of Artificial Sequence: Synthetic oligonucleotide
  Sense strand starting at position 3687 of SEQ ID NO: 1885103
gagaaaugauuaguucuuc

SEQ ID NO: 2316427 - RNA, 19 nt, Artificial Sequence
  Description of Artificial Sequence: Synthetic oligonucleotide
  Antisense strand to SEQ ID NO: 2316426
gaagaacuaaucauuucuc

SEQ ID NO: 2316428 - RNA, 19 nt, Artificial Sequence
  Description of Artificial Sequence: Synthetic oligonucleotide
  Sense strand starting at position 3705 of SEQ ID NO: 1885103
caggguuucugacucauua

SEQ ID NO: 2316429 - RNA, 19 nt, Artificial Sequence
  Description of Artificial Sequence: Synthetic oligonucleotide
  Antisense strand to SEQ ID NO: 2316428
uaaugagucagaaacccug

SEQ ID NO: 2316430 - RNA, 19 nt, Artificial Sequence
  Description of Artificial Sequence: Synthetic oligonucleotide
  Sense strand starting at position 3709 of SEQ ID NO: 1885103
guuucugacucauuaauug

SEQ ID NO: 2316431 - RNA, 19 nt, Artificial Sequence
  Description of Artificial Sequence: Synthetic oligonucleotide
  Antisense strand to SEQ ID NO: 2316430
caauuaaugagucagaaac

SEQ ID NO: 2316432 - RNA, 19 nt, Artificial Sequence
  Description of Artificial Sequence: Synthetic oligonucleotide
  Sense strand starting at position 3806 of SEQ ID NO: 1885103
ugguuaauuccuggcauaa

SEQ ID NO: 2316433 - RNA, 19 nt, Artificial Sequence
  Description of Artificial Sequence: Synthetic oligonucleotide
  Antisense strand to SEQ ID NO: 2316432
uuaugccaggaauuaacca

SEQ ID NO: 2316434 - RNA, 19 nt, Artificial Sequence
  Description of Artificial Sequence: Synthetic oligonucleotide
  Sense strand starting at position 34 of SEQ ID NO: 1885104
ggcuuacuccaaugaaauc

SEQ ID NO: 2316435 - RNA, 19 nt, Artificial Sequence
  Description of Artificial Sequence: Synthetic oligonucleotide
  Antisense strand to SEQ ID NO: 2316434
gauuucauuggaguaagcc

SEQ ID NO: 2316436 - RNA, 19 nt, Artificial Sequence
  Description of Artificial Sequence: Synthetic oligonucleotide
  Sense strand starting at position 249 of SEQ ID NO: 1885104
gcauuuauucugggugcca

SEQ ID NO: 2316437 - RNA, 19 nt, Artificial Sequence
  Description of Artificial Sequence: Synthetic oligonucleotide
  Antisense strand to SEQ ID NO: 2316436
uggcacccagaauaaaugc

SEQ ID NO: 2316438 - RNA, 19 nt, Artificial Sequence
  Description of Artificial Sequence: Synthetic oligonucleotide
  Sense strand starting at position 250 of SEQ ID NO: 1885104
cauuuauucugggugccau

SEQ ID NO: 2316439 - RNA, 19 nt, Artificial Sequence
  Description of Artificial Sequence: Synthetic oligonucleotide
  Antisense strand to SEQ ID NO: 2316438
auggcacccagaauaaaug

SEQ ID NO: 2316440 - RNA, 19 nt, Artificial Sequence
  Description of Artificial Sequence: Synthetic oligonucleotide
  Sense strand starting at position 357 of SEQ ID NO: 1885104
caggaacuaugguucucua

SEQ ID NO: 2316441 - RNA, 19 nt, Artificial Sequence
  Description of Artificial Sequence: Synthetic oligonucleotide
  Antisense strand to SEQ ID NO: 2316440
uagagaaccauaguuccug

SEQ ID NO: 2316442 - RNA, 19 nt, Artificial Sequence
  Description of Artificial Sequence: Synthetic oligonucleotide
  Sense strand starting at position 812 of SEQ ID NO: 1885104
gaaauuguggugcgaauuu

SEQ ID NO: 2316443 - RNA, 19 nt, Artificial Sequence
  Description of Artificial Sequence: Synthetic oligonucleotide
  Antisense strand to SEQ ID NO: 2316442
aaauucgcaccacaauuuc

SEQ ID NO: 2316444 - RNA, 19 nt, Artificial Sequence
  Description of Artificial Sequence: Synthetic oligonucleotide
  Sense strand starting at position 843 of SEQ ID NO: 1885104
cucugcuaaguguaaauau

SEQ ID NO: 2316445 - RNA, 19 nt, Artificial Sequence
  Description of Artificial Sequence: Synthetic oligonucleotide
  Antisense strand to SEQ ID NO: 2316444
auauuuacacuuagcagag

SEQ ID NO: 2316446 - RNA, 19 nt, Artificial Sequence
  Description of Artificial Sequence: Synthetic oligonucleotide
  Sense strand starting at position 1114 of SEQ ID NO: 1885104
aggcuuuaauaccuaagaa

SEQ ID NO: 2316447 - RNA, 19 nt, Artificial Sequence
  Description of Artificial Sequence: Synthetic oligonucleotide
  Antisense strand to SEQ ID NO: 2316446
uucuuagguauuaaagccu

SEQ ID NO: 2316448 - RNA, 19 nt, Artificial Sequence
  Description of Artificial Sequence: Synthetic oligonucleotide
  Sense strand starting at position 1186 of SEQ ID NO: 1885104
ccaugugaagguuaacuuu

SEQ ID NO: 2316449 - RNA, 19 nt, Artificial Sequence
  Description of Artificial Sequence: Synthetic oligonucleotide
  Antisense strand to SEQ ID NO: 2316448
aaaguuaaccuucacaugg

SEQ ID NO: 2316450 - RNA, 19 nt, Artificial Sequence
  Description of Artificial Sequence: Synthetic oligonucleotide
  Sense strand starting at position 1321 of SEQ ID NO: 1885104
agggcacugcuacaugaaa

SEQ ID NO: 2316451 - RNA, 19 nt, Artificial Sequence
  Description of Artificial Sequence: Synthetic oligonucleotide
  Antisense strand to SEQ ID NO: 2316450
uuucauguagcagugcccu

SEQ ID NO: 2316452 - RNA, 19 nt, Artificial Sequence
  Description of Artificial Sequence: Synthetic oligonucleotide
  Sense strand starting at position 1571 of SEQ ID NO: 1885104
acugaaguaucaguccaua

SEQ ID NO: 2316453 - RNA, 19 nt, Artificial Sequence
  Description of Artificial Sequence: Synthetic oligonucleotide
  Antisense strand to SEQ ID NO: 2316452
uauggacugauacuucagu

SEQ ID NO: 2316454 - RNA, 19 nt, Artificial Sequence
  Description of Artificial Sequence: Synthetic oligonucleotide
  Sense strand starting at position 1576 of SEQ ID NO: 1885104
aguaucaguccauaucuaa

SEQ ID NO: 2316455 - RNA, 19 nt, Artificial Sequence
  Description of Artificial Sequence: Synthetic oligonucleotide
  Antisense strand to SEQ ID NO: 2316454
uuagauauggacugauacu

SEQ ID NO: 2316456 - RNA, 19 nt, Artificial Sequence
  Description of Artificial Sequence: Synthetic oligonucleotide
  Sense strand starting at position 1587 of SEQ ID NO: 1885104
auaucuaaggcaggugaau

SEQ ID NO: 2316457 - RNA, 19 nt, Artificial Sequence
  Description of Artificial Sequence: Synthetic oligonucleotide
  Antisense strand to SEQ ID NO: 2316456
auucaccugccuuagauau

SEQ ID NO: 2316458 - RNA, 19 nt, Artificial Sequence
  Description of Artificial Sequence: Synthetic oligonucleotide
  Sense strand starting at position 1732 of SEQ ID NO: 1885104
ugccuauucuauuuguaca

SEQ ID NO: 2316459 - RNA, 19 nt, Artificial Sequence
  Description of Artificial Sequence: Synthetic oligonucleotide
  Antisense strand to SEQ ID NO: 2316458
uguacaaauagaauaggca

SEQ ID NO: 2316460 - RNA, 19 nt, Artificial Sequence
  Description of Artificial Sequence: Synthetic oligonucleotide
  Sense strand starting at position 1782 of SEQ ID NO: 1885104
aaacaucugugggcaauau

SEQ ID NO: 2316461 - RNA, 19 nt, Artificial Sequence
  Description of Artificial Sequence: Synthetic oligonucleotide
  Antisense strand to SEQ ID NO: 2316460
auauugcccacagauguuu

SEQ ID NO: 2316462 - RNA, 19 nt, Artificial Sequence
  Description of Artificial Sequence: Synthetic oligonucleotide
  Sense strand starting at position 1783 of SEQ ID NO: 1885104
aacaucugugggcaauauu

SEQ ID NO: 2316463 - RNA, 19 nt, Artificial Sequence
  Description of Artificial Sequence: Synthetic oligonucleotide
  Antisense strand to SEQ ID NO: 2316462
aauauugcccacagauguu

SEQ ID NO: 2316464 - RNA, 19 nt, Artificial Sequence
  Description of Artificial Sequence: Synthetic oligonucleotide
  Sense strand starting at position 2101 of SEQ ID NO: 1885104
ugaccugauuuauaaagga

SEQ ID NO: 2316465 - RNA, 19 nt, Artificial Sequence
  Description of Artificial Sequence: Synthetic oligonucleotide
  Antisense strand to SEQ ID NO: 2316464
uccuuuauaaaucagguca

SEQ ID NO: 2316466 - RNA, 19 nt, Artificial Sequence
  Description of Artificial Sequence: Synthetic oligonucleotide
  Sense strand starting at position 2231 of SEQ ID NO: 1885104
ugcccucugguggaugauu

SEQ ID NO: 2316467 - RNA, 19 nt, Artificial Sequence
  Description of Artificial Sequence: Synthetic oligonucleotide
  Antisense strand to SEQ ID NO: 2316466
aaucauccaccagagggca

SEQ ID NO: 2316468 - RNA, 19 nt, Artificial Sequence
  Description of Artificial Sequence: Synthetic oligonucleotide
  Sense strand starting at position 2340 of SEQ ID NO: 1885104
ucucaagaugaauaguguu

SEQ ID NO: 2316469 - RNA, 19 nt, Artificial Sequence
  Description of Artificial Sequence: Synthetic oligonucleotide
  Antisense strand to SEQ ID NO: 2316468
aacacuauucaucuugaga

SEQ ID NO: 2316470 - RNA, 19 nt, Artificial Sequence
  Description of Artificial Sequence: Synthetic oligonucleotide
  Sense strand starting at position 2417 of SEQ ID NO: 1885104
gugguuuguaaggaauauc

SEQ ID NO: 2316471 - RNA, 19 nt, Artificial Sequence
  Description of Artificial Sequence: Synthetic oligonucleotide
  Antisense strand to SEQ ID NO: 2316470
gauauuccuuacaaaccac

SEQ ID NO: 2316472 - RNA, 19 nt, Artificial Sequence
  Description of Artificial Sequence: Synthetic oligonucleotide
  Sense strand starting at position 2439 of SEQ ID NO: 1885104
ggugaauuccagcaaagug

SEQ ID NO: 2316473 - RNA, 19 nt, Artificial Sequence
  Description of Artificial Sequence: Synthetic oligonucleotide
  Antisense strand to SEQ ID NO: 2316472
cacuuugcuggaauucacc

SEQ ID NO: 2316474 - RNA, 19 nt, Artificial Sequence
  Description of Artificial Sequence: Synthetic oligonucleotide
  Sense strand starting at position 2448 of SEQ ID NO: 1885104
cagcaaagugaauaucagu

SEQ ID NO: 2316475 - RNA, 19 nt, Artificial Sequence
  Description of Artificial Sequence: Synthetic oligonucleotide
  Antisense strand to SEQ ID NO: 2316474
acugauauucacuuugcug

SEQ ID NO: 2316476 - RNA, 19 nt, Artificial Sequence
  Description of Artificial Sequence: Synthetic oligonucleotide
  Sense strand starting at position 2640 of SEQ ID NO: 1885104
aaagacaugugguucuuau

SEQ ID NO: 2316477 - RNA, 19 nt, Artificial Sequence
  Description of Artificial Sequence: Synthetic oligonucleotide
  Antisense strand to SEQ ID NO: 2316476
auaagaaccacaugucuuu

SEQ ID NO: 2316478 - RNA, 19 nt, Artificial Sequence
  Description of Artificial Sequence: Synthetic oligonucleotide
  Sense strand starting at position 2654 of SEQ ID NO: 1885104
cuuauugacuuaccgagau

SEQ ID NO: 2316479 - RNA, 19 nt, Artificial Sequence
  Description of Artificial Sequence: Synthetic oligonucleotide
  Antisense strand to SEQ ID NO: 2316478
aucucgguaagucaauaag

SEQ ID NO: 2316480 - RNA, 19 nt, Artificial Sequence
  Description of Artificial Sequence: Synthetic oligonucleotide
  Sense strand starting at position 2658 of SEQ ID NO: 1885104
uugacuuaccgagauuggu

SEQ ID NO: 2316481 - RNA, 19 nt, Artificial Sequence
  Description of Artificial Sequence: Synthetic oligonucleotide
  Antisense strand to SEQ ID NO: 2316480
accaaucucgguaagucaa

SEQ ID NO: 2316482 - RNA, 19 nt, Artificial Sequence
  Description of Artificial Sequence: Synthetic oligonucleotide
  Sense strand starting at position 2878 of SEQ ID NO: 1885104
ggagcauggcauuaaguuu

SEQ ID NO: 2316483 - RNA, 19 nt, Artificial Sequence
  Description of Artificial Sequence: Synthetic oligonucleotide
  Antisense strand to SEQ ID NO: 2316482
aaacuuaaugccaugcucc

SEQ ID NO: 2316484 - RNA, 19 nt, Artificial Sequence
  Description of Artificial Sequence: Synthetic oligonucleotide
  Sense strand starting at position 2885 of SEQ ID NO: 1885104
ggcauuaaguuuccacaag

SEQ ID NO: 2316485 - RNA, 19 nt, Artificial Sequence
  Description of Artificial Sequence: Synthetic oligonucleotide
  Antisense strand to SEQ ID NO: 2316484
cuuguggaaacuuaaugcc

SEQ ID NO: 2316486 - RNA, 19 nt, Artificial Sequence
  Description of Artificial Sequence: Synthetic oligonucleotide
  Sense strand starting at position 2966 of SEQ ID NO: 1885104
gucucaaauuagguaugga

SEQ ID NO: 2316487 - RNA, 19 nt, Artificial Sequence
  Description of Artificial Sequence: Synthetic oligonucleotide
  Antisense strand to SEQ ID NO: 2316486
uccauaccuaauuugagac

SEQ ID NO: 2316488 - RNA, 19 nt, Artificial Sequence
  Description of Artificial Sequence: Synthetic oligonucleotide
  Sense strand starting at position 2976 of SEQ ID NO: 1885104
agguauggagauugcauaa

SEQ ID NO: 2316489 - RNA, 19 nt, Artificial Sequence
  Description of Artificial Sequence: Synthetic oligonucleotide
  Antisense strand to SEQ ID NO: 2316488
uuaugcaaucuccauaccu

SEQ ID NO: 2316490 - RNA, 19 nt, Artificial Sequence
  Description of Artificial Sequence: Synthetic oligonucleotide
  Sense strand starting at position 3174 of SEQ ID NO: 1885104
aagagaaugcagcgauuaa

SEQ ID NO: 2316491 - RNA, 19 nt, Artificial Sequence
  Description of Artificial Sequence: Synthetic oligonucleotide
  Antisense strand to SEQ ID NO: 2316490
uuaaucgcugcauucucuu

SEQ ID NO: 2316492 - RNA, 19 nt, Artificial Sequence
  Description of Artificial Sequence: Synthetic oligonucleotide
  Sense strand starting at position 3175 of SEQ ID NO: 1885104
agagaaugcagcgauuaau

SEQ ID NO: 2316493 - RNA, 19 nt, Artificial Sequence
  Description of Artificial Sequence: Synthetic oligonucleotide
  Antisense strand to SEQ ID NO: 2316492
auuaaucgcugcauucucu

SEQ ID NO: 2316494 - RNA, 19 nt, Artificial Sequence
  Description of Artificial Sequence: Synthetic oligonucleotide
  Sense strand starting at position 3178 of SEQ ID NO: 1885104
gaaugcagcgauuaauaug

SEQ ID NO: 2316495 - RNA, 19 nt, Artificial Sequence
  Description of Artificial Sequence: Synthetic oligonucleotide
  Antisense strand to SEQ ID NO: 2316494
cauauuaaucgcugcauuc

SEQ ID NO: 2316496 - RNA, 19 nt, Artificial Sequence
  Description of Artificial Sequence: Synthetic oligonucleotide
  Sense strand starting at position 3244 of SEQ ID NO: 1885104
gaucuuggaugaguaauua

SEQ ID NO: 2316497 - RNA, 19 nt, Artificial Sequence
  Description of Artificial Sequence: Synthetic oligonucleotide
  Antisense strand to SEQ ID NO: 2316496
uaauuacucauccaagauc

SEQ ID NO: 2316498 - RNA, 19 nt, Artificial Sequence
  Description of Artificial Sequence: Synthetic oligonucleotide
  Sense strand starting at position 3248 of SEQ ID NO: 1885104
uuggaugaguaauuaaagu

SEQ ID NO: 2316499 - RNA, 19 nt, Artificial Sequence
  Description of Artificial Sequence: Synthetic oligonucleotide
  Antisense strand to SEQ ID NO: 2316498
acuuuaauuacucauccaa

SEQ ID NO: 2316500 - RNA, 19 nt, Artificial Sequence
  Description of Artificial Sequence: Synthetic oligonucleotide
  Sense strand starting at position 3350 of SEQ ID NO: 1885104
ugggaacauaaauguuagu

SEQ ID NO: 2316501 - RNA, 19 nt, Artificial Sequence
  Description of Artificial Sequence: Synthetic oligonucleotide
  Antisense strand to SEQ ID NO: 2316500
acuaacauuuauguuccca

SEQ ID NO: 2316502 - RNA, 19 nt, Artificial Sequence
  Description of Artificial Sequence: Synthetic oligonucleotide
  Sense strand starting at position 3535 of SEQ ID NO: 1885104
uuacaauguugagccuaga

SEQ ID NO: 2316503 - RNA, 19 nt, Artificial Sequence
  Description of Artificial Sequence: Synthetic oligonucleotide
  Antisense strand to SEQ ID NO: 2316502
ucuaggcucaacauuguaa

SEQ ID NO: 2316504 - RNA, 19 nt, Artificial Sequence
  Description of Artificial Sequence: Synthetic oligonucleotide
  Sense strand starting at position 3538 of SEQ ID NO: 1885104
caauguugagccuagauau

SEQ ID NO: 2316505 - RNA, 19 nt, Artificial Sequence
  Description of Artificial Sequence: Synthetic oligonucleotide
  Antisense strand to SEQ ID NO: 2316504
auaucuaggcucaacauug

SEQ ID NO: 2316506 - RNA, 19 nt, Artificial Sequence
  Description of Artificial Sequence: Synthetic oligonucleotide
  Sense strand starting at position 3566 of SEQ ID NO: 1885104
uuugacggucuauaaaguu

SEQ ID NO: 2316507 - RNA, 19 nt, Artificial Sequence
  Description of Artificial Sequence: Synthetic oligonucleotide
  Antisense strand to SEQ ID NO: 2316506
aacuuuauagaccgucaaa

SEQ ID NO: 2316508 - RNA, 19 nt, Artificial Sequence
  Description of Artificial Sequence: Synthetic oligonucleotide
  Sense strand starting at position 3696 of SEQ ID NO: 1885104
guuuacacuguguaaauau

SEQ ID NO: 2316509 - RNA, 19 nt, Artificial Sequence
  Description of Artificial Sequence: Synthetic oligonucleotide
  Antisense strand to SEQ ID NO: 2316508
auauuuacacaguguaaac

SEQ ID NO: 2316510 - RNA, 19 nt, Artificial Sequence
  Description of Artificial Sequence: Synthetic oligonucleotide
  Sense strand starting at position 3703 of SEQ ID NO: 1885104
cuguguaaauauucccaaa

SEQ ID NO: 2316511 - RNA, 19 nt, Artificial Sequence
  Description of Artificial Sequence: Synthetic oligonucleotide
  Antisense strand to SEQ ID NO: 2316510
uuugggaauauuuacacag

SEQ ID NO: 2316512 - RNA, 19 nt, Artificial Sequence
  Description of Artificial Sequence: Synthetic oligonucleotide
  Sense strand starting at position 3705 of SEQ ID NO: 1885104
guguaaauauucccaaaug

SEQ ID NO: 2316513 - RNA, 19 nt, Artificial Sequence
  Description of Artificial Sequence: Synthetic oligonucleotide
  Antisense strand to SEQ ID NO: 2316512
cauuugggaauauuuacac

SEQ ID NO: 2316514 - RNA, 19 nt, Artificial Sequence
  Description of Artificial Sequence: Synthetic oligonucleotide
  Sense strand starting at position 46 of SEQ ID NO: 1885105
uguuuaauuggugagccaa

SEQ ID NO: 2316515 - RNA, 19 nt, Artificial Sequence
  Description of Artificial Sequence: Synthetic oligonucleotide
  Antisense strand to SEQ ID NO: 2316514
uuggcucaccaauuaaaca

SEQ ID NO: 2316516 - RNA, 19 nt, Artificial Sequence
  Description of Artificial Sequence: Synthetic oligonucleotide
  Sense strand starting at position 503 of SEQ ID NO: 1885105
acaucaaauugggugaauu

SEQ ID NO: 2316517 - RNA, 19 nt, Artificial Sequence
  Description of Artificial Sequence: Synthetic oligonucleotide
  Antisense strand to SEQ ID NO: 2316516
aauucacccaauuugaugu

SEQ ID NO: 2316518 - RNA, 19 nt, Artificial Sequence
  Description of Artificial Sequence: Synthetic oligonucleotide
  Sense strand starting at position 728 of SEQ ID NO: 1885105
caaugaaucgcuuaguaag

SEQ ID NO: 2316519 - RNA, 19 nt, Artificial Sequence
  Description of Artificial Sequence: Synthetic oligonucleotide
  Antisense strand to SEQ ID NO: 2316518
cuuacuaagcgauucauug

SEQ ID NO: 2316520 - RNA, 19 nt, Artificial Sequence
  Description of Artificial Sequence: Synthetic oligonucleotide
  Sense strand starting at position 730 of SEQ ID NO: 1885105
augaaucgcuuaguaagaa

SEQ ID NO: 2316521 - RNA, 19 nt, Artificial Sequence
  Description of Artificial Sequence: Synthetic oligonucleotide
  Antisense strand to SEQ ID NO: 2316520
uucuuacuaagcgauucau

SEQ ID NO: 2316522 - RNA, 19 nt, Artificial Sequence
  Description of Artificial Sequence: Synthetic oligonucleotide
  Sense strand starting at position 814 of SEQ ID NO: 1885105
uaauuugguuaugugcaua

SEQ ID NO: 2316523 - RNA, 19 nt, Artificial Sequence
  Description of Artificial Sequence: Synthetic oligonucleotide
  Antisense strand to SEQ ID NO: 2316522
uaugcacauaaccaaauua

SEQ ID NO: 2316524 - RNA, 19 nt, Artificial Sequence
  Description of Artificial Sequence: Synthetic oligonucleotide
  Sense strand starting at position 1073 of SEQ ID NO: 1885105
augcaagaaguuugacauc

SEQ ID NO: 2316525 - RNA, 19 nt, Artificial Sequence
  Description of Artificial Sequence: Synthetic oligonucleotide
  Antisense strand to SEQ ID NO: 2316524
gaugucaaacuucuugcau

SEQ ID NO: 2316526 - RNA, 19 nt, Artificial Sequence
  Description of Artificial Sequence: Synthetic oligonucleotide
  Sense strand starting at position 1127 of SEQ ID NO: 1885105
agguacuauguguaauagu

SEQ ID NO: 2316527 - RNA, 19 nt, Artificial Sequence
  Description of Artificial Sequence: Synthetic oligonucleotide
  Antisense strand to SEQ ID NO: 2316526
acuauuacacauaguaccu

SEQ ID NO: 2316528 - RNA, 19 nt, Artificial Sequence
  Description of Artificial Sequence: Synthetic oligonucleotide
  Sense strand starting at position 1278 of SEQ ID NO: 1885105
auucuuuaggcucaaguga

SEQ ID NO: 2316529 - RNA, 19 nt, Artificial Sequence
  Description of Artificial Sequence: Synthetic oligonucleotide
  Antisense strand to SEQ ID NO: 2316528
ucacuugagccuaaagaau

SEQ ID NO: 2316530 - RNA, 19 nt, Artificial Sequence
  Description of Artificial Sequence: Synthetic oligonucleotide
  Sense strand starting at position 1305 of SEQ ID NO: 1885105
guagcaugucaccauuaua

SEQ ID NO: 2316531 - RNA, 19 nt, Artificial Sequence
  Description of Artificial Sequence: Synthetic oligonucleotide
  Antisense strand to SEQ ID NO: 2316530
uauaauggugacaugcuac

SEQ ID NO: 2316532 - RNA, 19 nt, Artificial Sequence
  Description of Artificial Sequence: Synthetic oligonucleotide
  Sense strand starting at position 1308 of SEQ ID NO: 1885105
gcaugucaccauuauaaug

SEQ ID NO: 2316533 - RNA, 19 nt, Artificial Sequence
  Description of Artificial Sequence: Synthetic oligonucleotide
  Antisense strand to SEQ ID NO: 2316532
cauuauaauggugacaugc

SEQ ID NO: 2316534 - RNA, 19 nt, Artificial Sequence
  Description of Artificial Sequence: Synthetic oligonucleotide
  Sense strand starting at position 1318 of SEQ ID NO: 1885105
auuauaaugugaccgaaac

SEQ ID NO: 2316535 - RNA, 19 nt, Artificial Sequence
  Description of Artificial Sequence: Synthetic oligonucleotide
  Antisense strand to SEQ ID NO: 2316534
guuucggucacauuauaau

SEQ ID NO: 2316536 - RNA, 19 nt, Artificial Sequence
  Description of Artificial Sequence: Synthetic oligonucleotide
  Sense strand starting at position 1391 of SEQ ID NO: 1885105
ugcucaguuccagaacauc

SEQ ID NO: 2316537 - RNA, 19 nt, Artificial Sequence
  Description of Artificial Sequence: Synthetic oligonucleotide
  Antisense strand to SEQ ID NO: 2316536
gauguucuggaacugagca

SEQ ID NO: 2316538 - RNA, 19 nt, Artificial Sequence
  Description of Artificial Sequence: Synthetic oligonucleotide
  Sense strand starting at position 1505 of SEQ ID NO: 1885105
cagagcagaugaguucuau

SEQ ID NO: 2316539 - RNA, 19 nt, Artificial Sequence
  Description of Artificial Sequence: Synthetic oligonucleotide
  Antisense strand to SEQ ID NO: 2316538
auagaacucaucugcucug

SEQ ID NO: 2316540 - RNA, 19 nt, Artificial Sequence
  Description of Artificial Sequence: Synthetic oligonucleotide
  Sense strand starting at position 1536 of SEQ ID NO: 1885105
uugggaacuaguggguaua

SEQ ID NO: 2316541 - RNA, 19 nt, Artificial Sequence
  Description of Artificial Sequence: Synthetic oligonucleotide
  Antisense strand to SEQ ID NO: 2316540
uauacccacuaguucccaa

SEQ ID NO: 2316542 - RNA, 19 nt, Artificial Sequence
  Description of Artificial Sequence: Synthetic oligonucleotide
  Sense strand starting at position 1537 of SEQ ID NO: 1885105
ugggaacuaguggguauaa

SEQ ID NO: 2316543 - RNA, 19 nt, Artificial Sequence
  Description of Artificial Sequence: Synthetic oligonucleotide
  Antisense strand to SEQ ID NO: 2316542
uuauacccacuaguuccca

SEQ ID NO: 2316544 - RNA, 19 nt, Artificial Sequence
  Description of Artificial Sequence: Synthetic oligonucleotide
  Sense strand starting at position 1571 of SEQ ID NO: 1885105
gugagaaguaggugggaua

SEQ ID NO: 2316545 - RNA, 19 nt, Artificial Sequence
  Description of Artificial Sequence: Synthetic oligonucleotide
  Antisense strand to SEQ ID NO: 2316544
uaucccaccuacuucucac

SEQ ID NO: 2316546 - RNA, 19 nt, Artificial Sequence
  Description of Artificial Sequence: Synthetic oligonucleotide
  Sense strand starting at position 1606 of SEQ ID NO: 1885105
cuguuauuccuaugaauug

SEQ ID NO: 2316547 - RNA, 19 nt, Artificial Sequence
  Description of Artificial Sequence: Synthetic oligonucleotide
  Antisense strand to SEQ ID NO: 2316546
caauucauaggaauaacag

SEQ ID NO: 2316548 - RNA, 19 nt, Artificial Sequence
  Description of Artificial Sequence: Synthetic oligonucleotide
  Sense strand starting at position 1622 of SEQ ID NO: 1885105
uuguaaacaucaguagaac

SEQ ID NO: 2316549 - RNA, 19 nt, Artificial Sequence
  Description of Artificial Sequence: Synthetic oligonucleotide
  Antisense strand to SEQ ID NO: 2316548
guucuacugauguuuacaa

SEQ ID NO: 2316550 - RNA, 19 nt, Artificial Sequence
  Description of Artificial Sequence: Synthetic oligonucleotide
  Sense strand starting at position 1739 of SEQ ID NO: 1885105
gaaagauaaugugccuauc

SEQ ID NO: 2316551 - RNA, 19 nt, Artificial Sequence
  Description of Artificial Sequence: Synthetic oligonucleotide
  Antisense strand to SEQ ID NO: 2316550
gauaggcacauuaucuuuc

SEQ ID NO: 2316552 - RNA, 19 nt, Artificial Sequence
  Description of Artificial Sequence: Synthetic oligonucleotide
  Sense strand starting at position 1742 of SEQ ID NO: 1885105
agauaaugugccuaucauc

SEQ ID NO: 2316553 - RNA, 19 nt, Artificial Sequence
  Description of Artificial Sequence: Synthetic oligonucleotide
  Antisense strand to SEQ ID NO: 2316552
gaugauaggcacauuaucu

SEQ ID NO: 2316554 - RNA, 19 nt, Artificial Sequence
  Description of Artificial Sequence: Synthetic oligonucleotide
  Sense strand starting at position 1753 of SEQ ID NO: 1885105
cuaucaucccagugagaua

SEQ ID NO: 2316555 - RNA, 19 nt, Artificial Sequence
  Description of Artificial Sequence: Synthetic oligonucleotide
  Antisense strand to SEQ ID NO: 2316554
uaucucacugggaugauag

SEQ ID NO: 2316556 - RNA, 19 nt, Artificial Sequence
  Description of Artificial Sequence: Synthetic oligonucleotide
  Sense strand starting at position 1809 of SEQ ID NO: 1885105
auaugaaauacgugguuaa

SEQ ID NO: 2316557 - RNA, 19 nt, Artificial Sequence
  Description of Artificial Sequence: Synthetic oligonucleotide
  Antisense strand to SEQ ID NO: 2316556
uuaaccacguauuucauau

SEQ ID NO: 2316558 - RNA, 19 nt, Artificial Sequence
  Description of Artificial Sequence: Synthetic oligonucleotide
  Sense strand starting at position 1810 of SEQ ID NO: 1885105
uaugaaauacgugguuaau

SEQ ID NO: 2316559 - RNA, 19 nt, Artificial Sequence
  Description of Artificial Sequence: Synthetic oligonucleotide
  Antisense strand to SEQ ID NO: 2316558
auuaaccacguauuucaua

SEQ ID NO: 2316560 - RNA, 19 nt, Artificial Sequence
  Description of Artificial Sequence: Synthetic oligonucleotide
  Sense strand starting at position 1813 of SEQ ID NO: 1885105
gaaauacgugguuaauggu

SEQ ID NO: 2316561 - RNA, 19 nt, Artificial Sequence
  Description of Artificial Sequence: Synthetic oligonucleotide
  Antisense strand to SEQ ID NO: 2316560
accauuaaccacguauuuc

SEQ ID NO: 2316562 - RNA, 19 nt, Artificial Sequence
  Description of Artificial Sequence: Synthetic oligonucleotide
  Sense strand starting at position 1820 of SEQ ID NO: 1885105
gugguuaaugguuaacaug

SEQ ID NO: 2316563 - RNA, 19 nt, Artificial Sequence
  Description of Artificial Sequence: Synthetic oligonucleotide
  Antisense strand to SEQ ID NO: 2316562
cauguuaaccauuaaccac

SEQ ID NO: 2316564 - RNA, 19 nt, Artificial Sequence
  Description of Artificial Sequence: Synthetic oligonucleotide
  Sense strand starting at position 1894 of SEQ ID NO: 1885105
accagauuugccuguuccu

SEQ ID NO: 2316565 - RNA, 19 nt, Artificial Sequence
  Description of Artificial Sequence: Synthetic oligonucleotide
  Antisense strand to SEQ ID NO: 2316564
aggaacaggcaaaucuggu

SEQ ID NO: 2316566 - RNA, 19 nt, Artificial Sequence
  Description of Artificial Sequence: Synthetic oligonucleotide
  Sense strand starting at position 2145 of SEQ ID NO: 1885105
uggaguuacuguuuagaca

SEQ ID NO: 2316567 - RNA, 19 nt, Artificial Sequence
  Description of Artificial Sequence: Synthetic oligonucleotide
  Antisense strand to SEQ ID NO: 2316566
ugucuaaacaguaacucca

SEQ ID NO: 2316568 - RNA, 19 nt, Artificial Sequence
  Description of Artificial Sequence: Synthetic oligonucleotide
  Sense strand starting at position 2146 of SEQ ID NO: 1885105
ggaguuacuguuuagacac

SEQ ID NO: 2316569 - RNA, 19 nt, Artificial Sequence
  Description of Artificial Sequence: Synthetic oligonucleotide
  Antisense strand to SEQ ID NO: 2316568
gugucuaaacaguaacucc

SEQ ID NO: 2316570 - RNA, 19 nt, Artificial Sequence
  Description of Artificial Sequence: Synthetic oligonucleotide
  Sense strand starting at position 2307 of SEQ ID NO: 1885105
ggguaaacaucucuguaaa

SEQ ID NO: 2316571 - RNA, 19 nt, Artificial Sequence
  Description of Artificial Sequence: Synthetic oligonucleotide
  Antisense strand to SEQ ID NO: 2316570
uuuacagagauguuuaccc

SEQ ID NO: 2316572 - RNA, 19 nt, Artificial Sequence
  Description of Artificial Sequence: Synthetic oligonucleotide
  Sense strand starting at position 2308 of SEQ ID NO: 1885105
gguaaacaucucuguaaau

SEQ ID NO: 2316573 - RNA, 19 nt, Artificial Sequence
  Description of Artificial Sequence: Synthetic oligonucleotide
  Antisense strand to SEQ ID NO: 2316572
auuuacagagauguuuacc

SEQ ID NO: 2316574 - RNA, 19 nt, Artificial Sequence
  Description of Artificial Sequence: Synthetic oligonucleotide
  Sense strand starting at position 2309 of SEQ ID NO: 1885105
guaaacaucucuguaaauu

SEQ ID NO: 2316575 - RNA, 19 nt, Artificial Sequence
  Description of Artificial Sequence: Synthetic oligonucleotide
  Antisense strand to SEQ ID NO: 2316574
aauuuacagagauguuuac

SEQ ID NO: 2316576 - RNA, 19 nt, Artificial Sequence
  Description of Artificial Sequence: Synthetic oligonucleotide
  Sense strand starting at position 2357 of SEQ ID NO: 1885105
auuaguaucugagccuaua

SEQ ID NO: 2316577 - RNA, 19 nt, Artificial Sequence
  Description of Artificial Sequence: Synthetic oligonucleotide
  Antisense strand to SEQ ID NO: 2316576
uauaggcucagauacuaau

SEQ ID NO: 2316578 - RNA, 19 nt, Artificial Sequence
  Description of Artificial Sequence: Synthetic oligonucleotide
  Sense strand starting at position 2437 of SEQ ID NO: 1885105
acaacuaucuaggauuuag

SEQ ID NO: 2316579 - RNA, 19 nt, Artificial Sequence
  Description of Artificial Sequence: Synthetic oligonucleotide
  Antisense strand to SEQ ID NO: 2316578
cuaaauccuagauaguugu

SEQ ID NO: 2316580 - RNA, 19 nt, Artificial Sequence
  Description of Artificial Sequence: Synthetic oligonucleotide
  Sense strand starting at position 2452 of SEQ ID NO: 1885105
uuagaaguuuagguuggau

SEQ ID NO: 2316581 - RNA, 19 nt, Artificial Sequence
  Description of Artificial Sequence: Synthetic oligonucleotide
  Antisense strand to SEQ ID NO: 2316580
auccaaccuaaacuucuaa

SEQ ID NO: 2316582 - RNA, 19 nt, Artificial Sequence
  Description of Artificial Sequence: Synthetic oligonucleotide
  Sense strand starting at position 2464 of SEQ ID NO: 1885105
guuggauaccaaugcaaau

SEQ ID NO: 2316583 - RNA, 19 nt, Artificial Sequence
  Description of Artificial Sequence: Synthetic oligonucleotide
  Antisense strand to SEQ ID NO: 2316582
auuugcauugguauccaac

SEQ ID NO: 2316584 - RNA, 19 nt, Artificial Sequence
  Description of Artificial Sequence: Synthetic oligonucleotide
  Sense strand starting at position 2488 of SEQ ID NO: 1885105
ucuagaccauguuugugaa

SEQ ID NO: 2316585 - RNA, 19 nt, Artificial Sequence
  Description of Artificial Sequence: Synthetic oligonucleotide
  Antisense strand to SEQ ID NO: 2316584
uucacaaacauggucuaga

SEQ ID NO: 2316586 - RNA, 19 nt, Artificial Sequence
  Description of Artificial Sequence: Synthetic oligonucleotide
  Sense strand starting at position 2489 of SEQ ID NO: 1885105
cuagaccauguuugugaau

SEQ ID NO: 2316587 - RNA, 19 nt, Artificial Sequence
  Description of Artificial Sequence: Synthetic oligonucleotide
  Antisense strand to SEQ ID NO: 2316586
auucacaaacauggucuag

SEQ ID NO: 2316588 - RNA, 19 nt, Artificial Sequence
  Description of Artificial Sequence: Synthetic oligonucleotide
  Sense strand starting at position 2692 of SEQ ID NO: 1885105
ucuguaguacauugaaauu

SEQ ID NO: 2316589 - RNA, 19 nt, Artificial Sequence
  Description of Artificial Sequence: Synthetic oligonucleotide
  Antisense strand to SEQ ID NO: 2316588
aauuucaauguacuacaga

SEQ ID NO: 2316590 - RNA, 19 nt, Artificial Sequence
  Description of Artificial Sequence: Synthetic oligonucleotide
  Sense strand starting at position 2919 of SEQ ID NO: 1885105
ucuacauguguguacuaaa

SEQ ID NO: 2316591 - RNA, 19 nt, Artificial Sequence
  Description of Artificial Sequence: Synthetic oligonucleotide
  Antisense strand to SEQ ID NO: 2316590
uuuaguacacacauguaga

SEQ ID NO: 2316592 - RNA, 19 nt, Artificial Sequence
  Description of Artificial Sequence: Synthetic oligonucleotide
  Sense strand starting at position 3775 of SEQ ID NO: 1885105
auguguguuccagcugcau

SEQ ID NO: 2316593 - RNA, 19 nt, Artificial Sequence
  Description of Artificial Sequence: Synthetic oligonucleotide
  Antisense strand to SEQ ID NO: 2316592
augcagcuggaacacacau

SEQ ID NO: 2316594 - RNA, 19 nt, Artificial Sequence
  Description of Artificial Sequence: Synthetic oligonucleotide
  Sense strand starting at position 239 of SEQ ID NO: 1885107
gagcauugcuuuguaguaa

SEQ ID NO: 2316595 - RNA, 19 nt, Artificial Sequence
  Description of Artificial Sequence: Synthetic oligonucleotide
  Antisense strand to SEQ ID NO: 2316594
uuacuacaaagcaaugcuc

SEQ ID NO: 2316596 - RNA, 19 nt, Artificial Sequence
  Description of Artificial Sequence: Synthetic oligonucleotide
  Sense strand starting at position 313 of SEQ ID NO: 1885107
ggccaaagugauuaucuuc

SEQ ID NO: 2316597 - RNA, 19 nt, Artificial Sequence
  Description of Artificial Sequence: Synthetic oligonucleotide
  Antisense strand to SEQ ID NO: 2316596
gaagauaaucacuuuggcc

SEQ ID NO: 2316598 - RNA, 19 nt, Artificial Sequence
  Description of Artificial Sequence: Synthetic oligonucleotide
  Sense strand starting at position 348 of SEQ ID NO: 1885107
ggaauagugucauuauucc

SEQ ID NO: 2316599 - RNA, 19 nt, Artificial Sequence
  Description of Artificial Sequence: Synthetic oligonucleotide
  Antisense strand to SEQ ID NO: 2316598
ggaauaaugacacuauucc

SEQ ID NO: 2316600 - RNA, 19 nt, Artificial Sequence
  Description of Artificial Sequence: Synthetic oligonucleotide
  Sense strand starting at position 538 of SEQ ID NO: 1885107
caguucuugccuggaguau

SEQ ID NO: 2316601 - RNA, 19 nt, Artificial Sequence
  Description of Artificial Sequence: Synthetic oligonucleotide
  Antisense strand to SEQ ID NO: 2316600
auacuccaggcaagaacug

SEQ ID NO: 2316602 - RNA, 19 nt, Artificial Sequence
  Description of Artificial Sequence: Synthetic oligonucleotide
  Sense strand starting at position 539 of SEQ ID NO: 1885107
aguucuugccuggaguauu

SEQ ID NO: 2316603 - RNA, 19 nt, Artificial Sequence
  Description of Artificial Sequence: Synthetic oligonucleotide
  Antisense strand to SEQ ID NO: 2316602
aauacuccaggcaagaacu

SEQ ID NO: 2316604 - RNA, 19 nt, Artificial Sequence
  Description of Artificial Sequence: Synthetic oligonucleotide
  Sense strand starting at position 550 of SEQ ID NO: 1885107
ggaguauugcaacauccaa

SEQ ID NO: 2316605 - RNA, 19 nt, Artificial Sequence
  Description of Artificial Sequence: Synthetic oligonucleotide
  Antisense strand to SEQ ID NO: 2316604
uuggauguugcaauacucc

SEQ ID NO: 2316606 - RNA, 19 nt, Artificial Sequence
  Description of Artificial Sequence: Synthetic oligonucleotide
  Sense strand starting at position 622 of SEQ ID NO: 1885107
augcaaaucugaccuggau

SEQ ID NO: 2316607 - RNA, 19 nt, Artificial Sequence
  Description of Artificial Sequence: Synthetic oligonucleotide
  Antisense strand to SEQ ID NO: 2316606
auccaggucagauuugcau

SEQ ID NO: 2316608 - RNA, 19 nt, Artificial Sequence
  Description of Artificial Sequence: Synthetic oligonucleotide
  Sense strand starting at position 647 of SEQ ID NO: 1885107
cugcuuaaagcuuaugacu

SEQ ID NO: 2316609 - RNA, 19 nt, Artificial Sequence
  Description of Artificial Sequence: Synthetic oligonucleotide
  Antisense strand to SEQ ID NO: 2316608
agucauaagcuuuaagcag

SEQ ID NO: 2316610 - RNA, 19 nt, Artificial Sequence
  Description of Artificial Sequence: Synthetic oligonucleotide
  Sense strand starting at position 656 of SEQ ID NO: 1885107
gcuuaugacugguuuccuu

SEQ ID NO: 2316611 - RNA, 19 nt, Artificial Sequence
  Description of Artificial Sequence: Synthetic oligonucleotide
  Antisense strand to SEQ ID NO: 2316610
aaggaaaccagucauaagc

SEQ ID NO: 2316612 - RNA, 19 nt, Artificial Sequence
  Description of Artificial Sequence: Synthetic oligonucleotide
  Sense strand starting at position 660 of SEQ ID NO: 1885107
augacugguuuccuuuaau

SEQ ID NO: 2316613 - RNA, 19 nt, Artificial Sequence
  Description of Artificial Sequence: Synthetic oligonucleotide
  Antisense strand to SEQ ID NO: 2316612
auuaaaggaaaccagucau

SEQ ID NO: 2316614 - RNA, 19 nt, Artificial Sequence
  Description of Artificial Sequence: Synthetic oligonucleotide
  Sense strand starting at position 671 of SEQ ID NO: 1885107
ccuuuaauucuuggauaag

SEQ ID NO: 2316615 - RNA, 19 nt, Artificial Sequence
  Description of Artificial Sequence: Synthetic oligonucleotide
  Antisense strand to SEQ ID NO: 2316614
cuuauccaagaauuaaagg

SEQ ID NO: 2316616 - RNA, 19 nt, Artificial Sequence
  Description of Artificial Sequence: Synthetic oligonucleotide
  Sense strand starting at position 831 of SEQ ID NO: 1885107
agccuuugcacgccugauu

SEQ ID NO: 2316617 - RNA, 19 nt, Artificial Sequence
  Description of Artificial Sequence: Synthetic oligonucleotide
  Antisense strand to SEQ ID NO: 2316616
aaucaggcgugcaaaggcu

SEQ ID NO: 2316618 - RNA, 19 nt, Artificial Sequence
  Description of Artificial Sequence: Synthetic oligonucleotide
  Sense strand starting at position 844 of SEQ ID NO: 1885107
cugauucccucugcuuaga

SEQ ID NO: 2316619 - RNA, 19 nt, Artificial Sequence
  Description of Artificial Sequence: Synthetic oligonucleotide
  Antisense strand to SEQ ID NO: 2316618
ucuaagcagagggaaucag

SEQ ID NO: 2316620 - RNA, 19 nt, Artificial Sequence
  Description of Artificial Sequence: Synthetic oligonucleotide
  Sense strand starting at position 863 of SEQ ID NO: 1885107
ggaguucccuccuuucuuu

SEQ ID NO: 2316621 - RNA, 19 nt, Artificial Sequence
  Description of Artificial Sequence: Synthetic oligonucleotide
  Antisense strand to SEQ ID NO: 2316620
aaagaaaggagggaacucc

SEQ ID NO: 2316622 - RNA, 19 nt, Artificial Sequence
  Description of Artificial Sequence: Synthetic oligonucleotide
  Sense strand starting at position 942 of SEQ ID NO: 1885107
ucaagaucucguuauugua

SEQ ID NO: 2316623 - RNA, 19 nt, Artificial Sequence
  Description of Artificial Sequence: Synthetic oligonucleotide
  Antisense strand to SEQ ID NO: 2316622
uacaauaacgagaucuuga

SEQ ID NO: 2316624 - RNA, 19 nt, Artificial Sequence
  Description of Artificial Sequence: Synthetic oligonucleotide
  Sense strand starting at position 944 of SEQ ID NO: 1885107
aagaucucguuauuguaaa

SEQ ID NO: 2316625 - RNA, 19 nt, Artificial Sequence
  Description of Artificial Sequence: Synthetic oligonucleotide
  Antisense strand to SEQ ID NO: 2316624
uuuacaauaacgagaucuu

SEQ ID NO: 2316626 - RNA, 19 nt, Artificial Sequence
  Description of Artificial Sequence: Synthetic oligonucleotide
  Sense strand starting at position 1370 of SEQ ID NO: 1885107
gaaagaaccuugucugcca

SEQ ID NO: 2316627 - RNA, 19 nt, Artificial Sequence
  Description of Artificial Sequence: Synthetic oligonucleotide
  Antisense strand to SEQ ID NO: 2316626
uggcagacaagguucuuuc

SEQ ID NO: 2316628 - RNA, 19 nt, Artificial Sequence
  Description of Artificial Sequence: Synthetic oligonucleotide
  Sense strand starting at position 1433 of SEQ ID NO: 1885107
caacuagacugguugacua

SEQ ID NO: 2316629 - RNA, 19 nt, Artificial Sequence
  Description of Artificial Sequence: Synthetic oligonucleotide
  Antisense strand to SEQ ID NO: 2316628
uagucaaccagucuaguug

SEQ ID NO: 2316630 - RNA, 19 nt, Artificial Sequence
  Description of Artificial Sequence: Synthetic oligonucleotide
  Sense strand starting at position 1441 of SEQ ID NO: 1885107
cugguugacuaagucaaua

SEQ ID NO: 2316631 - RNA, 19 nt, Artificial Sequence
  Description of Artificial Sequence: Synthetic oligonucleotide
  Antisense strand to SEQ ID NO: 2316630
uauugacuuagucaaccag

SEQ ID NO: 2316632 - RNA, 19 nt, Artificial Sequence
  Description of Artificial Sequence: Synthetic oligonucleotide
  Sense strand starting at position 1465 of SEQ ID NO: 1885107
agcacuacggucuauuaua

SEQ ID NO: 2316633 - RNA, 19 nt, Artificial Sequence
  Description of Artificial Sequence: Synthetic oligonucleotide
  Antisense strand to SEQ ID NO: 2316632
uauaauagaccguagugcu

SEQ ID NO: 2316634 - RNA, 19 nt, Artificial Sequence
  Description of Artificial Sequence: Synthetic oligonucleotide
  Sense strand starting at position 1537 of SEQ ID NO: 1885107
guucauggugccgacauuu

SEQ ID NO: 2316635 - RNA, 19 nt, Artificial Sequence
  Description of Artificial Sequence: Synthetic oligonucleotide
  Antisense strand to SEQ ID NO: 2316634
aaaugucggcaccaugaac

SEQ ID NO: 2316636 - RNA, 19 nt, Artificial Sequence
  Description of Artificial Sequence: Synthetic oligonucleotide
  Sense strand starting at position 2388 of SEQ ID NO: 1885107
aguggagauuugggucaca

SEQ ID NO: 2316637 - RNA, 19 nt, Artificial Sequence
  Description of Artificial Sequence: Synthetic oligonucleotide
  Antisense strand to SEQ ID NO: 2316636
ugugacccaaaucuccacu

SEQ ID NO: 2316638 - RNA, 19 nt, Artificial Sequence
  Description of Artificial Sequence: Synthetic oligonucleotide
  Sense strand starting at position 2460 of SEQ ID NO: 1885107
uggccuucucacugcuuaa

SEQ ID NO: 2316639 - RNA, 19 nt, Artificial Sequence
  Description of Artificial Sequence: Synthetic oligonucleotide
  Antisense strand to SEQ ID NO: 2316638
uuaagcagugagaaggcca

SEQ ID NO: 2316640 - RNA, 19 nt, Artificial Sequence
  Description of Artificial Sequence: Synthetic oligonucleotide
  Sense strand starting at position 2577 of SEQ ID NO: 1885107
gaugaagacugagauugua

SEQ ID NO: 2316641 - RNA, 19 nt, Artificial Sequence
  Description of Artificial Sequence: Synthetic oligonucleotide
  Antisense strand to SEQ ID NO: 2316640
uacaaucucagucuucauc

SEQ ID NO: 2316642 - RNA, 19 nt, Artificial Sequence
  Description of Artificial Sequence: Synthetic oligonucleotide
  Sense strand starting at position 2593 of SEQ ID NO: 1885107
guacuacauugagucaaag

SEQ ID NO: 2316643 - RNA, 19 nt, Artificial Sequence
  Description of Artificial Sequence: Synthetic oligonucleotide
  Antisense strand to SEQ ID NO: 2316642
cuuugacucaauguaguac

SEQ ID NO: 2316644 - RNA, 19 nt, Artificial Sequence
  Description of Artificial Sequence: Synthetic oligonucleotide
  Sense strand starting at position 2964 of SEQ ID NO: 1885107
cugugaacucuaugcagau

SEQ ID NO: 2316645 - RNA, 19 nt, Artificial Sequence
  Description of Artificial Sequence: Synthetic oligonucleotide
  Antisense strand to SEQ ID NO: 2316644
aucugcauagaguucacag

SEQ ID NO: 2316646 - RNA, 19 nt, Artificial Sequence
  Description of Artificial Sequence: Synthetic oligonucleotide
  Sense strand starting at position 2965 of SEQ ID NO: 1885107
ugugaacucuaugcagaug

SEQ ID NO: 2316647 - RNA, 19 nt, Artificial Sequence
  Description of Artificial Sequence: Synthetic oligonucleotide
  Antisense strand to SEQ ID NO: 2316646
caucugcauagaguucaca

SEQ ID NO: 2316648 - RNA, 19 nt, Artificial Sequence
  Description of Artificial Sequence: Synthetic oligonucleotide
  Sense strand starting at position 2966 of SEQ ID NO: 1885107
gugaacucuaugcagauga

SEQ ID NO: 2316649 - RNA, 19 nt, Artificial Sequence
  Description of Artificial Sequence: Synthetic oligonucleotide
  Antisense strand to SEQ ID NO: 2316648
ucaucugcauagaguucac

SEQ ID NO: 2316650 - RNA, 19 nt, Artificial Sequence
  Description of Artificial Sequence: Synthetic oligonucleotide
  Sense strand starting at position 3061 of SEQ ID NO: 1885107
uuccaaaguuccgugaaau

SEQ ID NO: 2316651 - RNA, 19 nt, Artificial Sequence
  Description of Artificial Sequence: Synthetic oligonucleotide
  Antisense strand to SEQ ID NO: 2316650
auuucacggaacuuuggaa

SEQ ID NO: 2316652 - RNA, 19 nt, Artificial Sequence
  Description of Artificial Sequence: Synthetic oligonucleotide
  Sense strand starting at position 3062 of SEQ ID NO: 1885107
uccaaaguuccgugaaaua

SEQ ID NO: 2316653 - RNA, 19 nt, Artificial Sequence
  Description of Artificial Sequence: Synthetic oligonucleotide
  Antisense strand to SEQ ID NO: 2316652
uauuucacggaacuuugga

SEQ ID NO: 2316654 - RNA, 19 nt, Artificial Sequence
  Description of Artificial Sequence: Synthetic oligonucleotide
  Sense strand starting at position 3067 of SEQ ID NO: 1885107
aguuccgugaaauagaauu

SEQ ID NO: 2316655 - RNA, 19 nt, Artificial Sequence
  Description of Artificial Sequence: Synthetic oligonucleotide
  Antisense strand to SEQ ID NO: 2316654
aauucuauuucacggaacu

SEQ ID NO: 2316656 - RNA, 19 nt, Artificial Sequence
  Description of Artificial Sequence: Synthetic oligonucleotide
  Sense strand starting at position 3095 of SEQ ID NO: 1885107
ugcuuaaugguagaauauu

SEQ ID NO: 2316657 - RNA, 19 nt, Artificial Sequence
  Description of Artificial Sequence: Synthetic oligonucleotide
  Antisense strand to SEQ ID NO: 2316656
aauauucuaccauuaagca

SEQ ID NO: 2316658 - RNA, 19 nt, Artificial Sequence
  Description of Artificial Sequence: Synthetic oligonucleotide
  Sense strand starting at position 3493 of SEQ ID NO: 1885107
agaaccaccuuaguguaau

SEQ ID NO: 2316659 - RNA, 19 nt, Artificial Sequence
  Description of Artificial Sequence: Synthetic oligonucleotide
  Antisense strand to SEQ ID NO: 2316658
auuacacuaaggugguucu

SEQ ID NO: 2316660 - RNA, 19 nt, Artificial Sequence
  Description of Artificial Sequence: Synthetic oligonucleotide
  Sense strand starting at position 3496 of SEQ ID NO: 1885107
accaccuuaguguaaugau

SEQ ID NO: 2316661 - RNA, 19 nt, Artificial Sequence
  Description of Artificial Sequence: Synthetic oligonucleotide
  Antisense strand to SEQ ID NO: 2316660
aucauuacacuaagguggu

SEQ ID NO: 2316662 - RNA, 19 nt, Artificial Sequence
  Description of Artificial Sequence: Synthetic oligonucleotide
  Sense strand starting at position 3513 of SEQ ID NO: 1885107
augauagcucauuguggua

SEQ ID NO: 2316663 - RNA, 19 nt, Artificial Sequence
  Description of Artificial Sequence: Synthetic oligonucleotide
  Antisense strand to SEQ ID NO: 2316662
uaccacaaugagcuaucau

SEQ ID NO: 2316664 - RNA, 19 nt, Artificial Sequence
  Description of Artificial Sequence: Synthetic oligonucleotide
  Sense strand starting at position 3544 of SEQ ID NO: 1885107
ggguuauagucuuauuucu

SEQ ID NO: 2316665 - RNA, 19 nt, Artificial Sequence
  Description of Artificial Sequence: Synthetic oligonucleotide
  Antisense strand to SEQ ID NO: 2316664
agaaauaagacuauaaccc

SEQ ID NO: 2316666 - RNA, 19 nt, Artificial Sequence
  Description of Artificial Sequence: Synthetic oligonucleotide
  Sense strand starting at position 3687 of SEQ ID NO: 1885107
aguauaauagccugugaaa

SEQ ID NO: 2316667 - RNA, 19 nt, Artificial Sequence
  Description of Artificial Sequence: Synthetic oligonucleotide
  Antisense strand to SEQ ID NO: 2316666
uuucacaggcuauuauacu

SEQ ID NO: 2316668 - RNA, 19 nt, Artificial Sequence
  Description of Artificial Sequence: Synthetic oligonucleotide
  Sense strand starting at position 3792 of SEQ ID NO: 1885107
uuuguaaacugggagauga

SEQ ID NO: 2316669 - RNA, 19 nt, Artificial Sequence
  Description of Artificial Sequence: Synthetic oligonucleotide
  Antisense strand to SEQ ID NO: 2316668
ucaucucccaguuuacaaa

SEQ ID NO: 2316670 - RNA, 19 nt, Artificial Sequence
  Description of Artificial Sequence: Synthetic oligonucleotide
  Sense strand starting at position 3813 of SEQ ID NO: 1885107
uuuccaguaguguggcaau

SEQ ID NO: 2316671 - RNA, 19 nt, Artificial Sequence
  Description of Artificial Sequence: Synthetic oligonucleotide
  Antisense strand to SEQ ID NO: 2316670
auugccacacuacuggaaa

SEQ ID NO: 2316672 - RNA, 19 nt, Artificial Sequence
  Description of Artificial Sequence: Synthetic oligonucleotide
  Sense strand starting at position 3869 of SEQ ID NO: 1885107
ugguccuauuuacaaagua

SEQ ID NO: 2316673 - RNA, 19 nt, Artificial Sequence
  Description of Artificial Sequence: Synthetic oligonucleotide
  Antisense strand to SEQ ID NO: 2316672
uacuuuguaaauaggacca

SEQ ID NO: 2316674 - RNA, 19 nt, Artificial Sequence
  Description of Artificial Sequence: Synthetic oligonucleotide
  Sense strand starting at position 1 of SEQ ID NO: 1885106
ucaagaucucguuauugua

SEQ ID NO: 2316675 - RNA, 19 nt, Artificial Sequence
  Description of Artificial Sequence: Synthetic oligonucleotide
  Antisense strand to SEQ ID NO: 2316674
uacaauaacgagaucuuga

SEQ ID NO: 2316676 - RNA, 19 nt, Artificial Sequence
  Description of Artificial Sequence: Synthetic oligonucleotide
  Sense strand starting at position 3 of SEQ ID NO: 1885106
aagaucucguuauuguaaa

SEQ ID NO: 2316677 - RNA, 19 nt, Artificial Sequence
  Description of Artificial Sequence: Synthetic oligonucleotide
  Antisense strand to SEQ ID NO: 2316676
uuuacaauaacgagaucuu

SEQ ID NO: 2316678 - RNA, 19 nt, Artificial Sequence
  Description of Artificial Sequence: Synthetic oligonucleotide
  Sense strand starting at position 429 of SEQ ID NO: 1885106
gaaagaaccuugucugcca

SEQ ID NO: 2316679 - RNA, 19 nt, Artificial Sequence
  Description of Artificial Sequence: Synthetic oligonucleotide
  Antisense strand to SEQ ID NO: 2316678
uggcagacaagguucuuuc

SEQ ID NO: 2316680 - RNA, 19 nt, Artificial Sequence
  Description of Artificial Sequence: Synthetic oligonucleotide
  Sense strand starting at position 492 of SEQ ID NO: 1885106
caacuagacugguugacua

SEQ ID NO: 2316681 - RNA, 19 nt, Artificial Sequence
  Description of Artificial Sequence: Synthetic oligonucleotide
  Antisense strand to SEQ ID NO: 2316680
uagucaaccagucuaguug

SEQ ID NO: 2316682 - RNA, 19 nt, Artificial Sequence
  Description of Artificial Sequence: Synthetic oligonucleotide
  Sense strand starting at position 500 of SEQ ID NO: 1885106
cugguugacuaagucaaua

SEQ ID NO: 2316683 - RNA, 19 nt, Artificial Sequence
  Description of Artificial Sequence: Synthetic oligonucleotide
  Antisense strand to SEQ ID NO: 2316682
uauugacuuagucaaccag

SEQ ID NO: 2316684 - RNA, 19 nt, Artificial Sequence
  Description of Artificial Sequence: Synthetic oligonucleotide
  Sense strand starting at position 524 of SEQ ID NO: 1885106
agcacuacggucuauuaua

SEQ ID NO: 2316685 - RNA, 19 nt, Artificial Sequence
  Description of Artificial Sequence: Synthetic oligonucleotide
  Antisense strand to SEQ ID NO: 2316684
uauaauagaccguagugcu

SEQ ID NO: 2316686 - RNA, 19 nt, Artificial Sequence
  Description of Artificial Sequence: Synthetic oligonucleotide
  Sense strand starting at position 596 of SEQ ID NO: 1885106
guucauggugccgacauuu

SEQ ID NO: 2316687 - RNA, 19 nt, Artificial Sequence
  Description of Artificial Sequence: Synthetic oligonucleotide
  Antisense strand to SEQ ID NO: 2316686
aaaugucggcaccaugaac

SEQ ID NO: 2316688 - RNA, 19 nt, Artificial Sequence
  Description of Artificial Sequence: Synthetic oligonucleotide
  Sense strand starting at position 1447 of SEQ ID NO: 1885106
aguggagauuugggucaca

SEQ ID NO: 2316689 - RNA, 19 nt, Artificial Sequence
  Description of Artificial Sequence: Synthetic oligonucleotide
  Antisense strand to SEQ ID NO: 2316688
ugugacccaaaucuccacu

SEQ ID NO: 2316690 - RNA, 19 nt, Artificial Sequence
  Description of Artificial Sequence: Synthetic oligonucleotide
  Sense strand starting at position 1519 of SEQ ID NO: 1885106
uggccuucucacugcuuaa

SEQ ID NO: 2316691 - RNA, 19 nt, Artificial Sequence
  Description of Artificial Sequence: Synthetic oligonucleotide
  Antisense strand to SEQ ID NO: 2316690
uuaagcagugagaaggcca

SEQ ID NO: 2316692 - RNA, 19 nt, Artificial Sequence
  Description of Artificial Sequence: Synthetic oligonucleotide
  Sense strand starting at position 1636 of SEQ ID NO: 1885106
gaugaagacugagauugua

SEQ ID NO: 2316693 - RNA, 19 nt, Artificial Sequence
  Description of Artificial Sequence: Synthetic oligonucleotide
  Antisense strand to SEQ ID NO: 2316692
uacaaucucagucuucauc

SEQ ID NO: 2316694 - RNA, 19 nt, Artificial Sequence
  Description of Artificial Sequence: Synthetic oligonucleotide
  Sense strand starting at position 1652 of SEQ ID NO: 1885106
guacuacauugagucaaag

SEQ ID NO: 2316695 - RNA, 19 nt, Artificial Sequence
  Description of Artificial Sequence: Synthetic oligonucleotide
  Antisense strand to SEQ ID NO: 2316694
cuuugacucaauguaguac

SEQ ID NO: 2316696 - RNA, 19 nt, Artificial Sequence
  Description of Artificial Sequence: Synthetic oligonucleotide
  Sense strand starting at position 2023 of SEQ ID NO: 1885106
cugugaacucuaugcagau

SEQ ID NO: 2316697 - RNA, 19 nt, Artificial Sequence
  Description of Artificial Sequence: Synthetic oligonucleotide
  Antisense strand to SEQ ID NO: 2316696
aucugcauagaguucacag

SEQ ID NO: 2316698 - RNA, 19 nt, Artificial Sequence
  Description of Artificial Sequence: Synthetic oligonucleotide
  Sense strand starting at position 2024 of SEQ ID NO: 1885106
ugugaacucuaugcagaug

SEQ ID NO: 2316699 - RNA, 19 nt, Artificial Sequence
  Description of Artificial Sequence: Synthetic oligonucleotide
  Antisense strand to SEQ ID NO: 2316698
caucugcauagaguucaca

SEQ ID NO: 2316700 - RNA, 19 nt, Artificial Sequence
  Description of Artificial Sequence: Synthetic oligonucleotide
  Sense strand starting at position 2025 of SEQ ID NO: 1885106
gugaacucuaugcagauga

SEQ ID NO: 2316701 - RNA, 19 nt, Artificial Sequence
  Description of Artificial Sequence: Synthetic oligonucleotide
  Antisense strand to SEQ ID NO: 2316700
ucaucugcauagaguucac

SEQ ID NO: 2316702 - RNA, 19 nt, Artificial Sequence
  Description of Artificial Sequence: Synthetic oligonucleotide
  Sense strand starting at position 2120 of SEQ ID NO: 1885106
uuccaaaguuccgugaaau

SEQ ID NO: 2316703 - RNA, 19 nt, Artificial Sequence
  Description of Artificial Sequence: Synthetic oligonucleotide
  Antisense strand to SEQ ID NO: 2316702
auuucacggaacuuuggaa

SEQ ID NO: 2316704 - RNA, 19 nt, Artificial Sequence
  Description of Artificial Sequence: Synthetic oligonucleotide
  Sense strand starting at position 2121 of SEQ ID NO: 1885106
uccaaaguuccgugaaaua

SEQ ID NO: 2316705 - RNA, 19 nt, Artificial Sequence
  Description of Artificial Sequence: Synthetic oligonucleotide
  Antisense strand to SEQ ID NO: 2316704
uauuucacggaacuuugga

SEQ ID NO: 2316706 - RNA, 19 nt, Artificial Sequence
  Description of Artificial Sequence: Synthetic oligonucleotide
  Sense strand starting at position 2126 of SEQ ID NO: 1885106
aguuccgugaaauagaauu

SEQ ID NO: 2316707 - RNA, 19 nt, Artificial Sequence
  Description of Artificial Sequence: Synthetic oligonucleotide
  Antisense strand to SEQ ID NO: 2316706
aauucuauuucacggaacu

SEQ ID NO: 2316708 - RNA, 19 nt, Artificial Sequence
  Description of Artificial Sequence: Synthetic oligonucleotide
  Sense strand starting at position 2154 of SEQ ID NO: 1885106
ugcuuaaugguagaauauu

SEQ ID NO: 2316709 - RNA, 19 nt, Artificial Sequence
  Description of Artificial Sequence: Synthetic oligonucleotide
  Antisense strand to SEQ ID NO: 2316708
aauauucuaccauuaagca

SEQ ID NO: 2316710 - RNA, 19 nt, Artificial Sequence
  Description of Artificial Sequence: Synthetic oligonucleotide
  Sense strand starting at position 2552 of SEQ ID NO: 1885106
agaaccaccuuaguguaau

SEQ ID NO: 2316711 - RNA, 19 nt, Artificial Sequence
  Description of Artificial Sequence: Synthetic oligonucleotide
  Antisense strand to SEQ ID NO: 2316710
auuacacuaaggugguucu

SEQ ID NO: 2316712 - RNA, 19 nt, Artificial Sequence
  Description of Artificial Sequence: Synthetic oligonucleotide
  Sense strand starting at position 2555 of SEQ ID NO: 1885106
accaccuuaguguaaugau

SEQ ID NO: 2316713 - RNA, 19 nt, Artificial Sequence
  Description of Artificial Sequence: Synthetic oligonucleotide
  Antisense strand to SEQ ID NO: 2316712
aucauuacacuaagguggu

SEQ ID NO: 2316714 - RNA, 19 nt, Artificial Sequence
  Description of Artificial Sequence: Synthetic oligonucleotide
  Sense strand starting at position 2572 of SEQ ID NO: 1885106
augauagcucauuguggua

SEQ ID NO: 2316715 - RNA, 19 nt, Artificial Sequence
  Description of Artificial Sequence: Synthetic oligonucleotide
  Antisense strand to SEQ ID NO: 2316714
uaccacaaugagcuaucau

SEQ ID NO: 2316716 - RNA, 19 nt, Artificial Sequence
  Description of Artificial Sequence: Synthetic oligonucleotide
  Sense strand starting at position 2603 of SEQ ID NO: 1885106
ggguuauagucuuauuucu

SEQ ID NO: 2316717 - RNA, 19 nt, Artificial Sequence
  Description of Artificial Sequence: Synthetic oligonucleotide
  Antisense strand to SEQ ID NO: 2316716
agaaauaagacuauaaccc

SEQ ID NO: 2316718 - RNA, 19 nt, Artificial Sequence
  Description of Artificial Sequence: Synthetic oligonucleotide
  Sense strand starting at position 2746 of SEQ ID NO: 1885106
aguauaauagccugugaaa

SEQ ID NO: 2316719 - RNA, 19 nt, Artificial Sequence
  Description of Artificial Sequence: Synthetic oligonucleotide
  Antisense strand to SEQ ID NO: 2316718
uuucacaggcuauuauacu

SEQ ID NO: 2316720 - RNA, 19 nt, Artificial Sequence
  Description of Artificial Sequence: Synthetic oligonucleotide
  Sense strand starting at position 2928 of SEQ ID NO: 1885106
ugguccuauuuacaaagua

SEQ ID NO: 2316721 - RNA, 19 nt, Artificial Sequence
  Description of Artificial Sequence: Synthetic oligonucleotide
  Antisense strand to SEQ ID NO: 2316720
uacuuuguaaauaggacca

SEQ ID NO: 2316722 - RNA, 19 nt, Artificial Sequence
  Description of Artificial Sequence: Synthetic oligonucleotide
  Sense strand starting at position 3151 of SEQ ID NO: 1885106
agacgugggacucgcuuaa

SEQ ID NO: 2316723 - RNA, 19 nt, Artificial Sequence
  Description of Artificial Sequence: Synthetic oligonucleotide
  Antisense strand to SEQ ID NO: 2316722
uuaagcgagucccacgucu

SEQ ID NO: 2316724 - RNA, 19 nt, Artificial Sequence
  Description of Artificial Sequence: Synthetic oligonucleotide
  Sense strand starting at position 3276 of SEQ ID NO: 1885106
auccuuugucuugaaugga

SEQ ID NO: 2316725 - RNA, 19 nt, Artificial Sequence
  Description of Artificial Sequence: Synthetic oligonucleotide
  Antisense strand to SEQ ID NO: 2316724
uccauucaagacaaaggau

SEQ ID NO: 2316726 - RNA, 19 nt, Artificial Sequence
  Description of Artificial Sequence: Synthetic oligonucleotide
  Sense strand starting at position 3279 of SEQ ID NO: 1885106
cuuugucuugaauggauua

SEQ ID NO: 2316727 - RNA, 19 nt, Artificial Sequence
  Description of Artificial Sequence: Synthetic oligonucleotide
  Antisense strand to SEQ ID NO: 2316726
uaauccauucaagacaaag

SEQ ID NO: 2316728 - RNA, 19 nt, Artificial Sequence
  Description of Artificial Sequence: Synthetic oligonucleotide
  Sense strand starting at position 3289 of SEQ ID NO: 1885106
aauggauuaugggaucaga

SEQ ID NO: 2316729 - RNA, 19 nt, Artificial Sequence
  Description of Artificial Sequence: Synthetic oligonucleotide
  Antisense strand to SEQ ID NO: 2316728
ucugaucccauaauccauu

SEQ ID NO: 2316730 - RNA, 19 nt, Artificial Sequence
  Description of Artificial Sequence: Synthetic oligonucleotide
  Sense strand starting at position 3367 of SEQ ID NO: 1885106
ccauacagucauugcaagu

SEQ ID NO: 2316731 - RNA, 19 nt, Artificial Sequence
  Description of Artificial Sequence: Synthetic oligonucleotide
  Antisense strand to SEQ ID NO: 2316730
acuugcaaugacuguaugg

SEQ ID NO: 2316732 - RNA, 19 nt, Artificial Sequence
  Description of Artificial Sequence: Synthetic oligonucleotide
  Sense strand starting at position 3476 of SEQ ID NO: 1885106
caaggagaucuuugucuua

SEQ ID NO: 2316733 - RNA, 19 nt, Artificial Sequence
  Description of Artificial Sequence: Synthetic oligonucleotide
  Antisense strand to SEQ ID NO: 2316732
uaagacaaagaucuccuug

SEQ ID NO: 2316734 - RNA, 19 nt, Artificial Sequence
  Description of Artificial Sequence: Synthetic oligonucleotide
  Sense strand starting at position 3478 of SEQ ID NO: 1885106
aggagaucuuugucuuauc

SEQ ID NO: 2316735 - RNA, 19 nt, Artificial Sequence
  Description of Artificial Sequence: Synthetic oligonucleotide
  Antisense strand to SEQ ID NO: 2316734
gauaagacaaagaucuccu

SEQ ID NO: 2316736 - RNA, 19 nt, Artificial Sequence
  Description of Artificial Sequence: Synthetic oligonucleotide
  Sense strand starting at position 3479 of SEQ ID NO: 1885106
ggagaucuuugucuuaucu

SEQ ID NO: 2316737 - RNA, 19 nt, Artificial Sequence
  Description of Artificial Sequence: Synthetic oligonucleotide
  Antisense strand to SEQ ID NO: 2316736
agauaagacaaagaucucc

SEQ ID NO: 2316738 - RNA, 19 nt, Artificial Sequence
  Description of Artificial Sequence: Synthetic oligonucleotide
  Sense strand starting at position 3528 of SEQ ID NO: 1885106
ugcuucugucugcuguaau

SEQ ID NO: 2316739 - RNA, 19 nt, Artificial Sequence
  Description of Artificial Sequence: Synthetic oligonucleotide
  Antisense strand to SEQ ID NO: 2316738
auuacagcagacagaagca

SEQ ID NO: 2316740 - RNA, 19 nt, Artificial Sequence
  Description of Artificial Sequence: Synthetic oligonucleotide
  Sense strand starting at position 3611 of SEQ ID NO: 1885106
gaauguuuaccugggccuu

SEQ ID NO: 2316741 - RNA, 19 nt, Artificial Sequence
  Description of Artificial Sequence: Synthetic oligonucleotide
  Antisense strand to SEQ ID NO: 2316740
aaggcccagguaaacauuc

SEQ ID NO: 2316742 - RNA, 19 nt, Artificial Sequence
  Description of Artificial Sequence: Synthetic oligonucleotide
  Sense strand starting at position 3635 of SEQ ID NO: 1885106
ucauguuccuggucauaua

SEQ ID NO: 2316743 - RNA, 19 nt, Artificial Sequence
  Description of Artificial Sequence: Synthetic oligonucleotide
  Antisense strand to SEQ ID NO: 2316742
uauaugaccaggaacauga

SEQ ID NO: 2316744 - RNA, 19 nt, Artificial Sequence
  Description of Artificial Sequence: Synthetic oligonucleotide
  Sense strand starting at position 3657 of SEQ ID NO: 1885106
aggagcaccuuucucuaaa

SEQ ID NO: 2316745 - RNA, 19 nt, Artificial Sequence
  Description of Artificial Sequence: Synthetic oligonucleotide
  Antisense strand to SEQ ID NO: 2316744
uuuagagaaaggugcuccu

SEQ ID NO: 2316746 - RNA, 19 nt, Artificial Sequence
  Description of Artificial Sequence: Synthetic oligonucleotide
  Sense strand starting at position 3732 of SEQ ID NO: 1885106
aggguccacacuugugauu

SEQ ID NO: 2316747 - RNA, 19 nt, Artificial Sequence
  Description of Artificial Sequence: Synthetic oligonucleotide
  Antisense strand to SEQ ID NO: 2316746
aaucacaaguguggacccu

SEQ ID NO: 2316748 - RNA, 19 nt, Artificial Sequence
  Description of Artificial Sequence: Synthetic oligonucleotide
  Sense strand starting at position 3744 of SEQ ID NO: 1885106
ugugauucucaauggagag

SEQ ID NO: 2316749 - RNA, 19 nt, Artificial Sequence
  Description of Artificial Sequence: Synthetic oligonucleotide
  Antisense strand to SEQ ID NO: 2316748
cucuccauugagaaucaca

SEQ ID NO: 2316750 - RNA, 19 nt, Artificial Sequence
  Description of Artificial Sequence: Synthetic oligonucleotide
  Sense strand starting at position 3745 of SEQ ID NO: 1885106
gugauucucaauggagagu

SEQ ID NO: 2316751 - RNA, 19 nt, Artificial Sequence
  Description of Artificial Sequence: Synthetic oligonucleotide
  Antisense strand to SEQ ID NO: 2316750
acucuccauugagaaucac

SEQ ID NO: 2316752 - RNA, 19 nt, Artificial Sequence
  Description of Artificial Sequence: Synthetic oligonucleotide
  Sense strand starting at position 3894 of SEQ ID NO: 1885106
acaggagucuaaucaagca

SEQ ID NO: 2316753 - RNA, 19 nt, Artificial Sequence
  Description of Artificial Sequence: Synthetic oligonucleotide
  Antisense strand to SEQ ID NO: 2316752
ugcuugauuagacuccugu

SEQ ID NO: 2316754 - RNA, 19 nt, Artificial Sequence
  Description of Artificial Sequence: Synthetic oligonucleotide
  Sense strand starting at position 155 of SEQ ID NO: 1885108
aaaggugcugcacauuaua

SEQ ID NO: 2316755 - RNA, 19 nt, Artificial Sequence
  Description of Artificial Sequence: Synthetic oligonucleotide
  Antisense strand to SEQ ID NO: 2316754
uauaaugugcagcaccuuu

SEQ ID NO: 2316756 - RNA, 19 nt, Artificial Sequence
  Description of Artificial Sequence: Synthetic oligonucleotide
  Sense strand starting at position 337 of SEQ ID NO: 1885108
acagauuggugguuucuua

SEQ ID NO: 2316757 - RNA, 19 nt, Artificial Sequence
  Description of Artificial Sequence: Synthetic oligonucleotide
  Antisense strand to SEQ ID NO: 2316756
uaagaaaccaccaaucugu

SEQ ID NO: 2316758 - RNA, 19 nt, Artificial Sequence
  Description of Artificial Sequence: Synthetic oligonucleotide
  Sense strand starting at position 341 of SEQ ID NO: 1885108
auuggugguuucuuacaaa

SEQ ID NO: 2316759 - RNA, 19 nt, Artificial Sequence
  Description of Artificial Sequence: Synthetic oligonucleotide
  Antisense strand to SEQ ID NO: 2316758
uuuguaagaaaccaccaau

SEQ ID NO: 2316760 - RNA, 19 nt, Artificial Sequence
  Description of Artificial Sequence: Synthetic oligonucleotide
  Sense strand starting at position 496 of SEQ ID NO: 1885108
gggcaaucaagacguccuu

SEQ ID NO: 2316761 - RNA, 19 nt, Artificial Sequence
  Description of Artificial Sequence: Synthetic oligonucleotide
  Antisense strand to SEQ ID NO: 2316760
aaggacgucuugauugccc

SEQ ID NO: 2316762 - RNA, 19 nt, Artificial Sequence
  Description of Artificial Sequence: Synthetic oligonucleotide
  Sense strand starting at position 842 of SEQ ID NO: 1885108
ggagaaaccucguuucuuu

SEQ ID NO: 2316763 - RNA, 19 nt, Artificial Sequence
  Description of Artificial Sequence: Synthetic oligonucleotide
  Antisense strand to SEQ ID NO: 2316762
aaagaaacgagguuucucc

SEQ ID NO: 2316764 - RNA, 19 nt, Artificial Sequence
  Description of Artificial Sequence: Synthetic oligonucleotide
  Sense strand starting at position 1401 of SEQ ID NO: 1885108
gcaguucgacgacaagacu

SEQ ID NO: 2316765 - RNA, 19 nt, Artificial Sequence
  Description of Artificial Sequence: Synthetic oligonucleotide
  Antisense strand to SEQ ID NO: 2316764
agucuugucgucgaacugc

SEQ ID NO: 2316766 - RNA, 19 nt, Artificial Sequence
  Description of Artificial Sequence: Synthetic oligonucleotide
  Sense strand starting at position 1413 of SEQ ID NO: 1885108
caagacucuggagguuauu

SEQ ID NO: 2316767 - RNA, 19 nt, Artificial Sequence
  Description of Artificial Sequence: Synthetic oligonucleotide
  Antisense strand to SEQ ID NO: 2316766
aauaaccuccagagucuug

SEQ ID NO: 2316768 - RNA, 19 nt, Artificial Sequence
  Description of Artificial Sequence: Synthetic oligonucleotide
  Sense strand starting at position 1670 of SEQ ID NO: 1885108
accugcagucaaugucaga

SEQ ID NO: 2316769 - RNA, 19 nt, Artificial Sequence
  Description of Artificial Sequence: Synthetic oligonucleotide
  Antisense strand to SEQ ID NO: 2316768
ucugacauugacugcaggu

SEQ ID NO: 2316770 - RNA, 19 nt, Artificial Sequence
  Description of Artificial Sequence: Synthetic oligonucleotide
  Sense strand starting at position 1703 of SEQ ID NO: 1885108
agcugagucccacaagacu

SEQ ID NO: 2316771 - RNA, 19 nt, Artificial Sequence
  Description of Artificial Sequence: Synthetic oligonucleotide
  Antisense strand to SEQ ID NO: 2316770
agucuugugggacucagcu

SEQ ID NO: 2316772 - RNA, 19 nt, Artificial Sequence
  Description of Artificial Sequence: Synthetic oligonucleotide
  Sense strand starting at position 1730 of SEQ ID NO: 1885108
ccagaugccaguugaaagu

SEQ ID NO: 2316773 - RNA, 19 nt, Artificial Sequence
  Description of Artificial Sequence: Synthetic oligonucleotide
  Antisense strand to SEQ ID NO: 2316772
acuuucaacuggcaucugg

SEQ ID NO: 2316774 - RNA, 19 nt, Artificial Sequence
  Description of Artificial Sequence: Synthetic oligonucleotide
  Sense strand starting at position 1791 of SEQ ID NO: 1885108
augaccuucuccuugaguu

SEQ ID NO: 2316775 - RNA, 19 nt, Artificial Sequence
  Description of Artificial Sequence: Synthetic oligonucleotide
  Antisense strand to SEQ ID NO: 2316774
aacucaaggagaaggucau

SEQ ID NO: 2316776 - RNA, 19 nt, Artificial Sequence
  Description of Artificial Sequence: Synthetic oligonucleotide
  Sense strand starting at position 1792 of SEQ ID NO: 1885108
ugaccuucuccuugaguuc

SEQ ID NO: 2316777 - RNA, 19 nt, Artificial Sequence
  Description of Artificial Sequence: Synthetic oligonucleotide
  Antisense strand to SEQ ID NO: 2316776
gaacucaaggagaagguca

SEQ ID NO: 2316778 - RNA, 19 nt, Artificial Sequence
  Description of Artificial Sequence: Synthetic oligonucleotide
  Sense strand starting at position 1804 of SEQ ID NO: 1885108
ugaguuccaucauuugcua

SEQ ID NO: 2316779 - RNA, 19 nt, Artificial Sequence
  Description of Artificial Sequence: Synthetic oligonucleotide
  Antisense strand to SEQ ID NO: 2316778
uagcaaaugauggaacuca

SEQ ID NO: 2316780 - RNA, 19 nt, Artificial Sequence
  Description of Artificial Sequence: Synthetic oligonucleotide
  Sense strand starting at position 1809 of SEQ ID NO: 1885108
uccaucauuugcuagaaug

SEQ ID NO: 2316781 - RNA, 19 nt, Artificial Sequence
  Description of Artificial Sequence: Synthetic oligonucleotide
  Antisense strand to SEQ ID NO: 2316780
cauucuagcaaaugaugga

SEQ ID NO: 2316782 - RNA, 19 nt, Artificial Sequence
  Description of Artificial Sequence: Synthetic oligonucleotide
  Sense strand starting at position 2101 of SEQ ID NO: 1885108
ccucuuaucccuuggucuu

SEQ ID NO: 2316783 - RNA, 19 nt, Artificial Sequence
  Description of Artificial Sequence: Synthetic oligonucleotide
  Antisense strand to SEQ ID NO: 2316782
aagaccaagggauaagagg

SEQ ID NO: 2316784 - RNA, 19 nt, Artificial Sequence
  Description of Artificial Sequence: Synthetic oligonucleotide
  Sense strand starting at position 2102 of SEQ ID NO: 1885108
cucuuaucccuuggucuuu

SEQ ID NO: 2316785 - RNA, 19 nt, Artificial Sequence
  Description of Artificial Sequence: Synthetic oligonucleotide
  Antisense strand to SEQ ID NO: 2316784
aaagaccaagggauaagag

SEQ ID NO: 2316786 - RNA, 19 nt, Artificial Sequence
  Description of Artificial Sequence: Synthetic oligonucleotide
  Sense strand starting at position 2124 of SEQ ID NO: 1885108
ugagcaguuucauccggaa

SEQ ID NO: 2316787 - RNA, 19 nt, Artificial Sequence
  Description of Artificial Sequence: Synthetic oligonucleotide
  Antisense strand to SEQ ID NO: 2316786
uuccggaugaaacugcuca

SEQ ID NO: 2316788 - RNA, 19 nt, Artificial Sequence
  Description of Artificial Sequence: Synthetic oligonucleotide
  Sense strand starting at position 2157 of SEQ ID NO: 1885108
uacgucaugcauuaacgua

SEQ ID NO: 2316789 - RNA, 19 nt, Artificial Sequence
  Description of Artificial Sequence: Synthetic oligonucleotide
  Antisense strand to SEQ ID NO: 2316788
uacguuaaugcaugacgua

SEQ ID NO: 2316790 - RNA, 19 nt, Artificial Sequence
  Description of Artificial Sequence: Synthetic oligonucleotide
  Sense strand starting at position 2184 of SEQ ID NO: 1885108
ucaggugugacugaugguu

SEQ ID NO: 2316791 - RNA, 19 nt, Artificial Sequence
  Description of Artificial Sequence: Synthetic oligonucleotide
  Antisense strand to SEQ ID NO: 2316790
aaccaucagucacaccuga

SEQ ID NO: 2316792 - RNA, 19 nt, Artificial Sequence
  Description of Artificial Sequence: Synthetic oligonucleotide
  Sense strand starting at position 2190 of SEQ ID NO: 1885108
gugacugaugguuacgcaa

SEQ ID NO: 2316793 - RNA, 19 nt, Artificial Sequence
  Description of Artificial Sequence: Synthetic oligonucleotide
  Antisense strand to SEQ ID NO: 2316792
uugcguaaccaucagucac

SEQ ID NO: 2316794 - RNA, 19 nt, Artificial Sequence
  Description of Artificial Sequence: Synthetic oligonucleotide
  Sense strand starting at position 2270 of SEQ ID NO: 1885108
uuaagaucucugugacagg

SEQ ID NO: 2316795 - RNA, 19 nt, Artificial Sequence
  Description of Artificial Sequence: Synthetic oligonucleotide
  Antisense strand to SEQ ID NO: 2316794
ccugucacagagaucuuaa

SEQ ID NO: 2316796 - RNA, 19 nt, Artificial Sequence
  Description of Artificial Sequence: Synthetic oligonucleotide
  Sense strand starting at position 2353 of SEQ ID NO: 1885108
guacaauuguuuguuuaca

SEQ ID NO: 2316797 - RNA, 19 nt, Artificial Sequence
  Description of Artificial Sequence: Synthetic oligonucleotide
  Antisense strand to SEQ ID NO: 2316796
uguaaacaaacaauuguac

SEQ ID NO: 2316798 - RNA, 19 nt, Artificial Sequence
  Description of Artificial Sequence: Synthetic oligonucleotide
  Sense strand starting at position 2382 of SEQ ID NO: 1885108
cccucaaagcacugguaua

SEQ ID NO: 2316799 - RNA, 19 nt, Artificial Sequence
  Description of Artificial Sequence: Synthetic oligonucleotide
  Antisense strand to SEQ ID NO: 2316798
uauaccagugcuuugaggg

SEQ ID NO: 2316800 - RNA, 19 nt, Artificial Sequence
  Description of Artificial Sequence: Synthetic oligonucleotide
  Sense strand starting at position 2504 of SEQ ID NO: 1885108
uaagaauggugucccuaug

SEQ ID NO: 2316801 - RNA, 19 nt, Artificial Sequence
  Description of Artificial Sequence: Synthetic oligonucleotide
  Antisense strand to SEQ ID NO: 2316800
cauagggacaccauucuua

SEQ ID NO: 2316802 - RNA, 19 nt, Artificial Sequence
  Description of Artificial Sequence: Synthetic oligonucleotide
  Sense strand starting at position 2514 of SEQ ID NO: 1885108
gucccuaugcuauggugaa

SEQ ID NO: 2316803 - RNA, 19 nt, Artificial Sequence
  Description of Artificial Sequence: Synthetic oligonucleotide
  Antisense strand to SEQ ID NO: 2316802
uucaccauagcauagggac

SEQ ID NO: 2316804 - RNA, 19 nt, Artificial Sequence
  Description of Artificial Sequence: Synthetic oligonucleotide
  Sense strand starting at position 2564 of SEQ ID NO: 1885108
gugguauggaccuauaguc

SEQ ID NO: 2316805 - RNA, 19 nt, Artificial Sequence
  Description of Artificial Sequence: Synthetic oligonucleotide
  Antisense strand to SEQ ID NO: 2316804
gacuauagguccauaccac

SEQ ID NO: 2316806 - RNA, 19 nt, Artificial Sequence
  Description of Artificial Sequence: Synthetic oligonucleotide
  Sense strand starting at position 2761 of SEQ ID NO: 1885108
guuuguuuccuuuagaugg

SEQ ID NO: 2316807 - RNA, 19 nt, Artificial Sequence
  Description of Artificial Sequence: Synthetic oligonucleotide
  Antisense strand to SEQ ID NO: 2316806
ccaucuaaaggaaacaaac

SEQ ID NO: 2316808 - RNA, 19 nt, Artificial Sequence
  Description of Artificial Sequence: Synthetic oligonucleotide
  Sense strand starting at position 2766 of SEQ ID NO: 1885108
uuuccuuuagauggaucuu

SEQ ID NO: 2316809 - RNA, 19 nt, Artificial Sequence
  Description of Artificial Sequence: Synthetic oligonucleotide
  Antisense strand to SEQ ID NO: 2316808
aagauccaucuaaaggaaa

SEQ ID NO: 2316810 - RNA, 19 nt, Artificial Sequence
  Description of Artificial Sequence: Synthetic oligonucleotide
  Sense strand starting at position 2811 of SEQ ID NO: 1885108
gaagaccuuuccguaauag

SEQ ID NO: 2316811 - RNA, 19 nt, Artificial Sequence
  Description of Artificial Sequence: Synthetic oligonucleotide
  Antisense strand to SEQ ID NO: 2316810
cuauuacggaaaggucuuc

SEQ ID NO: 2316812 - RNA, 19 nt, Artificial Sequence
  Description of Artificial Sequence: Synthetic oligonucleotide
  Sense strand starting at position 2812 of SEQ ID NO: 1885108
aagaccuuuccguaauaga

SEQ ID NO: 2316813 - RNA, 19 nt, Artificial Sequence
  Description of Artificial Sequence: Synthetic oligonucleotide
  Antisense strand to SEQ ID NO: 2316812
ucuauuacggaaaggucuu

SEQ ID NO: 2316814 - RNA, 19 nt, Artificial Sequence
  Description of Artificial Sequence: Synthetic oligonucleotide
  Sense strand starting at position 2819 of SEQ ID NO: 1885108
uuccguaauagaugaaggu

SEQ ID NO: 2316815 - RNA, 19 nt, Artificial Sequence
  Description of Artificial Sequence: Synthetic oligonucleotide
  Antisense strand to SEQ ID NO: 2316814
accuucaucuauuacggaa

SEQ ID NO: 2316816 - RNA, 19 nt, Artificial Sequence
  Description of Artificial Sequence: Synthetic oligonucleotide
  Sense strand starting at position 2902 of SEQ ID NO: 1885108
ucaggaagaucucuagcga

SEQ ID NO: 2316817 - RNA, 19 nt, Artificial Sequence
  Description of Artificial Sequence: Synthetic oligonucleotide
  Antisense strand to SEQ ID NO: 2316816
ucgcuagagaucuuccuga

SEQ ID NO: 2316818 - RNA, 19 nt, Artificial Sequence
  Description of Artificial Sequence: Synthetic oligonucleotide
  Sense strand starting at position 3160 of SEQ ID NO: 1885108
ggugacugguugcccaauu

SEQ ID NO: 2316819 - RNA, 19 nt, Artificial Sequence
  Description of Artificial Sequence: Synthetic oligonucleotide
  Antisense strand to SEQ ID NO: 2316818
aauugggcaaccagucacc

SEQ ID NO: 2316820 - RNA, 19 nt, Artificial Sequence
  Description of Artificial Sequence: Synthetic oligonucleotide
  Sense strand starting at position 3161 of SEQ ID NO: 1885108
gugacugguugcccaauuu

SEQ ID NO: 2316821 - RNA, 19 nt, Artificial Sequence
  Description of Artificial Sequence: Synthetic oligonucleotide
  Antisense strand to SEQ ID NO: 2316820
aaauugggcaaccagucac

SEQ ID NO: 2316822 - RNA, 19 nt, Artificial Sequence
  Description of Artificial Sequence: Synthetic oligonucleotide
  Sense strand starting at position 3190 of SEQ ID NO: 1885108
ucuugaugcuaugcuaaau

SEQ ID NO: 2316823 - RNA, 19 nt, Artificial Sequence
  Description of Artificial Sequence: Synthetic oligonucleotide
  Antisense strand to SEQ ID NO: 2316822
auuuagcauagcaucaaga

SEQ ID NO: 2316824 - RNA, 19 nt, Artificial Sequence
  Description of Artificial Sequence: Synthetic oligonucleotide
  Sense strand starting at position 3514 of SEQ ID NO: 1885108
uaaggcguggcuuauuuau

SEQ ID NO: 2316825 - RNA, 19 nt, Artificial Sequence
  Description of Artificial Sequence: Synthetic oligonucleotide
  Antisense strand to SEQ ID NO: 2316824
auaaauaagccacgccuua

SEQ ID NO: 2316826 - RNA, 19 nt, Artificial Sequence
  Description of Artificial Sequence: Synthetic oligonucleotide
  Sense strand starting at position 3570 of SEQ ID NO: 1885108
uguuguuauggcguuugua

SEQ ID NO: 2316827 - RNA, 19 nt, Artificial Sequence
  Description of Artificial Sequence: Synthetic oligonucleotide
  Antisense strand to SEQ ID NO: 2316826
uacaaacgccauaacaaca

SEQ ID NO: 2316828 - RNA, 19 nt, Artificial Sequence
  Description of Artificial Sequence: Synthetic oligonucleotide
  Sense strand starting at position 3571 of SEQ ID NO: 1885108
guuguuauggcguuuguaa

SEQ ID NO: 2316829 - RNA, 19 nt, Artificial Sequence
  Description of Artificial Sequence: Synthetic oligonucleotide
  Antisense strand to SEQ ID NO: 2316828
uuacaaacgccauaacaac

SEQ ID NO: 2316830 - RNA, 19 nt, Artificial Sequence
  Description of Artificial Sequence: Synthetic oligonucleotide
  Sense strand starting at position 3779 of SEQ ID NO: 1885108
aauguagacccguagguuu

SEQ ID NO: 2316831 - RNA, 19 nt, Artificial Sequence
  Description of Artificial Sequence: Synthetic oligonucleotide
  Antisense strand to SEQ ID NO: 2316830
aaaccuacgggucuacauu

SEQ ID NO: 2316832 - RNA, 19 nt, Artificial Sequence
  Description of Artificial Sequence: Synthetic oligonucleotide
  Sense strand starting at position 3979 of SEQ ID NO: 1885108
gagaauacauaguagauaa

SEQ ID NO: 2316833 - RNA, 19 nt, Artificial Sequence
  Description of Artificial Sequence: Synthetic oligonucleotide
  Antisense strand to SEQ ID NO: 2316832
uuaucuacuauguauucuc

SEQ ID NO: 2316834 - RNA, 19 nt, Artificial Sequence
  Description of Artificial Sequence: Synthetic oligonucleotide
  Sense strand starting at position 153 of SEQ ID NO: 1885109
augcaauugcuugagcuga

SEQ ID NO: 2316835 - RNA, 19 nt, Artificial Sequence
  Description of Artificial Sequence: Synthetic oligonucleotide
  Antisense strand to SEQ ID NO: 2316834
ucagcucaagcaauugcau

SEQ ID NO: 2316836 - RNA, 19 nt, Artificial Sequence
  Description of Artificial Sequence: Synthetic oligonucleotide
  Sense strand starting at position 166 of SEQ ID NO: 1885109
agcugagauaaaugcauga

SEQ ID NO: 2316837 - RNA, 19 nt, Artificial Sequence
  Description of Artificial Sequence: Synthetic oligonucleotide
  Antisense strand to SEQ ID NO: 2316836
ucaugcauuuaucucagcu

SEQ ID NO: 2316838 - RNA, 19 nt, Artificial Sequence
  Description of Artificial Sequence: Synthetic oligonucleotide
  Sense strand starting at position 274 of SEQ ID NO: 1885109
guaagcuagaaugagcaau

SEQ ID NO: 2316839 - RNA, 19 nt, Artificial Sequence
  Description of Artificial Sequence: Synthetic oligonucleotide
  Antisense strand to SEQ ID NO: 2316838
auugcucauucuagcuuac

SEQ ID NO: 2316840 - RNA, 19 nt, Artificial Sequence
  Description of Artificial Sequence: Synthetic oligonucleotide
  Sense strand starting at position 436 of SEQ ID NO: 1885109
ucaggaaauugagcacuau

SEQ ID NO: 2316841 - RNA, 19 nt, Artificial Sequence
  Description of Artificial Sequence: Synthetic oligonucleotide
  Antisense strand to SEQ ID NO: 2316840
auagugcucaauuuccuga

SEQ ID NO: 2316842 - RNA, 19 nt, Artificial Sequence
  Description of Artificial Sequence: Synthetic oligonucleotide
  Sense strand starting at position 552 of SEQ ID NO: 1885109
gauacauaccgaggaguac

SEQ ID NO: 2316843 - RNA, 19 nt, Artificial Sequence
  Description of Artificial Sequence: Synthetic oligonucleotide
  Antisense strand to SEQ ID NO: 2316842
guacuccucgguauguauc

SEQ ID NO: 2316844 - RNA, 19 nt, Artificial Sequence
  Description of Artificial Sequence: Synthetic oligonucleotide
  Sense strand starting at position 563 of SEQ ID NO: 1885109
aggaguacuugucuccaaa

SEQ ID NO: 2316845 - RNA, 19 nt, Artificial Sequence
  Description of Artificial Sequence: Synthetic oligonucleotide
  Antisense strand to SEQ ID NO: 2316844
uuuggagacaaguacuccu

SEQ ID NO: 2316846 - RNA, 19 nt, Artificial Sequence
  Description of Artificial Sequence: Synthetic oligonucleotide
  Sense strand starting at position 566 of SEQ ID NO: 1885109
aguacuugucuccaaauac

SEQ ID NO: 2316847 - RNA, 19 nt, Artificial Sequence
  Description of Artificial Sequence: Synthetic oligonucleotide
  Antisense strand to SEQ ID NO: 2316846
guauuuggagacaaguacu

SEQ ID NO: 2316848 - RNA, 19 nt, Artificial Sequence
  Description of Artificial Sequence: Synthetic oligonucleotide
  Sense strand starting at position 828 of SEQ ID NO: 1885109
agcuaaacauugguugaau

SEQ ID NO: 2316849 - RNA, 19 nt, Artificial Sequence
  Description of Artificial Sequence: Synthetic oligonucleotide
  Antisense strand to SEQ ID NO: 2316848
auucaaccaauguuuagcu

SEQ ID NO: 2316850 - RNA, 19 nt, Artificial Sequence
  Description of Artificial Sequence: Synthetic oligonucleotide
  Sense strand starting at position 829 of SEQ ID NO: 1885109
gcuaaacauugguugaaua

SEQ ID NO: 2316851 - RNA, 19 nt, Artificial Sequence
  Description of Artificial Sequence: Synthetic oligonucleotide
  Antisense strand to SEQ ID NO: 2316850
uauucaaccaauguuuagc

SEQ ID NO: 2316852 - RNA, 19 nt, Artificial Sequence
  Description of Artificial Sequence: Synthetic oligonucleotide
  Sense strand starting at position 849 of SEQ ID NO: 1885109
gugcgauuacaauaauaua

SEQ ID NO: 2316853 - RNA, 19 nt, Artificial Sequence
  Description of Artificial Sequence: Synthetic oligonucleotide
  Antisense strand to SEQ ID NO: 2316852
uauauuauuguaaucgcac

SEQ ID NO: 2316854 - RNA, 19 nt, Artificial Sequence
  Description of Artificial Sequence: Synthetic oligonucleotide
  Sense strand starting at position 860 of SEQ ID NO: 1885109
auaauauaggcaugcuuau

SEQ ID NO: 2316855 - RNA, 19 nt, Artificial Sequence
  Description of Artificial Sequence: Synthetic oligonucleotide
  Antisense strand to SEQ ID NO: 2316854
auaagcaugccuauauuau

SEQ ID NO: 2316856 - RNA, 19 nt, Artificial Sequence
  Description of Artificial Sequence: Synthetic oligonucleotide
  Sense strand starting at position 874 of SEQ ID NO: 1885109
cuuauuggcuccuuuagaa

SEQ ID NO: 2316857 - RNA, 19 nt, Artificial Sequence
  Description of Artificial Sequence: Synthetic oligonucleotide
  Antisense strand to SEQ ID NO: 2316856
uucuaaaggagccaauaag

SEQ ID NO: 2316858 - RNA, 19 nt, Artificial Sequence
  Description of Artificial Sequence: Synthetic oligonucleotide
  Sense strand starting at position 1023 of SEQ ID NO: 1885109
ugaucauugucucuaaaga

SEQ ID NO: 2316859 - RNA, 19 nt, Artificial Sequence
  Description of Artificial Sequence: Synthetic oligonucleotide
  Antisense strand to SEQ ID NO: 2316858
ucuuuagagacaaugauca

SEQ ID NO: 2316860 - RNA, 19 nt, Artificial Sequence
  Description of Artificial Sequence: Synthetic oligonucleotide
  Sense strand starting at position 1355 of SEQ ID NO: 1885109
cuggccgauuuagaauaaa

SEQ ID NO: 2316861 - RNA, 19 nt, Artificial Sequence
  Description of Artificial Sequence: Synthetic oligonucleotide
  Antisense strand to SEQ ID NO: 2316860
uuuauucuaaaucggccag

SEQ ID NO: 2316862 - RNA, 19 nt, Artificial Sequence
  Description of Artificial Sequence: Synthetic oligonucleotide
  Sense strand starting at position 1413 of SEQ ID NO: 1885109
gccacaaucucacucgaaa

SEQ ID NO: 2316863 - RNA, 19 nt, Artificial Sequence
  Description of Artificial Sequence: Synthetic oligonucleotide
  Antisense strand to SEQ ID NO: 2316862
uuucgagugagauuguggc

SEQ ID NO: 2316864 - RNA, 19 nt, Artificial Sequence
  Description of Artificial Sequence: Synthetic oligonucleotide
  Sense strand starting at position 1442 of SEQ ID NO: 1885109
ggugcucauaagcaguaaa

SEQ ID NO: 2316865 - RNA, 19 nt, Artificial Sequence
  Description of Artificial Sequence: Synthetic oligonucleotide
  Antisense strand to SEQ ID NO: 2316864
uuuacugcuuaugagcacc

SEQ ID NO: 2316866 - RNA, 19 nt, Artificial Sequence
  Description of Artificial Sequence: Synthetic oligonucleotide
  Sense strand starting at position 1456 of SEQ ID NO: 1885109
guaaaugccuuuccugaua

SEQ ID NO: 2316867 - RNA, 19 nt, Artificial Sequence
  Description of Artificial Sequence: Synthetic oligonucleotide
  Antisense strand to SEQ ID NO: 2316866
uaucaggaaaggcauuuac

SEQ ID NO: 2316868 - RNA, 19 nt, Artificial Sequence
  Description of Artificial Sequence: Synthetic oligonucleotide
  Sense strand starting at position 1680 of SEQ ID NO: 1885109
cagacuauucccgggaguc

SEQ ID NO: 2316869 - RNA, 19 nt, Artificial Sequence
  Description of Artificial Sequence: Synthetic oligonucleotide
  Antisense strand to SEQ ID NO: 2316868
gacucccgggaauagucug

SEQ ID NO: 2316870 - RNA, 19 nt, Artificial Sequence
  Description of Artificial Sequence: Synthetic oligonucleotide
  Sense strand starting at position 1681 of SEQ ID NO: 1885109
agacuauucccgggaguca

SEQ ID NO: 2316871 - RNA, 19 nt, Artificial Sequence
  Description of Artificial Sequence: Synthetic oligonucleotide
  Antisense strand to SEQ ID NO: 2316870
ugacucccgggaauagucu

SEQ ID NO: 2316872 - RNA, 19 nt, Artificial Sequence
  Description of Artificial Sequence: Synthetic oligonucleotide
  Sense strand starting at position 1682 of SEQ ID NO: 1885109
gacuauucccgggagucac

SEQ ID NO: 2316873 - RNA, 19 nt, Artificial Sequence
  Description of Artificial Sequence: Synthetic oligonucleotide
  Antisense strand to SEQ ID NO: 2316872
gugacucccgggaauaguc

SEQ ID NO: 2316874 - RNA, 19 nt, Artificial Sequence
  Description of Artificial Sequence: Synthetic oligonucleotide
  Sense strand starting at position 1793 of SEQ ID NO: 1885109
gugccuuagcgcuuggcaa

SEQ ID NO: 2316875 - RNA, 19 nt, Artificial Sequence
  Description of Artificial Sequence: Synthetic oligonucleotide
  Antisense strand to SEQ ID NO: 2316874
uugccaagcgcuaaggcac

SEQ ID NO: 2316876 - RNA, 19 nt, Artificial Sequence
  Description of Artificial Sequence: Synthetic oligonucleotide
  Sense strand starting at position 2073 of SEQ ID NO: 1885109
aaagauagcuguuugugga

SEQ ID NO: 2316877 - RNA, 19 nt, Artificial Sequence
  Description of Artificial Sequence: Synthetic oligonucleotide
  Antisense strand to SEQ ID NO: 2316876
uccacaaacagcuaucuuu

SEQ ID NO: 2316878 - RNA, 19 nt, Artificial Sequence
  Description of Artificial Sequence: Synthetic oligonucleotide
  Sense strand starting at position 2095 of SEQ ID NO: 1885109
ugccuuguuccauaccauu

SEQ ID NO: 2316879 - RNA, 19 nt, Artificial Sequence
  Description of Artificial Sequence: Synthetic oligonucleotide
  Antisense strand to SEQ ID NO: 2316878
aaugguauggaacaaggca

SEQ ID NO: 2316880 - RNA, 19 nt, Artificial Sequence
  Description of Artificial Sequence: Synthetic oligonucleotide
  Sense strand starting at position 2238 of SEQ ID NO: 1885109
gguacaugcuccucaauaa

SEQ ID NO: 2316881 - RNA, 19 nt, Artificial Sequence
  Description of Artificial Sequence: Synthetic oligonucleotide
  Antisense strand to SEQ ID NO: 2316880
uuauugaggagcauguacc

SEQ ID NO: 2316882 - RNA, 19 nt, Artificial Sequence
  Description of Artificial Sequence: Synthetic oligonucleotide
  Sense strand starting at position 2239 of SEQ ID NO: 1885109
guacaugcuccucaauaag

SEQ ID NO: 2316883 - RNA, 19 nt, Artificial Sequence
  Description of Artificial Sequence: Synthetic oligonucleotide
  Antisense strand to SEQ ID NO: 2316882
cuuauugaggagcauguac

SEQ ID NO: 2316884 - RNA, 19 nt, Artificial Sequence
  Description of Artificial Sequence: Synthetic oligonucleotide
  Sense strand starting at position 2294 of SEQ ID NO: 1885109
ugaggucagacuggccaua

SEQ ID NO: 2316885 - RNA, 19 nt, Artificial Sequence
  Description of Artificial Sequence: Synthetic oligonucleotide
  Antisense strand to SEQ ID NO: 2316884
uauggccagucugaccuca

SEQ ID NO: 2316886 - RNA, 19 nt, Artificial Sequence
  Description of Artificial Sequence: Synthetic oligonucleotide
  Sense strand starting at position 2347 of SEQ ID NO: 1885109
ccuagcaaccgauaaauga

SEQ ID NO: 2316887 - RNA, 19 nt, Artificial Sequence
  Description of Artificial Sequence: Synthetic oligonucleotide
  Antisense strand to SEQ ID NO: 2316886
ucauuuaucgguugcuagg

SEQ ID NO: 2316888 - RNA, 19 nt, Artificial Sequence
  Description of Artificial Sequence: Synthetic oligonucleotide
  Sense strand starting at position 2764 of SEQ ID NO: 1885109
uuuaaaugucuggacucau

SEQ ID NO: 2316889 - RNA, 19 nt, Artificial Sequence
  Description of Artificial Sequence: Synthetic oligonucleotide
  Antisense strand to SEQ ID NO: 2316888
augaguccagacauuuaaa

SEQ ID NO: 2316890 - RNA, 19 nt, Artificial Sequence
  Description of Artificial Sequence: Synthetic oligonucleotide
  Sense strand starting at position 2839 of SEQ ID NO: 1885109
aaucgauguccuggacuca

SEQ ID NO: 2316891 - RNA, 19 nt, Artificial Sequence
  Description of Artificial Sequence: Synthetic oligonucleotide
  Antisense strand to SEQ ID NO: 2316890
ugaguccaggacaucgauu

SEQ ID NO: 2316892 - RNA, 19 nt, Artificial Sequence
  Description of Artificial Sequence: Synthetic oligonucleotide
  Sense strand starting at position 2840 of SEQ ID NO: 1885109
aucgauguccuggacucau

SEQ ID NO: 2316893 - RNA, 19 nt, Artificial Sequence
  Description of Artificial Sequence: Synthetic oligonucleotide
  Antisense strand to SEQ ID NO: 2316892
augaguccaggacaucgau

SEQ ID NO: 2316894 - RNA, 19 nt, Artificial Sequence
  Description of Artificial Sequence: Synthetic oligonucleotide
  Sense strand starting at position 2873 of SEQ ID NO: 1885109
auucucaucuauguguaca

SEQ ID NO: 2316895 - RNA, 19 nt, Artificial Sequence
  Description of Artificial Sequence: Synthetic oligonucleotide
  Antisense strand to SEQ ID NO: 2316894
uguacacauagaugagaau

SEQ ID NO: 2316896 - RNA, 19 nt, Artificial Sequence
  Description of Artificial Sequence: Synthetic oligonucleotide
  Sense strand starting at position 3010 of SEQ ID NO: 1885109
uucuuauuuccucgaaagu

SEQ ID NO: 2316897 - RNA, 19 nt, Artificial Sequence
  Description of Artificial Sequence: Synthetic oligonucleotide
  Antisense strand to SEQ ID NO: 2316896
acuuucgaggaaauaagaa

SEQ ID NO: 2316898 - RNA, 19 nt, Artificial Sequence
  Description of Artificial Sequence: Synthetic oligonucleotide
  Sense strand starting at position 3208 of SEQ ID NO: 1885109
aauggaguauguuccaaau

SEQ ID NO: 2316899 - RNA, 19 nt, Artificial Sequence
  Description of Artificial Sequence: Synthetic oligonucleotide
  Antisense strand to SEQ ID NO: 2316898
auuuggaacauacuccauu

SEQ ID NO: 2316900 - RNA, 19 nt, Artificial Sequence
  Description of Artificial Sequence: Synthetic oligonucleotide
  Sense strand starting at position 3280 of SEQ ID NO: 1885109
acagcucacguagauauua

SEQ ID NO: 2316901 - RNA, 19 nt, Artificial Sequence
  Description of Artificial Sequence: Synthetic oligonucleotide
  Antisense strand to SEQ ID NO: 2316900
uaauaucuacgugagcugu

SEQ ID NO: 2316902 - RNA, 19 nt, Artificial Sequence
  Description of Artificial Sequence: Synthetic oligonucleotide
  Sense strand starting at position 3349 of SEQ ID NO: 1885109
caguacaguugaguguaaa

SEQ ID NO: 2316903 - RNA, 19 nt, Artificial Sequence
  Description of Artificial Sequence: Synthetic oligonucleotide
  Antisense strand to SEQ ID NO: 2316902
uuuacacucaacuguacug

SEQ ID NO: 2316904 - RNA, 19 nt, Artificial Sequence
  Description of Artificial Sequence: Synthetic oligonucleotide
  Sense strand starting at position 3391 of SEQ ID NO: 1885109
agagcaucccuugaauucu

SEQ ID NO: 2316905 - RNA, 19 nt, Artificial Sequence
  Description of Artificial Sequence: Synthetic oligonucleotide
  Antisense strand to SEQ ID NO: 2316904
agaauucaagggaugcucu

SEQ ID NO: 2316906 - RNA, 19 nt, Artificial Sequence
  Description of Artificial Sequence: Synthetic oligonucleotide
  Sense strand starting at position 3497 of SEQ ID NO: 1885109
ugcugaauaucaccagaca

SEQ ID NO: 2316907 - RNA, 19 nt, Artificial Sequence
  Description of Artificial Sequence: Synthetic oligonucleotide
  Antisense strand to SEQ ID NO: 2316906
ugucuggugauauucagca

SEQ ID NO: 2316908 - RNA, 19 nt, Artificial Sequence
  Description of Artificial Sequence: Synthetic oligonucleotide
  Sense strand starting at position 3567 of SEQ ID NO: 1885109
cgacgauuccaguaacaca

SEQ ID NO: 2316909 - RNA, 19 nt, Artificial Sequence
  Description of Artificial Sequence: Synthetic oligonucleotide
  Antisense strand to SEQ ID NO: 2316908
uguguuacuggaaucgucg

SEQ ID NO: 2316910 - RNA, 19 nt, Artificial Sequence
  Description of Artificial Sequence: Synthetic oligonucleotide
  Sense strand starting at position 3673 of SEQ ID NO: 1885109
cccaauguugcagacacaa

SEQ ID NO: 2316911 - RNA, 19 nt, Artificial Sequence
  Description of Artificial Sequence: Synthetic oligonucleotide
  Antisense strand to SEQ ID NO: 2316910
uugugucugcaacauuggg

SEQ ID NO: 2316912 - RNA, 19 nt, Artificial Sequence
  Description of Artificial Sequence: Synthetic oligonucleotide
  Sense strand starting at position 3851 of SEQ ID NO: 1885109
cucaucugccugcauagaa

SEQ ID NO: 2316913 - RNA, 19 nt, Artificial Sequence
  Description of Artificial Sequence: Synthetic oligonucleotide
  Antisense strand to SEQ ID NO: 2316912
uucuaugcaggcagaugag

SEQ ID NO: 2316914 - RNA, 19 nt, Artificial Sequence
  Description of Artificial Sequence: Synthetic oligonucleotide
  Sense strand starting at position 163 of SEQ ID NO: 1885110
gauuauuuguagcaacaga

SEQ ID NO: 2316915 - RNA, 19 nt, Artificial Sequence
  Description of Artificial Sequence: Synthetic oligonucleotide
  Antisense strand to SEQ ID NO: 2316914
ucuguugcuacaaauaauc

SEQ ID NO: 2316916 - RNA, 19 nt, Artificial Sequence
  Description of Artificial Sequence: Synthetic oligonucleotide
  Sense strand starting at position 329 of SEQ ID NO: 1885110
guuggaguucaguggugga

SEQ ID NO: 2316917 - RNA, 19 nt, Artificial Sequence
  Description of Artificial Sequence: Synthetic oligonucleotide
  Antisense strand to SEQ ID NO: 2316916
uccaccacugaacuccaac

SEQ ID NO: 2316918 - RNA, 19 nt, Artificial Sequence
  Description of Artificial Sequence: Synthetic oligonucleotide
  Sense strand starting at position 583 of SEQ ID NO: 1885110
gcuacagucagagguuuga

SEQ ID NO: 2316919 - RNA, 19 nt, Artificial Sequence
  Description of Artificial Sequence: Synthetic oligonucleotide
  Antisense strand to SEQ ID NO: 2316918
ucaaaccucugacuguagc

SEQ ID NO: 2316920 - RNA, 19 nt, Artificial Sequence
  Description of Artificial Sequence: Synthetic oligonucleotide
  Sense strand starting at position 830 of SEQ ID NO: 1885110
aauuuagaguacugagagu

SEQ ID NO: 2316921 - RNA, 19 nt, Artificial Sequence
  Description of Artificial Sequence: Synthetic oligonucleotide
  Antisense strand to SEQ ID NO: 2316920
acucucaguacucuaaauu

SEQ ID NO: 2316922 - RNA, 19 nt, Artificial Sequence
  Description of Artificial Sequence: Synthetic oligonucleotide
  Sense strand starting at position 1268 of SEQ ID NO: 1885110
gugugugaacccugccaga

SEQ ID NO: 2316923 - RNA, 19 nt, Artificial Sequence
  Description of Artificial Sequence: Synthetic oligonucleotide
  Antisense strand to SEQ ID NO: 2316922
ucuggcaggguucacacac

SEQ ID NO: 2316924 - RNA, 19 nt, Artificial Sequence
  Description of Artificial Sequence: Synthetic oligonucleotide
  Sense strand starting at position 1314 of SEQ ID NO: 1885110
augugaagaaugugagauu

SEQ ID NO: 2316925 - RNA, 19 nt, Artificial Sequence
  Description of Artificial Sequence: Synthetic oligonucleotide
  Antisense strand to SEQ ID NO: 2316924
aaucucacauucuucacau

SEQ ID NO: 2316926 - RNA, 19 nt, Artificial Sequence
  Description of Artificial Sequence: Synthetic oligonucleotide
  Sense strand starting at position 1317 of SEQ ID NO: 1885110
ugaagaaugugagauuccu

SEQ ID NO: 2316927 - RNA, 19 nt, Artificial Sequence
  Description of Artificial Sequence: Synthetic oligonucleotide
  Antisense strand to SEQ ID NO: 2316926
aggaaucucacauucuuca

SEQ ID NO: 2316928 - RNA, 19 nt, Artificial Sequence
  Description of Artificial Sequence: Synthetic oligonucleotide
  Sense strand starting at position 1507 of SEQ ID NO: 1885110
cgucaaucauugcccauuu

SEQ ID NO: 2316929 - RNA, 19 nt, Artificial Sequence
  Description of Artificial Sequence: Synthetic oligonucleotide
  Antisense strand to SEQ ID NO: 2316928
aaaugggcaaugauugacg

SEQ ID NO: 2316930 - RNA, 19 nt, Artificial Sequence
  Description of Artificial Sequence: Synthetic oligonucleotide
  Sense strand starting at position 2028 of SEQ ID NO: 1885110
ggcggaagcucgucaccaa

SEQ ID NO: 2316931 - RNA, 19 nt, Artificial Sequence
  Description of Artificial Sequence: Synthetic oligonucleotide
  Antisense strand to SEQ ID NO: 2316930
uuggugacgagcuuccgcc

SEQ ID NO: 2316932 - RNA, 19 nt, Artificial Sequence
  Description of Artificial Sequence: Synthetic oligonucleotide
  Sense strand starting at position 2029 of SEQ ID NO: 1885110
gcggaagcucgucaccaaa

SEQ ID NO: 2316933 - RNA, 19 nt, Artificial Sequence
  Description of Artificial Sequence: Synthetic oligonucleotide
  Antisense strand to SEQ ID NO: 2316932
uuuggugacgagcuuccgc

SEQ ID NO: 2316934 - RNA, 19 nt, Artificial Sequence
  Description of Artificial Sequence: Synthetic oligonucleotide
  Sense strand starting at position 2138 of SEQ ID NO: 1885110
caggaagucuagucuagag

SEQ ID NO: 2316935 - RNA, 19 nt, Artificial Sequence
  Description of Artificial Sequence: Synthetic oligonucleotide
  Antisense strand to SEQ ID NO: 2316934
cucuagacuagacuuccug

SEQ ID NO: 2316936 - RNA, 19 nt, Artificial Sequence
  Description of Artificial Sequence: Synthetic oligonucleotide
  Sense strand starting at position 2140 of SEQ ID NO: 1885110
ggaagucuagucuagaguc

SEQ ID NO: 2316937 - RNA, 19 nt, Artificial Sequence
  Description of Artificial Sequence: Synthetic oligonucleotide
  Antisense strand to SEQ ID NO: 2316936
gacucuagacuagacuucc

SEQ ID NO: 2316938 - RNA, 19 nt, Artificial Sequence
  Description of Artificial Sequence: Synthetic oligonucleotide
  Sense strand starting at position 2142 of SEQ ID NO: 1885110
aagucuagucuagagucua

SEQ ID NO: 2316939 - RNA, 19 nt, Artificial Sequence
  Description of Artificial Sequence: Synthetic oligonucleotide
  Antisense strand to SEQ ID NO: 2316938
uagacucuagacuagacuu

SEQ ID NO: 2316940 - RNA, 19 nt, Artificial Sequence
  Description of Artificial Sequence: Synthetic oligonucleotide
  Sense strand starting at position 2196 of SEQ ID NO: 1885110
gggagaacucuauguucuu

SEQ ID NO: 2316941 - RNA, 19 nt, Artificial Sequence
  Description of Artificial Sequence: Synthetic oligonucleotide
  Antisense strand to SEQ ID NO: 2316940
aagaacauagaguucuccc

SEQ ID NO: 2316942 - RNA, 19 nt, Artificial Sequence
  Description of Artificial Sequence: Synthetic oligonucleotide
  Sense strand starting at position 2197 of SEQ ID NO: 1885110
ggagaacucuauguucuuc

SEQ ID NO: 2316943 - RNA, 19 nt, Artificial Sequence
  Description of Artificial Sequence: Synthetic oligonucleotide
  Antisense strand to SEQ ID NO: 2316942
gaagaacauagaguucucc

SEQ ID NO: 2316944 - RNA, 19 nt, Artificial Sequence
  Description of Artificial Sequence: Synthetic oligonucleotide
  Sense strand starting at position 2268 of SEQ ID NO: 1885110
ggugacuugugucuuagag

SEQ ID NO: 2316945 - RNA, 19 nt, Artificial Sequence
  Description of Artificial Sequence: Synthetic oligonucleotide
  Antisense strand to SEQ ID NO: 2316944
cucuaagacacaagucacc

SEQ ID NO: 2316946 - RNA, 19 nt, Artificial Sequence
  Description of Artificial Sequence: Synthetic oligonucleotide
  Sense strand starting at position 2276 of SEQ ID NO: 1885110
gugucuuagagcugacgca

SEQ ID NO: 2316947 - RNA, 19 nt, Artificial Sequence
  Description of Artificial Sequence: Synthetic oligonucleotide
  Antisense strand to SEQ ID NO: 2316946
ugcgucagcucuaagacac

SEQ ID NO: 2316948 - RNA, 19 nt, Artificial Sequence
  Description of Artificial Sequence: Synthetic oligonucleotide
  Sense strand starting at position 2407 of SEQ ID NO: 1885110
ugacuccugucaugggaau

SEQ ID NO: 2316949 - RNA, 19 nt, Artificial Sequence
  Description of Artificial Sequence: Synthetic oligonucleotide
  Antisense strand to SEQ ID NO: 2316948
auucccaugacaggaguca

SEQ ID NO: 2316950 - RNA, 19 nt, Artificial Sequence
  Description of Artificial Sequence: Synthetic oligonucleotide
  Sense strand starting at position 2413 of SEQ ID NO: 1885110
cugucaugggaauggauau

SEQ ID NO: 2316951 - RNA, 19 nt, Artificial Sequence
  Description of Artificial Sequence: Synthetic oligonucleotide
  Antisense strand to SEQ ID NO: 2316950
auauccauucccaugacag

SEQ ID NO: 2316952 - RNA, 19 nt, Artificial Sequence
  Description of Artificial Sequence: Synthetic oligonucleotide
  Sense strand starting at position 2414 of SEQ ID NO: 1885110
ugucaugggaauggauauu

SEQ ID NO: 2316953 - RNA, 19 nt, Artificial Sequence
  Description of Artificial Sequence: Synthetic oligonucleotide
  Antisense strand to SEQ ID NO: 2316952
aauauccauucccaugaca

SEQ ID NO: 2316954 - RNA, 19 nt, Artificial Sequence
  Description of Artificial Sequence: Synthetic oligonucleotide
  Sense strand starting at position 2420 of SEQ ID NO: 1885110
gggaauggauauugcaguu

SEQ ID NO: 2316955 - RNA, 19 nt, Artificial Sequence
  Description of Artificial Sequence: Synthetic oligonucleotide
  Antisense strand to SEQ ID NO: 2316954
aacugcaauauccauuccc

SEQ ID NO: 2316956 - RNA, 19 nt, Artificial Sequence
  Description of Artificial Sequence: Synthetic oligonucleotide
  Sense strand starting at position 2465 of SEQ ID NO: 1885110
gagggagucugaccgcaaa

SEQ ID NO: 2316957 - RNA, 19 nt, Artificial Sequence
  Description of Artificial Sequence: Synthetic oligonucleotide
  Antisense strand to SEQ ID NO: 2316956
uuugcggucagacucccuc

SEQ ID NO: 2316958 - RNA, 19 nt, Artificial Sequence
  Description of Artificial Sequence: Synthetic oligonucleotide
  Sense strand starting at position 2567 of SEQ ID NO: 1885110
uguggaguucccugaaaca

SEQ ID NO: 2316959 - RNA, 19 nt, Artificial Sequence
  Description of Artificial Sequence: Synthetic oligonucleotide
  Antisense strand to SEQ ID NO: 2316958
uguuucagggaacuccaca

SEQ ID NO: 2316960 - RNA, 19 nt, Artificial Sequence
  Description of Artificial Sequence: Synthetic oligonucleotide
  Sense strand starting at position 2631 of SEQ ID NO: 1885110
ggguuugauuuccuuagcu

SEQ ID NO: 2316961 - RNA, 19 nt, Artificial Sequence
  Description of Artificial Sequence: Synthetic oligonucleotide
  Antisense strand to SEQ ID NO: 2316960
agcuaaggaaaucaaaccc

SEQ ID NO: 2316962 - RNA, 19 nt, Artificial Sequence
  Description of Artificial Sequence: Synthetic oligonucleotide
  Sense strand starting at position 2669 of SEQ ID NO: 1885110
ggaugugggcgguagagaa

SEQ ID NO: 2316963 - RNA, 19 nt, Artificial Sequence
  Description of Artificial Sequence: Synthetic oligonucleotide
  Antisense strand to SEQ ID NO: 2316962
uucucuaccgcccacaucc

SEQ ID NO: 2316964 - RNA, 19 nt, Artificial Sequence
  Description of Artificial Sequence: Synthetic oligonucleotide
  Sense strand starting at position 2722 of SEQ ID NO: 1885110
agagcuccgugagcagaua

SEQ ID NO: 2316965 - RNA, 19 nt, Artificial Sequence
  Description of Artificial Sequence: Synthetic oligonucleotide
  Antisense strand to SEQ ID NO: 2316964
uaucugcucacggagcucu

SEQ ID NO: 2316966 - RNA, 19 nt, Artificial Sequence
  Description of Artificial Sequence: Synthetic oligonucleotide
  Sense strand starting at position 2782 of SEQ ID NO: 1885110
uuccuagacuaaucuggua

SEQ ID NO: 2316967 - RNA, 19 nt, Artificial Sequence
  Description of Artificial Sequence: Synthetic oligonucleotide
  Antisense strand to SEQ ID NO: 2316966
uaccagauuagucuaggaa

SEQ ID NO: 2316968 - RNA, 19 nt, Artificial Sequence
  Description of Artificial Sequence: Synthetic oligonucleotide
  Sense strand starting at position 2785 of SEQ ID NO: 1885110
cuagacuaaucugguauua

SEQ ID NO: 2316969 - RNA, 19 nt, Artificial Sequence
  Description of Artificial Sequence: Synthetic oligonucleotide
  Antisense strand to SEQ ID NO: 2316968
uaauaccagauuagucuag

SEQ ID NO: 2316970 - RNA, 19 nt, Artificial Sequence
  Description of Artificial Sequence: Synthetic oligonucleotide
  Sense strand starting at position 2787 of SEQ ID NO: 1885110
agacuaaucugguauuaaa

SEQ ID NO: 2316971 - RNA, 19 nt, Artificial Sequence
  Description of Artificial Sequence: Synthetic oligonucleotide
  Antisense strand to SEQ ID NO: 2316970
uuuaauaccagauuagucu

SEQ ID NO: 2316972 - RNA, 19 nt, Artificial Sequence
  Description of Artificial Sequence: Synthetic oligonucleotide
  Sense strand starting at position 2797 of SEQ ID NO: 1885110
gguauuaaauaguauggua

SEQ ID NO: 2316973 - RNA, 19 nt, Artificial Sequence
  Description of Artificial Sequence: Synthetic oligonucleotide
  Antisense strand to SEQ ID NO: 2316972
uaccauacuauuuaauacc

SEQ ID NO: 2316974 - RNA, 19 nt, Artificial Sequence
  Description of Artificial Sequence: Synthetic oligonucleotide
  Sense strand starting at position 2811 of SEQ ID NO: 1885110
ugguauuuauuguggacau

SEQ ID NO: 2316975 - RNA, 19 nt, Artificial Sequence
  Description of Artificial Sequence: Synthetic oligonucleotide
  Antisense strand to SEQ ID NO: 2316974
auguccacaauaaauacca

SEQ ID NO: 2316976 - RNA, 19 nt, Artificial Sequence
  Description of Artificial Sequence: Synthetic oligonucleotide
  Sense strand starting at position 2812 of SEQ ID NO: 1885110
gguauuuauuguggacauu

SEQ ID NO: 2316977 - RNA, 19 nt, Artificial Sequence
  Description of Artificial Sequence: Synthetic oligonucleotide
  Antisense strand to SEQ ID NO: 2316976
aauguccacaauaaauacc

SEQ ID NO: 2316978 - RNA, 19 nt, Artificial Sequence
  Description of Artificial Sequence: Synthetic oligonucleotide
  Sense strand starting at position 2822 of SEQ ID NO: 1885110
guggacauuggcuaagcaa

SEQ ID NO: 2316979 - RNA, 19 nt, Artificial Sequence
  Description of Artificial Sequence: Synthetic oligonucleotide
  Antisense strand to SEQ ID NO: 2316978
uugcuuagccaauguccac

SEQ ID NO: 2316980 - RNA, 19 nt, Artificial Sequence
  Description of Artificial Sequence: Synthetic oligonucleotide
  Sense strand starting at position 2988 of SEQ ID NO: 1885110
gcgggacucugagauaagu

SEQ ID NO: 2316981 - RNA, 19 nt, Artificial Sequence
  Description of Artificial Sequence: Synthetic oligonucleotide
  Antisense strand to SEQ ID NO: 2316980
acuuaucucagagucccgc

SEQ ID NO: 2316982 - RNA, 19 nt, Artificial Sequence
  Description of Artificial Sequence: Synthetic oligonucleotide
  Sense strand starting at position 2997 of SEQ ID NO: 1885110
ugagauaaguaagauaaga

SEQ ID NO: 2316983 - RNA, 19 nt, Artificial Sequence
  Description of Artificial Sequence: Synthetic oligonucleotide
  Antisense strand to SEQ ID NO: 2316982
ucuuaucuuacuuaucuca

SEQ ID NO: 2316984 - RNA, 19 nt, Artificial Sequence
  Description of Artificial Sequence: Synthetic oligonucleotide
  Sense strand starting at position 3733 of SEQ ID NO: 1885110
uggguagugcauuaaagau

SEQ ID NO: 2316985 - RNA, 19 nt, Artificial Sequence
  Description of Artificial Sequence: Synthetic oligonucleotide
  Antisense strand to SEQ ID NO: 2316984
aucuuuaaugcacuaccca

SEQ ID NO: 2316986 - RNA, 19 nt, Artificial Sequence
  Description of Artificial Sequence: Synthetic oligonucleotide
  Sense strand starting at position 3739 of SEQ ID NO: 1885110
gugcauuaaagaugagaac

SEQ ID NO: 2316987 - RNA, 19 nt, Artificial Sequence
  Description of Artificial Sequence: Synthetic oligonucleotide
  Antisense strand to SEQ ID NO: 2316986
guucucaucuuuaaugcac

SEQ ID NO: 2316988 - RNA, 19 nt, Artificial Sequence
  Description of Artificial Sequence: Synthetic oligonucleotide
  Sense strand starting at position 3774 of SEQ ID NO: 1885110
agauaacgguuagagcaau

SEQ ID NO: 2316989 - RNA, 19 nt, Artificial Sequence
  Description of Artificial Sequence: Synthetic oligonucleotide
  Antisense strand to SEQ ID NO: 2316988
auugcucuaaccguuaucu

SEQ ID NO: 2316990 - RNA, 19 nt, Artificial Sequence
  Description of Artificial Sequence: Synthetic oligonucleotide
  Sense strand starting at position 3856 of SEQ ID NO: 1885110
uuucucguaagauggaauu

SEQ ID NO: 2316991 - RNA, 19 nt, Artificial Sequence
  Description of Artificial Sequence: Synthetic oligonucleotide
  Antisense strand to SEQ ID NO: 2316990
aauuccaucuuacgagaaa

SEQ ID NO: 2316992 - RNA, 19 nt, Artificial Sequence
  Description of Artificial Sequence: Synthetic oligonucleotide
  Sense strand starting at position 3919 of SEQ ID NO: 1885110
ucguuauauugcccaggca

SEQ ID NO: 2316993 - RNA, 19 nt, Artificial Sequence
  Description of Artificial Sequence: Synthetic oligonucleotide
  Antisense strand to SEQ ID NO: 2316992
ugccugggcaauauaacga

SEQ ID NO: 2316994 - RNA, 19 nt, Artificial Sequence
  Description of Artificial Sequence: Synthetic oligonucleotide
  Sense strand starting at position 171 of SEQ ID NO: 1885111
gaagacuuuggauguauua

SEQ ID NO: 2316995 - RNA, 19 nt, Artificial Sequence
  Description of Artificial Sequence: Synthetic oligonucleotide
  Antisense strand to SEQ ID NO: 2316994
uaauacauccaaagucuuc

SEQ ID NO: 2316996 - RNA, 19 nt, Artificial Sequence
  Description of Artificial Sequence: Synthetic oligonucleotide
  Sense strand starting at position 269 of SEQ ID NO: 1885111
gcuggcugcauuuggauaa

SEQ ID NO: 2316997 - RNA, 19 nt, Artificial Sequence
  Description of Artificial Sequence: Synthetic oligonucleotide
  Antisense strand to SEQ ID NO: 2316996
uuauccaaaugcagccagc

SEQ ID NO: 2316998 - RNA, 19 nt, Artificial Sequence
  Description of Artificial Sequence: Synthetic oligonucleotide
  Sense strand starting at position 296 of SEQ ID NO: 1885111
aacgauaacugucuuaguu

SEQ ID NO: 2316999 - RNA, 19 nt, Artificial Sequence
  Description of Artificial Sequence: Synthetic oligonucleotide
  Antisense strand to SEQ ID NO: 2316998
aacuaagacaguuaucguu

SEQ ID NO: 2317000 - RNA, 19 nt, Artificial Sequence
  Description of Artificial Sequence: Synthetic oligonucleotide
  Sense strand starting at position 300 of SEQ ID NO: 1885111
auaacugucuuaguuagaa

SEQ ID NO: 2317001 - RNA, 19 nt, Artificial Sequence
  Description of Artificial Sequence: Synthetic oligonucleotide
  Antisense strand to SEQ ID NO: 2317000
uucuaacuaagacaguuau

SEQ ID NO: 2317002 - RNA, 19 nt, Artificial Sequence
  Description of Artificial Sequence: Synthetic oligonucleotide
  Sense strand starting at position 805 of SEQ ID NO: 1885111
uuucuuguuguuggaacau

SEQ ID NO: 2317003 - RNA, 19 nt, Artificial Sequence
  Description of Artificial Sequence: Synthetic oligonucleotide
  Antisense strand to SEQ ID NO: 2317002
auguuccaacaacaagaaa

SEQ ID NO: 2317004 - RNA, 19 nt, Artificial Sequence
  Description of Artificial Sequence: Synthetic oligonucleotide
  Sense strand starting at position 816 of SEQ ID NO: 1885111
uggaacaucccgugucaaa

SEQ ID NO: 2317005 - RNA, 19 nt, Artificial Sequence
  Description of Artificial Sequence: Synthetic oligonucleotide
  Antisense strand to SEQ ID NO: 2317004
uuugacacgggauguucca

SEQ ID NO: 2317006 - RNA, 19 nt, Artificial Sequence
  Description of Artificial Sequence: Synthetic oligonucleotide
  Sense strand starting at position 855 of SEQ ID NO: 1885111
uaagaauauucgcuuggga

SEQ ID NO: 2317007 - RNA, 19 nt, Artificial Sequence
  Description of Artificial Sequence: Synthetic oligonucleotide
  Antisense strand to SEQ ID NO: 2317006
ucccaagcgaauauucuua

SEQ ID NO: 2317008 - RNA, 19 nt, Artificial Sequence
  Description of Artificial Sequence: Synthetic oligonucleotide
  Sense strand starting at position 857 of SEQ ID NO: 1885111
agaauauucgcuugggacg

SEQ ID NO: 2317009 - RNA, 19 nt, Artificial Sequence
  Description of Artificial Sequence: Synthetic oligonucleotide
  Antisense strand to SEQ ID NO: 2317008
cgucccaagcgaauauucu

SEQ ID NO: 2317010 - RNA, 19 nt, Artificial Sequence
  Description of Artificial Sequence: Synthetic oligonucleotide
  Sense strand starting at position 909 of SEQ ID NO: 1885111
cagagaugacucgguugag

SEQ ID NO: 2317011 - RNA, 19 nt, Artificial Sequence
  Description of Artificial Sequence: Synthetic oligonucleotide
  Antisense strand to SEQ ID NO: 2317010
cucaaccgagucaucucug

SEQ ID NO: 2317012 - RNA, 19 nt, Artificial Sequence
  Description of Artificial Sequence: Synthetic oligonucleotide
  Sense strand starting at position 910 of SEQ ID NO: 1885111
agagaugacucgguugaga

SEQ ID NO: 2317013 - RNA, 19 nt, Artificial Sequence
  Description of Artificial Sequence: Synthetic oligonucleotide
  Antisense strand to SEQ ID NO: 2317012
ucucaaccgagucaucucu

SEQ ID NO: 2317014 - RNA, 19 nt, Artificial Sequence
  Description of Artificial Sequence: Synthetic oligonucleotide
  Sense strand starting at position 912 of SEQ ID NO: 1885111
agaugacucgguugagacu

SEQ ID NO: 2317015 - RNA, 19 nt, Artificial Sequence
  Description of Artificial Sequence: Synthetic oligonucleotide
  Antisense strand to SEQ ID NO: 2317014
agucucaaccgagucaucu

SEQ ID NO: 2317016 - RNA, 19 nt, Artificial Sequence
  Description of Artificial Sequence: Synthetic oligonucleotide
  Sense strand starting at position 913 of SEQ ID NO: 1885111
gaugacucgguugagacuu

SEQ ID NO: 2317017 - RNA, 19 nt, Artificial Sequence
  Description of Artificial Sequence: Synthetic oligonucleotide
  Antisense strand to SEQ ID NO: 2317016
aagucucaaccgagucauc

SEQ ID NO: 2317018 - RNA, 19 nt, Artificial Sequence
  Description of Artificial Sequence: Synthetic oligonucleotide
  Sense strand starting at position 946 of SEQ ID NO: 1885111
gagagugagcagugggaaa

SEQ ID NO: 2317019 - RNA, 19 nt, Artificial Sequence
  Description of Artificial Sequence: Synthetic oligonucleotide
  Antisense strand to SEQ ID NO: 2317018
uuucccacugcucacucuc

SEQ ID NO: 2317020 - RNA, 19 nt, Artificial Sequence
  Description of Artificial Sequence: Synthetic oligonucleotide
  Sense strand starting at position 1725 of SEQ ID NO: 1885111
cgcgaaucagcugguaaga

SEQ ID NO: 2317021 - RNA, 19 nt, Artificial Sequence
  Description of Artificial Sequence: Synthetic oligonucleotide
  Antisense strand to SEQ ID NO: 2317020
ucuuaccagcugauucgcg

SEQ ID NO: 2317022 - RNA, 19 nt, Artificial Sequence
  Description of Artificial Sequence: Synthetic oligonucleotide
  Sense strand starting at position 1753 of SEQ ID NO: 1885111
aucucucauuuagagaguu

SEQ ID NO: 2317023 - RNA, 19 nt, Artificial Sequence
  Description of Artificial Sequence: Synthetic oligonucleotide
  Antisense strand to SEQ ID NO: 2317022
aacucucuaaaugagagau

SEQ ID NO: 2317024 - RNA, 19 nt, Artificial Sequence
  Description of Artificial Sequence: Synthetic oligonucleotide
  Sense strand starting at position 1761 of SEQ ID NO: 1885111
uuuagagaguuugcgaaca

SEQ ID NO: 2317025 - RNA, 19 nt, Artificial Sequence
  Description of Artificial Sequence: Synthetic oligonucleotide
  Antisense strand to SEQ ID NO: 2317024
uguucgcaaacucucuaaa

SEQ ID NO: 2317026 - RNA, 19 nt, Artificial Sequence
  Description of Artificial Sequence: Synthetic oligonucleotide
  Sense strand starting at position 1766 of SEQ ID NO: 1885111
agaguuugcgaacaaguac

SEQ ID NO: 2317027 - RNA, 19 nt, Artificial Sequence
  Description of Artificial Sequence: Synthetic oligonucleotide
  Antisense strand to SEQ ID NO: 2317026
guacuuguucgcaaacucu

SEQ ID NO: 2317028 - RNA, 19 nt, Artificial Sequence
  Description of Artificial Sequence: Synthetic oligonucleotide
  Sense strand starting at position 1991 of SEQ ID NO: 1885111
gcgcaaagcuaauuuguua

SEQ ID NO: 2317029 - RNA, 19 nt, Artificial Sequence
  Description of Artificial Sequence: Synthetic oligonucleotide
  Antisense strand to SEQ ID NO: 2317028
uaacaaauuagcuuugcgc

SEQ ID NO: 2317030 - RNA, 19 nt, Artificial Sequence
  Description of Artificial Sequence: Synthetic oligonucleotide
  Sense strand starting at position 2037 of SEQ ID NO: 1885111
ccagcuuccuauuucgcaa

SEQ ID NO: 2317031 - RNA, 19 nt, Artificial Sequence
  Description of Artificial Sequence: Synthetic oligonucleotide
  Antisense strand to SEQ ID NO: 2317030
uugcgaaauaggaagcugg

SEQ ID NO: 2317032 - RNA, 19 nt, Artificial Sequence
  Description of Artificial Sequence: Synthetic oligonucleotide
  Sense strand starting at position 2045 of SEQ ID NO: 1885111
cuauuucgcaaaggugagu

SEQ ID NO: 2317033 - RNA, 19 nt, Artificial Sequence
  Description of Artificial Sequence: Synthetic oligonucleotide
  Antisense strand to SEQ ID NO: 2317032
acucaccuuugcgaaauag

SEQ ID NO: 2317034 - RNA, 19 nt, Artificial Sequence
  Description of Artificial Sequence: Synthetic oligonucleotide
  Sense strand starting at position 2060 of SEQ ID NO: 1885111
gaguuuagggccuauggaa

SEQ ID NO: 2317035 - RNA, 19 nt, Artificial Sequence
  Description of Artificial Sequence: Synthetic oligonucleotide
  Antisense strand to SEQ ID NO: 2317034
uuccauaggcccuaaacuc

SEQ ID NO: 2317036 - RNA, 19 nt, Artificial Sequence
  Description of Artificial Sequence: Synthetic oligonucleotide
  Sense strand starting at position 2087 of SEQ ID NO: 1885111
acuuauugcuugcuugaaa

SEQ ID NO: 2317037 - RNA, 19 nt, Artificial Sequence
  Description of Artificial Sequence: Synthetic oligonucleotide
  Antisense strand to SEQ ID NO: 2317036
uuucaagcaagcaauaagu

SEQ ID NO: 2317038 - RNA, 19 nt, Artificial Sequence
  Description of Artificial Sequence: Synthetic oligonucleotide
  Sense strand starting at position 2151 of SEQ ID NO: 1885111
cugcauaucguugcugauu

SEQ ID NO: 2317039 - RNA, 19 nt, Artificial Sequence
  Description of Artificial Sequence: Synthetic oligonucleotide
  Antisense strand to SEQ ID NO: 2317038
aaucagcaacgauaugcag

SEQ ID NO: 2317040 - RNA, 19 nt, Artificial Sequence
  Description of Artificial Sequence: Synthetic oligonucleotide
  Sense strand starting at position 2152 of SEQ ID NO: 1885111
ugcauaucguugcugauuu

SEQ ID NO: 2317041 - RNA, 19 nt, Artificial Sequence
  Description of Artificial Sequence: Synthetic oligonucleotide
  Antisense strand to SEQ ID NO: 2317040
aaaucagcaacgauaugca

SEQ ID NO: 2317042 - RNA, 19 nt, Artificial Sequence
  Description of Artificial Sequence: Synthetic oligonucleotide
  Sense strand starting at position 2188 of SEQ ID NO: 1885111
guugauaugaagcaaagca

SEQ ID NO: 2317043 - RNA, 19 nt, Artificial Sequence
  Description of Artificial Sequence: Synthetic oligonucleotide
  Antisense strand to SEQ ID NO: 2317042
ugcuuugcuucauaucaac

SEQ ID NO: 2317044 - RNA, 19 nt, Artificial Sequence
  Description of Artificial Sequence: Synthetic oligonucleotide
  Sense strand starting at position 2212 of SEQ ID NO: 1885111
ggaggaacaugcuaauaga

SEQ ID NO: 2317045 - RNA, 19 nt, Artificial Sequence
  Description of Artificial Sequence: Synthetic oligonucleotide
  Antisense strand to SEQ ID NO: 2317044
ucuauuagcauguuccucc

SEQ ID NO: 2317046 - RNA, 19 nt, Artificial Sequence
  Description of Artificial Sequence: Synthetic oligonucleotide
  Sense strand starting at position 2311 of SEQ ID NO: 1885111
guaacagacuucuccaaag

SEQ ID NO: 2317047 - RNA, 19 nt, Artificial Sequence
  Description of Artificial Sequence: Synthetic oligonucleotide
  Antisense strand to SEQ ID NO: 2317046
cuuuggagaagucuguuac

SEQ ID NO: 2317048 - RNA, 19 nt, Artificial Sequence
  Description of Artificial Sequence: Synthetic oligonucleotide
  Sense strand starting at position 2323 of SEQ ID NO: 1885111
uccaaagacgauuauuguu

SEQ ID NO: 2317049 - RNA, 19 nt, Artificial Sequence
  Description of Artificial Sequence: Synthetic oligonucleotide
  Antisense strand to SEQ ID NO: 2317048
aacaauaaucgucuuugga

SEQ ID NO: 2317050 - RNA, 19 nt, Artificial Sequence
  Description of Artificial Sequence: Synthetic oligonucleotide
  Sense strand starting at position 2598 of SEQ ID NO: 1885111
augacuuugugaguacuuu

SEQ ID NO: 2317051 - RNA, 19 nt, Artificial Sequence
  Description of Artificial Sequence: Synthetic oligonucleotide
  Antisense strand to SEQ ID NO: 2317050
aaaguacucacaaagucau

SEQ ID NO: 2317052 - RNA, 19 nt, Artificial Sequence
  Description of Artificial Sequence: Synthetic oligonucleotide
  Sense strand starting at position 2599 of SEQ ID NO: 1885111
ugacuuugugaguacuuua

SEQ ID NO: 2317053 - RNA, 19 nt, Artificial Sequence
  Description of Artificial Sequence: Synthetic oligonucleotide
  Antisense strand to SEQ ID NO: 2317052
uaaaguacucacaaaguca

SEQ ID NO: 2317054 - RNA, 19 nt, Artificial Sequence
  Description of Artificial Sequence: Synthetic oligonucleotide
  Sense strand starting at position 2602 of SEQ ID NO: 1885111
cuuugugaguacuuuauau

SEQ ID NO: 2317055 - RNA, 19 nt, Artificial Sequence
  Description of Artificial Sequence: Synthetic oligonucleotide
  Antisense strand to SEQ ID NO: 2317054
auauaaaguacucacaaag

SEQ ID NO: 2317056 - RNA, 19 nt, Artificial Sequence
  Description of Artificial Sequence: Synthetic oligonucleotide
  Sense strand starting at position 2916 of SEQ ID NO: 1885111
gccaccacucuuuguauuu

SEQ ID NO: 2317057 - RNA, 19 nt, Artificial Sequence
  Description of Artificial Sequence: Synthetic oligonucleotide
  Antisense strand to SEQ ID NO: 2317056
aaauacaaagagugguggc

SEQ ID NO: 2317058 - RNA, 19 nt, Artificial Sequence
  Description of Artificial Sequence: Synthetic oligonucleotide
  Sense strand starting at position 3054 of SEQ ID NO: 1885111
gcccauuuauucuugucua

SEQ ID NO: 2317059 - RNA, 19 nt, Artificial Sequence
  Description of Artificial Sequence: Synthetic oligonucleotide
  Antisense strand to SEQ ID NO: 2317058
uagacaagaauaaaugggc

SEQ ID NO: 2317060 - RNA, 19 nt, Artificial Sequence
  Description of Artificial Sequence: Synthetic oligonucleotide
  Sense strand starting at position 3118 of SEQ ID NO: 1885111
gcgcaauggcgagaucaac

SEQ ID NO: 2317061 - RNA, 19 nt, Artificial Sequence
  Description of Artificial Sequence: Synthetic oligonucleotide
  Antisense strand to SEQ ID NO: 2317060
guugaucucgccauugcgc

SEQ ID NO: 2317062 - RNA, 19 nt, Artificial Sequence
  Description of Artificial Sequence: Synthetic oligonucleotide
  Sense strand starting at position 3439 of SEQ ID NO: 1885111
gcuggauacuuucuguauu

SEQ ID NO: 2317063 - RNA, 19 nt, Artificial Sequence
  Description of Artificial Sequence: Synthetic oligonucleotide
  Antisense strand to SEQ ID NO: 2317062
aauacagaaaguauccagc

SEQ ID NO: 2317064 - RNA, 19 nt, Artificial Sequence
  Description of Artificial Sequence: Synthetic oligonucleotide
  Sense strand starting at position 3714 of SEQ ID NO: 1885111
cgaguaacuaacugggauu

SEQ ID NO: 2317065 - RNA, 19 nt, Artificial Sequence
  Description of Artificial Sequence: Synthetic oligonucleotide
  Antisense strand to SEQ ID NO: 2317064
aaucccaguuaguuacucg

SEQ ID NO: 2317066 - RNA, 19 nt, Artificial Sequence
  Description of Artificial Sequence: Synthetic oligonucleotide
  Sense strand starting at position 3922 of SEQ ID NO: 1885111
ugucuaugggaauaaugcu

SEQ ID NO: 2317067 - RNA, 19 nt, Artificial Sequence
  Description of Artificial Sequence: Synthetic oligonucleotide
  Antisense strand to SEQ ID NO: 2317066
agcauuauucccauagaca

SEQ ID NO: 2317068 - RNA, 19 nt, Artificial Sequence
  Description of Artificial Sequence: Synthetic oligonucleotide
  Sense strand starting at position 3938 of SEQ ID NO: 1885111
gcugcuauuggugugcaaa

SEQ ID NO: 2317069 - RNA, 19 nt, Artificial Sequence
  Description of Artificial Sequence: Synthetic oligonucleotide
  Antisense strand to SEQ ID NO: 2317068
uuugcacaccaauagcagc

SEQ ID NO: 2317070 - RNA, 19 nt, Artificial Sequence
  Description of Artificial Sequence: Synthetic oligonucleotide
  Sense strand starting at position 3940 of SEQ ID NO: 1885111
ugcuauuggugugcaaaua

SEQ ID NO: 2317071 - RNA, 19 nt, Artificial Sequence
  Description of Artificial Sequence: Synthetic oligonucleotide
  Antisense strand to SEQ ID NO: 2317070
uauuugcacaccaauagca

SEQ ID NO: 2317072 - RNA, 19 nt, Artificial Sequence
  Description of Artificial Sequence: Synthetic oligonucleotide
  Sense strand starting at position 3950 of SEQ ID NO: 1885111
gugcaaauaucagcuuaag

SEQ ID NO: 2317073 - RNA, 19 nt, Artificial Sequence
  Description of Artificial Sequence: Synthetic oligonucleotide
  Antisense strand to SEQ ID NO: 2317072
cuuaagcugauauuugcac

SEQ ID NO: 2317074 - RNA, 19 nt, Artificial Sequence
  Description of Artificial Sequence: Synthetic oligonucleotide
  Sense strand starting at position 125 of SEQ ID NO: 1885112
ugaugaugcuaauuauaca

SEQ ID NO: 2317075 - RNA, 19 nt, Artificial Sequence
  Description of Artificial Sequence: Synthetic oligonucleotide
  Antisense strand to SEQ ID NO: 2317074
uguauaauuagcaucauca

SEQ ID NO: 2317076 - RNA, 19 nt, Artificial Sequence
  Description of Artificial Sequence: Synthetic oligonucleotide
  Sense strand starting at position 211 of SEQ ID NO: 1885112
ugcagaaucuuagucucca

SEQ ID NO: 2317077 - RNA, 19 nt, Artificial Sequence
  Description of Artificial Sequence: Synthetic oligonucleotide
  Antisense strand to SEQ ID NO: 2317076
uggagacuaagauucugca

SEQ ID NO: 2317078 - RNA, 19 nt, Artificial Sequence
  Description of Artificial Sequence: Synthetic oligonucleotide
  Sense strand starting at position 212 of SEQ ID NO: 1885112
gcagaaucuuagucuccau

SEQ ID NO: 2317079 - RNA, 19 nt, Artificial Sequence
  Description of Artificial Sequence: Synthetic oligonucleotide
  Antisense strand to SEQ ID NO: 2317078
auggagacuaagauucugc

SEQ ID NO: 2317080 - RNA, 19 nt, Artificial Sequence
  Description of Artificial Sequence: Synthetic oligonucleotide
  Sense strand starting at position 264 of SEQ ID NO: 1885112
gggauucgaucugugucuu

SEQ ID NO: 2317081 - RNA, 19 nt, Artificial Sequence
  Description of Artificial Sequence: Synthetic oligonucleotide
  Antisense strand to SEQ ID NO: 2317080
aagacacagaucgaauccc

SEQ ID NO: 2317082 - RNA, 19 nt, Artificial Sequence
  Description of Artificial Sequence: Synthetic oligonucleotide
  Sense strand starting at position 265 of SEQ ID NO: 1885112
ggauucgaucugugucuua

SEQ ID NO: 2317083 - RNA, 19 nt, Artificial Sequence
  Description of Artificial Sequence: Synthetic oligonucleotide
  Antisense strand to SEQ ID NO: 2317082
uaagacacagaucgaaucc

SEQ ID NO: 2317084 - RNA, 19 nt, Artificial Sequence
  Description of Artificial Sequence: Synthetic oligonucleotide
  Sense strand starting at position 268 of SEQ ID NO: 1885112
uucgaucugugucuuaaca

SEQ ID NO: 2317085 - RNA, 19 nt, Artificial Sequence
  Description of Artificial Sequence: Synthetic oligonucleotide
  Antisense strand to SEQ ID NO: 2317084
uguuaagacacagaucgaa

SEQ ID NO: 2317086 - RNA, 19 nt, Artificial Sequence
  Description of Artificial Sequence: Synthetic oligonucleotide
  Sense strand starting at position 849 of SEQ ID NO: 1885112
aguuuaauuugccacugga

SEQ ID NO: 2317087 - RNA, 19 nt, Artificial Sequence
  Description of Artificial Sequence: Synthetic oligonucleotide
  Antisense strand to SEQ ID NO: 2317086
uccaguggcaaauuaaacu

SEQ ID NO: 2317088 - RNA, 19 nt, Artificial Sequence
  Description of Artificial Sequence: Synthetic oligonucleotide
  Sense strand starting at position 1035 of SEQ ID NO: 1885112
cagcccaggucuucguaaa

SEQ ID NO: 2317089 - RNA, 19 nt, Artificial Sequence
  Description of Artificial Sequence: Synthetic oligonucleotide
  Antisense strand to SEQ ID NO: 2317088
uuuacgaagaccugggcug

SEQ ID NO: 2317090 - RNA, 19 nt, Artificial Sequence
  Description of Artificial Sequence: Synthetic oligonucleotide
  Sense strand starting at position 1072 of SEQ ID NO: 1885112
gcugguguagugggaacaa

SEQ ID NO: 2317091 - RNA, 19 nt, Artificial Sequence
  Description of Artificial Sequence: Synthetic oligonucleotide
  Antisense strand to SEQ ID NO: 2317090
uuguucccacuacaccagc

SEQ ID NO: 2317092 - RNA, 19 nt, Artificial Sequence
  Description of Artificial Sequence: Synthetic oligonucleotide
  Sense strand starting at position 1148 of SEQ ID NO: 1885112
guaggaccugagcaaucuu

SEQ ID NO: 2317093 - RNA, 19 nt, Artificial Sequence
  Description of Artificial Sequence: Synthetic oligonucleotide
  Antisense strand to SEQ ID NO: 2317092
aagauugcucagguccuac

SEQ ID NO: 2317094 - RNA, 19 nt, Artificial Sequence
  Description of Artificial Sequence: Synthetic oligonucleotide
  Sense strand starting at position 1505 of SEQ ID NO: 1885112
gaagacuuuggauguauua

SEQ ID NO: 2317095 - RNA, 19 nt, Artificial Sequence
  Description of Artificial Sequence: Synthetic oligonucleotide
  Antisense strand to SEQ ID NO: 2317094
uaauacauccaaagucuuc

SEQ ID NO: 2317096 - RNA, 19 nt, Artificial Sequence
  Description of Artificial Sequence: Synthetic oligonucleotide
  Sense strand starting at position 1603 of SEQ ID NO: 1885112
gcuggcugcauuuggauaa

SEQ ID NO: 2317097 - RNA, 19 nt, Artificial Sequence
  Description of Artificial Sequence: Synthetic oligonucleotide
  Antisense strand to SEQ ID NO: 2317096
uuauccaaaugcagccagc

SEQ ID NO: 2317098 - RNA, 19 nt, Artificial Sequence
  Description of Artificial Sequence: Synthetic oligonucleotide
  Sense strand starting at position 1630 of SEQ ID NO: 1885112
aacgauaacugucuuaguu

SEQ ID NO: 2317099 - RNA, 19 nt, Artificial Sequence
  Description of Artificial Sequence: Synthetic oligonucleotide
  Antisense strand to SEQ ID NO: 2317098
aacuaagacaguuaucguu

SEQ ID NO: 2317100 - RNA, 19 nt, Artificial Sequence
  Description of Artificial Sequence: Synthetic oligonucleotide
  Sense strand starting at position 1634 of SEQ ID NO: 1885112
auaacugucuuaguuagaa

SEQ ID NO: 2317101 - RNA, 19 nt, Artificial Sequence
  Description of Artificial Sequence: Synthetic oligonucleotide
  Antisense strand to SEQ ID NO: 2317100
uucuaacuaagacaguuau

SEQ ID NO: 2317102 - RNA, 19 nt, Artificial Sequence
  Description of Artificial Sequence: Synthetic oligonucleotide
  Sense strand starting at position 2139 of SEQ ID NO: 1885112
uuucuuguuguuggaacau

SEQ ID NO: 2317103 - RNA, 19 nt, Artificial Sequence
  Description of Artificial Sequence: Synthetic oligonucleotide
  Antisense strand to SEQ ID NO: 2317102
auguuccaacaacaagaaa

SEQ ID NO: 2317104 - RNA, 19 nt, Artificial Sequence
  Description of Artificial Sequence: Synthetic oligonucleotide
  Sense strand starting at position 2150 of SEQ ID NO: 1885112
uggaacaucccgugucaaa

SEQ ID NO: 2317105 - RNA, 19 nt, Artificial Sequence
  Description of Artificial Sequence: Synthetic oligonucleotide
  Antisense strand to SEQ ID NO: 2317104
uuugacacgggauguucca

SEQ ID NO: 2317106 - RNA, 19 nt, Artificial Sequence
  Description of Artificial Sequence: Synthetic oligonucleotide
  Sense strand starting at position 2189 of SEQ ID NO: 1885112
uaagaauauucgcuuggga

SEQ ID NO: 2317107 - RNA, 19 nt, Artificial Sequence
  Description of Artificial Sequence: Synthetic oligonucleotide
  Antisense strand to SEQ ID NO: 2317106
ucccaagcgaauauucuua

SEQ ID NO: 2317108 - RNA, 19 nt, Artificial Sequence
  Description of Artificial Sequence: Synthetic oligonucleotide
  Sense strand starting at position 2191 of SEQ ID NO: 1885112
agaauauucgcuugggacg

SEQ ID NO: 2317109 - RNA, 19 nt, Artificial Sequence
  Description of Artificial Sequence: Synthetic oligonucleotide
  Antisense strand to SEQ ID NO: 2317108
cgucccaagcgaauauucu

SEQ ID NO: 2317110 - RNA, 19 nt, Artificial Sequence
  Description of Artificial Sequence: Synthetic oligonucleotide
  Sense strand starting at position 2243 of SEQ ID NO: 1885112
cagagaugacucgguugag

SEQ ID NO: 2317111 - RNA, 19 nt, Artificial Sequence
  Description of Artificial Sequence: Synthetic oligonucleotide
  Antisense strand to SEQ ID NO: 2317110
cucaaccgagucaucucug

SEQ ID NO: 2317112 - RNA, 19 nt, Artificial Sequence
  Description of Artificial Sequence: Synthetic oligonucleotide
  Sense strand starting at position 2244 of SEQ ID NO: 1885112
agagaugacucgguugaga

SEQ ID NO: 2317113 - RNA, 19 nt, Artificial Sequence
  Description of Artificial Sequence: Synthetic oligonucleotide
  Antisense strand to SEQ ID NO: 2317112
ucucaaccgagucaucucu

SEQ ID NO: 2317114 - RNA, 19 nt, Artificial Sequence
  Description of Artificial Sequence: Synthetic oligonucleotide
  Sense strand starting at position 2246 of SEQ ID NO: 1885112
agaugacucgguugagacu

SEQ ID NO: 2317115 - RNA, 19 nt, Artificial Sequence
  Description of Artificial Sequence: Synthetic oligonucleotide
  Antisense strand to SEQ ID NO: 2317114
agucucaaccgagucaucu

SEQ ID NO: 2317116 - RNA, 19 nt, Artificial Sequence
  Description of Artificial Sequence: Synthetic oligonucleotide
  Sense strand starting at position 2247 of SEQ ID NO: 1885112
gaugacucgguugagacuu

SEQ ID NO: 2317117 - RNA, 19 nt, Artificial Sequence
  Description of Artificial Sequence: Synthetic oligonucleotide
  Antisense strand to SEQ ID NO: 2317116
aagucucaaccgagucauc

SEQ ID NO: 2317118 - RNA, 19 nt, Artificial Sequence
  Description of Artificial Sequence: Synthetic oligonucleotide
  Sense strand starting at position 2280 of SEQ ID NO: 1885112
gagagugagcagugggaaa

SEQ ID NO: 2317119 - RNA, 19 nt, Artificial Sequence
  Description of Artificial Sequence: Synthetic oligonucleotide
  Antisense strand to SEQ ID NO: 2317118
uuucccacugcucacucuc

SEQ ID NO: 2317120 - RNA, 19 nt, Artificial Sequence
  Description of Artificial Sequence: Synthetic oligonucleotide
  Sense strand starting at position 3087 of SEQ ID NO: 1885112
aucucucauuuagagaguu

SEQ ID NO: 2317121 - RNA, 19 nt, Artificial Sequence
  Description of Artificial Sequence: Synthetic oligonucleotide
  Antisense strand to SEQ ID NO: 2317120
aacucucuaaaugagagau

SEQ ID NO: 2317122 - RNA, 19 nt, Artificial Sequence
  Description of Artificial Sequence: Synthetic oligonucleotide
  Sense strand starting at position 3095 of SEQ ID NO: 1885112
uuuagagaguuugcgaaca

SEQ ID NO: 2317123 - RNA, 19 nt, Artificial Sequence
  Description of Artificial Sequence: Synthetic oligonucleotide
  Antisense strand to SEQ ID NO: 2317122
uguucgcaaacucucuaaa

SEQ ID NO: 2317124 - RNA, 19 nt, Artificial Sequence
  Description of Artificial Sequence: Synthetic oligonucleotide
  Sense strand starting at position 3100 of SEQ ID NO: 1885112
agaguuugcgaacaaguac

SEQ ID NO: 2317125 - RNA, 19 nt, Artificial Sequence
  Description of Artificial Sequence: Synthetic oligonucleotide
  Antisense strand to SEQ ID NO: 2317124
guacuuguucgcaaacucu

SEQ ID NO: 2317126 - RNA, 19 nt, Artificial Sequence
  Description of Artificial Sequence: Synthetic oligonucleotide
  Sense strand starting at position 3325 of SEQ ID NO: 1885112
gcgcaaagcuaauuuguua

SEQ ID NO: 2317127 - RNA, 19 nt, Artificial Sequence
  Description of Artificial Sequence: Synthetic oligonucleotide
  Antisense strand to SEQ ID NO: 2317126
uaacaaauuagcuuugcgc

SEQ ID NO: 2317128 - RNA, 19 nt, Artificial Sequence
  Description of Artificial Sequence: Synthetic oligonucleotide
  Sense strand starting at position 3371 of SEQ ID NO: 1885112
ccagcuuccuauuucgcaa

SEQ ID NO: 2317129 - RNA, 19 nt, Artificial Sequence
  Description of Artificial Sequence: Synthetic oligonucleotide
  Antisense strand to SEQ ID NO: 2317128
uugcgaaauaggaagcugg

SEQ ID NO: 2317130 - RNA, 19 nt, Artificial Sequence
  Description of Artificial Sequence: Synthetic oligonucleotide
  Sense strand starting at position 3379 of SEQ ID NO: 1885112
cuauuucgcaaaggugagu

SEQ ID NO: 2317131 - RNA, 19 nt, Artificial Sequence
  Description of Artificial Sequence: Synthetic oligonucleotide
  Antisense strand to SEQ ID NO: 2317130
acucaccuuugcgaaauag

SEQ ID NO: 2317132 - RNA, 19 nt, Artificial Sequence
  Description of Artificial Sequence: Synthetic oligonucleotide
  Sense strand starting at position 3394 of SEQ ID NO: 1885112
gaguuuagggccuauggaa

SEQ ID NO: 2317133 - RNA, 19 nt, Artificial Sequence
  Description of Artificial Sequence: Synthetic oligonucleotide
  Antisense strand to SEQ ID NO: 2317132
uuccauaggcccuaaacuc

SEQ ID NO: 2317134 - RNA, 19 nt, Artificial Sequence
  Description of Artificial Sequence: Synthetic oligonucleotide
  Sense strand starting at position 3421 of SEQ ID NO: 1885112
acuuauugcuugcuugaaa

SEQ ID NO: 2317135 - RNA, 19 nt, Artificial Sequence
  Description of Artificial Sequence: Synthetic oligonucleotide
  Antisense strand to SEQ ID NO: 2317134
uuucaagcaagcaauaagu

SEQ ID NO: 2317136 - RNA, 19 nt, Artificial Sequence
  Description of Artificial Sequence: Synthetic oligonucleotide
  Sense strand starting at position 3485 of SEQ ID NO: 1885112
cugcauaucguugcugauu

SEQ ID NO: 2317137 - RNA, 19 nt, Artificial Sequence
  Description of Artificial Sequence: Synthetic oligonucleotide
  Antisense strand to SEQ ID NO: 2317136
aaucagcaacgauaugcag

SEQ ID NO: 2317138 - RNA, 19 nt, Artificial Sequence
  Description of Artificial Sequence: Synthetic oligonucleotide
  Sense strand starting at position 3486 of SEQ ID NO: 1885112
ugcauaucguugcugauuu

SEQ ID NO: 2317139 - RNA, 19 nt, Artificial Sequence
  Description of Artificial Sequence: Synthetic oligonucleotide
  Antisense strand to SEQ ID NO: 2317138
aaaucagcaacgauaugca

SEQ ID NO: 2317140 - RNA, 19 nt, Artificial Sequence
  Description of Artificial Sequence: Synthetic oligonucleotide
  Sense strand starting at position 3522 of SEQ ID NO: 1885112
guugauaugaagcaaagca

SEQ ID NO: 2317141 - RNA, 19 nt, Artificial Sequence
  Description of Artificial Sequence: Synthetic oligonucleotide
  Antisense strand to SEQ ID NO: 2317140
ugcuuugcuucauaucaac

SEQ ID NO: 2317142 - RNA, 19 nt, Artificial Sequence
  Description of Artificial Sequence: Synthetic oligonucleotide
  Sense strand starting at position 3546 of SEQ ID NO: 1885112
ggaggaacaugcuaauaga

SEQ ID NO: 2317143 - RNA, 19 nt, Artificial Sequence
  Description of Artificial Sequence: Synthetic oligonucleotide
  Antisense strand to SEQ ID NO: 2317142
ucuauuagcauguuccucc

SEQ ID NO: 2317144 - RNA, 19 nt, Artificial Sequence
  Description of Artificial Sequence: Synthetic oligonucleotide
  Sense strand starting at position 3645 of SEQ ID NO: 1885112
guaacagacuucuccaaag

SEQ ID NO: 2317145 - RNA, 19 nt, Artificial Sequence
  Description of Artificial Sequence: Synthetic oligonucleotide
  Antisense strand to SEQ ID NO: 2317144
cuuuggagaagucuguuac

SEQ ID NO: 2317146 - RNA, 19 nt, Artificial Sequence
  Description of Artificial Sequence: Synthetic oligonucleotide
  Sense strand starting at position 3657 of SEQ ID NO: 1885112
uccaaagacgauuauuguu

SEQ ID NO: 2317147 - RNA, 19 nt, Artificial Sequence
  Description of Artificial Sequence: Synthetic oligonucleotide
  Antisense strand to SEQ ID NO: 2317146
aacaauaaucgucuuugga

SEQ ID NO: 2317148 - RNA, 19 nt, Artificial Sequence
  Description of Artificial Sequence: Synthetic oligonucleotide
  Sense strand starting at position 3932 of SEQ ID NO: 1885112
augacuuugugaguacuuu

SEQ ID NO: 2317149 - RNA, 19 nt, Artificial Sequence
  Description of Artificial Sequence: Synthetic oligonucleotide
  Antisense strand to SEQ ID NO: 2317148
aaaguacucacaaagucau

SEQ ID NO: 2317150 - RNA, 19 nt, Artificial Sequence
  Description of Artificial Sequence: Synthetic oligonucleotide
  Sense strand starting at position 3933 of SEQ ID NO: 1885112
ugacuuugugaguacuuua

SEQ ID NO: 2317151 - RNA, 19 nt, Artificial Sequence
  Description of Artificial Sequence: Synthetic oligonucleotide
  Antisense strand to SEQ ID NO: 2317150
uaaaguacucacaaaguca

SEQ ID NO: 2317152 - RNA, 19 nt, Artificial Sequence
  Description of Artificial Sequence: Synthetic oligonucleotide
  Sense strand starting at position 3936 of SEQ ID NO: 1885112
cuuugugaguacuuuauau

SEQ ID NO: 2317153 - RNA, 19 nt, Artificial Sequence
  Description of Artificial Sequence: Synthetic oligonucleotide
  Antisense strand to SEQ ID NO: 2317152
auauaaaguacucacaaag

SEQ ID NO: 2317154 - RNA, 19 nt, Artificial Sequence
  Description of Artificial Sequence: Synthetic oligonucleotide
  Sense strand starting at position 1417 of SEQ ID NO: 1885113
gguuucugcccagagaucu

SEQ ID NO: 2317155 - RNA, 19 nt, Artificial Sequence
  Description of Artificial Sequence: Synthetic oligonucleotide
  Antisense strand to SEQ ID NO: 2317154
agaucucugggcagaaacc

SEQ ID NO: 2317156 - RNA, 19 nt, Artificial Sequence
  Description of Artificial Sequence: Synthetic oligonucleotide
  Sense strand starting at position 2059 of SEQ ID NO: 1885113
aguuguacagcucaguuua

SEQ ID NO: 2317157 - RNA, 19 nt, Artificial Sequence
  Description of Artificial Sequence: Synthetic oligonucleotide
  Antisense strand to SEQ ID NO: 2317156
uaaacugagcuguacaacu

SEQ ID NO: 2317158 - RNA, 19 nt, Artificial Sequence
  Description of Artificial Sequence: Synthetic oligonucleotide
  Sense strand starting at position 2096 of SEQ ID NO: 1885113
uguguugcaucagucaaga

SEQ ID NO: 2317159 - RNA, 19 nt, Artificial Sequence
  Description of Artificial Sequence: Synthetic oligonucleotide
  Antisense strand to SEQ ID NO: 2317158
ucuugacugaugcaacaca

SEQ ID NO: 2317160 - RNA, 19 nt, Artificial Sequence
  Description of Artificial Sequence: Synthetic oligonucleotide
  Sense strand starting at position 2101 of SEQ ID NO: 1885113
ugcaucagucaagaauaua

SEQ ID NO: 2317161 - RNA, 19 nt, Artificial Sequence
  Description of Artificial Sequence: Synthetic oligonucleotide
  Antisense strand to SEQ ID NO: 2317160
uauauucuugacugaugca

SEQ ID NO: 2317162 - RNA, 19 nt, Artificial Sequence
  Description of Artificial Sequence: Synthetic oligonucleotide
  Sense strand starting at position 2234 of SEQ ID NO: 1885113
ggcucaaugaugugauuaa

SEQ ID NO: 2317163 - RNA, 19 nt, Artificial Sequence
  Description of Artificial Sequence: Synthetic oligonucleotide
  Antisense strand to SEQ ID NO: 2317162
uuaaucacaucauugagcc

SEQ ID NO: 2317164 - RNA, 19 nt, Artificial Sequence
  Description of Artificial Sequence: Synthetic oligonucleotide
  Sense strand starting at position 2235 of SEQ ID NO: 1885113
gcucaaugaugugauuaag

SEQ ID NO: 2317165 - RNA, 19 nt, Artificial Sequence
  Description of Artificial Sequence: Synthetic oligonucleotide
  Antisense strand to SEQ ID NO: 2317164
cuuaaucacaucauugagc

SEQ ID NO: 2317166 - RNA, 19 nt, Artificial Sequence
  Description of Artificial Sequence: Synthetic oligonucleotide
  Sense strand starting at position 2241 of SEQ ID NO: 1885113
ugaugugauuaagacucca

SEQ ID NO: 2317167 - RNA, 19 nt, Artificial Sequence
  Description of Artificial Sequence: Synthetic oligonucleotide
  Antisense strand to SEQ ID NO: 2317166
uggagucuuaaucacauca

SEQ ID NO: 2317168 - RNA, 19 nt, Artificial Sequence
  Description of Artificial Sequence: Synthetic oligonucleotide
  Sense strand starting at position 2303 of SEQ ID NO: 1885113
acauguguauaaucucaua

SEQ ID NO: 2317169 - RNA, 19 nt, Artificial Sequence
  Description of Artificial Sequence: Synthetic oligonucleotide
  Antisense strand to SEQ ID NO: 2317168
uaugagauuauacacaugu

SEQ ID NO: 2317170 - RNA, 19 nt, Artificial Sequence
  Description of Artificial Sequence: Synthetic oligonucleotide
  Sense strand starting at position 2359 of SEQ ID NO: 1885113
auguuacaugcagaaugau

SEQ ID NO: 2317171 - RNA, 19 nt, Artificial Sequence
  Description of Artificial Sequence: Synthetic oligonucleotide
  Antisense strand to SEQ ID NO: 2317170
aucauucugcauguaacau

SEQ ID NO: 2317172 - RNA, 19 nt, Artificial Sequence
  Description of Artificial Sequence: Synthetic oligonucleotide
  Sense strand starting at position 2396 of SEQ ID NO: 1885113
ccucuuaucaaguggugga

SEQ ID NO: 2317173 - RNA, 19 nt, Artificial Sequence
  Description of Artificial Sequence: Synthetic oligonucleotide
  Antisense strand to SEQ ID NO: 2317172
uccaccacuugauaagagg

SEQ ID NO: 2317174 - RNA, 19 nt, Artificial Sequence
  Description of Artificial Sequence: Synthetic oligonucleotide
  Sense strand starting at position 2397 of SEQ ID NO: 1885113
cucuuaucaagugguggaa

SEQ ID NO: 2317175 - RNA, 19 nt, Artificial Sequence
  Description of Artificial Sequence: Synthetic oligonucleotide
  Antisense strand to SEQ ID NO: 2317174
uuccaccacuugauaagag

SEQ ID NO: 2317176 - RNA, 19 nt, Artificial Sequence
  Description of Artificial Sequence: Synthetic oligonucleotide
  Sense strand starting at position 2713 of SEQ ID NO: 1885113
ccuaaagaaucaugagcua

SEQ ID NO: 2317177 - RNA, 19 nt, Artificial Sequence
  Description of Artificial Sequence: Synthetic oligonucleotide
  Antisense strand to SEQ ID NO: 2317176
uagcucaugauucuuuagg

SEQ ID NO: 2317178 - RNA, 19 nt, Artificial Sequence
  Description of Artificial Sequence: Synthetic oligonucleotide
  Sense strand starting at position 2747 of SEQ ID NO: 1885113
ccgcuaagucuugaagugu

SEQ ID NO: 2317179 - RNA, 19 nt, Artificial Sequence
  Description of Artificial Sequence: Synthetic oligonucleotide
  Antisense strand to SEQ ID NO: 2317178
acacuucaagacuuagcgg

SEQ ID NO: 2317180 - RNA, 19 nt, Artificial Sequence
  Description of Artificial Sequence: Synthetic oligonucleotide
  Sense strand starting at position 2867 of SEQ ID NO: 1885113
uuucuauucuggcugaaua

SEQ ID NO: 2317181 - RNA, 19 nt, Artificial Sequence
  Description of Artificial Sequence: Synthetic oligonucleotide
  Antisense strand to SEQ ID NO: 2317180
uauucagccagaauagaaa

SEQ ID NO: 2317182 - RNA, 19 nt, Artificial Sequence
  Description of Artificial Sequence: Synthetic oligonucleotide
  Sense strand starting at position 2868 of SEQ ID NO: 1885113
uucuauucuggcugaauau

SEQ ID NO: 2317183 - RNA, 19 nt, Artificial Sequence
  Description of Artificial Sequence: Synthetic oligonucleotide
  Antisense strand to SEQ ID NO: 2317182
auauucagccagaauagaa

SEQ ID NO: 2317184 - RNA, 19 nt, Artificial Sequence
  Description of Artificial Sequence: Synthetic oligonucleotide
  Sense strand starting at position 2869 of SEQ ID NO: 1885113
ucuauucuggcugaauauu

SEQ ID NO: 2317185 - RNA, 19 nt, Artificial Sequence
  Description of Artificial Sequence: Synthetic oligonucleotide
  Antisense strand to SEQ ID NO: 2317184
aauauucagccagaauaga

SEQ ID NO: 2317186 - RNA, 19 nt, Artificial Sequence
  Description of Artificial Sequence: Synthetic oligonucleotide
  Sense strand starting at position 2907 of SEQ ID NO: 1885113
guagaaauugaguggagcu

SEQ ID NO: 2317187 - RNA, 19 nt, Artificial Sequence
  Description of Artificial Sequence: Synthetic oligonucleotide
  Antisense strand to SEQ ID NO: 2317186
agcuccacucaauuucuac

SEQ ID NO: 2317188 - RNA, 19 nt, Artificial Sequence
  Description of Artificial Sequence: Synthetic oligonucleotide
  Sense strand starting at position 2999 of SEQ ID NO: 1885113
gggcguguccuacacauga

SEQ ID NO: 2317189 - RNA, 19 nt, Artificial Sequence
  Description of Artificial Sequence: Synthetic oligonucleotide
  Antisense strand to SEQ ID NO: 2317188
ucauguguaggacacgccc

SEQ ID NO: 2317190 - RNA, 19 nt, Artificial Sequence
  Description of Artificial Sequence: Synthetic oligonucleotide
  Sense strand starting at position 3089 of SEQ ID NO: 1885113
gauguuguugugggugaaa

SEQ ID NO: 2317191 - RNA, 19 nt, Artificial Sequence
  Description of Artificial Sequence: Synthetic oligonucleotide
  Antisense strand to SEQ ID NO: 2317190
uuucacccacaacaacauc

SEQ ID NO: 2317192 - RNA, 19 nt, Artificial Sequence
  Description of Artificial Sequence: Synthetic oligonucleotide
  Sense strand starting at position 3091 of SEQ ID NO: 1885113
uguuguugugggugaaaga

SEQ ID NO: 2317193 - RNA, 19 nt, Artificial Sequence
  Description of Artificial Sequence: Synthetic oligonucleotide
  Antisense strand to SEQ ID NO: 2317192
ucuuucacccacaacaaca

SEQ ID NO: 2317194 - RNA, 19 nt, Artificial Sequence
  Description of Artificial Sequence: Synthetic oligonucleotide
  Sense strand starting at position 3092 of SEQ ID NO: 1885113
guuguugugggugaaagau

SEQ ID NO: 2317195 - RNA, 19 nt, Artificial Sequence
  Description of Artificial Sequence: Synthetic oligonucleotide
  Antisense strand to SEQ ID NO: 2317194
aucuuucacccacaacaac

SEQ ID NO: 2317196 - RNA, 19 nt, Artificial Sequence
  Description of Artificial Sequence: Synthetic oligonucleotide
  Sense strand starting at position 3101 of SEQ ID NO: 1885113
ggugaaagaucccaauaua

SEQ ID NO: 2317197 - RNA, 19 nt, Artificial Sequence
  Description of Artificial Sequence: Synthetic oligonucleotide
  Antisense strand to SEQ ID NO: 2317196
uauauugggaucuuucacc

SEQ ID NO: 2317198 - RNA, 19 nt, Artificial Sequence
  Description of Artificial Sequence: Synthetic oligonucleotide
  Sense strand starting at position 3124 of SEQ ID NO: 1885113
cccacaaacuuagaggaua

SEQ ID NO: 2317199 - RNA, 19 nt, Artificial Sequence
  Description of Artificial Sequence: Synthetic oligonucleotide
  Antisense strand to SEQ ID NO: 2317198
uauccucuaaguuuguggg

SEQ ID NO: 2317200 - RNA, 19 nt, Artificial Sequence
  Description of Artificial Sequence: Synthetic oligonucleotide
  Sense strand starting at position 3132 of SEQ ID NO: 1885113
cuuagaggauaguuaucaa

SEQ ID NO: 2317201 - RNA, 19 nt, Artificial Sequence
  Description of Artificial Sequence: Synthetic oligonucleotide
  Antisense strand to SEQ ID NO: 2317200
uugauaacuauccucuaag

SEQ ID NO: 2317202 - RNA, 19 nt, Artificial Sequence
  Description of Artificial Sequence: Synthetic oligonucleotide
  Sense strand starting at position 3135 of SEQ ID NO: 1885113
agaggauaguuaucaaguu

SEQ ID NO: 2317203 - RNA, 19 nt, Artificial Sequence
  Description of Artificial Sequence: Synthetic oligonucleotide
  Antisense strand to SEQ ID NO: 2317202
aacuugauaacuauccucu

SEQ ID NO: 2317204 - RNA, 19 nt, Artificial Sequence
  Description of Artificial Sequence: Synthetic oligonucleotide
  Sense strand starting at position 3136 of SEQ ID NO: 1885113
gaggauaguuaucaaguuc

SEQ ID NO: 2317205 - RNA, 19 nt, Artificial Sequence
  Description of Artificial Sequence: Synthetic oligonucleotide
  Antisense strand to SEQ ID NO: 2317204
gaacuugauaacuauccuc

SEQ ID NO: 2317206 - RNA, 19 nt, Artificial Sequence
  Description of Artificial Sequence: Synthetic oligonucleotide
  Sense strand starting at position 3176 of SEQ ID NO: 1885113
ucucuauuggcuugaggug

SEQ ID NO: 2317207 - RNA, 19 nt, Artificial Sequence
  Description of Artificial Sequence: Synthetic oligonucleotide
  Antisense strand to SEQ ID NO: 2317206
caccucaagccaauagaga

SEQ ID NO: 2317208 - RNA, 19 nt, Artificial Sequence
  Description of Artificial Sequence: Synthetic oligonucleotide
  Sense strand starting at position 3212 of SEQ ID NO: 1885113
ccuacacuuuaguaaacga

SEQ ID NO: 2317209 - RNA, 19 nt, Artificial Sequence
  Description of Artificial Sequence: Synthetic oligonucleotide
  Antisense strand to SEQ ID NO: 2317208
ucguuuacuaaaguguagg

SEQ ID NO: 2317210 - RNA, 19 nt, Artificial Sequence
  Description of Artificial Sequence: Synthetic oligonucleotide
  Sense strand starting at position 3369 of SEQ ID NO: 1885113
ggacucuggugaugagauc

SEQ ID NO: 2317211 - RNA, 19 nt, Artificial Sequence
  Description of Artificial Sequence: Synthetic oligonucleotide
  Antisense strand to SEQ ID NO: 2317210
gaucucaucaccagagucc

SEQ ID NO: 2317212 - RNA, 19 nt, Artificial Sequence
  Description of Artificial Sequence: Synthetic oligonucleotide
  Sense strand starting at position 3380 of SEQ ID NO: 1885113
augagauccuagcuaauug

SEQ ID NO: 2317213 - RNA, 19 nt, Artificial Sequence
  Description of Artificial Sequence: Synthetic oligonucleotide
  Antisense strand to SEQ ID NO: 2317212
caauuagcuaggaucucau

SEQ ID NO: 2317214 - RNA, 19 nt, Artificial Sequence
  Description of Artificial Sequence: Synthetic oligonucleotide
  Sense strand starting at position 3438 of SEQ ID NO: 1885113
cagugucuugaguaguugu

SEQ ID NO: 2317215 - RNA, 19 nt, Artificial Sequence
  Description of Artificial Sequence: Synthetic oligonucleotide
  Antisense strand to SEQ ID NO: 2317214
acaacuacucaagacacug

SEQ ID NO: 2317216 - RNA, 19 nt, Artificial Sequence
  Description of Artificial Sequence: Synthetic oligonucleotide
  Sense strand starting at position 3595 of SEQ ID NO: 1885113
uccacauuaugguuucuca

SEQ ID NO: 2317217 - RNA, 19 nt, Artificial Sequence
  Description of Artificial Sequence: Synthetic oligonucleotide
  Antisense strand to SEQ ID NO: 2317216
ugagaaaccauaaugugga

SEQ ID NO: 2317218 - RNA, 19 nt, Artificial Sequence
  Description of Artificial Sequence: Synthetic oligonucleotide
  Sense strand starting at position 3615 of SEQ ID NO: 1885113
cucacaucagaaugugaca

SEQ ID NO: 2317219 - RNA, 19 nt, Artificial Sequence
  Description of Artificial Sequence: Synthetic oligonucleotide
  Antisense strand to SEQ ID NO: 2317218
ugucacauucugaugugag

SEQ ID NO: 2317220 - RNA, 19 nt, Artificial Sequence
  Description of Artificial Sequence: Synthetic oligonucleotide
  Sense strand starting at position 3620 of SEQ ID NO: 1885113
aucagaaugugacaccaau

SEQ ID NO: 2317221 - RNA, 19 nt, Artificial Sequence
  Description of Artificial Sequence: Synthetic oligonucleotide
  Antisense strand to SEQ ID NO: 2317220
auuggugucacauucugau

SEQ ID NO: 2317222 - RNA, 19 nt, Artificial Sequence
  Description of Artificial Sequence: Synthetic oligonucleotide
  Sense strand starting at position 3653 of SEQ ID NO: 1885113
ccuguacacugagauaaag

SEQ ID NO: 2317223 - RNA, 19 nt, Artificial Sequence
  Description of Artificial Sequence: Synthetic oligonucleotide
  Antisense strand to SEQ ID NO: 2317222
cuuuaucucaguguacagg

SEQ ID NO: 2317224 - RNA, 19 nt, Artificial Sequence
  Description of Artificial Sequence: Synthetic oligonucleotide
  Sense strand starting at position 3745 of SEQ ID NO: 1885113
gaaguuagauaacugcuuu

SEQ ID NO: 2317225 - RNA, 19 nt, Artificial Sequence
  Description of Artificial Sequence: Synthetic oligonucleotide
  Antisense strand to SEQ ID NO: 2317224
aaagcaguuaucuaacuuc

SEQ ID NO: 2317226 - RNA, 19 nt, Artificial Sequence
  Description of Artificial Sequence: Synthetic oligonucleotide
  Sense strand starting at position 3784 of SEQ ID NO: 1885113
gaaagcaugccaugucuca

SEQ ID NO: 2317227 - RNA, 19 nt, Artificial Sequence
  Description of Artificial Sequence: Synthetic oligonucleotide
  Antisense strand to SEQ ID NO: 2317226
ugagacauggcaugcuuuc

SEQ ID NO: 2317228 - RNA, 19 nt, Artificial Sequence
  Description of Artificial Sequence: Synthetic oligonucleotide
  Sense strand starting at position 3917 of SEQ ID NO: 1885113
gucauaaauguugagacga

SEQ ID NO: 2317229 - RNA, 19 nt, Artificial Sequence
  Description of Artificial Sequence: Synthetic oligonucleotide
  Antisense strand to SEQ ID NO: 2317228
ucgucucaacauuuaugac

SEQ ID NO: 2317230 - RNA, 19 nt, Artificial Sequence
  Description of Artificial Sequence: Synthetic oligonucleotide
  Sense strand starting at position 3919 of SEQ ID NO: 1885113
cauaaauguugagacgauu

SEQ ID NO: 2317231 - RNA, 19 nt, Artificial Sequence
  Description of Artificial Sequence: Synthetic oligonucleotide
  Antisense strand to SEQ ID NO: 2317230
aaucgucucaacauuuaug

SEQ ID NO: 2317232 - RNA, 19 nt, Artificial Sequence
  Description of Artificial Sequence: Synthetic oligonucleotide
  Sense strand starting at position 3967 of SEQ ID NO: 1885113
ccuacaaugucuguucuga

SEQ ID NO: 2317233 - RNA, 19 nt, Artificial Sequence
  Description of Artificial Sequence: Synthetic oligonucleotide
  Antisense strand to SEQ ID NO: 2317232
ucagaacagacauuguagg

SEQ ID NO: 2317234 - RNA, 19 nt, Artificial Sequence
  Description of Artificial Sequence: Synthetic oligonucleotide
  Sense strand starting at position 113 of SEQ ID NO: 1885114
gugguagucuaagcaugaa

SEQ ID NO: 2317235 - RNA, 19 nt, Artificial Sequence
  Description of Artificial Sequence: Synthetic oligonucleotide
  Antisense strand to SEQ ID NO: 2317234
uucaugcuuagacuaccac

SEQ ID NO: 2317236 - RNA, 19 nt, Artificial Sequence
  Description of Artificial Sequence: Synthetic oligonucleotide
  Sense strand starting at position 150 of SEQ ID NO: 1885114
ggcagcuguuugccaaaca

SEQ ID NO: 2317237 - RNA, 19 nt, Artificial Sequence
  Description of Artificial Sequence: Synthetic oligonucleotide
  Antisense strand to SEQ ID NO: 2317236
uguuuggcaaacagcugcc

SEQ ID NO: 2317238 - RNA, 19 nt, Artificial Sequence
  Description of Artificial Sequence: Synthetic oligonucleotide
  Sense strand starting at position 188 of SEQ ID NO: 1885114
ucccgugugguuuggauga

SEQ ID NO: 2317239 - RNA, 19 nt, Artificial Sequence
  Description of Artificial Sequence: Synthetic oligonucleotide
  Antisense strand to SEQ ID NO: 2317238
ucauccaaaccacacggga

SEQ ID NO: 2317240 - RNA, 19 nt, Artificial Sequence
  Description of Artificial Sequence: Synthetic oligonucleotide
  Sense strand starting at position 193 of SEQ ID NO: 1885114
ugugguuuggaugaugaca

SEQ ID NO: 2317241 - RNA, 19 nt, Artificial Sequence
  Description of Artificial Sequence: Synthetic oligonucleotide
  Antisense strand to SEQ ID NO: 2317240
ugucaucauccaaaccaca

SEQ ID NO: 2317242 - RNA, 19 nt, Artificial Sequence
  Description of Artificial Sequence: Synthetic oligonucleotide
  Sense strand starting at position 302 of SEQ ID NO: 1885114
gcaguuuagucacuggaac

SEQ ID NO: 2317243 - RNA, 19 nt, Artificial Sequence
  Description of Artificial Sequence: Synthetic oligonucleotide
  Antisense strand to SEQ ID NO: 2317242
guuccagugacuaaacugc

SEQ ID NO: 2317244 - RNA, 19 nt, Artificial Sequence
  Description of Artificial Sequence: Synthetic oligonucleotide
  Sense strand starting at position 382 of SEQ ID NO: 1885114
agagcugaaucagucaaca

SEQ ID NO: 2317245 - RNA, 19 nt, Artificial Sequence
  Description of Artificial Sequence: Synthetic oligonucleotide
  Antisense strand to SEQ ID NO: 2317244
uguugacugauucagcucu

SEQ ID NO: 2317246 - RNA, 19 nt, Artificial Sequence
  Description of Artificial Sequence: Synthetic oligonucleotide
  Sense strand starting at position 558 of SEQ ID NO: 1885114
gagagucugcaccauuaga

SEQ ID NO: 2317247 - RNA, 19 nt, Artificial Sequence
  Description of Artificial Sequence: Synthetic oligonucleotide
  Antisense strand to SEQ ID NO: 2317246
ucuaauggugcagacucuc

SEQ ID NO: 2317248 - RNA, 19 nt, Artificial Sequence
  Description of Artificial Sequence: Synthetic oligonucleotide
  Sense strand starting at position 571 of SEQ ID NO: 1885114
auuagaguuugcuuccuca

SEQ ID NO: 2317249 - RNA, 19 nt, Artificial Sequence
  Description of Artificial Sequence: Synthetic oligonucleotide
  Antisense strand to SEQ ID NO: 2317248
ugaggaagcaaacucuaau

SEQ ID NO: 2317250 - RNA, 19 nt, Artificial Sequence
  Description of Artificial Sequence: Synthetic oligonucleotide
  Sense strand starting at position 574 of SEQ ID NO: 1885114
agaguuugcuuccucauca

SEQ ID NO: 2317251 - RNA, 19 nt, Artificial Sequence
  Description of Artificial Sequence: Synthetic oligonucleotide
  Antisense strand to SEQ ID NO: 2317250
ugaugaggaagcaaacucu

SEQ ID NO: 2317252 - RNA, 19 nt, Artificial Sequence
  Description of Artificial Sequence: Synthetic oligonucleotide
  Sense strand starting at position 609 of SEQ ID NO: 1885114
ugugauuaacaguacaggu

SEQ ID NO: 2317253 - RNA, 19 nt, Artificial Sequence
  Description of Artificial Sequence: Synthetic oligonucleotide
  Antisense strand to SEQ ID NO: 2317252
accuguacuguuaaucaca

SEQ ID NO: 2317254 - RNA, 19 nt, Artificial Sequence
  Description of Artificial Sequence: Synthetic oligonucleotide
  Sense strand starting at position 658 of SEQ ID NO: 1885114
ugaaauuaugagugccagu

SEQ ID NO: 2317255 - RNA, 19 nt, Artificial Sequence
  Description of Artificial Sequence: Synthetic oligonucleotide
  Antisense strand to SEQ ID NO: 2317254
acuggcacucauaauuuca

SEQ ID NO: 2317256 - RNA, 19 nt, Artificial Sequence
  Description of Artificial Sequence: Synthetic oligonucleotide
  Sense strand starting at position 1025 of SEQ ID NO: 1885114
ccaagaauguuagucagau

SEQ ID NO: 2317257 - RNA, 19 nt, Artificial Sequence
  Description of Artificial Sequence: Synthetic oligonucleotide
  Antisense strand to SEQ ID NO: 2317256
aucugacuaacauucuugg

SEQ ID NO: 2317258 - RNA, 19 nt, Artificial Sequence
  Description of Artificial Sequence: Synthetic oligonucleotide
  Sense strand starting at position 1026 of SEQ ID NO: 1885114
caagaauguuagucagauu

SEQ ID NO: 2317259 - RNA, 19 nt, Artificial Sequence
  Description of Artificial Sequence: Synthetic oligonucleotide
  Antisense strand to SEQ ID NO: 2317258
aaucugacuaacauucuug

SEQ ID NO: 2317260 - RNA, 19 nt, Artificial Sequence
  Description of Artificial Sequence: Synthetic oligonucleotide
  Sense strand starting at position 1408 of SEQ ID NO: 1885114
cggagagcgcaaggaauua

SEQ ID NO: 2317261 - RNA, 19 nt, Artificial Sequence
  Description of Artificial Sequence: Synthetic oligonucleotide
  Antisense strand to SEQ ID NO: 2317260
uaauuccuugcgcucuccg

SEQ ID NO: 2317262 - RNA, 19 nt, Artificial Sequence
  Description of Artificial Sequence: Synthetic oligonucleotide
  Sense strand starting at position 2006 of SEQ ID NO: 1885114
guauguguuuggagagaag

SEQ ID NO: 2317263 - RNA, 19 nt, Artificial Sequence
  Description of Artificial Sequence: Synthetic oligonucleotide
  Antisense strand to SEQ ID NO: 2317262
cuucucuccaaacacauac

SEQ ID NO: 2317264 - RNA, 19 nt, Artificial Sequence
  Description of Artificial Sequence: Synthetic oligonucleotide
  Sense strand starting at position 2017 of SEQ ID NO: 1885114
gagagaagaugggauauaa

SEQ ID NO: 2317265 - RNA, 19 nt, Artificial Sequence
  Description of Artificial Sequence: Synthetic oligonucleotide
  Antisense strand to SEQ ID NO: 2317264
uuauaucccaucuucucuc

SEQ ID NO: 2317266 - RNA, 19 nt, Artificial Sequence
  Description of Artificial Sequence: Synthetic oligonucleotide
  Sense strand starting at position 2047 of SEQ ID NO: 1885114
aauugaugagggugagcuu

SEQ ID NO: 2317267 - RNA, 19 nt, Artificial Sequence
  Description of Artificial Sequence: Synthetic oligonucleotide
  Antisense strand to SEQ ID NO: 2317266
aagcucacccucaucaauu

SEQ ID NO: 2317268 - RNA, 19 nt, Artificial Sequence
  Description of Artificial Sequence: Synthetic oligonucleotide
  Sense strand starting at position 2080 of SEQ ID NO: 1885114
uuguuccuauuacuguaua

SEQ ID NO: 2317269 - RNA, 19 nt, Artificial Sequence
  Description of Artificial Sequence: Synthetic oligonucleotide
  Antisense strand to SEQ ID NO: 2317268
uauacaguaauaggaacaa

SEQ ID NO: 2317270 - RNA, 19 nt, Artificial Sequence
  Description of Artificial Sequence: Synthetic oligonucleotide
  Sense strand starting at position 2167 of SEQ ID NO: 1885114
uuucuagaguucgcgaaca

SEQ ID NO: 2317271 - RNA, 19 nt, Artificial Sequence
  Description of Artificial Sequence: Synthetic oligonucleotide
  Antisense strand to SEQ ID NO: 2317270
uguucgcgaacucuagaaa

SEQ ID NO: 2317272 - RNA, 19 nt, Artificial Sequence
  Description of Artificial Sequence: Synthetic oligonucleotide
  Sense strand starting at position 2169 of SEQ ID NO: 1885114
ucuagaguucgcgaacauu

SEQ ID NO: 2317273 - RNA, 19 nt, Artificial Sequence
  Description of Artificial Sequence: Synthetic oligonucleotide
  Antisense strand to SEQ ID NO: 2317272
aauguucgcgaacucuaga

SEQ ID NO: 2317274 - RNA, 19 nt, Artificial Sequence
  Description of Artificial Sequence: Synthetic oligonucleotide
  Sense strand starting at position 2172 of SEQ ID NO: 1885114
agaguucgcgaacauuugu

SEQ ID NO: 2317275 - RNA, 19 nt, Artificial Sequence
  Description of Artificial Sequence: Synthetic oligonucleotide
  Antisense strand to SEQ ID NO: 2317274
acaaauguucgcgaacucu

SEQ ID NO: 2317276 - RNA, 19 nt, Artificial Sequence
  Description of Artificial Sequence: Synthetic oligonucleotide
  Sense strand starting at position 2177 of SEQ ID NO: 1885114
ucgcgaacauuuguucuca

SEQ ID NO: 2317277 - RNA, 19 nt, Artificial Sequence
  Description of Artificial Sequence: Synthetic oligonucleotide
  Antisense strand to SEQ ID NO: 2317276
ugagaacaaauguucgcga

SEQ ID NO: 2317278 - RNA, 19 nt, Artificial Sequence
  Description of Artificial Sequence: Synthetic oligonucleotide
  Sense strand starting at position 2189 of SEQ ID NO: 1885114
guucucagcccaugcaaau

SEQ ID NO: 2317279 - RNA, 19 nt, Artificial Sequence
  Description of Artificial Sequence: Synthetic oligonucleotide
  Antisense strand to SEQ ID NO: 2317278
auuugcaugggcugagaac

SEQ ID NO: 2317280 - RNA, 19 nt, Artificial Sequence
  Description of Artificial Sequence: Synthetic oligonucleotide
  Sense strand starting at position 2204 of SEQ ID NO: 1885114
aaaugaguucggugcugau

SEQ ID NO: 2317281 - RNA, 19 nt, Artificial Sequence
  Description of Artificial Sequence: Synthetic oligonucleotide
  Antisense strand to SEQ ID NO: 2317280
aucagcaccgaacucauuu

SEQ ID NO: 2317282 - RNA, 19 nt, Artificial Sequence
  Description of Artificial Sequence: Synthetic oligonucleotide
  Sense strand starting at position 2213 of SEQ ID NO: 1885114
cggugcugauugguugaga

SEQ ID NO: 2317283 - RNA, 19 nt, Artificial Sequence
  Description of Artificial Sequence: Synthetic oligonucleotide
  Antisense strand to SEQ ID NO: 2317282
ucucaaccaaucagcaccg

SEQ ID NO: 2317284 - RNA, 19 nt, Artificial Sequence
  Description of Artificial Sequence: Synthetic oligonucleotide
  Sense strand starting at position 2214 of SEQ ID NO: 1885114
ggugcugauugguugagaa

SEQ ID NO: 2317285 - RNA, 19 nt, Artificial Sequence
  Description of Artificial Sequence: Synthetic oligonucleotide
  Antisense strand to SEQ ID NO: 2317284
uucucaaccaaucagcacc

SEQ ID NO: 2317286 - RNA, 19 nt, Artificial Sequence
  Description of Artificial Sequence: Synthetic oligonucleotide
  Sense strand starting at position 2322 of SEQ ID NO: 1885114
uccuaaaggccuugucuau

SEQ ID NO: 2317287 - RNA, 19 nt, Artificial Sequence
  Description of Artificial Sequence: Synthetic oligonucleotide
  Antisense strand to SEQ ID NO: 2317286
auagacaaggccuuuagga

SEQ ID NO: 2317288 - RNA, 19 nt, Artificial Sequence
  Description of Artificial Sequence: Synthetic oligonucleotide
  Sense strand starting at position 2326 of SEQ ID NO: 1885114
aaaggccuugucuauugau

SEQ ID NO: 2317289 - RNA, 19 nt, Artificial Sequence
  Description of Artificial Sequence: Synthetic oligonucleotide
  Antisense strand to SEQ ID NO: 2317288
aucaauagacaaggccuuu

SEQ ID NO: 2317290 - RNA, 19 nt, Artificial Sequence
  Description of Artificial Sequence: Synthetic oligonucleotide
  Sense strand starting at position 2333 of SEQ ID NO: 1885114
uugucuauugaugagcgau

SEQ ID NO: 2317291 - RNA, 19 nt, Artificial Sequence
  Description of Artificial Sequence: Synthetic oligonucleotide
  Antisense strand to SEQ ID NO: 2317290
aucgcucaucaauagacaa

SEQ ID NO: 2317292 - RNA, 19 nt, Artificial Sequence
  Description of Artificial Sequence: Synthetic oligonucleotide
  Sense strand starting at position 2336 of SEQ ID NO: 1885114
ucuauugaugagcgaugga

SEQ ID NO: 2317293 - RNA, 19 nt, Artificial Sequence
  Description of Artificial Sequence: Synthetic oligonucleotide
  Antisense strand to SEQ ID NO: 2317292
uccaucgcucaucaauaga

SEQ ID NO: 2317294 - RNA, 19 nt, Artificial Sequence
  Description of Artificial Sequence: Synthetic oligonucleotide
  Sense strand starting at position 2416 of SEQ ID NO: 1885114
acuguaggugguuaaggau

SEQ ID NO: 2317295 - RNA, 19 nt, Artificial Sequence
  Description of Artificial Sequence: Synthetic oligonucleotide
  Antisense strand to SEQ ID NO: 2317294
auccuuaaccaccuacagu

SEQ ID NO: 2317296 - RNA, 19 nt, Artificial Sequence
  Description of Artificial Sequence: Synthetic oligonucleotide
  Sense strand starting at position 2440 of SEQ ID NO: 1885114
guacuaaucgccuggaccu

SEQ ID NO: 2317297 - RNA, 19 nt, Artificial Sequence
  Description of Artificial Sequence: Synthetic oligonucleotide
  Antisense strand to SEQ ID NO: 2317296
agguccaggcgauuaguac

SEQ ID NO: 2317298 - RNA, 19 nt, Artificial Sequence
  Description of Artificial Sequence: Synthetic oligonucleotide
  Sense strand starting at position 2558 of SEQ ID NO: 1885114
gggaucuuggcucaccaua

SEQ ID NO: 2317299 - RNA, 19 nt, Artificial Sequence
  Description of Artificial Sequence: Synthetic oligonucleotide
  Antisense strand to SEQ ID NO: 2317298
uauggugagccaagauccc

SEQ ID NO: 2317300 - RNA, 19 nt, Artificial Sequence
  Description of Artificial Sequence: Synthetic oligonucleotide
  Sense strand starting at position 2794 of SEQ ID NO: 1885114
ucauaaccguuucuuaaag

SEQ ID NO: 2317301 - RNA, 19 nt, Artificial Sequence
  Description of Artificial Sequence: Synthetic oligonucleotide
  Antisense strand to SEQ ID NO: 2317300
cuuuaagaaacgguuauga

SEQ ID NO: 2317302 - RNA, 19 nt, Artificial Sequence
  Description of Artificial Sequence: Synthetic oligonucleotide
  Sense strand starting at position 2808 of SEQ ID NO: 1885114
uaaaguauuccacggaaag

SEQ ID NO: 2317303 - RNA, 19 nt, Artificial Sequence
  Description of Artificial Sequence: Synthetic oligonucleotide
  Antisense strand to SEQ ID NO: 2317302
cuuuccguggaauacuuua

SEQ ID NO: 2317304 - RNA, 19 nt, Artificial Sequence
  Description of Artificial Sequence: Synthetic oligonucleotide
  Sense strand starting at position 2809 of SEQ ID NO: 1885114
aaaguauuccacggaaagg

SEQ ID NO: 2317305 - RNA, 19 nt, Artificial Sequence
  Description of Artificial Sequence: Synthetic oligonucleotide
  Antisense strand to SEQ ID NO: 2317304
ccuuuccguggaauacuuu

SEQ ID NO: 2317306 - RNA, 19 nt, Artificial Sequence
  Description of Artificial Sequence: Synthetic oligonucleotide
  Sense strand starting at position 2843 of SEQ ID NO: 1885114
gcccuuguuccggaggacu

SEQ ID NO: 2317307 - RNA, 19 nt, Artificial Sequence
  Description of Artificial Sequence: Synthetic oligonucleotide
  Antisense strand to SEQ ID NO: 2317306
aguccuccggaacaagggc

SEQ ID NO: 2317308 - RNA, 19 nt, Artificial Sequence
  Description of Artificial Sequence: Synthetic oligonucleotide
  Sense strand starting at position 2878 of SEQ ID NO: 1885114
gugagacccgucugaauag

SEQ ID NO: 2317309 - RNA, 19 nt, Artificial Sequence
  Description of Artificial Sequence: Synthetic oligonucleotide
  Antisense strand to SEQ ID NO: 2317308
cuauucagacgggucucac

SEQ ID NO: 2317310 - RNA, 19 nt, Artificial Sequence
  Description of Artificial Sequence: Synthetic oligonucleotide
  Sense strand starting at position 2890 of SEQ ID NO: 1885114
ugaauagauuccuagaacu

SEQ ID NO: 2317311 - RNA, 19 nt, Artificial Sequence
  Description of Artificial Sequence: Synthetic oligonucleotide
  Antisense strand to SEQ ID NO: 2317310
aguucuaggaaucuauuca

SEQ ID NO: 2317312 - RNA, 19 nt, Artificial Sequence
  Description of Artificial Sequence: Synthetic oligonucleotide
  Sense strand starting at position 2902 of SEQ ID NO: 1885114
uagaacugaccacgucaga

SEQ ID NO: 2317313 - RNA, 19 nt, Artificial Sequence
  Description of Artificial Sequence: Synthetic oligonucleotide
  Antisense strand to SEQ ID NO: 2317312
ucugacguggucaguucua

SEQ ID NO: 2317314 - RNA, 19 nt, Artificial Sequence
  Description of Artificial Sequence: Synthetic oligonucleotide
  Sense strand starting at position 32 of SEQ ID NO: 1885115
uuccuuauuccagcgcuuu

SEQ ID NO: 2317315 - RNA, 19 nt, Artificial Sequence
  Description of Artificial Sequence: Synthetic oligonucleotide
  Antisense strand to SEQ ID NO: 2317314
aaagcgcuggaauaaggaa

SEQ ID NO: 2317316 - RNA, 19 nt, Artificial Sequence
  Description of Artificial Sequence: Synthetic oligonucleotide
  Sense strand starting at position 172 of SEQ ID NO: 1885115
gagaccuuccagcauugua

SEQ ID NO: 2317317 - RNA, 19 nt, Artificial Sequence
  Description of Artificial Sequence: Synthetic oligonucleotide
  Antisense strand to SEQ ID NO: 2317316
uacaaugcuggaaggucuc

SEQ ID NO: 2317318 - RNA, 19 nt, Artificial Sequence
  Description of Artificial Sequence: Synthetic oligonucleotide
  Sense strand starting at position 211 of SEQ ID NO: 1885115
guaugccucgguuuaguuu

SEQ ID NO: 2317319 - RNA, 19 nt, Artificial Sequence
  Description of Artificial Sequence: Synthetic oligonucleotide
  Antisense strand to SEQ ID NO: 2317318
aaacuaaaccgaggcauac

SEQ ID NO: 2317320 - RNA, 19 nt, Artificial Sequence
  Description of Artificial Sequence: Synthetic oligonucleotide
  Sense strand starting at position 239 of SEQ ID NO: 1885115
ggcaguuucuuccuauaag

SEQ ID NO: 2317321 - RNA, 19 nt, Artificial Sequence
  Description of Artificial Sequence: Synthetic oligonucleotide
  Antisense strand to SEQ ID NO: 2317320
cuuauaggaagaaacugcc

SEQ ID NO: 2317322 - RNA, 19 nt, Artificial Sequence
  Description of Artificial Sequence: Synthetic oligonucleotide
  Sense strand starting at position 250 of SEQ ID NO: 1885115
ccuauaagaccuugaauug

SEQ ID NO: 2317323 - RNA, 19 nt, Artificial Sequence
  Description of Artificial Sequence: Synthetic oligonucleotide
  Antisense strand to SEQ ID NO: 2317322
caauucaaggucuuauagg

SEQ ID NO: 2317324 - RNA, 19 nt, Artificial Sequence
  Description of Artificial Sequence: Synthetic oligonucleotide
  Sense strand starting at position 335 of SEQ ID NO: 1885115
agugcagugcuauauauua

SEQ ID NO: 2317325 - RNA, 19 nt, Artificial Sequence
  Description of Artificial Sequence: Synthetic oligonucleotide
  Antisense strand to SEQ ID NO: 2317324
uaauauauagcacugcacu

SEQ ID NO: 2317326 - RNA, 19 nt, Artificial Sequence
  Description of Artificial Sequence: Synthetic oligonucleotide
  Sense strand starting at position 818 of SEQ ID NO: 1885115
cagagugacugcuuuacag

SEQ ID NO: 2317327 - RNA, 19 nt, Artificial Sequence
  Description of Artificial Sequence: Synthetic oligonucleotide
  Antisense strand to SEQ ID NO: 2317326
cuguaaagcagucacucug

SEQ ID NO: 2317328 - RNA, 19 nt, Artificial Sequence
  Description of Artificial Sequence: Synthetic oligonucleotide
  Sense strand starting at position 820 of SEQ ID NO: 1885115
gagugacugcuuuacagac

SEQ ID NO: 2317329 - RNA, 19 nt, Artificial Sequence
  Description of Artificial Sequence: Synthetic oligonucleotide
  Antisense strand to SEQ ID NO: 2317328
gucuguaaagcagucacuc

SEQ ID NO: 2317330 - RNA, 19 nt, Artificial Sequence
  Description of Artificial Sequence: Synthetic oligonucleotide
  Sense strand starting at position 1119 of SEQ ID NO: 1885115
aggauaauuuggcagauga

SEQ ID NO: 2317331 - RNA, 19 nt, Artificial Sequence
  Description of Artificial Sequence: Synthetic oligonucleotide
  Antisense strand to SEQ ID NO: 2317330
ucaucugccaaauuauccu

SEQ ID NO: 2317332 - RNA, 19 nt, Artificial Sequence
  Description of Artificial Sequence: Synthetic oligonucleotide
  Sense strand starting at position 1175 of SEQ ID NO: 1885115
gaugaaaucguaggaaguc

SEQ ID NO: 2317333 - RNA, 19 nt, Artificial Sequence
  Description of Artificial Sequence: Synthetic oligonucleotide
  Antisense strand to SEQ ID NO: 2317332
gacuuccuacgauuucauc

SEQ ID NO: 2317334 - RNA, 19 nt, Artificial Sequence
  Description of Artificial Sequence: Synthetic oligonucleotide
  Sense strand starting at position 2143 of SEQ ID NO: 1885115
gcuuuaagaaaggguuguu

SEQ ID NO: 2317335 - RNA, 19 nt, Artificial Sequence
  Description of Artificial Sequence: Synthetic oligonucleotide
  Antisense strand to SEQ ID NO: 2317334
aacaacccuuucuuaaagc

SEQ ID NO: 2317336 - RNA, 19 nt, Artificial Sequence
  Description of Artificial Sequence: Synthetic oligonucleotide
  Sense strand starting at position 2155 of SEQ ID NO: 1885115
gguuguuaccgucuuuguu

SEQ ID NO: 2317337 - RNA, 19 nt, Artificial Sequence
  Description of Artificial Sequence: Synthetic oligonucleotide
  Antisense strand to SEQ ID NO: 2317336
aacaaagacgguaacaacc

SEQ ID NO: 2317338 - RNA, 19 nt, Artificial Sequence
  Description of Artificial Sequence: Synthetic oligonucleotide
  Sense strand starting at position 2156 of SEQ ID NO: 1885115
guuguuaccgucuuuguuu

SEQ ID NO: 2317339 - RNA, 19 nt, Artificial Sequence
  Description of Artificial Sequence: Synthetic oligonucleotide
  Antisense strand to SEQ ID NO: 2317338
aaacaaagacgguaacaac

SEQ ID NO: 2317340 - RNA, 19 nt, Artificial Sequence
  Description of Artificial Sequence: Synthetic oligonucleotide
  Sense strand starting at position 2252 of SEQ ID NO: 1885115
gcaagagggagucaguuaa

SEQ ID NO: 2317341 - RNA, 19 nt, Artificial Sequence
  Description of Artificial Sequence: Synthetic oligonucleotide
  Antisense strand to SEQ ID NO: 2317340
uuaacugacucccucuugc

SEQ ID NO: 2317342 - RNA, 19 nt, Artificial Sequence
  Description of Artificial Sequence: Synthetic oligonucleotide
  Sense strand starting at position 2256 of SEQ ID NO: 1885115
gagggagucaguuaaguuu

SEQ ID NO: 2317343 - RNA, 19 nt, Artificial Sequence
  Description of Artificial Sequence: Synthetic oligonucleotide
  Antisense strand to SEQ ID NO: 2317342
aaacuuaacugacucccuc

SEQ ID NO: 2317344 - RNA, 19 nt, Artificial Sequence
  Description of Artificial Sequence: Synthetic oligonucleotide
  Sense strand starting at position 2259 of SEQ ID NO: 1885115
ggagucaguuaaguuugau

SEQ ID NO: 2317345 - RNA, 19 nt, Artificial Sequence
  Description of Artificial Sequence: Synthetic oligonucleotide
  Antisense strand to SEQ ID NO: 2317344
aucaaacuuaacugacucc

SEQ ID NO: 2317346 - RNA, 19 nt, Artificial Sequence
  Description of Artificial Sequence: Synthetic oligonucleotide
  Sense strand starting at position 2265 of SEQ ID NO: 1885115
aguuaaguuugaucuccuu

SEQ ID NO: 2317347 - RNA, 19 nt, Artificial Sequence
  Description of Artificial Sequence: Synthetic oligonucleotide
  Antisense strand to SEQ ID NO: 2317346
aaggagaucaaacuuaacu

SEQ ID NO: 2317348 - RNA, 19 nt, Artificial Sequence
  Description of Artificial Sequence: Synthetic oligonucleotide
  Sense strand starting at position 2357 of SEQ ID NO: 1885115
ugaucucucacugguacga

SEQ ID NO: 2317349 - RNA, 19 nt, Artificial Sequence
  Description of Artificial Sequence: Synthetic oligonucleotide
  Antisense strand to SEQ ID NO: 2317348
ucguaccagugagagauca

SEQ ID NO: 2317350 - RNA, 19 nt, Artificial Sequence
  Description of Artificial Sequence: Synthetic oligonucleotide
  Sense strand starting at position 2460 of SEQ ID NO: 1885115
ugcuuugagaugcaggaaa

SEQ ID NO: 2317351 - RNA, 19 nt, Artificial Sequence
  Description of Artificial Sequence: Synthetic oligonucleotide
  Antisense strand to SEQ ID NO: 2317350
uuuccugcaucucaaagca

SEQ ID NO: 2317352 - RNA, 19 nt, Artificial Sequence
  Description of Artificial Sequence: Synthetic oligonucleotide
  Sense strand starting at position 2462 of SEQ ID NO: 1885115
cuuugagaugcaggaaaug

SEQ ID NO: 2317353 - RNA, 19 nt, Artificial Sequence
  Description of Artificial Sequence: Synthetic oligonucleotide
  Antisense strand to SEQ ID NO: 2317352
cauuuccugcaucucaaag

SEQ ID NO: 2317354 - RNA, 19 nt, Artificial Sequence
  Description of Artificial Sequence: Synthetic oligonucleotide
  Sense strand starting at position 2725 of SEQ ID NO: 1885115
ucgagauugcaccacuaac

SEQ ID NO: 2317355 - RNA, 19 nt, Artificial Sequence
  Description of Artificial Sequence: Synthetic oligonucleotide
  Antisense strand to SEQ ID NO: 2317354
guuaguggugcaaucucga

SEQ ID NO: 2317356 - RNA, 19 nt, Artificial Sequence
  Description of Artificial Sequence: Synthetic oligonucleotide
  Sense strand starting at position 3014 of SEQ ID NO: 1885115
guuaauaucuggcccaaga

SEQ ID NO: 2317357 - RNA, 19 nt, Artificial Sequence
  Description of Artificial Sequence: Synthetic oligonucleotide
  Antisense strand to SEQ ID NO: 2317356
ucuugggccagauauuaac

SEQ ID NO: 2317358 - RNA, 19 nt, Artificial Sequence
  Description of Artificial Sequence: Synthetic oligonucleotide
  Sense strand starting at position 3073 of SEQ ID NO: 1885115
gcuggucaucaccacuuua

SEQ ID NO: 2317359 - RNA, 19 nt, Artificial Sequence
  Description of Artificial Sequence: Synthetic oligonucleotide
  Antisense strand to SEQ ID NO: 2317358
uaaaguggugaugaccagc

SEQ ID NO: 2317360 - RNA, 19 nt, Artificial Sequence
  Description of Artificial Sequence: Synthetic oligonucleotide
  Sense strand starting at position 3119 of SEQ ID NO: 1885115
aggguuucuguggauugua

SEQ ID NO: 2317361 - RNA, 19 nt, Artificial Sequence
  Description of Artificial Sequence: Synthetic oligonucleotide
  Antisense strand to SEQ ID NO: 2317360
uacaauccacagaaacccu

SEQ ID NO: 2317362 - RNA, 19 nt, Artificial Sequence
  Description of Artificial Sequence: Synthetic oligonucleotide
  Sense strand starting at position 3296 of SEQ ID NO: 1885115
gugucacuuugaguagaga

SEQ ID NO: 2317363 - RNA, 19 nt, Artificial Sequence
  Description of Artificial Sequence: Synthetic oligonucleotide
  Antisense strand to SEQ ID NO: 2317362
ucucuacucaaagugacac

SEQ ID NO: 2317364 - RNA, 19 nt, Artificial Sequence
  Description of Artificial Sequence: Synthetic oligonucleotide
  Sense strand starting at position 3377 of SEQ ID NO: 1885115
agugcauaccuggacuaga

SEQ ID NO: 2317365 - RNA, 19 nt, Artificial Sequence
  Description of Artificial Sequence: Synthetic oligonucleotide
  Antisense strand to SEQ ID NO: 2317364
ucuaguccagguaugcacu

SEQ ID NO: 2317366 - RNA, 19 nt, Artificial Sequence
  Description of Artificial Sequence: Synthetic oligonucleotide
  Sense strand starting at position 3380 of SEQ ID NO: 1885115
gcauaccuggacuagaagu

SEQ ID NO: 2317367 - RNA, 19 nt, Artificial Sequence
  Description of Artificial Sequence: Synthetic oligonucleotide
  Antisense strand to SEQ ID NO: 2317366
acuucuaguccagguaugc

SEQ ID NO: 2317368 - RNA, 19 nt, Artificial Sequence
  Description of Artificial Sequence: Synthetic oligonucleotide
  Sense strand starting at position 3390 of SEQ ID NO: 1885115
acuagaaguuagcuuuauc

SEQ ID NO: 2317369 - RNA, 19 nt, Artificial Sequence
  Description of Artificial Sequence: Synthetic oligonucleotide
  Antisense strand to SEQ ID NO: 2317368
gauaaagcuaacuucuagu

SEQ ID NO: 2317370 - RNA, 19 nt, Artificial Sequence
  Description of Artificial Sequence: Synthetic oligonucleotide
  Sense strand starting at position 3478 of SEQ ID NO: 1885115
gugcuagguccugauuaaa

SEQ ID NO: 2317371 - RNA, 19 nt, Artificial Sequence
  Description of Artificial Sequence: Synthetic oligonucleotide
  Antisense strand to SEQ ID NO: 2317370
uuuaaucaggaccuagcac

SEQ ID NO: 2317372 - RNA, 19 nt, Artificial Sequence
  Description of Artificial Sequence: Synthetic oligonucleotide
  Sense strand starting at position 3532 of SEQ ID NO: 1885115
uagucuaauuugcagagaa

SEQ ID NO: 2317373 - RNA, 19 nt, Artificial Sequence
  Description of Artificial Sequence: Synthetic oligonucleotide
  Antisense strand to SEQ ID NO: 2317372
uucucugcaaauuagacua

SEQ ID NO: 2317374 - RNA, 19 nt, Artificial Sequence
  Description of Artificial Sequence: Synthetic oligonucleotide
  Sense strand starting at position 3555 of SEQ ID NO: 1885115
aguagaugaagcuguaaua

SEQ ID NO: 2317375 - RNA, 19 nt, Artificial Sequence
  Description of Artificial Sequence: Synthetic oligonucleotide
  Antisense strand to SEQ ID NO: 2317374
uauuacagcuucaucuacu

SEQ ID NO: 2317376 - RNA, 19 nt, Artificial Sequence
  Description of Artificial Sequence: Synthetic oligonucleotide
  Sense strand starting at position 3565 of SEQ ID NO: 1885115
gcuguaauacaauguagga

SEQ ID NO: 2317377 - RNA, 19 nt, Artificial Sequence
  Description of Artificial Sequence: Synthetic oligonucleotide
  Antisense strand to SEQ ID NO: 2317376
uccuacauuguauuacagc

SEQ ID NO: 2317378 - RNA, 19 nt, Artificial Sequence
  Description of Artificial Sequence: Synthetic oligonucleotide
  Sense strand starting at position 3621 of SEQ ID NO: 1885115
guuuaauucugaguuugac

SEQ ID NO: 2317379 - RNA, 19 nt, Artificial Sequence
  Description of Artificial Sequence: Synthetic oligonucleotide
  Antisense strand to SEQ ID NO: 2317378
gucaaacucagaauuaaac

SEQ ID NO: 2317380 - RNA, 19 nt, Artificial Sequence
  Description of Artificial Sequence: Synthetic oligonucleotide
  Sense strand starting at position 3629 of SEQ ID NO: 1885115
cugaguuugacauguaagu

SEQ ID NO: 2317381 - RNA, 19 nt, Artificial Sequence
  Description of Artificial Sequence: Synthetic oligonucleotide
  Antisense strand to SEQ ID NO: 2317380
acuuacaugucaaacucag

SEQ ID NO: 2317382 - RNA, 19 nt, Artificial Sequence
  Description of Artificial Sequence: Synthetic oligonucleotide
  Sense strand starting at position 3720 of SEQ ID NO: 1885115
cucuuaggcuuuguugaaa

SEQ ID NO: 2317383 - RNA, 19 nt, Artificial Sequence
  Description of Artificial Sequence: Synthetic oligonucleotide
  Antisense strand to SEQ ID NO: 2317382
uuucaacaaagccuaagag

SEQ ID NO: 2317384 - RNA, 19 nt, Artificial Sequence
  Description of Artificial Sequence: Synthetic oligonucleotide
  Sense strand starting at position 3723 of SEQ ID NO: 1885115
uuaggcuuuguugaaagga

SEQ ID NO: 2317385 - RNA, 19 nt, Artificial Sequence
  Description of Artificial Sequence: Synthetic oligonucleotide
  Antisense strand to SEQ ID NO: 2317384
uccuuucaacaaagccuaa

SEQ ID NO: 2317386 - RNA, 19 nt, Artificial Sequence
  Description of Artificial Sequence: Synthetic oligonucleotide
  Sense strand starting at position 3765 of SEQ ID NO: 1885115
uguuuaacucuaggacugu

SEQ ID NO: 2317387 - RNA, 19 nt, Artificial Sequence
  Description of Artificial Sequence: Synthetic oligonucleotide
  Antisense strand to SEQ ID NO: 2317386
acaguccuagaguuaaaca

SEQ ID NO: 2317388 - RNA, 19 nt, Artificial Sequence
  Description of Artificial Sequence: Synthetic oligonucleotide
  Sense strand starting at position 3774 of SEQ ID NO: 1885115
cuaggacuguuccugguua

SEQ ID NO: 2317389 - RNA, 19 nt, Artificial Sequence
  Description of Artificial Sequence: Synthetic oligonucleotide
  Antisense strand to SEQ ID NO: 2317388
uaaccaggaacaguccuag

SEQ ID NO: 2317390 - RNA, 19 nt, Artificial Sequence
  Description of Artificial Sequence: Synthetic oligonucleotide
  Sense strand starting at position 3776 of SEQ ID NO: 1885115
aggacuguuccugguuauc

SEQ ID NO: 2317391 - RNA, 19 nt, Artificial Sequence
  Description of Artificial Sequence: Synthetic oligonucleotide
  Antisense strand to SEQ ID NO: 2317390
gauaaccaggaacaguccu

SEQ ID NO: 2317392 - RNA, 19 nt, Artificial Sequence
  Description of Artificial Sequence: Synthetic oligonucleotide
  Sense strand starting at position 3787 of SEQ ID NO: 1885115
ugguuaucuggugaauaac

SEQ ID NO: 2317393 - RNA, 19 nt, Artificial Sequence
  Description of Artificial Sequence: Synthetic oligonucleotide
  Antisense strand to SEQ ID NO: 2317392
guuauucaccagauaacca

SEQ ID NO: 2317394 - RNA, 19 nt, Artificial Sequence
  Description of Artificial Sequence: Synthetic oligonucleotide
  Sense strand starting at position 2124 of SEQ ID NO: 1885116
agaggccuucuucgacaau

SEQ ID NO: 2317395 - RNA, 19 nt, Artificial Sequence
  Description of Artificial Sequence: Synthetic oligonucleotide
  Antisense strand to SEQ ID NO: 2317394
auugucgaagaaggccucu

SEQ ID NO: 2317396 - RNA, 19 nt, Artificial Sequence
  Description of Artificial Sequence: Synthetic oligonucleotide
  Sense strand starting at position 2127 of SEQ ID NO: 1885116
ggccuucuucgacaaugaa

SEQ ID NO: 2317397 - RNA, 19 nt, Artificial Sequence
  Description of Artificial Sequence: Synthetic oligonucleotide
  Antisense strand to SEQ ID NO: 2317396
uucauugucgaagaaggcc

SEQ ID NO: 2317398 - RNA, 19 nt, Artificial Sequence
  Description of Artificial Sequence: Synthetic oligonucleotide
  Sense strand starting at position 2187 of SEQ ID NO: 1885116
gugacaaugcuaggccuau

SEQ ID NO: 2317399 - RNA, 19 nt, Artificial Sequence
  Description of Artificial Sequence: Synthetic oligonucleotide
  Antisense strand to SEQ ID NO: 2317398
auaggccuagcauugucac

SEQ ID NO: 2317400 - RNA, 19 nt, Artificial Sequence
  Description of Artificial Sequence: Synthetic oligonucleotide
  Sense strand starting at position 2271 of SEQ ID NO: 1885116
aaaugucccuauggaaaga

SEQ ID NO: 2317401 - RNA, 19 nt, Artificial Sequence
  Description of Artificial Sequence: Synthetic oligonucleotide
  Antisense strand to SEQ ID NO: 2317400
ucuuuccauagggacauuu

SEQ ID NO: 2317402 - RNA, 19 nt, Artificial Sequence
  Description of Artificial Sequence: Synthetic oligonucleotide
  Sense strand starting at position 2298 of SEQ ID NO: 1885116
aauugcaugugguuaaauc

SEQ ID NO: 2317403 - RNA, 19 nt, Artificial Sequence
  Description of Artificial Sequence: Synthetic oligonucleotide
  Antisense strand to SEQ ID NO: 2317402
gauuuaaccacaugcaauu

SEQ ID NO: 2317404 - RNA, 19 nt, Artificial Sequence
  Description of Artificial Sequence: Synthetic oligonucleotide
  Sense strand starting at position 2299 of SEQ ID NO: 1885116
auugcaugugguuaaaucu

SEQ ID NO: 2317405 - RNA, 19 nt, Artificial Sequence
  Description of Artificial Sequence: Synthetic oligonucleotide
  Antisense strand to SEQ ID NO: 2317404
agauuuaaccacaugcaau

SEQ ID NO: 2317406 - RNA, 19 nt, Artificial Sequence
  Description of Artificial Sequence: Synthetic oligonucleotide
  Sense strand starting at position 2305 of SEQ ID NO: 1885116
ugugguuaaaucuauaugu

SEQ ID NO: 2317407 - RNA, 19 nt, Artificial Sequence
  Description of Artificial Sequence: Synthetic oligonucleotide
  Antisense strand to SEQ ID NO: 2317406
acauauagauuuaaccaca

SEQ ID NO: 2317408 - RNA, 19 nt, Artificial Sequence
  Description of Artificial Sequence: Synthetic oligonucleotide
  Sense strand starting at position 2307 of SEQ ID NO: 1885116
ugguuaaaucuauauguug

SEQ ID NO: 2317409 - RNA, 19 nt, Artificial Sequence
  Description of Artificial Sequence: Synthetic oligonucleotide
  Antisense strand to SEQ ID NO: 2317408
caacauauagauuuaacca

SEQ ID NO: 2317410 - RNA, 19 nt, Artificial Sequence
  Description of Artificial Sequence: Synthetic oligonucleotide
  Sense strand starting at position 2322 of SEQ ID NO: 1885116
guuguaaucccuuauuacc

SEQ ID NO: 2317411 - RNA, 19 nt, Artificial Sequence
  Description of Artificial Sequence: Synthetic oligonucleotide
  Antisense strand to SEQ ID NO: 2317410
gguaauaagggauuacaac

SEQ ID NO: 2317412 - RNA, 19 nt, Artificial Sequence
  Description of Artificial Sequence: Synthetic oligonucleotide
  Sense strand starting at position 2342 of SEQ ID NO: 1885116
agcaauucugcacauaguu

SEQ ID NO: 2317413 - RNA, 19 nt, Artificial Sequence
  Description of Artificial Sequence: Synthetic oligonucleotide
  Antisense strand to SEQ ID NO: 2317412
aacuaugugcagaauugcu

SEQ ID NO: 2317414 - RNA, 19 nt, Artificial Sequence
  Description of Artificial Sequence: Synthetic oligonucleotide
  Sense strand starting at position 2479 of SEQ ID NO: 1885116
cucuguugcccaguuugua

SEQ ID NO: 2317415 - RNA, 19 nt, Artificial Sequence
  Description of Artificial Sequence: Synthetic oligonucleotide
  Antisense strand to SEQ ID NO: 2317414
uacaaacugggcaacagag

SEQ ID NO: 2317416 - RNA, 19 nt, Artificial Sequence
  Description of Artificial Sequence: Synthetic oligonucleotide
  Sense strand starting at position 3037 of SEQ ID NO: 1885116
uccagugaacaguguguaa

SEQ ID NO: 2317417 - RNA, 19 nt, Artificial Sequence
  Description of Artificial Sequence: Synthetic oligonucleotide
  Antisense strand to SEQ ID NO: 2317416
uuacacacuguucacugga

SEQ ID NO: 2317418 - RNA, 19 nt, Artificial Sequence
  Description of Artificial Sequence: Synthetic oligonucleotide
  Sense strand starting at position 3039 of SEQ ID NO: 1885116
cagugaacaguguguaaac

SEQ ID NO: 2317419 - RNA, 19 nt, Artificial Sequence
  Description of Artificial Sequence: Synthetic oligonucleotide
  Antisense strand to SEQ ID NO: 2317418
guuuacacacuguucacug

SEQ ID NO: 2317420 - RNA, 19 nt, Artificial Sequence
  Description of Artificial Sequence: Synthetic oligonucleotide
  Sense strand starting at position 3049 of SEQ ID NO: 1885116
uguguaaaccagcagcauu

SEQ ID NO: 2317421 - RNA, 19 nt, Artificial Sequence
  Description of Artificial Sequence: Synthetic oligonucleotide
  Antisense strand to SEQ ID NO: 2317420
aaugcugcugguuuacaca

SEQ ID NO: 2317422 - RNA, 19 nt, Artificial Sequence
  Description of Artificial Sequence: Synthetic oligonucleotide
  Sense strand starting at position 3148 of SEQ ID NO: 1885116
uuaacagacuuguacagua

SEQ ID NO: 2317423 - RNA, 19 nt, Artificial Sequence
  Description of Artificial Sequence: Synthetic oligonucleotide
  Antisense strand to SEQ ID NO: 2317422
uacuguacaagucuguuaa

SEQ ID NO: 2317424 - RNA, 19 nt, Artificial Sequence
  Description of Artificial Sequence: Synthetic oligonucleotide
  Sense strand starting at position 3153 of SEQ ID NO: 1885116
agacuuguacaguaaugua

SEQ ID NO: 2317425 - RNA, 19 nt, Artificial Sequence
  Description of Artificial Sequence: Synthetic oligonucleotide
  Antisense strand to SEQ ID NO: 2317424
uacauuacuguacaagucu

SEQ ID NO: 2317426 - RNA, 19 nt, Artificial Sequence
  Description of Artificial Sequence: Synthetic oligonucleotide
  Sense strand starting at position 3156 of SEQ ID NO: 1885116
cuuguacaguaauguacau

SEQ ID NO: 2317427 - RNA, 19 nt, Artificial Sequence
  Description of Artificial Sequence: Synthetic oligonucleotide
  Antisense strand to SEQ ID NO: 2317426
auguacauuacuguacaag

SEQ ID NO: 2317428 - RNA, 19 nt, Artificial Sequence
  Description of Artificial Sequence: Synthetic oligonucleotide
  Sense strand starting at position 3176 of SEQ ID NO: 1885116
gcaacuuuauaauggugga

SEQ ID NO: 2317429 - RNA, 19 nt, Artificial Sequence
  Description of Artificial Sequence: Synthetic oligonucleotide
  Antisense strand to SEQ ID NO: 2317428
uccaccauuauaaaguugc

SEQ ID NO: 2317430 - RNA, 19 nt, Artificial Sequence
  Description of Artificial Sequence: Synthetic oligonucleotide
  Sense strand starting at position 3359 of SEQ ID NO: 1885116
uuauccaggcguuguagua

SEQ ID NO: 2317431 - RNA, 19 nt, Artificial Sequence
  Description of Artificial Sequence: Synthetic oligonucleotide
  Antisense strand to SEQ ID NO: 2317430
uacuacaacgccuggauaa

SEQ ID NO: 2317432 - RNA, 19 nt, Artificial Sequence
  Description of Artificial Sequence: Synthetic oligonucleotide
  Sense strand starting at position 3542 of SEQ ID NO: 1885116
gugguauauuuagaugaug

SEQ ID NO: 2317433 - RNA, 19 nt, Artificial Sequence
  Description of Artificial Sequence: Synthetic oligonucleotide
  Antisense strand to SEQ ID NO: 2317432
caucaucuaaauauaccac

SEQ ID NO: 2317434 - RNA, 19 nt, Artificial Sequence
  Description of Artificial Sequence: Synthetic oligonucleotide
  Sense strand starting at position 3560 of SEQ ID NO: 1885116
ggaauacuauaugacaaug

SEQ ID NO: 2317435 - RNA, 19 nt, Artificial Sequence
  Description of Artificial Sequence: Synthetic oligonucleotide
  Antisense strand to SEQ ID NO: 2317434
cauugucauauaguauucc

SEQ ID NO: 2317436 - RNA, 19 nt, Artificial Sequence
  Description of Artificial Sequence: Synthetic oligonucleotide
  Sense strand starting at position 3731 of SEQ ID NO: 1885116
aguggaacuucugagcuca

SEQ ID NO: 2317437 - RNA, 19 nt, Artificial Sequence
  Description of Artificial Sequence: Synthetic oligonucleotide
  Antisense strand to SEQ ID NO: 2317436
ugagcucagaaguuccacu

SEQ ID NO: 2317438 - RNA, 19 nt, Artificial Sequence
  Description of Artificial Sequence: Synthetic oligonucleotide
  Sense strand starting at position 3881 of SEQ ID NO: 1885116
aggagcuacccuugggaau

SEQ ID NO: 2317439 - RNA, 19 nt, Artificial Sequence
  Description of Artificial Sequence: Synthetic oligonucleotide
  Antisense strand to SEQ ID NO: 2317438
auucccaaggguagcuccu

SEQ ID NO: 2317440 - RNA, 19 nt, Artificial Sequence
  Description of Artificial Sequence: Synthetic oligonucleotide
  Sense strand starting at position 3897 of SEQ ID NO: 1885116
aauguaucaucagggaaag

SEQ ID NO: 2317441 - RNA, 19 nt, Artificial Sequence
  Description of Artificial Sequence: Synthetic oligonucleotide
  Antisense strand to SEQ ID NO: 2317440
cuuucccugaugauacauu

SEQ ID NO: 2317442 - RNA, 19 nt, Artificial Sequence
  Description of Artificial Sequence: Synthetic oligonucleotide
  Sense strand starting at position 1415 of SEQ ID NO: 1885117
cagaguuggagcgggauau

SEQ ID NO: 2317443 - RNA, 19 nt, Artificial Sequence
  Description of Artificial Sequence: Synthetic oligonucleotide
  Antisense strand to SEQ ID NO: 2317442
auaucccgcuccaacucug

SEQ ID NO: 2317444 - RNA, 19 nt, Artificial Sequence
  Description of Artificial Sequence: Synthetic oligonucleotide
  Sense strand starting at position 1425 of SEQ ID NO: 1885117
gcgggauaugucuauugag

SEQ ID NO: 2317445 - RNA, 19 nt, Artificial Sequence
  Description of Artificial Sequence: Synthetic oligonucleotide
  Antisense strand to SEQ ID NO: 2317444
cucaauagacauaucccgc

SEQ ID NO: 2317446 - RNA, 19 nt, Artificial Sequence
  Description of Artificial Sequence: Synthetic oligonucleotide
  Sense strand starting at position 1550 of SEQ ID NO: 1885117
aaaguuguccgagagcaag

SEQ ID NO: 2317447 - RNA, 19 nt, Artificial Sequence
  Description of Artificial Sequence: Synthetic oligonucleotide
  Antisense strand to SEQ ID NO: 2317446
cuugcucucggacaacuuu

SEQ ID NO: 2317448 - RNA, 19 nt, Artificial Sequence
  Description of Artificial Sequence: Synthetic oligonucleotide
  Sense strand starting at position 1587 of SEQ ID NO: 1885117
guuugcuugccagugcauu

SEQ ID NO: 2317449 - RNA, 19 nt, Artificial Sequence
  Description of Artificial Sequence: Synthetic oligonucleotide
  Antisense strand to SEQ ID NO: 2317448
aaugcacuggcaagcaaac

SEQ ID NO: 2317450 - RNA, 19 nt, Artificial Sequence
  Description of Artificial Sequence: Synthetic oligonucleotide
  Sense strand starting at position 1860 of SEQ ID NO: 1885117
auacuuuaccuuugaguua

SEQ ID NO: 2317451 - RNA, 19 nt, Artificial Sequence
  Description of Artificial Sequence: Synthetic oligonucleotide
  Antisense strand to SEQ ID NO: 2317450
uaacucaaagguaaaguau

SEQ ID NO: 2317452 - RNA, 19 nt, Artificial Sequence
  Description of Artificial Sequence: Synthetic oligonucleotide
  Sense strand starting at position 1904 of SEQ ID NO: 1885117
auuugucuccgauguguuu

SEQ ID NO: 2317453 - RNA, 19 nt, Artificial Sequence
  Description of Artificial Sequence: Synthetic oligonucleotide
  Antisense strand to SEQ ID NO: 2317452
aaacacaucggagacaaau

SEQ ID NO: 2317454 - RNA, 19 nt, Artificial Sequence
  Description of Artificial Sequence: Synthetic oligonucleotide
  Sense strand starting at position 1915 of SEQ ID NO: 1885117
auguguuugcucucgaugu

SEQ ID NO: 2317455 - RNA, 19 nt, Artificial Sequence
  Description of Artificial Sequence: Synthetic oligonucleotide
  Antisense strand to SEQ ID NO: 2317454
acaucgagagcaaacacau

SEQ ID NO: 2317456 - RNA, 19 nt, Artificial Sequence
  Description of Artificial Sequence: Synthetic oligonucleotide
  Sense strand starting at position 1967 of SEQ ID NO: 1885117
cagggaaccuucccgaauu

SEQ ID NO: 2317457 - RNA, 19 nt, Artificial Sequence
  Description of Artificial Sequence: Synthetic oligonucleotide
  Antisense strand to SEQ ID NO: 2317456
aauucgggaagguucccug

SEQ ID NO: 2317458 - RNA, 19 nt, Artificial Sequence
  Description of Artificial Sequence: Synthetic oligonucleotide
  Sense strand starting at position 1969 of SEQ ID NO: 1885117
gggaaccuucccgaauucu

SEQ ID NO: 2317459 - RNA, 19 nt, Artificial Sequence
  Description of Artificial Sequence: Synthetic oligonucleotide
  Antisense strand to SEQ ID NO: 2317458
agaauucgggaagguuccc

SEQ ID NO: 2317460 - RNA, 19 nt, Artificial Sequence
  Description of Artificial Sequence: Synthetic oligonucleotide
  Sense strand starting at position 1977 of SEQ ID NO: 1885117
ucccgaauucucuaaaugg

SEQ ID NO: 2317461 - RNA, 19 nt, Artificial Sequence
  Description of Artificial Sequence: Synthetic oligonucleotide
  Antisense strand to SEQ ID NO: 2317460
ccauuuagagaauucggga

SEQ ID NO: 2317462 - RNA, 19 nt, Artificial Sequence
  Description of Artificial Sequence: Synthetic oligonucleotide
  Sense strand starting at position 1986 of SEQ ID NO: 1885117
cucuaaaugggaugcgaau

SEQ ID NO: 2317463 - RNA, 19 nt, Artificial Sequence
  Description of Artificial Sequence: Synthetic oligonucleotide
  Antisense strand to SEQ ID NO: 2317462
auucgcaucccauuuagag

SEQ ID NO: 2317464 - RNA, 19 nt, Artificial Sequence
  Description of Artificial Sequence: Synthetic oligonucleotide
  Sense strand starting at position 2090 of SEQ ID NO: 1885117
ggauaaauauuugggaucu

SEQ ID NO: 2317465 - RNA, 19 nt, Artificial Sequence
  Description of Artificial Sequence: Synthetic oligonucleotide
  Antisense strand to SEQ ID NO: 2317464
agaucccaaauauuuaucc

SEQ ID NO: 2317466 - RNA, 19 nt, Artificial Sequence
  Description of Artificial Sequence: Synthetic oligonucleotide
  Sense strand starting at position 2091 of SEQ ID NO: 1885117
gauaaauauuugggaucug

SEQ ID NO: 2317467 - RNA, 19 nt, Artificial Sequence
  Description of Artificial Sequence: Synthetic oligonucleotide
  Antisense strand to SEQ ID NO: 2317466
cagaucccaaauauuuauc

SEQ ID NO: 2317468 - RNA, 19 nt, Artificial Sequence
  Description of Artificial Sequence: Synthetic oligonucleotide
  Sense strand starting at position 2485 of SEQ ID NO: 1885117
uugaauaauugcuccagua

SEQ ID NO: 2317469 - RNA, 19 nt, Artificial Sequence
  Description of Artificial Sequence: Synthetic oligonucleotide
  Antisense strand to SEQ ID NO: 2317468
uacuggagcaauuauucaa

SEQ ID NO: 2317470 - RNA, 19 nt, Artificial Sequence
  Description of Artificial Sequence: Synthetic oligonucleotide
  Sense strand starting at position 2594 of SEQ ID NO: 1885117
uguugaaauaucugugaug

SEQ ID NO: 2317471 - RNA, 19 nt, Artificial Sequence
  Description of Artificial Sequence: Synthetic oligonucleotide
  Antisense strand to SEQ ID NO: 2317470
caucacagauauuucaaca

SEQ ID NO: 2317472 - RNA, 19 nt, Artificial Sequence
  Description of Artificial Sequence: Synthetic oligonucleotide
  Sense strand starting at position 2596 of SEQ ID NO: 1885117
uugaaauaucugugauggu

SEQ ID NO: 2317473 - RNA, 19 nt, Artificial Sequence
  Description of Artificial Sequence: Synthetic oligonucleotide
  Antisense strand to SEQ ID NO: 2317472
accaucacagauauuucaa

SEQ ID NO: 2317474 - RNA, 19 nt, Artificial Sequence
  Description of Artificial Sequence: Synthetic oligonucleotide
  Sense strand starting at position 2621 of SEQ ID NO: 1885117
guauuucuguuguuugaaa

SEQ ID NO: 2317475 - RNA, 19 nt, Artificial Sequence
  Description of Artificial Sequence: Synthetic oligonucleotide
  Antisense strand to SEQ ID NO: 2317474
uuucaaacaacagaaauac

SEQ ID NO: 2317476 - RNA, 19 nt, Artificial Sequence
  Description of Artificial Sequence: Synthetic oligonucleotide
  Sense strand starting at position 2651 of SEQ ID NO: 1885117
ugcagagugguguucguuu

SEQ ID NO: 2317477 - RNA, 19 nt, Artificial Sequence
  Description of Artificial Sequence: Synthetic oligonucleotide
  Antisense strand to SEQ ID NO: 2317476
aaacgaacaccacucugca

SEQ ID NO: 2317478 - RNA, 19 nt, Artificial Sequence
  Description of Artificial Sequence: Synthetic oligonucleotide
  Sense strand starting at position 2677 of SEQ ID NO: 1885117
cuauuauuccuaugaguug

SEQ ID NO: 2317479 - RNA, 19 nt, Artificial Sequence
  Description of Artificial Sequence: Synthetic oligonucleotide
  Antisense strand to SEQ ID NO: 2317478
caacucauaggaauaauag

SEQ ID NO: 2317480 - RNA, 19 nt, Artificial Sequence
  Description of Artificial Sequence: Synthetic oligonucleotide
  Sense strand starting at position 2684 of SEQ ID NO: 1885117
uccuaugaguugccaaaug

SEQ ID NO: 2317481 - RNA, 19 nt, Artificial Sequence
  Description of Artificial Sequence: Synthetic oligonucleotide
  Antisense strand to SEQ ID NO: 2317480
cauuuggcaacucauagga

SEQ ID NO: 2317482 - RNA, 19 nt, Artificial Sequence
  Description of Artificial Sequence: Synthetic oligonucleotide
  Sense strand starting at position 2732 of SEQ ID NO: 1885117
guauaugacuuucuuucua

SEQ ID NO: 2317483 - RNA, 19 nt, Artificial Sequence
  Description of Artificial Sequence: Synthetic oligonucleotide
  Antisense strand to SEQ ID NO: 2317482
uagaaagaaagucauauac

SEQ ID NO: 2317484 - RNA, 19 nt, Artificial Sequence
  Description of Artificial Sequence: Synthetic oligonucleotide
  Sense strand starting at position 2819 of SEQ ID NO: 1885117
agaguuuccucuuugaacc

SEQ ID NO: 2317485 - RNA, 19 nt, Artificial Sequence
  Description of Artificial Sequence: Synthetic oligonucleotide
  Antisense strand to SEQ ID NO: 2317484
gguucaaagaggaaacucu

SEQ ID NO: 2317486 - RNA, 19 nt, Artificial Sequence
  Description of Artificial Sequence: Synthetic oligonucleotide
  Sense strand starting at position 2868 of SEQ ID NO: 1885117
ucuguaaacucuguaccau

SEQ ID NO: 2317487 - RNA, 19 nt, Artificial Sequence
  Description of Artificial Sequence: Synthetic oligonucleotide
  Antisense strand to SEQ ID NO: 2317486
augguacagaguuuacaga

SEQ ID NO: 2317488 - RNA, 19 nt, Artificial Sequence
  Description of Artificial Sequence: Synthetic oligonucleotide
  Sense strand starting at position 2869 of SEQ ID NO: 1885117
cuguaaacucuguaccauc

SEQ ID NO: 2317489 - RNA, 19 nt, Artificial Sequence
  Description of Artificial Sequence: Synthetic oligonucleotide
  Antisense strand to SEQ ID NO: 2317488
gaugguacagaguuuacag

SEQ ID NO: 2317490 - RNA, 19 nt, Artificial Sequence
  Description of Artificial Sequence: Synthetic oligonucleotide
  Sense strand starting at position 2906 of SEQ ID NO: 1885117
aacugaacguguuccaaca

SEQ ID NO: 2317491 - RNA, 19 nt, Artificial Sequence
  Description of Artificial Sequence: Synthetic oligonucleotide
  Antisense strand to SEQ ID NO: 2317490
uguuggaacacguucaguu

SEQ ID NO: 2317492 - RNA, 19 nt, Artificial Sequence
  Description of Artificial Sequence: Synthetic oligonucleotide
  Sense strand starting at position 3257 of SEQ ID NO: 1885117
uuagaugcgaguuaaccuu

SEQ ID NO: 2317493 - RNA, 19 nt, Artificial Sequence
  Description of Artificial Sequence: Synthetic oligonucleotide
  Antisense strand to SEQ ID NO: 2317492
aagguuaacucgcaucuaa

SEQ ID NO: 2317494 - RNA, 19 nt, Artificial Sequence
  Description of Artificial Sequence: Synthetic oligonucleotide
  Sense strand starting at position 3283 of SEQ ID NO: 1885117
agcagaugcucagcauaaa

SEQ ID NO: 2317495 - RNA, 19 nt, Artificial Sequence
  Description of Artificial Sequence: Synthetic oligonucleotide
  Antisense strand to SEQ ID NO: 2317494
uuuaugcugagcaucugcu

SEQ ID NO: 2317496 - RNA, 19 nt, Artificial Sequence
  Description of Artificial Sequence: Synthetic oligonucleotide
  Sense strand starting at position 3526 of SEQ ID NO: 1885117
uugauuuacuuugugcuua

SEQ ID NO: 2317497 - RNA, 19 nt, Artificial Sequence
  Description of Artificial Sequence: Synthetic oligonucleotide
  Antisense strand to SEQ ID NO: 2317496
uaagcacaaaguaaaucaa

SEQ ID NO: 2317498 - RNA, 19 nt, Artificial Sequence
  Description of Artificial Sequence: Synthetic oligonucleotide
  Sense strand starting at position 3531 of SEQ ID NO: 1885117
uuacuuugugcuuauuaca

SEQ ID NO: 2317499 - RNA, 19 nt, Artificial Sequence
  Description of Artificial Sequence: Synthetic oligonucleotide
  Antisense strand to SEQ ID NO: 2317498
uguaauaagcacaaaguaa

SEQ ID NO: 2317500 - RNA, 19 nt, Artificial Sequence
  Description of Artificial Sequence: Synthetic oligonucleotide
  Sense strand starting at position 3587 of SEQ ID NO: 1885117
ugccaaauagacgauaauu

SEQ ID NO: 2317501 - RNA, 19 nt, Artificial Sequence
  Description of Artificial Sequence: Synthetic oligonucleotide
  Antisense strand to SEQ ID NO: 2317500
aauuaucgucuauuuggca

SEQ ID NO: 2317502 - RNA, 19 nt, Artificial Sequence
  Description of Artificial Sequence: Synthetic oligonucleotide
  Sense strand starting at position 3613 of SEQ ID NO: 1885117
aaucuaguugugggauagu

SEQ ID NO: 2317503 - RNA, 19 nt, Artificial Sequence
  Description of Artificial Sequence: Synthetic oligonucleotide
  Antisense strand to SEQ ID NO: 2317502
acuaucccacaacuagauu

SEQ ID NO: 2317504 - RNA, 19 nt, Artificial Sequence
  Description of Artificial Sequence: Synthetic oligonucleotide
  Sense strand starting at position 3616 of SEQ ID NO: 1885117
cuaguugugggauagugga

SEQ ID NO: 2317505 - RNA, 19 nt, Artificial Sequence
  Description of Artificial Sequence: Synthetic oligonucleotide
  Antisense strand to SEQ ID NO: 2317504
uccacuaucccacaacuag

SEQ ID NO: 2317506 - RNA, 19 nt, Artificial Sequence
  Description of Artificial Sequence: Synthetic oligonucleotide
  Sense strand starting at position 3701 of SEQ ID NO: 1885117
ugcaguauaguauaucaua

SEQ ID NO: 2317507 - RNA, 19 nt, Artificial Sequence
  Description of Artificial Sequence: Synthetic oligonucleotide
  Antisense strand to SEQ ID NO: 2317506
uaugauauacuauacugca

SEQ ID NO: 2317508 - RNA, 19 nt, Artificial Sequence
  Description of Artificial Sequence: Synthetic oligonucleotide
  Sense strand starting at position 3743 of SEQ ID NO: 1885117
gugacauagaaaugucuga

SEQ ID NO: 2317509 - RNA, 19 nt, Artificial Sequence
  Description of Artificial Sequence: Synthetic oligonucleotide
  Antisense strand to SEQ ID NO: 2317508
ucagacauuucuaugucac

SEQ ID NO: 2317510 - RNA, 19 nt, Artificial Sequence
  Description of Artificial Sequence: Synthetic oligonucleotide
  Sense strand starting at position 3747 of SEQ ID NO: 1885117
cauagaaaugucugaauug

SEQ ID NO: 2317511 - RNA, 19 nt, Artificial Sequence
  Description of Artificial Sequence: Synthetic oligonucleotide
  Antisense strand to SEQ ID NO: 2317510
caauucagacauuucuaug

SEQ ID NO: 2317512 - RNA, 19 nt, Artificial Sequence
  Description of Artificial Sequence: Synthetic oligonucleotide
  Sense strand starting at position 3830 of SEQ ID NO: 1885117
cccaguuaaguguaauauu

SEQ ID NO: 2317513 - RNA, 19 nt, Artificial Sequence
  Description of Artificial Sequence: Synthetic oligonucleotide
  Antisense strand to SEQ ID NO: 2317512
aauauuacacuuaacuggg

SEQ ID NO: 2317514 - RNA, 19 nt, Artificial Sequence
  Description of Artificial Sequence: Synthetic oligonucleotide
  Sense strand starting at position 3924 of SEQ ID NO: 1885117
gaacuaugucaggguuaau

SEQ ID NO: 2317515 - RNA, 19 nt, Artificial Sequence
  Description of Artificial Sequence: Synthetic oligonucleotide
  Antisense strand to SEQ ID NO: 2317514
auuaacccugacauaguuc

SEQ ID NO: 2317516 - RNA, 19 nt, Artificial Sequence
  Description of Artificial Sequence: Synthetic oligonucleotide
  Sense strand starting at position 3927 of SEQ ID NO: 1885117
cuaugucaggguuaaugca

SEQ ID NO: 2317517 - RNA, 19 nt, Artificial Sequence
  Description of Artificial Sequence: Synthetic oligonucleotide
  Antisense strand to SEQ ID NO: 2317516
ugcauuaacccugacauag

SEQ ID NO: 2317518 - RNA, 19 nt, Artificial Sequence
  Description of Artificial Sequence: Synthetic oligonucleotide
  Sense strand starting at position 3934 of SEQ ID NO: 1885117
aggguuaaugcauguauag

SEQ ID NO: 2317519 - RNA, 19 nt, Artificial Sequence
  Description of Artificial Sequence: Synthetic oligonucleotide
  Antisense strand to SEQ ID NO: 2317518
cuauacaugcauuaacccu

SEQ ID NO: 2317520 - RNA, 19 nt, Artificial Sequence
  Description of Artificial Sequence: Synthetic oligonucleotide
  Sense strand starting at position 3936 of SEQ ID NO: 1885117
gguuaaugcauguauagag

SEQ ID NO: 2317521 - RNA, 19 nt, Artificial Sequence
  Description of Artificial Sequence: Synthetic oligonucleotide
  Antisense strand to SEQ ID NO: 2317520
cucuauacaugcauuaacc

SEQ ID NO: 2317522 - RNA, 19 nt, Artificial Sequence
  Description of Artificial Sequence: Synthetic oligonucleotide
  Sense strand starting at position 533 of SEQ ID NO: 1885118
gcauuccaaucguuaggaa

SEQ ID NO: 2317523 - RNA, 19 nt, Artificial Sequence
  Description of Artificial Sequence: Synthetic oligonucleotide
  Antisense strand to SEQ ID NO: 2317522
uuccuaacgauuggaaugc

SEQ ID NO: 2317524 - RNA, 19 nt, Artificial Sequence
  Description of Artificial Sequence: Synthetic oligonucleotide
  Sense strand starting at position 567 of SEQ ID NO: 1885118
cuaucacuauguuuaagag

SEQ ID NO: 2317525 - RNA, 19 nt, Artificial Sequence
  Description of Artificial Sequence: Synthetic oligonucleotide
  Antisense strand to SEQ ID NO: 2317524
cucuuaaacauagugauag

SEQ ID NO: 2317526 - RNA, 19 nt, Artificial Sequence
  Description of Artificial Sequence: Synthetic oligonucleotide
  Sense strand starting at position 583 of SEQ ID NO: 1885118
gagucauaauuauuaucga

SEQ ID NO: 2317527 - RNA, 19 nt, Artificial Sequence
  Description of Artificial Sequence: Synthetic oligonucleotide
  Antisense strand to SEQ ID NO: 2317526
ucgauaauaauuaugacuc

SEQ ID NO: 2317528 - RNA, 19 nt, Artificial Sequence
  Description of Artificial Sequence: Synthetic oligonucleotide
  Sense strand starting at position 689 of SEQ ID NO: 1885118
uaauguggauccgucagaa

SEQ ID NO: 2317529 - RNA, 19 nt, Artificial Sequence
  Description of Artificial Sequence: Synthetic oligonucleotide
  Antisense strand to SEQ ID NO: 2317528
uucugacggauccacauua

SEQ ID NO: 2317530 - RNA, 19 nt, Artificial Sequence
  Description of Artificial Sequence: Synthetic oligonucleotide
  Sense strand starting at position 697 of SEQ ID NO: 1885118
auccgucagaauuggguau

SEQ ID NO: 2317531 - RNA, 19 nt, Artificial Sequence
  Description of Artificial Sequence: Synthetic oligonucleotide
  Antisense strand to SEQ ID NO: 2317530
auacccaauucugacggau

SEQ ID NO: 2317532 - RNA, 19 nt, Artificial Sequence
  Description of Artificial Sequence: Synthetic oligonucleotide
  Sense strand starting at position 701 of SEQ ID NO: 1885118
gucagaauuggguaucuua

SEQ ID NO: 2317533 - RNA, 19 nt, Artificial Sequence
  Description of Artificial Sequence: Synthetic oligonucleotide
  Antisense strand to SEQ ID NO: 2317532
uaagauacccaauucugac

SEQ ID NO: 2317534 - RNA, 19 nt, Artificial Sequence
  Description of Artificial Sequence: Synthetic oligonucleotide
  Sense strand starting at position 704 of SEQ ID NO: 1885118
agaauuggguaucuuauac

SEQ ID NO: 2317535 - RNA, 19 nt, Artificial Sequence
  Description of Artificial Sequence: Synthetic oligonucleotide
  Antisense strand to SEQ ID NO: 2317534
guauaagauacccaauucu

SEQ ID NO: 2317536 - RNA, 19 nt, Artificial Sequence
  Description of Artificial Sequence: Synthetic oligonucleotide
  Sense strand starting at position 746 of SEQ ID NO: 1885118
uagauaauuuacgaacugu

SEQ ID NO: 2317537 - RNA, 19 nt, Artificial Sequence
  Description of Artificial Sequence: Synthetic oligonucleotide
  Antisense strand to SEQ ID NO: 2317536
acaguucguaaauuaucua

SEQ ID NO: 2317538 - RNA, 19 nt, Artificial Sequence
  Description of Artificial Sequence: Synthetic oligonucleotide
  Sense strand starting at position 1215 of SEQ ID NO: 1885118
ucagucagaauugguaguu

SEQ ID NO: 2317539 - RNA, 19 nt, Artificial Sequence
  Description of Artificial Sequence: Synthetic oligonucleotide
  Antisense strand to SEQ ID NO: 2317538
aacuaccaauucugacuga

SEQ ID NO: 2317540 - RNA, 19 nt, Artificial Sequence
  Description of Artificial Sequence: Synthetic oligonucleotide
  Sense strand starting at position 1220 of SEQ ID NO: 1885118
cagaauugguaguuccaca

SEQ ID NO: 2317541 - RNA, 19 nt, Artificial Sequence
  Description of Artificial Sequence: Synthetic oligonucleotide
  Antisense strand to SEQ ID NO: 2317540
uguggaacuaccaauucug

SEQ ID NO: 2317542 - RNA, 19 nt, Artificial Sequence
  Description of Artificial Sequence: Synthetic oligonucleotide
  Sense strand starting at position 1225 of SEQ ID NO: 1885118
uugguaguuccacaaccuu

SEQ ID NO: 2317543 - RNA, 19 nt, Artificial Sequence
  Description of Artificial Sequence: Synthetic oligonucleotide
  Antisense strand to SEQ ID NO: 2317542
aagguuguggaacuaccaa

SEQ ID NO: 2317544 - RNA, 19 nt, Artificial Sequence
  Description of Artificial Sequence: Synthetic oligonucleotide
  Sense strand starting at position 1278 of SEQ ID NO: 1885118
uuccuagcucguuaauaca

SEQ ID NO: 2317545 - RNA, 19 nt, Artificial Sequence
  Description of Artificial Sequence: Synthetic oligonucleotide
  Antisense strand to SEQ ID NO: 2317544
uguauuaacgagcuaggaa

SEQ ID NO: 2317546 - RNA, 19 nt, Artificial Sequence
  Description of Artificial Sequence: Synthetic oligonucleotide
  Sense strand starting at position 1303 of SEQ ID NO: 1885118
uaagguuuacacggacgaa

SEQ ID NO: 2317547 - RNA, 19 nt, Artificial Sequence
  Description of Artificial Sequence: Synthetic oligonucleotide
  Antisense strand to SEQ ID NO: 2317546
uucguccguguaaaccuua

SEQ ID NO: 2317548 - RNA, 19 nt, Artificial Sequence
  Description of Artificial Sequence: Synthetic oligonucleotide
  Sense strand starting at position 1529 of SEQ ID NO: 1885118
aucacuagccagggugaau

SEQ ID NO: 2317549 - RNA, 19 nt, Artificial Sequence
  Description of Artificial Sequence: Synthetic oligonucleotide
  Antisense strand to SEQ ID NO: 2317548
auucacccuggcuagugau

SEQ ID NO: 2317550 - RNA, 19 nt, Artificial Sequence
  Description of Artificial Sequence: Synthetic oligonucleotide
  Sense strand starting at position 1815 of SEQ ID NO: 1885118
aacucagauucgguaccua

SEQ ID NO: 2317551 - RNA, 19 nt, Artificial Sequence
  Description of Artificial Sequence: Synthetic oligonucleotide
  Antisense strand to SEQ ID NO: 2317550
uagguaccgaaucugaguu

SEQ ID NO: 2317552 - RNA, 19 nt, Artificial Sequence
  Description of Artificial Sequence: Synthetic oligonucleotide
  Sense strand starting at position 1906 of SEQ ID NO: 1885118
gaagcuucgccucagacua

SEQ ID NO: 2317553 - RNA, 19 nt, Artificial Sequence
  Description of Artificial Sequence: Synthetic oligonucleotide
  Antisense strand to SEQ ID NO: 2317552
uagucugaggcgaagcuuc

SEQ ID NO: 2317554 - RNA, 19 nt, Artificial Sequence
  Description of Artificial Sequence: Synthetic oligonucleotide
  Sense strand starting at position 1980 of SEQ ID NO: 1885118
cacagcuugcugggagaaa

SEQ ID NO: 2317555 - RNA, 19 nt, Artificial Sequence
  Description of Artificial Sequence: Synthetic oligonucleotide
  Antisense strand to SEQ ID NO: 2317554
uuucucccagcaagcugug

SEQ ID NO: 2317556 - RNA, 19 nt, Artificial Sequence
  Description of Artificial Sequence: Synthetic oligonucleotide
  Sense strand starting at position 2156 of SEQ ID NO: 1885118
gcaacuuccuauuucgagu

SEQ ID NO: 2317557 - RNA, 19 nt, Artificial Sequence
  Description of Artificial Sequence: Synthetic oligonucleotide
  Antisense strand to SEQ ID NO: 2317556
acucgaaauaggaaguugc

SEQ ID NO: 2317558 - RNA, 19 nt, Artificial Sequence
  Description of Artificial Sequence: Synthetic oligonucleotide
  Sense strand starting at position 2172 of SEQ ID NO: 1885118
agucuaaaguaaucuuggu

SEQ ID NO: 2317559 - RNA, 19 nt, Artificial Sequence
  Description of Artificial Sequence: Synthetic oligonucleotide
  Antisense strand to SEQ ID NO: 2317558
accaagauuacuuuagacu

SEQ ID NO: 2317560 - RNA, 19 nt, Artificial Sequence
  Description of Artificial Sequence: Synthetic oligonucleotide
  Sense strand starting at position 2223 of SEQ ID NO: 1885118
guguucucccgccaauuua

SEQ ID NO: 2317561 - RNA, 19 nt, Artificial Sequence
  Description of Artificial Sequence: Synthetic oligonucleotide
  Antisense strand to SEQ ID NO: 2317560
uaaauuggcgggagaacac

SEQ ID NO: 2317562 - RNA, 19 nt, Artificial Sequence
  Description of Artificial Sequence: Synthetic oligonucleotide
  Sense strand starting at position 2234 of SEQ ID NO: 1885118
ccaauuuaagccuguggca

SEQ ID NO: 2317563 - RNA, 19 nt, Artificial Sequence
  Description of Artificial Sequence: Synthetic oligonucleotide
  Antisense strand to SEQ ID NO: 2317562
ugccacaggcuuaaauugg

SEQ ID NO: 2317564 - RNA, 19 nt, Artificial Sequence
  Description of Artificial Sequence: Synthetic oligonucleotide
  Sense strand starting at position 2376 of SEQ ID NO: 1885118
guggguucaggacgaagua

SEQ ID NO: 2317565 - RNA, 19 nt, Artificial Sequence
  Description of Artificial Sequence: Synthetic oligonucleotide
  Antisense strand to SEQ ID NO: 2317564
uacuucguccugaacccac

SEQ ID NO: 2317566 - RNA, 19 nt, Artificial Sequence
  Description of Artificial Sequence: Synthetic oligonucleotide
  Sense strand starting at position 2471 of SEQ ID NO: 1885118
cggcgauguccagcggaga

SEQ ID NO: 2317567 - RNA, 19 nt, Artificial Sequence
  Description of Artificial Sequence: Synthetic oligonucleotide
  Antisense strand to SEQ ID NO: 2317566
ucuccgcuggacaucgccg

SEQ ID NO: 2317568 - RNA, 19 nt, Artificial Sequence
  Description of Artificial Sequence: Synthetic oligonucleotide
  Sense strand starting at position 2486 of SEQ ID NO: 1885118
gagagcguuuaaguaugga

SEQ ID NO: 2317569 - RNA, 19 nt, Artificial Sequence
  Description of Artificial Sequence: Synthetic oligonucleotide
  Antisense strand to SEQ ID NO: 2317568
uccauacuuaaacgcucuc

SEQ ID NO: 2317570 - RNA, 19 nt, Artificial Sequence
  Description of Artificial Sequence: Synthetic oligonucleotide
  Sense strand starting at position 2548 of SEQ ID NO: 1885118
cgcgaaucuguucugcauu

SEQ ID NO: 2317571 - RNA, 19 nt, Artificial Sequence
  Description of Artificial Sequence: Synthetic oligonucleotide
  Antisense strand to SEQ ID NO: 2317570
aaugcagaacagauucgcg

SEQ ID NO: 2317572 - RNA, 19 nt, Artificial Sequence
  Description of Artificial Sequence: Synthetic oligonucleotide
  Sense strand starting at position 2570 of SEQ ID NO: 1885118
ccgccagagugaucucaaa

SEQ ID NO: 2317573 - RNA, 19 nt, Artificial Sequence
  Description of Artificial Sequence: Synthetic oligonucleotide
  Antisense strand to SEQ ID NO: 2317572
uuugagaucacucuggcgg

SEQ ID NO: 2317574 - RNA, 19 nt, Artificial Sequence
  Description of Artificial Sequence: Synthetic oligonucleotide
  Sense strand starting at position 2653 of SEQ ID NO: 1885118
caaucuugaggucgagguu

SEQ ID NO: 2317575 - RNA, 19 nt, Artificial Sequence
  Description of Artificial Sequence: Synthetic oligonucleotide
  Antisense strand to SEQ ID NO: 2317574
aaccucgaccucaagauug

SEQ ID NO: 2317576 - RNA, 19 nt, Artificial Sequence
  Description of Artificial Sequence: Synthetic oligonucleotide
  Sense strand starting at position 2936 of SEQ ID NO: 1885118
uuguaauuauuugugcagu

SEQ ID NO: 2317577 - RNA, 19 nt, Artificial Sequence
  Description of Artificial Sequence: Synthetic oligonucleotide
  Antisense strand to SEQ ID NO: 2317576
acugcacaaauaauuacaa

SEQ ID NO: 2317578 - RNA, 19 nt, Artificial Sequence
  Description of Artificial Sequence: Synthetic oligonucleotide
  Sense strand starting at position 3086 of SEQ ID NO: 1885118
uagaaaggugucuggcaca

SEQ ID NO: 2317579 - RNA, 19 nt, Artificial Sequence
  Description of Artificial Sequence: Synthetic oligonucleotide
  Antisense strand to SEQ ID NO: 2317578
ugugccagacaccuuucua

SEQ ID NO: 2317580 - RNA, 19 nt, Artificial Sequence
  Description of Artificial Sequence: Synthetic oligonucleotide
  Sense strand starting at position 3296 of SEQ ID NO: 1885118
guuucuguucccuugcuua

SEQ ID NO: 2317581 - RNA, 19 nt, Artificial Sequence
  Description of Artificial Sequence: Synthetic oligonucleotide
  Antisense strand to SEQ ID NO: 2317580
uaagcaagggaacagaaac

SEQ ID NO: 2317582 - RNA, 19 nt, Artificial Sequence
  Description of Artificial Sequence: Synthetic oligonucleotide
  Sense strand starting at position 3419 of SEQ ID NO: 1885118
aagcauuguucugugaaca

SEQ ID NO: 2317583 - RNA, 19 nt, Artificial Sequence
  Description of Artificial Sequence: Synthetic oligonucleotide
  Antisense strand to SEQ ID NO: 2317582
uguucacagaacaaugcuu

SEQ ID NO: 2317584 - RNA, 19 nt, Artificial Sequence
  Description of Artificial Sequence: Synthetic oligonucleotide
  Sense strand starting at position 3581 of SEQ ID NO: 1885118
cuaaauuagucccuuggua

SEQ ID NO: 2317585 - RNA, 19 nt, Artificial Sequence
  Description of Artificial Sequence: Synthetic oligonucleotide
  Antisense strand to SEQ ID NO: 2317584
uaccaagggacuaauuuag

SEQ ID NO: 2317586 - RNA, 19 nt, Artificial Sequence
  Description of Artificial Sequence: Synthetic oligonucleotide
  Sense strand starting at position 3596 of SEQ ID NO: 1885118
gguauugguauccauggga

SEQ ID NO: 2317587 - RNA, 19 nt, Artificial Sequence
  Description of Artificial Sequence: Synthetic oligonucleotide
  Antisense strand to SEQ ID NO: 2317586
ucccauggauaccaauacc

SEQ ID NO: 2317588 - RNA, 19 nt, Artificial Sequence
  Description of Artificial Sequence: Synthetic oligonucleotide
  Sense strand starting at position 3691 of SEQ ID NO: 1885118
gcauguagccuaggaacau

SEQ ID NO: 2317589 - RNA, 19 nt, Artificial Sequence
  Description of Artificial Sequence: Synthetic oligonucleotide
  Antisense strand to SEQ ID NO: 2317588
auguuccuaggcuacaugc

SEQ ID NO: 2317590 - RNA, 19 nt, Artificial Sequence
  Description of Artificial Sequence: Synthetic oligonucleotide
  Sense strand starting at position 3702 of SEQ ID NO: 1885118
aggaacaucugccuguaua

SEQ ID NO: 2317591 - RNA, 19 nt, Artificial Sequence
  Description of Artificial Sequence: Synthetic oligonucleotide
  Antisense strand to SEQ ID NO: 2317590
uauacaggcagauguuccu

SEQ ID NO: 2317592 - RNA, 19 nt, Artificial Sequence
  Description of Artificial Sequence: Synthetic oligonucleotide
  Sense strand starting at position 3703 of SEQ ID NO: 1885118
ggaacaucugccuguauac

SEQ ID NO: 2317593 - RNA, 19 nt, Artificial Sequence
  Description of Artificial Sequence: Synthetic oligonucleotide
  Antisense strand to SEQ ID NO: 2317592
guauacaggcagauguucc

SEQ ID NO: 2317594 - RNA, 19 nt, Artificial Sequence
  Description of Artificial Sequence: Synthetic oligonucleotide
  Sense strand starting at position 3777 of SEQ ID NO: 1885118
guaggugcaaucuagggau

SEQ ID NO: 2317595 - RNA, 19 nt, Artificial Sequence
  Description of Artificial Sequence: Synthetic oligonucleotide
  Antisense strand to SEQ ID NO: 2317594
aucccuagauugcaccuac

SEQ ID NO: 2317596 - RNA, 19 nt, Artificial Sequence
  Description of Artificial Sequence: Synthetic oligonucleotide
  Sense strand starting at position 3783 of SEQ ID NO: 1885118
gcaaucuagggauguggaa

SEQ ID NO: 2317597 - RNA, 19 nt, Artificial Sequence
  Description of Artificial Sequence: Synthetic oligonucleotide
  Antisense strand to SEQ ID NO: 2317596
uuccacaucccuagauugc

SEQ ID NO: 2317598 - RNA, 19 nt, Artificial Sequence
  Description of Artificial Sequence: Synthetic oligonucleotide
  Sense strand starting at position 3795 of SEQ ID NO: 1885118
uguggaacacauggauauu

SEQ ID NO: 2317599 - RNA, 19 nt, Artificial Sequence
  Description of Artificial Sequence: Synthetic oligonucleotide
  Antisense strand to SEQ ID NO: 2317598
aauauccauguguuccaca

SEQ ID NO: 2317600 - RNA, 19 nt, Artificial Sequence
  Description of Artificial Sequence: Synthetic oligonucleotide
  Sense strand starting at position 3814 of SEQ ID NO: 1885118
gacggcaaacuguauauau

SEQ ID NO: 2317601 - RNA, 19 nt, Artificial Sequence
  Description of Artificial Sequence: Synthetic oligonucleotide
  Antisense strand to SEQ ID NO: 2317600
auauauacaguuugccguc

SEQ ID NO: 2317602 - RNA, 19 nt, Artificial Sequence
  Description of Artificial Sequence: Synthetic oligonucleotide
  Sense strand starting at position 10 of SEQ ID NO: 1885119
aggcaugaguucuuaacca

SEQ ID NO: 2317603 - RNA, 19 nt, Artificial Sequence
  Description of Artificial Sequence: Synthetic oligonucleotide
  Antisense strand to SEQ ID NO: 2317602
ugguuaagaacucaugccu

SEQ ID NO: 2317604 - RNA, 19 nt, Artificial Sequence
  Description of Artificial Sequence: Synthetic oligonucleotide
  Sense strand starting at position 15 of SEQ ID NO: 1885119
ugaguucuuaaccagaggu

SEQ ID NO: 2317605 - RNA, 19 nt, Artificial Sequence
  Description of Artificial Sequence: Synthetic oligonucleotide
  Antisense strand to SEQ ID NO: 2317604
accucugguuaagaacuca

SEQ ID NO: 2317606 - RNA, 19 nt, Artificial Sequence
  Description of Artificial Sequence: Synthetic oligonucleotide
  Sense strand starting at position 149 of SEQ ID NO: 1885119
agauaucugugaccuccaa

SEQ ID NO: 2317607 - RNA, 19 nt, Artificial Sequence
  Description of Artificial Sequence: Synthetic oligonucleotide
  Antisense strand to SEQ ID NO: 2317606
uuggaggucacagauaucu

SEQ ID NO: 2317608 - RNA, 19 nt, Artificial Sequence
  Description of Artificial Sequence: Synthetic oligonucleotide
  Sense strand starting at position 249 of SEQ ID NO: 1885119
gccuaauguucucuuagac

SEQ ID NO: 2317609 - RNA, 19 nt, Artificial Sequence
  Description of Artificial Sequence: Synthetic oligonucleotide
  Antisense strand to SEQ ID NO: 2317608
gucuaagagaacauuaggc

SEQ ID NO: 2317610 - RNA, 19 nt, Artificial Sequence
  Description of Artificial Sequence: Synthetic oligonucleotide
  Sense strand starting at position 256 of SEQ ID NO: 1885119
guucucuuagacuguaaca

SEQ ID NO: 2317611 - RNA, 19 nt, Artificial Sequence
  Description of Artificial Sequence: Synthetic oligonucleotide
  Antisense strand to SEQ ID NO: 2317610
uguuacagucuaagagaac

SEQ ID NO: 2317612 - RNA, 19 nt, Artificial Sequence
  Description of Artificial Sequence: Synthetic oligonucleotide
  Sense strand starting at position 285 of SEQ ID NO: 1885119
gucagaggacuuuacguaa

SEQ ID NO: 2317613 - RNA, 19 nt, Artificial Sequence
  Description of Artificial Sequence: Synthetic oligonucleotide
  Antisense strand to SEQ ID NO: 2317612
uuacguaaaguccucugac

SEQ ID NO: 2317614 - RNA, 19 nt, Artificial Sequence
  Description of Artificial Sequence: Synthetic oligonucleotide
  Sense strand starting at position 585 of SEQ ID NO: 1885119
aguggagaugauugcucaa

SEQ ID NO: 2317615 - RNA, 19 nt, Artificial Sequence
  Description of Artificial Sequence: Synthetic oligonucleotide
  Antisense strand to SEQ ID NO: 2317614
uugagcaaucaucuccacu

SEQ ID NO: 2317616 - RNA, 19 nt, Artificial Sequence
  Description of Artificial Sequence: Synthetic oligonucleotide
  Sense strand starting at position 587 of SEQ ID NO: 1885119
uggagaugauugcucaauu

SEQ ID NO: 2317617 - RNA, 19 nt, Artificial Sequence
  Description of Artificial Sequence: Synthetic oligonucleotide
  Antisense strand to SEQ ID NO: 2317616
aauugagcaaucaucucca

SEQ ID NO: 2317618 - RNA, 19 nt, Artificial Sequence
  Description of Artificial Sequence: Synthetic oligonucleotide
  Sense strand starting at position 630 of SEQ ID NO: 1885119
ucaagagaccgcugauaua

SEQ ID NO: 2317619 - RNA, 19 nt, Artificial Sequence
  Description of Artificial Sequence: Synthetic oligonucleotide
  Antisense strand to SEQ ID NO: 2317618
uauaucagcggucucuuga

SEQ ID NO: 2317620 - RNA, 19 nt, Artificial Sequence
  Description of Artificial Sequence: Synthetic oligonucleotide
  Sense strand starting at position 640 of SEQ ID NO: 1885119
gcugauauagucuaugcau

SEQ ID NO: 2317621 - RNA, 19 nt, Artificial Sequence
  Description of Artificial Sequence: Synthetic oligonucleotide
  Antisense strand to SEQ ID NO: 2317620
augcauagacuauaucagc

SEQ ID NO: 2317622 - RNA, 19 nt, Artificial Sequence
  Description of Artificial Sequence: Synthetic oligonucleotide
  Sense strand starting at position 859 of SEQ ID NO: 1885119
cgagcuuuaaaggaucacu

SEQ ID NO: 2317623 - RNA, 19 nt, Artificial Sequence
  Description of Artificial Sequence: Synthetic oligonucleotide
  Antisense strand to SEQ ID NO: 2317622
agugauccuuuaaagcucg

SEQ ID NO: 2317624 - RNA, 19 nt, Artificial Sequence
  Description of Artificial Sequence: Synthetic oligonucleotide
  Sense strand starting at position 1138 of SEQ ID NO: 1885119
gcccacccgagauaugaaa

SEQ ID NO: 2317625 - RNA, 19 nt, Artificial Sequence
  Description of Artificial Sequence: Synthetic oligonucleotide
  Antisense strand to SEQ ID NO: 2317624
uuucauaucucgggugggc

SEQ ID NO: 2317626 - RNA, 19 nt, Artificial Sequence
  Description of Artificial Sequence: Synthetic oligonucleotide
  Sense strand starting at position 1194 of SEQ ID NO: 1885119
ccaaauauugcagguguga

SEQ ID NO: 2317627 - RNA, 19 nt, Artificial Sequence
  Description of Artificial Sequence: Synthetic oligonucleotide
  Antisense strand to SEQ ID NO: 2317626
ucacaccugcaauauuugg

SEQ ID NO: 2317628 - RNA, 19 nt, Artificial Sequence
  Description of Artificial Sequence: Synthetic oligonucleotide
  Sense strand starting at position 1229 of SEQ ID NO: 1885119
ggagauggugugugaggaa

SEQ ID NO: 2317629 - RNA, 19 nt, Artificial Sequence
  Description of Artificial Sequence: Synthetic oligonucleotide
  Antisense strand to SEQ ID NO: 2317628
uuccucacacaccaucucc

SEQ ID NO: 2317630 - RNA, 19 nt, Artificial Sequence
  Description of Artificial Sequence: Synthetic oligonucleotide
  Sense strand starting at position 1352 of SEQ ID NO: 1885119
cgagaccgaucuucugaga

SEQ ID NO: 2317631 - RNA, 19 nt, Artificial Sequence
  Description of Artificial Sequence: Synthetic oligonucleotide
  Antisense strand to SEQ ID NO: 2317630
ucucagaagaucggucucg

SEQ ID NO: 2317632 - RNA, 19 nt, Artificial Sequence
  Description of Artificial Sequence: Synthetic oligonucleotide
  Sense strand starting at position 1443 of SEQ ID NO: 1885119
agugucugguaccuauuua

SEQ ID NO: 2317633 - RNA, 19 nt, Artificial Sequence
  Description of Artificial Sequence: Synthetic oligonucleotide
  Antisense strand to SEQ ID NO: 2317632
uaaauagguaccagacacu

SEQ ID NO: 2317634 - RNA, 19 nt, Artificial Sequence
  Description of Artificial Sequence: Synthetic oligonucleotide
  Sense strand starting at position 1450 of SEQ ID NO: 1885119
gguaccuauuuagacagaa

SEQ ID NO: 2317635 - RNA, 19 nt, Artificial Sequence
  Description of Artificial Sequence: Synthetic oligonucleotide
  Antisense strand to SEQ ID NO: 2317634
uucugucuaaauagguacc

SEQ ID NO: 2317636 - RNA, 19 nt, Artificial Sequence
  Description of Artificial Sequence: Synthetic oligonucleotide
  Sense strand starting at position 1717 of SEQ ID NO: 1885119
caguaaagccgugaggaga

SEQ ID NO: 2317637 - RNA, 19 nt, Artificial Sequence
  Description of Artificial Sequence: Synthetic oligonucleotide
  Antisense strand to SEQ ID NO: 2317636
ucuccucacggcuuuacug

SEQ ID NO: 2317638 - RNA, 19 nt, Artificial Sequence
  Description of Artificial Sequence: Synthetic oligonucleotide
  Sense strand starting at position 2003 of SEQ ID NO: 1885119
cgccuuaggcguagagaug

SEQ ID NO: 2317639 - RNA, 19 nt, Artificial Sequence
  Description of Artificial Sequence: Synthetic oligonucleotide
  Antisense strand to SEQ ID NO: 2317638
caucucuacgccuaaggcg

SEQ ID NO: 2317640 - RNA, 19 nt, Artificial Sequence
  Description of Artificial Sequence: Synthetic oligonucleotide
  Sense strand starting at position 2075 of SEQ ID NO: 1885119
cccauuggucaauagcuga

SEQ ID NO: 2317641 - RNA, 19 nt, Artificial Sequence
  Description of Artificial Sequence: Synthetic oligonucleotide
  Antisense strand to SEQ ID NO: 2317640
ucagcuauugaccaauggg

SEQ ID NO: 2317642 - RNA, 19 nt, Artificial Sequence
  Description of Artificial Sequence: Synthetic oligonucleotide
  Sense strand starting at position 2726 of SEQ ID NO: 1885119
ccacgcuugagagaaguaa

SEQ ID NO: 2317643 - RNA, 19 nt, Artificial Sequence
  Description of Artificial Sequence: Synthetic oligonucleotide
  Antisense strand to SEQ ID NO: 2317642
uuacuucucucaagcgugg

SEQ ID NO: 2317644 - RNA, 19 nt, Artificial Sequence
  Description of Artificial Sequence: Synthetic oligonucleotide
  Sense strand starting at position 2749 of SEQ ID NO: 1885119
gaugcagacuguuuacaug

SEQ ID NO: 2317645 - RNA, 19 nt, Artificial Sequence
  Description of Artificial Sequence: Synthetic oligonucleotide
  Antisense strand to SEQ ID NO: 2317644
cauguaaacagucugcauc

SEQ ID NO: 2317646 - RNA, 19 nt, Artificial Sequence
  Description of Artificial Sequence: Synthetic oligonucleotide
  Sense strand starting at position 2847 of SEQ ID NO: 1885119
cuuagugguucuuugauga

SEQ ID NO: 2317647 - RNA, 19 nt, Artificial Sequence
  Description of Artificial Sequence: Synthetic oligonucleotide
  Antisense strand to SEQ ID NO: 2317646
ucaucaaagaaccacuaag

SEQ ID NO: 2317648 - RNA, 19 nt, Artificial Sequence
  Description of Artificial Sequence: Synthetic oligonucleotide
  Sense strand starting at position 2854 of SEQ ID NO: 1885119
guucuuugaugauuccaug

SEQ ID NO: 2317649 - RNA, 19 nt, Artificial Sequence
  Description of Artificial Sequence: Synthetic oligonucleotide
  Antisense strand to SEQ ID NO: 2317648
cauggaaucaucaaagaac

SEQ ID NO: 2317650 - RNA, 19 nt, Artificial Sequence
  Description of Artificial Sequence: Synthetic oligonucleotide
  Sense strand starting at position 2868 of SEQ ID NO: 1885119
ccaugacuuucgccuggaa

SEQ ID NO: 2317651 - RNA, 19 nt, Artificial Sequence
  Description of Artificial Sequence: Synthetic oligonucleotide
  Antisense strand to SEQ ID NO: 2317650
uuccaggcgaaagucaugg

SEQ ID NO: 2317652 - RNA, 19 nt, Artificial Sequence
  Description of Artificial Sequence: Synthetic oligonucleotide
  Sense strand starting at position 2870 of SEQ ID NO: 1885119
augacuuucgccuggaauu

SEQ ID NO: 2317653 - RNA, 19 nt, Artificial Sequence
  Description of Artificial Sequence: Synthetic oligonucleotide
  Antisense strand to SEQ ID NO: 2317652
aauuccaggcgaaagucau

SEQ ID NO: 2317654 - RNA, 19 nt, Artificial Sequence
  Description of Artificial Sequence: Synthetic oligonucleotide
  Sense strand starting at position 2872 of SEQ ID NO: 1885119
gacuuucgccuggaauucu

SEQ ID NO: 2317655 - RNA, 19 nt, Artificial Sequence
  Description of Artificial Sequence: Synthetic oligonucleotide
  Antisense strand to SEQ ID NO: 2317654
agaauuccaggcgaaaguc

SEQ ID NO: 2317656 - RNA, 19 nt, Artificial Sequence
  Description of Artificial Sequence: Synthetic oligonucleotide
  Sense strand starting at position 2880 of SEQ ID NO: 1885119
ccuggaauucuggguguac

SEQ ID NO: 2317657 - RNA, 19 nt, Artificial Sequence
  Description of Artificial Sequence: Synthetic oligonucleotide
  Antisense strand to SEQ ID NO: 2317656
guacacccagaauuccagg

SEQ ID NO: 2317658 - RNA, 19 nt, Artificial Sequence
  Description of Artificial Sequence: Synthetic oligonucleotide
  Sense strand starting at position 2884 of SEQ ID NO: 1885119
gaauucuggguguacguga

SEQ ID NO: 2317659 - RNA, 19 nt, Artificial Sequence
  Description of Artificial Sequence: Synthetic oligonucleotide
  Antisense strand to SEQ ID NO: 2317658
ucacguacacccagaauuc

SEQ ID NO: 2317660 - RNA, 19 nt, Artificial Sequence
  Description of Artificial Sequence: Synthetic oligonucleotide
  Sense strand starting at position 3002 of SEQ ID NO: 1885119
acaguugacguguaaagau

SEQ ID NO: 2317661 - RNA, 19 nt, Artificial Sequence
  Description of Artificial Sequence: Synthetic oligonucleotide
  Antisense strand to SEQ ID NO: 2317660
aucuuuacacgucaacugu

SEQ ID NO: 2317662 - RNA, 19 nt, Artificial Sequence
  Description of Artificial Sequence: Synthetic oligonucleotide
  Sense strand starting at position 3009 of SEQ ID NO: 1885119
acguguaaagaucagagca

SEQ ID NO: 2317663 - RNA, 19 nt, Artificial Sequence
  Description of Artificial Sequence: Synthetic oligonucleotide
  Antisense strand to SEQ ID NO: 2317662
ugcucugaucuuuacacgu

SEQ ID NO: 2317664 - RNA, 19 nt, Artificial Sequence
  Description of Artificial Sequence: Synthetic oligonucleotide
  Sense strand starting at position 3031 of SEQ ID NO: 1885119
augacuaugucucugaaau

SEQ ID NO: 2317665 - RNA, 19 nt, Artificial Sequence
  Description of Artificial Sequence: Synthetic oligonucleotide
  Antisense strand to SEQ ID NO: 2317664
auuucagagacauagucau

SEQ ID NO: 2317666 - RNA, 19 nt, Artificial Sequence
  Description of Artificial Sequence: Synthetic oligonucleotide
  Sense strand starting at position 3032 of SEQ ID NO: 1885119
ugacuaugucucugaaaug

SEQ ID NO: 2317667 - RNA, 19 nt, Artificial Sequence
  Description of Artificial Sequence: Synthetic oligonucleotide
  Antisense strand to SEQ ID NO: 2317666
cauuucagagacauaguca

SEQ ID NO: 2317668 - RNA, 19 nt, Artificial Sequence
  Description of Artificial Sequence: Synthetic oligonucleotide
  Sense strand starting at position 3054 of SEQ ID NO: 1885119
ugaggacucuucuugucuu

SEQ ID NO: 2317669 - RNA, 19 nt, Artificial Sequence
  Description of Artificial Sequence: Synthetic oligonucleotide
  Antisense strand to SEQ ID NO: 2317668
aagacaagaagaguccuca

SEQ ID NO: 2317670 - RNA, 19 nt, Artificial Sequence
  Description of Artificial Sequence: Synthetic oligonucleotide
  Sense strand starting at position 3109 of SEQ ID NO: 1885119
gcgugauggguaaguucuu

SEQ ID NO: 2317671 - RNA, 19 nt, Artificial Sequence
  Description of Artificial Sequence: Synthetic oligonucleotide
  Antisense strand to SEQ ID NO: 2317670
aagaacuuacccaucacgc

SEQ ID NO: 2317672 - RNA, 19 nt, Artificial Sequence
  Description of Artificial Sequence: Synthetic oligonucleotide
  Sense strand starting at position 3755 of SEQ ID NO: 1885119
augagauaugcuggguuag

SEQ ID NO: 2317673 - RNA, 19 nt, Artificial Sequence
  Description of Artificial Sequence: Synthetic oligonucleotide
  Antisense strand to SEQ ID NO: 2317672
cuaacccagcauaucucau

SEQ ID NO: 2317674 - RNA, 19 nt, Artificial Sequence
  Description of Artificial Sequence: Synthetic oligonucleotide
  Sense strand starting at position 3756 of SEQ ID NO: 1885119
ugagauaugcuggguuaga

SEQ ID NO: 2317675 - RNA, 19 nt, Artificial Sequence
  Description of Artificial Sequence: Synthetic oligonucleotide
  Antisense strand to SEQ ID NO: 2317674
ucuaacccagcauaucuca

SEQ ID NO: 2317676 - RNA, 19 nt, Artificial Sequence
  Description of Artificial Sequence: Synthetic oligonucleotide
  Sense strand starting at position 3757 of SEQ ID NO: 1885119
gagauaugcuggguuagaa

SEQ ID NO: 2317677 - RNA, 19 nt, Artificial Sequence
  Description of Artificial Sequence: Synthetic oligonucleotide
  Antisense strand to SEQ ID NO: 2317676
uucuaacccagcauaucuc

SEQ ID NO: 2317678 - RNA, 19 nt, Artificial Sequence
  Description of Artificial Sequence: Synthetic oligonucleotide
  Sense strand starting at position 3852 of SEQ ID NO: 1885119
gauauuaugguauacuagu

SEQ ID NO: 2317679 - RNA, 19 nt, Artificial Sequence
  Description of Artificial Sequence: Synthetic oligonucleotide
  Antisense strand to SEQ ID NO: 2317678
acuaguauaccauaauauc

SEQ ID NO: 2317680 - RNA, 19 nt, Artificial Sequence
  Description of Artificial Sequence: Synthetic oligonucleotide
  Sense strand starting at position 3858 of SEQ ID NO: 1885119
augguauacuaguucuaag

SEQ ID NO: 2317681 - RNA, 19 nt, Artificial Sequence
  Description of Artificial Sequence: Synthetic oligonucleotide
  Antisense strand to SEQ ID NO: 2317680
cuuagaacuaguauaccau

SEQ ID NO: 2317682 - RNA, 19 nt, Artificial Sequence
  Description of Artificial Sequence: Synthetic oligonucleotide
  Sense strand starting at position 520 of SEQ ID NO: 1885120
ggccuagaguagcugauuu

SEQ ID NO: 2317683 - RNA, 19 nt, Artificial Sequence
  Description of Artificial Sequence: Synthetic oligonucleotide
  Antisense strand to SEQ ID NO: 2317682
aaaucagcuacucuaggcc

SEQ ID NO: 2317684 - RNA, 19 nt, Artificial Sequence
  Description of Artificial Sequence: Synthetic oligonucleotide
  Sense strand starting at position 929 of SEQ ID NO: 1885120
ucucacagcucaguauuau

SEQ ID NO: 2317685 - RNA, 19 nt, Artificial Sequence
  Description of Artificial Sequence: Synthetic oligonucleotide
  Antisense strand to SEQ ID NO: 2317684
auaauacugagcugugaga

SEQ ID NO: 2317686 - RNA, 19 nt, Artificial Sequence
  Description of Artificial Sequence: Synthetic oligonucleotide
  Sense strand starting at position 930 of SEQ ID NO: 1885120
cucacagcucaguauuauc

SEQ ID NO: 2317687 - RNA, 19 nt, Artificial Sequence
  Description of Artificial Sequence: Synthetic oligonucleotide
  Antisense strand to SEQ ID NO: 2317686
gauaauacugagcugugag

SEQ ID NO: 2317688 - RNA, 19 nt, Artificial Sequence
  Description of Artificial Sequence: Synthetic oligonucleotide
  Sense strand starting at position 938 of SEQ ID NO: 1885120
ucaguauuaucuguagcca

SEQ ID NO: 2317689 - RNA, 19 nt, Artificial Sequence
  Description of Artificial Sequence: Synthetic oligonucleotide
  Antisense strand to SEQ ID NO: 2317688
uggcuacagauaauacuga

SEQ ID NO: 2317690 - RNA, 19 nt, Artificial Sequence
  Description of Artificial Sequence: Synthetic oligonucleotide
  Sense strand starting at position 1100 of SEQ ID NO: 1885120
cgagcuuucuuacccuaaa

SEQ ID NO: 2317691 - RNA, 19 nt, Artificial Sequence
  Description of Artificial Sequence: Synthetic oligonucleotide
  Antisense strand to SEQ ID NO: 2317690
uuuaggguaagaaagcucg

SEQ ID NO: 2317692 - RNA, 19 nt, Artificial Sequence
  Description of Artificial Sequence: Synthetic oligonucleotide
  Sense strand starting at position 1124 of SEQ ID NO: 1885120
ucauguauacauugaggaa

SEQ ID NO: 2317693 - RNA, 19 nt, Artificial Sequence
  Description of Artificial Sequence: Synthetic oligonucleotide
  Antisense strand to SEQ ID NO: 2317692
uuccucaauguauacauga

SEQ ID NO: 2317694 - RNA, 19 nt, Artificial Sequence
  Description of Artificial Sequence: Synthetic oligonucleotide
  Sense strand starting at position 1160 of SEQ ID NO: 1885120
ugggucaagaucugucagu

SEQ ID NO: 2317695 - RNA, 19 nt, Artificial Sequence
  Description of Artificial Sequence: Synthetic oligonucleotide
  Antisense strand to SEQ ID NO: 2317694
acugacagaucuugaccca

SEQ ID NO: 2317696 - RNA, 19 nt, Artificial Sequence
  Description of Artificial Sequence: Synthetic oligonucleotide
  Sense strand starting at position 1161 of SEQ ID NO: 1885120
gggucaagaucugucaguc

SEQ ID NO: 2317697 - RNA, 19 nt, Artificial Sequence
  Description of Artificial Sequence: Synthetic oligonucleotide
  Antisense strand to SEQ ID NO: 2317696
gacugacagaucuugaccc

SEQ ID NO: 2317698 - RNA, 19 nt, Artificial Sequence
  Description of Artificial Sequence: Synthetic oligonucleotide
  Sense strand starting at position 1249 of SEQ ID NO: 1885120
agcgcuacuuguccaggaa

SEQ ID NO: 2317699 - RNA, 19 nt, Artificial Sequence
  Description of Artificial Sequence: Synthetic oligonucleotide
  Antisense strand to SEQ ID NO: 2317698
uuccuggacaaguagcgcu

SEQ ID NO: 2317700 - RNA, 19 nt, Artificial Sequence
  Description of Artificial Sequence: Synthetic oligonucleotide
  Sense strand starting at position 1666 of SEQ ID NO: 1885120
acuugcagccaucagauua

SEQ ID NO: 2317701 - RNA, 19 nt, Artificial Sequence
  Description of Artificial Sequence: Synthetic oligonucleotide
  Antisense strand to SEQ ID NO: 2317700
uaaucugauggcugcaagu

SEQ ID NO: 2317702 - RNA, 19 nt, Artificial Sequence
  Description of Artificial Sequence: Synthetic oligonucleotide
  Sense strand starting at position 1990 of SEQ ID NO: 1885120
ucaucauguggcugacaaa

SEQ ID NO: 2317703 - RNA, 19 nt, Artificial Sequence
  Description of Artificial Sequence: Synthetic oligonucleotide
  Antisense strand to SEQ ID NO: 2317702
uuugucagccacaugauga

SEQ ID NO: 2317704 - RNA, 19 nt, Artificial Sequence
  Description of Artificial Sequence: Synthetic oligonucleotide
  Sense strand starting at position 2141 of SEQ ID NO: 1885120
gaaagugacuaugagggaa

SEQ ID NO: 2317705 - RNA, 19 nt, Artificial Sequence
  Description of Artificial Sequence: Synthetic oligonucleotide
  Antisense strand to SEQ ID NO: 2317704
uucccucauagucacuuuc

SEQ ID NO: 2317706 - RNA, 19 nt, Artificial Sequence
  Description of Artificial Sequence: Synthetic oligonucleotide
  Sense strand starting at position 2212 of SEQ ID NO: 1885120
ucagaucuaacccguggaa

SEQ ID NO: 2317707 - RNA, 19 nt, Artificial Sequence
  Description of Artificial Sequence: Synthetic oligonucleotide
  Antisense strand to SEQ ID NO: 2317706
uuccacggguuagaucuga

SEQ ID NO: 2317708 - RNA, 19 nt, Artificial Sequence
  Description of Artificial Sequence: Synthetic oligonucleotide
  Sense strand starting at position 2214 of SEQ ID NO: 1885120
agaucuaacccguggaauc

SEQ ID NO: 2317709 - RNA, 19 nt, Artificial Sequence
  Description of Artificial Sequence: Synthetic oligonucleotide
  Antisense strand to SEQ ID NO: 2317708
gauuccacggguuagaucu

SEQ ID NO: 2317710 - RNA, 19 nt, Artificial Sequence
  Description of Artificial Sequence: Synthetic oligonucleotide
  Sense strand starting at position 2224 of SEQ ID NO: 1885120
cguggaaucgaauguuuaa

SEQ ID NO: 2317711 - RNA, 19 nt, Artificial Sequence
  Description of Artificial Sequence: Synthetic oligonucleotide
  Antisense strand to SEQ ID NO: 2317710
uuaaacauucgauuccacg

SEQ ID NO: 2317712 - RNA, 19 nt, Artificial Sequence
  Description of Artificial Sequence: Synthetic oligonucleotide
  Sense strand starting at position 2289 of SEQ ID NO: 1885120
gguacaugcucaucaguag

SEQ ID NO: 2317713 - RNA, 19 nt, Artificial Sequence
  Description of Artificial Sequence: Synthetic oligonucleotide
  Antisense strand to SEQ ID NO: 2317712
cuacugaugagcauguacc

SEQ ID NO: 2317714 - RNA, 19 nt, Artificial Sequence
  Description of Artificial Sequence: Synthetic oligonucleotide
  Sense strand starting at position 2290 of SEQ ID NO: 1885120
guacaugcucaucaguaga

SEQ ID NO: 2317715 - RNA, 19 nt, Artificial Sequence
  Description of Artificial Sequence: Synthetic oligonucleotide
  Antisense strand to SEQ ID NO: 2317714
ucuacugaugagcauguac

SEQ ID NO: 2317716 - RNA, 19 nt, Artificial Sequence
  Description of Artificial Sequence: Synthetic oligonucleotide
  Sense strand starting at position 2293 of SEQ ID NO: 1885120
caugcucaucaguagagau

SEQ ID NO: 2317717 - RNA, 19 nt, Artificial Sequence
  Description of Artificial Sequence: Synthetic oligonucleotide
  Antisense strand to SEQ ID NO: 2317716
aucucuacugaugagcaug

SEQ ID NO: 2317718 - RNA, 19 nt, Artificial Sequence
  Description of Artificial Sequence: Synthetic oligonucleotide
  Sense strand starting at position 2295 of SEQ ID NO: 1885120
ugcucaucaguagagauau

SEQ ID NO: 2317719 - RNA, 19 nt, Artificial Sequence
  Description of Artificial Sequence: Synthetic oligonucleotide
  Antisense strand to SEQ ID NO: 2317718
auaucucuacugaugagca

SEQ ID NO: 2317720 - RNA, 19 nt, Artificial Sequence
  Description of Artificial Sequence: Synthetic oligonucleotide
  Sense strand starting at position 2322 of SEQ ID NO: 1885120
agaggcauuuaucagugaa

SEQ ID NO: 2317721 - RNA, 19 nt, Artificial Sequence
  Description of Artificial Sequence: Synthetic oligonucleotide
  Antisense strand to SEQ ID NO: 2317720
uucacugauaaaugccucu

SEQ ID NO: 2317722 - RNA, 19 nt, Artificial Sequence
  Description of Artificial Sequence: Synthetic oligonucleotide
  Sense strand starting at position 2407 of SEQ ID NO: 1885120
guaccaguuggguguuuca

SEQ ID NO: 2317723 - RNA, 19 nt, Artificial Sequence
  Description of Artificial Sequence: Synthetic oligonucleotide
  Antisense strand to SEQ ID NO: 2317722
ugaaacacccaacugguac

SEQ ID NO: 2317724 - RNA, 19 nt, Artificial Sequence
  Description of Artificial Sequence: Synthetic oligonucleotide
  Sense strand starting at position 3065 of SEQ ID NO: 1885120
accuuagaguaguuauaug

SEQ ID NO: 2317725 - RNA, 19 nt, Artificial Sequence
  Description of Artificial Sequence: Synthetic oligonucleotide
  Antisense strand to SEQ ID NO: 2317724
cauauaacuacucuaaggu

SEQ ID NO: 2317726 - RNA, 19 nt, Artificial Sequence
  Description of Artificial Sequence: Synthetic oligonucleotide
  Sense strand starting at position 3070 of SEQ ID NO: 1885120
agaguaguuauaugacuug

SEQ ID NO: 2317727 - RNA, 19 nt, Artificial Sequence
  Description of Artificial Sequence: Synthetic oligonucleotide
  Antisense strand to SEQ ID NO: 2317726
caagucauauaacuacucu

SEQ ID NO: 2317728 - RNA, 19 nt, Artificial Sequence
  Description of Artificial Sequence: Synthetic oligonucleotide
  Sense strand starting at position 3244 of SEQ ID NO: 1885120
ucuugacacuucuuugaag

SEQ ID NO: 2317729 - RNA, 19 nt, Artificial Sequence
  Description of Artificial Sequence: Synthetic oligonucleotide
  Antisense strand to SEQ ID NO: 2317728
cuucaaagaagugucaaga

SEQ ID NO: 2317730 - RNA, 19 nt, Artificial Sequence
  Description of Artificial Sequence: Synthetic oligonucleotide
  Sense strand starting at position 3245 of SEQ ID NO: 1885120
cuugacacuucuuugaaga

SEQ ID NO: 2317731 - RNA, 19 nt, Artificial Sequence
  Description of Artificial Sequence: Synthetic oligonucleotide
  Antisense strand to SEQ ID NO: 2317730
ucuucaaagaagugucaag

SEQ ID NO: 2317732 - RNA, 19 nt, Artificial Sequence
  Description of Artificial Sequence: Synthetic oligonucleotide
  Sense strand starting at position 3246 of SEQ ID NO: 1885120
uugacacuucuuugaagag

SEQ ID NO: 2317733 - RNA, 19 nt, Artificial Sequence
  Description of Artificial Sequence: Synthetic oligonucleotide
  Antisense strand to SEQ ID NO: 2317732
cucuucaaagaagugucaa

SEQ ID NO: 2317734 - RNA, 19 nt, Artificial Sequence
  Description of Artificial Sequence: Synthetic oligonucleotide
  Sense strand starting at position 3318 of SEQ ID NO: 1885120
cgcgauuauauugaaguua

SEQ ID NO: 2317735 - RNA, 19 nt, Artificial Sequence
  Description of Artificial Sequence: Synthetic oligonucleotide
  Antisense strand to SEQ ID NO: 2317734
uaacuucaauauaaucgcg

SEQ ID NO: 2317736 - RNA, 19 nt, Artificial Sequence
  Description of Artificial Sequence: Synthetic oligonucleotide
  Sense strand starting at position 3365 of SEQ ID NO: 1885120
gaggguugguccucaggca

SEQ ID NO: 2317737 - RNA, 19 nt, Artificial Sequence
  Description of Artificial Sequence: Synthetic oligonucleotide
  Antisense strand to SEQ ID NO: 2317736
ugccugaggaccaacccuc

SEQ ID NO: 2317738 - RNA, 19 nt, Artificial Sequence
  Description of Artificial Sequence: Synthetic oligonucleotide
  Sense strand starting at position 3383 of SEQ ID NO: 1885120
aucguaucaagaggugcau

SEQ ID NO: 2317739 - RNA, 19 nt, Artificial Sequence
  Description of Artificial Sequence: Synthetic oligonucleotide
  Antisense strand to SEQ ID NO: 2317738
augcaccucuugauacgau

SEQ ID NO: 2317740 - RNA, 19 nt, Artificial Sequence
  Description of Artificial Sequence: Synthetic oligonucleotide
  Sense strand starting at position 3398 of SEQ ID NO: 1885120
gcaugaagugaaugucuua

SEQ ID NO: 2317741 - RNA, 19 nt, Artificial Sequence
  Description of Artificial Sequence: Synthetic oligonucleotide
  Antisense strand to SEQ ID NO: 2317740
uaagacauucacuucaugc

SEQ ID NO: 2317742 - RNA, 19 nt, Artificial Sequence
  Description of Artificial Sequence: Synthetic oligonucleotide
  Sense strand starting at position 3401 of SEQ ID NO: 1885120
ugaagugaaugucuuauua

SEQ ID NO: 2317743 - RNA, 19 nt, Artificial Sequence
  Description of Artificial Sequence: Synthetic oligonucleotide
  Antisense strand to SEQ ID NO: 2317742
uaauaagacauucacuuca

SEQ ID NO: 2317744 - RNA, 19 nt, Artificial Sequence
  Description of Artificial Sequence: Synthetic oligonucleotide
  Sense strand starting at position 3585 of SEQ ID NO: 1885120
augauucuugccugccaca

SEQ ID NO: 2317745 - RNA, 19 nt, Artificial Sequence
  Description of Artificial Sequence: Synthetic oligonucleotide
  Antisense strand to SEQ ID NO: 2317744
uguggcaggcaagaaucau

SEQ ID NO: 2317746 - RNA, 19 nt, Artificial Sequence
  Description of Artificial Sequence: Synthetic oligonucleotide
  Sense strand starting at position 3609 of SEQ ID NO: 1885120
ugcugugguguuuacuaaa

SEQ ID NO: 2317747 - RNA, 19 nt, Artificial Sequence
  Description of Artificial Sequence: Synthetic oligonucleotide
  Antisense strand to SEQ ID NO: 2317746
uuuaguaaacaccacagca

SEQ ID NO: 2317748 - RNA, 19 nt, Artificial Sequence
  Description of Artificial Sequence: Synthetic oligonucleotide
  Sense strand starting at position 3616 of SEQ ID NO: 1885120
guguuuacuaaauggugau

SEQ ID NO: 2317749 - RNA, 19 nt, Artificial Sequence
  Description of Artificial Sequence: Synthetic oligonucleotide
  Antisense strand to SEQ ID NO: 2317748
aucaccauuuaguaaacac

SEQ ID NO: 2317750 - RNA, 19 nt, Artificial Sequence
  Description of Artificial Sequence: Synthetic oligonucleotide
  Sense strand starting at position 3721 of SEQ ID NO: 1885120
acuuauuuauagcagaaug

SEQ ID NO: 2317751 - RNA, 19 nt, Artificial Sequence
  Description of Artificial Sequence: Synthetic oligonucleotide
  Antisense strand to SEQ ID NO: 2317750
cauucugcuauaaauaagu

SEQ ID NO: 2317752 - RNA, 19 nt, Artificial Sequence
  Description of Artificial Sequence: Synthetic oligonucleotide
  Sense strand starting at position 3747 of SEQ ID NO: 1885120
ggauauuugucuuauucug

SEQ ID NO: 2317753 - RNA, 19 nt, Artificial Sequence
  Description of Artificial Sequence: Synthetic oligonucleotide
  Antisense strand to SEQ ID NO: 2317752
cagaauaagacaaauaucc

SEQ ID NO: 2317754 - RNA, 19 nt, Artificial Sequence
  Description of Artificial Sequence: Synthetic oligonucleotide
  Sense strand starting at position 3755 of SEQ ID NO: 1885120
gucuuauucugugcuuuaa

SEQ ID NO: 2317755 - RNA, 19 nt, Artificial Sequence
  Description of Artificial Sequence: Synthetic oligonucleotide
  Antisense strand to SEQ ID NO: 2317754
uuaaagcacagaauaagac

SEQ ID NO: 2317756 - RNA, 19 nt, Artificial Sequence
  Description of Artificial Sequence: Synthetic oligonucleotide
  Sense strand starting at position 3814 of SEQ ID NO: 1885120
cauacuuggucucugcgau

SEQ ID NO: 2317757 - RNA, 19 nt, Artificial Sequence
  Description of Artificial Sequence: Synthetic oligonucleotide
  Antisense strand to SEQ ID NO: 2317756
aucgcagagaccaaguaug

SEQ ID NO: 2317758 - RNA, 19 nt, Artificial Sequence
  Description of Artificial Sequence: Synthetic oligonucleotide
  Sense strand starting at position 3844 of SEQ ID NO: 1885120
uggccuguguccuuugaac

SEQ ID NO: 2317759 - RNA, 19 nt, Artificial Sequence
  Description of Artificial Sequence: Synthetic oligonucleotide
  Antisense strand to SEQ ID NO: 2317758
guucaaaggacacaggcca

SEQ ID NO: 2317760 - RNA, 19 nt, Artificial Sequence
  Description of Artificial Sequence: Synthetic oligonucleotide
  Sense strand starting at position 3846 of SEQ ID NO: 1885120
gccuguguccuuugaacau

SEQ ID NO: 2317761 - RNA, 19 nt, Artificial Sequence
  Description of Artificial Sequence: Synthetic oligonucleotide
  Antisense strand to SEQ ID NO: 2317760
auguucaaaggacacaggc

SEQ ID NO: 2317762 - RNA, 19 nt, Artificial Sequence
  Description of Artificial Sequence: Synthetic oligonucleotide
  Sense strand starting at position 726 of SEQ ID NO: 1885121
ucgcuuccuccugauaucu

SEQ ID NO: 2317763 - RNA, 19 nt, Artificial Sequence
  Description of Artificial Sequence: Synthetic oligonucleotide
  Antisense strand to SEQ ID NO: 2317762
agauaucaggaggaagcga

SEQ ID NO: 2317764 - RNA, 19 nt, Artificial Sequence
  Description of Artificial Sequence: Synthetic oligonucleotide
  Sense strand starting at position 791 of SEQ ID NO: 1885121
aucuguagugcuuaauaug

SEQ ID NO: 2317765 - RNA, 19 nt, Artificial Sequence
  Description of Artificial Sequence: Synthetic oligonucleotide
  Antisense strand to SEQ ID NO: 2317764
cauauuaagcacuacagau

SEQ ID NO: 2317766 - RNA, 19 nt, Artificial Sequence
  Description of Artificial Sequence: Synthetic oligonucleotide
  Sense strand starting at position 1261 of SEQ ID NO: 1885121
gauggcgucugucuguaau

SEQ ID NO: 2317767 - RNA, 19 nt, Artificial Sequence
  Description of Artificial Sequence: Synthetic oligonucleotide
  Antisense strand to SEQ ID NO: 2317766
auuacagacagacgccauc

SEQ ID NO: 2317768 - RNA, 19 nt, Artificial Sequence
  Description of Artificial Sequence: Synthetic oligonucleotide
  Sense strand starting at position 1420 of SEQ ID NO: 1885121
uguggauaccuuuaccuuu

SEQ ID NO: 2317769 - RNA, 19 nt, Artificial Sequence
  Description of Artificial Sequence: Synthetic oligonucleotide
  Antisense strand to SEQ ID NO: 2317768
aaagguaaagguauccaca

SEQ ID NO: 2317770 - RNA, 19 nt, Artificial Sequence
  Description of Artificial Sequence: Synthetic oligonucleotide
  Sense strand starting at position 1644 of SEQ ID NO: 1885121
uugucuuuaguauggcauu

SEQ ID NO: 2317771 - RNA, 19 nt, Artificial Sequence
  Description of Artificial Sequence: Synthetic oligonucleotide
  Antisense strand to SEQ ID NO: 2317770
aaugccauacuaaagacaa

SEQ ID NO: 2317772 - RNA, 19 nt, Artificial Sequence
  Description of Artificial Sequence: Synthetic oligonucleotide
  Sense strand starting at position 1808 of SEQ ID NO: 1885121
ggaagaagguacuagauca

SEQ ID NO: 2317773 - RNA, 19 nt, Artificial Sequence
  Description of Artificial Sequence: Synthetic oligonucleotide
  Antisense strand to SEQ ID NO: 2317772
ugaucuaguaccuucuucc

SEQ ID NO: 2317774 - RNA, 19 nt, Artificial Sequence
  Description of Artificial Sequence: Synthetic oligonucleotide
  Sense strand starting at position 1815 of SEQ ID NO: 1885121
gguacuagaucagagagaa

SEQ ID NO: 2317775 - RNA, 19 nt, Artificial Sequence
  Description of Artificial Sequence: Synthetic oligonucleotide
  Antisense strand to SEQ ID NO: 2317774
uucucucugaucuaguacc

SEQ ID NO: 2317776 - RNA, 19 nt, Artificial Sequence
  Description of Artificial Sequence: Synthetic oligonucleotide
  Sense strand starting at position 1834 of SEQ ID NO: 1885121
ggucauuucuucccaguuu

SEQ ID NO: 2317777 - RNA, 19 nt, Artificial Sequence
  Description of Artificial Sequence: Synthetic oligonucleotide
  Antisense strand to SEQ ID NO: 2317776
aaacugggaagaaaugacc

SEQ ID NO: 2317778 - RNA, 19 nt, Artificial Sequence
  Description of Artificial Sequence: Synthetic oligonucleotide
  Sense strand starting at position 1867 of SEQ ID NO: 1885121
uguccucucgugccuuuaa

SEQ ID NO: 2317779 - RNA, 19 nt, Artificial Sequence
  Description of Artificial Sequence: Synthetic oligonucleotide
  Antisense strand to SEQ ID NO: 2317778
uuaaaggcacgagaggaca

SEQ ID NO: 2317780 - RNA, 19 nt, Artificial Sequence
  Description of Artificial Sequence: Synthetic oligonucleotide
  Sense strand starting at position 1945 of SEQ ID NO: 1885121
gccagacuacccuguuaga

SEQ ID NO: 2317781 - RNA, 19 nt, Artificial Sequence
  Description of Artificial Sequence: Synthetic oligonucleotide
  Antisense strand to SEQ ID NO: 2317780
ucuaacaggguagucuggc

SEQ ID NO: 2317782 - RNA, 19 nt, Artificial Sequence
  Description of Artificial Sequence: Synthetic oligonucleotide
  Sense strand starting at position 1948 of SEQ ID NO: 1885121
agacuacccuguuagaacu

SEQ ID NO: 2317783 - RNA, 19 nt, Artificial Sequence
  Description of Artificial Sequence: Synthetic oligonucleotide
  Antisense strand to SEQ ID NO: 2317782
aguucuaacaggguagucu

SEQ ID NO: 2317784 - RNA, 19 nt, Artificial Sequence
  Description of Artificial Sequence: Synthetic oligonucleotide
  Sense strand starting at position 2520 of SEQ ID NO: 1885121
gggcucaccuucuugcgaa

SEQ ID NO: 2317785 - RNA, 19 nt, Artificial Sequence
  Description of Artificial Sequence: Synthetic oligonucleotide
  Antisense strand to SEQ ID NO: 2317784
uucgcaagaaggugagccc

SEQ ID NO: 2317786 - RNA, 19 nt, Artificial Sequence
  Description of Artificial Sequence: Synthetic oligonucleotide
  Sense strand starting at position 2639 of SEQ ID NO: 1885121
acauaaaugccgcaugaaa

SEQ ID NO: 2317787 - RNA, 19 nt, Artificial Sequence
  Description of Artificial Sequence: Synthetic oligonucleotide
  Antisense strand to SEQ ID NO: 2317786
uuucaugcggcauuuaugu

SEQ ID NO: 2317788 - RNA, 19 nt, Artificial Sequence
  Description of Artificial Sequence: Synthetic oligonucleotide
  Sense strand starting at position 2662 of SEQ ID NO: 1885121
agacauaugcccuguguaa

SEQ ID NO: 2317789 - RNA, 19 nt, Artificial Sequence
  Description of Artificial Sequence: Synthetic oligonucleotide
  Antisense strand to SEQ ID NO: 2317788
uuacacagggcauaugucu

SEQ ID NO: 2317790 - RNA, 19 nt, Artificial Sequence
  Description of Artificial Sequence: Synthetic oligonucleotide
  Sense strand starting at position 2664 of SEQ ID NO: 1885121
acauaugcccuguguaaag

SEQ ID NO: 2317791 - RNA, 19 nt, Artificial Sequence
  Description of Artificial Sequence: Synthetic oligonucleotide
  Antisense strand to SEQ ID NO: 2317790
cuuuacacagggcauaugu

SEQ ID NO: 2317792 - RNA, 19 nt, Artificial Sequence
  Description of Artificial Sequence: Synthetic oligonucleotide
  Sense strand starting at position 2666 of SEQ ID NO: 1885121
auaugcccuguguaaagaa

SEQ ID NO: 2317793 - RNA, 19 nt, Artificial Sequence
  Description of Artificial Sequence: Synthetic oligonucleotide
  Antisense strand to SEQ ID NO: 2317792
uucuuuacacagggcauau

SEQ ID NO: 2317794 - RNA, 19 nt, Artificial Sequence
  Description of Artificial Sequence: Synthetic oligonucleotide
  Sense strand starting at position 2693 of SEQ ID NO: 1885121
agaguuaaauagggaucau

SEQ ID NO: 2317795 - RNA, 19 nt, Artificial Sequence
  Description of Artificial Sequence: Synthetic oligonucleotide
  Antisense strand to SEQ ID NO: 2317794
augaucccuauuuaacucu

SEQ ID NO: 2317796 - RNA, 19 nt, Artificial Sequence
  Description of Artificial Sequence: Synthetic oligonucleotide
  Sense strand starting at position 2744 of SEQ ID NO: 1885121
gaggcauuaucacaggcaa

SEQ ID NO: 2317797 - RNA, 19 nt, Artificial Sequence
  Description of Artificial Sequence: Synthetic oligonucleotide
  Antisense strand to SEQ ID NO: 2317796
uugccugugauaaugccuc

SEQ ID NO: 2317798 - RNA, 19 nt, Artificial Sequence
  Description of Artificial Sequence: Synthetic oligonucleotide
  Sense strand starting at position 2837 of SEQ ID NO: 1885121
cagguucucuuccagggaa

SEQ ID NO: 2317799 - RNA, 19 nt, Artificial Sequence
  Description of Artificial Sequence: Synthetic oligonucleotide
  Antisense strand to SEQ ID NO: 2317798
uucccuggaagagaaccug

SEQ ID NO: 2317800 - RNA, 19 nt, Artificial Sequence
  Description of Artificial Sequence: Synthetic oligonucleotide
  Sense strand starting at position 2840 of SEQ ID NO: 1885121
guucucuuccagggaagcu

SEQ ID NO: 2317801 - RNA, 19 nt, Artificial Sequence
  Description of Artificial Sequence: Synthetic oligonucleotide
  Antisense strand to SEQ ID NO: 2317800
agcuucccuggaagagaac

SEQ ID NO: 2317802 - RNA, 19 nt, Artificial Sequence
  Description of Artificial Sequence: Synthetic oligonucleotide
  Sense strand starting at position 2929 of SEQ ID NO: 1885121
ggccuagaaccauggaaug

SEQ ID NO: 2317803 - RNA, 19 nt, Artificial Sequence
  Description of Artificial Sequence: Synthetic oligonucleotide
  Antisense strand to SEQ ID NO: 2317802
cauuccaugguucuaggcc

SEQ ID NO: 2317804 - RNA, 19 nt, Artificial Sequence
  Description of Artificial Sequence: Synthetic oligonucleotide
  Sense strand starting at position 2959 of SEQ ID NO: 1885121
agcagaagcccuugcucua

SEQ ID NO: 2317805 - RNA, 19 nt, Artificial Sequence
  Description of Artificial Sequence: Synthetic oligonucleotide
  Antisense strand to SEQ ID NO: 2317804
uagagcaagggcuucugcu

SEQ ID NO: 2317806 - RNA, 19 nt, Artificial Sequence
  Description of Artificial Sequence: Synthetic oligonucleotide
  Sense strand starting at position 2966 of SEQ ID NO: 1885121
gcccuugcucuagaucagu

SEQ ID NO: 2317807 - RNA, 19 nt, Artificial Sequence
  Description of Artificial Sequence: Synthetic oligonucleotide
  Antisense strand to SEQ ID NO: 2317806
acugaucuagagcaagggc

SEQ ID NO: 2317808 - RNA, 19 nt, Artificial Sequence
  Description of Artificial Sequence: Synthetic oligonucleotide
  Sense strand starting at position 3027 of SEQ ID NO: 1885121
ccucgcaggucucuuacaa

SEQ ID NO: 2317809 - RNA, 19 nt, Artificial Sequence
  Description of Artificial Sequence: Synthetic oligonucleotide
  Antisense strand to SEQ ID NO: 2317808
uuguaagagaccugcgagg

SEQ ID NO: 2317810 - RNA, 19 nt, Artificial Sequence
  Description of Artificial Sequence: Synthetic oligonucleotide
  Sense strand starting at position 3112 of SEQ ID NO: 1885121
uucgcugacgagcauuaaa

SEQ ID NO: 2317811 - RNA, 19 nt, Artificial Sequence
  Description of Artificial Sequence: Synthetic oligonucleotide
  Antisense strand to SEQ ID NO: 2317810
uuuaaugcucgucagcgaa

SEQ ID NO: 2317812 - RNA, 19 nt, Artificial Sequence
  Description of Artificial Sequence: Synthetic oligonucleotide
  Sense strand starting at position 3175 of SEQ ID NO: 1885121
gucgcauuccaccaaagau

SEQ ID NO: 2317813 - RNA, 19 nt, Artificial Sequence
  Description of Artificial Sequence: Synthetic oligonucleotide
  Antisense strand to SEQ ID NO: 2317812
aucuuugguggaaugcgac

SEQ ID NO: 2317814 - RNA, 19 nt, Artificial Sequence
  Description of Artificial Sequence: Synthetic oligonucleotide
  Sense strand starting at position 3217 of SEQ ID NO: 1885121
cuuagaaucguauggcacu

SEQ ID NO: 2317815 - RNA, 19 nt, Artificial Sequence
  Description of Artificial Sequence: Synthetic oligonucleotide
  Antisense strand to SEQ ID NO: 2317814
agugccauacgauucuaag

SEQ ID NO: 2317816 - RNA, 19 nt, Artificial Sequence
  Description of Artificial Sequence: Synthetic oligonucleotide
  Sense strand starting at position 3271 of SEQ ID NO: 1885121
gaggcaauggcuuaucuuu

SEQ ID NO: 2317817 - RNA, 19 nt, Artificial Sequence
  Description of Artificial Sequence: Synthetic oligonucleotide
  Antisense strand to SEQ ID NO: 2317816
aaagauaagccauugccuc

SEQ ID NO: 2317818 - RNA, 19 nt, Artificial Sequence
  Description of Artificial Sequence: Synthetic oligonucleotide
  Sense strand starting at position 3273 of SEQ ID NO: 1885121
ggcaauggcuuaucuuuau

SEQ ID NO: 2317819 - RNA, 19 nt, Artificial Sequence
  Description of Artificial Sequence: Synthetic oligonucleotide
  Antisense strand to SEQ ID NO: 2317818
auaaagauaagccauugcc

SEQ ID NO: 2317820 - RNA, 19 nt, Artificial Sequence
  Description of Artificial Sequence: Synthetic oligonucleotide
  Sense strand starting at position 3352 of SEQ ID NO: 1885121
gugacacagguaggauauu

SEQ ID NO: 2317821 - RNA, 19 nt, Artificial Sequence
  Description of Artificial Sequence: Synthetic oligonucleotide
  Antisense strand to SEQ ID NO: 2317820
aauauccuaccugugucac

SEQ ID NO: 2317822 - RNA, 19 nt, Artificial Sequence
  Description of Artificial Sequence: Synthetic oligonucleotide
  Sense strand starting at position 3358 of SEQ ID NO: 1885121
cagguaggauauuaaacaa

SEQ ID NO: 2317823 - RNA, 19 nt, Artificial Sequence
  Description of Artificial Sequence: Synthetic oligonucleotide
  Antisense strand to SEQ ID NO: 2317822
uuguuuaauauccuaccug

SEQ ID NO: 2317824 - RNA, 19 nt, Artificial Sequence
  Description of Artificial Sequence: Synthetic oligonucleotide
  Sense strand starting at position 3452 of SEQ ID NO: 1885121
cucugaagccacugaguaa

SEQ ID NO: 2317825 - RNA, 19 nt, Artificial Sequence
  Description of Artificial Sequence: Synthetic oligonucleotide
  Antisense strand to SEQ ID NO: 2317824
uuacucaguggcuucagag

SEQ ID NO: 2317826 - RNA, 19 nt, Artificial Sequence
  Description of Artificial Sequence: Synthetic oligonucleotide
  Sense strand starting at position 3459 of SEQ ID NO: 1885121
gccacugaguaaucggacu

SEQ ID NO: 2317827 - RNA, 19 nt, Artificial Sequence
  Description of Artificial Sequence: Synthetic oligonucleotide
  Antisense strand to SEQ ID NO: 2317826
aguccgauuacucaguggc

SEQ ID NO: 2317828 - RNA, 19 nt, Artificial Sequence
  Description of Artificial Sequence: Synthetic oligonucleotide
  Sense strand starting at position 3465 of SEQ ID NO: 1885121
gaguaaucggacugguugu

SEQ ID NO: 2317829 - RNA, 19 nt, Artificial Sequence
  Description of Artificial Sequence: Synthetic oligonucleotide
  Antisense strand to SEQ ID NO: 2317828
acaaccaguccgauuacuc

SEQ ID NO: 2317830 - RNA, 19 nt, Artificial Sequence
  Description of Artificial Sequence: Synthetic oligonucleotide
  Sense strand starting at position 3601 of SEQ ID NO: 1885121
gggagccaucauuguaguu

SEQ ID NO: 2317831 - RNA, 19 nt, Artificial Sequence
  Description of Artificial Sequence: Synthetic oligonucleotide
  Antisense strand to SEQ ID NO: 2317830
aacuacaaugauggcuccc

SEQ ID NO: 2317832 - RNA, 19 nt, Artificial Sequence
  Description of Artificial Sequence: Synthetic oligonucleotide
  Sense strand starting at position 3616 of SEQ ID NO: 1885121
aguugaccuguuuacggau

SEQ ID NO: 2317833 - RNA, 19 nt, Artificial Sequence
  Description of Artificial Sequence: Synthetic oligonucleotide
  Antisense strand to SEQ ID NO: 2317832
auccguaaacaggucaacu

SEQ ID NO: 2317834 - RNA, 19 nt, Artificial Sequence
  Description of Artificial Sequence: Synthetic oligonucleotide
  Sense strand starting at position 3669 of SEQ ID NO: 1885121
ucuugcugcugcucauaau

SEQ ID NO: 2317835 - RNA, 19 nt, Artificial Sequence
  Description of Artificial Sequence: Synthetic oligonucleotide
  Antisense strand to SEQ ID NO: 2317834
auuaugagcagcagcaaga

SEQ ID NO: 2317836 - RNA, 19 nt, Artificial Sequence
  Description of Artificial Sequence: Synthetic oligonucleotide
  Sense strand starting at position 3694 of SEQ ID NO: 1885121
gcagcaauuucucccagua

SEQ ID NO: 2317837 - RNA, 19 nt, Artificial Sequence
  Description of Artificial Sequence: Synthetic oligonucleotide
  Antisense strand to SEQ ID NO: 2317836
uacugggagaaauugcugc

SEQ ID NO: 2317838 - RNA, 19 nt, Artificial Sequence
  Description of Artificial Sequence: Synthetic oligonucleotide
  Sense strand starting at position 3696 of SEQ ID NO: 1885121
agcaauuucucccaguagu

SEQ ID NO: 2317839 - RNA, 19 nt, Artificial Sequence
  Description of Artificial Sequence: Synthetic oligonucleotide
  Antisense strand to SEQ ID NO: 2317838
acuacugggagaaauugcu

SEQ ID NO: 2317840 - RNA, 19 nt, Artificial Sequence
  Description of Artificial Sequence: Synthetic oligonucleotide
  Sense strand starting at position 3919 of SEQ ID NO: 1885121
aaauuugauugagaguaca

SEQ ID NO: 2317841 - RNA, 19 nt, Artificial Sequence
  Description of Artificial Sequence: Synthetic oligonucleotide
  Antisense strand to SEQ ID NO: 2317840
uguacucucaaucaaauuu

SEQ ID NO: 2317842 - RNA, 19 nt, Artificial Sequence
  Description of Artificial Sequence: Synthetic oligonucleotide
  Sense strand starting at position 318 of SEQ ID NO: 1885122
gccagaucgccagaugaac

SEQ ID NO: 2317843 - RNA, 19 nt, Artificial Sequence
  Description of Artificial Sequence: Synthetic oligonucleotide
  Antisense strand to SEQ ID NO: 2317842
guucaucuggcgaucuggc

SEQ ID NO: 2317844 - RNA, 19 nt, Artificial Sequence
  Description of Artificial Sequence: Synthetic oligonucleotide
  Sense strand starting at position 540 of SEQ ID NO: 1885122
gagggcucuugaguaagaa

SEQ ID NO: 2317845 - RNA, 19 nt, Artificial Sequence
  Description of Artificial Sequence: Synthetic oligonucleotide
  Antisense strand to SEQ ID NO: 2317844
uucuuacucaagagcccuc

SEQ ID NO: 2317846 - RNA, 19 nt, Artificial Sequence
  Description of Artificial Sequence: Synthetic oligonucleotide
  Sense strand starting at position 623 of SEQ ID NO: 1885122
ugugaauaauccuauuuga

SEQ ID NO: 2317847 - RNA, 19 nt, Artificial Sequence
  Description of Artificial Sequence: Synthetic oligonucleotide
  Antisense strand to SEQ ID NO: 2317846
ucaaauaggauuauucaca

SEQ ID NO: 2317848 - RNA, 19 nt, Artificial Sequence
  Description of Artificial Sequence: Synthetic oligonucleotide
  Sense strand starting at position 714 of SEQ ID NO: 1885122
gucucugagccauaugaau

SEQ ID NO: 2317849 - RNA, 19 nt, Artificial Sequence
  Description of Artificial Sequence: Synthetic oligonucleotide
  Antisense strand to SEQ ID NO: 2317848
auucauauggcucagagac

SEQ ID NO: 2317850 - RNA, 19 nt, Artificial Sequence
  Description of Artificial Sequence: Synthetic oligonucleotide
  Sense strand starting at position 811 of SEQ ID NO: 1885122
cucucaccuggugaaacuu

SEQ ID NO: 2317851 - RNA, 19 nt, Artificial Sequence
  Description of Artificial Sequence: Synthetic oligonucleotide
  Antisense strand to SEQ ID NO: 2317850
aaguuucaccaggugagag

SEQ ID NO: 2317852 - RNA, 19 nt, Artificial Sequence
  Description of Artificial Sequence: Synthetic oligonucleotide
  Sense strand starting at position 863 of SEQ ID NO: 1885122
gugagauagauacgauucu

SEQ ID NO: 2317853 - RNA, 19 nt, Artificial Sequence
  Description of Artificial Sequence: Synthetic oligonucleotide
  Antisense strand to SEQ ID NO: 2317852
agaaucguaucuaucucac

SEQ ID NO: 2317854 - RNA, 19 nt, Artificial Sequence
  Description of Artificial Sequence: Synthetic oligonucleotide
  Sense strand starting at position 916 of SEQ ID NO: 1885122
agaugcuugcauuaagcaa

SEQ ID NO: 2317855 - RNA, 19 nt, Artificial Sequence
  Description of Artificial Sequence: Synthetic oligonucleotide
  Antisense strand to SEQ ID NO: 2317854
uugcuuaaugcaagcaucu

SEQ ID NO: 2317856 - RNA, 19 nt, Artificial Sequence
  Description of Artificial Sequence: Synthetic oligonucleotide
  Sense strand starting at position 1023 of SEQ ID NO: 1885122
ugguuucugcucgcacuua

SEQ ID NO: 2317857 - RNA, 19 nt, Artificial Sequence
  Description of Artificial Sequence: Synthetic oligonucleotide
  Antisense strand to SEQ ID NO: 2317856
uaagugcgagcagaaacca

SEQ ID NO: 2317858 - RNA, 19 nt, Artificial Sequence
  Description of Artificial Sequence: Synthetic oligonucleotide
  Sense strand starting at position 1055 of SEQ ID NO: 1885122
cugagcagcagcuaugauu

SEQ ID NO: 2317859 - RNA, 19 nt, Artificial Sequence
  Description of Artificial Sequence: Synthetic oligonucleotide
  Antisense strand to SEQ ID NO: 2317858
aaucauagcugcugcucag

SEQ ID NO: 2317860 - RNA, 19 nt, Artificial Sequence
  Description of Artificial Sequence: Synthetic oligonucleotide
  Sense strand starting at position 1061 of SEQ ID NO: 1885122
agcagcuaugauuagaaca

SEQ ID NO: 2317861 - RNA, 19 nt, Artificial Sequence
  Description of Artificial Sequence: Synthetic oligonucleotide
  Antisense strand to SEQ ID NO: 2317860
uguucuaaucauagcugcu

SEQ ID NO: 2317862 - RNA, 19 nt, Artificial Sequence
  Description of Artificial Sequence: Synthetic oligonucleotide
  Sense strand starting at position 1117 of SEQ ID NO: 1885122
aggaguaucggagaagcca

SEQ ID NO: 2317863 - RNA, 19 nt, Artificial Sequence
  Description of Artificial Sequence: Synthetic oligonucleotide
  Antisense strand to SEQ ID NO: 2317862
uggcuucuccgauacuccu

SEQ ID NO: 2317864 - RNA, 19 nt, Artificial Sequence
  Description of Artificial Sequence: Synthetic oligonucleotide
  Sense strand starting at position 1495 of SEQ ID NO: 1885122
cucaaugugccuuaacuga

SEQ ID NO: 2317865 - RNA, 19 nt, Artificial Sequence
  Description of Artificial Sequence: Synthetic oligonucleotide
  Antisense strand to SEQ ID NO: 2317864
ucaguuaaggcacauugag

SEQ ID NO: 2317866 - RNA, 19 nt, Artificial Sequence
  Description of Artificial Sequence: Synthetic oligonucleotide
  Sense strand starting at position 1559 of SEQ ID NO: 1885122
acucaccgucuuggagaua

SEQ ID NO: 2317867 - RNA, 19 nt, Artificial Sequence
  Description of Artificial Sequence: Synthetic oligonucleotide
  Antisense strand to SEQ ID NO: 2317866
uaucuccaagacggugagu

SEQ ID NO: 2317868 - RNA, 19 nt, Artificial Sequence
  Description of Artificial Sequence: Synthetic oligonucleotide
  Sense strand starting at position 1571 of SEQ ID NO: 1885122
ggagauauucugggcugcu

SEQ ID NO: 2317869 - RNA, 19 nt, Artificial Sequence
  Description of Artificial Sequence: Synthetic oligonucleotide
  Antisense strand to SEQ ID NO: 2317868
agcagcccagaauaucucc

SEQ ID NO: 2317870 - RNA, 19 nt, Artificial Sequence
  Description of Artificial Sequence: Synthetic oligonucleotide
  Sense strand starting at position 1972 of SEQ ID NO: 1885122
gucgcauucgccuuagucu

SEQ ID NO: 2317871 - RNA, 19 nt, Artificial Sequence
  Description of Artificial Sequence: Synthetic oligonucleotide
  Antisense strand to SEQ ID NO: 2317870
agacuaaggcgaaugcgac

SEQ ID NO: 2317872 - RNA, 19 nt, Artificial Sequence
  Description of Artificial Sequence: Synthetic oligonucleotide
  Sense strand starting at position 2044 of SEQ ID NO: 1885122
cugagaucucuccagcaga

SEQ ID NO: 2317873 - RNA, 19 nt, Artificial Sequence
  Description of Artificial Sequence: Synthetic oligonucleotide
  Antisense strand to SEQ ID NO: 2317872
ucugcuggagagaucucag

SEQ ID NO: 2317874 - RNA, 19 nt, Artificial Sequence
  Description of Artificial Sequence: Synthetic oligonucleotide
  Sense strand starting at position 2308 of SEQ ID NO: 1885122
agcuguguacucucggcua

SEQ ID NO: 2317875 - RNA, 19 nt, Artificial Sequence
  Description of Artificial Sequence: Synthetic oligonucleotide
  Antisense strand to SEQ ID NO: 2317874
uagccgagaguacacagcu

SEQ ID NO: 2317876 - RNA, 19 nt, Artificial Sequence
  Description of Artificial Sequence: Synthetic oligonucleotide
  Sense strand starting at position 2337 of SEQ ID NO: 1885122
cugugauggccacaucauc

SEQ ID NO: 2317877 - RNA, 19 nt, Artificial Sequence
  Description of Artificial Sequence: Synthetic oligonucleotide
  Antisense strand to SEQ ID NO: 2317876
gaugauguggccaucacag

SEQ ID NO: 2317878 - RNA, 19 nt, Artificial Sequence
  Description of Artificial Sequence: Synthetic oligonucleotide
  Sense strand starting at position 2822 of SEQ ID NO: 1885122
ucagcugugaggcauugaa

SEQ ID NO: 2317879 - RNA, 19 nt, Artificial Sequence
  Description of Artificial Sequence: Synthetic oligonucleotide
  Antisense strand to SEQ ID NO: 2317878
uucaaugccucacagcuga

SEQ ID NO: 2317880 - RNA, 19 nt, Artificial Sequence
  Description of Artificial Sequence: Synthetic oligonucleotide
  Sense strand starting at position 2927 of SEQ ID NO: 1885122
uaggaagcuccugagcauu

SEQ ID NO: 2317881 - RNA, 19 nt, Artificial Sequence
  Description of Artificial Sequence: Synthetic oligonucleotide
  Antisense strand to SEQ ID NO: 2317880
aaugcucaggagcuuccua

SEQ ID NO: 2317882 - RNA, 19 nt, Artificial Sequence
  Description of Artificial Sequence: Synthetic oligonucleotide
  Sense strand starting at position 2938 of SEQ ID NO: 1885122
ugagcauugggucgagaca

SEQ ID NO: 2317883 - RNA, 19 nt, Artificial Sequence
  Description of Artificial Sequence: Synthetic oligonucleotide
  Antisense strand to SEQ ID NO: 2317882
ugucucgacccaaugcuca

SEQ ID NO: 2317884 - RNA, 19 nt, Artificial Sequence
  Description of Artificial Sequence: Synthetic oligonucleotide
  Sense strand starting at position 2939 of SEQ ID NO: 1885122
gagcauugggucgagacaa

SEQ ID NO: 2317885 - RNA, 19 nt, Artificial Sequence
  Description of Artificial Sequence: Synthetic oligonucleotide
  Antisense strand to SEQ ID NO: 2317884
uugucucgacccaaugcuc

SEQ ID NO: 2317886 - RNA, 19 nt, Artificial Sequence
  Description of Artificial Sequence: Synthetic oligonucleotide
  Sense strand starting at position 2955 of SEQ ID NO: 1885122
caacacucgcagggagaua

SEQ ID NO: 2317887 - RNA, 19 nt, Artificial Sequence
  Description of Artificial Sequence: Synthetic oligonucleotide
  Antisense strand to SEQ ID NO: 2317886
uaucucccugcgaguguug

SEQ ID NO: 2317888 - RNA, 19 nt, Artificial Sequence
  Description of Artificial Sequence: Synthetic oligonucleotide
  Sense strand starting at position 3063 of SEQ ID NO: 1885122
ccuguaugcccugugcaau

SEQ ID NO: 2317889 - RNA, 19 nt, Artificial Sequence
  Description of Artificial Sequence: Synthetic oligonucleotide
  Antisense strand to SEQ ID NO: 2317888
auugcacagggcauacagg

SEQ ID NO: 2317890 - RNA, 19 nt, Artificial Sequence
  Description of Artificial Sequence: Synthetic oligonucleotide
  Sense strand starting at position 3116 of SEQ ID NO: 1885122
aguuaaucaggcugacaag

SEQ ID NO: 2317891 - RNA, 19 nt, Artificial Sequence
  Description of Artificial Sequence: Synthetic oligonucleotide
  Antisense strand to SEQ ID NO: 2317890
cuugucagccugauuaacu

SEQ ID NO: 2317892 - RNA, 19 nt, Artificial Sequence
  Description of Artificial Sequence: Synthetic oligonucleotide
  Sense strand starting at position 3264 of SEQ ID NO: 1885122
uuucgugcuguaccguaau

SEQ ID NO: 2317893 - RNA, 19 nt, Artificial Sequence
  Description of Artificial Sequence: Synthetic oligonucleotide
  Antisense strand to SEQ ID NO: 2317892
auuacgguacagcacgaaa

SEQ ID NO: 2317894 - RNA, 19 nt, Artificial Sequence
  Description of Artificial Sequence: Synthetic oligonucleotide
  Sense strand starting at position 3266 of SEQ ID NO: 1885122
ucgugcuguaccguaauca

SEQ ID NO: 2317895 - RNA, 19 nt, Artificial Sequence
  Description of Artificial Sequence: Synthetic oligonucleotide
  Antisense strand to SEQ ID NO: 2317894
ugauuacgguacagcacga

SEQ ID NO: 2317896 - RNA, 19 nt, Artificial Sequence
  Description of Artificial Sequence: Synthetic oligonucleotide
  Sense strand starting at position 3282 of SEQ ID NO: 1885122
ucaugucuccuguaaggac

SEQ ID NO: 2317897 - RNA, 19 nt, Artificial Sequence
  Description of Artificial Sequence: Synthetic oligonucleotide
  Antisense strand to SEQ ID NO: 2317896
guccuuacaggagacauga

SEQ ID NO: 2317898 - RNA, 19 nt, Artificial Sequence
  Description of Artificial Sequence: Synthetic oligonucleotide
  Sense strand starting at position 3309 of SEQ ID NO: 1885122
caagaauuguguuuaauga

SEQ ID NO: 2317899 - RNA, 19 nt, Artificial Sequence
  Description of Artificial Sequence: Synthetic oligonucleotide
  Antisense strand to SEQ ID NO: 2317898
ucauuaaacacaauucuug

SEQ ID NO: 2317900 - RNA, 19 nt, Artificial Sequence
  Description of Artificial Sequence: Synthetic oligonucleotide
  Sense strand starting at position 3402 of SEQ ID NO: 1885122
acagguuacaggugagcua

SEQ ID NO: 2317901 - RNA, 19 nt, Artificial Sequence
  Description of Artificial Sequence: Synthetic oligonucleotide
  Antisense strand to SEQ ID NO: 2317900
uagcucaccuguaaccugu

SEQ ID NO: 2317902 - RNA, 19 nt, Artificial Sequence
  Description of Artificial Sequence: Synthetic oligonucleotide
  Sense strand starting at position 3493 of SEQ ID NO: 1885122
uuauguauggucuagaagg

SEQ ID NO: 2317903 - RNA, 19 nt, Artificial Sequence
  Description of Artificial Sequence: Synthetic oligonucleotide
  Antisense strand to SEQ ID NO: 2317902
ccuucuagaccauacauaa

SEQ ID NO: 2317904 - RNA, 19 nt, Artificial Sequence
  Description of Artificial Sequence: Synthetic oligonucleotide
  Sense strand starting at position 3519 of SEQ ID NO: 1885122
aggugaacuagucaagcuu

SEQ ID NO: 2317905 - RNA, 19 nt, Artificial Sequence
  Description of Artificial Sequence: Synthetic oligonucleotide
  Antisense strand to SEQ ID NO: 2317904
aagcuugacuaguucaccu

SEQ ID NO: 2317906 - RNA, 19 nt, Artificial Sequence
  Description of Artificial Sequence: Synthetic oligonucleotide
  Sense strand starting at position 3561 of SEQ ID NO: 1885122
aguguacuaguggauguaa

SEQ ID NO: 2317907 - RNA, 19 nt, Artificial Sequence
  Description of Artificial Sequence: Synthetic oligonucleotide
  Antisense strand to SEQ ID NO: 2317906
uuacauccacuaguacacu

SEQ ID NO: 2317908 - RNA, 19 nt, Artificial Sequence
  Description of Artificial Sequence: Synthetic oligonucleotide
  Sense strand starting at position 3563 of SEQ ID NO: 1885122
uguacuaguggauguaacu

SEQ ID NO: 2317909 - RNA, 19 nt, Artificial Sequence
  Description of Artificial Sequence: Synthetic oligonucleotide
  Antisense strand to SEQ ID NO: 2317908
aguuacauccacuaguaca

SEQ ID NO: 2317910 - RNA, 19 nt, Artificial Sequence
  Description of Artificial Sequence: Synthetic oligonucleotide
  Sense strand starting at position 3569 of SEQ ID NO: 1885122
aguggauguaacuguagau

SEQ ID NO: 2317911 - RNA, 19 nt, Artificial Sequence
  Description of Artificial Sequence: Synthetic oligonucleotide
  Antisense strand to SEQ ID NO: 2317910
aucuacaguuacauccacu

SEQ ID NO: 2317912 - RNA, 19 nt, Artificial Sequence
  Description of Artificial Sequence: Synthetic oligonucleotide
  Sense strand starting at position 3575 of SEQ ID NO: 1885122
uguaacuguagauauagua

SEQ ID NO: 2317913 - RNA, 19 nt, Artificial Sequence
  Description of Artificial Sequence: Synthetic oligonucleotide
  Antisense strand to SEQ ID NO: 2317912
uacuauaucuacaguuaca

SEQ ID NO: 2317914 - RNA, 19 nt, Artificial Sequence
  Description of Artificial Sequence: Synthetic oligonucleotide
  Sense strand starting at position 3631 of SEQ ID NO: 1885122
cuuugaucuaggcagugaa

SEQ ID NO: 2317915 - RNA, 19 nt, Artificial Sequence
  Description of Artificial Sequence: Synthetic oligonucleotide
  Antisense strand to SEQ ID NO: 2317914
uucacugccuagaucaaag

SEQ ID NO: 2317916 - RNA, 19 nt, Artificial Sequence
  Description of Artificial Sequence: Synthetic oligonucleotide
  Sense strand starting at position 3634 of SEQ ID NO: 1885122
ugaucuaggcagugaacaa

SEQ ID NO: 2317917 - RNA, 19 nt, Artificial Sequence
  Description of Artificial Sequence: Synthetic oligonucleotide
  Antisense strand to SEQ ID NO: 2317916
uuguucacugccuagauca

SEQ ID NO: 2317918 - RNA, 19 nt, Artificial Sequence
  Description of Artificial Sequence: Synthetic oligonucleotide
  Sense strand starting at position 3796 of SEQ ID NO: 1885122
gccuaaaggccugacacua

SEQ ID NO: 2317919 - RNA, 19 nt, Artificial Sequence
  Description of Artificial Sequence: Synthetic oligonucleotide
  Antisense strand to SEQ ID NO: 2317918
uagugucaggccuuuaggc

SEQ ID NO: 2317920 - RNA, 19 nt, Artificial Sequence
  Description of Artificial Sequence: Synthetic oligonucleotide
  Sense strand starting at position 3859 of SEQ ID NO: 1885122
ccugccaugugauuaccaa

SEQ ID NO: 2317921 - RNA, 19 nt, Artificial Sequence
  Description of Artificial Sequence: Synthetic oligonucleotide
  Antisense strand to SEQ ID NO: 2317920
uugguaaucacauggcagg

SEQ ID NO: 2317922 - RNA, 19 nt, Artificial Sequence
  Description of Artificial Sequence: Synthetic oligonucleotide
  Sense strand starting at position 359 of SEQ ID NO: 1885123
ugauauaagaaggguguga

SEQ ID NO: 2317923 - RNA, 19 nt, Artificial Sequence
  Description of Artificial Sequence: Synthetic oligonucleotide
  Antisense strand to SEQ ID NO: 2317922
ucacacccuucuuauauca

SEQ ID NO: 2317924 - RNA, 19 nt, Artificial Sequence
  Description of Artificial Sequence: Synthetic oligonucleotide
  Sense strand starting at position 590 of SEQ ID NO: 1885123
gacuacgugcauuaagaaa

SEQ ID NO: 2317925 - RNA, 19 nt, Artificial Sequence
  Description of Artificial Sequence: Synthetic oligonucleotide
  Antisense strand to SEQ ID NO: 2317924
uuucuuaaugcacguaguc

SEQ ID NO: 2317926 - RNA, 19 nt, Artificial Sequence
  Description of Artificial Sequence: Synthetic oligonucleotide
  Sense strand starting at position 629 of SEQ ID NO: 1885123
cucacuguccaguagggaa

SEQ ID NO: 2317927 - RNA, 19 nt, Artificial Sequence
  Description of Artificial Sequence: Synthetic oligonucleotide
  Antisense strand to SEQ ID NO: 2317926
uucccuacuggacagugag

SEQ ID NO: 2317928 - RNA, 19 nt, Artificial Sequence
  Description of Artificial Sequence: Synthetic oligonucleotide
  Sense strand starting at position 675 of SEQ ID NO: 1885123
gacaguagagcugguacaa

SEQ ID NO: 2317929 - RNA, 19 nt, Artificial Sequence
  Description of Artificial Sequence: Synthetic oligonucleotide
  Antisense strand to SEQ ID NO: 2317928
uuguaccagcucuacuguc

SEQ ID NO: 2317930 - RNA, 19 nt, Artificial Sequence
  Description of Artificial Sequence: Synthetic oligonucleotide
  Sense strand starting at position 824 of SEQ ID NO: 1885123
cucauuagaugagugacau

SEQ ID NO: 2317931 - RNA, 19 nt, Artificial Sequence
  Description of Artificial Sequence: Synthetic oligonucleotide
  Antisense strand to SEQ ID NO: 2317930
augucacucaucuaaugag

SEQ ID NO: 2317932 - RNA, 19 nt, Artificial Sequence
  Description of Artificial Sequence: Synthetic oligonucleotide
  Sense strand starting at position 825 of SEQ ID NO: 1885123
ucauuagaugagugacaug

SEQ ID NO: 2317933 - RNA, 19 nt, Artificial Sequence
  Description of Artificial Sequence: Synthetic oligonucleotide
  Antisense strand to SEQ ID NO: 2317932
caugucacucaucuaauga

SEQ ID NO: 2317934 - RNA, 19 nt, Artificial Sequence
  Description of Artificial Sequence: Synthetic oligonucleotide
  Sense strand starting at position 956 of SEQ ID NO: 1885123
agguuaagggaucaugcuu

SEQ ID NO: 2317935 - RNA, 19 nt, Artificial Sequence
  Description of Artificial Sequence: Synthetic oligonucleotide
  Antisense strand to SEQ ID NO: 2317934
aagcaugaucccuuaaccu

SEQ ID NO: 2317936 - RNA, 19 nt, Artificial Sequence
  Description of Artificial Sequence: Synthetic oligonucleotide
  Sense strand starting at position 961 of SEQ ID NO: 1885123
aagggaucaugcuuauaga

SEQ ID NO: 2317937 - RNA, 19 nt, Artificial Sequence
  Description of Artificial Sequence: Synthetic oligonucleotide
  Antisense strand to SEQ ID NO: 2317936
ucuauaagcaugaucccuu

SEQ ID NO: 2317938 - RNA, 19 nt, Artificial Sequence
  Description of Artificial Sequence: Synthetic oligonucleotide
  Sense strand starting at position 974 of SEQ ID NO: 1885123
uauagagaugcuuaaaguu

SEQ ID NO: 2317939 - RNA, 19 nt, Artificial Sequence
  Description of Artificial Sequence: Synthetic oligonucleotide
  Antisense strand to SEQ ID NO: 2317938
aacuuuaagcaucucuaua

SEQ ID NO: 2317940 - RNA, 19 nt, Artificial Sequence
  Description of Artificial Sequence: Synthetic oligonucleotide
  Sense strand starting at position 993 of SEQ ID NO: 1885123
gcgcuuuaacuguaauuuc

SEQ ID NO: 2317941 - RNA, 19 nt, Artificial Sequence
  Description of Artificial Sequence: Synthetic oligonucleotide
  Antisense strand to SEQ ID NO: 2317940
gaaauuacaguuaaagcgc

SEQ ID NO: 2317942 - RNA, 19 nt, Artificial Sequence
  Description of Artificial Sequence: Synthetic oligonucleotide
  Sense strand starting at position 1070 of SEQ ID NO: 1885123
aauaaagauuuaggagaug

SEQ ID NO: 2317943 - RNA, 19 nt, Artificial Sequence
  Description of Artificial Sequence: Synthetic oligonucleotide
  Antisense strand to SEQ ID NO: 2317942
caucuccuaaaucuuuauu

SEQ ID NO: 2317944 - RNA, 19 nt, Artificial Sequence
  Description of Artificial Sequence: Synthetic oligonucleotide
  Sense strand starting at position 1360 of SEQ ID NO: 1885123
cagagaucacguuagggua

SEQ ID NO: 2317945 - RNA, 19 nt, Artificial Sequence
  Description of Artificial Sequence: Synthetic oligonucleotide
  Antisense strand to SEQ ID NO: 2317944
uacccuaacgugaucucug

SEQ ID NO: 2317946 - RNA, 19 nt, Artificial Sequence
  Description of Artificial Sequence: Synthetic oligonucleotide
  Sense strand starting at position 1549 of SEQ ID NO: 1885123
uggagaaauguuuacguga

SEQ ID NO: 2317947 - RNA, 19 nt, Artificial Sequence
  Description of Artificial Sequence: Synthetic oligonucleotide
  Antisense strand to SEQ ID NO: 2317946
ucacguaaacauuucucca

SEQ ID NO: 2317948 - RNA, 19 nt, Artificial Sequence
  Description of Artificial Sequence: Synthetic oligonucleotide
  Sense strand starting at position 1552 of SEQ ID NO: 1885123
agaaauguuuacgugagac

SEQ ID NO: 2317949 - RNA, 19 nt, Artificial Sequence
  Description of Artificial Sequence: Synthetic oligonucleotide
  Antisense strand to SEQ ID NO: 2317948
gucucacguaaacauuucu

SEQ ID NO: 2317950 - RNA, 19 nt, Artificial Sequence
  Description of Artificial Sequence: Synthetic oligonucleotide
  Sense strand starting at position 1570 of SEQ ID NO: 1885123
cgcagaaguagucaagaaa

SEQ ID NO: 2317951 - RNA, 19 nt, Artificial Sequence
  Description of Artificial Sequence: Synthetic oligonucleotide
  Antisense strand to SEQ ID NO: 2317950
uuucuugacuacuucugcg

SEQ ID NO: 2317952 - RNA, 19 nt, Artificial Sequence
  Description of Artificial Sequence: Synthetic oligonucleotide
  Sense strand starting at position 1582 of SEQ ID NO: 1885123
caagaaauaucacucgggu

SEQ ID NO: 2317953 - RNA, 19 nt, Artificial Sequence
  Description of Artificial Sequence: Synthetic oligonucleotide
  Antisense strand to SEQ ID NO: 2317952
acccgagugauauuucuug

SEQ ID NO: 2317954 - RNA, 19 nt, Artificial Sequence
  Description of Artificial Sequence: Synthetic oligonucleotide
  Sense strand starting at position 1584 of SEQ ID NO: 1885123
agaaauaucacucgggucu

SEQ ID NO: 2317955 - RNA, 19 nt, Artificial Sequence
  Description of Artificial Sequence: Synthetic oligonucleotide
  Antisense strand to SEQ ID NO: 2317954
agacccgagugauauuucu

SEQ ID NO: 2317956 - RNA, 19 nt, Artificial Sequence
  Description of Artificial Sequence: Synthetic oligonucleotide
  Sense strand starting at position 2257 of SEQ ID NO: 1885123
agucguaauuucucaguac

SEQ ID NO: 2317957 - RNA, 19 nt, Artificial Sequence
  Description of Artificial Sequence: Synthetic oligonucleotide
  Antisense strand to SEQ ID NO: 2317956
guacugagaaauuacgacu

SEQ ID NO: 2317958 - RNA, 19 nt, Artificial Sequence
  Description of Artificial Sequence: Synthetic oligonucleotide
  Sense strand starting at position 2260 of SEQ ID NO: 1885123
cguaauuucucaguacccu

SEQ ID NO: 2317959 - RNA, 19 nt, Artificial Sequence
  Description of Artificial Sequence: Synthetic oligonucleotide
  Antisense strand to SEQ ID NO: 2317958
aggguacugagaaauuacg

SEQ ID NO: 2317960 - RNA, 19 nt, Artificial Sequence
  Description of Artificial Sequence: Synthetic oligonucleotide
  Sense strand starting at position 2297 of SEQ ID NO: 1885123
cgcuuucucguacucggaa

SEQ ID NO: 2317961 - RNA, 19 nt, Artificial Sequence
  Description of Artificial Sequence: Synthetic oligonucleotide
  Antisense strand to SEQ ID NO: 2317960
uuccgaguacgagaaagcg

SEQ ID NO: 2317962 - RNA, 19 nt, Artificial Sequence
  Description of Artificial Sequence: Synthetic oligonucleotide
  Sense strand starting at position 2446 of SEQ ID NO: 1885123
ccuaaaucugcggaaaccu

SEQ ID NO: 2317963 - RNA, 19 nt, Artificial Sequence
  Description of Artificial Sequence: Synthetic oligonucleotide
  Antisense strand to SEQ ID NO: 2317962
agguuuccgcagauuuagg

SEQ ID NO: 2317964 - RNA, 19 nt, Artificial Sequence
  Description of Artificial Sequence: Synthetic oligonucleotide
  Sense strand starting at position 2550 of SEQ ID NO: 1885123
gcuuguagagguuauugga

SEQ ID NO: 2317965 - RNA, 19 nt, Artificial Sequence
  Description of Artificial Sequence: Synthetic oligonucleotide
  Antisense strand to SEQ ID NO: 2317964
uccaauaaccucuacaagc

SEQ ID NO: 2317966 - RNA, 19 nt, Artificial Sequence
  Description of Artificial Sequence: Synthetic oligonucleotide
  Sense strand starting at position 2566 of SEQ ID NO: 1885123
ggagauacuuuagucuuac

SEQ ID NO: 2317967 - RNA, 19 nt, Artificial Sequence
  Description of Artificial Sequence: Synthetic oligonucleotide
  Antisense strand to SEQ ID NO: 2317966
guaagacuaaaguaucucc

SEQ ID NO: 2317968 - RNA, 19 nt, Artificial Sequence
  Description of Artificial Sequence: Synthetic oligonucleotide
  Sense strand starting at position 2646 of SEQ ID NO: 1885123
ggaaacaaguuucuuaacu

SEQ ID NO: 2317969 - RNA, 19 nt, Artificial Sequence
  Description of Artificial Sequence: Synthetic oligonucleotide
  Antisense strand to SEQ ID NO: 2317968
aguuaagaaacuuguuucc

SEQ ID NO: 2317970 - RNA, 19 nt, Artificial Sequence
  Description of Artificial Sequence: Synthetic oligonucleotide
  Sense strand starting at position 2734 of SEQ ID NO: 1885123
gcaacuugaggacggauua

SEQ ID NO: 2317971 - RNA, 19 nt, Artificial Sequence
  Description of Artificial Sequence: Synthetic oligonucleotide
  Antisense strand to SEQ ID NO: 2317970
uaauccguccucaaguugc

SEQ ID NO: 2317972 - RNA, 19 nt, Artificial Sequence
  Description of Artificial Sequence: Synthetic oligonucleotide
  Sense strand starting at position 2881 of SEQ ID NO: 1885123
aggaaucaccugugaccuu

SEQ ID NO: 2317973 - RNA, 19 nt, Artificial Sequence
  Description of Artificial Sequence: Synthetic oligonucleotide
  Antisense strand to SEQ ID NO: 2317972
aaggucacaggugauuccu

SEQ ID NO: 2317974 - RNA, 19 nt, Artificial Sequence
  Description of Artificial Sequence: Synthetic oligonucleotide
  Sense strand starting at position 2927 of SEQ ID NO: 1885123
auugauuaaccuggaaucu

SEQ ID NO: 2317975 - RNA, 19 nt, Artificial Sequence
  Description of Artificial Sequence: Synthetic oligonucleotide
  Antisense strand to SEQ ID NO: 2317974
agauuccagguuaaucaau

SEQ ID NO: 2317976 - RNA, 19 nt, Artificial Sequence
  Description of Artificial Sequence: Synthetic oligonucleotide
  Sense strand starting at position 2944 of SEQ ID NO: 1885123
cugccauacuuucuaagag

SEQ ID NO: 2317977 - RNA, 19 nt, Artificial Sequence
  Description of Artificial Sequence: Synthetic oligonucleotide
  Antisense strand to SEQ ID NO: 2317976
cucuuagaaaguauggcag

SEQ ID NO: 2317978 - RNA, 19 nt, Artificial Sequence
  Description of Artificial Sequence: Synthetic oligonucleotide
  Sense strand starting at position 2961 of SEQ ID NO: 1885123
agaacauaaugggaagaaa

SEQ ID NO: 2317979 - RNA, 19 nt, Artificial Sequence
  Description of Artificial Sequence: Synthetic oligonucleotide
  Antisense strand to SEQ ID NO: 2317978
uuucuucccauuauguucu

SEQ ID NO: 2317980 - RNA, 19 nt, Artificial Sequence
  Description of Artificial Sequence: Synthetic oligonucleotide
  Sense strand starting at position 3279 of SEQ ID NO: 1885123
ccaaguagucaugagugua

SEQ ID NO: 2317981 - RNA, 19 nt, Artificial Sequence
  Description of Artificial Sequence: Synthetic oligonucleotide
  Antisense strand to SEQ ID NO: 2317980
uacacucaugacuacuugg

SEQ ID NO: 2317982 - RNA, 19 nt, Artificial Sequence
  Description of Artificial Sequence: Synthetic oligonucleotide
  Sense strand starting at position 3347 of SEQ ID NO: 1885123
ggauuaaacucugucucua

SEQ ID NO: 2317983 - RNA, 19 nt, Artificial Sequence
  Description of Artificial Sequence: Synthetic oligonucleotide
  Antisense strand to SEQ ID NO: 2317982
uagagacagaguuuaaucc

SEQ ID NO: 2317984 - RNA, 19 nt, Artificial Sequence
  Description of Artificial Sequence: Synthetic oligonucleotide
  Sense strand starting at position 3480 of SEQ ID NO: 1885123
aucauacuccagugacaga

SEQ ID NO: 2317985 - RNA, 19 nt, Artificial Sequence
  Description of Artificial Sequence: Synthetic oligonucleotide
  Antisense strand to SEQ ID NO: 2317984
ucugucacuggaguaugau

SEQ ID NO: 2317986 - RNA, 19 nt, Artificial Sequence
  Description of Artificial Sequence: Synthetic oligonucleotide
  Sense strand starting at position 3497 of SEQ ID NO: 1885123
gagaauggguucucucaca

SEQ ID NO: 2317987 - RNA, 19 nt, Artificial Sequence
  Description of Artificial Sequence: Synthetic oligonucleotide
  Antisense strand to SEQ ID NO: 2317986
ugugagagaacccauucuc

SEQ ID NO: 2317988 - RNA, 19 nt, Artificial Sequence
  Description of Artificial Sequence: Synthetic oligonucleotide
  Sense strand starting at position 3505 of SEQ ID NO: 1885123
guucucucacaagaagucu

SEQ ID NO: 2317989 - RNA, 19 nt, Artificial Sequence
  Description of Artificial Sequence: Synthetic oligonucleotide
  Antisense strand to SEQ ID NO: 2317988
agacuucuugugagagaac

SEQ ID NO: 2317990 - RNA, 19 nt, Artificial Sequence
  Description of Artificial Sequence: Synthetic oligonucleotide
  Sense strand starting at position 3781 of SEQ ID NO: 1885123
ugggaaucuuuauugucau

SEQ ID NO: 2317991 - RNA, 19 nt, Artificial Sequence
  Description of Artificial Sequence: Synthetic oligonucleotide
  Antisense strand to SEQ ID NO: 2317990
augacaauaaagauuccca

SEQ ID NO: 2317992 - RNA, 19 nt, Artificial Sequence
  Description of Artificial Sequence: Synthetic oligonucleotide
  Sense strand starting at position 3868 of SEQ ID NO: 1885123
accucaaaguaucuaguua

SEQ ID NO: 2317993 - RNA, 19 nt, Artificial Sequence
  Description of Artificial Sequence: Synthetic oligonucleotide
  Antisense strand to SEQ ID NO: 2317992
uaacuagauacuuugaggu

SEQ ID NO: 2317994 - RNA, 19 nt, Artificial Sequence
  Description of Artificial Sequence: Synthetic oligonucleotide
  Sense strand starting at position 3904 of SEQ ID NO: 1885123
cauguaugucaagggaaua

SEQ ID NO: 2317995 - RNA, 19 nt, Artificial Sequence
  Description of Artificial Sequence: Synthetic oligonucleotide
  Antisense strand to SEQ ID NO: 2317994
uauucccuugacauacaug

SEQ ID NO: 2317996 - RNA, 19 nt, Artificial Sequence
  Description of Artificial Sequence: Synthetic oligonucleotide
  Sense strand starting at position 3905 of SEQ ID NO: 1885123
auguaugucaagggaauag

SEQ ID NO: 2317997 - RNA, 19 nt, Artificial Sequence
  Description of Artificial Sequence: Synthetic oligonucleotide
  Antisense strand to SEQ ID NO: 2317996
cuauucccuugacauacau

SEQ ID NO: 2317998 - RNA, 19 nt, Artificial Sequence
  Description of Artificial Sequence: Synthetic oligonucleotide
  Sense strand starting at position 3935 of SEQ ID NO: 1885123
gguacaucgcgucucuaau

SEQ ID NO: 2317999 - RNA, 19 nt, Artificial Sequence
  Description of Artificial Sequence: Synthetic oligonucleotide
  Antisense strand to SEQ ID NO: 2317998
auuagagacgcgauguacc

SEQ ID NO: 2318000 - RNA, 19 nt, Artificial Sequence
  Description of Artificial Sequence: Synthetic oligonucleotide
  Sense strand starting at position 3936 of SEQ ID NO: 1885123
guacaucgcgucucuaauu

SEQ ID NO: 2318001 - RNA, 19 nt, Artificial Sequence
  Description of Artificial Sequence: Synthetic oligonucleotide
  Antisense strand to SEQ ID NO: 2318000
aauuagagacgcgauguac

SEQ ID NO: 2318002 - RNA, 19 nt, Artificial Sequence
  Description of Artificial Sequence: Synthetic oligonucleotide
  Sense strand starting at position 250 of SEQ ID NO: 1885126
ugugguaggcacuauaacu

SEQ ID NO: 2318003 - RNA, 19 nt, Artificial Sequence
  Description of Artificial Sequence: Synthetic oligonucleotide
  Antisense strand to SEQ ID NO: 2318002
aguuauagugccuaccaca

SEQ ID NO: 2318004 - RNA, 19 nt, Artificial Sequence
  Description of Artificial Sequence: Synthetic oligonucleotide
  Sense strand starting at position 258 of SEQ ID NO: 1885126
gcacuauaacugggaucuu

SEQ ID NO: 2318005 - RNA, 19 nt, Artificial Sequence
  Description of Artificial Sequence: Synthetic oligonucleotide
  Antisense strand to SEQ ID NO: 2318004
aagaucccaguuauagugc

SEQ ID NO: 2318006 - RNA, 19 nt, Artificial Sequence
  Description of Artificial Sequence: Synthetic oligonucleotide
  Sense strand starting at position 269 of SEQ ID NO: 1885126
gggaucuuaucuuccucau

SEQ ID NO: 2318007 - RNA, 19 nt, Artificial Sequence
  Description of Artificial Sequence: Synthetic oligonucleotide
  Antisense strand to SEQ ID NO: 2318006
augaggaagauaagauccc

SEQ ID NO: 2318008 - RNA, 19 nt, Artificial Sequence
  Description of Artificial Sequence: Synthetic oligonucleotide
  Sense strand starting at position 280 of SEQ ID NO: 1885126
uuccucauccacugugaca

SEQ ID NO: 2318009 - RNA, 19 nt, Artificial Sequence
  Description of Artificial Sequence: Synthetic oligonucleotide
  Antisense strand to SEQ ID NO: 2318008
ugucacaguggaugaggaa

SEQ ID NO: 2318010 - RNA, 19 nt, Artificial Sequence
  Description of Artificial Sequence: Synthetic oligonucleotide
  Sense strand starting at position 324 of SEQ ID NO: 1885126
aucuguaugguccacagua

SEQ ID NO: 2318011 - RNA, 19 nt, Artificial Sequence
  Description of Artificial Sequence: Synthetic oligonucleotide
  Antisense strand to SEQ ID NO: 2318010
uacuguggaccauacagau

SEQ ID NO: 2318012 - RNA, 19 nt, Artificial Sequence
  Description of Artificial Sequence: Synthetic oligonucleotide
  Sense strand starting at position 611 of SEQ ID NO: 1885126
uaguaucugccgugggaga

SEQ ID NO: 2318013 - RNA, 19 nt, Artificial Sequence
  Description of Artificial Sequence: Synthetic oligonucleotide
  Antisense strand to SEQ ID NO: 2318012
ucucccacggcagauacua

SEQ ID NO: 2318014 - RNA, 19 nt, Artificial Sequence
  Description of Artificial Sequence: Synthetic oligonucleotide
  Sense strand starting at position 938 of SEQ ID NO: 1885126
gggaguacucccugcagaa

SEQ ID NO: 2318015 - RNA, 19 nt, Artificial Sequence
  Description of Artificial Sequence: Synthetic oligonucleotide
  Antisense strand to SEQ ID NO: 2318014
uucugcagggaguacuccc

SEQ ID NO: 2318016 - RNA, 19 nt, Artificial Sequence
  Description of Artificial Sequence: Synthetic oligonucleotide
  Sense strand starting at position 940 of SEQ ID NO: 1885126
gaguacucccugcagaaag

SEQ ID NO: 2318017 - RNA, 19 nt, Artificial Sequence
  Description of Artificial Sequence: Synthetic oligonucleotide
  Antisense strand to SEQ ID NO: 2318016
cuuucugcagggaguacuc

SEQ ID NO: 2318018 - RNA, 19 nt, Artificial Sequence
  Description of Artificial Sequence: Synthetic oligonucleotide
  Sense strand starting at position 995 of SEQ ID NO: 1885126
gaggcagcauucucagaaa

SEQ ID NO: 2318019 - RNA, 19 nt, Artificial Sequence
  Description of Artificial Sequence: Synthetic oligonucleotide
  Antisense strand to SEQ ID NO: 2318018
uuucugagaaugcugccuc

SEQ ID NO: 2318020 - RNA, 19 nt, Artificial Sequence
  Description of Artificial Sequence: Synthetic oligonucleotide
  Sense strand starting at position 1221 of SEQ ID NO: 1885126
aaagguccugagugugaaa

SEQ ID NO: 2318021 - RNA, 19 nt, Artificial Sequence
  Description of Artificial Sequence: Synthetic oligonucleotide
  Antisense strand to SEQ ID NO: 2318020
uuucacacucaggaccuuu

SEQ ID NO: 2318022 - RNA, 19 nt, Artificial Sequence
  Description of Artificial Sequence: Synthetic oligonucleotide
  Sense strand starting at position 1274 of SEQ ID NO: 1885126
uguuacuuccuguacccau

SEQ ID NO: 2318023 - RNA, 19 nt, Artificial Sequence
  Description of Artificial Sequence: Synthetic oligonucleotide
  Antisense strand to SEQ ID NO: 2318022
auggguacaggaaguaaca

SEQ ID NO: 2318024 - RNA, 19 nt, Artificial Sequence
  Description of Artificial Sequence: Synthetic oligonucleotide
  Sense strand starting at position 1989 of SEQ ID NO: 1885126
uuuagcaguccgugaggaa

SEQ ID NO: 2318025 - RNA, 19 nt, Artificial Sequence
  Description of Artificial Sequence: Synthetic oligonucleotide
  Antisense strand to SEQ ID NO: 2318024
uuccucacggacugcuaaa

SEQ ID NO: 2318026 - RNA, 19 nt, Artificial Sequence
  Description of Artificial Sequence: Synthetic oligonucleotide
  Sense strand starting at position 2004 of SEQ ID NO: 1885126
ggaagagcugugugggagu

SEQ ID NO: 2318027 - RNA, 19 nt, Artificial Sequence
  Description of Artificial Sequence: Synthetic oligonucleotide
  Antisense strand to SEQ ID NO: 2318026
acucccacacagcucuucc

SEQ ID NO: 2318028 - RNA, 19 nt, Artificial Sequence
  Description of Artificial Sequence: Synthetic oligonucleotide
  Sense strand starting at position 2034 of SEQ ID NO: 1885126
ggaucugcccgagaguaag

SEQ ID NO: 2318029 - RNA, 19 nt, Artificial Sequence
  Description of Artificial Sequence: Synthetic oligonucleotide
  Antisense strand to SEQ ID NO: 2318028
cuuacucucgggcagaucc

SEQ ID NO: 2318030 - RNA, 19 nt, Artificial Sequence
  Description of Artificial Sequence: Synthetic oligonucleotide
  Sense strand starting at position 2268 of SEQ ID NO: 1885126
ccuaaugccacgugaaaug

SEQ ID NO: 2318031 - RNA, 19 nt, Artificial Sequence
  Description of Artificial Sequence: Synthetic oligonucleotide
  Antisense strand to SEQ ID NO: 2318030
cauuucacguggcauuagg

SEQ ID NO: 2318032 - RNA, 19 nt, Artificial Sequence
  Description of Artificial Sequence: Synthetic oligonucleotide
  Sense strand starting at position 2306 of SEQ ID NO: 1885126
ggcgucugaucgccagaau

SEQ ID NO: 2318033 - RNA, 19 nt, Artificial Sequence
  Description of Artificial Sequence: Synthetic oligonucleotide
  Antisense strand to SEQ ID NO: 2318032
auucuggcgaucagacgcc

SEQ ID NO: 2318034 - RNA, 19 nt, Artificial Sequence
  Description of Artificial Sequence: Synthetic oligonucleotide
  Sense strand starting at position 2307 of SEQ ID NO: 1885126
gcgucugaucgccagaaug

SEQ ID NO: 2318035 - RNA, 19 nt, Artificial Sequence
  Description of Artificial Sequence: Synthetic oligonucleotide
  Antisense strand to SEQ ID NO: 2318034
cauucuggcgaucagacgc

SEQ ID NO: 2318036 - RNA, 19 nt, Artificial Sequence
  Description of Artificial Sequence: Synthetic oligonucleotide
  Sense strand starting at position 2309 of SEQ ID NO: 1885126
gucugaucgccagaaugag

SEQ ID NO: 2318037 - RNA, 19 nt, Artificial Sequence
  Description of Artificial Sequence: Synthetic oligonucleotide
  Antisense strand to SEQ ID NO: 2318036
cucauucuggcgaucagac

SEQ ID NO: 2318038 - RNA, 19 nt, Artificial Sequence
  Description of Artificial Sequence: Synthetic oligonucleotide
  Sense strand starting at position 2438 of SEQ ID NO: 1885126
cagaguuugugacuaggaa

SEQ ID NO: 2318039 - RNA, 19 nt, Artificial Sequence
  Description of Artificial Sequence: Synthetic oligonucleotide
  Antisense strand to SEQ ID NO: 2318038
uuccuagucacaaacucug

SEQ ID NO: 2318040 - RNA, 19 nt, Artificial Sequence
  Description of Artificial Sequence: Synthetic oligonucleotide
  Sense strand starting at position 2442 of SEQ ID NO: 1885126
guuugugacuaggaacuaa

SEQ ID NO: 2318041 - RNA, 19 nt, Artificial Sequence
  Description of Artificial Sequence: Synthetic oligonucleotide
  Antisense strand to SEQ ID NO: 2318040
uuaguuccuagucacaaac

SEQ ID NO: 2318042 - RNA, 19 nt, Artificial Sequence
  Description of Artificial Sequence: Synthetic oligonucleotide
  Sense strand starting at position 2875 of SEQ ID NO: 1885126
ucucucugcuuguugucaa

SEQ ID NO: 2318043 - RNA, 19 nt, Artificial Sequence
  Description of Artificial Sequence: Synthetic oligonucleotide
  Antisense strand to SEQ ID NO: 2318042
uugacaacaagcagagaga

SEQ ID NO: 2318044 - RNA, 19 nt, Artificial Sequence
  Description of Artificial Sequence: Synthetic oligonucleotide
  Sense strand starting at position 2882 of SEQ ID NO: 1885126
gcuuguugucaagacaaac

SEQ ID NO: 2318045 - RNA, 19 nt, Artificial Sequence
  Description of Artificial Sequence: Synthetic oligonucleotide
  Antisense strand to SEQ ID NO: 2318044
guuugucuugacaacaagc

SEQ ID NO: 2318046 - RNA, 19 nt, Artificial Sequence
  Description of Artificial Sequence: Synthetic oligonucleotide
  Sense strand starting at position 2917 of SEQ ID NO: 1885126
cugaauaucuagcuagcau

SEQ ID NO: 2318047 - RNA, 19 nt, Artificial Sequence
  Description of Artificial Sequence: Synthetic oligonucleotide
  Antisense strand to SEQ ID NO: 2318046
augcuagcuagauauucag

SEQ ID NO: 2318048 - RNA, 19 nt, Artificial Sequence
  Description of Artificial Sequence: Synthetic oligonucleotide
  Sense strand starting at position 2924 of SEQ ID NO: 1885126
ucuagcuagcauuauuaga

SEQ ID NO: 2318049 - RNA, 19 nt, Artificial Sequence
  Description of Artificial Sequence: Synthetic oligonucleotide
  Antisense strand to SEQ ID NO: 2318048
ucuaauaaugcuagcuaga

SEQ ID NO: 2318050 - RNA, 19 nt, Artificial Sequence
  Description of Artificial Sequence: Synthetic oligonucleotide
  Sense strand starting at position 2990 of SEQ ID NO: 1885126
uggaaagcaccgugguuua

SEQ ID NO: 2318051 - RNA, 19 nt, Artificial Sequence
  Description of Artificial Sequence: Synthetic oligonucleotide
  Antisense strand to SEQ ID NO: 2318050
uaaaccacggugcuuucca

SEQ ID NO: 2318052 - RNA, 19 nt, Artificial Sequence
  Description of Artificial Sequence: Synthetic oligonucleotide
  Sense strand starting at position 3001 of SEQ ID NO: 1885126
gugguuuagaagggucgga

SEQ ID NO: 2318053 - RNA, 19 nt, Artificial Sequence
  Description of Artificial Sequence: Synthetic oligonucleotide
  Antisense strand to SEQ ID NO: 2318052
uccgacccuucuaaaccac

SEQ ID NO: 2318054 - RNA, 19 nt, Artificial Sequence
  Description of Artificial Sequence: Synthetic oligonucleotide
  Sense strand starting at position 3073 of SEQ ID NO: 1885126
ucaguuuccucccugguaa

SEQ ID NO: 2318055 - RNA, 19 nt, Artificial Sequence
  Description of Artificial Sequence: Synthetic oligonucleotide
  Antisense strand to SEQ ID NO: 2318054
uuaccagggaggaaacuga

SEQ ID NO: 2318056 - RNA, 19 nt, Artificial Sequence
  Description of Artificial Sequence: Synthetic oligonucleotide
  Sense strand starting at position 3107 of SEQ ID NO: 1885126
cuguguggugaggauucaa

SEQ ID NO: 2318057 - RNA, 19 nt, Artificial Sequence
  Description of Artificial Sequence: Synthetic oligonucleotide
  Antisense strand to SEQ ID NO: 2318056
uugaauccucaccacacag

SEQ ID NO: 2318058 - RNA, 19 nt, Artificial Sequence
  Description of Artificial Sequence: Synthetic oligonucleotide
  Sense strand starting at position 3139 of SEQ ID NO: 1885126
gugaacaugcgcugugaca

SEQ ID NO: 2318059 - RNA, 19 nt, Artificial Sequence
  Description of Artificial Sequence: Synthetic oligonucleotide
  Antisense strand to SEQ ID NO: 2318058
ugucacagcgcauguucac

SEQ ID NO: 2318060 - RNA, 19 nt, Artificial Sequence
  Description of Artificial Sequence: Synthetic oligonucleotide
  Sense strand starting at position 3141 of SEQ ID NO: 1885126
gaacaugcgcugugacaga

SEQ ID NO: 2318061 - RNA, 19 nt, Artificial Sequence
  Description of Artificial Sequence: Synthetic oligonucleotide
  Antisense strand to SEQ ID NO: 2318060
ucugucacagcgcauguuc

SEQ ID NO: 2318062 - RNA, 19 nt, Artificial Sequence
  Description of Artificial Sequence: Synthetic oligonucleotide
  Sense strand starting at position 3222 of SEQ ID NO: 1885126
ucagacaucugggagcaga

SEQ ID NO: 2318063 - RNA, 19 nt, Artificial Sequence
  Description of Artificial Sequence: Synthetic oligonucleotide
  Antisense strand to SEQ ID NO: 2318062
ucugcucccagaugucuga

SEQ ID NO: 2318064 - RNA, 19 nt, Artificial Sequence
  Description of Artificial Sequence: Synthetic oligonucleotide
  Sense strand starting at position 3335 of SEQ ID NO: 1885126
ggcuauagaucuuugagac

SEQ ID NO: 2318065 - RNA, 19 nt, Artificial Sequence
  Description of Artificial Sequence: Synthetic oligonucleotide
  Antisense strand to SEQ ID NO: 2318064
gucucaaagaucuauagcc

SEQ ID NO: 2318066 - RNA, 19 nt, Artificial Sequence
  Description of Artificial Sequence: Synthetic oligonucleotide
  Sense strand starting at position 3336 of SEQ ID NO: 1885126
gcuauagaucuuugagacu

SEQ ID NO: 2318067 - RNA, 19 nt, Artificial Sequence
  Description of Artificial Sequence: Synthetic oligonucleotide
  Antisense strand to SEQ ID NO: 2318066
agucucaaagaucuauagc

SEQ ID NO: 2318068 - RNA, 19 nt, Artificial Sequence
  Description of Artificial Sequence: Synthetic oligonucleotide
  Sense strand starting at position 3339 of SEQ ID NO: 1885126
auagaucuuugagacugga

SEQ ID NO: 2318069 - RNA, 19 nt, Artificial Sequence
  Description of Artificial Sequence: Synthetic oligonucleotide
  Antisense strand to SEQ ID NO: 2318068
uccagucucaaagaucuau

SEQ ID NO: 2318070 - RNA, 19 nt, Artificial Sequence
  Description of Artificial Sequence: Synthetic oligonucleotide
  Sense strand starting at position 3427 of SEQ ID NO: 1885126
ggaguagguucccaaaccu

SEQ ID NO: 2318071 - RNA, 19 nt, Artificial Sequence
  Description of Artificial Sequence: Synthetic oligonucleotide
  Antisense strand to SEQ ID NO: 2318070
agguuugggaaccuacucc

SEQ ID NO: 2318072 - RNA, 19 nt, Artificial Sequence
  Description of Artificial Sequence: Synthetic oligonucleotide
  Sense strand starting at position 3445 of SEQ ID NO: 1885126
ucagcaucagaauggguua

SEQ ID NO: 2318073 - RNA, 19 nt, Artificial Sequence
  Description of Artificial Sequence: Synthetic oligonucleotide
  Antisense strand to SEQ ID NO: 2318072
uaacccauucugaugcuga

SEQ ID NO: 2318074 - RNA, 19 nt, Artificial Sequence
  Description of Artificial Sequence: Synthetic oligonucleotide
  Sense strand starting at position 3448 of SEQ ID NO: 1885126
gcaucagaauggguuagaa

SEQ ID NO: 2318075 - RNA, 19 nt, Artificial Sequence
  Description of Artificial Sequence: Synthetic oligonucleotide
  Antisense strand to SEQ ID NO: 2318074
uucuaacccauucugaugc

SEQ ID NO: 2318076 - RNA, 19 nt, Artificial Sequence
  Description of Artificial Sequence: Synthetic oligonucleotide
  Sense strand starting at position 3567 of SEQ ID NO: 1885126
accucuccucagugauucu

SEQ ID NO: 2318077 - RNA, 19 nt, Artificial Sequence
  Description of Artificial Sequence: Synthetic oligonucleotide
  Antisense strand to SEQ ID NO: 2318076
agaaucacugaggagaggu

SEQ ID NO: 2318078 - RNA, 19 nt, Artificial Sequence
  Description of Artificial Sequence: Synthetic oligonucleotide
  Sense strand starting at position 3570 of SEQ ID NO: 1885126
ucuccucagugauucugau

SEQ ID NO: 2318079 - RNA, 19 nt, Artificial Sequence
  Description of Artificial Sequence: Synthetic oligonucleotide
  Antisense strand to SEQ ID NO: 2318078
aucagaaucacugaggaga

SEQ ID NO: 2318080 - RNA, 19 nt, Artificial Sequence
  Description of Artificial Sequence: Synthetic oligonucleotide
  Sense strand starting at position 3844 of SEQ ID NO: 1885126
caaggugagccaugaucaa

SEQ ID NO: 2318081 - RNA, 19 nt, Artificial Sequence
  Description of Artificial Sequence: Synthetic oligonucleotide
  Antisense strand to SEQ ID NO: 2318080
uugaucauggcucaccuug

SEQ ID NO: 2318082 - RNA, 19 nt, Artificial Sequence
  Description of Artificial Sequence: Synthetic oligonucleotide
  Sense strand starting at position 41 of SEQ ID NO: 1885125
aucuguaugguccacagua

SEQ ID NO: 2318083 - RNA, 19 nt, Artificial Sequence
  Description of Artificial Sequence: Synthetic oligonucleotide
  Antisense strand to SEQ ID NO: 2318082
uacuguggaccauacagau

SEQ ID NO: 2318084 - RNA, 19 nt, Artificial Sequence
  Description of Artificial Sequence: Synthetic oligonucleotide
  Sense strand starting at position 328 of SEQ ID NO: 1885125
uaguaucugccgugggaga

SEQ ID NO: 2318085 - RNA, 19 nt, Artificial Sequence
  Description of Artificial Sequence: Synthetic oligonucleotide
  Antisense strand to SEQ ID NO: 2318084
ucucccacggcagauacua

SEQ ID NO: 2318086 - RNA, 19 nt, Artificial Sequence
  Description of Artificial Sequence: Synthetic oligonucleotide
  Sense strand starting at position 481 of SEQ ID NO: 1885125
cucaccucuugccaggaua

SEQ ID NO: 2318087 - RNA, 19 nt, Artificial Sequence
  Description of Artificial Sequence: Synthetic oligonucleotide
  Antisense strand to SEQ ID NO: 2318086
uauccuggcaagaggugag

SEQ ID NO: 2318088 - RNA, 19 nt, Artificial Sequence
  Description of Artificial Sequence: Synthetic oligonucleotide
  Sense strand starting at position 655 of SEQ ID NO: 1885125
gggaguacucccugcagaa

SEQ ID NO: 2318089 - RNA, 19 nt, Artificial Sequence
  Description of Artificial Sequence: Synthetic oligonucleotide
  Antisense strand to SEQ ID NO: 2318088
uucugcagggaguacuccc

SEQ ID NO: 2318090 - RNA, 19 nt, Artificial Sequence
  Description of Artificial Sequence: Synthetic oligonucleotide
  Sense strand starting at position 657 of SEQ ID NO: 1885125
gaguacucccugcagaaag

SEQ ID NO: 2318091 - RNA, 19 nt, Artificial Sequence
  Description of Artificial Sequence: Synthetic oligonucleotide
  Antisense strand to SEQ ID NO: 2318090
cuuucugcagggaguacuc

SEQ ID NO: 2318092 - RNA, 19 nt, Artificial Sequence
  Description of Artificial Sequence: Synthetic oligonucleotide
  Sense strand starting at position 712 of SEQ ID NO: 1885125
gaggcagcauucucagaaa

SEQ ID NO: 2318093 - RNA, 19 nt, Artificial Sequence
  Description of Artificial Sequence: Synthetic oligonucleotide
  Antisense strand to SEQ ID NO: 2318092
uuucugagaaugcugccuc

SEQ ID NO: 2318094 - RNA, 19 nt, Artificial Sequence
  Description of Artificial Sequence: Synthetic oligonucleotide
  Sense strand starting at position 934 of SEQ ID NO: 1885125
aaagaaagguccugagugu

SEQ ID NO: 2318095 - RNA, 19 nt, Artificial Sequence
  Description of Artificial Sequence: Synthetic oligonucleotide
  Antisense strand to SEQ ID NO: 2318094
acacucaggaccuuucuuu

SEQ ID NO: 2318096 - RNA, 19 nt, Artificial Sequence
  Description of Artificial Sequence: Synthetic oligonucleotide
  Sense strand starting at position 938 of SEQ ID NO: 1885125
aaagguccugagugugaaa

SEQ ID NO: 2318097 - RNA, 19 nt, Artificial Sequence
  Description of Artificial Sequence: Synthetic oligonucleotide
  Antisense strand to SEQ ID NO: 2318096
uuucacacucaggaccuuu

SEQ ID NO: 2318098 - RNA, 19 nt, Artificial Sequence
  Description of Artificial Sequence: Synthetic oligonucleotide
  Sense strand starting at position 991 of SEQ ID NO: 1885125
uguuacuuccuguacccau

SEQ ID NO: 2318099 - RNA, 19 nt, Artificial Sequence
  Description of Artificial Sequence: Synthetic oligonucleotide
  Antisense strand to SEQ ID NO: 2318098
auggguacaggaaguaaca

SEQ ID NO: 2318100 - RNA, 19 nt, Artificial Sequence
  Description of Artificial Sequence: Synthetic oligonucleotide
  Sense strand starting at position 1706 of SEQ ID NO: 1885125
uuuagcaguccgugaggaa

SEQ ID NO: 2318101 - RNA, 19 nt, Artificial Sequence
  Description of Artificial Sequence: Synthetic oligonucleotide
  Antisense strand to SEQ ID NO: 2318100
uuccucacggacugcuaaa

SEQ ID NO: 2318102 - RNA, 19 nt, Artificial Sequence
  Description of Artificial Sequence: Synthetic oligonucleotide
  Sense strand starting at position 1721 of SEQ ID NO: 1885125
ggaagagcugugugggagu

SEQ ID NO: 2318103 - RNA, 19 nt, Artificial Sequence
  Description of Artificial Sequence: Synthetic oligonucleotide
  Antisense strand to SEQ ID NO: 2318102
acucccacacagcucuucc

SEQ ID NO: 2318104 - RNA, 19 nt, Artificial Sequence
  Description of Artificial Sequence: Synthetic oligonucleotide
  Sense strand starting at position 1751 of SEQ ID NO: 1885125
ggaucugcccgagaguaag

SEQ ID NO: 2318105 - RNA, 19 nt, Artificial Sequence
  Description of Artificial Sequence: Synthetic oligonucleotide
  Antisense strand to SEQ ID NO: 2318104
cuuacucucgggcagaucc

SEQ ID NO: 2318106 - RNA, 19 nt, Artificial Sequence
  Description of Artificial Sequence: Synthetic oligonucleotide
  Sense strand starting at position 1985 of SEQ ID NO: 1885125
ccuaaugccacgugaaaug

SEQ ID NO: 2318107 - RNA, 19 nt, Artificial Sequence
  Description of Artificial Sequence: Synthetic oligonucleotide
  Antisense strand to SEQ ID NO: 2318106
cauuucacguggcauuagg

SEQ ID NO: 2318108 - RNA, 19 nt, Artificial Sequence
  Description of Artificial Sequence: Synthetic oligonucleotide
  Sense strand starting at position 2023 of SEQ ID NO: 1885125
ggcgucugaucgccagaau

SEQ ID NO: 2318109 - RNA, 19 nt, Artificial Sequence
  Description of Artificial Sequence: Synthetic oligonucleotide
  Antisense strand to SEQ ID NO: 2318108
auucuggcgaucagacgcc

SEQ ID NO: 2318110 - RNA, 19 nt, Artificial Sequence
  Description of Artificial Sequence: Synthetic oligonucleotide
  Sense strand starting at position 2024 of SEQ ID NO: 1885125
gcgucugaucgccagaaug

SEQ ID NO: 2318111 - RNA, 19 nt, Artificial Sequence
  Description of Artificial Sequence: Synthetic oligonucleotide
  Antisense strand to SEQ ID NO: 2318110
cauucuggcgaucagacgc

SEQ ID NO: 2318112 - RNA, 19 nt, Artificial Sequence
  Description of Artificial Sequence: Synthetic oligonucleotide
  Sense strand starting at position 2026 of SEQ ID NO: 1885125
gucugaucgccagaaugag

SEQ ID NO: 2318113 - RNA, 19 nt, Artificial Sequence
  Description of Artificial Sequence: Synthetic oligonucleotide
  Antisense strand to SEQ ID NO: 2318112
cucauucuggcgaucagac

SEQ ID NO: 2318114 - RNA, 19 nt, Artificial Sequence
  Description of Artificial Sequence: Synthetic oligonucleotide
  Sense strand starting at position 2155 of SEQ ID NO: 1885125
cagaguuugugacuaggaa

SEQ ID NO: 2318115 - RNA, 19 nt, Artificial Sequence
  Description of Artificial Sequence: Synthetic oligonucleotide
  Antisense strand to SEQ ID NO: 2318114
uuccuagucacaaacucug

SEQ ID NO: 2318116 - RNA, 19 nt, Artificial Sequence
  Description of Artificial Sequence: Synthetic oligonucleotide
  Sense strand starting at position 2159 of SEQ ID NO: 1885125
guuugugacuaggaacuaa

SEQ ID NO: 2318117 - RNA, 19 nt, Artificial Sequence
  Description of Artificial Sequence: Synthetic oligonucleotide
  Antisense strand to SEQ ID NO: 2318116
uuaguuccuagucacaaac

SEQ ID NO: 2318118 - RNA, 19 nt, Artificial Sequence
  Description of Artificial Sequence: Synthetic oligonucleotide
  Sense strand starting at position 2592 of SEQ ID NO: 1885125
ucucucugcuuguugucaa

SEQ ID NO: 2318119 - RNA, 19 nt, Artificial Sequence
  Description of Artificial Sequence: Synthetic oligonucleotide
  Antisense strand to SEQ ID NO: 2318118
uugacaacaagcagagaga

SEQ ID NO: 2318120 - RNA, 19 nt, Artificial Sequence
  Description of Artificial Sequence: Synthetic oligonucleotide
  Sense strand starting at position 2599 of SEQ ID NO: 1885125
gcuuguugucaagacaaac

SEQ ID NO: 2318121 - RNA, 19 nt, Artificial Sequence
  Description of Artificial Sequence: Synthetic oligonucleotide
  Antisense strand to SEQ ID NO: 2318120
guuugucuugacaacaagc

SEQ ID NO: 2318122 - RNA, 19 nt, Artificial Sequence
  Description of Artificial Sequence: Synthetic oligonucleotide
  Sense strand starting at position 2634 of SEQ ID NO: 1885125
cugaauaucuagcuagcau

SEQ ID NO: 2318123 - RNA, 19 nt, Artificial Sequence
  Description of Artificial Sequence: Synthetic oligonucleotide
  Antisense strand to SEQ ID NO: 2318122
augcuagcuagauauucag

SEQ ID NO: 2318124 - RNA, 19 nt, Artificial Sequence
  Description of Artificial Sequence: Synthetic oligonucleotide
  Sense strand starting at position 2641 of SEQ ID NO: 1885125
ucuagcuagcauuauuaga

SEQ ID NO: 2318125 - RNA, 19 nt, Artificial Sequence
  Description of Artificial Sequence: Synthetic oligonucleotide
  Antisense strand to SEQ ID NO: 2318124
ucuaauaaugcuagcuaga

SEQ ID NO: 2318126 - RNA, 19 nt, Artificial Sequence
  Description of Artificial Sequence: Synthetic oligonucleotide
  Sense strand starting at position 2707 of SEQ ID NO: 1885125
uggaaagcaccgugguuua

SEQ ID NO: 2318127 - RNA, 19 nt, Artificial Sequence
  Description of Artificial Sequence: Synthetic oligonucleotide
  Antisense strand to SEQ ID NO: 2318126
uaaaccacggugcuuucca

SEQ ID NO: 2318128 - RNA, 19 nt, Artificial Sequence
  Description of Artificial Sequence: Synthetic oligonucleotide
  Sense strand starting at position 2718 of SEQ ID NO: 1885125
gugguuuagaagggucgga

SEQ ID NO: 2318129 - RNA, 19 nt, Artificial Sequence
  Description of Artificial Sequence: Synthetic oligonucleotide
  Antisense strand to SEQ ID NO: 2318128
uccgacccuucuaaaccac

SEQ ID NO: 2318130 - RNA, 19 nt, Artificial Sequence
  Description of Artificial Sequence: Synthetic oligonucleotide
  Sense strand starting at position 2790 of SEQ ID NO: 1885125
ucaguuuccucccugguaa

SEQ ID NO: 2318131 - RNA, 19 nt, Artificial Sequence
  Description of Artificial Sequence: Synthetic oligonucleotide
  Antisense strand to SEQ ID NO: 2318130
uuaccagggaggaaacuga

SEQ ID NO: 2318132 - RNA, 19 nt, Artificial Sequence
  Description of Artificial Sequence: Synthetic oligonucleotide
  Sense strand starting at position 2824 of SEQ ID NO: 1885125
cuguguggugaggauucaa

SEQ ID NO: 2318133 - RNA, 19 nt, Artificial Sequence
  Description of Artificial Sequence: Synthetic oligonucleotide
  Antisense strand to SEQ ID NO: 2318132
uugaauccucaccacacag

SEQ ID NO: 2318134 - RNA, 19 nt, Artificial Sequence
  Description of Artificial Sequence: Synthetic oligonucleotide
  Sense strand starting at position 2856 of SEQ ID NO: 1885125
gugaacaugcgcugugaca

SEQ ID NO: 2318135 - RNA, 19 nt, Artificial Sequence
  Description of Artificial Sequence: Synthetic oligonucleotide
  Antisense strand to SEQ ID NO: 2318134
ugucacagcgcauguucac

SEQ ID NO: 2318136 - RNA, 19 nt, Artificial Sequence
  Description of Artificial Sequence: Synthetic oligonucleotide
  Sense strand starting at position 2858 of SEQ ID NO: 1885125
gaacaugcgcugugacaga

SEQ ID NO: 2318137 - RNA, 19 nt, Artificial Sequence
  Description of Artificial Sequence: Synthetic oligonucleotide
  Antisense strand to SEQ ID NO: 2318136
ucugucacagcgcauguuc

SEQ ID NO: 2318138 - RNA, 19 nt, Artificial Sequence
  Description of Artificial Sequence: Synthetic oligonucleotide
  Sense strand starting at position 2939 of SEQ ID NO: 1885125
ucagacaucugggagcaga

SEQ ID NO: 2318139 - RNA, 19 nt, Artificial Sequence
  Description of Artificial Sequence: Synthetic oligonucleotide
  Antisense strand to SEQ ID NO: 2318138
ucugcucccagaugucuga

SEQ ID NO: 2318140 - RNA, 19 nt, Artificial Sequence
  Description of Artificial Sequence: Synthetic oligonucleotide
  Sense strand starting at position 3052 of SEQ ID NO: 1885125
ggcuauagaucuuugagac

SEQ ID NO: 2318141 - RNA, 19 nt, Artificial Sequence
  Description of Artificial Sequence: Synthetic oligonucleotide
  Antisense strand to SEQ ID NO: 2318140
gucucaaagaucuauagcc

SEQ ID NO: 2318142 - RNA, 19 nt, Artificial Sequence
  Description of Artificial Sequence: Synthetic oligonucleotide
  Sense strand starting at position 3053 of SEQ ID NO: 1885125
gcuauagaucuuugagacu

SEQ ID NO: 2318143 - RNA, 19 nt, Artificial Sequence
  Description of Artificial Sequence: Synthetic oligonucleotide
  Antisense strand to SEQ ID NO: 2318142
agucucaaagaucuauagc

SEQ ID NO: 2318144 - RNA, 19 nt, Artificial Sequence
  Description of Artificial Sequence: Synthetic oligonucleotide
  Sense strand starting at position 3056 of SEQ ID NO: 1885125
auagaucuuugagacugga

SEQ ID NO: 2318145 - RNA, 19 nt, Artificial Sequence
  Description of Artificial Sequence: Synthetic oligonucleotide
  Antisense strand to SEQ ID NO: 2318144
uccagucucaaagaucuau

SEQ ID NO: 2318146 - RNA, 19 nt, Artificial Sequence
  Description of Artificial Sequence: Synthetic oligonucleotide
  Sense strand starting at position 3144 of SEQ ID NO: 1885125
ggaguagguucccaaaccu

SEQ ID NO: 2318147 - RNA, 19 nt, Artificial Sequence
  Description of Artificial Sequence: Synthetic oligonucleotide
  Antisense strand to SEQ ID NO: 2318146
agguuugggaaccuacucc

SEQ ID NO: 2318148 - RNA, 19 nt, Artificial Sequence
  Description of Artificial Sequence: Synthetic oligonucleotide
  Sense strand starting at position 3162 of SEQ ID NO: 1885125
ucagcaucagaauggguua

SEQ ID NO: 2318149 - RNA, 19 nt, Artificial Sequence
  Description of Artificial Sequence: Synthetic oligonucleotide
  Antisense strand to SEQ ID NO: 2318148
uaacccauucugaugcuga

SEQ ID NO: 2318150 - RNA, 19 nt, Artificial Sequence
  Description of Artificial Sequence: Synthetic oligonucleotide
  Sense strand starting at position 3165 of SEQ ID NO: 1885125
gcaucagaauggguuagaa

SEQ ID NO: 2318151 - RNA, 19 nt, Artificial Sequence
  Description of Artificial Sequence: Synthetic oligonucleotide
  Antisense strand to SEQ ID NO: 2318150
uucuaacccauucugaugc

SEQ ID NO: 2318152 - RNA, 19 nt, Artificial Sequence
  Description of Artificial Sequence: Synthetic oligonucleotide
  Sense strand starting at position 3284 of SEQ ID NO: 1885125
accucuccucagugauucu

SEQ ID NO: 2318153 - RNA, 19 nt, Artificial Sequence
  Description of Artificial Sequence: Synthetic oligonucleotide
  Antisense strand to SEQ ID NO: 2318152
agaaucacugaggagaggu

SEQ ID NO: 2318154 - RNA, 19 nt, Artificial Sequence
  Description of Artificial Sequence: Synthetic oligonucleotide
  Sense strand starting at position 3287 of SEQ ID NO: 1885125
ucuccucagugauucugau

SEQ ID NO: 2318155 - RNA, 19 nt, Artificial Sequence
  Description of Artificial Sequence: Synthetic oligonucleotide
  Antisense strand to SEQ ID NO: 2318154
aucagaaucacugaggaga

SEQ ID NO: 2318156 - RNA, 19 nt, Artificial Sequence
  Description of Artificial Sequence: Synthetic oligonucleotide
  Sense strand starting at position 3291 of SEQ ID NO: 1885125
cucagugauucugauaagc

SEQ ID NO: 2318157 - RNA, 19 nt, Artificial Sequence
  Description of Artificial Sequence: Synthetic oligonucleotide
  Antisense strand to SEQ ID NO: 2318156
gcuuaucagaaucacugag

SEQ ID NO: 2318158 - RNA, 19 nt, Artificial Sequence
  Description of Artificial Sequence: Synthetic oligonucleotide
  Sense strand starting at position 3293 of SEQ ID NO: 1885125
cagugauucugauaagcca

SEQ ID NO: 2318159 - RNA, 19 nt, Artificial Sequence
  Description of Artificial Sequence: Synthetic oligonucleotide
  Antisense strand to SEQ ID NO: 2318158
uggcuuaucagaaucacug

SEQ ID NO: 2318160 - RNA, 19 nt, Artificial Sequence
  Description of Artificial Sequence: Synthetic oligonucleotide
  Sense strand starting at position 3561 of SEQ ID NO: 1885125
caaggugagccaugaucaa

SEQ ID NO: 2318161 - RNA, 19 nt, Artificial Sequence
  Description of Artificial Sequence: Synthetic oligonucleotide
  Antisense strand to SEQ ID NO: 2318160
uugaucauggcucaccuug

SEQ ID NO: 2318162 - RNA, 19 nt, Artificial Sequence
  Description of Artificial Sequence: Synthetic oligonucleotide
  Sense strand starting at position 183 of SEQ ID NO: 1885124
gggaguacucccugcagaa

SEQ ID NO: 2318163 - RNA, 19 nt, Artificial Sequence
  Description of Artificial Sequence: Synthetic oligonucleotide
  Antisense strand to SEQ ID NO: 2318162
uucugcagggaguacuccc

SEQ ID NO: 2318164 - RNA, 19 nt, Artificial Sequence
  Description of Artificial Sequence: Synthetic oligonucleotide
  Sense strand starting at position 185 of SEQ ID NO: 1885124
gaguacucccugcagaaag

SEQ ID NO: 2318165 - RNA, 19 nt, Artificial Sequence
  Description of Artificial Sequence: Synthetic oligonucleotide
  Antisense strand to SEQ ID NO: 2318164
cuuucugcagggaguacuc

SEQ ID NO: 2318166 - RNA, 19 nt, Artificial Sequence
  Description of Artificial Sequence: Synthetic oligonucleotide
  Sense strand starting at position 240 of SEQ ID NO: 1885124
gaggcagcauucucagaaa

SEQ ID NO: 2318167 - RNA, 19 nt, Artificial Sequence
  Description of Artificial Sequence: Synthetic oligonucleotide
  Antisense strand to SEQ ID NO: 2318166
uuucugagaaugcugccuc

SEQ ID NO: 2318168 - RNA, 19 nt, Artificial Sequence
  Description of Artificial Sequence: Synthetic oligonucleotide
  Sense strand starting at position 466 of SEQ ID NO: 1885124
aaagguccugagugugaaa

SEQ ID NO: 2318169 - RNA, 19 nt, Artificial Sequence
  Description of Artificial Sequence: Synthetic oligonucleotide
  Antisense strand to SEQ ID NO: 2318168
uuucacacucaggaccuuu

SEQ ID NO: 2318170 - RNA, 19 nt, Artificial Sequence
  Description of Artificial Sequence: Synthetic oligonucleotide
  Sense strand starting at position 519 of SEQ ID NO: 1885124
uguuacuuccuguacccau

SEQ ID NO: 2318171 - RNA, 19 nt, Artificial Sequence
  Description of Artificial Sequence: Synthetic oligonucleotide
  Antisense strand to SEQ ID NO: 2318170
auggguacaggaaguaaca

SEQ ID NO: 2318172 - RNA, 19 nt, Artificial Sequence
  Description of Artificial Sequence: Synthetic oligonucleotide
  Sense strand starting at position 1234 of SEQ ID NO: 1885124
uuuagcaguccgugaggaa

SEQ ID NO: 2318173 - RNA, 19 nt, Artificial Sequence
  Description of Artificial Sequence: Synthetic oligonucleotide
  Antisense strand to SEQ ID NO: 2318172
uuccucacggacugcuaaa

SEQ ID NO: 2318174 - RNA, 19 nt, Artificial Sequence
  Description of Artificial Sequence: Synthetic oligonucleotide
  Sense strand starting at position 1249 of SEQ ID NO: 1885124
ggaagagcugugugggagu

SEQ ID NO: 2318175 - RNA, 19 nt, Artificial Sequence
  Description of Artificial Sequence: Synthetic oligonucleotide
  Antisense strand to SEQ ID NO: 2318174
acucccacacagcucuucc

SEQ ID NO: 2318176 - RNA, 19 nt, Artificial Sequence
  Description of Artificial Sequence: Synthetic oligonucleotide
  Sense strand starting at position 1279 of SEQ ID NO: 1885124
ggaucugcccgagaguaag

SEQ ID NO: 2318177 - RNA, 19 nt, Artificial Sequence
  Description of Artificial Sequence: Synthetic oligonucleotide
  Antisense strand to SEQ ID NO: 2318176
cuuacucucgggcagaucc

SEQ ID NO: 2318178 - RNA, 19 nt, Artificial Sequence
  Description of Artificial Sequence: Synthetic oligonucleotide
  Sense strand starting at position 1513 of SEQ ID NO: 1885124
ccuaaugccacgugaaaug

SEQ ID NO: 2318179 - RNA, 19 nt, Artificial Sequence
  Description of Artificial Sequence: Synthetic oligonucleotide
  Antisense strand to SEQ ID NO: 2318178
cauuucacguggcauuagg

SEQ ID NO: 2318180 - RNA, 19 nt, Artificial Sequence
  Description of Artificial Sequence: Synthetic oligonucleotide
  Sense strand starting at position 1552 of SEQ ID NO: 1885124
gcgucugaucgccagaaug

SEQ ID NO: 2318181 - RNA, 19 nt, Artificial Sequence
  Description of Artificial Sequence: Synthetic oligonucleotide
  Antisense strand to SEQ ID NO: 2318180
cauucuggcgaucagacgc

SEQ ID NO: 2318182 - RNA, 19 nt, Artificial Sequence
  Description of Artificial Sequence: Synthetic oligonucleotide
  Sense strand starting at position 1554 of SEQ ID NO: 1885124
gucugaucgccagaaugag

SEQ ID NO: 2318183 - RNA, 19 nt, Artificial Sequence
  Description of Artificial Sequence: Synthetic oligonucleotide
  Antisense strand to SEQ ID NO: 2318182
cucauucuggcgaucagac

SEQ ID NO: 2318184 - RNA, 19 nt, Artificial Sequence
  Description of Artificial Sequence: Synthetic oligonucleotide
  Sense strand starting at position 1683 of SEQ ID NO: 1885124
cagaguuugugacuaggaa

SEQ ID NO: 2318185 - RNA, 19 nt, Artificial Sequence
  Description of Artificial Sequence: Synthetic oligonucleotide
  Antisense strand to SEQ ID NO: 2318184
uuccuagucacaaacucug

SEQ ID NO: 2318186 - RNA, 19 nt, Artificial Sequence
  Description of Artificial Sequence: Synthetic oligonucleotide
  Sense strand starting at position 2120 of SEQ ID NO: 1885124
ucucucugcuuguugucaa

SEQ ID NO: 2318187 - RNA, 19 nt, Artificial Sequence
  Description of Artificial Sequence: Synthetic oligonucleotide
  Antisense strand to SEQ ID NO: 2318186
uugacaacaagcagagaga

SEQ ID NO: 2318188 - RNA, 19 nt, Artificial Sequence
  Description of Artificial Sequence: Synthetic oligonucleotide
  Sense strand starting at position 2127 of SEQ ID NO: 1885124
gcuuguugucaagacaaac

SEQ ID NO: 2318189 - RNA, 19 nt, Artificial Sequence
  Description of Artificial Sequence: Synthetic oligonucleotide
  Antisense strand to SEQ ID NO: 2318188
guuugucuugacaacaagc

SEQ ID NO: 2318190 - RNA, 19 nt, Artificial Sequence
  Description of Artificial Sequence: Synthetic oligonucleotide
  Sense strand starting at position 2162 of SEQ ID NO: 1885124
cugaauaucuagcuagcau

SEQ ID NO: 2318191 - RNA, 19 nt, Artificial Sequence
  Description of Artificial Sequence: Synthetic oligonucleotide
  Antisense strand to SEQ ID NO: 2318190
augcuagcuagauauucag

SEQ ID NO: 2318192 - RNA, 19 nt, Artificial Sequence
  Description of Artificial Sequence: Synthetic oligonucleotide
  Sense strand starting at position 2169 of SEQ ID NO: 1885124
ucuagcuagcauuauuaga

SEQ ID NO: 2318193 - RNA, 19 nt, Artificial Sequence
  Description of Artificial Sequence: Synthetic oligonucleotide
  Antisense strand to SEQ ID NO: 2318192
ucuaauaaugcuagcuaga

SEQ ID NO: 2318194 - RNA, 19 nt, Artificial Sequence
  Description of Artificial Sequence: Synthetic oligonucleotide
  Sense strand starting at position 2235 of SEQ ID NO: 1885124
uggaaagcaccgugguuua

SEQ ID NO: 2318195 - RNA, 19 nt, Artificial Sequence
  Description of Artificial Sequence: Synthetic oligonucleotide
  Antisense strand to SEQ ID NO: 2318194
uaaaccacggugcuuucca

SEQ ID NO: 2318196 - RNA, 19 nt, Artificial Sequence
  Description of Artificial Sequence: Synthetic oligonucleotide
  Sense strand starting at position 2246 of SEQ ID NO: 1885124
gugguuuagaagggucgga

SEQ ID NO: 2318197 - RNA, 19 nt, Artificial Sequence
  Description of Artificial Sequence: Synthetic oligonucleotide
  Antisense strand to SEQ ID NO: 2318196
uccgacccuucuaaaccac

SEQ ID NO: 2318198 - RNA, 19 nt, Artificial Sequence
  Description of Artificial Sequence: Synthetic oligonucleotide
  Sense strand starting at position 2318 of SEQ ID NO: 1885124
ucaguuuccucccugguaa

SEQ ID NO: 2318199 - RNA, 19 nt, Artificial Sequence
  Description of Artificial Sequence: Synthetic oligonucleotide
  Antisense strand to SEQ ID NO: 2318198
uuaccagggaggaaacuga

SEQ ID NO: 2318200 - RNA, 19 nt, Artificial Sequence
  Description of Artificial Sequence: Synthetic oligonucleotide
  Sense strand starting at position 2352 of SEQ ID NO: 1885124
cuguguggugaggauucaa

SEQ ID NO: 2318201 - RNA, 19 nt, Artificial Sequence
  Description of Artificial Sequence: Synthetic oligonucleotide
  Antisense strand to SEQ ID NO: 2318200
uugaauccucaccacacag

SEQ ID NO: 2318202 - RNA, 19 nt, Artificial Sequence
  Description of Artificial Sequence: Synthetic oligonucleotide
  Sense strand starting at position 2384 of SEQ ID NO: 1885124
gugaacaugcgcugugaca

SEQ ID NO: 2318203 - RNA, 19 nt, Artificial Sequence
  Description of Artificial Sequence: Synthetic oligonucleotide
  Antisense strand to SEQ ID NO: 2318202
ugucacagcgcauguucac

SEQ ID NO: 2318204 - RNA, 19 nt, Artificial Sequence
  Description of Artificial Sequence: Synthetic oligonucleotide
  Sense strand starting at position 2386 of SEQ ID NO: 1885124
gaacaugcgcugugacaga

SEQ ID NO: 2318205 - RNA, 19 nt, Artificial Sequence
  Description of Artificial Sequence: Synthetic oligonucleotide
  Antisense strand to SEQ ID NO: 2318204
ucugucacagcgcauguuc

SEQ ID NO: 2318206 - RNA, 19 nt, Artificial Sequence
  Description of Artificial Sequence: Synthetic oligonucleotide
  Sense strand starting at position 2467 of SEQ ID NO: 1885124
ucagacaucugggagcaga

SEQ ID NO: 2318207 - RNA, 19 nt, Artificial Sequence
  Description of Artificial Sequence: Synthetic oligonucleotide
  Antisense strand to SEQ ID NO: 2318206
ucugcucccagaugucuga

SEQ ID NO: 2318208 - RNA, 19 nt, Artificial Sequence
  Description of Artificial Sequence: Synthetic oligonucleotide
  Sense strand starting at position 2580 of SEQ ID NO: 1885124
ggcuauagaucuuugagac

SEQ ID NO: 2318209 - RNA, 19 nt, Artificial Sequence
  Description of Artificial Sequence: Synthetic oligonucleotide
  Antisense strand to SEQ ID NO: 2318208
gucucaaagaucuauagcc

SEQ ID NO: 2318210 - RNA, 19 nt, Artificial Sequence
  Description of Artificial Sequence: Synthetic oligonucleotide
  Sense strand starting at position 2581 of SEQ ID NO: 1885124
gcuauagaucuuugagacu

SEQ ID NO: 2318211 - RNA, 19 nt, Artificial Sequence
  Description of Artificial Sequence: Synthetic oligonucleotide
  Antisense strand to SEQ ID NO: 2318210
agucucaaagaucuauagc

SEQ ID NO: 2318212 - RNA, 19 nt, Artificial Sequence
  Description of Artificial Sequence: Synthetic oligonucleotide
  Sense strand starting at position 2584 of SEQ ID NO: 1885124
auagaucuuugagacugga

SEQ ID NO: 2318213 - RNA, 19 nt, Artificial Sequence
  Description of Artificial Sequence: Synthetic oligonucleotide
  Antisense strand to SEQ ID NO: 2318212
uccagucucaaagaucuau

SEQ ID NO: 2318214 - RNA, 19 nt, Artificial Sequence
  Description of Artificial Sequence: Synthetic oligonucleotide
  Sense strand starting at position 2690 of SEQ ID NO: 1885124
ucagcaucagaauggguua

SEQ ID NO: 2318215 - RNA, 19 nt, Artificial Sequence
  Description of Artificial Sequence: Synthetic oligonucleotide
  Antisense strand to SEQ ID NO: 2318214
uaacccauucugaugcuga

SEQ ID NO: 2318216 - RNA, 19 nt, Artificial Sequence
  Description of Artificial Sequence: Synthetic oligonucleotide
  Sense strand starting at position 2693 of SEQ ID NO: 1885124
gcaucagaauggguuagaa

SEQ ID NO: 2318217 - RNA, 19 nt, Artificial Sequence
  Description of Artificial Sequence: Synthetic oligonucleotide
  Antisense strand to SEQ ID NO: 2318216
uucuaacccauucugaugc

SEQ ID NO: 2318218 - RNA, 19 nt, Artificial Sequence
  Description of Artificial Sequence: Synthetic oligonucleotide
  Sense strand starting at position 2812 of SEQ ID NO: 1885124
accucuccucagugauucu

SEQ ID NO: 2318219 - RNA, 19 nt, Artificial Sequence
  Description of Artificial Sequence: Synthetic oligonucleotide
  Antisense strand to SEQ ID NO: 2318218
agaaucacugaggagaggu

SEQ ID NO: 2318220 - RNA, 19 nt, Artificial Sequence
  Description of Artificial Sequence: Synthetic oligonucleotide
  Sense strand starting at position 2815 of SEQ ID NO: 1885124
ucuccucagugauucugau

SEQ ID NO: 2318221 - RNA, 19 nt, Artificial Sequence
  Description of Artificial Sequence: Synthetic oligonucleotide
  Antisense strand to SEQ ID NO: 2318220
aucagaaucacugaggaga

SEQ ID NO: 2318222 - RNA, 19 nt, Artificial Sequence
  Description of Artificial Sequence: Synthetic oligonucleotide
  Sense strand starting at position 3089 of SEQ ID NO: 1885124
caaggugagccaugaucaa

SEQ ID NO: 2318223 - RNA, 19 nt, Artificial Sequence
  Description of Artificial Sequence: Synthetic oligonucleotide
  Antisense strand to SEQ ID NO: 2318222
uugaucauggcucaccuug

SEQ ID NO: 2318224 - RNA, 19 nt, Artificial Sequence
  Description of Artificial Sequence: Synthetic oligonucleotide
  Sense strand starting at position 3524 of SEQ ID NO: 1885124
accuguaacugauuaugau

SEQ ID NO: 2318225 - RNA, 19 nt, Artificial Sequence
  Description of Artificial Sequence: Synthetic oligonucleotide
  Antisense strand to SEQ ID NO: 2318224
aucauaaucaguuacaggu

SEQ ID NO: 2318226 - RNA, 19 nt, Artificial Sequence
  Description of Artificial Sequence: Synthetic oligonucleotide
  Sense strand starting at position 3525 of SEQ ID NO: 1885124
ccuguaacugauuaugauc

SEQ ID NO: 2318227 - RNA, 19 nt, Artificial Sequence
  Description of Artificial Sequence: Synthetic oligonucleotide
  Antisense strand to SEQ ID NO: 2318226
gaucauaaucaguuacagg

SEQ ID NO: 2318228 - RNA, 19 nt, Artificial Sequence
  Description of Artificial Sequence: Synthetic oligonucleotide
  Sense strand starting at position 3556 of SEQ ID NO: 1885124
guaacugauuaugaucaag

SEQ ID NO: 2318229 - RNA, 19 nt, Artificial Sequence
  Description of Artificial Sequence: Synthetic oligonucleotide
  Antisense strand to SEQ ID NO: 2318228
cuugaucauaaucaguuac

SEQ ID NO: 2318230 - RNA, 19 nt, Artificial Sequence
  Description of Artificial Sequence: Synthetic oligonucleotide
  Sense strand starting at position 3598 of SEQ ID NO: 1885124
gccuguuaagcagugguuu

SEQ ID NO: 2318231 - RNA, 19 nt, Artificial Sequence
  Description of Artificial Sequence: Synthetic oligonucleotide
  Antisense strand to SEQ ID NO: 2318230
aaaccacugcuuaacaggc

SEQ ID NO: 2318232 - RNA, 19 nt, Artificial Sequence
  Description of Artificial Sequence: Synthetic oligonucleotide
  Sense strand starting at position 3617 of SEQ ID NO: 1885124
ugcgaaucauugccuuaug

SEQ ID NO: 2318233 - RNA, 19 nt, Artificial Sequence
  Description of Artificial Sequence: Synthetic oligonucleotide
  Antisense strand to SEQ ID NO: 2318232
cauaaggcaaugauucgca

SEQ ID NO: 2318234 - RNA, 19 nt, Artificial Sequence
  Description of Artificial Sequence: Synthetic oligonucleotide
  Sense strand starting at position 3635 of SEQ ID NO: 1885124
guagcaauguuacucuaug

SEQ ID NO: 2318235 - RNA, 19 nt, Artificial Sequence
  Description of Artificial Sequence: Synthetic oligonucleotide
  Antisense strand to SEQ ID NO: 2318234
cauagaguaacauugcuac

SEQ ID NO: 2318236 - RNA, 19 nt, Artificial Sequence
  Description of Artificial Sequence: Synthetic oligonucleotide
  Sense strand starting at position 3660 of SEQ ID NO: 1885124
auuccauagcccuggagau

SEQ ID NO: 2318237 - RNA, 19 nt, Artificial Sequence
  Description of Artificial Sequence: Synthetic oligonucleotide
  Antisense strand to SEQ ID NO: 2318236
aucuccagggcuauggaau

SEQ ID NO: 2318238 - RNA, 19 nt, Artificial Sequence
  Description of Artificial Sequence: Synthetic oligonucleotide
  Sense strand starting at position 3661 of SEQ ID NO: 1885124
uuccauagcccuggagaua

SEQ ID NO: 2318239 - RNA, 19 nt, Artificial Sequence
  Description of Artificial Sequence: Synthetic oligonucleotide
  Antisense strand to SEQ ID NO: 2318238
uaucuccagggcuauggaa

SEQ ID NO: 2318240 - RNA, 19 nt, Artificial Sequence
  Description of Artificial Sequence: Synthetic oligonucleotide
  Sense strand starting at position 3779 of SEQ ID NO: 1885124
uguccagcuguaugaggaa

SEQ ID NO: 2318241 - RNA, 19 nt, Artificial Sequence
  Description of Artificial Sequence: Synthetic oligonucleotide
  Antisense strand to SEQ ID NO: 2318240
uuccucauacagcuggaca

SEQ ID NO: 2318242 - RNA, 19 nt, Artificial Sequence
  Description of Artificial Sequence: Synthetic oligonucleotide
  Sense strand starting at position 288 of SEQ ID NO: 1885127
ugugguaggcacuauaacu

SEQ ID NO: 2318243 - RNA, 19 nt, Artificial Sequence
  Description of Artificial Sequence: Synthetic oligonucleotide
  Antisense strand to SEQ ID NO: 2318242
aguuauagugccuaccaca

SEQ ID NO: 2318244 - RNA, 19 nt, Artificial Sequence
  Description of Artificial Sequence: Synthetic oligonucleotide
  Sense strand starting at position 296 of SEQ ID NO: 1885127
gcacuauaacugggaucuu

SEQ ID NO: 2318245 - RNA, 19 nt, Artificial Sequence
  Description of Artificial Sequence: Synthetic oligonucleotide
  Antisense strand to SEQ ID NO: 2318244
aagaucccaguuauagugc

SEQ ID NO: 2318246 - RNA, 19 nt, Artificial Sequence
  Description of Artificial Sequence: Synthetic oligonucleotide
  Sense strand starting at position 307 of SEQ ID NO: 1885127
gggaucuuaucuuccucau

SEQ ID NO: 2318247 - RNA, 19 nt, Artificial Sequence
  Description of Artificial Sequence: Synthetic oligonucleotide
  Antisense strand to SEQ ID NO: 2318246
augaggaagauaagauccc

SEQ ID NO: 2318248 - RNA, 19 nt, Artificial Sequence
  Description of Artificial Sequence: Synthetic oligonucleotide
  Sense strand starting at position 318 of SEQ ID NO: 1885127
uuccucauccacugugaca

SEQ ID NO: 2318249 - RNA, 19 nt, Artificial Sequence
  Description of Artificial Sequence: Synthetic oligonucleotide
  Antisense strand to SEQ ID NO: 2318248
ugucacaguggaugaggaa

SEQ ID NO: 2318250 - RNA, 19 nt, Artificial Sequence
  Description of Artificial Sequence: Synthetic oligonucleotide
  Sense strand starting at position 362 of SEQ ID NO: 1885127
aucuguaugguccacagua

SEQ ID NO: 2318251 - RNA, 19 nt, Artificial Sequence
  Description of Artificial Sequence: Synthetic oligonucleotide
  Antisense strand to SEQ ID NO: 2318250
uacuguggaccauacagau

SEQ ID NO: 2318252 - RNA, 19 nt, Artificial Sequence
  Description of Artificial Sequence: Synthetic oligonucleotide
  Sense strand starting at position 649 of SEQ ID NO: 1885127
uaguaucugccgugggaga

SEQ ID NO: 2318253 - RNA, 19 nt, Artificial Sequence
  Description of Artificial Sequence: Synthetic oligonucleotide
  Antisense strand to SEQ ID NO: 2318252
ucucccacggcagauacua

SEQ ID NO: 2318254 - RNA, 19 nt, Artificial Sequence
  Description of Artificial Sequence: Synthetic oligonucleotide
  Sense strand starting at position 976 of SEQ ID NO: 1885127
gggaguacucccugcagaa

SEQ ID NO: 2318255 - RNA, 19 nt, Artificial Sequence
  Description of Artificial Sequence: Synthetic oligonucleotide
  Antisense strand to SEQ ID NO: 2318254
uucugcagggaguacuccc

SEQ ID NO: 2318256 - RNA, 19 nt, Artificial Sequence
  Description of Artificial Sequence: Synthetic oligonucleotide
  Sense strand starting at position 978 of SEQ ID NO: 1885127
gaguacucccugcagaaag

SEQ ID NO: 2318257 - RNA, 19 nt, Artificial Sequence
  Description of Artificial Sequence: Synthetic oligonucleotide
  Antisense strand to SEQ ID NO: 2318256
cuuucugcagggaguacuc

SEQ ID NO: 2318258 - RNA, 19 nt, Artificial Sequence
  Description of Artificial Sequence: Synthetic oligonucleotide
  Sense strand starting at position 1033 of SEQ ID NO: 1885127
gaggcagcauucucagaaa

SEQ ID NO: 2318259 - RNA, 19 nt, Artificial Sequence
  Description of Artificial Sequence: Synthetic oligonucleotide
  Antisense strand to SEQ ID NO: 2318258
uuucugagaaugcugccuc

SEQ ID NO: 2318260 - RNA, 19 nt, Artificial Sequence
  Description of Artificial Sequence: Synthetic oligonucleotide
  Sense strand starting at position 1259 of SEQ ID NO: 1885127
aaagguccugagugugaaa

SEQ ID NO: 2318261 - RNA, 19 nt, Artificial Sequence
  Description of Artificial Sequence: Synthetic oligonucleotide
  Antisense strand to SEQ ID NO: 2318260
uuucacacucaggaccuuu

SEQ ID NO: 2318262 - RNA, 19 nt, Artificial Sequence
  Description of Artificial Sequence: Synthetic oligonucleotide
  Sense strand starting at position 1312 of SEQ ID NO: 1885127
uguuacuuccuguacccau

SEQ ID NO: 2318263 - RNA, 19 nt, Artificial Sequence
  Description of Artificial Sequence: Synthetic oligonucleotide
  Antisense strand to SEQ ID NO: 2318262
auggguacaggaaguaaca

SEQ ID NO: 2318264 - RNA, 19 nt, Artificial Sequence
  Description of Artificial Sequence: Synthetic oligonucleotide
  Sense strand starting at position 2027 of SEQ ID NO: 1885127
uuuagcaguccgugaggaa

SEQ ID NO: 2318265 - RNA, 19 nt, Artificial Sequence
  Description of Artificial Sequence: Synthetic oligonucleotide
  Antisense strand to SEQ ID NO: 2318264
uuccucacggacugcuaaa

SEQ ID NO: 2318266 - RNA, 19 nt, Artificial Sequence
  Description of Artificial Sequence: Synthetic oligonucleotide
  Sense strand starting at position 2042 of SEQ ID NO: 1885127
ggaagagcugugugggagu

SEQ ID NO: 2318267 - RNA, 19 nt, Artificial Sequence
  Description of Artificial Sequence: Synthetic oligonucleotide
  Antisense strand to SEQ ID NO: 2318266
acucccacacagcucuucc

SEQ ID NO: 2318268 - RNA, 19 nt, Artificial Sequence
  Description of Artificial Sequence: Synthetic oligonucleotide
  Sense strand starting at position 2072 of SEQ ID NO: 1885127
ggaucugcccgagaguaag

SEQ ID NO: 2318269 - RNA, 19 nt, Artificial Sequence
  Description of Artificial Sequence: Synthetic oligonucleotide
  Antisense strand to SEQ ID NO: 2318268
cuuacucucgggcagaucc

SEQ ID NO: 2318270 - RNA, 19 nt, Artificial Sequence
  Description of Artificial Sequence: Synthetic oligonucleotide
  Sense strand starting at position 2306 of SEQ ID NO: 1885127
ccuaaugccacgugaaaug

SEQ ID NO: 2318271 - RNA, 19 nt, Artificial Sequence
  Description of Artificial Sequence: Synthetic oligonucleotide
  Antisense strand to SEQ ID NO: 2318270
cauuucacguggcauuagg

SEQ ID NO: 2318272 - RNA, 19 nt, Artificial Sequence
  Description of Artificial Sequence: Synthetic oligonucleotide
  Sense strand starting at position 2344 of SEQ ID NO: 1885127
ggcgucugaucgccagaau

SEQ ID NO: 2318273 - RNA, 19 nt, Artificial Sequence
  Description of Artificial Sequence: Synthetic oligonucleotide
  Antisense strand to SEQ ID NO: 2318272
auucuggcgaucagacgcc

SEQ ID NO: 2318274 - RNA, 19 nt, Artificial Sequence
  Description of Artificial Sequence: Synthetic oligonucleotide
  Sense strand starting at position 2345 of SEQ ID NO: 1885127
gcgucugaucgccagaaug

SEQ ID NO: 2318275 - RNA, 19 nt, Artificial Sequence
  Description of Artificial Sequence: Synthetic oligonucleotide
  Antisense strand to SEQ ID NO: 2318274
cauucuggcgaucagacgc

SEQ ID NO: 2318276 - RNA, 19 nt, Artificial Sequence
  Description of Artificial Sequence: Synthetic oligonucleotide
  Sense strand starting at position 2347 of SEQ ID NO: 1885127
gucugaucgccagaaugag

SEQ ID NO: 2318277 - RNA, 19 nt, Artificial Sequence
  Description of Artificial Sequence: Synthetic oligonucleotide
  Antisense strand to SEQ ID NO: 2318276
cucauucuggcgaucagac

SEQ ID NO: 2318278 - RNA, 19 nt, Artificial Sequence
  Description of Artificial Sequence: Synthetic oligonucleotide
  Sense strand starting at position 2476 of SEQ ID NO: 1885127
cagaguuugugacuaggaa

SEQ ID NO: 2318279 - RNA, 19 nt, Artificial Sequence
  Description of Artificial Sequence: Synthetic oligonucleotide
  Antisense strand to SEQ ID NO: 2318278
uuccuagucacaaacucug

SEQ ID NO: 2318280 - RNA, 19 nt, Artificial Sequence
  Description of Artificial Sequence: Synthetic oligonucleotide
  Sense strand starting at position 2480 of SEQ ID NO: 1885127
guuugugacuaggaacuaa

SEQ ID NO: 2318281 - RNA, 19 nt, Artificial Sequence
  Description of Artificial Sequence: Synthetic oligonucleotide
  Antisense strand to SEQ ID NO: 2318280
uuaguuccuagucacaaac

SEQ ID NO: 2318282 - RNA, 19 nt, Artificial Sequence
  Description of Artificial Sequence: Synthetic oligonucleotide
  Sense strand starting at position 2913 of SEQ ID NO: 1885127
ucucucugcuuguugucaa

SEQ ID NO: 2318283 - RNA, 19 nt, Artificial Sequence
  Description of Artificial Sequence: Synthetic oligonucleotide
  Antisense strand to SEQ ID NO: 2318282
uugacaacaagcagagaga

SEQ ID NO: 2318284 - RNA, 19 nt, Artificial Sequence
  Description of Artificial Sequence: Synthetic oligonucleotide
  Sense strand starting at position 2920 of SEQ ID NO: 1885127
gcuuguugucaagacaaac

SEQ ID NO: 2318285 - RNA, 19 nt, Artificial Sequence
  Description of Artificial Sequence: Synthetic oligonucleotide
  Antisense strand to SEQ ID NO: 2318284
guuugucuugacaacaagc

SEQ ID NO: 2318286 - RNA, 19 nt, Artificial Sequence
  Description of Artificial Sequence: Synthetic oligonucleotide
  Sense strand starting at position 2955 of SEQ ID NO: 1885127
cugaauaucuagcuagcau

SEQ ID NO: 2318287 - RNA, 19 nt, Artificial Sequence
  Description of Artificial Sequence: Synthetic oligonucleotide
  Antisense strand to SEQ ID NO: 2318286
augcuagcuagauauucag

SEQ ID NO: 2318288 - RNA, 19 nt, Artificial Sequence
  Description of Artificial Sequence: Synthetic oligonucleotide
  Sense strand starting at position 2962 of SEQ ID NO: 1885127
ucuagcuagcauuauuaga

SEQ ID NO: 2318289 - RNA, 19 nt, Artificial Sequence
  Description of Artificial Sequence: Synthetic oligonucleotide
  Antisense strand to SEQ ID NO: 2318288
ucuaauaaugcuagcuaga

SEQ ID NO: 2318290 - RNA, 19 nt, Artificial Sequence
  Description of Artificial Sequence: Synthetic oligonucleotide
  Sense strand starting at position 3028 of SEQ ID NO: 1885127
uggaaagcaccgugguuua

SEQ ID NO: 2318291 - RNA, 19 nt, Artificial Sequence
  Description of Artificial Sequence: Synthetic oligonucleotide
  Antisense strand to SEQ ID NO: 2318290
uaaaccacggugcuuucca

SEQ ID NO: 2318292 - RNA, 19 nt, Artificial Sequence
  Description of Artificial Sequence: Synthetic oligonucleotide
  Sense strand starting at position 3039 of SEQ ID NO: 1885127
gugguuuagaagggucgga

SEQ ID NO: 2318293 - RNA, 19 nt, Artificial Sequence
  Description of Artificial Sequence: Synthetic oligonucleotide
  Antisense strand to SEQ ID NO: 2318292
uccgacccuucuaaaccac

SEQ ID NO: 2318294 - RNA, 19 nt, Artificial Sequence
  Description of Artificial Sequence: Synthetic oligonucleotide
  Sense strand starting at position 3111 of SEQ ID NO: 1885127
ucaguuuccucccugguaa

SEQ ID NO: 2318295 - RNA, 19 nt, Artificial Sequence
  Description of Artificial Sequence: Synthetic oligonucleotide
  Antisense strand to SEQ ID NO: 2318294
uuaccagggaggaaacuga

SEQ ID NO: 2318296 - RNA, 19 nt, Artificial Sequence
  Description of Artificial Sequence: Synthetic oligonucleotide
  Sense strand starting at position 3145 of SEQ ID NO: 1885127
cuguguggugaggauucaa

SEQ ID NO: 2318297 - RNA, 19 nt, Artificial Sequence
  Description of Artificial Sequence: Synthetic oligonucleotide
  Antisense strand to SEQ ID NO: 2318296
uugaauccucaccacacag

SEQ ID NO: 2318298 - RNA, 19 nt, Artificial Sequence
  Description of Artificial Sequence: Synthetic oligonucleotide
  Sense strand starting at position 3177 of SEQ ID NO: 1885127
gugaacaugcgcugugaca

SEQ ID NO: 2318299 - RNA, 19 nt, Artificial Sequence
  Description of Artificial Sequence: Synthetic oligonucleotide
  Antisense strand to SEQ ID NO: 2318298
ugucacagcgcauguucac

SEQ ID NO: 2318300 - RNA, 19 nt, Artificial Sequence
  Description of Artificial Sequence: Synthetic oligonucleotide
  Sense strand starting at position 3179 of SEQ ID NO: 1885127
gaacaugcgcugugacaga

SEQ ID NO: 2318301 - RNA, 19 nt, Artificial Sequence
  Description of Artificial Sequence: Synthetic oligonucleotide
  Antisense strand to SEQ ID NO: 2318300
ucugucacagcgcauguuc

SEQ ID NO: 2318302 - RNA, 19 nt, Artificial Sequence
  Description of Artificial Sequence: Synthetic oligonucleotide
  Sense strand starting at position 3260 of SEQ ID NO: 1885127
ucagacaucugggagcaga

SEQ ID NO: 2318303 - RNA, 19 nt, Artificial Sequence
  Description of Artificial Sequence: Synthetic oligonucleotide
  Antisense strand to SEQ ID NO: 2318302
ucugcucccagaugucuga

SEQ ID NO: 2318304 - RNA, 19 nt, Artificial Sequence
  Description of Artificial Sequence: Synthetic oligonucleotide
  Sense strand starting at position 3373 of SEQ ID NO: 1885127
ggcuauagaucuuugagac

SEQ ID NO: 2318305 - RNA, 19 nt, Artificial Sequence
  Description of Artificial Sequence: Synthetic oligonucleotide
  Antisense strand to SEQ ID NO: 2318304
gucucaaagaucuauagcc

SEQ ID NO: 2318306 - RNA, 19 nt, Artificial Sequence
  Description of Artificial Sequence: Synthetic oligonucleotide
  Sense strand starting at position 3374 of SEQ ID NO: 1885127
gcuauagaucuuugagacu

SEQ ID NO: 2318307 - RNA, 19 nt, Artificial Sequence
  Description of Artificial Sequence: Synthetic oligonucleotide
  Antisense strand to SEQ ID NO: 2318306
agucucaaagaucuauagc

SEQ ID NO: 2318308 - RNA, 19 nt, Artificial Sequence
  Description of Artificial Sequence: Synthetic oligonucleotide
  Sense strand starting at position 3377 of SEQ ID NO: 1885127
auagaucuuugagacugga

SEQ ID NO: 2318309 - RNA, 19 nt, Artificial Sequence
  Description of Artificial Sequence: Synthetic oligonucleotide
  Antisense strand to SEQ ID NO: 2318308
uccagucucaaagaucuau

SEQ ID NO: 2318310 - RNA, 19 nt, Artificial Sequence
  Description of Artificial Sequence: Synthetic oligonucleotide
  Sense strand starting at position 3465 of SEQ ID NO: 1885127
ggaguagguucccaaaccu

SEQ ID NO: 2318311 - RNA, 19 nt, Artificial Sequence
  Description of Artificial Sequence: Synthetic oligonucleotide
  Antisense strand to SEQ ID NO: 2318310
agguuugggaaccuacucc

SEQ ID NO: 2318312 - RNA, 19 nt, Artificial Sequence
  Description of Artificial Sequence: Synthetic oligonucleotide
  Sense strand starting at position 3483 of SEQ ID NO: 1885127
ucagcaucagaauggguua

SEQ ID NO: 2318313 - RNA, 19 nt, Artificial Sequence
  Description of Artificial Sequence: Synthetic oligonucleotide
  Antisense strand to SEQ ID NO: 2318312
uaacccauucugaugcuga

SEQ ID NO: 2318314 - RNA, 19 nt, Artificial Sequence
  Description of Artificial Sequence: Synthetic oligonucleotide
  Sense strand starting at position 3486 of SEQ ID NO: 1885127
gcaucagaauggguuagaa

SEQ ID NO: 2318315 - RNA, 19 nt, Artificial Sequence
  Description of Artificial Sequence: Synthetic oligonucleotide
  Antisense strand to SEQ ID NO: 2318314
uucuaacccauucugaugc

SEQ ID NO: 2318316 - RNA, 19 nt, Artificial Sequence
  Description of Artificial Sequence: Synthetic oligonucleotide
  Sense strand starting at position 3605 of SEQ ID NO: 1885127
accucuccucagugauucu

SEQ ID NO: 2318317 - RNA, 19 nt, Artificial Sequence
  Description of Artificial Sequence: Synthetic oligonucleotide
  Antisense strand to SEQ ID NO: 2318316
agaaucacugaggagaggu

SEQ ID NO: 2318318 - RNA, 19 nt, Artificial Sequence
  Description of Artificial Sequence: Synthetic oligonucleotide
  Sense strand starting at position 3608 of SEQ ID NO: 1885127
ucuccucagugauucugau

SEQ ID NO: 2318319 - RNA, 19 nt, Artificial Sequence
  Description of Artificial Sequence: Synthetic oligonucleotide
  Antisense strand to SEQ ID NO: 2318318
aucagaaucacugaggaga

SEQ ID NO: 2318320 - RNA, 19 nt, Artificial Sequence
  Description of Artificial Sequence: Synthetic oligonucleotide
  Sense strand starting at position 3882 of SEQ ID NO: 1885127
caaggugagccaugaucaa

SEQ ID NO: 2318321 - RNA, 19 nt, Artificial Sequence
  Description of Artificial Sequence: Synthetic oligonucleotide
  Antisense strand to SEQ ID NO: 2318320
uugaucauggcucaccuug

SEQ ID NO: 2318322 - RNA, 19 nt, Artificial Sequence
  Description of Artificial Sequence: Synthetic oligonucleotide
  Sense strand starting at position 26 of SEQ ID NO: 1885128
gaaccuacuuguccaguga

SEQ ID NO: 2318323 - RNA, 19 nt, Artificial Sequence
  Description of Artificial Sequence: Synthetic oligonucleotide
  Antisense strand to SEQ ID NO: 2318322
ucacuggacaaguagguuc

SEQ ID NO: 2318324 - RNA, 19 nt, Artificial Sequence
  Description of Artificial Sequence: Synthetic oligonucleotide
  Sense strand starting at position 30 of SEQ ID NO: 1885128
cuacuuguccagugaugac

SEQ ID NO: 2318325 - RNA, 19 nt, Artificial Sequence
  Description of Artificial Sequence: Synthetic oligonucleotide
  Antisense strand to SEQ ID NO: 2318324
gucaucacuggacaaguag

SEQ ID NO: 2318326 - RNA, 19 nt, Artificial Sequence
  Description of Artificial Sequence: Synthetic oligonucleotide
  Sense strand starting at position 39 of SEQ ID NO: 1885128
cagugaugacaauguugau

SEQ ID NO: 2318327 - RNA, 19 nt, Artificial Sequence
  Description of Artificial Sequence: Synthetic oligonucleotide
  Antisense strand to SEQ ID NO: 2318326
aucaacauugucaucacug

SEQ ID NO: 2318328 - RNA, 19 nt, Artificial Sequence
  Description of Artificial Sequence: Synthetic oligonucleotide
  Sense strand starting at position 1987 of SEQ ID NO: 1885128
gagcacugguauucugauu

SEQ ID NO: 2318329 - RNA, 19 nt, Artificial Sequence
  Description of Artificial Sequence: Synthetic oligonucleotide
  Antisense strand to SEQ ID NO: 2318328
aaucagaauaccagugcuc

SEQ ID NO: 2318330 - RNA, 19 nt, Artificial Sequence
  Description of Artificial Sequence: Synthetic oligonucleotide
  Sense strand starting at position 1992 of SEQ ID NO: 1885128
cugguauucugauuccaug

SEQ ID NO: 2318331 - RNA, 19 nt, Artificial Sequence
  Description of Artificial Sequence: Synthetic oligonucleotide
  Antisense strand to SEQ ID NO: 2318330
cauggaaucagaauaccag

SEQ ID NO: 2318332 - RNA, 19 nt, Artificial Sequence
  Description of Artificial Sequence: Synthetic oligonucleotide
  Sense strand starting at position 2000 of SEQ ID NO: 1885128
cugauuccauguucucuua

SEQ ID NO: 2318333 - RNA, 19 nt, Artificial Sequence
  Description of Artificial Sequence: Synthetic oligonucleotide
  Antisense strand to SEQ ID NO: 2318332
uaagagaacauggaaucag

SEQ ID NO: 2318334 - RNA, 19 nt, Artificial Sequence
  Description of Artificial Sequence: Synthetic oligonucleotide
  Sense strand starting at position 2013 of SEQ ID NO: 1885128
cucuuaucuccugggaaau

SEQ ID NO: 2318335 - RNA, 19 nt, Artificial Sequence
  Description of Artificial Sequence: Synthetic oligonucleotide
  Antisense strand to SEQ ID NO: 2318334
auuucccaggagauaagag

SEQ ID NO: 2318336 - RNA, 19 nt, Artificial Sequence
  Description of Artificial Sequence: Synthetic oligonucleotide
  Sense strand starting at position 2014 of SEQ ID NO: 1885128
ucuuaucuccugggaaauu

SEQ ID NO: 2318337 - RNA, 19 nt, Artificial Sequence
  Description of Artificial Sequence: Synthetic oligonucleotide
  Antisense strand to SEQ ID NO: 2318336
aauuucccaggagauaaga

SEQ ID NO: 2318338 - RNA, 19 nt, Artificial Sequence
  Description of Artificial Sequence: Synthetic oligonucleotide
  Sense strand starting at position 2064 of SEQ ID NO: 1885128
uucugugugcuuuccacuu

SEQ ID NO: 2318339 - RNA, 19 nt, Artificial Sequence
  Description of Artificial Sequence: Synthetic oligonucleotide
  Antisense strand to SEQ ID NO: 2318338
aaguggaaagcacacagaa

SEQ ID NO: 2318340 - RNA, 19 nt, Artificial Sequence
  Description of Artificial Sequence: Synthetic oligonucleotide
  Sense strand starting at position 2144 of SEQ ID NO: 1885128
ugugaaagcucaucucucu

SEQ ID NO: 2318341 - RNA, 19 nt, Artificial Sequence
  Description of Artificial Sequence: Synthetic oligonucleotide
  Antisense strand to SEQ ID NO: 2318340
agagagaugagcuuucaca

SEQ ID NO: 2318342 - RNA, 19 nt, Artificial Sequence
  Description of Artificial Sequence: Synthetic oligonucleotide
  Sense strand starting at position 2164 of SEQ ID NO: 1885128
accuuaaagcgguacagaa

SEQ ID NO: 2318343 - RNA, 19 nt, Artificial Sequence
  Description of Artificial Sequence: Synthetic oligonucleotide
  Antisense strand to SEQ ID NO: 2318342
uucuguaccgcuuuaaggu

SEQ ID NO: 2318344 - RNA, 19 nt, Artificial Sequence
  Description of Artificial Sequence: Synthetic oligonucleotide
  Sense strand starting at position 2166 of SEQ ID NO: 1885128
cuuaaagcgguacagaauu

SEQ ID NO: 2318345 - RNA, 19 nt, Artificial Sequence
  Description of Artificial Sequence: Synthetic oligonucleotide
  Antisense strand to SEQ ID NO: 2318344
aauucuguaccgcuuuaag

SEQ ID NO: 2318346 - RNA, 19 nt, Artificial Sequence
  Description of Artificial Sequence: Synthetic oligonucleotide
  Sense strand starting at position 2426 of SEQ ID NO: 1885128
ccaggacuuguagaugguu

SEQ ID NO: 2318347 - RNA, 19 nt, Artificial Sequence
  Description of Artificial Sequence: Synthetic oligonucleotide
  Antisense strand to SEQ ID NO: 2318346
aaccaucuacaaguccugg

SEQ ID NO: 2318348 - RNA, 19 nt, Artificial Sequence
  Description of Artificial Sequence: Synthetic oligonucleotide
  Sense strand starting at position 2600 of SEQ ID NO: 1885128
auguuugagaacuaagugu

SEQ ID NO: 2318349 - RNA, 19 nt, Artificial Sequence
  Description of Artificial Sequence: Synthetic oligonucleotide
  Antisense strand to SEQ ID NO: 2318348
acacuuaguucucaaacau

SEQ ID NO: 2318350 - RNA, 19 nt, Artificial Sequence
  Description of Artificial Sequence: Synthetic oligonucleotide
  Sense strand starting at position 2679 of SEQ ID NO: 1885128
gugcaagaggcugauuaca

SEQ ID NO: 2318351 - RNA, 19 nt, Artificial Sequence
  Description of Artificial Sequence: Synthetic oligonucleotide
  Antisense strand to SEQ ID NO: 2318350
uguaaucagccucuugcac

SEQ ID NO: 2318352 - RNA, 19 nt, Artificial Sequence
  Description of Artificial Sequence: Synthetic oligonucleotide
  Sense strand starting at position 2681 of SEQ ID NO: 1885128
gcaagaggcugauuacaua

SEQ ID NO: 2318353 - RNA, 19 nt, Artificial Sequence
  Description of Artificial Sequence: Synthetic oligonucleotide
  Antisense strand to SEQ ID NO: 2318352
uauguaaucagccucuugc

SEQ ID NO: 2318354 - RNA, 19 nt, Artificial Sequence
  Description of Artificial Sequence: Synthetic oligonucleotide
  Sense strand starting at position 2868 of SEQ ID NO: 1885128
uggacuaguugugccuuaa

SEQ ID NO: 2318355 - RNA, 19 nt, Artificial Sequence
  Description of Artificial Sequence: Synthetic oligonucleotide
  Antisense strand to SEQ ID NO: 2318354
uuaaggcacaacuagucca

SEQ ID NO: 2318356 - RNA, 19 nt, Artificial Sequence
  Description of Artificial Sequence: Synthetic oligonucleotide
  Sense strand starting at position 2872 of SEQ ID NO: 1885128
cuaguugugccuuaacaau

SEQ ID NO: 2318357 - RNA, 19 nt, Artificial Sequence
  Description of Artificial Sequence: Synthetic oligonucleotide
  Antisense strand to SEQ ID NO: 2318356
auuguuaaggcacaacuag

SEQ ID NO: 2318358 - RNA, 19 nt, Artificial Sequence
  Description of Artificial Sequence: Synthetic oligonucleotide
  Sense strand starting at position 2945 of SEQ ID NO: 1885128
auagaauguugccuuaacu

SEQ ID NO: 2318359 - RNA, 19 nt, Artificial Sequence
  Description of Artificial Sequence: Synthetic oligonucleotide
  Antisense strand to SEQ ID NO: 2318358
aguuaaggcaacauucuau

SEQ ID NO: 2318360 - RNA, 19 nt, Artificial Sequence
  Description of Artificial Sequence: Synthetic oligonucleotide
  Sense strand starting at position 2994 of SEQ ID NO: 1885128
ugcauaacaguuuaugaaa

SEQ ID NO: 2318361 - RNA, 19 nt, Artificial Sequence
  Description of Artificial Sequence: Synthetic oligonucleotide
  Antisense strand to SEQ ID NO: 2318360
uuucauaaacuguuaugca

SEQ ID NO: 2318362 - RNA, 19 nt, Artificial Sequence
  Description of Artificial Sequence: Synthetic oligonucleotide
  Sense strand starting at position 3043 of SEQ ID NO: 1885128
aguuaaauacucugccuga

SEQ ID NO: 2318363 - RNA, 19 nt, Artificial Sequence
  Description of Artificial Sequence: Synthetic oligonucleotide
  Antisense strand to SEQ ID NO: 2318362
ucaggcagaguauuuaacu

SEQ ID NO: 2318364 - RNA, 19 nt, Artificial Sequence
  Description of Artificial Sequence: Synthetic oligonucleotide
  Sense strand starting at position 3044 of SEQ ID NO: 1885128
guuaaauacucugccugaa

SEQ ID NO: 2318365 - RNA, 19 nt, Artificial Sequence
  Description of Artificial Sequence: Synthetic oligonucleotide
  Antisense strand to SEQ ID NO: 2318364
uucaggcagaguauuuaac

SEQ ID NO: 2318366 - RNA, 19 nt, Artificial Sequence
  Description of Artificial Sequence: Synthetic oligonucleotide
  Sense strand starting at position 3066 of SEQ ID NO: 1885128
ugccaauaaguugaauaua

SEQ ID NO: 2318367 - RNA, 19 nt, Artificial Sequence
  Description of Artificial Sequence: Synthetic oligonucleotide
  Antisense strand to SEQ ID NO: 2318366
uauauucaacuuauuggca

SEQ ID NO: 2318368 - RNA, 19 nt, Artificial Sequence
  Description of Artificial Sequence: Synthetic oligonucleotide
  Sense strand starting at position 3107 of SEQ ID NO: 1885128
guauauggguccucucaca

SEQ ID NO: 2318369 - RNA, 19 nt, Artificial Sequence
  Description of Artificial Sequence: Synthetic oligonucleotide
  Antisense strand to SEQ ID NO: 2318368
ugugagaggacccauauac

SEQ ID NO: 2318370 - RNA, 19 nt, Artificial Sequence
  Description of Artificial Sequence: Synthetic oligonucleotide
  Sense strand starting at position 3120 of SEQ ID NO: 1885128
cucacagagcuuugcacua

SEQ ID NO: 2318371 - RNA, 19 nt, Artificial Sequence
  Description of Artificial Sequence: Synthetic oligonucleotide
  Antisense strand to SEQ ID NO: 2318370
uagugcaaagcucugugag

SEQ ID NO: 2318372 - RNA, 19 nt, Artificial Sequence
  Description of Artificial Sequence: Synthetic oligonucleotide
  Sense strand starting at position 3125 of SEQ ID NO: 1885128
agagcuuugcacuauuaag

SEQ ID NO: 2318373 - RNA, 19 nt, Artificial Sequence
  Description of Artificial Sequence: Synthetic oligonucleotide
  Antisense strand to SEQ ID NO: 2318372
cuuaauagugcaaagcucu

SEQ ID NO: 2318374 - RNA, 19 nt, Artificial Sequence
  Description of Artificial Sequence: Synthetic oligonucleotide
  Sense strand starting at position 3280 of SEQ ID NO: 1885128
ugagguaguaaacgcauua

SEQ ID NO: 2318375 - RNA, 19 nt, Artificial Sequence
  Description of Artificial Sequence: Synthetic oligonucleotide
  Antisense strand to SEQ ID NO: 2318374
uaaugcguuuacuaccuca

SEQ ID NO: 2318376 - RNA, 19 nt, Artificial Sequence
  Description of Artificial Sequence: Synthetic oligonucleotide
  Sense strand starting at position 3402 of SEQ ID NO: 1885128
agagaaugcucugcaguca

SEQ ID NO: 2318377 - RNA, 19 nt, Artificial Sequence
  Description of Artificial Sequence: Synthetic oligonucleotide
  Antisense strand to SEQ ID NO: 2318376
ugacugcagagcauucucu

SEQ ID NO: 2318378 - RNA, 19 nt, Artificial Sequence
  Description of Artificial Sequence: Synthetic oligonucleotide
  Sense strand starting at position 3434 of SEQ ID NO: 1885128
gguauauauuauccuuucu

SEQ ID NO: 2318379 - RNA, 19 nt, Artificial Sequence
  Description of Artificial Sequence: Synthetic oligonucleotide
  Antisense strand to SEQ ID NO: 2318378
agaaaggauaauauauacc

SEQ ID NO: 2318380 - RNA, 19 nt, Artificial Sequence
  Description of Artificial Sequence: Synthetic oligonucleotide
  Sense strand starting at position 3487 of SEQ ID NO: 1885128
cuuuguuacugguuugacu

SEQ ID NO: 2318381 - RNA, 19 nt, Artificial Sequence
  Description of Artificial Sequence: Synthetic oligonucleotide
  Antisense strand to SEQ ID NO: 2318380
agucaaaccaguaacaaag

SEQ ID NO: 2318382 - RNA, 19 nt, Artificial Sequence
  Description of Artificial Sequence: Synthetic oligonucleotide
  Sense strand starting at position 3498 of SEQ ID NO: 1885128
guuugacugucucuuggga

SEQ ID NO: 2318383 - RNA, 19 nt, Artificial Sequence
  Description of Artificial Sequence: Synthetic oligonucleotide
  Antisense strand to SEQ ID NO: 2318382
ucccaagagacagucaaac

SEQ ID NO: 2318384 - RNA, 19 nt, Artificial Sequence
  Description of Artificial Sequence: Synthetic oligonucleotide
  Sense strand starting at position 3530 of SEQ ID NO: 1885128
uaugguaaccugcaguaaa

SEQ ID NO: 2318385 - RNA, 19 nt, Artificial Sequence
  Description of Artificial Sequence: Synthetic oligonucleotide
  Antisense strand to SEQ ID NO: 2318384
uuuacugcagguuaccaua

SEQ ID NO: 2318386 - RNA, 19 nt, Artificial Sequence
  Description of Artificial Sequence: Synthetic oligonucleotide
  Sense strand starting at position 3533 of SEQ ID NO: 1885128
gguaaccugcaguaaaguu

SEQ ID NO: 2318387 - RNA, 19 nt, Artificial Sequence
  Description of Artificial Sequence: Synthetic oligonucleotide
  Antisense strand to SEQ ID NO: 2318386
aacuuuacugcagguuacc

SEQ ID NO: 2318388 - RNA, 19 nt, Artificial Sequence
  Description of Artificial Sequence: Synthetic oligonucleotide
  Sense strand starting at position 3559 of SEQ ID NO: 1885128
guucucucugagugacaca

SEQ ID NO: 2318389 - RNA, 19 nt, Artificial Sequence
  Description of Artificial Sequence: Synthetic oligonucleotide
  Antisense strand to SEQ ID NO: 2318388
ugugucacucagagagaac

SEQ ID NO: 2318390 - RNA, 19 nt, Artificial Sequence
  Description of Artificial Sequence: Synthetic oligonucleotide
  Sense strand starting at position 3596 of SEQ ID NO: 1885128
cugucuguccauuauuauc

SEQ ID NO: 2318391 - RNA, 19 nt, Artificial Sequence
  Description of Artificial Sequence: Synthetic oligonucleotide
  Antisense strand to SEQ ID NO: 2318390
gauaauaauggacagacag

SEQ ID NO: 2318392 - RNA, 19 nt, Artificial Sequence
  Description of Artificial Sequence: Synthetic oligonucleotide
  Sense strand starting at position 3614 of SEQ ID NO: 1885128
ccacaaugugagugccuaa

SEQ ID NO: 2318393 - RNA, 19 nt, Artificial Sequence
  Description of Artificial Sequence: Synthetic oligonucleotide
  Antisense strand to SEQ ID NO: 2318392
uuaggcacucacauugugg

SEQ ID NO: 2318394 - RNA, 19 nt, Artificial Sequence
  Description of Artificial Sequence: Synthetic oligonucleotide
  Sense strand starting at position 3649 of SEQ ID NO: 1885128
gggacuuaugacugaacgu

SEQ ID NO: 2318395 - RNA, 19 nt, Artificial Sequence
  Description of Artificial Sequence: Synthetic oligonucleotide
  Antisense strand to SEQ ID NO: 2318394
acguucagucauaaguccc

SEQ ID NO: 2318396 - RNA, 19 nt, Artificial Sequence
  Description of Artificial Sequence: Synthetic oligonucleotide
  Sense strand starting at position 3698 of SEQ ID NO: 1885128
uucugauaauguucuaaag

SEQ ID NO: 2318397 - RNA, 19 nt, Artificial Sequence
  Description of Artificial Sequence: Synthetic oligonucleotide
  Antisense strand to SEQ ID NO: 2318396
cuuuagaacauuaucagaa

SEQ ID NO: 2318398 - RNA, 19 nt, Artificial Sequence
  Description of Artificial Sequence: Synthetic oligonucleotide
  Sense strand starting at position 3761 of SEQ ID NO: 1885128
gcaucaauucucugccaga

SEQ ID NO: 2318399 - RNA, 19 nt, Artificial Sequence
  Description of Artificial Sequence: Synthetic oligonucleotide
  Antisense strand to SEQ ID NO: 2318398
ucuggcagagaauugaugc

SEQ ID NO: 2318400 - RNA, 19 nt, Artificial Sequence
  Description of Artificial Sequence: Synthetic oligonucleotide
  Sense strand starting at position 3779 of SEQ ID NO: 1885128
accgaucaauuggauuuau

SEQ ID NO: 2318401 - RNA, 19 nt, Artificial Sequence
  Description of Artificial Sequence: Synthetic oligonucleotide
  Antisense strand to SEQ ID NO: 2318400
auaaauccaauugaucggu

SEQ ID NO: 2318402 - RNA, 19 nt, Artificial Sequence
  Description of Artificial Sequence: Synthetic oligonucleotide
  Sense strand starting at position 321 of SEQ ID NO: 1885129
ccuacuagcuuuguagagu

SEQ ID NO: 2318403 - RNA, 19 nt, Artificial Sequence
  Description of Artificial Sequence: Synthetic oligonucleotide
  Antisense strand to SEQ ID NO: 2318402
acucuacaaagcuaguagg

SEQ ID NO: 2318404 - RNA, 19 nt, Artificial Sequence
  Description of Artificial Sequence: Synthetic oligonucleotide
  Sense strand starting at position 324 of SEQ ID NO: 1885129
acuagcuuuguagaguaau

SEQ ID NO: 2318405 - RNA, 19 nt, Artificial Sequence
  Description of Artificial Sequence: Synthetic oligonucleotide
  Antisense strand to SEQ ID NO: 2318404
auuacucuacaaagcuagu

SEQ ID NO: 2318406 - RNA, 19 nt, Artificial Sequence
  Description of Artificial Sequence: Synthetic oligonucleotide
  Sense strand starting at position 327 of SEQ ID NO: 1885129
agcuuuguagaguaaucca

SEQ ID NO: 2318407 - RNA, 19 nt, Artificial Sequence
  Description of Artificial Sequence: Synthetic oligonucleotide
  Antisense strand to SEQ ID NO: 2318406
uggauuacucuacaaagcu

SEQ ID NO: 2318408 - RNA, 19 nt, Artificial Sequence
  Description of Artificial Sequence: Synthetic oligonucleotide
  Sense strand starting at position 368 of SEQ ID NO: 1885129
acauuagaguaagauuaga

SEQ ID NO: 2318409 - RNA, 19 nt, Artificial Sequence
  Description of Artificial Sequence: Synthetic oligonucleotide
  Antisense strand to SEQ ID NO: 2318408
ucuaaucuuacucuaaugu

SEQ ID NO: 2318410 - RNA, 19 nt, Artificial Sequence
  Description of Artificial Sequence: Synthetic oligonucleotide
  Sense strand starting at position 459 of SEQ ID NO: 1885129
acugccauuccggaaacau

SEQ ID NO: 2318411 - RNA, 19 nt, Artificial Sequence
  Description of Artificial Sequence: Synthetic oligonucleotide
  Antisense strand to SEQ ID NO: 2318410
auguuuccggaauggcagu

SEQ ID NO: 2318412 - RNA, 19 nt, Artificial Sequence
  Description of Artificial Sequence: Synthetic oligonucleotide
  Sense strand starting at position 484 of SEQ ID NO: 1885129
ccaaguaugcugcaaucau

SEQ ID NO: 2318413 - RNA, 19 nt, Artificial Sequence
  Description of Artificial Sequence: Synthetic oligonucleotide
  Antisense strand to SEQ ID NO: 2318412
augauugcagcauacuugg

SEQ ID NO: 2318414 - RNA, 19 nt, Artificial Sequence
  Description of Artificial Sequence: Synthetic oligonucleotide
  Sense strand starting at position 641 of SEQ ID NO: 1885129
guauaaugauaguuuccaa

SEQ ID NO: 2318415 - RNA, 19 nt, Artificial Sequence
  Description of Artificial Sequence: Synthetic oligonucleotide
  Antisense strand to SEQ ID NO: 2318414
uuggaaacuaucauuauac

SEQ ID NO: 2318416 - RNA, 19 nt, Artificial Sequence
  Description of Artificial Sequence: Synthetic oligonucleotide
  Sense strand starting at position 685 of SEQ ID NO: 1885129
gcagaaauccucuagucac

SEQ ID NO: 2318417 - RNA, 19 nt, Artificial Sequence
  Description of Artificial Sequence: Synthetic oligonucleotide
  Antisense strand to SEQ ID NO: 2318416
gugacuagaggauuucugc

SEQ ID NO: 2318418 - RNA, 19 nt, Artificial Sequence
  Description of Artificial Sequence: Synthetic oligonucleotide
  Sense strand starting at position 732 of SEQ ID NO: 1885129
aguuaaugaugucaaugga

SEQ ID NO: 2318419 - RNA, 19 nt, Artificial Sequence
  Description of Artificial Sequence: Synthetic oligonucleotide
  Antisense strand to SEQ ID NO: 2318418
uccauugacaucauuaacu

SEQ ID NO: 2318420 - RNA, 19 nt, Artificial Sequence
  Description of Artificial Sequence: Synthetic oligonucleotide
  Sense strand starting at position 765 of SEQ ID NO: 1885129
ggguucacuggugauaagu

SEQ ID NO: 2318421 - RNA, 19 nt, Artificial Sequence
  Description of Artificial Sequence: Synthetic oligonucleotide
  Antisense strand to SEQ ID NO: 2318420
acuuaucaccagugaaccc

SEQ ID NO: 2318422 - RNA, 19 nt, Artificial Sequence
  Description of Artificial Sequence: Synthetic oligonucleotide
  Sense strand starting at position 783 of SEQ ID NO: 1885129
ucaugagacucugagcaaa

SEQ ID NO: 2318423 - RNA, 19 nt, Artificial Sequence
  Description of Artificial Sequence: Synthetic oligonucleotide
  Antisense strand to SEQ ID NO: 2318422
uuugcucagagucucauga

SEQ ID NO: 2318424 - RNA, 19 nt, Artificial Sequence
  Description of Artificial Sequence: Synthetic oligonucleotide
  Sense strand starting at position 808 of SEQ ID NO: 1885129
guaauaagguuagaauucu

SEQ ID NO: 2318425 - RNA, 19 nt, Artificial Sequence
  Description of Artificial Sequence: Synthetic oligonucleotide
  Antisense strand to SEQ ID NO: 2318424
agaauucuaaccuuauuac

SEQ ID NO: 2318426 - RNA, 19 nt, Artificial Sequence
  Description of Artificial Sequence: Synthetic oligonucleotide
  Sense strand starting at position 814 of SEQ ID NO: 1885129
agguuagaauucuuuagaa

SEQ ID NO: 2318427 - RNA, 19 nt, Artificial Sequence
  Description of Artificial Sequence: Synthetic oligonucleotide
  Antisense strand to SEQ ID NO: 2318426
uucuaaagaauucuaaccu

SEQ ID NO: 2318428 - RNA, 19 nt, Artificial Sequence
  Description of Artificial Sequence: Synthetic oligonucleotide
  Sense strand starting at position 816 of SEQ ID NO: 1885129
guuagaauucuuuagaagu

SEQ ID NO: 2318429 - RNA, 19 nt, Artificial Sequence
  Description of Artificial Sequence: Synthetic oligonucleotide
  Antisense strand to SEQ ID NO: 2318428
acuucuaaagaauucuaac

SEQ ID NO: 2318430 - RNA, 19 nt, Artificial Sequence
  Description of Artificial Sequence: Synthetic oligonucleotide
  Sense strand starting at position 818 of SEQ ID NO: 1885129
uagaauucuuuagaagugu

SEQ ID NO: 2318431 - RNA, 19 nt, Artificial Sequence
  Description of Artificial Sequence: Synthetic oligonucleotide
  Antisense strand to SEQ ID NO: 2318430
acacuucuaaagaauucua

SEQ ID NO: 2318432 - RNA, 19 nt, Artificial Sequence
  Description of Artificial Sequence: Synthetic oligonucleotide
  Sense strand starting at position 886 of SEQ ID NO: 1885129
cuaaguacuuuguuguuua

SEQ ID NO: 2318433 - RNA, 19 nt, Artificial Sequence
  Description of Artificial Sequence: Synthetic oligonucleotide
  Antisense strand to SEQ ID NO: 2318432
uaaacaacaaaguacuuag

SEQ ID NO: 2318434 - RNA, 19 nt, Artificial Sequence
  Description of Artificial Sequence: Synthetic oligonucleotide
  Sense strand starting at position 929 of SEQ ID NO: 1885129
cuguaagacugauauuauc

SEQ ID NO: 2318435 - RNA, 19 nt, Artificial Sequence
  Description of Artificial Sequence: Synthetic oligonucleotide
  Antisense strand to SEQ ID NO: 2318434
gauaauaucagucuuacag

SEQ ID NO: 2318436 - RNA, 19 nt, Artificial Sequence
  Description of Artificial Sequence: Synthetic oligonucleotide
  Sense strand starting at position 1047 of SEQ ID NO: 1885129
gguuccagaagucagugua

SEQ ID NO: 2318437 - RNA, 19 nt, Artificial Sequence
  Description of Artificial Sequence: Synthetic oligonucleotide
  Antisense strand to SEQ ID NO: 2318436
uacacugacuucuggaacc

SEQ ID NO: 2318438 - RNA, 19 nt, Artificial Sequence
  Description of Artificial Sequence: Synthetic oligonucleotide
  Sense strand starting at position 1102 of SEQ ID NO: 1885129
aauugaggccagcaaguuu

SEQ ID NO: 2318439 - RNA, 19 nt, Artificial Sequence
  Description of Artificial Sequence: Synthetic oligonucleotide
  Antisense strand to SEQ ID NO: 2318438
aaacuugcuggccucaauu

SEQ ID NO: 2318440 - RNA, 19 nt, Artificial Sequence
  Description of Artificial Sequence: Synthetic oligonucleotide
  Sense strand starting at position 1185 of SEQ ID NO: 1885129
acauuuaagcgguagcuuu

SEQ ID NO: 2318441 - RNA, 19 nt, Artificial Sequence
  Description of Artificial Sequence: Synthetic oligonucleotide
  Antisense strand to SEQ ID NO: 2318440
aaagcuaccgcuuaaaugu

SEQ ID NO: 2318442 - RNA, 19 nt, Artificial Sequence
  Description of Artificial Sequence: Synthetic oligonucleotide
  Sense strand starting at position 1403 of SEQ ID NO: 1885129
ccugaagucgguuagguua

SEQ ID NO: 2318443 - RNA, 19 nt, Artificial Sequence
  Description of Artificial Sequence: Synthetic oligonucleotide
  Antisense strand to SEQ ID NO: 2318442
uaaccuaaccgacuucagg

SEQ ID NO: 2318444 - RNA, 19 nt, Artificial Sequence
  Description of Artificial Sequence: Synthetic oligonucleotide
  Sense strand starting at position 1406 of SEQ ID NO: 1885129
gaagucgguuagguuauaa

SEQ ID NO: 2318445 - RNA, 19 nt, Artificial Sequence
  Description of Artificial Sequence: Synthetic oligonucleotide
  Antisense strand to SEQ ID NO: 2318444
uuauaaccuaaccgacuuc

SEQ ID NO: 2318446 - RNA, 19 nt, Artificial Sequence
  Description of Artificial Sequence: Synthetic oligonucleotide
  Sense strand starting at position 1529 of SEQ ID NO: 1885129
ccucuuucgaggcgucgaa

SEQ ID NO: 2318447 - RNA, 19 nt, Artificial Sequence
  Description of Artificial Sequence: Synthetic oligonucleotide
  Antisense strand to SEQ ID NO: 2318446
uucgacgccucgaaagagg

SEQ ID NO: 2318448 - RNA, 19 nt, Artificial Sequence
  Description of Artificial Sequence: Synthetic oligonucleotide
  Sense strand starting at position 1940 of SEQ ID NO: 1885129
cuccauauuccgggagcca

SEQ ID NO: 2318449 - RNA, 19 nt, Artificial Sequence
  Description of Artificial Sequence: Synthetic oligonucleotide
  Antisense strand to SEQ ID NO: 2318448
uggcucccggaauauggag

SEQ ID NO: 2318450 - RNA, 19 nt, Artificial Sequence
  Description of Artificial Sequence: Synthetic oligonucleotide
  Sense strand starting at position 1988 of SEQ ID NO: 1885129
ccgcgauuggucgacagga

SEQ ID NO: 2318451 - RNA, 19 nt, Artificial Sequence
  Description of Artificial Sequence: Synthetic oligonucleotide
  Antisense strand to SEQ ID NO: 2318450
uccugucgaccaaucgcgg

SEQ ID NO: 2318452 - RNA, 19 nt, Artificial Sequence
  Description of Artificial Sequence: Synthetic oligonucleotide
  Sense strand starting at position 2300 of SEQ ID NO: 1885129
gagguauagcucuauccug

SEQ ID NO: 2318453 - RNA, 19 nt, Artificial Sequence
  Description of Artificial Sequence: Synthetic oligonucleotide
  Antisense strand to SEQ ID NO: 2318452
caggauagagcuauaccuc

SEQ ID NO: 2318454 - RNA, 19 nt, Artificial Sequence
  Description of Artificial Sequence: Synthetic oligonucleotide
  Sense strand starting at position 3264 of SEQ ID NO: 1885129
ucugcaaugucguuuacag

SEQ ID NO: 2318455 - RNA, 19 nt, Artificial Sequence
  Description of Artificial Sequence: Synthetic oligonucleotide
  Antisense strand to SEQ ID NO: 2318454
cuguaaacgacauugcaga

SEQ ID NO: 2318456 - RNA, 19 nt, Artificial Sequence
  Description of Artificial Sequence: Synthetic oligonucleotide
  Sense strand starting at position 3348 of SEQ ID NO: 1885129
aaagguaauugagcuucuu

SEQ ID NO: 2318457 - RNA, 19 nt, Artificial Sequence
  Description of Artificial Sequence: Synthetic oligonucleotide
  Antisense strand to SEQ ID NO: 2318456
aagaagcucaauuaccuuu

SEQ ID NO: 2318458 - RNA, 19 nt, Artificial Sequence
  Description of Artificial Sequence: Synthetic oligonucleotide
  Sense strand starting at position 3455 of SEQ ID NO: 1885129
ccaaauaaagugcgaagua

SEQ ID NO: 2318459 - RNA, 19 nt, Artificial Sequence
  Description of Artificial Sequence: Synthetic oligonucleotide
  Antisense strand to SEQ ID NO: 2318458
uacuucgcacuuuauuugg

SEQ ID NO: 2318460 - RNA, 19 nt, Artificial Sequence
  Description of Artificial Sequence: Synthetic oligonucleotide
  Sense strand starting at position 3576 of SEQ ID NO: 1885129
acaaauuaguucugagauu

SEQ ID NO: 2318461 - RNA, 19 nt, Artificial Sequence
  Description of Artificial Sequence: Synthetic oligonucleotide
  Antisense strand to SEQ ID NO: 2318460
aaucucagaacuaauuugu

SEQ ID NO: 2318462 - RNA, 19 nt, Artificial Sequence
  Description of Artificial Sequence: Synthetic oligonucleotide
  Sense strand starting at position 3587 of SEQ ID NO: 1885129
cugagauucucgcuacagu

SEQ ID NO: 2318463 - RNA, 19 nt, Artificial Sequence
  Description of Artificial Sequence: Synthetic oligonucleotide
  Antisense strand to SEQ ID NO: 2318462
acuguagcgagaaucucag

SEQ ID NO: 2318464 - RNA, 19 nt, Artificial Sequence
  Description of Artificial Sequence: Synthetic oligonucleotide
  Sense strand starting at position 3588 of SEQ ID NO: 1885129
ugagauucucgcuacagua

SEQ ID NO: 2318465 - RNA, 19 nt, Artificial Sequence
  Description of Artificial Sequence: Synthetic oligonucleotide
  Antisense strand to SEQ ID NO: 2318464
uacuguagcgagaaucuca

SEQ ID NO: 2318466 - RNA, 19 nt, Artificial Sequence
  Description of Artificial Sequence: Synthetic oligonucleotide
  Sense strand starting at position 3601 of SEQ ID NO: 1885129
acaguacaucuguggaguu

SEQ ID NO: 2318467 - RNA, 19 nt, Artificial Sequence
  Description of Artificial Sequence: Synthetic oligonucleotide
  Antisense strand to SEQ ID NO: 2318466
aacuccacagauguacugu

SEQ ID NO: 2318468 - RNA, 19 nt, Artificial Sequence
  Description of Artificial Sequence: Synthetic oligonucleotide
  Sense strand starting at position 3620 of SEQ ID NO: 1885129
ucagaaagguuugaugaag

SEQ ID NO: 2318469 - RNA, 19 nt, Artificial Sequence
  Description of Artificial Sequence: Synthetic oligonucleotide
  Antisense strand to SEQ ID NO: 2318468
cuucaucaaaccuuucuga

SEQ ID NO: 2318470 - RNA, 19 nt, Artificial Sequence
  Description of Artificial Sequence: Synthetic oligonucleotide
  Sense strand starting at position 3631 of SEQ ID NO: 1885129
ugaugaaguuccuccagau

SEQ ID NO: 2318471 - RNA, 19 nt, Artificial Sequence
  Description of Artificial Sequence: Synthetic oligonucleotide
  Antisense strand to SEQ ID NO: 2318470
aucuggaggaacuucauca

SEQ ID NO: 2318472 - RNA, 19 nt, Artificial Sequence
  Description of Artificial Sequence: Synthetic oligonucleotide
  Sense strand starting at position 3635 of SEQ ID NO: 1885129
gaaguuccuccagaucgga

SEQ ID NO: 2318473 - RNA, 19 nt, Artificial Sequence
  Description of Artificial Sequence: Synthetic oligonucleotide
  Antisense strand to SEQ ID NO: 2318472
uccgaucuggaggaacuuc

SEQ ID NO: 2318474 - RNA, 19 nt, Artificial Sequence
  Description of Artificial Sequence: Synthetic oligonucleotide
  Sense strand starting at position 3813 of SEQ ID NO: 1885129
gcagaacuaguuugacuuu

SEQ ID NO: 2318475 - RNA, 19 nt, Artificial Sequence
  Description of Artificial Sequence: Synthetic oligonucleotide
  Antisense strand to SEQ ID NO: 2318474
aaagucaaacuaguucugc

SEQ ID NO: 2318476 - RNA, 19 nt, Artificial Sequence
  Description of Artificial Sequence: Synthetic oligonucleotide
  Sense strand starting at position 3838 of SEQ ID NO: 1885129
gccagcuccugccucuaua

SEQ ID NO: 2318477 - RNA, 19 nt, Artificial Sequence
  Description of Artificial Sequence: Synthetic oligonucleotide
  Antisense strand to SEQ ID NO: 2318476
uauagaggcaggagcuggc

SEQ ID NO: 2318478 - RNA, 19 nt, Artificial Sequence
  Description of Artificial Sequence: Synthetic oligonucleotide
  Sense strand starting at position 3848 of SEQ ID NO: 1885129
gccucuauauaugaagaca

SEQ ID NO: 2318479 - RNA, 19 nt, Artificial Sequence
  Description of Artificial Sequence: Synthetic oligonucleotide
  Antisense strand to SEQ ID NO: 2318478
ugucuucauauauagaggc

SEQ ID NO: 2318480 - RNA, 19 nt, Artificial Sequence
  Description of Artificial Sequence: Synthetic oligonucleotide
  Sense strand starting at position 3870 of SEQ ID NO: 1885129
gcgccucccucaguuagau

SEQ ID NO: 2318481 - RNA, 19 nt, Artificial Sequence
  Description of Artificial Sequence: Synthetic oligonucleotide
  Antisense strand to SEQ ID NO: 2318480
aucuaacugagggaggcgc

SEQ ID NO: 2318482 - RNA, 19 nt, Artificial Sequence
  Description of Artificial Sequence: Synthetic oligonucleotide
  Sense strand starting at position 33 of SEQ ID NO: 1885130
cacuaauuggaguguauau

SEQ ID NO: 2318483 - RNA, 19 nt, Artificial Sequence
  Description of Artificial Sequence: Synthetic oligonucleotide
  Antisense strand to SEQ ID NO: 2318482
auauacacuccaauuagug

SEQ ID NO: 2318484 - RNA, 19 nt, Artificial Sequence
  Description of Artificial Sequence: Synthetic oligonucleotide
  Sense strand starting at position 89 of SEQ ID NO: 1885130
gcaagcuugguccaaauaa

SEQ ID NO: 2318485 - RNA, 19 nt, Artificial Sequence
  Description of Artificial Sequence: Synthetic oligonucleotide
  Antisense strand to SEQ ID NO: 2318484
uuauuuggaccaagcuugc

SEQ ID NO: 2318486 - RNA, 19 nt, Artificial Sequence
  Description of Artificial Sequence: Synthetic oligonucleotide
  Sense strand starting at position 193 of SEQ ID NO: 1885130
uuuggaaagugaccaugua

SEQ ID NO: 2318487 - RNA, 19 nt, Artificial Sequence
  Description of Artificial Sequence: Synthetic oligonucleotide
  Antisense strand to SEQ ID NO: 2318486
uacauggucacuuuccaaa

SEQ ID NO: 2318488 - RNA, 19 nt, Artificial Sequence
  Description of Artificial Sequence: Synthetic oligonucleotide
  Sense strand starting at position 432 of SEQ ID NO: 1885130
uuucuaucauacuugagga

SEQ ID NO: 2318489 - RNA, 19 nt, Artificial Sequence
  Description of Artificial Sequence: Synthetic oligonucleotide
  Antisense strand to SEQ ID NO: 2318488
uccucaaguaugauagaaa

SEQ ID NO: 2318490 - RNA, 19 nt, Artificial Sequence
  Description of Artificial Sequence: Synthetic oligonucleotide
  Sense strand starting at position 479 of SEQ ID NO: 1885130
uuaucuaguguuuacagaa

SEQ ID NO: 2318491 - RNA, 19 nt, Artificial Sequence
  Description of Artificial Sequence: Synthetic oligonucleotide
  Antisense strand to SEQ ID NO: 2318490
uucuguaaacacuagauaa

SEQ ID NO: 2318492 - RNA, 19 nt, Artificial Sequence
  Description of Artificial Sequence: Synthetic oligonucleotide
  Sense strand starting at position 726 of SEQ ID NO: 1885130
ggacuuaaucuguguaaca

SEQ ID NO: 2318493 - RNA, 19 nt, Artificial Sequence
  Description of Artificial Sequence: Synthetic oligonucleotide
  Antisense strand to SEQ ID NO: 2318492
uguuacacagauuaagucc

SEQ ID NO: 2318494 - RNA, 19 nt, Artificial Sequence
  Description of Artificial Sequence: Synthetic oligonucleotide
  Sense strand starting at position 1162 of SEQ ID NO: 1885130
ucuucucucccagagucau

SEQ ID NO: 2318495 - RNA, 19 nt, Artificial Sequence
  Description of Artificial Sequence: Synthetic oligonucleotide
  Antisense strand to SEQ ID NO: 2318494
augacucugggagagaaga

SEQ ID NO: 2318496 - RNA, 19 nt, Artificial Sequence
  Description of Artificial Sequence: Synthetic oligonucleotide
  Sense strand starting at position 1185 of SEQ ID NO: 1885130
uagggaaauuacguauaug

SEQ ID NO: 2318497 - RNA, 19 nt, Artificial Sequence
  Description of Artificial Sequence: Synthetic oligonucleotide
  Antisense strand to SEQ ID NO: 2318496
cauauacguaauuucccua

SEQ ID NO: 2318498 - RNA, 19 nt, Artificial Sequence
  Description of Artificial Sequence: Synthetic oligonucleotide
  Sense strand starting at position 1188 of SEQ ID NO: 1885130
ggaaauuacguauauggcu

SEQ ID NO: 2318499 - RNA, 19 nt, Artificial Sequence
  Description of Artificial Sequence: Synthetic oligonucleotide
  Antisense strand to SEQ ID NO: 2318498
agccauauacguaauuucc

SEQ ID NO: 2318500 - RNA, 19 nt, Artificial Sequence
  Description of Artificial Sequence: Synthetic oligonucleotide
  Sense strand starting at position 1297 of SEQ ID NO: 1885130
ccuuucuaggaaugaaauc

SEQ ID NO: 2318501 - RNA, 19 nt, Artificial Sequence
  Description of Artificial Sequence: Synthetic oligonucleotide
  Antisense strand to SEQ ID NO: 2318500
gauuucauuccuagaaagg

SEQ ID NO: 2318502 - RNA, 19 nt, Artificial Sequence
  Description of Artificial Sequence: Synthetic oligonucleotide
  Sense strand starting at position 1427 of SEQ ID NO: 1885130
ugguucuuccuagaaaguu

SEQ ID NO: 2318503 - RNA, 19 nt, Artificial Sequence
  Description of Artificial Sequence: Synthetic oligonucleotide
  Antisense strand to SEQ ID NO: 2318502
aacuuucuaggaagaacca

SEQ ID NO: 2318504 - RNA, 19 nt, Artificial Sequence
  Description of Artificial Sequence: Synthetic oligonucleotide
  Sense strand starting at position 1442 of SEQ ID NO: 1885130
aguuuagaauuccuuagag

SEQ ID NO: 2318505 - RNA, 19 nt, Artificial Sequence
  Description of Artificial Sequence: Synthetic oligonucleotide
  Antisense strand to SEQ ID NO: 2318504
cucuaaggaauucuaaacu

SEQ ID NO: 2318506 - RNA, 19 nt, Artificial Sequence
  Description of Artificial Sequence: Synthetic oligonucleotide
  Sense strand starting at position 1444 of SEQ ID NO: 1885130
uuuagaauuccuuagagca

SEQ ID NO: 2318507 - RNA, 19 nt, Artificial Sequence
  Description of Artificial Sequence: Synthetic oligonucleotide
  Antisense strand to SEQ ID NO: 2318506
ugcucuaaggaauucuaaa

SEQ ID NO: 2318508 - RNA, 19 nt, Artificial Sequence
  Description of Artificial Sequence: Synthetic oligonucleotide
  Sense strand starting at position 1605 of SEQ ID NO: 1885130
agcauuagaucauuaacug

SEQ ID NO: 2318509 - RNA, 19 nt, Artificial Sequence
  Description of Artificial Sequence: Synthetic oligonucleotide
  Antisense strand to SEQ ID NO: 2318508
caguuaaugaucuaaugcu

SEQ ID NO: 2318510 - RNA, 19 nt, Artificial Sequence
  Description of Artificial Sequence: Synthetic oligonucleotide
  Sense strand starting at position 1746 of SEQ ID NO: 1885130
cccacaggaucuccugaua

SEQ ID NO: 2318511 - RNA, 19 nt, Artificial Sequence
  Description of Artificial Sequence: Synthetic oligonucleotide
  Antisense strand to SEQ ID NO: 2318510
uaucaggagauccuguggg

SEQ ID NO: 2318512 - RNA, 19 nt, Artificial Sequence
  Description of Artificial Sequence: Synthetic oligonucleotide
  Sense strand starting at position 1786 of SEQ ID NO: 1885130
auguuagaaucccuuaagu

SEQ ID NO: 2318513 - RNA, 19 nt, Artificial Sequence
  Description of Artificial Sequence: Synthetic oligonucleotide
  Antisense strand to SEQ ID NO: 2318512
acuuaagggauucuaacau

SEQ ID NO: 2318514 - RNA, 19 nt, Artificial Sequence
  Description of Artificial Sequence: Synthetic oligonucleotide
  Sense strand starting at position 1788 of SEQ ID NO: 1885130
guuagaaucccuuaaguuu

SEQ ID NO: 2318515 - RNA, 19 nt, Artificial Sequence
  Description of Artificial Sequence: Synthetic oligonucleotide
  Antisense strand to SEQ ID NO: 2318514
aaacuuaagggauucuaac

SEQ ID NO: 2318516 - RNA, 19 nt, Artificial Sequence
  Description of Artificial Sequence: Synthetic oligonucleotide
  Sense strand starting at position 1819 of SEQ ID NO: 1885130
guaucacugaggcaggauu

SEQ ID NO: 2318517 - RNA, 19 nt, Artificial Sequence
  Description of Artificial Sequence: Synthetic oligonucleotide
  Antisense strand to SEQ ID NO: 2318516
aauccugccucagugauac

SEQ ID NO: 2318518 - RNA, 19 nt, Artificial Sequence
  Description of Artificial Sequence: Synthetic oligonucleotide
  Sense strand starting at position 1821 of SEQ ID NO: 1885130
aucacugaggcaggauuaa

SEQ ID NO: 2318519 - RNA, 19 nt, Artificial Sequence
  Description of Artificial Sequence: Synthetic oligonucleotide
  Antisense strand to SEQ ID NO: 2318518
uuaauccugccucagugau

SEQ ID NO: 2318520 - RNA, 19 nt, Artificial Sequence
  Description of Artificial Sequence: Synthetic oligonucleotide
  Sense strand starting at position 2070 of SEQ ID NO: 1885130
ccuagcucacuugaguaau

SEQ ID NO: 2318521 - RNA, 19 nt, Artificial Sequence
  Description of Artificial Sequence: Synthetic oligonucleotide
  Antisense strand to SEQ ID NO: 2318520
auuacucaagugagcuagg

SEQ ID NO: 2318522 - RNA, 19 nt, Artificial Sequence
  Description of Artificial Sequence: Synthetic oligonucleotide
  Sense strand starting at position 2073 of SEQ ID NO: 1885130
agcucacuugaguaaucau

SEQ ID NO: 2318523 - RNA, 19 nt, Artificial Sequence
  Description of Artificial Sequence: Synthetic oligonucleotide
  Antisense strand to SEQ ID NO: 2318522
augauuacucaagugagcu

SEQ ID NO: 2318524 - RNA, 19 nt, Artificial Sequence
  Description of Artificial Sequence: Synthetic oligonucleotide
  Sense strand starting at position 2648 of SEQ ID NO: 1885130
augagacuccugcauaauu

SEQ ID NO: 2318525 - RNA, 19 nt, Artificial Sequence
  Description of Artificial Sequence: Synthetic oligonucleotide
  Antisense strand to SEQ ID NO: 2318524
aauuaugcaggagucucau

SEQ ID NO: 2318526 - RNA, 19 nt, Artificial Sequence
  Description of Artificial Sequence: Synthetic oligonucleotide
  Sense strand starting at position 2650 of SEQ ID NO: 1885130
gagacuccugcauaauugu

SEQ ID NO: 2318527 - RNA, 19 nt, Artificial Sequence
  Description of Artificial Sequence: Synthetic oligonucleotide
  Antisense strand to SEQ ID NO: 2318526
acaauuaugcaggagucuc

SEQ ID NO: 2318528 - RNA, 19 nt, Artificial Sequence
  Description of Artificial Sequence: Synthetic oligonucleotide
  Sense strand starting at position 2763 of SEQ ID NO: 1885130
ccuguuaugguacagguaa

SEQ ID NO: 2318529 - RNA, 19 nt, Artificial Sequence
  Description of Artificial Sequence: Synthetic oligonucleotide
  Antisense strand to SEQ ID NO: 2318528
uuaccuguaccauaacagg

SEQ ID NO: 2318530 - RNA, 19 nt, Artificial Sequence
  Description of Artificial Sequence: Synthetic oligonucleotide
  Sense strand starting at position 2771 of SEQ ID NO: 1885130
gguacagguaaguaucaau

SEQ ID NO: 2318531 - RNA, 19 nt, Artificial Sequence
  Description of Artificial Sequence: Synthetic oligonucleotide
  Antisense strand to SEQ ID NO: 2318530
auugauacuuaccuguacc

SEQ ID NO: 2318532 - RNA, 19 nt, Artificial Sequence
  Description of Artificial Sequence: Synthetic oligonucleotide
  Sense strand starting at position 2929 of SEQ ID NO: 1885130
cgucucacucuagaacuau

SEQ ID NO: 2318533 - RNA, 19 nt, Artificial Sequence
  Description of Artificial Sequence: Synthetic oligonucleotide
  Antisense strand to SEQ ID NO: 2318532
auaguucuagagugagacg

SEQ ID NO: 2318534 - RNA, 19 nt, Artificial Sequence
  Description of Artificial Sequence: Synthetic oligonucleotide
  Sense strand starting at position 3009 of SEQ ID NO: 1885130
ccuuaaaguggucauauug

SEQ ID NO: 2318535 - RNA, 19 nt, Artificial Sequence
  Description of Artificial Sequence: Synthetic oligonucleotide
  Antisense strand to SEQ ID NO: 2318534
caauaugaccacuuuaagg

SEQ ID NO: 2318536 - RNA, 19 nt, Artificial Sequence
  Description of Artificial Sequence: Synthetic oligonucleotide
  Sense strand starting at position 3148 of SEQ ID NO: 1885130
acacucaauuaguugguaa

SEQ ID NO: 2318537 - RNA, 19 nt, Artificial Sequence
  Description of Artificial Sequence: Synthetic oligonucleotide
  Antisense strand to SEQ ID NO: 2318536
uuaccaacuaauugagugu

SEQ ID NO: 2318538 - RNA, 19 nt, Artificial Sequence
  Description of Artificial Sequence: Synthetic oligonucleotide
  Sense strand starting at position 3257 of SEQ ID NO: 1885130
augaaagagccauguugaa

SEQ ID NO: 2318539 - RNA, 19 nt, Artificial Sequence
  Description of Artificial Sequence: Synthetic oligonucleotide
  Antisense strand to SEQ ID NO: 2318538
uucaacauggcucuuucau

SEQ ID NO: 2318540 - RNA, 19 nt, Artificial Sequence
  Description of Artificial Sequence: Synthetic oligonucleotide
  Sense strand starting at position 3339 of SEQ ID NO: 1885130
uuacgagugaauugaauug

SEQ ID NO: 2318541 - RNA, 19 nt, Artificial Sequence
  Description of Artificial Sequence: Synthetic oligonucleotide
  Antisense strand to SEQ ID NO: 2318540
caauucaauucacucguaa

SEQ ID NO: 2318542 - RNA, 19 nt, Artificial Sequence
  Description of Artificial Sequence: Synthetic oligonucleotide
  Sense strand starting at position 3344 of SEQ ID NO: 1885130
agugaauugaauugguaga

SEQ ID NO: 2318543 - RNA, 19 nt, Artificial Sequence
  Description of Artificial Sequence: Synthetic oligonucleotide
  Antisense strand to SEQ ID NO: 2318542
ucuaccaauucaauucacu

SEQ ID NO: 2318544 - RNA, 19 nt, Artificial Sequence
  Description of Artificial Sequence: Synthetic oligonucleotide
  Sense strand starting at position 3345 of SEQ ID NO: 1885130
gugaauugaauugguagau

SEQ ID NO: 2318545 - RNA, 19 nt, Artificial Sequence
  Description of Artificial Sequence: Synthetic oligonucleotide
  Antisense strand to SEQ ID NO: 2318544
aucuaccaauucaauucac

SEQ ID NO: 2318546 - RNA, 19 nt, Artificial Sequence
  Description of Artificial Sequence: Synthetic oligonucleotide
  Sense strand starting at position 3346 of SEQ ID NO: 1885130
ugaauugaauugguagauu

SEQ ID NO: 2318547 - RNA, 19 nt, Artificial Sequence
  Description of Artificial Sequence: Synthetic oligonucleotide
  Antisense strand to SEQ ID NO: 2318546
aaucuaccaauucaauuca

SEQ ID NO: 2318548 - RNA, 19 nt, Artificial Sequence
  Description of Artificial Sequence: Synthetic oligonucleotide
  Sense strand starting at position 3402 of SEQ ID NO: 1885130
uugucauauuucucuguag

SEQ ID NO: 2318549 - RNA, 19 nt, Artificial Sequence
  Description of Artificial Sequence: Synthetic oligonucleotide
  Antisense strand to SEQ ID NO: 2318548
cuacagagaaauaugacaa

SEQ ID NO: 2318550 - RNA, 19 nt, Artificial Sequence
  Description of Artificial Sequence: Synthetic oligonucleotide
  Sense strand starting at position 3405 of SEQ ID NO: 1885130
ucauauuucucuguaggca

SEQ ID NO: 2318551 - RNA, 19 nt, Artificial Sequence
  Description of Artificial Sequence: Synthetic oligonucleotide
  Antisense strand to SEQ ID NO: 2318550
ugccuacagagaaauauga

SEQ ID NO: 2318552 - RNA, 19 nt, Artificial Sequence
  Description of Artificial Sequence: Synthetic oligonucleotide
  Sense strand starting at position 3443 of SEQ ID NO: 1885130
ugacuuuagguuuggacau

SEQ ID NO: 2318553 - RNA, 19 nt, Artificial Sequence
  Description of Artificial Sequence: Synthetic oligonucleotide
  Antisense strand to SEQ ID NO: 2318552
auguccaaaccuaaaguca

SEQ ID NO: 2318554 - RNA, 19 nt, Artificial Sequence
  Description of Artificial Sequence: Synthetic oligonucleotide
  Sense strand starting at position 3504 of SEQ ID NO: 1885130
ggccauguccaagaguaug

SEQ ID NO: 2318555 - RNA, 19 nt, Artificial Sequence
  Description of Artificial Sequence: Synthetic oligonucleotide
  Antisense strand to SEQ ID NO: 2318554
cauacucuuggacauggcc

SEQ ID NO: 2318556 - RNA, 19 nt, Artificial Sequence
  Description of Artificial Sequence: Synthetic oligonucleotide
  Sense strand starting at position 3709 of SEQ ID NO: 1885130
uauuguaagcccuaagaga

SEQ ID NO: 2318557 - RNA, 19 nt, Artificial Sequence
  Description of Artificial Sequence: Synthetic oligonucleotide
  Antisense strand to SEQ ID NO: 2318556
ucucuuagggcuuacaaua

SEQ ID NO: 2318558 - RNA, 19 nt, Artificial Sequence
  Description of Artificial Sequence: Synthetic oligonucleotide
  Sense strand starting at position 3811 of SEQ ID NO: 1885130
gcaggcaauagugaggaau

SEQ ID NO: 2318559 - RNA, 19 nt, Artificial Sequence
  Description of Artificial Sequence: Synthetic oligonucleotide
  Antisense strand to SEQ ID NO: 2318558
auuccucacuauugccugc

SEQ ID NO: 2318560 - RNA, 19 nt, Artificial Sequence
  Description of Artificial Sequence: Synthetic oligonucleotide
  Sense strand starting at position 3819 of SEQ ID NO: 1885130
uagugaggaaucuguuaga

SEQ ID NO: 2318561 - RNA, 19 nt, Artificial Sequence
  Description of Artificial Sequence: Synthetic oligonucleotide
  Antisense strand to SEQ ID NO: 2318560
ucuaacagauuccucacua

SEQ ID NO: 2318562 - RNA, 19 nt, Artificial Sequence
  Description of Artificial Sequence: Synthetic oligonucleotide
  Sense strand starting at position 42 of SEQ ID NO: 1885131
aauggcccuguguguuaua

SEQ ID NO: 2318563 - RNA, 19 nt, Artificial Sequence
  Description of Artificial Sequence: Synthetic oligonucleotide
  Antisense strand to SEQ ID NO: 2318562
uauaacacacagggccauu

SEQ ID NO: 2318564 - RNA, 19 nt, Artificial Sequence
  Description of Artificial Sequence: Synthetic oligonucleotide
  Sense strand starting at position 243 of SEQ ID NO: 1885131
uuagcucuuugcccagauu

SEQ ID NO: 2318565 - RNA, 19 nt, Artificial Sequence
  Description of Artificial Sequence: Synthetic oligonucleotide
  Antisense strand to SEQ ID NO: 2318564
aaucugggcaaagagcuaa

SEQ ID NO: 2318566 - RNA, 19 nt, Artificial Sequence
  Description of Artificial Sequence: Synthetic oligonucleotide
  Sense strand starting at position 435 of SEQ ID NO: 1885131
gggcaagaacauugccuau

SEQ ID NO: 2318567 - RNA, 19 nt, Artificial Sequence
  Description of Artificial Sequence: Synthetic oligonucleotide
  Antisense strand to SEQ ID NO: 2318566
auaggcaauguucuugccc

SEQ ID NO: 2318568 - RNA, 19 nt, Artificial Sequence
  Description of Artificial Sequence: Synthetic oligonucleotide
  Sense strand starting at position 573 of SEQ ID NO: 1885131
ggauguaucuucuauuaau

SEQ ID NO: 2318569 - RNA, 19 nt, Artificial Sequence
  Description of Artificial Sequence: Synthetic oligonucleotide
  Antisense strand to SEQ ID NO: 2318568
auuaauagaagauacaucc

SEQ ID NO: 2318570 - RNA, 19 nt, Artificial Sequence
  Description of Artificial Sequence: Synthetic oligonucleotide
  Sense strand starting at position 711 of SEQ ID NO: 1885131
acuuguuuccaagacgugu

SEQ ID NO: 2318571 - RNA, 19 nt, Artificial Sequence
  Description of Artificial Sequence: Synthetic oligonucleotide
  Antisense strand to SEQ ID NO: 2318570
acacgucuuggaaacaagu

SEQ ID NO: 2318572 - RNA, 19 nt, Artificial Sequence
  Description of Artificial Sequence: Synthetic oligonucleotide
  Sense strand starting at position 726 of SEQ ID NO: 1885131
gugucauccuuccugagau

SEQ ID NO: 2318573 - RNA, 19 nt, Artificial Sequence
  Description of Artificial Sequence: Synthetic oligonucleotide
  Antisense strand to SEQ ID NO: 2318572
aucucaggaaggaugacac

SEQ ID NO: 2318574 - RNA, 19 nt, Artificial Sequence
  Description of Artificial Sequence: Synthetic oligonucleotide
  Sense strand starting at position 797 of SEQ ID NO: 1885131
cccucuuuccaaggcagaa

SEQ ID NO: 2318575 - RNA, 19 nt, Artificial Sequence
  Description of Artificial Sequence: Synthetic oligonucleotide
  Antisense strand to SEQ ID NO: 2318574
uucugccuuggaaagaggg

SEQ ID NO: 2318576 - RNA, 19 nt, Artificial Sequence
  Description of Artificial Sequence: Synthetic oligonucleotide
  Sense strand starting at position 848 of SEQ ID NO: 1885131
gugagaauucaaugggcug

SEQ ID NO: 2318577 - RNA, 19 nt, Artificial Sequence
  Description of Artificial Sequence: Synthetic oligonucleotide
  Antisense strand to SEQ ID NO: 2318576
cagcccauugaauucucac

SEQ ID NO: 2318578 - RNA, 19 nt, Artificial Sequence
  Description of Artificial Sequence: Synthetic oligonucleotide
  Sense strand starting at position 1038 of SEQ ID NO: 1885131
ggucacaaaguuuguguga

SEQ ID NO: 2318579 - RNA, 19 nt, Artificial Sequence
  Description of Artificial Sequence: Synthetic oligonucleotide
  Antisense strand to SEQ ID NO: 2318578
ucacacaaacuuugugacc

SEQ ID NO: 2318580 - RNA, 19 nt, Artificial Sequence
  Description of Artificial Sequence: Synthetic oligonucleotide
  Sense strand starting at position 2160 of SEQ ID NO: 1885131
gcgugaagguccuuccaac

SEQ ID NO: 2318581 - RNA, 19 nt, Artificial Sequence
  Description of Artificial Sequence: Synthetic oligonucleotide
  Antisense strand to SEQ ID NO: 2318580
guuggaaggaccuucacgc

SEQ ID NO: 2318582 - RNA, 19 nt, Artificial Sequence
  Description of Artificial Sequence: Synthetic oligonucleotide
  Sense strand starting at position 2171 of SEQ ID NO: 1885131
cuuccaacugcuugcuaga

SEQ ID NO: 2318583 - RNA, 19 nt, Artificial Sequence
  Description of Artificial Sequence: Synthetic oligonucleotide
  Antisense strand to SEQ ID NO: 2318582
ucuagcaagcaguuggaag

SEQ ID NO: 2318584 - RNA, 19 nt, Artificial Sequence
  Description of Artificial Sequence: Synthetic oligonucleotide
  Sense strand starting at position 2173 of SEQ ID NO: 1885131
uccaacugcuugcuagaaa

SEQ ID NO: 2318585 - RNA, 19 nt, Artificial Sequence
  Description of Artificial Sequence: Synthetic oligonucleotide
  Antisense strand to SEQ ID NO: 2318584
uuucuagcaagcaguugga

SEQ ID NO: 2318586 - RNA, 19 nt, Artificial Sequence
  Description of Artificial Sequence: Synthetic oligonucleotide
  Sense strand starting at position 2283 of SEQ ID NO: 1885131
guuuaaauuccgggcaaac

SEQ ID NO: 2318587 - RNA, 19 nt, Artificial Sequence
  Description of Artificial Sequence: Synthetic oligonucleotide
  Antisense strand to SEQ ID NO: 2318586
guuugcccggaauuuaaac

SEQ ID NO: 2318588 - RNA, 19 nt, Artificial Sequence
  Description of Artificial Sequence: Synthetic oligonucleotide
  Sense strand starting at position 2285 of SEQ ID NO: 1885131
uuaaauuccgggcaaacau

SEQ ID NO: 2318589 - RNA, 19 nt, Artificial Sequence
  Description of Artificial Sequence: Synthetic oligonucleotide
  Antisense strand to SEQ ID NO: 2318588
auguuugcccggaauuuaa

SEQ ID NO: 2318590 - RNA, 19 nt, Artificial Sequence
  Description of Artificial Sequence: Synthetic oligonucleotide
  Sense strand starting at position 2296 of SEQ ID NO: 1885131
gcaaacauccuucgcgauu

SEQ ID NO: 2318591 - RNA, 19 nt, Artificial Sequence
  Description of Artificial Sequence: Synthetic oligonucleotide
  Antisense strand to SEQ ID NO: 2318590
aaucgcgaaggauguuugc

SEQ ID NO: 2318592 - RNA, 19 nt, Artificial Sequence
  Description of Artificial Sequence: Synthetic oligonucleotide
  Sense strand starting at position 2374 of SEQ ID NO: 1885131
ugagcuaauggccagauua

SEQ ID NO: 2318593 - RNA, 19 nt, Artificial Sequence
  Description of Artificial Sequence: Synthetic oligonucleotide
  Antisense strand to SEQ ID NO: 2318592
uaaucuggccauuagcuca

SEQ ID NO: 2318594 - RNA, 19 nt, Artificial Sequence
  Description of Artificial Sequence: Synthetic oligonucleotide
  Sense strand starting at position 2376 of SEQ ID NO: 1885131
agcuaauggccagauuaaa

SEQ ID NO: 2318595 - RNA, 19 nt, Artificial Sequence
  Description of Artificial Sequence: Synthetic oligonucleotide
  Antisense strand to SEQ ID NO: 2318594
uuuaaucuggccauuagcu

SEQ ID NO: 2318596 - RNA, 19 nt, Artificial Sequence
  Description of Artificial Sequence: Synthetic oligonucleotide
  Sense strand starting at position 2436 of SEQ ID NO: 1885131
acagucucacuaugacuua

SEQ ID NO: 2318597 - RNA, 19 nt, Artificial Sequence
  Description of Artificial Sequence: Synthetic oligonucleotide
  Antisense strand to SEQ ID NO: 2318596
uaagucauagugagacugu

SEQ ID NO: 2318598 - RNA, 19 nt, Artificial Sequence
  Description of Artificial Sequence: Synthetic oligonucleotide
  Sense strand starting at position 2448 of SEQ ID NO: 1885131
ugacuuaggucuucuucuu

SEQ ID NO: 2318599 - RNA, 19 nt, Artificial Sequence
  Description of Artificial Sequence: Synthetic oligonucleotide
  Antisense strand to SEQ ID NO: 2318598
aagaagaagaccuaaguca

SEQ ID NO: 2318600 - RNA, 19 nt, Artificial Sequence
  Description of Artificial Sequence: Synthetic oligonucleotide
  Sense strand starting at position 2461 of SEQ ID NO: 1885131
cuucuugagucucaaguca

SEQ ID NO: 2318601 - RNA, 19 nt, Artificial Sequence
  Description of Artificial Sequence: Synthetic oligonucleotide
  Antisense strand to SEQ ID NO: 2318600
ugacuugagacucaagaag

SEQ ID NO: 2318602 - RNA, 19 nt, Artificial Sequence
  Description of Artificial Sequence: Synthetic oligonucleotide
  Sense strand starting at position 2468 of SEQ ID NO: 1885131
agucucaagucagaagcaa

SEQ ID NO: 2318603 - RNA, 19 nt, Artificial Sequence
  Description of Artificial Sequence: Synthetic oligonucleotide
  Antisense strand to SEQ ID NO: 2318602
uugcuucugacuugagacu

SEQ ID NO: 2318604 - RNA, 19 nt, Artificial Sequence
  Description of Artificial Sequence: Synthetic oligonucleotide
  Sense strand starting at position 2509 of SEQ ID NO: 1885131
aaggaugacuguugaagca

SEQ ID NO: 2318605 - RNA, 19 nt, Artificial Sequence
  Description of Artificial Sequence: Synthetic oligonucleotide
  Antisense strand to SEQ ID NO: 2318604
ugcuucaacagucauccuu

SEQ ID NO: 2318606 - RNA, 19 nt, Artificial Sequence
  Description of Artificial Sequence: Synthetic oligonucleotide
  Sense strand starting at position 2611 of SEQ ID NO: 1885131
agguuagaauaucaugaau

SEQ ID NO: 2318607 - RNA, 19 nt, Artificial Sequence
  Description of Artificial Sequence: Synthetic oligonucleotide
  Antisense strand to SEQ ID NO: 2318606
auucaugauauucuaaccu

SEQ ID NO: 2318608 - RNA, 19 nt, Artificial Sequence
  Description of Artificial Sequence: Synthetic oligonucleotide
  Sense strand starting at position 3176 of SEQ ID NO: 1885131
aagguagucugauacaugu

SEQ ID NO: 2318609 - RNA, 19 nt, Artificial Sequence
  Description of Artificial Sequence: Synthetic oligonucleotide
  Antisense strand to SEQ ID NO: 2318608
acauguaucagacuaccuu

SEQ ID NO: 2318610 - RNA, 19 nt, Artificial Sequence
  Description of Artificial Sequence: Synthetic oligonucleotide
  Sense strand starting at position 3178 of SEQ ID NO: 1885131
gguagucugauacauguua

SEQ ID NO: 2318611 - RNA, 19 nt, Artificial Sequence
  Description of Artificial Sequence: Synthetic oligonucleotide
  Antisense strand to SEQ ID NO: 2318610
uaacauguaucagacuacc

SEQ ID NO: 2318612 - RNA, 19 nt, Artificial Sequence
  Description of Artificial Sequence: Synthetic oligonucleotide
  Sense strand starting at position 3225 of SEQ ID NO: 1885131
uguguugguccugaaauug

SEQ ID NO: 2318613 - RNA, 19 nt, Artificial Sequence
  Description of Artificial Sequence: Synthetic oligonucleotide
  Antisense strand to SEQ ID NO: 2318612
caauuucaggaccaacaca

SEQ ID NO: 2318614 - RNA, 19 nt, Artificial Sequence
  Description of Artificial Sequence: Synthetic oligonucleotide
  Sense strand starting at position 3271 of SEQ ID NO: 1885131
gaagcagaauuguauuucu

SEQ ID NO: 2318615 - RNA, 19 nt, Artificial Sequence
  Description of Artificial Sequence: Synthetic oligonucleotide
  Antisense strand to SEQ ID NO: 2318614
agaaauacaauucugcuuc

SEQ ID NO: 2318616 - RNA, 19 nt, Artificial Sequence
  Description of Artificial Sequence: Synthetic oligonucleotide
  Sense strand starting at position 3554 of SEQ ID NO: 1885131
auaccuuucuuauagcagu

SEQ ID NO: 2318617 - RNA, 19 nt, Artificial Sequence
  Description of Artificial Sequence: Synthetic oligonucleotide
  Antisense strand to SEQ ID NO: 2318616
acugcuauaagaaagguau

SEQ ID NO: 2318618 - RNA, 19 nt, Artificial Sequence
  Description of Artificial Sequence: Synthetic oligonucleotide
  Sense strand starting at position 3578 of SEQ ID NO: 1885131
ugcugugguuauuuaagua

SEQ ID NO: 2318619 - RNA, 19 nt, Artificial Sequence
  Description of Artificial Sequence: Synthetic oligonucleotide
  Antisense strand to SEQ ID NO: 2318618
uacuuaaauaaccacagca

SEQ ID NO: 2318620 - RNA, 19 nt, Artificial Sequence
  Description of Artificial Sequence: Synthetic oligonucleotide
  Sense strand starting at position 3582 of SEQ ID NO: 1885131
gugguuauuuaaguacuuu

SEQ ID NO: 2318621 - RNA, 19 nt, Artificial Sequence
  Description of Artificial Sequence: Synthetic oligonucleotide
  Antisense strand to SEQ ID NO: 2318620
aaaguacuuaaauaaccac

SEQ ID NO: 2318622 - RNA, 19 nt, Artificial Sequence
  Description of Artificial Sequence: Synthetic oligonucleotide
  Sense strand starting at position 3601 of SEQ ID NO: 1885131
auauguugacuuuagcuua

SEQ ID NO: 2318623 - RNA, 19 nt, Artificial Sequence
  Description of Artificial Sequence: Synthetic oligonucleotide
  Antisense strand to SEQ ID NO: 2318622
uaagcuaaagucaacauau

SEQ ID NO: 2318624 - RNA, 19 nt, Artificial Sequence
  Description of Artificial Sequence: Synthetic oligonucleotide
  Sense strand starting at position 3604 of SEQ ID NO: 1885131
uguugacuuuagcuuacua

SEQ ID NO: 2318625 - RNA, 19 nt, Artificial Sequence
  Description of Artificial Sequence: Synthetic oligonucleotide
  Antisense strand to SEQ ID NO: 2318624
uaguaagcuaaagucaaca

SEQ ID NO: 2318626 - RNA, 19 nt, Artificial Sequence
  Description of Artificial Sequence: Synthetic oligonucleotide
  Sense strand starting at position 3628 of SEQ ID NO: 1885131
uuauaaguucuuugaaagc

SEQ ID NO: 2318627 - RNA, 19 nt, Artificial Sequence
  Description of Artificial Sequence: Synthetic oligonucleotide
  Antisense strand to SEQ ID NO: 2318626
gcuuucaaagaacuuauaa

SEQ ID NO: 2318628 - RNA, 19 nt, Artificial Sequence
  Description of Artificial Sequence: Synthetic oligonucleotide
  Sense strand starting at position 3637 of SEQ ID NO: 1885131
cuuugaaagcaaugauuau

SEQ ID NO: 2318629 - RNA, 19 nt, Artificial Sequence
  Description of Artificial Sequence: Synthetic oligonucleotide
  Antisense strand to SEQ ID NO: 2318628
auaaucauugcuuucaaag

SEQ ID NO: 2318630 - RNA, 19 nt, Artificial Sequence
  Description of Artificial Sequence: Synthetic oligonucleotide
  Sense strand starting at position 3834 of SEQ ID NO: 1885131
gggagcuuaacaggcuuau

SEQ ID NO: 2318631 - RNA, 19 nt, Artificial Sequence
  Description of Artificial Sequence: Synthetic oligonucleotide
  Antisense strand to SEQ ID NO: 2318630
auaagccuguuaagcuccc

SEQ ID NO: 2318632 - RNA, 19 nt, Artificial Sequence
  Description of Artificial Sequence: Synthetic oligonucleotide
  Sense strand starting at position 3844 of SEQ ID NO: 1885131
caggcuuaucagggaaaca

SEQ ID NO: 2318633 - RNA, 19 nt, Artificial Sequence
  Description of Artificial Sequence: Synthetic oligonucleotide
  Antisense strand to SEQ ID NO: 2318632
uguuucccugauaagccug

SEQ ID NO: 2318634 - RNA, 19 nt, Artificial Sequence
  Description of Artificial Sequence: Synthetic oligonucleotide
  Sense strand starting at position 3864 of SEQ ID NO: 1885131
gguauauguuaaugaguaa

SEQ ID NO: 2318635 - RNA, 19 nt, Artificial Sequence
  Description of Artificial Sequence: Synthetic oligonucleotide
  Antisense strand to SEQ ID NO: 2318634
uuacucauuaacauauacc

SEQ ID NO: 2318636 - RNA, 19 nt, Artificial Sequence
  Description of Artificial Sequence: Synthetic oligonucleotide
  Sense strand starting at position 3949 of SEQ ID NO: 1885131
aggacauggauucgagcua

SEQ ID NO: 2318637 - RNA, 19 nt, Artificial Sequence
  Description of Artificial Sequence: Synthetic oligonucleotide
  Antisense strand to SEQ ID NO: 2318636
uagcucgaauccauguccu

SEQ ID NO: 2318638 - RNA, 19 nt, Artificial Sequence
  Description of Artificial Sequence: Synthetic oligonucleotide
  Sense strand starting at position 3950 of SEQ ID NO: 1885131
ggacauggauucgagcuaa

SEQ ID NO: 2318639 - RNA, 19 nt, Artificial Sequence
  Description of Artificial Sequence: Synthetic oligonucleotide
  Antisense strand to SEQ ID NO: 2318638
uuagcucgaauccaugucc

SEQ ID NO: 2318640 - RNA, 19 nt, Artificial Sequence
  Description of Artificial Sequence: Synthetic oligonucleotide
  Sense strand starting at position 3954 of SEQ ID NO: 1885131
auggauucgagcuaagucu

SEQ ID NO: 2318641 - RNA, 19 nt, Artificial Sequence
  Description of Artificial Sequence: Synthetic oligonucleotide
  Antisense strand to SEQ ID NO: 2318640
agacuuagcucgaauccau

SEQ ID NO: 2318642 - RNA, 19 nt, Artificial Sequence
  Description of Artificial Sequence: Synthetic oligonucleotide
  Sense strand starting at position 163 of SEQ ID NO: 1885132
ggcuucagguaauugugau

SEQ ID NO: 2318643 - RNA, 19 nt, Artificial Sequence
  Description of Artificial Sequence: Synthetic oligonucleotide
  Antisense strand to SEQ ID NO: 2318642
aucacaauuaccugaagcc

SEQ ID NO: 2318644 - RNA, 19 nt, Artificial Sequence
  Description of Artificial Sequence: Synthetic oligonucleotide
  Sense strand starting at position 169 of SEQ ID NO: 1885132
agguaauugugaucaaagc

SEQ ID NO: 2318645 - RNA, 19 nt, Artificial Sequence
  Description of Artificial Sequence: Synthetic oligonucleotide
  Antisense strand to SEQ ID NO: 2318644
gcuuugaucacaauuaccu

SEQ ID NO: 2318646 - RNA, 19 nt, Artificial Sequence
  Description of Artificial Sequence: Synthetic oligonucleotide
  Sense strand starting at position 170 of SEQ ID NO: 1885132
gguaauugugaucaaagcu

SEQ ID NO: 2318647 - RNA, 19 nt, Artificial Sequence
  Description of Artificial Sequence: Synthetic oligonucleotide
  Antisense strand to SEQ ID NO: 2318646
agcuuugaucacaauuacc

SEQ ID NO: 2318648 - RNA, 19 nt, Artificial Sequence
  Description of Artificial Sequence: Synthetic oligonucleotide
  Sense strand starting at position 292 of SEQ ID NO: 1885132
gguggaucuugaucagggu

SEQ ID NO: 2318649 - RNA, 19 nt, Artificial Sequence
  Description of Artificial Sequence: Synthetic oligonucleotide
  Antisense strand to SEQ ID NO: 2318648
acccugaucaagauccacc

SEQ ID NO: 2318650 - RNA, 19 nt, Artificial Sequence
  Description of Artificial Sequence: Synthetic oligonucleotide
  Sense strand starting at position 296 of SEQ ID NO: 1885132
gaucuugaucagggucaac

SEQ ID NO: 2318651 - RNA, 19 nt, Artificial Sequence
  Description of Artificial Sequence: Synthetic oligonucleotide
  Antisense strand to SEQ ID NO: 2318650
guugacccugaucaagauc

SEQ ID NO: 2318652 - RNA, 19 nt, Artificial Sequence
  Description of Artificial Sequence: Synthetic oligonucleotide
  Sense strand starting at position 368 of SEQ ID NO: 1885132
ccuugaugcuaacucugau

SEQ ID NO: 2318653 - RNA, 19 nt, Artificial Sequence
  Description of Artificial Sequence: Synthetic oligonucleotide
  Antisense strand to SEQ ID NO: 2318652
aucagaguuagcaucaagg

SEQ ID NO: 2318654 - RNA, 19 nt, Artificial Sequence
  Description of Artificial Sequence: Synthetic oligonucleotide
  Sense strand starting at position 371 of SEQ ID NO: 1885132
ugaugcuaacucugauauu

SEQ ID NO: 2318655 - RNA, 19 nt, Artificial Sequence
  Description of Artificial Sequence: Synthetic oligonucleotide
  Antisense strand to SEQ ID NO: 2318654
aauaucagaguuagcauca

SEQ ID NO: 2318656 - RNA, 19 nt, Artificial Sequence
  Description of Artificial Sequence: Synthetic oligonucleotide
  Sense strand starting at position 380 of SEQ ID NO: 1885132
cucugauauuaagccauga

SEQ ID NO: 2318657 - RNA, 19 nt, Artificial Sequence
  Description of Artificial Sequence: Synthetic oligonucleotide
  Antisense strand to SEQ ID NO: 2318656
ucauggcuuaauaucagag

SEQ ID NO: 2318658 - RNA, 19 nt, Artificial Sequence
  Description of Artificial Sequence: Synthetic oligonucleotide
  Sense strand starting at position 681 of SEQ ID NO: 1885132
gugcuucuggaagguaaau

SEQ ID NO: 2318659 - RNA, 19 nt, Artificial Sequence
  Description of Artificial Sequence: Synthetic oligonucleotide
  Antisense strand to SEQ ID NO: 2318658
auuuaccuuccagaagcac

SEQ ID NO: 2318660 - RNA, 19 nt, Artificial Sequence
  Description of Artificial Sequence: Synthetic oligonucleotide
  Sense strand starting at position 695 of SEQ ID NO: 1885132
uaaauagcgccaggaucau

SEQ ID NO: 2318661 - RNA, 19 nt, Artificial Sequence
  Description of Artificial Sequence: Synthetic oligonucleotide
  Antisense strand to SEQ ID NO: 2318660
augauccuggcgcuauuua

SEQ ID NO: 2318662 - RNA, 19 nt, Artificial Sequence
  Description of Artificial Sequence: Synthetic oligonucleotide
  Sense strand starting at position 723 of SEQ ID NO: 1885132
gaugaaguucucugccuca

SEQ ID NO: 2318663 - RNA, 19 nt, Artificial Sequence
  Description of Artificial Sequence: Synthetic oligonucleotide
  Antisense strand to SEQ ID NO: 2318662
ugaggcagagaacuucauc

SEQ ID NO: 2318664 - RNA, 19 nt, Artificial Sequence
  Description of Artificial Sequence: Synthetic oligonucleotide
  Sense strand starting at position 726 of SEQ ID NO: 1885132
gaaguucucugccucaaag

SEQ ID NO: 2318665 - RNA, 19 nt, Artificial Sequence
  Description of Artificial Sequence: Synthetic oligonucleotide
  Antisense strand to SEQ ID NO: 2318664
cuuugaggcagagaacuuc

SEQ ID NO: 2318666 - RNA, 19 nt, Artificial Sequence
  Description of Artificial Sequence: Synthetic oligonucleotide
  Sense strand starting at position 728 of SEQ ID NO: 1885132
aguucucugccucaaagag

SEQ ID NO: 2318667 - RNA, 19 nt, Artificial Sequence
  Description of Artificial Sequence: Synthetic oligonucleotide
  Antisense strand to SEQ ID NO: 2318666
cucuuugaggcagagaacu

SEQ ID NO: 2318668 - RNA, 19 nt, Artificial Sequence
  Description of Artificial Sequence: Synthetic oligonucleotide
  Sense strand starting at position 754 of SEQ ID NO: 1885132
cuucgacuucuugauucca

SEQ ID NO: 2318669 - RNA, 19 nt, Artificial Sequence
  Description of Artificial Sequence: Synthetic oligonucleotide
  Antisense strand to SEQ ID NO: 2318668
uggaaucaagaagucgaag

SEQ ID NO: 2318670 - RNA, 19 nt, Artificial Sequence
  Description of Artificial Sequence: Synthetic oligonucleotide
  Sense strand starting at position 777 of SEQ ID NO: 1885132
cagauuguugaagguguaa

SEQ ID NO: 2318671 - RNA, 19 nt, Artificial Sequence
  Description of Artificial Sequence: Synthetic oligonucleotide
  Antisense strand to SEQ ID NO: 2318670
uuacaccuucaacaaucug

SEQ ID NO: 2318672 - RNA, 19 nt, Artificial Sequence
  Description of Artificial Sequence: Synthetic oligonucleotide
  Sense strand starting at position 779 of SEQ ID NO: 1885132
gauuguugaagguguaaug

SEQ ID NO: 2318673 - RNA, 19 nt, Artificial Sequence
  Description of Artificial Sequence: Synthetic oligonucleotide
  Antisense strand to SEQ ID NO: 2318672
cauuacaccuucaacaauc

SEQ ID NO: 2318674 - RNA, 19 nt, Artificial Sequence
  Description of Artificial Sequence: Synthetic oligonucleotide
  Sense strand starting at position 925 of SEQ ID NO: 1885132
uugguaaacuuggucacua

SEQ ID NO: 2318675 - RNA, 19 nt, Artificial Sequence
  Description of Artificial Sequence: Synthetic oligonucleotide
  Antisense strand to SEQ ID NO: 2318674
uagugaccaaguuuaccaa

SEQ ID NO: 2318676 - RNA, 19 nt, Artificial Sequence
  Description of Artificial Sequence: Synthetic oligonucleotide
  Sense strand starting at position 926 of SEQ ID NO: 1885132
ugguaaacuuggucacuaa

SEQ ID NO: 2318677 - RNA, 19 nt, Artificial Sequence
  Description of Artificial Sequence: Synthetic oligonucleotide
  Antisense strand to SEQ ID NO: 2318676
uuagugaccaaguuuacca

SEQ ID NO: 2318678 - RNA, 19 nt, Artificial Sequence
  Description of Artificial Sequence: Synthetic oligonucleotide
  Sense strand starting at position 1042 of SEQ ID NO: 1885132
gcgugaguugaaguucagu

SEQ ID NO: 2318679 - RNA, 19 nt, Artificial Sequence
  Description of Artificial Sequence: Synthetic oligonucleotide
  Antisense strand to SEQ ID NO: 2318678
acugaacuucaacucacgc

SEQ ID NO: 2318680 - RNA, 19 nt, Artificial Sequence
  Description of Artificial Sequence: Synthetic oligonucleotide
  Sense strand starting at position 1068 of SEQ ID NO: 1885132
gcugguagccaacaauaga

SEQ ID NO: 2318681 - RNA, 19 nt, Artificial Sequence
  Description of Artificial Sequence: Synthetic oligonucleotide
  Antisense strand to SEQ ID NO: 2318680
ucuauuguuggcuaccagc

SEQ ID NO: 2318682 - RNA, 19 nt, Artificial Sequence
  Description of Artificial Sequence: Synthetic oligonucleotide
  Sense strand starting at position 1115 of SEQ ID NO: 1885132
uuaggaugcucucuccaaa

SEQ ID NO: 2318683 - RNA, 19 nt, Artificial Sequence
  Description of Artificial Sequence: Synthetic oligonucleotide
  Antisense strand to SEQ ID NO: 2318682
uuuggagagagcauccuaa

SEQ ID NO: 2318684 - RNA, 19 nt, Artificial Sequence
  Description of Artificial Sequence: Synthetic oligonucleotide
  Sense strand starting at position 1148 of SEQ ID NO: 1885132
gauccaugucugcaugcaa

SEQ ID NO: 2318685 - RNA, 19 nt, Artificial Sequence
  Description of Artificial Sequence: Synthetic oligonucleotide
  Antisense strand to SEQ ID NO: 2318684
uugcaugcagacauggauc

SEQ ID NO: 2318686 - RNA, 19 nt, Artificial Sequence
  Description of Artificial Sequence: Synthetic oligonucleotide
  Sense strand starting at position 1202 of SEQ ID NO: 1885132
ggcagagaugauugcucua

SEQ ID NO: 2318687 - RNA, 19 nt, Artificial Sequence
  Description of Artificial Sequence: Synthetic oligonucleotide
  Antisense strand to SEQ ID NO: 2318686
uagagcaaucaucucugcc

SEQ ID NO: 2318688 - RNA, 19 nt, Artificial Sequence
  Description of Artificial Sequence: Synthetic oligonucleotide
  Sense strand starting at position 1225 of SEQ ID NO: 1885132
agagacaauguguguagua

SEQ ID NO: 2318689 - RNA, 19 nt, Artificial Sequence
  Description of Artificial Sequence: Synthetic oligonucleotide
  Antisense strand to SEQ ID NO: 2318688
uacuacacacauugucucu

SEQ ID NO: 2318690 - RNA, 19 nt, Artificial Sequence
  Description of Artificial Sequence: Synthetic oligonucleotide
  Sense strand starting at position 1226 of SEQ ID NO: 1885132
gagacaauguguguaguaa

SEQ ID NO: 2318691 - RNA, 19 nt, Artificial Sequence
  Description of Artificial Sequence: Synthetic oligonucleotide
  Antisense strand to SEQ ID NO: 2318690
uuacuacacacauugucuc

SEQ ID NO: 2318692 - RNA, 19 nt, Artificial Sequence
  Description of Artificial Sequence: Synthetic oligonucleotide
  Sense strand starting at position 1227 of SEQ ID NO: 1885132
agacaauguguguaguaaa

SEQ ID NO: 2318693 - RNA, 19 nt, Artificial Sequence
  Description of Artificial Sequence: Synthetic oligonucleotide
  Antisense strand to SEQ ID NO: 2318692
uuuacuacacacauugucu

SEQ ID NO: 2318694 - RNA, 19 nt, Artificial Sequence
  Description of Artificial Sequence: Synthetic oligonucleotide
  Sense strand starting at position 1261 of SEQ ID NO: 1885132
gucucauaauccucaugag

SEQ ID NO: 2318695 - RNA, 19 nt, Artificial Sequence
  Description of Artificial Sequence: Synthetic oligonucleotide
  Antisense strand to SEQ ID NO: 2318694
cucaugaggauuaugagac

SEQ ID NO: 2318696 - RNA, 19 nt, Artificial Sequence
  Description of Artificial Sequence: Synthetic oligonucleotide
  Sense strand starting at position 1376 of SEQ ID NO: 1885132
agcuguauccagcauggaa

SEQ ID NO: 2318697 - RNA, 19 nt, Artificial Sequence
  Description of Artificial Sequence: Synthetic oligonucleotide
  Antisense strand to SEQ ID NO: 2318696
uuccaugcuggauacagcu

SEQ ID NO: 2318698 - RNA, 19 nt, Artificial Sequence
  Description of Artificial Sequence: Synthetic oligonucleotide
  Sense strand starting at position 1424 of SEQ ID NO: 1885132
auaccuaugggucgaaugu

SEQ ID NO: 2318699 - RNA, 19 nt, Artificial Sequence
  Description of Artificial Sequence: Synthetic oligonucleotide
  Antisense strand to SEQ ID NO: 2318698
acauucgacccauagguau

SEQ ID NO: 2318700 - RNA, 19 nt, Artificial Sequence
  Description of Artificial Sequence: Synthetic oligonucleotide
  Sense strand starting at position 1425 of SEQ ID NO: 1885132
uaccuaugggucgaauguu

SEQ ID NO: 2318701 - RNA, 19 nt, Artificial Sequence
  Description of Artificial Sequence: Synthetic oligonucleotide
  Antisense strand to SEQ ID NO: 2318700
aacauucgacccauaggua

SEQ ID NO: 2318702 - RNA, 19 nt, Artificial Sequence
  Description of Artificial Sequence: Synthetic oligonucleotide
  Sense strand starting at position 1478 of SEQ ID NO: 1885132
ugaucuugccagggcugau

SEQ ID NO: 2318703 - RNA, 19 nt, Artificial Sequence
  Description of Artificial Sequence: Synthetic oligonucleotide
  Antisense strand to SEQ ID NO: 2318702
aucagcccuggcaagauca

SEQ ID NO: 2318704 - RNA, 19 nt, Artificial Sequence
  Description of Artificial Sequence: Synthetic oligonucleotide
  Sense strand starting at position 1561 of SEQ ID NO: 1885132
ugaucuucuugagugcaau

SEQ ID NO: 2318705 - RNA, 19 nt, Artificial Sequence
  Description of Artificial Sequence: Synthetic oligonucleotide
  Antisense strand to SEQ ID NO: 2318704
auugcacucaagaagauca

SEQ ID NO: 2318706 - RNA, 19 nt, Artificial Sequence
  Description of Artificial Sequence: Synthetic oligonucleotide
  Sense strand starting at position 1562 of SEQ ID NO: 1885132
gaucuucuugagugcaauu

SEQ ID NO: 2318707 - RNA, 19 nt, Artificial Sequence
  Description of Artificial Sequence: Synthetic oligonucleotide
  Antisense strand to SEQ ID NO: 2318706
aauugcacucaagaagauc

SEQ ID NO: 2318708 - RNA, 19 nt, Artificial Sequence
  Description of Artificial Sequence: Synthetic oligonucleotide
  Sense strand starting at position 1564 of SEQ ID NO: 1885132
ucuucuugagugcaauuga

SEQ ID NO: 2318709 - RNA, 19 nt, Artificial Sequence
  Description of Artificial Sequence: Synthetic oligonucleotide
  Antisense strand to SEQ ID NO: 2318708
ucaauugcacucaagaaga

SEQ ID NO: 2318710 - RNA, 19 nt, Artificial Sequence
  Description of Artificial Sequence: Synthetic oligonucleotide
  Sense strand starting at position 1569 of SEQ ID NO: 1885132
uugagugcaauugaguaau

SEQ ID NO: 2318711 - RNA, 19 nt, Artificial Sequence
  Description of Artificial Sequence: Synthetic oligonucleotide
  Antisense strand to SEQ ID NO: 2318710
auuacucaauugcacucaa

SEQ ID NO: 2318712 - RNA, 19 nt, Artificial Sequence
  Description of Artificial Sequence: Synthetic oligonucleotide
  Sense strand starting at position 1634 of SEQ ID NO: 1885132
caacgaugagcccacagau

SEQ ID NO: 2318713 - RNA, 19 nt, Artificial Sequence
  Description of Artificial Sequence: Synthetic oligonucleotide
  Antisense strand to SEQ ID NO: 2318712
aucugugggcucaucguug

SEQ ID NO: 2318714 - RNA, 19 nt, Artificial Sequence
  Description of Artificial Sequence: Synthetic oligonucleotide
  Sense strand starting at position 3837 of SEQ ID NO: 1885132
ucacguaugacagaaggua

SEQ ID NO: 2318715 - RNA, 19 nt, Artificial Sequence
  Description of Artificial Sequence: Synthetic oligonucleotide
  Antisense strand to SEQ ID NO: 2318714
uaccuucugucauacguga

SEQ ID NO: 2318716 - RNA, 19 nt, Artificial Sequence
  Description of Artificial Sequence: Synthetic oligonucleotide
  Sense strand starting at position 3863 of SEQ ID NO: 1885132
ucgagaaguaacugaauua

SEQ ID NO: 2318717 - RNA, 19 nt, Artificial Sequence
  Description of Artificial Sequence: Synthetic oligonucleotide
  Antisense strand to SEQ ID NO: 2318716
uaauucaguuacuucucga

SEQ ID NO: 2318718 - RNA, 19 nt, Artificial Sequence
  Description of Artificial Sequence: Synthetic oligonucleotide
  Sense strand starting at position 3895 of SEQ ID NO: 1885132
uugcaacugguguaacaaa

SEQ ID NO: 2318719 - RNA, 19 nt, Artificial Sequence
  Description of Artificial Sequence: Synthetic oligonucleotide
  Antisense strand to SEQ ID NO: 2318718
uuuguuacaccaguugcaa

SEQ ID NO: 2318720 - RNA, 19 nt, Artificial Sequence
  Description of Artificial Sequence: Synthetic oligonucleotide
  Sense strand starting at position 3948 of SEQ ID NO: 1885132
uaguuauggagauggaguu

SEQ ID NO: 2318721 - RNA, 19 nt, Artificial Sequence
  Description of Artificial Sequence: Synthetic oligonucleotide
  Antisense strand to SEQ ID NO: 2318720
aacuccaucuccauaacua

SEQ ID NO: 2318722 - RNA, 19 nt, Artificial Sequence
  Description of Artificial Sequence: Synthetic oligonucleotide
  Sense strand starting at position 267 of SEQ ID NO: 1885133
acaacagcucgauaaaccu

SEQ ID NO: 2318723 - RNA, 19 nt, Artificial Sequence
  Description of Artificial Sequence: Synthetic oligonucleotide
  Antisense strand to SEQ ID NO: 2318722
agguuuaucgagcuguugu

SEQ ID NO: 2318724 - RNA, 19 nt, Artificial Sequence
  Description of Artificial Sequence: Synthetic oligonucleotide
  Sense strand starting at position 364 of SEQ ID NO: 1885133
cucaguagucuuuaacuga

SEQ ID NO: 2318725 - RNA, 19 nt, Artificial Sequence
  Description of Artificial Sequence: Synthetic oligonucleotide
  Antisense strand to SEQ ID NO: 2318724
ucaguuaaagacuacugag

SEQ ID NO: 2318726 - RNA, 19 nt, Artificial Sequence
  Description of Artificial Sequence: Synthetic oligonucleotide
  Sense strand starting at position 405 of SEQ ID NO: 1885133
aggacaaacugggcucaua

SEQ ID NO: 2318727 - RNA, 19 nt, Artificial Sequence
  Description of Artificial Sequence: Synthetic oligonucleotide
  Antisense strand to SEQ ID NO: 2318726
uaugagcccaguuuguccu

SEQ ID NO: 2318728 - RNA, 19 nt, Artificial Sequence
  Description of Artificial Sequence: Synthetic oligonucleotide
  Sense strand starting at position 526 of SEQ ID NO: 1885133
cuagaaucucgagaagucu

SEQ ID NO: 2318729 - RNA, 19 nt, Artificial Sequence
  Description of Artificial Sequence: Synthetic oligonucleotide
  Antisense strand to SEQ ID NO: 2318728
agacuucucgagauucuag

SEQ ID NO: 2318730 - RNA, 19 nt, Artificial Sequence
  Description of Artificial Sequence: Synthetic oligonucleotide
  Sense strand starting at position 566 of SEQ ID NO: 1885133
gacaccuguguuggaaaca

SEQ ID NO: 2318731 - RNA, 19 nt, Artificial Sequence
  Description of Artificial Sequence: Synthetic oligonucleotide
  Antisense strand to SEQ ID NO: 2318730
uguuuccaacacagguguc

SEQ ID NO: 2318732 - RNA, 19 nt, Artificial Sequence
  Description of Artificial Sequence: Synthetic oligonucleotide
  Sense strand starting at position 708 of SEQ ID NO: 1885133
cuaagaagguucucuugag

SEQ ID NO: 2318733 - RNA, 19 nt, Artificial Sequence
  Description of Artificial Sequence: Synthetic oligonucleotide
  Antisense strand to SEQ ID NO: 2318732
cucaagagaaccuucuuag

SEQ ID NO: 2318734 - RNA, 19 nt, Artificial Sequence
  Description of Artificial Sequence: Synthetic oligonucleotide
  Sense strand starting at position 712 of SEQ ID NO: 1885133
gaagguucucuugagcaac

SEQ ID NO: 2318735 - RNA, 19 nt, Artificial Sequence
  Description of Artificial Sequence: Synthetic oligonucleotide
  Antisense strand to SEQ ID NO: 2318734
guugcucaagagaaccuuc

SEQ ID NO: 2318736 - RNA, 19 nt, Artificial Sequence
  Description of Artificial Sequence: Synthetic oligonucleotide
  Sense strand starting at position 949 of SEQ ID NO: 1885133
ugaugugagcuuuaauacc

SEQ ID NO: 2318737 - RNA, 19 nt, Artificial Sequence
  Description of Artificial Sequence: Synthetic oligonucleotide
  Antisense strand to SEQ ID NO: 2318736
gguauuaaagcucacauca

SEQ ID NO: 2318738 - RNA, 19 nt, Artificial Sequence
  Description of Artificial Sequence: Synthetic oligonucleotide
  Sense strand starting at position 1038 of SEQ ID NO: 1885133
aggcuuaagaaauguagau

SEQ ID NO: 2318739 - RNA, 19 nt, Artificial Sequence
  Description of Artificial Sequence: Synthetic oligonucleotide
  Antisense strand to SEQ ID NO: 2318738
aucuacauuucuuaagccu

SEQ ID NO: 2318740 - RNA, 19 nt, Artificial Sequence
  Description of Artificial Sequence: Synthetic oligonucleotide
  Sense strand starting at position 1071 of SEQ ID NO: 1885133
ggugucauacuacauuaag

SEQ ID NO: 2318741 - RNA, 19 nt, Artificial Sequence
  Description of Artificial Sequence: Synthetic oligonucleotide
  Antisense strand to SEQ ID NO: 2318740
cuuaauguaguaugacacc

SEQ ID NO: 2318742 - RNA, 19 nt, Artificial Sequence
  Description of Artificial Sequence: Synthetic oligonucleotide
  Sense strand starting at position 1152 of SEQ ID NO: 1885133
augucagacuucucugaca

SEQ ID NO: 2318743 - RNA, 19 nt, Artificial Sequence
  Description of Artificial Sequence: Synthetic oligonucleotide
  Antisense strand to SEQ ID NO: 2318742
ugucagagaagucugacau

SEQ ID NO: 2318744 - RNA, 19 nt, Artificial Sequence
  Description of Artificial Sequence: Synthetic oligonucleotide
  Sense strand starting at position 1236 of SEQ ID NO: 1885133
ccgggaguccagggacaau

SEQ ID NO: 2318745 - RNA, 19 nt, Artificial Sequence
  Description of Artificial Sequence: Synthetic oligonucleotide
  Antisense strand to SEQ ID NO: 2318744
auugucccuggacucccgg

SEQ ID NO: 2318746 - RNA, 19 nt, Artificial Sequence
  Description of Artificial Sequence: Synthetic oligonucleotide
  Sense strand starting at position 1760 of SEQ ID NO: 1885133
acuggaaagccuugauccu

SEQ ID NO: 2318747 - RNA, 19 nt, Artificial Sequence
  Description of Artificial Sequence: Synthetic oligonucleotide
  Antisense strand to SEQ ID NO: 2318746
aggaucaaggcuuuccagu

SEQ ID NO: 2318748 - RNA, 19 nt, Artificial Sequence
  Description of Artificial Sequence: Synthetic oligonucleotide
  Sense strand starting at position 2039 of SEQ ID NO: 1885133
agucuacauuguuuaggga

SEQ ID NO: 2318749 - RNA, 19 nt, Artificial Sequence
  Description of Artificial Sequence: Synthetic oligonucleotide
  Antisense strand to SEQ ID NO: 2318748
ucccuaaacaauguagacu

SEQ ID NO: 2318750 - RNA, 19 nt, Artificial Sequence
  Description of Artificial Sequence: Synthetic oligonucleotide
  Sense strand starting at position 2040 of SEQ ID NO: 1885133
gucuacauuguuuagggaa

SEQ ID NO: 2318751 - RNA, 19 nt, Artificial Sequence
  Description of Artificial Sequence: Synthetic oligonucleotide
  Antisense strand to SEQ ID NO: 2318750
uucccuaaacaauguagac

SEQ ID NO: 2318752 - RNA, 19 nt, Artificial Sequence
  Description of Artificial Sequence: Synthetic oligonucleotide
  Sense strand starting at position 2047 of SEQ ID NO: 1885133
uuguuuagggaaggagauu

SEQ ID NO: 2318753 - RNA, 19 nt, Artificial Sequence
  Description of Artificial Sequence: Synthetic oligonucleotide
  Antisense strand to SEQ ID NO: 2318752
aaucuccuucccuaaacaa

SEQ ID NO: 2318754 - RNA, 19 nt, Artificial Sequence
  Description of Artificial Sequence: Synthetic oligonucleotide
  Sense strand starting at position 2126 of SEQ ID NO: 1885133
cccuaaagaucgcugggaa

SEQ ID NO: 2318755 - RNA, 19 nt, Artificial Sequence
  Description of Artificial Sequence: Synthetic oligonucleotide
  Antisense strand to SEQ ID NO: 2318754
uucccagcgaucuuuaggg

SEQ ID NO: 2318756 - RNA, 19 nt, Artificial Sequence
  Description of Artificial Sequence: Synthetic oligonucleotide
  Sense strand starting at position 2129 of SEQ ID NO: 1885133
uaaagaucgcugggaauug

SEQ ID NO: 2318757 - RNA, 19 nt, Artificial Sequence
  Description of Artificial Sequence: Synthetic oligonucleotide
  Antisense strand to SEQ ID NO: 2318756
caauucccagcgaucuuua

SEQ ID NO: 2318758 - RNA, 19 nt, Artificial Sequence
  Description of Artificial Sequence: Synthetic oligonucleotide
  Sense strand starting at position 2139 of SEQ ID NO: 1885133
ugggaauuguaguuuaauc

SEQ ID NO: 2318759 - RNA, 19 nt, Artificial Sequence
  Description of Artificial Sequence: Synthetic oligonucleotide
  Antisense strand to SEQ ID NO: 2318758
gauuaaacuacaauuccca

SEQ ID NO: 2318760 - RNA, 19 nt, Artificial Sequence
  Description of Artificial Sequence: Synthetic oligonucleotide
  Sense strand starting at position 2141 of SEQ ID NO: 1885133
ggaauuguaguuuaaucuu

SEQ ID NO: 2318761 - RNA, 19 nt, Artificial Sequence
  Description of Artificial Sequence: Synthetic oligonucleotide
  Antisense strand to SEQ ID NO: 2318760
aagauuaaacuacaauucc

SEQ ID NO: 2318762 - RNA, 19 nt, Artificial Sequence
  Description of Artificial Sequence: Synthetic oligonucleotide
  Sense strand starting at position 2217 of SEQ ID NO: 1885133
cuaggaaauccuggguucu

SEQ ID NO: 2318763 - RNA, 19 nt, Artificial Sequence
  Description of Artificial Sequence: Synthetic oligonucleotide
  Antisense strand to SEQ ID NO: 2318762
agaacccaggauuuccuag

SEQ ID NO: 2318764 - RNA, 19 nt, Artificial Sequence
  Description of Artificial Sequence: Synthetic oligonucleotide
  Sense strand starting at position 2218 of SEQ ID NO: 1885133
uaggaaauccuggguucua

SEQ ID NO: 2318765 - RNA, 19 nt, Artificial Sequence
  Description of Artificial Sequence: Synthetic oligonucleotide
  Antisense strand to SEQ ID NO: 2318764
uagaacccaggauuuccua

SEQ ID NO: 2318766 - RNA, 19 nt, Artificial Sequence
  Description of Artificial Sequence: Synthetic oligonucleotide
  Sense strand starting at position 2219 of SEQ ID NO: 1885133
aggaaauccuggguucuau

SEQ ID NO: 2318767 - RNA, 19 nt, Artificial Sequence
  Description of Artificial Sequence: Synthetic oligonucleotide
  Antisense strand to SEQ ID NO: 2318766
auagaacccaggauuuccu

SEQ ID NO: 2318768 - RNA, 19 nt, Artificial Sequence
  Description of Artificial Sequence: Synthetic oligonucleotide
  Sense strand starting at position 2279 of SEQ ID NO: 1885133
ucccaaagggauugcaaau

SEQ ID NO: 2318769 - RNA, 19 nt, Artificial Sequence
  Description of Artificial Sequence: Synthetic oligonucleotide
  Antisense strand to SEQ ID NO: 2318768
auuugcaaucccuuuggga

SEQ ID NO: 2318770 - RNA, 19 nt, Artificial Sequence
  Description of Artificial Sequence: Synthetic oligonucleotide
  Sense strand starting at position 2559 of SEQ ID NO: 1885133
cuauaaccucaguauuagu

SEQ ID NO: 2318771 - RNA, 19 nt, Artificial Sequence
  Description of Artificial Sequence: Synthetic oligonucleotide
  Antisense strand to SEQ ID NO: 2318770
acuaauacugagguuauag

SEQ ID NO: 2318772 - RNA, 19 nt, Artificial Sequence
  Description of Artificial Sequence: Synthetic oligonucleotide
  Sense strand starting at position 2564 of SEQ ID NO: 1885133
accucaguauuagucaaga

SEQ ID NO: 2318773 - RNA, 19 nt, Artificial Sequence
  Description of Artificial Sequence: Synthetic oligonucleotide
  Antisense strand to SEQ ID NO: 2318772
ucuugacuaauacugaggu

SEQ ID NO: 2318774 - RNA, 19 nt, Artificial Sequence
  Description of Artificial Sequence: Synthetic oligonucleotide
  Sense strand starting at position 2566 of SEQ ID NO: 1885133
cucaguauuagucaagagu

SEQ ID NO: 2318775 - RNA, 19 nt, Artificial Sequence
  Description of Artificial Sequence: Synthetic oligonucleotide
  Antisense strand to SEQ ID NO: 2318774
acucuugacuaauacugag

SEQ ID NO: 2318776 - RNA, 19 nt, Artificial Sequence
  Description of Artificial Sequence: Synthetic oligonucleotide
  Sense strand starting at position 2625 of SEQ ID NO: 1885133
cgagauuuauuccaagaau

SEQ ID NO: 2318777 - RNA, 19 nt, Artificial Sequence
  Description of Artificial Sequence: Synthetic oligonucleotide
  Antisense strand to SEQ ID NO: 2318776
auucuuggaauaaaucucg

SEQ ID NO: 2318778 - RNA, 19 nt, Artificial Sequence
  Description of Artificial Sequence: Synthetic oligonucleotide
  Sense strand starting at position 2693 of SEQ ID NO: 1885133
cugucuauacacuggagaa

SEQ ID NO: 2318779 - RNA, 19 nt, Artificial Sequence
  Description of Artificial Sequence: Synthetic oligonucleotide
  Antisense strand to SEQ ID NO: 2318778
uucuccaguguauagacag

SEQ ID NO: 2318780 - RNA, 19 nt, Artificial Sequence
  Description of Artificial Sequence: Synthetic oligonucleotide
  Sense strand starting at position 2838 of SEQ ID NO: 1885133
gucccagcucaugaagaaa

SEQ ID NO: 2318781 - RNA, 19 nt, Artificial Sequence
  Description of Artificial Sequence: Synthetic oligonucleotide
  Antisense strand to SEQ ID NO: 2318780
uuucuucaugagcugggac

SEQ ID NO: 2318782 - RNA, 19 nt, Artificial Sequence
  Description of Artificial Sequence: Synthetic oligonucleotide
  Sense strand starting at position 2920 of SEQ ID NO: 1885133
cauauuaaugagggugauc

SEQ ID NO: 2318783 - RNA, 19 nt, Artificial Sequence
  Description of Artificial Sequence: Synthetic oligonucleotide
  Antisense strand to SEQ ID NO: 2318782
gaucacccucauuaauaug

SEQ ID NO: 2318784 - RNA, 19 nt, Artificial Sequence
  Description of Artificial Sequence: Synthetic oligonucleotide
  Sense strand starting at position 2922 of SEQ ID NO: 1885133
uauuaaugagggugaucuu

SEQ ID NO: 2318785 - RNA, 19 nt, Artificial Sequence
  Description of Artificial Sequence: Synthetic oligonucleotide
  Antisense strand to SEQ ID NO: 2318784
aagaucacccucauuaaua

SEQ ID NO: 2318786 - RNA, 19 nt, Artificial Sequence
  Description of Artificial Sequence: Synthetic oligonucleotide
  Sense strand starting at position 2925 of SEQ ID NO: 1885133
uaaugagggugaucuucuu

SEQ ID NO: 2318787 - RNA, 19 nt, Artificial Sequence
  Description of Artificial Sequence: Synthetic oligonucleotide
  Antisense strand to SEQ ID NO: 2318786
aagaagaucacccucauua

SEQ ID NO: 2318788 - RNA, 19 nt, Artificial Sequence
  Description of Artificial Sequence: Synthetic oligonucleotide
  Sense strand starting at position 3020 of SEQ ID NO: 1885133
cugggugucccuuagacca

SEQ ID NO: 2318789 - RNA, 19 nt, Artificial Sequence
  Description of Artificial Sequence: Synthetic oligonucleotide
  Antisense strand to SEQ ID NO: 2318788
uggucuaagggacacccag

SEQ ID NO: 2318790 - RNA, 19 nt, Artificial Sequence
  Description of Artificial Sequence: Synthetic oligonucleotide
  Sense strand starting at position 3368 of SEQ ID NO: 1885133
ggucucccugugaguggua

SEQ ID NO: 2318791 - RNA, 19 nt, Artificial Sequence
  Description of Artificial Sequence: Synthetic oligonucleotide
  Antisense strand to SEQ ID NO: 2318790
uaccacucacagggagacc

SEQ ID NO: 2318792 - RNA, 19 nt, Artificial Sequence
  Description of Artificial Sequence: Synthetic oligonucleotide
  Sense strand starting at position 3528 of SEQ ID NO: 1885133
gcugacaucaagggugaga

SEQ ID NO: 2318793 - RNA, 19 nt, Artificial Sequence
  Description of Artificial Sequence: Synthetic oligonucleotide
  Antisense strand to SEQ ID NO: 2318792
ucucacccuugaugucagc

SEQ ID NO: 2318794 - RNA, 19 nt, Artificial Sequence
  Description of Artificial Sequence: Synthetic oligonucleotide
  Sense strand starting at position 3560 of SEQ ID NO: 1885133
cuugcaagacuuuggaaau

SEQ ID NO: 2318795 - RNA, 19 nt, Artificial Sequence
  Description of Artificial Sequence: Synthetic oligonucleotide
  Antisense strand to SEQ ID NO: 2318794
auuuccaaagucuugcaag

SEQ ID NO: 2318796 - RNA, 19 nt, Artificial Sequence
  Description of Artificial Sequence: Synthetic oligonucleotide
  Sense strand starting at position 3603 of SEQ ID NO: 1885133
gcccauaauuuccugagcu

SEQ ID NO: 2318797 - RNA, 19 nt, Artificial Sequence
  Description of Artificial Sequence: Synthetic oligonucleotide
  Antisense strand to SEQ ID NO: 2318796
agcucaggaaauuaugggc

SEQ ID NO: 2318798 - RNA, 19 nt, Artificial Sequence
  Description of Artificial Sequence: Synthetic oligonucleotide
  Sense strand starting at position 3781 of SEQ ID NO: 1885133
ugcuucuuacccuagaaug

SEQ ID NO: 2318799 - RNA, 19 nt, Artificial Sequence
  Description of Artificial Sequence: Synthetic oligonucleotide
  Antisense strand to SEQ ID NO: 2318798
cauucuaggguaagaagca

SEQ ID NO: 2318800 - RNA, 19 nt, Artificial Sequence
  Description of Artificial Sequence: Synthetic oligonucleotide
  Sense strand starting at position 3857 of SEQ ID NO: 1885133
guauuucuguguuucugac

SEQ ID NO: 2318801 - RNA, 19 nt, Artificial Sequence
  Description of Artificial Sequence: Synthetic oligonucleotide
  Antisense strand to SEQ ID NO: 2318800
gucagaaacacagaaauac

SEQ ID NO: 2318802 - RNA, 19 nt, Artificial Sequence
  Description of Artificial Sequence: Synthetic oligonucleotide
  Sense strand starting at position 10 of SEQ ID NO: 1885134
gguauucaauaagugagag

SEQ ID NO: 2318803 - RNA, 19 nt, Artificial Sequence
  Description of Artificial Sequence: Synthetic oligonucleotide
  Antisense strand to SEQ ID NO: 2318802
cucucacuuauugaauacc

SEQ ID NO: 2318804 - RNA, 19 nt, Artificial Sequence
  Description of Artificial Sequence: Synthetic oligonucleotide
  Sense strand starting at position 32 of SEQ ID NO: 1885134
uguggagcaucuuuauacu

SEQ ID NO: 2318805 - RNA, 19 nt, Artificial Sequence
  Description of Artificial Sequence: Synthetic oligonucleotide
  Antisense strand to SEQ ID NO: 2318804
aguauaaagaugcuccaca

SEQ ID NO: 2318806 - RNA, 19 nt, Artificial Sequence
  Description of Artificial Sequence: Synthetic oligonucleotide
  Sense strand starting at position 35 of SEQ ID NO: 1885134
ggagcaucuuuauacuagu

SEQ ID NO: 2318807 - RNA, 19 nt, Artificial Sequence
  Description of Artificial Sequence: Synthetic oligonucleotide
  Antisense strand to SEQ ID NO: 2318806
acuaguauaaagaugcucc

SEQ ID NO: 2318808 - RNA, 19 nt, Artificial Sequence
  Description of Artificial Sequence: Synthetic oligonucleotide
  Sense strand starting at position 82 of SEQ ID NO: 1885134
caugcuaucuagcagggaa

SEQ ID NO: 2318809 - RNA, 19 nt, Artificial Sequence
  Description of Artificial Sequence: Synthetic oligonucleotide
  Antisense strand to SEQ ID NO: 2318808
uucccugcuagauagcaug

SEQ ID NO: 2318810 - RNA, 19 nt, Artificial Sequence
  Description of Artificial Sequence: Synthetic oligonucleotide
  Sense strand starting at position 208 of SEQ ID NO: 1885134
aggguuagugaaggaucaa

SEQ ID NO: 2318811 - RNA, 19 nt, Artificial Sequence
  Description of Artificial Sequence: Synthetic oligonucleotide
  Antisense strand to SEQ ID NO: 2318810
uugauccuucacuaacccu

SEQ ID NO: 2318812 - RNA, 19 nt, Artificial Sequence
  Description of Artificial Sequence: Synthetic oligonucleotide
  Sense strand starting at position 314 of SEQ ID NO: 1885134
gggaaacaguaauaaaguu

SEQ ID NO: 2318813 - RNA, 19 nt, Artificial Sequence
  Description of Artificial Sequence: Synthetic oligonucleotide
  Antisense strand to SEQ ID NO: 2318812
aacuuuauuacuguuuccc

SEQ ID NO: 2318814 - RNA, 19 nt, Artificial Sequence
  Description of Artificial Sequence: Synthetic oligonucleotide
  Sense strand starting at position 322 of SEQ ID NO: 1885134
guaauaaaguuggcauguu

SEQ ID NO: 2318815 - RNA, 19 nt, Artificial Sequence
  Description of Artificial Sequence: Synthetic oligonucleotide
  Antisense strand to SEQ ID NO: 2318814
aacaugccaacuuuauuac

SEQ ID NO: 2318816 - RNA, 19 nt, Artificial Sequence
  Description of Artificial Sequence: Synthetic oligonucleotide
  Sense strand starting at position 866 of SEQ ID NO: 1885134
aggagagaguuacuguuua

SEQ ID NO: 2318817 - RNA, 19 nt, Artificial Sequence
  Description of Artificial Sequence: Synthetic oligonucleotide
  Antisense strand to SEQ ID NO: 2318816
uaaacaguaacucucuccu

SEQ ID NO: 2318818 - RNA, 19 nt, Artificial Sequence
  Description of Artificial Sequence: Synthetic oligonucleotide
  Sense strand starting at position 892 of SEQ ID NO: 1885134
caaaguuucuguuuggguu

SEQ ID NO: 2318819 - RNA, 19 nt, Artificial Sequence
  Description of Artificial Sequence: Synthetic oligonucleotide
  Antisense strand to SEQ ID NO: 2318818
aacccaaacagaaacuuug

SEQ ID NO: 2318820 - RNA, 19 nt, Artificial Sequence
  Description of Artificial Sequence: Synthetic oligonucleotide
  Sense strand starting at position 938 of SEQ ID NO: 1885134
gugauagcuguacaacaug

SEQ ID NO: 2318821 - RNA, 19 nt, Artificial Sequence
  Description of Artificial Sequence: Synthetic oligonucleotide
  Antisense strand to SEQ ID NO: 2318820
cauguuguacagcuaucac

SEQ ID NO: 2318822 - RNA, 19 nt, Artificial Sequence
  Description of Artificial Sequence: Synthetic oligonucleotide
  Sense strand starting at position 944 of SEQ ID NO: 1885134
gcuguacaacaugguaaau

SEQ ID NO: 2318823 - RNA, 19 nt, Artificial Sequence
  Description of Artificial Sequence: Synthetic oligonucleotide
  Antisense strand to SEQ ID NO: 2318822
auuuaccauguuguacagc

SEQ ID NO: 2318824 - RNA, 19 nt, Artificial Sequence
  Description of Artificial Sequence: Synthetic oligonucleotide
  Sense strand starting at position 1010 of SEQ ID NO: 1885134
ggcucaugccuaugauaac

SEQ ID NO: 2318825 - RNA, 19 nt, Artificial Sequence
  Description of Artificial Sequence: Synthetic oligonucleotide
  Antisense strand to SEQ ID NO: 2318824
guuaucauaggcaugagcc

SEQ ID NO: 2318826 - RNA, 19 nt, Artificial Sequence
  Description of Artificial Sequence: Synthetic oligonucleotide
  Sense strand starting at position 1218 of SEQ ID NO: 1885134
cucugaggcuaccuguaau

SEQ ID NO: 2318827 - RNA, 19 nt, Artificial Sequence
  Description of Artificial Sequence: Synthetic oligonucleotide
  Antisense strand to SEQ ID NO: 2318826
auuacagguagccucagag

SEQ ID NO: 2318828 - RNA, 19 nt, Artificial Sequence
  Description of Artificial Sequence: Synthetic oligonucleotide
  Sense strand starting at position 1221 of SEQ ID NO: 1885134
ugaggcuaccuguaaugaa

SEQ ID NO: 2318829 - RNA, 19 nt, Artificial Sequence
  Description of Artificial Sequence: Synthetic oligonucleotide
  Antisense strand to SEQ ID NO: 2318828
uucauuacagguagccuca

SEQ ID NO: 2318830 - RNA, 19 nt, Artificial Sequence
  Description of Artificial Sequence: Synthetic oligonucleotide
  Sense strand starting at position 1271 of SEQ ID NO: 1885134
ugaacaaugcuacguuaaa

SEQ ID NO: 2318831 - RNA, 19 nt, Artificial Sequence
  Description of Artificial Sequence: Synthetic oligonucleotide
  Antisense strand to SEQ ID NO: 2318830
uuuaacguagcauuguuca

SEQ ID NO: 2318832 - RNA, 19 nt, Artificial Sequence
  Description of Artificial Sequence: Synthetic oligonucleotide
  Sense strand starting at position 1289 of SEQ ID NO: 1885134
aauuaaauauugcugggua

SEQ ID NO: 2318833 - RNA, 19 nt, Artificial Sequence
  Description of Artificial Sequence: Synthetic oligonucleotide
  Antisense strand to SEQ ID NO: 2318832
uacccagcaauauuuaauu

SEQ ID NO: 2318834 - RNA, 19 nt, Artificial Sequence
  Description of Artificial Sequence: Synthetic oligonucleotide
  Sense strand starting at position 1293 of SEQ ID NO: 1885134
aaauauugcuggguaauac

SEQ ID NO: 2318835 - RNA, 19 nt, Artificial Sequence
  Description of Artificial Sequence: Synthetic oligonucleotide
  Antisense strand to SEQ ID NO: 2318834
guauuacccagcaauauuu

SEQ ID NO: 2318836 - RNA, 19 nt, Artificial Sequence
  Description of Artificial Sequence: Synthetic oligonucleotide
  Sense strand starting at position 1294 of SEQ ID NO: 1885134
aauauugcuggguaauaca

SEQ ID NO: 2318837 - RNA, 19 nt, Artificial Sequence
  Description of Artificial Sequence: Synthetic oligonucleotide
  Antisense strand to SEQ ID NO: 2318836
uguauuacccagcaauauu

SEQ ID NO: 2318838 - RNA, 19 nt, Artificial Sequence
  Description of Artificial Sequence: Synthetic oligonucleotide
  Sense strand starting at position 1308 of SEQ ID NO: 1885134
auacaagauugccugauua

SEQ ID NO: 2318839 - RNA, 19 nt, Artificial Sequence
  Description of Artificial Sequence: Synthetic oligonucleotide
  Antisense strand to SEQ ID NO: 2318838
uaaucaggcaaucuuguau

SEQ ID NO: 2318840 - RNA, 19 nt, Artificial Sequence
  Description of Artificial Sequence: Synthetic oligonucleotide
  Sense strand starting at position 1421 of SEQ ID NO: 1885134
ucugaauggcuaggaaaua

SEQ ID NO: 2318841 - RNA, 19 nt, Artificial Sequence
  Description of Artificial Sequence: Synthetic oligonucleotide
  Antisense strand to SEQ ID NO: 2318840
uauuuccuagccauucaga

SEQ ID NO: 2318842 - RNA, 19 nt, Artificial Sequence
  Description of Artificial Sequence: Synthetic oligonucleotide
  Sense strand starting at position 1422 of SEQ ID NO: 1885134
cugaauggcuaggaaauau

SEQ ID NO: 2318843 - RNA, 19 nt, Artificial Sequence
  Description of Artificial Sequence: Synthetic oligonucleotide
  Antisense strand to SEQ ID NO: 2318842
auauuuccuagccauucag

SEQ ID NO: 2318844 - RNA, 19 nt, Artificial Sequence
  Description of Artificial Sequence: Synthetic oligonucleotide
  Sense strand starting at position 1709 of SEQ ID NO: 1885134
ccuugaucucccgaccagu

SEQ ID NO: 2318845 - RNA, 19 nt, Artificial Sequence
  Description of Artificial Sequence: Synthetic oligonucleotide
  Antisense strand to SEQ ID NO: 2318844
acuggucgggagaucaagg

SEQ ID NO: 2318846 - RNA, 19 nt, Artificial Sequence
  Description of Artificial Sequence: Synthetic oligonucleotide
  Sense strand starting at position 1724 of SEQ ID NO: 1885134
cagugauuggcccaccuca

SEQ ID NO: 2318847 - RNA, 19 nt, Artificial Sequence
  Description of Artificial Sequence: Synthetic oligonucleotide
  Antisense strand to SEQ ID NO: 2318846
ugaggugggccaaucacug

SEQ ID NO: 2318848 - RNA, 19 nt, Artificial Sequence
  Description of Artificial Sequence: Synthetic oligonucleotide
  Sense strand starting at position 1798 of SEQ ID NO: 1885134
gguucuuaagccuaacaua

SEQ ID NO: 2318849 - RNA, 19 nt, Artificial Sequence
  Description of Artificial Sequence: Synthetic oligonucleotide
  Antisense strand to SEQ ID NO: 2318848
uauguuaggcuuaagaacc

SEQ ID NO: 2318850 - RNA, 19 nt, Artificial Sequence
  Description of Artificial Sequence: Synthetic oligonucleotide
  Sense strand starting at position 1888 of SEQ ID NO: 1885134
ggcaauucgcacuggaaua

SEQ ID NO: 2318851 - RNA, 19 nt, Artificial Sequence
  Description of Artificial Sequence: Synthetic oligonucleotide
  Antisense strand to SEQ ID NO: 2318850
uauuccagugcgaauugcc

SEQ ID NO: 2318852 - RNA, 19 nt, Artificial Sequence
  Description of Artificial Sequence: Synthetic oligonucleotide
  Sense strand starting at position 1942 of SEQ ID NO: 1885134
cuuagcuccuguuugaaac

SEQ ID NO: 2318853 - RNA, 19 nt, Artificial Sequence
  Description of Artificial Sequence: Synthetic oligonucleotide
  Antisense strand to SEQ ID NO: 2318852
guuucaaacaggagcuaag

SEQ ID NO: 2318854 - RNA, 19 nt, Artificial Sequence
  Description of Artificial Sequence: Synthetic oligonucleotide
  Sense strand starting at position 1972 of SEQ ID NO: 1885134
gcaaaccauuggucuugau

SEQ ID NO: 2318855 - RNA, 19 nt, Artificial Sequence
  Description of Artificial Sequence: Synthetic oligonucleotide
  Antisense strand to SEQ ID NO: 2318854
aucaagaccaaugguuugc

SEQ ID NO: 2318856 - RNA, 19 nt, Artificial Sequence
  Description of Artificial Sequence: Synthetic oligonucleotide
  Sense strand starting at position 2118 of SEQ ID NO: 1885134
cccuauguuuaauccaguu

SEQ ID NO: 2318857 - RNA, 19 nt, Artificial Sequence
  Description of Artificial Sequence: Synthetic oligonucleotide
  Antisense strand to SEQ ID NO: 2318856
aacuggauuaaacauaggg

SEQ ID NO: 2318858 - RNA, 19 nt, Artificial Sequence
  Description of Artificial Sequence: Synthetic oligonucleotide
  Sense strand starting at position 2141 of SEQ ID NO: 1885134
gaugcuccguguuucuauu

SEQ ID NO: 2318859 - RNA, 19 nt, Artificial Sequence
  Description of Artificial Sequence: Synthetic oligonucleotide
  Antisense strand to SEQ ID NO: 2318858
aauagaaacacggagcauc

SEQ ID NO: 2318860 - RNA, 19 nt, Artificial Sequence
  Description of Artificial Sequence: Synthetic oligonucleotide
  Sense strand starting at position 2169 of SEQ ID NO: 1885134
ucacgagaagcuuaguucu

SEQ ID NO: 2318861 - RNA, 19 nt, Artificial Sequence
  Description of Artificial Sequence: Synthetic oligonucleotide
  Antisense strand to SEQ ID NO: 2318860
agaacuaagcuucucguga

SEQ ID NO: 2318862 - RNA, 19 nt, Artificial Sequence
  Description of Artificial Sequence: Synthetic oligonucleotide
  Sense strand starting at position 2171 of SEQ ID NO: 1885134
acgagaagcuuaguucuac

SEQ ID NO: 2318863 - RNA, 19 nt, Artificial Sequence
  Description of Artificial Sequence: Synthetic oligonucleotide
  Antisense strand to SEQ ID NO: 2318862
guagaacuaagcuucucgu

SEQ ID NO: 2318864 - RNA, 19 nt, Artificial Sequence
  Description of Artificial Sequence: Synthetic oligonucleotide
  Sense strand starting at position 2227 of SEQ ID NO: 1885134
auuuguuggugugcuaauc

SEQ ID NO: 2318865 - RNA, 19 nt, Artificial Sequence
  Description of Artificial Sequence: Synthetic oligonucleotide
  Antisense strand to SEQ ID NO: 2318864
gauuagcacaccaacaaau

SEQ ID NO: 2318866 - RNA, 19 nt, Artificial Sequence
  Description of Artificial Sequence: Synthetic oligonucleotide
  Sense strand starting at position 2498 of SEQ ID NO: 1885134
ccaggcgucuuggcacaua

SEQ ID NO: 2318867 - RNA, 19 nt, Artificial Sequence
  Description of Artificial Sequence: Synthetic oligonucleotide
  Antisense strand to SEQ ID NO: 2318866
uaugugccaagacgccugg

SEQ ID NO: 2318868 - RNA, 19 nt, Artificial Sequence
  Description of Artificial Sequence: Synthetic oligonucleotide
  Sense strand starting at position 2722 of SEQ ID NO: 1885134
ucaggugaguuggaaacuu

SEQ ID NO: 2318869 - RNA, 19 nt, Artificial Sequence
  Description of Artificial Sequence: Synthetic oligonucleotide
  Antisense strand to SEQ ID NO: 2318868
aaguuuccaacucaccuga

SEQ ID NO: 2318870 - RNA, 19 nt, Artificial Sequence
  Description of Artificial Sequence: Synthetic oligonucleotide
  Sense strand starting at position 2762 of SEQ ID NO: 1885134
guguucucacaccauuaag

SEQ ID NO: 2318871 - RNA, 19 nt, Artificial Sequence
  Description of Artificial Sequence: Synthetic oligonucleotide
  Antisense strand to SEQ ID NO: 2318870
cuuaauggugugagaacac

SEQ ID NO: 2318872 - RNA, 19 nt, Artificial Sequence
  Description of Artificial Sequence: Synthetic oligonucleotide
  Sense strand starting at position 3343 of SEQ ID NO: 1885134
gaaggcuuagaccggagaa

SEQ ID NO: 2318873 - RNA, 19 nt, Artificial Sequence
  Description of Artificial Sequence: Synthetic oligonucleotide
  Antisense strand to SEQ ID NO: 2318872
uucuccggucuaagccuuc

SEQ ID NO: 2318874 - RNA, 19 nt, Artificial Sequence
  Description of Artificial Sequence: Synthetic oligonucleotide
  Sense strand starting at position 3344 of SEQ ID NO: 1885134
aaggcuuagaccggagaau

SEQ ID NO: 2318875 - RNA, 19 nt, Artificial Sequence
  Description of Artificial Sequence: Synthetic oligonucleotide
  Antisense strand to SEQ ID NO: 2318874
auucuccggucuaagccuu

SEQ ID NO: 2318876 - RNA, 19 nt, Artificial Sequence
  Description of Artificial Sequence: Synthetic oligonucleotide
  Sense strand starting at position 3457 of SEQ ID NO: 1885134
augacuagcuuggaauuau

SEQ ID NO: 2318877 - RNA, 19 nt, Artificial Sequence
  Description of Artificial Sequence: Synthetic oligonucleotide
  Antisense strand to SEQ ID NO: 2318876
auaauuccaagcuagucau

SEQ ID NO: 2318878 - RNA, 19 nt, Artificial Sequence
  Description of Artificial Sequence: Synthetic oligonucleotide
  Sense strand starting at position 3654 of SEQ ID NO: 1885134
auugaaguaucaggauaua

SEQ ID NO: 2318879 - RNA, 19 nt, Artificial Sequence
  Description of Artificial Sequence: Synthetic oligonucleotide
  Antisense strand to SEQ ID NO: 2318878
uauauccugauacuucaau

SEQ ID NO: 2318880 - RNA, 19 nt, Artificial Sequence
  Description of Artificial Sequence: Synthetic oligonucleotide
  Sense strand starting at position 3702 of SEQ ID NO: 1885134
augucucaugucuauaauc

SEQ ID NO: 2318881 - RNA, 19 nt, Artificial Sequence
  Description of Artificial Sequence: Synthetic oligonucleotide
  Antisense strand to SEQ ID NO: 2318880
gauuauagacaugagacau

SEQ ID NO: 2318882 - RNA, 19 nt, Artificial Sequence
  Description of Artificial Sequence: Synthetic oligonucleotide
  Sense strand starting at position 14 of SEQ ID NO: 1885135
uggcauuucuugccaagca

SEQ ID NO: 2318883 - RNA, 19 nt, Artificial Sequence
  Description of Artificial Sequence: Synthetic oligonucleotide
  Antisense strand to SEQ ID NO: 2318882
ugcuuggcaagaaaugcca

SEQ ID NO: 2318884 - RNA, 19 nt, Artificial Sequence
  Description of Artificial Sequence: Synthetic oligonucleotide
  Sense strand starting at position 15 of SEQ ID NO: 1885135
ggcauuucuugccaagcaa

SEQ ID NO: 2318885 - RNA, 19 nt, Artificial Sequence
  Description of Artificial Sequence: Synthetic oligonucleotide
  Antisense strand to SEQ ID NO: 2318884
uugcuuggcaagaaaugcc

SEQ ID NO: 2318886 - RNA, 19 nt, Artificial Sequence
  Description of Artificial Sequence: Synthetic oligonucleotide
  Sense strand starting at position 155 of SEQ ID NO: 1885135
ugccaaauguaguccuuua

SEQ ID NO: 2318887 - RNA, 19 nt, Artificial Sequence
  Description of Artificial Sequence: Synthetic oligonucleotide
  Antisense strand to SEQ ID NO: 2318886
uaaaggacuacauuuggca

SEQ ID NO: 2318888 - RNA, 19 nt, Artificial Sequence
  Description of Artificial Sequence: Synthetic oligonucleotide
  Sense strand starting at position 163 of SEQ ID NO: 1885135
guaguccuuuaacagaauc

SEQ ID NO: 2318889 - RNA, 19 nt, Artificial Sequence
  Description of Artificial Sequence: Synthetic oligonucleotide
  Antisense strand to SEQ ID NO: 2318888
gauucuguuaaaggacuac

SEQ ID NO: 2318890 - RNA, 19 nt, Artificial Sequence
  Description of Artificial Sequence: Synthetic oligonucleotide
  Sense strand starting at position 182 of SEQ ID NO: 1885135
aagagacauuaugaugguu

SEQ ID NO: 2318891 - RNA, 19 nt, Artificial Sequence
  Description of Artificial Sequence: Synthetic oligonucleotide
  Antisense strand to SEQ ID NO: 2318890
aaccaucauaaugucucuu

SEQ ID NO: 2318892 - RNA, 19 nt, Artificial Sequence
  Description of Artificial Sequence: Synthetic oligonucleotide
  Sense strand starting at position 273 of SEQ ID NO: 1885135
auguuuaaaguaugcaagu

SEQ ID NO: 2318893 - RNA, 19 nt, Artificial Sequence
  Description of Artificial Sequence: Synthetic oligonucleotide
  Antisense strand to SEQ ID NO: 2318892
acuugcauacuuuaaacau

SEQ ID NO: 2318894 - RNA, 19 nt, Artificial Sequence
  Description of Artificial Sequence: Synthetic oligonucleotide
  Sense strand starting at position 274 of SEQ ID NO: 1885135
uguuuaaaguaugcaaguu

SEQ ID NO: 2318895 - RNA, 19 nt, Artificial Sequence
  Description of Artificial Sequence: Synthetic oligonucleotide
  Antisense strand to SEQ ID NO: 2318894
aacuugcauacuuuaaaca

SEQ ID NO: 2318896 - RNA, 19 nt, Artificial Sequence
  Description of Artificial Sequence: Synthetic oligonucleotide
  Sense strand starting at position 303 of SEQ ID NO: 1885135
cacagugacuaaguguuau

SEQ ID NO: 2318897 - RNA, 19 nt, Artificial Sequence
  Description of Artificial Sequence: Synthetic oligonucleotide
  Antisense strand to SEQ ID NO: 2318896
auaacacuuagucacugug

SEQ ID NO: 2318898 - RNA, 19 nt, Artificial Sequence
  Description of Artificial Sequence: Synthetic oligonucleotide
  Sense strand starting at position 307 of SEQ ID NO: 1885135
gugacuaaguguuaucaca

SEQ ID NO: 2318899 - RNA, 19 nt, Artificial Sequence
  Description of Artificial Sequence: Synthetic oligonucleotide
  Antisense strand to SEQ ID NO: 2318898
ugugauaacacuuagucac

SEQ ID NO: 2318900 - RNA, 19 nt, Artificial Sequence
  Description of Artificial Sequence: Synthetic oligonucleotide
  Sense strand starting at position 1197 of SEQ ID NO: 1885135
uugcuugacccaggaguua

SEQ ID NO: 2318901 - RNA, 19 nt, Artificial Sequence
  Description of Artificial Sequence: Synthetic oligonucleotide
  Antisense strand to SEQ ID NO: 2318900
uaacuccugggucaagcaa

SEQ ID NO: 2318902 - RNA, 19 nt, Artificial Sequence
  Description of Artificial Sequence: Synthetic oligonucleotide
  Sense strand starting at position 1738 of SEQ ID NO: 1885135
gcauuaggauccuaauaag

SEQ ID NO: 2318903 - RNA, 19 nt, Artificial Sequence
  Description of Artificial Sequence: Synthetic oligonucleotide
  Antisense strand to SEQ ID NO: 2318902
cuuauuaggauccuaaugc

SEQ ID NO: 2318904 - RNA, 19 nt, Artificial Sequence
  Description of Artificial Sequence: Synthetic oligonucleotide
  Sense strand starting at position 1741 of SEQ ID NO: 1885135
uuaggauccuaauaagcaa

SEQ ID NO: 2318905 - RNA, 19 nt, Artificial Sequence
  Description of Artificial Sequence: Synthetic oligonucleotide
  Antisense strand to SEQ ID NO: 2318904
uugcuuauuaggauccuaa

SEQ ID NO: 2318906 - RNA, 19 nt, Artificial Sequence
  Description of Artificial Sequence: Synthetic oligonucleotide
  Sense strand starting at position 1860 of SEQ ID NO: 1885135
cgacucauguuucuuucua

SEQ ID NO: 2318907 - RNA, 19 nt, Artificial Sequence
  Description of Artificial Sequence: Synthetic oligonucleotide
  Antisense strand to SEQ ID NO: 2318906
uagaaagaaacaugagucg

SEQ ID NO: 2318908 - RNA, 19 nt, Artificial Sequence
  Description of Artificial Sequence: Synthetic oligonucleotide
  Sense strand starting at position 1896 of SEQ ID NO: 1885135
uuuccaaaguuaugaaaug

SEQ ID NO: 2318909 - RNA, 19 nt, Artificial Sequence
  Description of Artificial Sequence: Synthetic oligonucleotide
  Antisense strand to SEQ ID NO: 2318908
cauuucauaacuuuggaaa

SEQ ID NO: 2318910 - RNA, 19 nt, Artificial Sequence
  Description of Artificial Sequence: Synthetic oligonucleotide
  Sense strand starting at position 2037 of SEQ ID NO: 1885135
agagauucccacuagucuu

SEQ ID NO: 2318911 - RNA, 19 nt, Artificial Sequence
  Description of Artificial Sequence: Synthetic oligonucleotide
  Antisense strand to SEQ ID NO: 2318910
aagacuagugggaaucucu

SEQ ID NO: 2318912 - RNA, 19 nt, Artificial Sequence
  Description of Artificial Sequence: Synthetic oligonucleotide
  Sense strand starting at position 2072 of SEQ ID NO: 1885135
agccuuaacaggcagagua

SEQ ID NO: 2318913 - RNA, 19 nt, Artificial Sequence
  Description of Artificial Sequence: Synthetic oligonucleotide
  Antisense strand to SEQ ID NO: 2318912
uacucugccuguuaaggcu

SEQ ID NO: 2318914 - RNA, 19 nt, Artificial Sequence
  Description of Artificial Sequence: Synthetic oligonucleotide
  Sense strand starting at position 2110 of SEQ ID NO: 1885135
gugucuggucauuggaaga

SEQ ID NO: 2318915 - RNA, 19 nt, Artificial Sequence
  Description of Artificial Sequence: Synthetic oligonucleotide
  Antisense strand to SEQ ID NO: 2318914
ucuuccaaugaccagacac

SEQ ID NO: 2318916 - RNA, 19 nt, Artificial Sequence
  Description of Artificial Sequence: Synthetic oligonucleotide
  Sense strand starting at position 2186 of SEQ ID NO: 1885135
gugguaugggccugaaaug

SEQ ID NO: 2318917 - RNA, 19 nt, Artificial Sequence
  Description of Artificial Sequence: Synthetic oligonucleotide
  Antisense strand to SEQ ID NO: 2318916
cauuucaggcccauaccac

SEQ ID NO: 2318918 - RNA, 19 nt, Artificial Sequence
  Description of Artificial Sequence: Synthetic oligonucleotide
  Sense strand starting at position 2241 of SEQ ID NO: 1885135
acaaacaauuacgaugaaa

SEQ ID NO: 2318919 - RNA, 19 nt, Artificial Sequence
  Description of Artificial Sequence: Synthetic oligonucleotide
  Antisense strand to SEQ ID NO: 2318918
uuucaucguaauuguuugu

SEQ ID NO: 2318920 - RNA, 19 nt, Artificial Sequence
  Description of Artificial Sequence: Synthetic oligonucleotide
  Sense strand starting at position 2361 of SEQ ID NO: 1885135
gugcauaaagaaugaguca

SEQ ID NO: 2318921 - RNA, 19 nt, Artificial Sequence
  Description of Artificial Sequence: Synthetic oligonucleotide
  Antisense strand to SEQ ID NO: 2318920
ugacucauucuuuaugcac

SEQ ID NO: 2318922 - RNA, 19 nt, Artificial Sequence
  Description of Artificial Sequence: Synthetic oligonucleotide
  Sense strand starting at position 2645 of SEQ ID NO: 1885135
ccaagcaauuuaggauuaa

SEQ ID NO: 2318923 - RNA, 19 nt, Artificial Sequence
  Description of Artificial Sequence: Synthetic oligonucleotide
  Antisense strand to SEQ ID NO: 2318922
uuaauccuaaauugcuugg

SEQ ID NO: 2318924 - RNA, 19 nt, Artificial Sequence
  Description of Artificial Sequence: Synthetic oligonucleotide
  Sense strand starting at position 2656 of SEQ ID NO: 1885135
aggauuaaccugugcuuau

SEQ ID NO: 2318925 - RNA, 19 nt, Artificial Sequence
  Description of Artificial Sequence: Synthetic oligonucleotide
  Antisense strand to SEQ ID NO: 2318924
auaagcacagguuaauccu

SEQ ID NO: 2318926 - RNA, 19 nt, Artificial Sequence
  Description of Artificial Sequence: Synthetic oligonucleotide
  Sense strand starting at position 2657 of SEQ ID NO: 1885135
ggauuaaccugugcuuauu

SEQ ID NO: 2318927 - RNA, 19 nt, Artificial Sequence
  Description of Artificial Sequence: Synthetic oligonucleotide
  Antisense strand to SEQ ID NO: 2318926
aauaagcacagguuaaucc

SEQ ID NO: 2318928 - RNA, 19 nt, Artificial Sequence
  Description of Artificial Sequence: Synthetic oligonucleotide
  Sense strand starting at position 2663 of SEQ ID NO: 1885135
accugugcuuauuucugaa

SEQ ID NO: 2318929 - RNA, 19 nt, Artificial Sequence
  Description of Artificial Sequence: Synthetic oligonucleotide
  Antisense strand to SEQ ID NO: 2318928
uucagaaauaagcacaggu

SEQ ID NO: 2318930 - RNA, 19 nt, Artificial Sequence
  Description of Artificial Sequence: Synthetic oligonucleotide
  Sense strand starting at position 2666 of SEQ ID NO: 1885135
ugugcuuauuucugaacug

SEQ ID NO: 2318931 - RNA, 19 nt, Artificial Sequence
  Description of Artificial Sequence: Synthetic oligonucleotide
  Antisense strand to SEQ ID NO: 2318930
caguucagaaauaagcaca

SEQ ID NO: 2318932 - RNA, 19 nt, Artificial Sequence
  Description of Artificial Sequence: Synthetic oligonucleotide
  Sense strand starting at position 2667 of SEQ ID NO: 1885135
gugcuuauuucugaacuga

SEQ ID NO: 2318933 - RNA, 19 nt, Artificial Sequence
  Description of Artificial Sequence: Synthetic oligonucleotide
  Antisense strand to SEQ ID NO: 2318932
ucaguucagaaauaagcac

SEQ ID NO: 2318934 - RNA, 19 nt, Artificial Sequence
  Description of Artificial Sequence: Synthetic oligonucleotide
  Sense strand starting at position 2683 of SEQ ID NO: 1885135
ugaagaauaucugaaccaa

SEQ ID NO: 2318935 - RNA, 19 nt, Artificial Sequence
  Description of Artificial Sequence: Synthetic oligonucleotide
  Antisense strand to SEQ ID NO: 2318934
uugguucagauauucuuca

SEQ ID NO: 2318936 - RNA, 19 nt, Artificial Sequence
  Description of Artificial Sequence: Synthetic oligonucleotide
  Sense strand starting at position 3477 of SEQ ID NO: 1885135
gaacguauauaccuuaaag

SEQ ID NO: 2318937 - RNA, 19 nt, Artificial Sequence
  Description of Artificial Sequence: Synthetic oligonucleotide
  Antisense strand to SEQ ID NO: 2318936
cuuuaagguauauacguuc

SEQ ID NO: 2318938 - RNA, 19 nt, Artificial Sequence
  Description of Artificial Sequence: Synthetic oligonucleotide
  Sense strand starting at position 3479 of SEQ ID NO: 1885135
acguauauaccuuaaaggu

SEQ ID NO: 2318939 - RNA, 19 nt, Artificial Sequence
  Description of Artificial Sequence: Synthetic oligonucleotide
  Antisense strand to SEQ ID NO: 2318938
accuuuaagguauauacgu

SEQ ID NO: 2318940 - RNA, 19 nt, Artificial Sequence
  Description of Artificial Sequence: Synthetic oligonucleotide
  Sense strand starting at position 3536 of SEQ ID NO: 1885135
ccagcauucuccguuccuu

SEQ ID NO: 2318941 - RNA, 19 nt, Artificial Sequence
  Description of Artificial Sequence: Synthetic oligonucleotide
  Antisense strand to SEQ ID NO: 2318940
aaggaacggagaaugcugg

SEQ ID NO: 2318942 - RNA, 19 nt, Artificial Sequence
  Description of Artificial Sequence: Synthetic oligonucleotide
  Sense strand starting at position 3593 of SEQ ID NO: 1885135
ggcgguaucgucgcagaca

SEQ ID NO: 2318943 - RNA, 19 nt, Artificial Sequence
  Description of Artificial Sequence: Synthetic oligonucleotide
  Antisense strand to SEQ ID NO: 2318942
ugucugcgacgauaccgcc

SEQ ID NO: 2318944 - RNA, 19 nt, Artificial Sequence
  Description of Artificial Sequence: Synthetic oligonucleotide
  Sense strand starting at position 3595 of SEQ ID NO: 1885135
cgguaucgucgcagacauu

SEQ ID NO: 2318945 - RNA, 19 nt, Artificial Sequence
  Description of Artificial Sequence: Synthetic oligonucleotide
  Antisense strand to SEQ ID NO: 2318944
aaugucugcgacgauaccg

SEQ ID NO: 2318946 - RNA, 19 nt, Artificial Sequence
  Description of Artificial Sequence: Synthetic oligonucleotide
  Sense strand starting at position 3596 of SEQ ID NO: 1885135
gguaucgucgcagacauuu

SEQ ID NO: 2318947 - RNA, 19 nt, Artificial Sequence
  Description of Artificial Sequence: Synthetic oligonucleotide
  Antisense strand to SEQ ID NO: 2318946
aaaugucugcgacgauacc

SEQ ID NO: 2318948 - RNA, 19 nt, Artificial Sequence
  Description of Artificial Sequence: Synthetic oligonucleotide
  Sense strand starting at position 3619 of SEQ ID NO: 1885135
cgcuuuaaguucucucguu

SEQ ID NO: 2318949 - RNA, 19 nt, Artificial Sequence
  Description of Artificial Sequence: Synthetic oligonucleotide
  Antisense strand to SEQ ID NO: 2318948
aacgagagaacuuaaagcg

SEQ ID NO: 2318950 - RNA, 19 nt, Artificial Sequence
  Description of Artificial Sequence: Synthetic oligonucleotide
  Sense strand starting at position 3668 of SEQ ID NO: 1885135
ggagacuacugccuagagu

SEQ ID NO: 2318951 - RNA, 19 nt, Artificial Sequence
  Description of Artificial Sequence: Synthetic oligonucleotide
  Antisense strand to SEQ ID NO: 2318950
acucuaggcaguagucucc

SEQ ID NO: 2318952 - RNA, 19 nt, Artificial Sequence
  Description of Artificial Sequence: Synthetic oligonucleotide
  Sense strand starting at position 3669 of SEQ ID NO: 1885135
gagacuacugccuagaguu

SEQ ID NO: 2318953 - RNA, 19 nt, Artificial Sequence
  Description of Artificial Sequence: Synthetic oligonucleotide
  Antisense strand to SEQ ID NO: 2318952
aacucuaggcaguagucuc

SEQ ID NO: 2318954 - RNA, 19 nt, Artificial Sequence
  Description of Artificial Sequence: Synthetic oligonucleotide
  Sense strand starting at position 3677 of SEQ ID NO: 1885135
ugccuagaguuacaagagu

SEQ ID NO: 2318955 - RNA, 19 nt, Artificial Sequence
  Description of Artificial Sequence: Synthetic oligonucleotide
  Antisense strand to SEQ ID NO: 2318954
acucuuguaacucuaggca

SEQ ID NO: 2318956 - RNA, 19 nt, Artificial Sequence
  Description of Artificial Sequence: Synthetic oligonucleotide
  Sense strand starting at position 3699 of SEQ ID NO: 1885135
gauguuauuugccaagcaa

SEQ ID NO: 2318957 - RNA, 19 nt, Artificial Sequence
  Description of Artificial Sequence: Synthetic oligonucleotide
  Antisense strand to SEQ ID NO: 2318956
uugcuuggcaaauaacauc

SEQ ID NO: 2318958 - RNA, 19 nt, Artificial Sequence
  Description of Artificial Sequence: Synthetic oligonucleotide
  Sense strand starting at position 3725 of SEQ ID NO: 1885135
agguuacgucuccaaguca

SEQ ID NO: 2318959 - RNA, 19 nt, Artificial Sequence
  Description of Artificial Sequence: Synthetic oligonucleotide
  Antisense strand to SEQ ID NO: 2318958
ugacuuggagacguaaccu

SEQ ID NO: 2318960 - RNA, 19 nt, Artificial Sequence
  Description of Artificial Sequence: Synthetic oligonucleotide
  Sense strand starting at position 3767 of SEQ ID NO: 1885135
ggcauaagauaggcaguuu

SEQ ID NO: 2318961 - RNA, 19 nt, Artificial Sequence
  Description of Artificial Sequence: Synthetic oligonucleotide
  Antisense strand to SEQ ID NO: 2318960
aaacugccuaucuuaugcc

SEQ ID NO: 2318962 - RNA, 19 nt, Artificial Sequence
  Description of Artificial Sequence: Synthetic oligonucleotide
  Sense strand starting at position 157 of SEQ ID NO: 1885136
gaauguaaaugcuuaaagu

SEQ ID NO: 2318963 - RNA, 19 nt, Artificial Sequence
  Description of Artificial Sequence: Synthetic oligonucleotide
  Antisense strand to SEQ ID NO: 2318962
acuuuaagcauuuacauuc

SEQ ID NO: 2318964 - RNA, 19 nt, Artificial Sequence
  Description of Artificial Sequence: Synthetic oligonucleotide
  Sense strand starting at position 173 of SEQ ID NO: 1885136
aguuaagaugaugguauaa

SEQ ID NO: 2318965 - RNA, 19 nt, Artificial Sequence
  Description of Artificial Sequence: Synthetic oligonucleotide
  Antisense strand to SEQ ID NO: 2318964
uuauaccaucaucuuaacu

SEQ ID NO: 2318966 - RNA, 19 nt, Artificial Sequence
  Description of Artificial Sequence: Synthetic oligonucleotide
  Sense strand starting at position 183 of SEQ ID NO: 1885136
augguauaacuguaagcca

SEQ ID NO: 2318967 - RNA, 19 nt, Artificial Sequence
  Description of Artificial Sequence: Synthetic oligonucleotide
  Antisense strand to SEQ ID NO: 2318966
uggcuuacaguuauaccau

SEQ ID NO: 2318968 - RNA, 19 nt, Artificial Sequence
  Description of Artificial Sequence: Synthetic oligonucleotide
  Sense strand starting at position 250 of SEQ ID NO: 1885136
gucauaaugcaguauagaa

SEQ ID NO: 2318969 - RNA, 19 nt, Artificial Sequence
  Description of Artificial Sequence: Synthetic oligonucleotide
  Antisense strand to SEQ ID NO: 2318968
uucuauacugcauuaugac

SEQ ID NO: 2318970 - RNA, 19 nt, Artificial Sequence
  Description of Artificial Sequence: Synthetic oligonucleotide
  Sense strand starting at position 394 of SEQ ID NO: 1885136
ggcccaauuucucuauguu

SEQ ID NO: 2318971 - RNA, 19 nt, Artificial Sequence
  Description of Artificial Sequence: Synthetic oligonucleotide
  Antisense strand to SEQ ID NO: 2318970
aacauagagaaauugggcc

SEQ ID NO: 2318972 - RNA, 19 nt, Artificial Sequence
  Description of Artificial Sequence: Synthetic oligonucleotide
  Sense strand starting at position 435 of SEQ ID NO: 1885136
agaauucugagaugguauu

SEQ ID NO: 2318973 - RNA, 19 nt, Artificial Sequence
  Description of Artificial Sequence: Synthetic oligonucleotide
  Antisense strand to SEQ ID NO: 2318972
aauaccaucucagaauucu

SEQ ID NO: 2318974 - RNA, 19 nt, Artificial Sequence
  Description of Artificial Sequence: Synthetic oligonucleotide
  Sense strand starting at position 436 of SEQ ID NO: 1885136
gaauucugagaugguauua

SEQ ID NO: 2318975 - RNA, 19 nt, Artificial Sequence
  Description of Artificial Sequence: Synthetic oligonucleotide
  Antisense strand to SEQ ID NO: 2318974
uaauaccaucucagaauuc

SEQ ID NO: 2318976 - RNA, 19 nt, Artificial Sequence
  Description of Artificial Sequence: Synthetic oligonucleotide
  Sense strand starting at position 612 of SEQ ID NO: 1885136
cagagauggcauuggcauu

SEQ ID NO: 2318977 - RNA, 19 nt, Artificial Sequence
  Description of Artificial Sequence: Synthetic oligonucleotide
  Antisense strand to SEQ ID NO: 2318976
aaugccaaugccaucucug

SEQ ID NO: 2318978 - RNA, 19 nt, Artificial Sequence
  Description of Artificial Sequence: Synthetic oligonucleotide
  Sense strand starting at position 613 of SEQ ID NO: 1885136
agagauggcauuggcauua

SEQ ID NO: 2318979 - RNA, 19 nt, Artificial Sequence
  Description of Artificial Sequence: Synthetic oligonucleotide
  Antisense strand to SEQ ID NO: 2318978
uaaugccaaugccaucucu

SEQ ID NO: 2318980 - RNA, 19 nt, Artificial Sequence
  Description of Artificial Sequence: Synthetic oligonucleotide
  Sense strand starting at position 622 of SEQ ID NO: 1885136
auuggcauuaaucgugaga

SEQ ID NO: 2318981 - RNA, 19 nt, Artificial Sequence
  Description of Artificial Sequence: Synthetic oligonucleotide
  Antisense strand to SEQ ID NO: 2318980
ucucacgauuaaugccaau

SEQ ID NO: 2318982 - RNA, 19 nt, Artificial Sequence
  Description of Artificial Sequence: Synthetic oligonucleotide
  Sense strand starting at position 625 of SEQ ID NO: 1885136
ggcauuaaucgugagaaau

SEQ ID NO: 2318983 - RNA, 19 nt, Artificial Sequence
  Description of Artificial Sequence: Synthetic oligonucleotide
  Antisense strand to SEQ ID NO: 2318982
auuucucacgauuaaugcc

SEQ ID NO: 2318984 - RNA, 19 nt, Artificial Sequence
  Description of Artificial Sequence: Synthetic oligonucleotide
  Sense strand starting at position 783 of SEQ ID NO: 1885136
uacuucuugggauggaagu

SEQ ID NO: 2318985 - RNA, 19 nt, Artificial Sequence
  Description of Artificial Sequence: Synthetic oligonucleotide
  Antisense strand to SEQ ID NO: 2318984
acuuccaucccaagaagua

SEQ ID NO: 2318986 - RNA, 19 nt, Artificial Sequence
  Description of Artificial Sequence: Synthetic oligonucleotide
  Sense strand starting at position 784 of SEQ ID NO: 1885136
acuucuugggauggaagua

SEQ ID NO: 2318987 - RNA, 19 nt, Artificial Sequence
  Description of Artificial Sequence: Synthetic oligonucleotide
  Antisense strand to SEQ ID NO: 2318986
uacuuccaucccaagaagu

SEQ ID NO: 2318988 - RNA, 19 nt, Artificial Sequence
  Description of Artificial Sequence: Synthetic oligonucleotide
  Sense strand starting at position 799 of SEQ ID NO: 1885136
aguaucaucugucccaacu

SEQ ID NO: 2318989 - RNA, 19 nt, Artificial Sequence
  Description of Artificial Sequence: Synthetic oligonucleotide
  Antisense strand to SEQ ID NO: 2318988
aguugggacagaugauacu

SEQ ID NO: 2318990 - RNA, 19 nt, Artificial Sequence
  Description of Artificial Sequence: Synthetic oligonucleotide
  Sense strand starting at position 893 of SEQ ID NO: 1885136
ucaggugacuguuugauau

SEQ ID NO: 2318991 - RNA, 19 nt, Artificial Sequence
  Description of Artificial Sequence: Synthetic oligonucleotide
  Antisense strand to SEQ ID NO: 2318990
auaucaaacagucaccuga

SEQ ID NO: 2318992 - RNA, 19 nt, Artificial Sequence
  Description of Artificial Sequence: Synthetic oligonucleotide
  Sense strand starting at position 1091 of SEQ ID NO: 1885136
guuaaagacugcccaauua

SEQ ID NO: 2318993 - RNA, 19 nt, Artificial Sequence
  Description of Artificial Sequence: Synthetic oligonucleotide
  Antisense strand to SEQ ID NO: 2318992
uaauugggcagucuuuaac

SEQ ID NO: 2318994 - RNA, 19 nt, Artificial Sequence
  Description of Artificial Sequence: Synthetic oligonucleotide
  Sense strand starting at position 1158 of SEQ ID NO: 1885136
cgauauuagggccaucagu

SEQ ID NO: 2318995 - RNA, 19 nt, Artificial Sequence
  Description of Artificial Sequence: Synthetic oligonucleotide
  Antisense strand to SEQ ID NO: 2318994
acugauggcccuaauaucg

SEQ ID NO: 2318996 - RNA, 19 nt, Artificial Sequence
  Description of Artificial Sequence: Synthetic oligonucleotide
  Sense strand starting at position 1315 of SEQ ID NO: 1885136
gggauuaucucucuuucuc

SEQ ID NO: 2318997 - RNA, 19 nt, Artificial Sequence
  Description of Artificial Sequence: Synthetic oligonucleotide
  Antisense strand to SEQ ID NO: 2318996
gagaaagagagauaauccc

SEQ ID NO: 2318998 - RNA, 19 nt, Artificial Sequence
  Description of Artificial Sequence: Synthetic oligonucleotide
  Sense strand starting at position 1566 of SEQ ID NO: 1885136
gccaauccacucugagaca

SEQ ID NO: 2318999 - RNA, 19 nt, Artificial Sequence
  Description of Artificial Sequence: Synthetic oligonucleotide
  Antisense strand to SEQ ID NO: 2318998
ugucucagaguggauuggc

SEQ ID NO: 2319000 - RNA, 19 nt, Artificial Sequence
  Description of Artificial Sequence: Synthetic oligonucleotide
  Sense strand starting at position 1608 of SEQ ID NO: 1885136
uuucgagaucccugggauc

SEQ ID NO: 2319001 - RNA, 19 nt, Artificial Sequence
  Description of Artificial Sequence: Synthetic oligonucleotide
  Antisense strand to SEQ ID NO: 2319000
gaucccagggaucucgaaa

SEQ ID NO: 2319002 - RNA, 19 nt, Artificial Sequence
  Description of Artificial Sequence: Synthetic oligonucleotide
  Sense strand starting at position 1701 of SEQ ID NO: 1885136
uguggucugaaguaugaau

SEQ ID NO: 2319003 - RNA, 19 nt, Artificial Sequence
  Description of Artificial Sequence: Synthetic oligonucleotide
  Antisense strand to SEQ ID NO: 2319002
auucauacuucagaccaca

SEQ ID NO: 2319004 - RNA, 19 nt, Artificial Sequence
  Description of Artificial Sequence: Synthetic oligonucleotide
  Sense strand starting at position 1712 of SEQ ID NO: 1885136
guaugaaucugacuuauca

SEQ ID NO: 2319005 - RNA, 19 nt, Artificial Sequence
  Description of Artificial Sequence: Synthetic oligonucleotide
  Antisense strand to SEQ ID NO: 2319004
ugauaagucagauucauac

SEQ ID NO: 2319006 - RNA, 19 nt, Artificial Sequence
  Description of Artificial Sequence: Synthetic oligonucleotide
  Sense strand starting at position 1805 of SEQ ID NO: 1885136
auccuagucccuuggaaga

SEQ ID NO: 2319007 - RNA, 19 nt, Artificial Sequence
  Description of Artificial Sequence: Synthetic oligonucleotide
  Antisense strand to SEQ ID NO: 2319006
ucuuccaagggacuaggau

SEQ ID NO: 2319008 - RNA, 19 nt, Artificial Sequence
  Description of Artificial Sequence: Synthetic oligonucleotide
  Sense strand starting at position 2053 of SEQ ID NO: 1885136
guccuucuacaaugagaac

SEQ ID NO: 2319009 - RNA, 19 nt, Artificial Sequence
  Description of Artificial Sequence: Synthetic oligonucleotide
  Antisense strand to SEQ ID NO: 2319008
guucucauuguagaaggac

SEQ ID NO: 2319010 - RNA, 19 nt, Artificial Sequence
  Description of Artificial Sequence: Synthetic oligonucleotide
  Sense strand starting at position 2112 of SEQ ID NO: 1885136
cuagauuccuugucucaag

SEQ ID NO: 2319011 - RNA, 19 nt, Artificial Sequence
  Description of Artificial Sequence: Synthetic oligonucleotide
  Antisense strand to SEQ ID NO: 2319010
cuugagacaaggaaucuag

SEQ ID NO: 2319012 - RNA, 19 nt, Artificial Sequence
  Description of Artificial Sequence: Synthetic oligonucleotide
  Sense strand starting at position 2149 of SEQ ID NO: 1885136
uauguccuacucugggaua

SEQ ID NO: 2319013 - RNA, 19 nt, Artificial Sequence
  Description of Artificial Sequence: Synthetic oligonucleotide
  Antisense strand to SEQ ID NO: 2319012
uaucccagaguaggacaua

SEQ ID NO: 2319014 - RNA, 19 nt, Artificial Sequence
  Description of Artificial Sequence: Synthetic oligonucleotide
  Sense strand starting at position 2151 of SEQ ID NO: 1885136
uguccuacucugggauaug

SEQ ID NO: 2319015 - RNA, 19 nt, Artificial Sequence
  Description of Artificial Sequence: Synthetic oligonucleotide
  Antisense strand to SEQ ID NO: 2319014
cauaucccagaguaggaca

SEQ ID NO: 2319016 - RNA, 19 nt, Artificial Sequence
  Description of Artificial Sequence: Synthetic oligonucleotide
  Sense strand starting at position 2274 of SEQ ID NO: 1885136
gguauucaauaagugagag

SEQ ID NO: 2319017 - RNA, 19 nt, Artificial Sequence
  Description of Artificial Sequence: Synthetic oligonucleotide
  Antisense strand to SEQ ID NO: 2319016
cucucacuuauugaauacc

SEQ ID NO: 2319018 - RNA, 19 nt, Artificial Sequence
  Description of Artificial Sequence: Synthetic oligonucleotide
  Sense strand starting at position 2472 of SEQ ID NO: 1885136
aggguuagugaaggaucaa

SEQ ID NO: 2319019 - RNA, 19 nt, Artificial Sequence
  Description of Artificial Sequence: Synthetic oligonucleotide
  Antisense strand to SEQ ID NO: 2319018
uugauccuucacuaacccu

SEQ ID NO: 2319020 - RNA, 19 nt, Artificial Sequence
  Description of Artificial Sequence: Synthetic oligonucleotide
  Sense strand starting at position 3130 of SEQ ID NO: 1885136
aggagagaguuacuguuua

SEQ ID NO: 2319021 - RNA, 19 nt, Artificial Sequence
  Description of Artificial Sequence: Synthetic oligonucleotide
  Antisense strand to SEQ ID NO: 2319020
uaaacaguaacucucuccu

SEQ ID NO: 2319022 - RNA, 19 nt, Artificial Sequence
  Description of Artificial Sequence: Synthetic oligonucleotide
  Sense strand starting at position 3202 of SEQ ID NO: 1885136
gugauagcuguacaacaug

SEQ ID NO: 2319023 - RNA, 19 nt, Artificial Sequence
  Description of Artificial Sequence: Synthetic oligonucleotide
  Antisense strand to SEQ ID NO: 2319022
cauguuguacagcuaucac

SEQ ID NO: 2319024 - RNA, 19 nt, Artificial Sequence
  Description of Artificial Sequence: Synthetic oligonucleotide
  Sense strand starting at position 3208 of SEQ ID NO: 1885136
gcuguacaacaugguaaau

SEQ ID NO: 2319025 - RNA, 19 nt, Artificial Sequence
  Description of Artificial Sequence: Synthetic oligonucleotide
  Antisense strand to SEQ ID NO: 2319024
auuuaccauguuguacagc

SEQ ID NO: 2319026 - RNA, 19 nt, Artificial Sequence
  Description of Artificial Sequence: Synthetic oligonucleotide
  Sense strand starting at position 3485 of SEQ ID NO: 1885136
ugaggcuaccuguaaugaa

SEQ ID NO: 2319027 - RNA, 19 nt, Artificial Sequence
  Description of Artificial Sequence: Synthetic oligonucleotide
  Antisense strand to SEQ ID NO: 2319026
uucauuacagguagccuca

SEQ ID NO: 2319028 - RNA, 19 nt, Artificial Sequence
  Description of Artificial Sequence: Synthetic oligonucleotide
  Sense strand starting at position 3535 of SEQ ID NO: 1885136
ugaacaaugcuacguuaaa

SEQ ID NO: 2319029 - RNA, 19 nt, Artificial Sequence
  Description of Artificial Sequence: Synthetic oligonucleotide
  Antisense strand to SEQ ID NO: 2319028
uuuaacguagcauuguuca

SEQ ID NO: 2319030 - RNA, 19 nt, Artificial Sequence
  Description of Artificial Sequence: Synthetic oligonucleotide
  Sense strand starting at position 3553 of SEQ ID NO: 1885136
aauuaaauauugcugggua

SEQ ID NO: 2319031 - RNA, 19 nt, Artificial Sequence
  Description of Artificial Sequence: Synthetic oligonucleotide
  Antisense strand to SEQ ID NO: 2319030
uacccagcaauauuuaauu

SEQ ID NO: 2319032 - RNA, 19 nt, Artificial Sequence
  Description of Artificial Sequence: Synthetic oligonucleotide
  Sense strand starting at position 3557 of SEQ ID NO: 1885136
aaauauugcuggguaauac

SEQ ID NO: 2319033 - RNA, 19 nt, Artificial Sequence
  Description of Artificial Sequence: Synthetic oligonucleotide
  Antisense strand to SEQ ID NO: 2319032
guauuacccagcaauauuu

SEQ ID NO: 2319034 - RNA, 19 nt, Artificial Sequence
  Description of Artificial Sequence: Synthetic oligonucleotide
  Sense strand starting at position 3558 of SEQ ID NO: 1885136
aauauugcuggguaauaca

SEQ ID NO: 2319035 - RNA, 19 nt, Artificial Sequence
  Description of Artificial Sequence: Synthetic oligonucleotide
  Antisense strand to SEQ ID NO: 2319034
uguauuacccagcaauauu

SEQ ID NO: 2319036 - RNA, 19 nt, Artificial Sequence
  Description of Artificial Sequence: Synthetic oligonucleotide
  Sense strand starting at position 3572 of SEQ ID NO: 1885136
auacaagauugccugauua

SEQ ID NO: 2319037 - RNA, 19 nt, Artificial Sequence
  Description of Artificial Sequence: Synthetic oligonucleotide
  Antisense strand to SEQ ID NO: 2319036
uaaucaggcaaucuuguau

SEQ ID NO: 2319038 - RNA, 19 nt, Artificial Sequence
  Description of Artificial Sequence: Synthetic oligonucleotide
  Sense strand starting at position 3685 of SEQ ID NO: 1885136
ucugaauggcuaggaaaua

SEQ ID NO: 2319039 - RNA, 19 nt, Artificial Sequence
  Description of Artificial Sequence: Synthetic oligonucleotide
  Antisense strand to SEQ ID NO: 2319038
uauuuccuagccauucaga

SEQ ID NO: 2319040 - RNA, 19 nt, Artificial Sequence
  Description of Artificial Sequence: Synthetic oligonucleotide
  Sense strand starting at position 3973 of SEQ ID NO: 1885136
ccuugaucucccgaccagu

SEQ ID NO: 2319041 - RNA, 19 nt, Artificial Sequence
  Description of Artificial Sequence: Synthetic oligonucleotide
  Antisense strand to SEQ ID NO: 2319040
acuggucgggagaucaagg

SEQ ID NO: 2319042 - RNA, 19 nt, Artificial Sequence
  Description of Artificial Sequence: Synthetic oligonucleotide
  Sense strand starting at position 722 of SEQ ID NO: 1885137
cugagauacucugcaagag

SEQ ID NO: 2319043 - RNA, 19 nt, Artificial Sequence
  Description of Artificial Sequence: Synthetic oligonucleotide
  Antisense strand to SEQ ID NO: 2319042
cucuugcagaguaucucag

SEQ ID NO: 2319044 - RNA, 19 nt, Artificial Sequence
  Description of Artificial Sequence: Synthetic oligonucleotide
  Sense strand starting at position 769 of SEQ ID NO: 1885137
agaugacuugugugagcag

SEQ ID NO: 2319045 - RNA, 19 nt, Artificial Sequence
  Description of Artificial Sequence: Synthetic oligonucleotide
  Antisense strand to SEQ ID NO: 2319044
cugcucacacaagucaucu

SEQ ID NO: 2319046 - RNA, 19 nt, Artificial Sequence
  Description of Artificial Sequence: Synthetic oligonucleotide
  Sense strand starting at position 807 of SEQ ID NO: 1885137
caagcaaauguugaguaua

SEQ ID NO: 2319047 - RNA, 19 nt, Artificial Sequence
  Description of Artificial Sequence: Synthetic oligonucleotide
  Antisense strand to SEQ ID NO: 2319046
uauacucaacauuugcuug

SEQ ID NO: 2319048 - RNA, 19 nt, Artificial Sequence
  Description of Artificial Sequence: Synthetic oligonucleotide
  Sense strand starting at position 809 of SEQ ID NO: 1885137
agcaaauguugaguauaaa

SEQ ID NO: 2319049 - RNA, 19 nt, Artificial Sequence
  Description of Artificial Sequence: Synthetic oligonucleotide
  Antisense strand to SEQ ID NO: 2319048
uuuauacucaacauuugcu

SEQ ID NO: 2319050 - RNA, 19 nt, Artificial Sequence
  Description of Artificial Sequence: Synthetic oligonucleotide
  Sense strand starting at position 810 of SEQ ID NO: 1885137
gcaaauguugaguauaaau

SEQ ID NO: 2319051 - RNA, 19 nt, Artificial Sequence
  Description of Artificial Sequence: Synthetic oligonucleotide
  Antisense strand to SEQ ID NO: 2319050
auuuauacucaacauuugc

SEQ ID NO: 2319052 - RNA, 19 nt, Artificial Sequence
  Description of Artificial Sequence: Synthetic oligonucleotide
  Sense strand starting at position 856 of SEQ ID NO: 1885137
aaauguaaguuugucugaa

SEQ ID NO: 2319053 - RNA, 19 nt, Artificial Sequence
  Description of Artificial Sequence: Synthetic oligonucleotide
  Antisense strand to SEQ ID NO: 2319052
uucagacaaacuuacauuu

SEQ ID NO: 2319054 - RNA, 19 nt, Artificial Sequence
  Description of Artificial Sequence: Synthetic oligonucleotide
  Sense strand starting at position 857 of SEQ ID NO: 1885137
aauguaaguuugucugaag

SEQ ID NO: 2319055 - RNA, 19 nt, Artificial Sequence
  Description of Artificial Sequence: Synthetic oligonucleotide
  Antisense strand to SEQ ID NO: 2319054
cuucagacaaacuuacauu

SEQ ID NO: 2319056 - RNA, 19 nt, Artificial Sequence
  Description of Artificial Sequence: Synthetic oligonucleotide
  Sense strand starting at position 938 of SEQ ID NO: 1885137
ugcauuagugcuucuugca

SEQ ID NO: 2319057 - RNA, 19 nt, Artificial Sequence
  Description of Artificial Sequence: Synthetic oligonucleotide
  Antisense strand to SEQ ID NO: 2319056
ugcaagaagcacuaaugca

SEQ ID NO: 2319058 - RNA, 19 nt, Artificial Sequence
  Description of Artificial Sequence: Synthetic oligonucleotide
  Sense strand starting at position 939 of SEQ ID NO: 1885137
gcauuagugcuucuugcac

SEQ ID NO: 2319059 - RNA, 19 nt, Artificial Sequence
  Description of Artificial Sequence: Synthetic oligonucleotide
  Antisense strand to SEQ ID NO: 2319058
gugcaagaagcacuaaugc

SEQ ID NO: 2319060 - RNA, 19 nt, Artificial Sequence
  Description of Artificial Sequence: Synthetic oligonucleotide
  Sense strand starting at position 967 of SEQ ID NO: 1885137
cugcaaagcuucucauuga

SEQ ID NO: 2319061 - RNA, 19 nt, Artificial Sequence
  Description of Artificial Sequence: Synthetic oligonucleotide
  Antisense strand to SEQ ID NO: 2319060
ucaaugagaagcuuugcag

SEQ ID NO: 2319062 - RNA, 19 nt, Artificial Sequence
  Description of Artificial Sequence: Synthetic oligonucleotide
  Sense strand starting at position 1265 of SEQ ID NO: 1885137
aucaguuccuaagaugaaa

SEQ ID NO: 2319063 - RNA, 19 nt, Artificial Sequence
  Description of Artificial Sequence: Synthetic oligonucleotide
  Antisense strand to SEQ ID NO: 2319062
uuucaucuuaggaacugau

SEQ ID NO: 2319064 - RNA, 19 nt, Artificial Sequence
  Description of Artificial Sequence: Synthetic oligonucleotide
  Sense strand starting at position 1292 of SEQ ID NO: 1885137
aggaguuaguauucuugga

SEQ ID NO: 2319065 - RNA, 19 nt, Artificial Sequence
  Description of Artificial Sequence: Synthetic oligonucleotide
  Antisense strand to SEQ ID NO: 2319064
uccaagaauacuaacuccu

SEQ ID NO: 2319066 - RNA, 19 nt, Artificial Sequence
  Description of Artificial Sequence: Synthetic oligonucleotide
  Sense strand starting at position 1294 of SEQ ID NO: 1885137
gaguuaguauucuuggaaa

SEQ ID NO: 2319067 - RNA, 19 nt, Artificial Sequence
  Description of Artificial Sequence: Synthetic oligonucleotide
  Antisense strand to SEQ ID NO: 2319066
uuuccaagaauacuaacuc

SEQ ID NO: 2319068 - RNA, 19 nt, Artificial Sequence
  Description of Artificial Sequence: Synthetic oligonucleotide
  Sense strand starting at position 1813 of SEQ ID NO: 1885137
uaacaucagccaugaguga

SEQ ID NO: 2319069 - RNA, 19 nt, Artificial Sequence
  Description of Artificial Sequence: Synthetic oligonucleotide
  Antisense strand to SEQ ID NO: 2319068
ucacucauggcugauguua

SEQ ID NO: 2319070 - RNA, 19 nt, Artificial Sequence
  Description of Artificial Sequence: Synthetic oligonucleotide
  Sense strand starting at position 2017 of SEQ ID NO: 1885137
cgugaaggauaguccucua

SEQ ID NO: 2319071 - RNA, 19 nt, Artificial Sequence
  Description of Artificial Sequence: Synthetic oligonucleotide
  Antisense strand to SEQ ID NO: 2319070
uagaggacuauccuucacg

SEQ ID NO: 2319072 - RNA, 19 nt, Artificial Sequence
  Description of Artificial Sequence: Synthetic oligonucleotide
  Sense strand starting at position 2020 of SEQ ID NO: 1885137
gaaggauaguccucuaacc

SEQ ID NO: 2319073 - RNA, 19 nt, Artificial Sequence
  Description of Artificial Sequence: Synthetic oligonucleotide
  Antisense strand to SEQ ID NO: 2319072
gguuagaggacuauccuuc

SEQ ID NO: 2319074 - RNA, 19 nt, Artificial Sequence
  Description of Artificial Sequence: Synthetic oligonucleotide
  Sense strand starting at position 2022 of SEQ ID NO: 1885137
aggauaguccucuaaccuc

SEQ ID NO: 2319075 - RNA, 19 nt, Artificial Sequence
  Description of Artificial Sequence: Synthetic oligonucleotide
  Antisense strand to SEQ ID NO: 2319074
gagguuagaggacuauccu

SEQ ID NO: 2319076 - RNA, 19 nt, Artificial Sequence
  Description of Artificial Sequence: Synthetic oligonucleotide
  Sense strand starting at position 2084 of SEQ ID NO: 1885137
uaacgauuucugugccaga

SEQ ID NO: 2319077 - RNA, 19 nt, Artificial Sequence
  Description of Artificial Sequence: Synthetic oligonucleotide
  Antisense strand to SEQ ID NO: 2319076
ucuggcacagaaaucguua

SEQ ID NO: 2319078 - RNA, 19 nt, Artificial Sequence
  Description of Artificial Sequence: Synthetic oligonucleotide
  Sense strand starting at position 2363 of SEQ ID NO: 1885137
gugaaaugcugggcaguuu

SEQ ID NO: 2319079 - RNA, 19 nt, Artificial Sequence
  Description of Artificial Sequence: Synthetic oligonucleotide
  Antisense strand to SEQ ID NO: 2319078
aaacugcccagcauuucac

SEQ ID NO: 2319080 - RNA, 19 nt, Artificial Sequence
  Description of Artificial Sequence: Synthetic oligonucleotide
  Sense strand starting at position 2374 of SEQ ID NO: 1885137
ggcaguuucugcucaugaa

SEQ ID NO: 2319081 - RNA, 19 nt, Artificial Sequence
  Description of Artificial Sequence: Synthetic oligonucleotide
  Antisense strand to SEQ ID NO: 2319080
uucaugagcagaaacugcc

SEQ ID NO: 2319082 - RNA, 19 nt, Artificial Sequence
  Description of Artificial Sequence: Synthetic oligonucleotide
  Sense strand starting at position 2458 of SEQ ID NO: 1885137
uguucucaacugugaauua

SEQ ID NO: 2319083 - RNA, 19 nt, Artificial Sequence
  Description of Artificial Sequence: Synthetic oligonucleotide
  Antisense strand to SEQ ID NO: 2319082
uaauucacaguugagaaca

SEQ ID NO: 2319084 - RNA, 19 nt, Artificial Sequence
  Description of Artificial Sequence: Synthetic oligonucleotide
  Sense strand starting at position 2505 of SEQ ID NO: 1885137
gacagaucuuaaguggugu

SEQ ID NO: 2319085 - RNA, 19 nt, Artificial Sequence
  Description of Artificial Sequence: Synthetic oligonucleotide
  Antisense strand to SEQ ID NO: 2319084
acaccacuuaagaucuguc

SEQ ID NO: 2319086 - RNA, 19 nt, Artificial Sequence
  Description of Artificial Sequence: Synthetic oligonucleotide
  Sense strand starting at position 2525 of SEQ ID NO: 1885137
uuuguugucauguaaguaa

SEQ ID NO: 2319087 - RNA, 19 nt, Artificial Sequence
  Description of Artificial Sequence: Synthetic oligonucleotide
  Antisense strand to SEQ ID NO: 2319086
uuacuuacaugacaacaaa

SEQ ID NO: 2319088 - RNA, 19 nt, Artificial Sequence
  Description of Artificial Sequence: Synthetic oligonucleotide
  Sense strand starting at position 2559 of SEQ ID NO: 1885137
gaauuacuaggucaagcau

SEQ ID NO: 2319089 - RNA, 19 nt, Artificial Sequence
  Description of Artificial Sequence: Synthetic oligonucleotide
  Antisense strand to SEQ ID NO: 2319088
augcuugaccuaguaauuc

SEQ ID NO: 2319090 - RNA, 19 nt, Artificial Sequence
  Description of Artificial Sequence: Synthetic oligonucleotide
  Sense strand starting at position 2611 of SEQ ID NO: 1885137
ggcugccuucuagaacuau

SEQ ID NO: 2319091 - RNA, 19 nt, Artificial Sequence
  Description of Artificial Sequence: Synthetic oligonucleotide
  Antisense strand to SEQ ID NO: 2319090
auaguucuagaaggcagcc

SEQ ID NO: 2319092 - RNA, 19 nt, Artificial Sequence
  Description of Artificial Sequence: Synthetic oligonucleotide
  Sense strand starting at position 2636 of SEQ ID NO: 1885137
uuaugcuuucacgggagga

SEQ ID NO: 2319093 - RNA, 19 nt, Artificial Sequence
  Description of Artificial Sequence: Synthetic oligonucleotide
  Antisense strand to SEQ ID NO: 2319092
uccucccgugaaagcauaa

SEQ ID NO: 2319094 - RNA, 19 nt, Artificial Sequence
  Description of Artificial Sequence: Synthetic oligonucleotide
  Sense strand starting at position 2638 of SEQ ID NO: 1885137
augcuuucacgggaggaua

SEQ ID NO: 2319095 - RNA, 19 nt, Artificial Sequence
  Description of Artificial Sequence: Synthetic oligonucleotide
  Antisense strand to SEQ ID NO: 2319094
uauccucccgugaaagcau

SEQ ID NO: 2319096 - RNA, 19 nt, Artificial Sequence
  Description of Artificial Sequence: Synthetic oligonucleotide
  Sense strand starting at position 2651 of SEQ ID NO: 1885137
aggauaugagagugucuga

SEQ ID NO: 2319097 - RNA, 19 nt, Artificial Sequence
  Description of Artificial Sequence: Synthetic oligonucleotide
  Antisense strand to SEQ ID NO: 2319096
ucagacacucucauauccu

SEQ ID NO: 2319098 - RNA, 19 nt, Artificial Sequence
  Description of Artificial Sequence: Synthetic oligonucleotide
  Sense strand starting at position 2669 of SEQ ID NO: 1885137
acucacugugccugaugaa

SEQ ID NO: 2319099 - RNA, 19 nt, Artificial Sequence
  Description of Artificial Sequence: Synthetic oligonucleotide
  Antisense strand to SEQ ID NO: 2319098
uucaucaggcacagugagu

SEQ ID NO: 2319100 - RNA, 19 nt, Artificial Sequence
  Description of Artificial Sequence: Synthetic oligonucleotide
  Sense strand starting at position 2670 of SEQ ID NO: 1885137
cucacugugccugaugaaa

SEQ ID NO: 2319101 - RNA, 19 nt, Artificial Sequence
  Description of Artificial Sequence: Synthetic oligonucleotide
  Antisense strand to SEQ ID NO: 2319100
uuucaucaggcacagugag

SEQ ID NO: 2319102 - RNA, 19 nt, Artificial Sequence
  Description of Artificial Sequence: Synthetic oligonucleotide
  Sense strand starting at position 2723 of SEQ ID NO: 1885137
ugggcauauuacccuaacu

SEQ ID NO: 2319103 - RNA, 19 nt, Artificial Sequence
  Description of Artificial Sequence: Synthetic oligonucleotide
  Antisense strand to SEQ ID NO: 2319102
aguuaggguaauaugccca

SEQ ID NO: 2319104 - RNA, 19 nt, Artificial Sequence
  Description of Artificial Sequence: Synthetic oligonucleotide
  Sense strand starting at position 2725 of SEQ ID NO: 1885137
ggcauauuacccuaacuug

SEQ ID NO: 2319105 - RNA, 19 nt, Artificial Sequence
  Description of Artificial Sequence: Synthetic oligonucleotide
  Antisense strand to SEQ ID NO: 2319104
caaguuaggguaauaugcc

SEQ ID NO: 2319106 - RNA, 19 nt, Artificial Sequence
  Description of Artificial Sequence: Synthetic oligonucleotide
  Sense strand starting at position 2754 of SEQ ID NO: 1885137
cauucuaaauugguuggaa

SEQ ID NO: 2319107 - RNA, 19 nt, Artificial Sequence
  Description of Artificial Sequence: Synthetic oligonucleotide
  Antisense strand to SEQ ID NO: 2319106
uuccaaccaauuuagaaug

SEQ ID NO: 2319108 - RNA, 19 nt, Artificial Sequence
  Description of Artificial Sequence: Synthetic oligonucleotide
  Sense strand starting at position 2755 of SEQ ID NO: 1885137
auucuaaauugguuggaau

SEQ ID NO: 2319109 - RNA, 19 nt, Artificial Sequence
  Description of Artificial Sequence: Synthetic oligonucleotide
  Antisense strand to SEQ ID NO: 2319108
auuccaaccaauuuagaau

SEQ ID NO: 2319110 - RNA, 19 nt, Artificial Sequence
  Description of Artificial Sequence: Synthetic oligonucleotide
  Sense strand starting at position 2756 of SEQ ID NO: 1885137
uucuaaauugguuggaauu

SEQ ID NO: 2319111 - RNA, 19 nt, Artificial Sequence
  Description of Artificial Sequence: Synthetic oligonucleotide
  Antisense strand to SEQ ID NO: 2319110
aauuccaaccaauuuagaa

SEQ ID NO: 2319112 - RNA, 19 nt, Artificial Sequence
  Description of Artificial Sequence: Synthetic oligonucleotide
  Sense strand starting at position 2822 of SEQ ID NO: 1885137
cgucuuaaugaugauugca

SEQ ID NO: 2319113 - RNA, 19 nt, Artificial Sequence
  Description of Artificial Sequence: Synthetic oligonucleotide
  Antisense strand to SEQ ID NO: 2319112
ugcaaucaucauuaagacg

SEQ ID NO: 2319114 - RNA, 19 nt, Artificial Sequence
  Description of Artificial Sequence: Synthetic oligonucleotide
  Sense strand starting at position 2838 of SEQ ID NO: 1885137
gcaggucaccggcauuuau

SEQ ID NO: 2319115 - RNA, 19 nt, Artificial Sequence
  Description of Artificial Sequence: Synthetic oligonucleotide
  Antisense strand to SEQ ID NO: 2319114
auaaaugccggugaccugc

SEQ ID NO: 2319116 - RNA, 19 nt, Artificial Sequence
  Description of Artificial Sequence: Synthetic oligonucleotide
  Sense strand starting at position 2848 of SEQ ID NO: 1885137
ggcauuuauucugagacau

SEQ ID NO: 2319117 - RNA, 19 nt, Artificial Sequence
  Description of Artificial Sequence: Synthetic oligonucleotide
  Antisense strand to SEQ ID NO: 2319116
augucucagaauaaaugcc

SEQ ID NO: 2319118 - RNA, 19 nt, Artificial Sequence
  Description of Artificial Sequence: Synthetic oligonucleotide
  Sense strand starting at position 3226 of SEQ ID NO: 1885137
uuccaacuucccugggaaa

SEQ ID NO: 2319119 - RNA, 19 nt, Artificial Sequence
  Description of Artificial Sequence: Synthetic oligonucleotide
  Antisense strand to SEQ ID NO: 2319118
uuucccagggaaguuggaa

SEQ ID NO: 2319120 - RNA, 19 nt, Artificial Sequence
  Description of Artificial Sequence: Synthetic oligonucleotide
  Sense strand starting at position 3843 of SEQ ID NO: 1885137
cuggaaacuuugggacaaa

SEQ ID NO: 2319121 - RNA, 19 nt, Artificial Sequence
  Description of Artificial Sequence: Synthetic oligonucleotide
  Antisense strand to SEQ ID NO: 2319120
uuugucccaaaguuuccag

SEQ ID NO: 2319122 - RNA, 19 nt, Artificial Sequence
  Description of Artificial Sequence: Synthetic oligonucleotide
  Sense strand starting at position 609 of SEQ ID NO: 1885138
agcugucuauccuauguaa

SEQ ID NO: 2319123 - RNA, 19 nt, Artificial Sequence
  Description of Artificial Sequence: Synthetic oligonucleotide
  Antisense strand to SEQ ID NO: 2319122
uuacauaggauagacagcu

SEQ ID NO: 2319124 - RNA, 19 nt, Artificial Sequence
  Description of Artificial Sequence: Synthetic oligonucleotide
  Sense strand starting at position 710 of SEQ ID NO: 1885138
gugcaacaguaagaucaau

SEQ ID NO: 2319125 - RNA, 19 nt, Artificial Sequence
  Description of Artificial Sequence: Synthetic oligonucleotide
  Antisense strand to SEQ ID NO: 2319124
auugaucuuacuguugcac

SEQ ID NO: 2319126 - RNA, 19 nt, Artificial Sequence
  Description of Artificial Sequence: Synthetic oligonucleotide
  Sense strand starting at position 774 of SEQ ID NO: 1885138
ggaacuaguuagcaaguau

SEQ ID NO: 2319127 - RNA, 19 nt, Artificial Sequence
  Description of Artificial Sequence: Synthetic oligonucleotide
  Antisense strand to SEQ ID NO: 2319126
auacuugcuaacuaguucc

SEQ ID NO: 2319128 - RNA, 19 nt, Artificial Sequence
  Description of Artificial Sequence: Synthetic oligonucleotide
  Sense strand starting at position 785 of SEQ ID NO: 1885138
gcaaguauuuaugaauccu

SEQ ID NO: 2319129 - RNA, 19 nt, Artificial Sequence
  Description of Artificial Sequence: Synthetic oligonucleotide
  Antisense strand to SEQ ID NO: 2319128
aggauucauaaauacuugc

SEQ ID NO: 2319130 - RNA, 19 nt, Artificial Sequence
  Description of Artificial Sequence: Synthetic oligonucleotide
  Sense strand starting at position 1370 of SEQ ID NO: 1885138
gacuaugccucagggaaac

SEQ ID NO: 2319131 - RNA, 19 nt, Artificial Sequence
  Description of Artificial Sequence: Synthetic oligonucleotide
  Antisense strand to SEQ ID NO: 2319130
guuucccugaggcauaguc

SEQ ID NO: 2319132 - RNA, 19 nt, Artificial Sequence
  Description of Artificial Sequence: Synthetic oligonucleotide
  Sense strand starting at position 1410 of SEQ ID NO: 1885138
uuauaaccuuuggaguauu

SEQ ID NO: 2319133 - RNA, 19 nt, Artificial Sequence
  Description of Artificial Sequence: Synthetic oligonucleotide
  Antisense strand to SEQ ID NO: 2319132
aauacuccaaagguuauaa

SEQ ID NO: 2319134 - RNA, 19 nt, Artificial Sequence
  Description of Artificial Sequence: Synthetic oligonucleotide
  Sense strand starting at position 1479 of SEQ ID NO: 1885138
ucagacaaguguguucuaa

SEQ ID NO: 2319135 - RNA, 19 nt, Artificial Sequence
  Description of Artificial Sequence: Synthetic oligonucleotide
  Antisense strand to SEQ ID NO: 2319134
uuagaacacacuugucuga

SEQ ID NO: 2319136 - RNA, 19 nt, Artificial Sequence
  Description of Artificial Sequence: Synthetic oligonucleotide
  Sense strand starting at position 1481 of SEQ ID NO: 1885138
agacaaguguguucuaagu

SEQ ID NO: 2319137 - RNA, 19 nt, Artificial Sequence
  Description of Artificial Sequence: Synthetic oligonucleotide
  Antisense strand to SEQ ID NO: 2319136
acuuagaacacacuugucu

SEQ ID NO: 2319138 - RNA, 19 nt, Artificial Sequence
  Description of Artificial Sequence: Synthetic oligonucleotide
  Sense strand starting at position 1483 of SEQ ID NO: 1885138
acaaguguguucuaaguaa

SEQ ID NO: 2319139 - RNA, 19 nt, Artificial Sequence
  Description of Artificial Sequence: Synthetic oligonucleotide
  Antisense strand to SEQ ID NO: 2319138
uuacuuagaacacacuugu

SEQ ID NO: 2319140 - RNA, 19 nt, Artificial Sequence
  Description of Artificial Sequence: Synthetic oligonucleotide
  Sense strand starting at position 1487 of SEQ ID NO: 1885138
guguguucuaaguaauucg

SEQ ID NO: 2319141 - RNA, 19 nt, Artificial Sequence
  Description of Artificial Sequence: Synthetic oligonucleotide
  Antisense strand to SEQ ID NO: 2319140
cgaauuacuuagaacacac

SEQ ID NO: 2319142 - RNA, 19 nt, Artificial Sequence
  Description of Artificial Sequence: Synthetic oligonucleotide
  Sense strand starting at position 1494 of SEQ ID NO: 1885138
cuaaguaauucguaccuau

SEQ ID NO: 2319143 - RNA, 19 nt, Artificial Sequence
  Description of Artificial Sequence: Synthetic oligonucleotide
  Antisense strand to SEQ ID NO: 2319142
auagguacgaauuacuuag

SEQ ID NO: 2319144 - RNA, 19 nt, Artificial Sequence
  Description of Artificial Sequence: Synthetic oligonucleotide
  Sense strand starting at position 1497 of SEQ ID NO: 1885138
aguaauucguaccuaugua

SEQ ID NO: 2319145 - RNA, 19 nt, Artificial Sequence
  Description of Artificial Sequence: Synthetic oligonucleotide
  Antisense strand to SEQ ID NO: 2319144
uacauagguacgaauuacu

SEQ ID NO: 2319146 - RNA, 19 nt, Artificial Sequence
  Description of Artificial Sequence: Synthetic oligonucleotide
  Sense strand starting at position 1674 of SEQ ID NO: 1885138
uguagaaucuaggaaauca

SEQ ID NO: 2319147 - RNA, 19 nt, Artificial Sequence
  Description of Artificial Sequence: Synthetic oligonucleotide
  Antisense strand to SEQ ID NO: 2319146
ugauuuccuagauucuaca

SEQ ID NO: 2319148 - RNA, 19 nt, Artificial Sequence
  Description of Artificial Sequence: Synthetic oligonucleotide
  Sense strand starting at position 1725 of SEQ ID NO: 1885138
ucuaucagagacugucauu

SEQ ID NO: 2319149 - RNA, 19 nt, Artificial Sequence
  Description of Artificial Sequence: Synthetic oligonucleotide
  Antisense strand to SEQ ID NO: 2319148
aaugacagucucugauaga

SEQ ID NO: 2319150 - RNA, 19 nt, Artificial Sequence
  Description of Artificial Sequence: Synthetic oligonucleotide
  Sense strand starting at position 1728 of SEQ ID NO: 1885138
aucagagacugucauuauu

SEQ ID NO: 2319151 - RNA, 19 nt, Artificial Sequence
  Description of Artificial Sequence: Synthetic oligonucleotide
  Antisense strand to SEQ ID NO: 2319150
aauaaugacagucucugau

SEQ ID NO: 2319152 - RNA, 19 nt, Artificial Sequence
  Description of Artificial Sequence: Synthetic oligonucleotide
  Sense strand starting at position 1749 of SEQ ID NO: 1885138
cagaaauguccgcacacga

SEQ ID NO: 2319153 - RNA, 19 nt, Artificial Sequence
  Description of Artificial Sequence: Synthetic oligonucleotide
  Antisense strand to SEQ ID NO: 2319152
ucgugugcggacauuucug

SEQ ID NO: 2319154 - RNA, 19 nt, Artificial Sequence
  Description of Artificial Sequence: Synthetic oligonucleotide
  Sense strand starting at position 1995 of SEQ ID NO: 1885138
gcauguuguggucauggaa

SEQ ID NO: 2319155 - RNA, 19 nt, Artificial Sequence
  Description of Artificial Sequence: Synthetic oligonucleotide
  Antisense strand to SEQ ID NO: 2319154
uuccaugaccacaacaugc

SEQ ID NO: 2319156 - RNA, 19 nt, Artificial Sequence
  Description of Artificial Sequence: Synthetic oligonucleotide
  Sense strand starting at position 1998 of SEQ ID NO: 1885138
uguuguggucauggaaauu

SEQ ID NO: 2319157 - RNA, 19 nt, Artificial Sequence
  Description of Artificial Sequence: Synthetic oligonucleotide
  Antisense strand to SEQ ID NO: 2319156
aauuuccaugaccacaaca

SEQ ID NO: 2319158 - RNA, 19 nt, Artificial Sequence
  Description of Artificial Sequence: Synthetic oligonucleotide
  Sense strand starting at position 2010 of SEQ ID NO: 1885138
ggaaauucuuaacugugaa

SEQ ID NO: 2319159 - RNA, 19 nt, Artificial Sequence
  Description of Artificial Sequence: Synthetic oligonucleotide
  Antisense strand to SEQ ID NO: 2319158
uucacaguuaagaauuucc

SEQ ID NO: 2319160 - RNA, 19 nt, Artificial Sequence
  Description of Artificial Sequence: Synthetic oligonucleotide
  Sense strand starting at position 2014 of SEQ ID NO: 1885138
auucuuaacugugaauaga

SEQ ID NO: 2319161 - RNA, 19 nt, Artificial Sequence
  Description of Artificial Sequence: Synthetic oligonucleotide
  Antisense strand to SEQ ID NO: 2319160
ucuauucacaguuaagaau

SEQ ID NO: 2319162 - RNA, 19 nt, Artificial Sequence
  Description of Artificial Sequence: Synthetic oligonucleotide
  Sense strand starting at position 2024 of SEQ ID NO: 1885138
gugaauagaucacaaggau

SEQ ID NO: 2319163 - RNA, 19 nt, Artificial Sequence
  Description of Artificial Sequence: Synthetic oligonucleotide
  Antisense strand to SEQ ID NO: 2319162
auccuugugaucuauucac

SEQ ID NO: 2319164 - RNA, 19 nt, Artificial Sequence
  Description of Artificial Sequence: Synthetic oligonucleotide
  Sense strand starting at position 2070 of SEQ ID NO: 1885138
aguaaauguuuaggccaaa

SEQ ID NO: 2319165 - RNA, 19 nt, Artificial Sequence
  Description of Artificial Sequence: Synthetic oligonucleotide
  Antisense strand to SEQ ID NO: 2319164
uuuggccuaaacauuuacu

SEQ ID NO: 2319166 - RNA, 19 nt, Artificial Sequence
  Description of Artificial Sequence: Synthetic oligonucleotide
  Sense strand starting at position 2153 of SEQ ID NO: 1885138
gggcucaaaccauguauua

SEQ ID NO: 2319167 - RNA, 19 nt, Artificial Sequence
  Description of Artificial Sequence: Synthetic oligonucleotide
  Antisense strand to SEQ ID NO: 2319166
uaauacaugguuugagccc

SEQ ID NO: 2319168 - RNA, 19 nt, Artificial Sequence
  Description of Artificial Sequence: Synthetic oligonucleotide
  Sense strand starting at position 2184 of SEQ ID NO: 1885138
cucucaaguuuauguucua

SEQ ID NO: 2319169 - RNA, 19 nt, Artificial Sequence
  Description of Artificial Sequence: Synthetic oligonucleotide
  Antisense strand to SEQ ID NO: 2319168
uagaacauaaacuugagag

SEQ ID NO: 2319170 - RNA, 19 nt, Artificial Sequence
  Description of Artificial Sequence: Synthetic oligonucleotide
  Sense strand starting at position 2187 of SEQ ID NO: 1885138
ucaaguuuauguucuacau

SEQ ID NO: 2319171 - RNA, 19 nt, Artificial Sequence
  Description of Artificial Sequence: Synthetic oligonucleotide
  Antisense strand to SEQ ID NO: 2319170
auguagaacauaaacuuga

SEQ ID NO: 2319172 - RNA, 19 nt, Artificial Sequence
  Description of Artificial Sequence: Synthetic oligonucleotide
  Sense strand starting at position 2191 of SEQ ID NO: 1885138
guuuauguucuacauacag

SEQ ID NO: 2319173 - RNA, 19 nt, Artificial Sequence
  Description of Artificial Sequence: Synthetic oligonucleotide
  Antisense strand to SEQ ID NO: 2319172
cuguauguagaacauaaac

SEQ ID NO: 2319174 - RNA, 19 nt, Artificial Sequence
  Description of Artificial Sequence: Synthetic oligonucleotide
  Sense strand starting at position 2246 of SEQ ID NO: 1885138
aaagucugguaggcuuaau

SEQ ID NO: 2319175 - RNA, 19 nt, Artificial Sequence
  Description of Artificial Sequence: Synthetic oligonucleotide
  Antisense strand to SEQ ID NO: 2319174
auuaagccuaccagacuuu

SEQ ID NO: 2319176 - RNA, 19 nt, Artificial Sequence
  Description of Artificial Sequence: Synthetic oligonucleotide
  Sense strand starting at position 3136 of SEQ ID NO: 1885138
agggaugugaauugcuguu

SEQ ID NO: 2319177 - RNA, 19 nt, Artificial Sequence
  Description of Artificial Sequence: Synthetic oligonucleotide
  Antisense strand to SEQ ID NO: 2319176
aacagcaauucacaucccu

SEQ ID NO: 2319178 - RNA, 19 nt, Artificial Sequence
  Description of Artificial Sequence: Synthetic oligonucleotide
  Sense strand starting at position 3138 of SEQ ID NO: 1885138
ggaugugaauugcuguugu

SEQ ID NO: 2319179 - RNA, 19 nt, Artificial Sequence
  Description of Artificial Sequence: Synthetic oligonucleotide
  Antisense strand to SEQ ID NO: 2319178
acaacagcaauucacaucc

SEQ ID NO: 2319180 - RNA, 19 nt, Artificial Sequence
  Description of Artificial Sequence: Synthetic oligonucleotide
  Sense strand starting at position 3141 of SEQ ID NO: 1885138
ugugaauugcuguuguguu

SEQ ID NO: 2319181 - RNA, 19 nt, Artificial Sequence
  Description of Artificial Sequence: Synthetic oligonucleotide
  Antisense strand to SEQ ID NO: 2319180
aacacaacagcaauucaca

SEQ ID NO: 2319182 - RNA, 19 nt, Artificial Sequence
  Description of Artificial Sequence: Synthetic oligonucleotide
  Sense strand starting at position 3222 of SEQ ID NO: 1885138
acacgaugauauggaauau

SEQ ID NO: 2319183 - RNA, 19 nt, Artificial Sequence
  Description of Artificial Sequence: Synthetic oligonucleotide
  Antisense strand to SEQ ID NO: 2319182
auauuccauaucaucgugu

SEQ ID NO: 2319184 - RNA, 19 nt, Artificial Sequence
  Description of Artificial Sequence: Synthetic oligonucleotide
  Sense strand starting at position 3245 of SEQ ID NO: 1885138
guggucucauaaccucauu

SEQ ID NO: 2319185 - RNA, 19 nt, Artificial Sequence
  Description of Artificial Sequence: Synthetic oligonucleotide
  Antisense strand to SEQ ID NO: 2319184
aaugagguuaugagaccac

SEQ ID NO: 2319186 - RNA, 19 nt, Artificial Sequence
  Description of Artificial Sequence: Synthetic oligonucleotide
  Sense strand starting at position 3270 of SEQ ID NO: 1885138
acacguaacuaugugaaca

SEQ ID NO: 2319187 - RNA, 19 nt, Artificial Sequence
  Description of Artificial Sequence: Synthetic oligonucleotide
  Antisense strand to SEQ ID NO: 2319186
uguucacauaguuacgugu

SEQ ID NO: 2319188 - RNA, 19 nt, Artificial Sequence
  Description of Artificial Sequence: Synthetic oligonucleotide
  Sense strand starting at position 3476 of SEQ ID NO: 1885138
acaaguugcucacuuugua

SEQ ID NO: 2319189 - RNA, 19 nt, Artificial Sequence
  Description of Artificial Sequence: Synthetic oligonucleotide
  Antisense strand to SEQ ID NO: 2319188
uacaaagugagcaacuugu

SEQ ID NO: 2319190 - RNA, 19 nt, Artificial Sequence
  Description of Artificial Sequence: Synthetic oligonucleotide
  Sense strand starting at position 3540 of SEQ ID NO: 1885138
cuaagaacacucggaaagu

SEQ ID NO: 2319191 - RNA, 19 nt, Artificial Sequence
  Description of Artificial Sequence: Synthetic oligonucleotide
  Antisense strand to SEQ ID NO: 2319190
acuuuccgaguguucuuag

SEQ ID NO: 2319192 - RNA, 19 nt, Artificial Sequence
  Description of Artificial Sequence: Synthetic oligonucleotide
  Sense strand starting at position 3549 of SEQ ID NO: 1885138
cucggaaagucuuaaacac

SEQ ID NO: 2319193 - RNA, 19 nt, Artificial Sequence
  Description of Artificial Sequence: Synthetic oligonucleotide
  Antisense strand to SEQ ID NO: 2319192
guguuuaagacuuuccgag

SEQ ID NO: 2319194 - RNA, 19 nt, Artificial Sequence
  Description of Artificial Sequence: Synthetic oligonucleotide
  Sense strand starting at position 3558 of SEQ ID NO: 1885138
ucuuaaacacucggaacau

SEQ ID NO: 2319195 - RNA, 19 nt, Artificial Sequence
  Description of Artificial Sequence: Synthetic oligonucleotide
  Antisense strand to SEQ ID NO: 2319194
auguuccgaguguuuaaga

SEQ ID NO: 2319196 - RNA, 19 nt, Artificial Sequence
  Description of Artificial Sequence: Synthetic oligonucleotide
  Sense strand starting at position 3559 of SEQ ID NO: 1885138
cuuaaacacucggaacauu

SEQ ID NO: 2319197 - RNA, 19 nt, Artificial Sequence
  Description of Artificial Sequence: Synthetic oligonucleotide
  Antisense strand to SEQ ID NO: 2319196
aauguuccgaguguuuaag

SEQ ID NO: 2319198 - RNA, 19 nt, Artificial Sequence
  Description of Artificial Sequence: Synthetic oligonucleotide
  Sense strand starting at position 3855 of SEQ ID NO: 1885138
uuguuuggguuccauaaua

SEQ ID NO: 2319199 - RNA, 19 nt, Artificial Sequence
  Description of Artificial Sequence: Synthetic oligonucleotide
  Antisense strand to SEQ ID NO: 2319198
uauuauggaacccaaacaa

SEQ ID NO: 2319200 - RNA, 19 nt, Artificial Sequence
  Description of Artificial Sequence: Synthetic oligonucleotide
  Sense strand starting at position 3860 of SEQ ID NO: 1885138
uggguuccauaauaaauuu

SEQ ID NO: 2319201 - RNA, 19 nt, Artificial Sequence
  Description of Artificial Sequence: Synthetic oligonucleotide
  Antisense strand to SEQ ID NO: 2319200
aaauuuauuauggaaccca

SEQ ID NO: 2319202 - RNA, 19 nt, Artificial Sequence
  Description of Artificial Sequence: Synthetic oligonucleotide
  Sense strand starting at position 6 of SEQ ID NO: 1885139
gugcguaagcagguaguau

SEQ ID NO: 2319203 - RNA, 19 nt, Artificial Sequence
  Description of Artificial Sequence: Synthetic oligonucleotide
  Antisense strand to SEQ ID NO: 2319202
auacuaccugcuuacgcac

SEQ ID NO: 2319204 - RNA, 19 nt, Artificial Sequence
  Description of Artificial Sequence: Synthetic oligonucleotide
  Sense strand starting at position 23 of SEQ ID NO: 1885139
auaaaugcuuagguugaga

SEQ ID NO: 2319205 - RNA, 19 nt, Artificial Sequence
  Description of Artificial Sequence: Synthetic oligonucleotide
  Antisense strand to SEQ ID NO: 2319204
ucucaaccuaagcauuuau

SEQ ID NO: 2319206 - RNA, 19 nt, Artificial Sequence
  Description of Artificial Sequence: Synthetic oligonucleotide
  Sense strand starting at position 25 of SEQ ID NO: 1885139
aaaugcuuagguugagaua

SEQ ID NO: 2319207 - RNA, 19 nt, Artificial Sequence
  Description of Artificial Sequence: Synthetic oligonucleotide
  Antisense strand to SEQ ID NO: 2319206
uaucucaaccuaagcauuu

SEQ ID NO: 2319208 - RNA, 19 nt, Artificial Sequence
  Description of Artificial Sequence: Synthetic oligonucleotide
  Sense strand starting at position 160 of SEQ ID NO: 1885139
ggaauauucugguccuuaa

SEQ ID NO: 2319209 - RNA, 19 nt, Artificial Sequence
  Description of Artificial Sequence: Synthetic oligonucleotide
  Antisense strand to SEQ ID NO: 2319208
uuaaggaccagaauauucc

SEQ ID NO: 2319210 - RNA, 19 nt, Artificial Sequence
  Description of Artificial Sequence: Synthetic oligonucleotide
  Sense strand starting at position 566 of SEQ ID NO: 1885139
agguguauucaggaguggu

SEQ ID NO: 2319211 - RNA, 19 nt, Artificial Sequence
  Description of Artificial Sequence: Synthetic oligonucleotide
  Antisense strand to SEQ ID NO: 2319210
accacuccugaauacaccu

SEQ ID NO: 2319212 - RNA, 19 nt, Artificial Sequence
  Description of Artificial Sequence: Synthetic oligonucleotide
  Sense strand starting at position 600 of SEQ ID NO: 1885139
accugauccugguuaugag

SEQ ID NO: 2319213 - RNA, 19 nt, Artificial Sequence
  Description of Artificial Sequence: Synthetic oligonucleotide
  Antisense strand to SEQ ID NO: 2319212
cucauaaccaggaucaggu

SEQ ID NO: 2319214 - RNA, 19 nt, Artificial Sequence
  Description of Artificial Sequence: Synthetic oligonucleotide
  Sense strand starting at position 674 of SEQ ID NO: 1885139
ggaagacacuaauucuguu

SEQ ID NO: 2319215 - RNA, 19 nt, Artificial Sequence
  Description of Artificial Sequence: Synthetic oligonucleotide
  Antisense strand to SEQ ID NO: 2319214
aacagaauuagugucuucc

SEQ ID NO: 2319216 - RNA, 19 nt, Artificial Sequence
  Description of Artificial Sequence: Synthetic oligonucleotide
  Sense strand starting at position 697 of SEQ ID NO: 1885139
ucuauauucggccuugugu

SEQ ID NO: 2319217 - RNA, 19 nt, Artificial Sequence
  Description of Artificial Sequence: Synthetic oligonucleotide
  Antisense strand to SEQ ID NO: 2319216
acacaaggccgaauauaga

SEQ ID NO: 2319218 - RNA, 19 nt, Artificial Sequence
  Description of Artificial Sequence: Synthetic oligonucleotide
  Sense strand starting at position 698 of SEQ ID NO: 1885139
cuauauucggccuuguguu

SEQ ID NO: 2319219 - RNA, 19 nt, Artificial Sequence
  Description of Artificial Sequence: Synthetic oligonucleotide
  Antisense strand to SEQ ID NO: 2319218
aacacaaggccgaauauag

SEQ ID NO: 2319220 - RNA, 19 nt, Artificial Sequence
  Description of Artificial Sequence: Synthetic oligonucleotide
  Sense strand starting at position 711 of SEQ ID NO: 1885139
uguguugaaacagacugua

SEQ ID NO: 2319221 - RNA, 19 nt, Artificial Sequence
  Description of Artificial Sequence: Synthetic oligonucleotide
  Antisense strand to SEQ ID NO: 2319220
uacagucuguuucaacaca

SEQ ID NO: 2319222 - RNA, 19 nt, Artificial Sequence
  Description of Artificial Sequence: Synthetic oligonucleotide
  Sense strand starting at position 865 of SEQ ID NO: 1885139
uggaguucuuaccuugauu

SEQ ID NO: 2319223 - RNA, 19 nt, Artificial Sequence
  Description of Artificial Sequence: Synthetic oligonucleotide
  Antisense strand to SEQ ID NO: 2319222
aaucaagguaagaacucca

SEQ ID NO: 2319224 - RNA, 19 nt, Artificial Sequence
  Description of Artificial Sequence: Synthetic oligonucleotide
  Sense strand starting at position 968 of SEQ ID NO: 1885139
gcuugaaauaugugaaagu

SEQ ID NO: 2319225 - RNA, 19 nt, Artificial Sequence
  Description of Artificial Sequence: Synthetic oligonucleotide
  Antisense strand to SEQ ID NO: 2319224
acuuucacauauuucaagc

SEQ ID NO: 2319226 - RNA, 19 nt, Artificial Sequence
  Description of Artificial Sequence: Synthetic oligonucleotide
  Sense strand starting at position 1171 of SEQ ID NO: 1885139
cugugacuuguggaaguua

SEQ ID NO: 2319227 - RNA, 19 nt, Artificial Sequence
  Description of Artificial Sequence: Synthetic oligonucleotide
  Antisense strand to SEQ ID NO: 2319226
uaacuuccacaagucacag

SEQ ID NO: 2319228 - RNA, 19 nt, Artificial Sequence
  Description of Artificial Sequence: Synthetic oligonucleotide
  Sense strand starting at position 1337 of SEQ ID NO: 1885139
auuucuggucucggguaaa

SEQ ID NO: 2319229 - RNA, 19 nt, Artificial Sequence
  Description of Artificial Sequence: Synthetic oligonucleotide
  Antisense strand to SEQ ID NO: 2319228
uuuacccgagaccagaaau

SEQ ID NO: 2319230 - RNA, 19 nt, Artificial Sequence
  Description of Artificial Sequence: Synthetic oligonucleotide
  Sense strand starting at position 1340 of SEQ ID NO: 1885139
ucuggucucggguaaaggu

SEQ ID NO: 2319231 - RNA, 19 nt, Artificial Sequence
  Description of Artificial Sequence: Synthetic oligonucleotide
  Antisense strand to SEQ ID NO: 2319230
accuuuacccgagaccaga

SEQ ID NO: 2319232 - RNA, 19 nt, Artificial Sequence
  Description of Artificial Sequence: Synthetic oligonucleotide
  Sense strand starting at position 1599 of SEQ ID NO: 1885139
acucauuggcauugaacuu

SEQ ID NO: 2319233 - RNA, 19 nt, Artificial Sequence
  Description of Artificial Sequence: Synthetic oligonucleotide
  Antisense strand to SEQ ID NO: 2319232
aaguucaaugccaaugagu

SEQ ID NO: 2319234 - RNA, 19 nt, Artificial Sequence
  Description of Artificial Sequence: Synthetic oligonucleotide
  Sense strand starting at position 1719 of SEQ ID NO: 1885139
uggugugaauggagaugau

SEQ ID NO: 2319235 - RNA, 19 nt, Artificial Sequence
  Description of Artificial Sequence: Synthetic oligonucleotide
  Antisense strand to SEQ ID NO: 2319234
aucaucuccauucacacca

SEQ ID NO: 2319236 - RNA, 19 nt, Artificial Sequence
  Description of Artificial Sequence: Synthetic oligonucleotide
  Sense strand starting at position 1731 of SEQ ID NO: 1885139
agaugauaacuuggccagu

SEQ ID NO: 2319237 - RNA, 19 nt, Artificial Sequence
  Description of Artificial Sequence: Synthetic oligonucleotide
  Antisense strand to SEQ ID NO: 2319236
acuggccaaguuaucaucu

SEQ ID NO: 2319238 - RNA, 19 nt, Artificial Sequence
  Description of Artificial Sequence: Synthetic oligonucleotide
  Sense strand starting at position 1973 of SEQ ID NO: 1885139
ggaacucaguuggcuuaau

SEQ ID NO: 2319239 - RNA, 19 nt, Artificial Sequence
  Description of Artificial Sequence: Synthetic oligonucleotide
  Antisense strand to SEQ ID NO: 2319238
auuaagccaacugaguucc

SEQ ID NO: 2319240 - RNA, 19 nt, Artificial Sequence
  Description of Artificial Sequence: Synthetic oligonucleotide
  Sense strand starting at position 1974 of SEQ ID NO: 1885139
gaacucaguuggcuuaaua

SEQ ID NO: 2319241 - RNA, 19 nt, Artificial Sequence
  Description of Artificial Sequence: Synthetic oligonucleotide
  Antisense strand to SEQ ID NO: 2319240
uauuaagccaacugaguuc

SEQ ID NO: 2319242 - RNA, 19 nt, Artificial Sequence
  Description of Artificial Sequence: Synthetic oligonucleotide
  Sense strand starting at position 2038 of SEQ ID NO: 1885139
cuacuagaaugagagauuu

SEQ ID NO: 2319243 - RNA, 19 nt, Artificial Sequence
  Description of Artificial Sequence: Synthetic oligonucleotide
  Antisense strand to SEQ ID NO: 2319242
aaaucucucauucuaguag

SEQ ID NO: 2319244 - RNA, 19 nt, Artificial Sequence
  Description of Artificial Sequence: Synthetic oligonucleotide
  Sense strand starting at position 2066 of SEQ ID NO: 1885139
uaguguuaggaguauaaau

SEQ ID NO: 2319245 - RNA, 19 nt, Artificial Sequence
  Description of Artificial Sequence: Synthetic oligonucleotide
  Antisense strand to SEQ ID NO: 2319244
auuuauacuccuaacacua

SEQ ID NO: 2319246 - RNA, 19 nt, Artificial Sequence
  Description of Artificial Sequence: Synthetic oligonucleotide
  Sense strand starting at position 2075 of SEQ ID NO: 1885139
gaguauaaaugguuuggua

SEQ ID NO: 2319247 - RNA, 19 nt, Artificial Sequence
  Description of Artificial Sequence: Synthetic oligonucleotide
  Antisense strand to SEQ ID NO: 2319246
uaccaaaccauuuauacuc

SEQ ID NO: 2319248 - RNA, 19 nt, Artificial Sequence
  Description of Artificial Sequence: Synthetic oligonucleotide
  Sense strand starting at position 2154 of SEQ ID NO: 1885139
uugaccugaccuugaaacu

SEQ ID NO: 2319249 - RNA, 19 nt, Artificial Sequence
  Description of Artificial Sequence: Synthetic oligonucleotide
  Antisense strand to SEQ ID NO: 2319248
aguuucaaggucaggucaa

SEQ ID NO: 2319250 - RNA, 19 nt, Artificial Sequence
  Description of Artificial Sequence: Synthetic oligonucleotide
  Sense strand starting at position 2180 of SEQ ID NO: 1885139
ucguuauucccagcgugac

SEQ ID NO: 2319251 - RNA, 19 nt, Artificial Sequence
  Description of Artificial Sequence: Synthetic oligonucleotide
  Antisense strand to SEQ ID NO: 2319250
gucacgcugggaauaacga

SEQ ID NO: 2319252 - RNA, 19 nt, Artificial Sequence
  Description of Artificial Sequence: Synthetic oligonucleotide
  Sense strand starting at position 2333 of SEQ ID NO: 1885139
gauagauguacaggguaug

SEQ ID NO: 2319253 - RNA, 19 nt, Artificial Sequence
  Description of Artificial Sequence: Synthetic oligonucleotide
  Antisense strand to SEQ ID NO: 2319252
cauacccuguacaucuauc

SEQ ID NO: 2319254 - RNA, 19 nt, Artificial Sequence
  Description of Artificial Sequence: Synthetic oligonucleotide
  Sense strand starting at position 2336 of SEQ ID NO: 1885139
agauguacaggguauguua

SEQ ID NO: 2319255 - RNA, 19 nt, Artificial Sequence
  Description of Artificial Sequence: Synthetic oligonucleotide
  Antisense strand to SEQ ID NO: 2319254
uaacauacccuguacaucu

SEQ ID NO: 2319256 - RNA, 19 nt, Artificial Sequence
  Description of Artificial Sequence: Synthetic oligonucleotide
  Sense strand starting at position 2339 of SEQ ID NO: 1885139
uguacaggguauguuaauu

SEQ ID NO: 2319257 - RNA, 19 nt, Artificial Sequence
  Description of Artificial Sequence: Synthetic oligonucleotide
  Antisense strand to SEQ ID NO: 2319256
aauuaacauacccuguaca

SEQ ID NO: 2319258 - RNA, 19 nt, Artificial Sequence
  Description of Artificial Sequence: Synthetic oligonucleotide
  Sense strand starting at position 2449 of SEQ ID NO: 1885139
aguggugacucauuccuga

SEQ ID NO: 2319259 - RNA, 19 nt, Artificial Sequence
  Description of Artificial Sequence: Synthetic oligonucleotide
  Antisense strand to SEQ ID NO: 2319258
ucaggaaugagucaccacu

SEQ ID NO: 2319260 - RNA, 19 nt, Artificial Sequence
  Description of Artificial Sequence: Synthetic oligonucleotide
  Sense strand starting at position 2452 of SEQ ID NO: 1885139
ggugacucauuccugaaau

SEQ ID NO: 2319261 - RNA, 19 nt, Artificial Sequence
  Description of Artificial Sequence: Synthetic oligonucleotide
  Antisense strand to SEQ ID NO: 2319260
auuucaggaaugagucacc

SEQ ID NO: 2319262 - RNA, 19 nt, Artificial Sequence
  Description of Artificial Sequence: Synthetic oligonucleotide
  Sense strand starting at position 2886 of SEQ ID NO: 1885139
guugauguacaccacaaau

SEQ ID NO: 2319263 - RNA, 19 nt, Artificial Sequence
  Description of Artificial Sequence: Synthetic oligonucleotide
  Antisense strand to SEQ ID NO: 2319262
auuugugguguacaucaac

SEQ ID NO: 2319264 - RNA, 19 nt, Artificial Sequence
  Description of Artificial Sequence: Synthetic oligonucleotide
  Sense strand starting at position 2945 of SEQ ID NO: 1885139
ucuacuguuagugauguga

SEQ ID NO: 2319265 - RNA, 19 nt, Artificial Sequence
  Description of Artificial Sequence: Synthetic oligonucleotide
  Antisense strand to SEQ ID NO: 2319264
ucacaucacuaacaguaga

SEQ ID NO: 2319266 - RNA, 19 nt, Artificial Sequence
  Description of Artificial Sequence: Synthetic oligonucleotide
  Sense strand starting at position 3127 of SEQ ID NO: 1885139
caggaaaccuuguccaaug

SEQ ID NO: 2319267 - RNA, 19 nt, Artificial Sequence
  Description of Artificial Sequence: Synthetic oligonucleotide
  Antisense strand to SEQ ID NO: 2319266
cauuggacaagguuuccug

SEQ ID NO: 2319268 - RNA, 19 nt, Artificial Sequence
  Description of Artificial Sequence: Synthetic oligonucleotide
  Sense strand starting at position 3179 of SEQ ID NO: 1885139
aagggauauuuaugugaag

SEQ ID NO: 2319269 - RNA, 19 nt, Artificial Sequence
  Description of Artificial Sequence: Synthetic oligonucleotide
  Antisense strand to SEQ ID NO: 2319268
cuucacauaaauaucccuu

SEQ ID NO: 2319270 - RNA, 19 nt, Artificial Sequence
  Description of Artificial Sequence: Synthetic oligonucleotide
  Sense strand starting at position 3182 of SEQ ID NO: 1885139
ggauauuuaugugaagaaa

SEQ ID NO: 2319271 - RNA, 19 nt, Artificial Sequence
  Description of Artificial Sequence: Synthetic oligonucleotide
  Antisense strand to SEQ ID NO: 2319270
uuucuucacauaaauaucc

SEQ ID NO: 2319272 - RNA, 19 nt, Artificial Sequence
  Description of Artificial Sequence: Synthetic oligonucleotide
  Sense strand starting at position 3442 of SEQ ID NO: 1885139
guccuugauagucaucugu

SEQ ID NO: 2319273 - RNA, 19 nt, Artificial Sequence
  Description of Artificial Sequence: Synthetic oligonucleotide
  Antisense strand to SEQ ID NO: 2319272
acagaugacuaucaaggac

SEQ ID NO: 2319274 - RNA, 19 nt, Artificial Sequence
  Description of Artificial Sequence: Synthetic oligonucleotide
  Sense strand starting at position 3526 of SEQ ID NO: 1885139
agcacuagucuggauucua

SEQ ID NO: 2319275 - RNA, 19 nt, Artificial Sequence
  Description of Artificial Sequence: Synthetic oligonucleotide
  Antisense strand to SEQ ID NO: 2319274
uagaauccagacuagugcu

SEQ ID NO: 2319276 - RNA, 19 nt, Artificial Sequence
  Description of Artificial Sequence: Synthetic oligonucleotide
  Sense strand starting at position 3578 of SEQ ID NO: 1885139
ucagguaaguaaucugaau

SEQ ID NO: 2319277 - RNA, 19 nt, Artificial Sequence
  Description of Artificial Sequence: Synthetic oligonucleotide
  Antisense strand to SEQ ID NO: 2319276
auucagauuacuuaccuga

SEQ ID NO: 2319278 - RNA, 19 nt, Artificial Sequence
  Description of Artificial Sequence: Synthetic oligonucleotide
  Sense strand starting at position 3939 of SEQ ID NO: 1885139
uguugcucugaagauugaa

SEQ ID NO: 2319279 - RNA, 19 nt, Artificial Sequence
  Description of Artificial Sequence: Synthetic oligonucleotide
  Antisense strand to SEQ ID NO: 2319278
uucaaucuucagagcaaca

SEQ ID NO: 2319280 - RNA, 19 nt, Artificial Sequence
  Description of Artificial Sequence: Synthetic oligonucleotide
  Sense strand starting at position 3942 of SEQ ID NO: 1885139
ugcucugaagauugaaauu

SEQ ID NO: 2319281 - RNA, 19 nt, Artificial Sequence
  Description of Artificial Sequence: Synthetic oligonucleotide
  Antisense strand to SEQ ID NO: 2319280
aauuucaaucuucagagca

SEQ ID NO: 2319282 - RNA, 19 nt, Artificial Sequence
  Description of Artificial Sequence: Synthetic oligonucleotide
  Sense strand starting at position 277 of SEQ ID NO: 1885140
ggacaucaauuagcucaau

SEQ ID NO: 2319283 - RNA, 19 nt, Artificial Sequence
  Description of Artificial Sequence: Synthetic oligonucleotide
  Antisense strand to SEQ ID NO: 2319282
auugagcuaauugaugucc

SEQ ID NO: 2319284 - RNA, 19 nt, Artificial Sequence
  Description of Artificial Sequence: Synthetic oligonucleotide
  Sense strand starting at position 292 of SEQ ID NO: 1885140
caaugcuuaccuuagaggu

SEQ ID NO: 2319285 - RNA, 19 nt, Artificial Sequence
  Description of Artificial Sequence: Synthetic oligonucleotide
  Antisense strand to SEQ ID NO: 2319284
accucuaagguaagcauug

SEQ ID NO: 2319286 - RNA, 19 nt, Artificial Sequence
  Description of Artificial Sequence: Synthetic oligonucleotide
  Sense strand starting at position 351 of SEQ ID NO: 1885140
ugguauaaaucauugccuu

SEQ ID NO: 2319287 - RNA, 19 nt, Artificial Sequence
  Description of Artificial Sequence: Synthetic oligonucleotide
  Antisense strand to SEQ ID NO: 2319286
aaggcaaugauuuauacca

SEQ ID NO: 2319288 - RNA, 19 nt, Artificial Sequence
  Description of Artificial Sequence: Synthetic oligonucleotide
  Sense strand starting at position 352 of SEQ ID NO: 1885140
gguauaaaucauugccuuc

SEQ ID NO: 2319289 - RNA, 19 nt, Artificial Sequence
  Description of Artificial Sequence: Synthetic oligonucleotide
  Antisense strand to SEQ ID NO: 2319288
gaaggcaaugauuuauacc

SEQ ID NO: 2319290 - RNA, 19 nt, Artificial Sequence
  Description of Artificial Sequence: Synthetic oligonucleotide
  Sense strand starting at position 424 of SEQ ID NO: 1885140
cgacauuguugauuaacuc

SEQ ID NO: 2319291 - RNA, 19 nt, Artificial Sequence
  Description of Artificial Sequence: Synthetic oligonucleotide
  Antisense strand to SEQ ID NO: 2319290
gaguuaaucaacaaugucg

SEQ ID NO: 2319292 - RNA, 19 nt, Artificial Sequence
  Description of Artificial Sequence: Synthetic oligonucleotide
  Sense strand starting at position 431 of SEQ ID NO: 1885140
guugauuaacuccaugauc

SEQ ID NO: 2319293 - RNA, 19 nt, Artificial Sequence
  Description of Artificial Sequence: Synthetic oligonucleotide
  Antisense strand to SEQ ID NO: 2319292
gaucauggaguuaaucaac

SEQ ID NO: 2319294 - RNA, 19 nt, Artificial Sequence
  Description of Artificial Sequence: Synthetic oligonucleotide
  Sense strand starting at position 433 of SEQ ID NO: 1885140
ugauuaacuccaugaucag

SEQ ID NO: 2319295 - RNA, 19 nt, Artificial Sequence
  Description of Artificial Sequence: Synthetic oligonucleotide
  Antisense strand to SEQ ID NO: 2319294
cugaucauggaguuaauca

SEQ ID NO: 2319296 - RNA, 19 nt, Artificial Sequence
  Description of Artificial Sequence: Synthetic oligonucleotide
  Sense strand starting at position 439 of SEQ ID NO: 1885140
acuccaugaucaguacagu

SEQ ID NO: 2319297 - RNA, 19 nt, Artificial Sequence
  Description of Artificial Sequence: Synthetic oligonucleotide
  Antisense strand to SEQ ID NO: 2319296
acuguacugaucauggagu

SEQ ID NO: 2319298 - RNA, 19 nt, Artificial Sequence
  Description of Artificial Sequence: Synthetic oligonucleotide
  Sense strand starting at position 442 of SEQ ID NO: 1885140
ccaugaucaguacagucuu

SEQ ID NO: 2319299 - RNA, 19 nt, Artificial Sequence
  Description of Artificial Sequence: Synthetic oligonucleotide
  Antisense strand to SEQ ID NO: 2319298
aagacuguacugaucaugg

SEQ ID NO: 2319300 - RNA, 19 nt, Artificial Sequence
  Description of Artificial Sequence: Synthetic oligonucleotide
  Sense strand starting at position 483 of SEQ ID NO: 1885140
agcccuauaagagguugaa

SEQ ID NO: 2319301 - RNA, 19 nt, Artificial Sequence
  Description of Artificial Sequence: Synthetic oligonucleotide
  Antisense strand to SEQ ID NO: 2319300
uucaaccucuuauagggcu

SEQ ID NO: 2319302 - RNA, 19 nt, Artificial Sequence
  Description of Artificial Sequence: Synthetic oligonucleotide
  Sense strand starting at position 633 of SEQ ID NO: 1885140
cguacucaucagugaggaa

SEQ ID NO: 2319303 - RNA, 19 nt, Artificial Sequence
  Description of Artificial Sequence: Synthetic oligonucleotide
  Antisense strand to SEQ ID NO: 2319302
uuccucacugaugaguacg

SEQ ID NO: 2319304 - RNA, 19 nt, Artificial Sequence
  Description of Artificial Sequence: Synthetic oligonucleotide
  Sense strand starting at position 781 of SEQ ID NO: 1885140
ugauaccagucaccagaau

SEQ ID NO: 2319305 - RNA, 19 nt, Artificial Sequence
  Description of Artificial Sequence: Synthetic oligonucleotide
  Antisense strand to SEQ ID NO: 2319304
auucuggugacugguauca

SEQ ID NO: 2319306 - RNA, 19 nt, Artificial Sequence
  Description of Artificial Sequence: Synthetic oligonucleotide
  Sense strand starting at position 849 of SEQ ID NO: 1885140
ggagcaaaucuguaaaggu

SEQ ID NO: 2319307 - RNA, 19 nt, Artificial Sequence
  Description of Artificial Sequence: Synthetic oligonucleotide
  Antisense strand to SEQ ID NO: 2319306
accuuuacagauuugcucc

SEQ ID NO: 2319308 - RNA, 19 nt, Artificial Sequence
  Description of Artificial Sequence: Synthetic oligonucleotide
  Sense strand starting at position 1192 of SEQ ID NO: 1885140
agccauaagaccgagucuu

SEQ ID NO: 2319309 - RNA, 19 nt, Artificial Sequence
  Description of Artificial Sequence: Synthetic oligonucleotide
  Antisense strand to SEQ ID NO: 2319308
aagacucggucuuauggcu

SEQ ID NO: 2319310 - RNA, 19 nt, Artificial Sequence
  Description of Artificial Sequence: Synthetic oligonucleotide
  Sense strand starting at position 1563 of SEQ ID NO: 1885140
uuaauaaucgaacguauca

SEQ ID NO: 2319311 - RNA, 19 nt, Artificial Sequence
  Description of Artificial Sequence: Synthetic oligonucleotide
  Antisense strand to SEQ ID NO: 2319310
ugauacguucgauuauuaa

SEQ ID NO: 2319312 - RNA, 19 nt, Artificial Sequence
  Description of Artificial Sequence: Synthetic oligonucleotide
  Sense strand starting at position 1643 of SEQ ID NO: 1885140
aguuccuuugugcauagau

SEQ ID NO: 2319313 - RNA, 19 nt, Artificial Sequence
  Description of Artificial Sequence: Synthetic oligonucleotide
  Antisense strand to SEQ ID NO: 2319312
aucuaugcacaaaggaacu

SEQ ID NO: 2319314 - RNA, 19 nt, Artificial Sequence
  Description of Artificial Sequence: Synthetic oligonucleotide
  Sense strand starting at position 1707 of SEQ ID NO: 1885140
ucaauagguucuccaauga

SEQ ID NO: 2319315 - RNA, 19 nt, Artificial Sequence
  Description of Artificial Sequence: Synthetic oligonucleotide
  Antisense strand to SEQ ID NO: 2319314
ucauuggagaaccuauuga

SEQ ID NO: 2319316 - RNA, 19 nt, Artificial Sequence
  Description of Artificial Sequence: Synthetic oligonucleotide
  Sense strand starting at position 1729 of SEQ ID NO: 1885140
ucaugauucugcccaaagu

SEQ ID NO: 2319317 - RNA, 19 nt, Artificial Sequence
  Description of Artificial Sequence: Synthetic oligonucleotide
  Antisense strand to SEQ ID NO: 2319316
acuuugggcagaaucauga

SEQ ID NO: 2319318 - RNA, 19 nt, Artificial Sequence
  Description of Artificial Sequence: Synthetic oligonucleotide
  Sense strand starting at position 2129 of SEQ ID NO: 1885140
uuuagaauuggugguaguc

SEQ ID NO: 2319319 - RNA, 19 nt, Artificial Sequence
  Description of Artificial Sequence: Synthetic oligonucleotide
  Antisense strand to SEQ ID NO: 2319318
gacuaccaccaauucuaaa

SEQ ID NO: 2319320 - RNA, 19 nt, Artificial Sequence
  Description of Artificial Sequence: Synthetic oligonucleotide
  Sense strand starting at position 2139 of SEQ ID NO: 1885140
gugguagucccucaucaaa

SEQ ID NO: 2319321 - RNA, 19 nt, Artificial Sequence
  Description of Artificial Sequence: Synthetic oligonucleotide
  Antisense strand to SEQ ID NO: 2319320
uuugaugagggacuaccac

SEQ ID NO: 2319322 - RNA, 19 nt, Artificial Sequence
  Description of Artificial Sequence: Synthetic oligonucleotide
  Sense strand starting at position 2141 of SEQ ID NO: 1885140
gguagucccucaucaaacu

SEQ ID NO: 2319323 - RNA, 19 nt, Artificial Sequence
  Description of Artificial Sequence: Synthetic oligonucleotide
  Antisense strand to SEQ ID NO: 2319322
aguuugaugagggacuacc

SEQ ID NO: 2319324 - RNA, 19 nt, Artificial Sequence
  Description of Artificial Sequence: Synthetic oligonucleotide
  Sense strand starting at position 2228 of SEQ ID NO: 1885140
gauguuugcgccgcauagu

SEQ ID NO: 2319325 - RNA, 19 nt, Artificial Sequence
  Description of Artificial Sequence: Synthetic oligonucleotide
  Antisense strand to SEQ ID NO: 2319324
acuaugcggcgcaaacauc

SEQ ID NO: 2319326 - RNA, 19 nt, Artificial Sequence
  Description of Artificial Sequence: Synthetic oligonucleotide
  Sense strand starting at position 2239 of SEQ ID NO: 1885140
cgcauagucccugacuaac

SEQ ID NO: 2319327 - RNA, 19 nt, Artificial Sequence
  Description of Artificial Sequence: Synthetic oligonucleotide
  Antisense strand to SEQ ID NO: 2319326
guuagucagggacuaugcg

SEQ ID NO: 2319328 - RNA, 19 nt, Artificial Sequence
  Description of Artificial Sequence: Synthetic oligonucleotide
  Sense strand starting at position 2291 of SEQ ID NO: 1885140
ccaguuaaaggucaucgga

SEQ ID NO: 2319329 - RNA, 19 nt, Artificial Sequence
  Description of Artificial Sequence: Synthetic oligonucleotide
  Antisense strand to SEQ ID NO: 2319328
uccgaugaccuuuaacugg

SEQ ID NO: 2319330 - RNA, 19 nt, Artificial Sequence
  Description of Artificial Sequence: Synthetic oligonucleotide
  Sense strand starting at position 2293 of SEQ ID NO: 1885140
aguuaaaggucaucggaag

SEQ ID NO: 2319331 - RNA, 19 nt, Artificial Sequence
  Description of Artificial Sequence: Synthetic oligonucleotide
  Antisense strand to SEQ ID NO: 2319330
cuuccgaugaccuuuaacu

SEQ ID NO: 2319332 - RNA, 19 nt, Artificial Sequence
  Description of Artificial Sequence: Synthetic oligonucleotide
  Sense strand starting at position 2550 of SEQ ID NO: 1885140
cagagcugggucgaagaaa

SEQ ID NO: 2319333 - RNA, 19 nt, Artificial Sequence
  Description of Artificial Sequence: Synthetic oligonucleotide
  Antisense strand to SEQ ID NO: 2319332
uuucuucgacccagcucug

SEQ ID NO: 2319334 - RNA, 19 nt, Artificial Sequence
  Description of Artificial Sequence: Synthetic oligonucleotide
  Sense strand starting at position 2586 of SEQ ID NO: 1885140
auucuuguucuccagccau

SEQ ID NO: 2319335 - RNA, 19 nt, Artificial Sequence
  Description of Artificial Sequence: Synthetic oligonucleotide
  Antisense strand to SEQ ID NO: 2319334
auggcuggagaacaagaau

SEQ ID NO: 2319336 - RNA, 19 nt, Artificial Sequence
  Description of Artificial Sequence: Synthetic oligonucleotide
  Sense strand starting at position 2991 of SEQ ID NO: 1885140
gcuucuacagguuaauaca

SEQ ID NO: 2319337 - RNA, 19 nt, Artificial Sequence
  Description of Artificial Sequence: Synthetic oligonucleotide
  Antisense strand to SEQ ID NO: 2319336
uguauuaaccuguagaagc

SEQ ID NO: 2319338 - RNA, 19 nt, Artificial Sequence
  Description of Artificial Sequence: Synthetic oligonucleotide
  Sense strand starting at position 3218 of SEQ ID NO: 1885140
ugggcuuucuccuuagaua

SEQ ID NO: 2319339 - RNA, 19 nt, Artificial Sequence
  Description of Artificial Sequence: Synthetic oligonucleotide
  Antisense strand to SEQ ID NO: 2319338
uaucuaaggagaaagccca

SEQ ID NO: 2319340 - RNA, 19 nt, Artificial Sequence
  Description of Artificial Sequence: Synthetic oligonucleotide
  Sense strand starting at position 3219 of SEQ ID NO: 1885140
gggcuuucuccuuagauag

SEQ ID NO: 2319341 - RNA, 19 nt, Artificial Sequence
  Description of Artificial Sequence: Synthetic oligonucleotide
  Antisense strand to SEQ ID NO: 2319340
cuaucuaaggagaaagccc

SEQ ID NO: 2319342 - RNA, 19 nt, Artificial Sequence
  Description of Artificial Sequence: Synthetic oligonucleotide
  Sense strand starting at position 3230 of SEQ ID NO: 1885140
uuagauagguccuugaucu

SEQ ID NO: 2319343 - RNA, 19 nt, Artificial Sequence
  Description of Artificial Sequence: Synthetic oligonucleotide
  Antisense strand to SEQ ID NO: 2319342
agaucaaggaccuaucuaa

SEQ ID NO: 2319344 - RNA, 19 nt, Artificial Sequence
  Description of Artificial Sequence: Synthetic oligonucleotide
  Sense strand starting at position 3231 of SEQ ID NO: 1885140
uagauagguccuugaucua

SEQ ID NO: 2319345 - RNA, 19 nt, Artificial Sequence
  Description of Artificial Sequence: Synthetic oligonucleotide
  Antisense strand to SEQ ID NO: 2319344
uagaucaaggaccuaucua

SEQ ID NO: 2319346 - RNA, 19 nt, Artificial Sequence
  Description of Artificial Sequence: Synthetic oligonucleotide
  Sense strand starting at position 3236 of SEQ ID NO: 1885140
agguccuugaucuagguga

SEQ ID NO: 2319347 - RNA, 19 nt, Artificial Sequence
  Description of Artificial Sequence: Synthetic oligonucleotide
  Antisense strand to SEQ ID NO: 2319346
ucaccuagaucaaggaccu

SEQ ID NO: 2319348 - RNA, 19 nt, Artificial Sequence
  Description of Artificial Sequence: Synthetic oligonucleotide
  Sense strand starting at position 3238 of SEQ ID NO: 1885140
guccuugaucuaggugaca

SEQ ID NO: 2319349 - RNA, 19 nt, Artificial Sequence
  Description of Artificial Sequence: Synthetic oligonucleotide
  Antisense strand to SEQ ID NO: 2319348
ugucaccuagaucaaggac

SEQ ID NO: 2319350 - RNA, 19 nt, Artificial Sequence
  Description of Artificial Sequence: Synthetic oligonucleotide
  Sense strand starting at position 3540 of SEQ ID NO: 1885140
gugaacaaacaaugcaaua

SEQ ID NO: 2319351 - RNA, 19 nt, Artificial Sequence
  Description of Artificial Sequence: Synthetic oligonucleotide
  Antisense strand to SEQ ID NO: 2319350
uauugcauuguuuguucac

SEQ ID NO: 2319352 - RNA, 19 nt, Artificial Sequence
  Description of Artificial Sequence: Synthetic oligonucleotide
  Sense strand starting at position 3564 of SEQ ID NO: 1885140
augguuccugguuagcaua

SEQ ID NO: 2319353 - RNA, 19 nt, Artificial Sequence
  Description of Artificial Sequence: Synthetic oligonucleotide
  Antisense strand to SEQ ID NO: 2319352
uaugcuaaccaggaaccau

SEQ ID NO: 2319354 - RNA, 19 nt, Artificial Sequence
  Description of Artificial Sequence: Synthetic oligonucleotide
  Sense strand starting at position 3566 of SEQ ID NO: 1885140
gguuccugguuagcauaaa

SEQ ID NO: 2319355 - RNA, 19 nt, Artificial Sequence
  Description of Artificial Sequence: Synthetic oligonucleotide
  Antisense strand to SEQ ID NO: 2319354
uuuaugcuaaccaggaacc

SEQ ID NO: 2319356 - RNA, 19 nt, Artificial Sequence
  Description of Artificial Sequence: Synthetic oligonucleotide
  Sense strand starting at position 3635 of SEQ ID NO: 1885140
aauuguccaccuugaagga

SEQ ID NO: 2319357 - RNA, 19 nt, Artificial Sequence
  Description of Artificial Sequence: Synthetic oligonucleotide
  Antisense strand to SEQ ID NO: 2319356
uccuucaagguggacaauu

SEQ ID NO: 2319358 - RNA, 19 nt, Artificial Sequence
  Description of Artificial Sequence: Synthetic oligonucleotide
  Sense strand starting at position 3661 of SEQ ID NO: 1885140
agaccucagcuaugaaaug

SEQ ID NO: 2319359 - RNA, 19 nt, Artificial Sequence
  Description of Artificial Sequence: Synthetic oligonucleotide
  Antisense strand to SEQ ID NO: 2319358
cauuucauagcugaggucu

SEQ ID NO: 2319360 - RNA, 19 nt, Artificial Sequence
  Description of Artificial Sequence: Synthetic oligonucleotide
  Sense strand starting at position 3668 of SEQ ID NO: 1885140
agcuaugaaaugugaauag

SEQ ID NO: 2319361 - RNA, 19 nt, Artificial Sequence
  Description of Artificial Sequence: Synthetic oligonucleotide
  Antisense strand to SEQ ID NO: 2319360
cuauucacauuucauagcu

SEQ ID NO: 2319362 - RNA, 19 nt, Artificial Sequence
  Description of Artificial Sequence: Synthetic oligonucleotide
  Sense strand starting at position 3 of SEQ ID NO: 1885141
aagucaggauggucuugau

SEQ ID NO: 2319363 - RNA, 19 nt, Artificial Sequence
  Description of Artificial Sequence: Synthetic oligonucleotide
  Antisense strand to SEQ ID NO: 2319362
aucaagaccauccugacuu

SEQ ID NO: 2319364 - RNA, 19 nt, Artificial Sequence
  Description of Artificial Sequence: Synthetic oligonucleotide
  Sense strand starting at position 197 of SEQ ID NO: 1885141
agaaaccauugcuuuguga

SEQ ID NO: 2319365 - RNA, 19 nt, Artificial Sequence
  Description of Artificial Sequence: Synthetic oligonucleotide
  Antisense strand to SEQ ID NO: 2319364
ucacaaagcaaugguuucu

SEQ ID NO: 2319366 - RNA, 19 nt, Artificial Sequence
  Description of Artificial Sequence: Synthetic oligonucleotide
  Sense strand starting at position 204 of SEQ ID NO: 1885141
auugcuuugugaucuacau

SEQ ID NO: 2319367 - RNA, 19 nt, Artificial Sequence
  Description of Artificial Sequence: Synthetic oligonucleotide
  Antisense strand to SEQ ID NO: 2319366
auguagaucacaaagcaau

SEQ ID NO: 2319368 - RNA, 19 nt, Artificial Sequence
  Description of Artificial Sequence: Synthetic oligonucleotide
  Sense strand starting at position 703 of SEQ ID NO: 1885141
ccuguacagaggugauaga

SEQ ID NO: 2319369 - RNA, 19 nt, Artificial Sequence
  Description of Artificial Sequence: Synthetic oligonucleotide
  Antisense strand to SEQ ID NO: 2319368
ucuaucaccucuguacagg

SEQ ID NO: 2319370 - RNA, 19 nt, Artificial Sequence
  Description of Artificial Sequence: Synthetic oligonucleotide
  Sense strand starting at position 713 of SEQ ID NO: 1885141
ggugauagaucccuucuug

SEQ ID NO: 2319371 - RNA, 19 nt, Artificial Sequence
  Description of Artificial Sequence: Synthetic oligonucleotide
  Antisense strand to SEQ ID NO: 2319370
caagaagggaucuaucacc

SEQ ID NO: 2319372 - RNA, 19 nt, Artificial Sequence
  Description of Artificial Sequence: Synthetic oligonucleotide
  Sense strand starting at position 800 of SEQ ID NO: 1885141
agggauucggcccaauaau

SEQ ID NO: 2319373 - RNA, 19 nt, Artificial Sequence
  Description of Artificial Sequence: Synthetic oligonucleotide
  Antisense strand to SEQ ID NO: 2319372
auuauugggccgaaucccu

SEQ ID NO: 2319374 - RNA, 19 nt, Artificial Sequence
  Description of Artificial Sequence: Synthetic oligonucleotide
  Sense strand starting at position 934 of SEQ ID NO: 1885141
ggugaagcgaaagauguua

SEQ ID NO: 2319375 - RNA, 19 nt, Artificial Sequence
  Description of Artificial Sequence: Synthetic oligonucleotide
  Antisense strand to SEQ ID NO: 2319374
uaacaucuuucgcuucacc

SEQ ID NO: 2319376 - RNA, 19 nt, Artificial Sequence
  Description of Artificial Sequence: Synthetic oligonucleotide
  Sense strand starting at position 978 of SEQ ID NO: 1885141
cuucuuggucucugaagua

SEQ ID NO: 2319377 - RNA, 19 nt, Artificial Sequence
  Description of Artificial Sequence: Synthetic oligonucleotide
  Antisense strand to SEQ ID NO: 2319376
uacuucagagaccaagaag

SEQ ID NO: 2319378 - RNA, 19 nt, Artificial Sequence
  Description of Artificial Sequence: Synthetic oligonucleotide
  Sense strand starting at position 1071 of SEQ ID NO: 1885141
gcgcuaccugcaguaauca

SEQ ID NO: 2319379 - RNA, 19 nt, Artificial Sequence
  Description of Artificial Sequence: Synthetic oligonucleotide
  Antisense strand to SEQ ID NO: 2319378
ugauuacugcagguagcgc

SEQ ID NO: 2319380 - RNA, 19 nt, Artificial Sequence
  Description of Artificial Sequence: Synthetic oligonucleotide
  Sense strand starting at position 1336 of SEQ ID NO: 1885141
acauauguaccacguccaa

SEQ ID NO: 2319381 - RNA, 19 nt, Artificial Sequence
  Description of Artificial Sequence: Synthetic oligonucleotide
  Antisense strand to SEQ ID NO: 2319380
uuggacgugguacauaugu

SEQ ID NO: 2319382 - RNA, 19 nt, Artificial Sequence
  Description of Artificial Sequence: Synthetic oligonucleotide
  Sense strand starting at position 1624 of SEQ ID NO: 1885141
ggacaucaauuagcucaau

SEQ ID NO: 2319383 - RNA, 19 nt, Artificial Sequence
  Description of Artificial Sequence: Synthetic oligonucleotide
  Antisense strand to SEQ ID NO: 2319382
auugagcuaauugaugucc

SEQ ID NO: 2319384 - RNA, 19 nt, Artificial Sequence
  Description of Artificial Sequence: Synthetic oligonucleotide
  Sense strand starting at position 1636 of SEQ ID NO: 1885141
gcucaaugcuuaccuuaga

SEQ ID NO: 2319385 - RNA, 19 nt, Artificial Sequence
  Description of Artificial Sequence: Synthetic oligonucleotide
  Antisense strand to SEQ ID NO: 2319384
ucuaagguaagcauugagc

SEQ ID NO: 2319386 - RNA, 19 nt, Artificial Sequence
  Description of Artificial Sequence: Synthetic oligonucleotide
  Sense strand starting at position 1639 of SEQ ID NO: 1885141
caaugcuuaccuuagaggu

SEQ ID NO: 2319387 - RNA, 19 nt, Artificial Sequence
  Description of Artificial Sequence: Synthetic oligonucleotide
  Antisense strand to SEQ ID NO: 2319386
accucuaagguaagcauug

SEQ ID NO: 2319388 - RNA, 19 nt, Artificial Sequence
  Description of Artificial Sequence: Synthetic oligonucleotide
  Sense strand starting at position 1698 of SEQ ID NO: 1885141
ugguauaaaucauugccuu

SEQ ID NO: 2319389 - RNA, 19 nt, Artificial Sequence
  Description of Artificial Sequence: Synthetic oligonucleotide
  Antisense strand to SEQ ID NO: 2319388
aaggcaaugauuuauacca

SEQ ID NO: 2319390 - RNA, 19 nt, Artificial Sequence
  Description of Artificial Sequence: Synthetic oligonucleotide
  Sense strand starting at position 1699 of SEQ ID NO: 1885141
gguauaaaucauugccuuc

SEQ ID NO: 2319391 - RNA, 19 nt, Artificial Sequence
  Description of Artificial Sequence: Synthetic oligonucleotide
  Antisense strand to SEQ ID NO: 2319390
gaaggcaaugauuuauacc

SEQ ID NO: 2319392 - RNA, 19 nt, Artificial Sequence
  Description of Artificial Sequence: Synthetic oligonucleotide
  Sense strand starting at position 1771 of SEQ ID NO: 1885141
cgacauuguugauuaacuc

SEQ ID NO: 2319393 - RNA, 19 nt, Artificial Sequence
  Description of Artificial Sequence: Synthetic oligonucleotide
  Antisense strand to SEQ ID NO: 2319392
gaguuaaucaacaaugucg

SEQ ID NO: 2319394 - RNA, 19 nt, Artificial Sequence
  Description of Artificial Sequence: Synthetic oligonucleotide
  Sense strand starting at position 1778 of SEQ ID NO: 1885141
guugauuaacuccaugauc

SEQ ID NO: 2319395 - RNA, 19 nt, Artificial Sequence
  Description of Artificial Sequence: Synthetic oligonucleotide
  Antisense strand to SEQ ID NO: 2319394
gaucauggaguuaaucaac

SEQ ID NO: 2319396 - RNA, 19 nt, Artificial Sequence
  Description of Artificial Sequence: Synthetic oligonucleotide
  Sense strand starting at position 1780 of SEQ ID NO: 1885141
ugauuaacuccaugaucag

SEQ ID NO: 2319397 - RNA, 19 nt, Artificial Sequence
  Description of Artificial Sequence: Synthetic oligonucleotide
  Antisense strand to SEQ ID NO: 2319396
cugaucauggaguuaauca

SEQ ID NO: 2319398 - RNA, 19 nt, Artificial Sequence
  Description of Artificial Sequence: Synthetic oligonucleotide
  Sense strand starting at position 1786 of SEQ ID NO: 1885141
acuccaugaucaguacagu

SEQ ID NO: 2319399 - RNA, 19 nt, Artificial Sequence
  Description of Artificial Sequence: Synthetic oligonucleotide
  Antisense strand to SEQ ID NO: 2319398
acuguacugaucauggagu

SEQ ID NO: 2319400 - RNA, 19 nt, Artificial Sequence
  Description of Artificial Sequence: Synthetic oligonucleotide
  Sense strand starting at position 1789 of SEQ ID NO: 1885141
ccaugaucaguacagucuu

SEQ ID NO: 2319401 - RNA, 19 nt, Artificial Sequence
  Description of Artificial Sequence: Synthetic oligonucleotide
  Antisense strand to SEQ ID NO: 2319400
aagacuguacugaucaugg

SEQ ID NO: 2319402 - RNA, 19 nt, Artificial Sequence
  Description of Artificial Sequence: Synthetic oligonucleotide
  Sense strand starting at position 1830 of SEQ ID NO: 1885141
agcccuauaagagguugaa

SEQ ID NO: 2319403 - RNA, 19 nt, Artificial Sequence
  Description of Artificial Sequence: Synthetic oligonucleotide
  Antisense strand to SEQ ID NO: 2319402
uucaaccucuuauagggcu

SEQ ID NO: 2319404 - RNA, 19 nt, Artificial Sequence
  Description of Artificial Sequence: Synthetic oligonucleotide
  Sense strand starting at position 1980 of SEQ ID NO: 1885141
cguacucaucagugaggaa

SEQ ID NO: 2319405 - RNA, 19 nt, Artificial Sequence
  Description of Artificial Sequence: Synthetic oligonucleotide
  Antisense strand to SEQ ID NO: 2319404
uuccucacugaugaguacg

SEQ ID NO: 2319406 - RNA, 19 nt, Artificial Sequence
  Description of Artificial Sequence: Synthetic oligonucleotide
  Sense strand starting at position 2128 of SEQ ID NO: 1885141
ugauaccagucaccagaau

SEQ ID NO: 2319407 - RNA, 19 nt, Artificial Sequence
  Description of Artificial Sequence: Synthetic oligonucleotide
  Antisense strand to SEQ ID NO: 2319406
auucuggugacugguauca

SEQ ID NO: 2319408 - RNA, 19 nt, Artificial Sequence
  Description of Artificial Sequence: Synthetic oligonucleotide
  Sense strand starting at position 2196 of SEQ ID NO: 1885141
ggagcaaaucuguaaaggu

SEQ ID NO: 2319409 - RNA, 19 nt, Artificial Sequence
  Description of Artificial Sequence: Synthetic oligonucleotide
  Antisense strand to SEQ ID NO: 2319408
accuuuacagauuugcucc

SEQ ID NO: 2319410 - RNA, 19 nt, Artificial Sequence
  Description of Artificial Sequence: Synthetic oligonucleotide
  Sense strand starting at position 2539 of SEQ ID NO: 1885141
agccauaagaccgagucuu

SEQ ID NO: 2319411 - RNA, 19 nt, Artificial Sequence
  Description of Artificial Sequence: Synthetic oligonucleotide
  Antisense strand to SEQ ID NO: 2319410
aagacucggucuuauggcu

SEQ ID NO: 2319412 - RNA, 19 nt, Artificial Sequence
  Description of Artificial Sequence: Synthetic oligonucleotide
  Sense strand starting at position 2891 of SEQ ID NO: 1885141
gaaacugcacugugugauu

SEQ ID NO: 2319413 - RNA, 19 nt, Artificial Sequence
  Description of Artificial Sequence: Synthetic oligonucleotide
  Antisense strand to SEQ ID NO: 2319412
aaucacacagugcaguuuc

SEQ ID NO: 2319414 - RNA, 19 nt, Artificial Sequence
  Description of Artificial Sequence: Synthetic oligonucleotide
  Sense strand starting at position 2910 of SEQ ID NO: 1885141
uuaauaaucgaacguauca

SEQ ID NO: 2319415 - RNA, 19 nt, Artificial Sequence
  Description of Artificial Sequence: Synthetic oligonucleotide
  Antisense strand to SEQ ID NO: 2319414
ugauacguucgauuauuaa

SEQ ID NO: 2319416 - RNA, 19 nt, Artificial Sequence
  Description of Artificial Sequence: Synthetic oligonucleotide
  Sense strand starting at position 2990 of SEQ ID NO: 1885141
aguuccuuugugcauagau

SEQ ID NO: 2319417 - RNA, 19 nt, Artificial Sequence
  Description of Artificial Sequence: Synthetic oligonucleotide
  Antisense strand to SEQ ID NO: 2319416
aucuaugcacaaaggaacu

SEQ ID NO: 2319418 - RNA, 19 nt, Artificial Sequence
  Description of Artificial Sequence: Synthetic oligonucleotide
  Sense strand starting at position 3054 of SEQ ID NO: 1885141
ucaauagguucuccaauga

SEQ ID NO: 2319419 - RNA, 19 nt, Artificial Sequence
  Description of Artificial Sequence: Synthetic oligonucleotide
  Antisense strand to SEQ ID NO: 2319418
ucauuggagaaccuauuga

SEQ ID NO: 2319420 - RNA, 19 nt, Artificial Sequence
  Description of Artificial Sequence: Synthetic oligonucleotide
  Sense strand starting at position 3076 of SEQ ID NO: 1885141
ucaugauucugcccaaagu

SEQ ID NO: 2319421 - RNA, 19 nt, Artificial Sequence
  Description of Artificial Sequence: Synthetic oligonucleotide
  Antisense strand to SEQ ID NO: 2319420
acuuugggcagaaucauga

SEQ ID NO: 2319422 - RNA, 19 nt, Artificial Sequence
  Description of Artificial Sequence: Synthetic oligonucleotide
  Sense strand starting at position 3135 of SEQ ID NO: 1885141
aguacuuucuggccucuaa

SEQ ID NO: 2319423 - RNA, 19 nt, Artificial Sequence
  Description of Artificial Sequence: Synthetic oligonucleotide
  Antisense strand to SEQ ID NO: 2319422
uuagaggccagaaaguacu

SEQ ID NO: 2319424 - RNA, 19 nt, Artificial Sequence
  Description of Artificial Sequence: Synthetic oligonucleotide
  Sense strand starting at position 3476 of SEQ ID NO: 1885141
uuuagaauuggugguaguc

SEQ ID NO: 2319425 - RNA, 19 nt, Artificial Sequence
  Description of Artificial Sequence: Synthetic oligonucleotide
  Antisense strand to SEQ ID NO: 2319424
gacuaccaccaauucuaaa

SEQ ID NO: 2319426 - RNA, 19 nt, Artificial Sequence
  Description of Artificial Sequence: Synthetic oligonucleotide
  Sense strand starting at position 3486 of SEQ ID NO: 1885141
gugguagucccucaucaaa

SEQ ID NO: 2319427 - RNA, 19 nt, Artificial Sequence
  Description of Artificial Sequence: Synthetic oligonucleotide
  Antisense strand to SEQ ID NO: 2319426
uuugaugagggacuaccac

SEQ ID NO: 2319428 - RNA, 19 nt, Artificial Sequence
  Description of Artificial Sequence: Synthetic oligonucleotide
  Sense strand starting at position 3488 of SEQ ID NO: 1885141
gguagucccucaucaaacu

SEQ ID NO: 2319429 - RNA, 19 nt, Artificial Sequence
  Description of Artificial Sequence: Synthetic oligonucleotide
  Antisense strand to SEQ ID NO: 2319428
aguuugaugagggacuacc

SEQ ID NO: 2319430 - RNA, 19 nt, Artificial Sequence
  Description of Artificial Sequence: Synthetic oligonucleotide
  Sense strand starting at position 3575 of SEQ ID NO: 1885141
gauguuugcgccgcauagu

SEQ ID NO: 2319431 - RNA, 19 nt, Artificial Sequence
  Description of Artificial Sequence: Synthetic oligonucleotide
  Antisense strand to SEQ ID NO: 2319430
acuaugcggcgcaaacauc

SEQ ID NO: 2319432 - RNA, 19 nt, Artificial Sequence
  Description of Artificial Sequence: Synthetic oligonucleotide
  Sense strand starting at position 3586 of SEQ ID NO: 1885141
cgcauagucccugacuaac

SEQ ID NO: 2319433 - RNA, 19 nt, Artificial Sequence
  Description of Artificial Sequence: Synthetic oligonucleotide
  Antisense strand to SEQ ID NO: 2319432
guuagucagggacuaugcg

SEQ ID NO: 2319434 - RNA, 19 nt, Artificial Sequence
  Description of Artificial Sequence: Synthetic oligonucleotide
  Sense strand starting at position 3638 of SEQ ID NO: 1885141
ccaguuaaaggucaucgga

SEQ ID NO: 2319435 - RNA, 19 nt, Artificial Sequence
  Description of Artificial Sequence: Synthetic oligonucleotide
  Antisense strand to SEQ ID NO: 2319434
uccgaugaccuuuaacugg

SEQ ID NO: 2319436 - RNA, 19 nt, Artificial Sequence
  Description of Artificial Sequence: Synthetic oligonucleotide
  Sense strand starting at position 3640 of SEQ ID NO: 1885141
aguuaaaggucaucggaag

SEQ ID NO: 2319437 - RNA, 19 nt, Artificial Sequence
  Description of Artificial Sequence: Synthetic oligonucleotide
  Antisense strand to SEQ ID NO: 2319436
cuuccgaugaccuuuaacu

SEQ ID NO: 2319438 - RNA, 19 nt, Artificial Sequence
  Description of Artificial Sequence: Synthetic oligonucleotide
  Sense strand starting at position 3897 of SEQ ID NO: 1885141
cagagcugggucgaagaaa

SEQ ID NO: 2319439 - RNA, 19 nt, Artificial Sequence
  Description of Artificial Sequence: Synthetic oligonucleotide
  Antisense strand to SEQ ID NO: 2319438
uuucuucgacccagcucug

SEQ ID NO: 2319440 - RNA, 19 nt, Artificial Sequence
  Description of Artificial Sequence: Synthetic oligonucleotide
  Sense strand starting at position 3933 of SEQ ID NO: 1885141
auucuuguucuccagccau

SEQ ID NO: 2319441 - RNA, 19 nt, Artificial Sequence
  Description of Artificial Sequence: Synthetic oligonucleotide
  Antisense strand to SEQ ID NO: 2319440
auggcuggagaacaagaau

SEQ ID NO: 2319442 - RNA, 19 nt, Artificial Sequence
  Description of Artificial Sequence: Synthetic oligonucleotide
  Sense strand starting at position 20 of SEQ ID NO: 1885142
ccaagaugagcggaucauu

SEQ ID NO: 2319443 - RNA, 19 nt, Artificial Sequence
  Description of Artificial Sequence: Synthetic oligonucleotide
  Antisense strand to SEQ ID NO: 2319442
aaugauccgcucaucuugg

SEQ ID NO: 2319444 - RNA, 19 nt, Artificial Sequence
  Description of Artificial Sequence: Synthetic oligonucleotide
  Sense strand starting at position 180 of SEQ ID NO: 1885142
ucugcaugcuucuauagau

SEQ ID NO: 2319445 - RNA, 19 nt, Artificial Sequence
  Description of Artificial Sequence: Synthetic oligonucleotide
  Antisense strand to SEQ ID NO: 2319444
aucuauagaagcaugcaga

SEQ ID NO: 2319446 - RNA, 19 nt, Artificial Sequence
  Description of Artificial Sequence: Synthetic oligonucleotide
  Sense strand starting at position 741 of SEQ ID NO: 1885142
ucaggauucuuauugugaa

SEQ ID NO: 2319447 - RNA, 19 nt, Artificial Sequence
  Description of Artificial Sequence: Synthetic oligonucleotide
  Antisense strand to SEQ ID NO: 2319446
uucacaauaagaauccuga

SEQ ID NO: 2319448 - RNA, 19 nt, Artificial Sequence
  Description of Artificial Sequence: Synthetic oligonucleotide
  Sense strand starting at position 742 of SEQ ID NO: 1885142
caggauucuuauugugaaa

SEQ ID NO: 2319449 - RNA, 19 nt, Artificial Sequence
  Description of Artificial Sequence: Synthetic oligonucleotide
  Antisense strand to SEQ ID NO: 2319448
uuucacaauaagaauccug

SEQ ID NO: 2319450 - RNA, 19 nt, Artificial Sequence
  Description of Artificial Sequence: Synthetic oligonucleotide
  Sense strand starting at position 744 of SEQ ID NO: 1885142
ggauucuuauugugaaaug

SEQ ID NO: 2319451 - RNA, 19 nt, Artificial Sequence
  Description of Artificial Sequence: Synthetic oligonucleotide
  Antisense strand to SEQ ID NO: 2319450
cauuucacaauaagaaucc

SEQ ID NO: 2319452 - RNA, 19 nt, Artificial Sequence
  Description of Artificial Sequence: Synthetic oligonucleotide
  Sense strand starting at position 745 of SEQ ID NO: 1885142
gauucuuauugugaaaugu

SEQ ID NO: 2319453 - RNA, 19 nt, Artificial Sequence
  Description of Artificial Sequence: Synthetic oligonucleotide
  Antisense strand to SEQ ID NO: 2319452
acauuucacaauaagaauc

SEQ ID NO: 2319454 - RNA, 19 nt, Artificial Sequence
  Description of Artificial Sequence: Synthetic oligonucleotide
  Sense strand starting at position 754 of SEQ ID NO: 1885142
ugugaaauguagcuaaaug

SEQ ID NO: 2319455 - RNA, 19 nt, Artificial Sequence
  Description of Artificial Sequence: Synthetic oligonucleotide
  Antisense strand to SEQ ID NO: 2319454
cauuuagcuacauuucaca

SEQ ID NO: 2319456 - RNA, 19 nt, Artificial Sequence
  Description of Artificial Sequence: Synthetic oligonucleotide
  Sense strand starting at position 755 of SEQ ID NO: 1885142
gugaaauguagcuaaaugu

SEQ ID NO: 2319457 - RNA, 19 nt, Artificial Sequence
  Description of Artificial Sequence: Synthetic oligonucleotide
  Antisense strand to SEQ ID NO: 2319456
acauuuagcuacauuucac

SEQ ID NO: 2319458 - RNA, 19 nt, Artificial Sequence
  Description of Artificial Sequence: Synthetic oligonucleotide
  Sense strand starting at position 799 of SEQ ID NO: 1885142
uagaucauauggugucuau

SEQ ID NO: 2319459 - RNA, 19 nt, Artificial Sequence
  Description of Artificial Sequence: Synthetic oligonucleotide
  Antisense strand to SEQ ID NO: 2319458
auagacaccauaugaucua

SEQ ID NO: 2319460 - RNA, 19 nt, Artificial Sequence
  Description of Artificial Sequence: Synthetic oligonucleotide
  Sense strand starting at position 1061 of SEQ ID NO: 1885142
aggacugcuugacccgaaa

SEQ ID NO: 2319461 - RNA, 19 nt, Artificial Sequence
  Description of Artificial Sequence: Synthetic oligonucleotide
  Antisense strand to SEQ ID NO: 2319460
uuucgggucaagcaguccu

SEQ ID NO: 2319462 - RNA, 19 nt, Artificial Sequence
  Description of Artificial Sequence: Synthetic oligonucleotide
  Sense strand starting at position 1064 of SEQ ID NO: 1885142
acugcuugacccgaaaugu

SEQ ID NO: 2319463 - RNA, 19 nt, Artificial Sequence
  Description of Artificial Sequence: Synthetic oligonucleotide
  Antisense strand to SEQ ID NO: 2319462
acauuucgggucaagcagu

SEQ ID NO: 2319464 - RNA, 19 nt, Artificial Sequence
  Description of Artificial Sequence: Synthetic oligonucleotide
  Sense strand starting at position 1074 of SEQ ID NO: 1885142
ccgaaaugucgacgcugca

SEQ ID NO: 2319465 - RNA, 19 nt, Artificial Sequence
  Description of Artificial Sequence: Synthetic oligonucleotide
  Antisense strand to SEQ ID NO: 2319464
ugcagcgucgacauuucgg

SEQ ID NO: 2319466 - RNA, 19 nt, Artificial Sequence
  Description of Artificial Sequence: Synthetic oligonucleotide
  Sense strand starting at position 1598 of SEQ ID NO: 1885142
caccuaaguuucuguggaa

SEQ ID NO: 2319467 - RNA, 19 nt, Artificial Sequence
  Description of Artificial Sequence: Synthetic oligonucleotide
  Antisense strand to SEQ ID NO: 2319466
uuccacagaaacuuaggug

SEQ ID NO: 2319468 - RNA, 19 nt, Artificial Sequence
  Description of Artificial Sequence: Synthetic oligonucleotide
  Sense strand starting at position 1599 of SEQ ID NO: 1885142
accuaaguuucuguggaaa

SEQ ID NO: 2319469 - RNA, 19 nt, Artificial Sequence
  Description of Artificial Sequence: Synthetic oligonucleotide
  Antisense strand to SEQ ID NO: 2319468
uuuccacagaaacuuaggu

SEQ ID NO: 2319470 - RNA, 19 nt, Artificial Sequence
  Description of Artificial Sequence: Synthetic oligonucleotide
  Sense strand starting at position 1703 of SEQ ID NO: 1885142
ggaguaaggcgccauccuu

SEQ ID NO: 2319471 - RNA, 19 nt, Artificial Sequence
  Description of Artificial Sequence: Synthetic oligonucleotide
  Antisense strand to SEQ ID NO: 2319470
aaggauggcgccuuacucc

SEQ ID NO: 2319472 - RNA, 19 nt, Artificial Sequence
  Description of Artificial Sequence: Synthetic oligonucleotide
  Sense strand starting at position 2051 of SEQ ID NO: 1885142
caacgaggguguuaucauc

SEQ ID NO: 2319473 - RNA, 19 nt, Artificial Sequence
  Description of Artificial Sequence: Synthetic oligonucleotide
  Antisense strand to SEQ ID NO: 2319472
gaugauaacacccucguug

SEQ ID NO: 2319474 - RNA, 19 nt, Artificial Sequence
  Description of Artificial Sequence: Synthetic oligonucleotide
  Sense strand starting at position 2059 of SEQ ID NO: 1885142
guguuaucaucuccgaaga

SEQ ID NO: 2319475 - RNA, 19 nt, Artificial Sequence
  Description of Artificial Sequence: Synthetic oligonucleotide
  Antisense strand to SEQ ID NO: 2319474
ucuucggagaugauaacac

SEQ ID NO: 2319476 - RNA, 19 nt, Artificial Sequence
  Description of Artificial Sequence: Synthetic oligonucleotide
  Sense strand starting at position 2060 of SEQ ID NO: 1885142
uguuaucaucuccgaagac

SEQ ID NO: 2319477 - RNA, 19 nt, Artificial Sequence
  Description of Artificial Sequence: Synthetic oligonucleotide
  Antisense strand to SEQ ID NO: 2319476
gucuucggagaugauaaca

SEQ ID NO: 2319478 - RNA, 19 nt, Artificial Sequence
  Description of Artificial Sequence: Synthetic oligonucleotide
  Sense strand starting at position 2061 of SEQ ID NO: 1885142
guuaucaucuccgaagaca

SEQ ID NO: 2319479 - RNA, 19 nt, Artificial Sequence
  Description of Artificial Sequence: Synthetic oligonucleotide
  Antisense strand to SEQ ID NO: 2319478
ugucuucggagaugauaac

SEQ ID NO: 2319480 - RNA, 19 nt, Artificial Sequence
  Description of Artificial Sequence: Synthetic oligonucleotide
  Sense strand starting at position 2155 of SEQ ID NO: 1885142
ugcaguuaccugggacauu

SEQ ID NO: 2319481 - RNA, 19 nt, Artificial Sequence
  Description of Artificial Sequence: Synthetic oligonucleotide
  Antisense strand to SEQ ID NO: 2319480
aaugucccagguaacugca

SEQ ID NO: 2319482 - RNA, 19 nt, Artificial Sequence
  Description of Artificial Sequence: Synthetic oligonucleotide
  Sense strand starting at position 2156 of SEQ ID NO: 1885142
gcaguuaccugggacauuu

SEQ ID NO: 2319483 - RNA, 19 nt, Artificial Sequence
  Description of Artificial Sequence: Synthetic oligonucleotide
  Antisense strand to SEQ ID NO: 2319482
aaaugucccagguaacugc

SEQ ID NO: 2319484 - RNA, 19 nt, Artificial Sequence
  Description of Artificial Sequence: Synthetic oligonucleotide
  Sense strand starting at position 2741 of SEQ ID NO: 1885142
ggcagagguuucgaugaac

SEQ ID NO: 2319485 - RNA, 19 nt, Artificial Sequence
  Description of Artificial Sequence: Synthetic oligonucleotide
  Antisense strand to SEQ ID NO: 2319484
guucaucgaaaccucugcc

SEQ ID NO: 2319486 - RNA, 19 nt, Artificial Sequence
  Description of Artificial Sequence: Synthetic oligonucleotide
  Sense strand starting at position 3035 of SEQ ID NO: 1885142
ucuuguugcccauauugga

SEQ ID NO: 2319487 - RNA, 19 nt, Artificial Sequence
  Description of Artificial Sequence: Synthetic oligonucleotide
  Antisense strand to SEQ ID NO: 2319486
uccaauaugggcaacaaga

SEQ ID NO: 2319488 - RNA, 19 nt, Artificial Sequence
  Description of Artificial Sequence: Synthetic oligonucleotide
  Sense strand starting at position 3043 of SEQ ID NO: 1885142
cccauauuggagugcaaug

SEQ ID NO: 2319489 - RNA, 19 nt, Artificial Sequence
  Description of Artificial Sequence: Synthetic oligonucleotide
  Antisense strand to SEQ ID NO: 2319488
cauugcacuccaauauggg

SEQ ID NO: 2319490 - RNA, 19 nt, Artificial Sequence
  Description of Artificial Sequence: Synthetic oligonucleotide
  Sense strand starting at position 3432 of SEQ ID NO: 1885142
gcuacaacaucaugaauga

SEQ ID NO: 2319491 - RNA, 19 nt, Artificial Sequence
  Description of Artificial Sequence: Synthetic oligonucleotide
  Antisense strand to SEQ ID NO: 2319490
ucauucaugauguuguagc

SEQ ID NO: 2319492 - RNA, 19 nt, Artificial Sequence
  Description of Artificial Sequence: Synthetic oligonucleotide
  Sense strand starting at position 3463 of SEQ ID NO: 1885142
gaugaaccaugcuaaguga

SEQ ID NO: 2319493 - RNA, 19 nt, Artificial Sequence
  Description of Artificial Sequence: Synthetic oligonucleotide
  Antisense strand to SEQ ID NO: 2319492
ucacuuagcaugguucauc

SEQ ID NO: 2319494 - RNA, 19 nt, Artificial Sequence
  Description of Artificial Sequence: Synthetic oligonucleotide
  Sense strand starting at position 3466 of SEQ ID NO: 1885142
gaaccaugcuaagugaaag

SEQ ID NO: 2319495 - RNA, 19 nt, Artificial Sequence
  Description of Artificial Sequence: Synthetic oligonucleotide
  Antisense strand to SEQ ID NO: 2319494
cuuucacuuagcaugguuc

SEQ ID NO: 2319496 - RNA, 19 nt, Artificial Sequence
  Description of Artificial Sequence: Synthetic oligonucleotide
  Sense strand starting at position 3509 of SEQ ID NO: 1885142
guuccacuuauaugaggga

SEQ ID NO: 2319497 - RNA, 19 nt, Artificial Sequence
  Description of Artificial Sequence: Synthetic oligonucleotide
  Antisense strand to SEQ ID NO: 2319496
ucccucauauaaguggaac

SEQ ID NO: 2319498 - RNA, 19 nt, Artificial Sequence
  Description of Artificial Sequence: Synthetic oligonucleotide
  Sense strand starting at position 3526 of SEQ ID NO: 1885142
gaccuaggauagucaaauu

SEQ ID NO: 2319499 - RNA, 19 nt, Artificial Sequence
  Description of Artificial Sequence: Synthetic oligonucleotide
  Antisense strand to SEQ ID NO: 2319498
aauuugacuauccuagguc

SEQ ID NO: 2319500 - RNA, 19 nt, Artificial Sequence
  Description of Artificial Sequence: Synthetic oligonucleotide
  Sense strand starting at position 3594 of SEQ ID NO: 1885142
ggaagauggcgagguauug

SEQ ID NO: 2319501 - RNA, 19 nt, Artificial Sequence
  Description of Artificial Sequence: Synthetic oligonucleotide
  Antisense strand to SEQ ID NO: 2319500
caauaccucgccaucuucc

SEQ ID NO: 2319502 - RNA, 19 nt, Artificial Sequence
  Description of Artificial Sequence: Synthetic oligonucleotide
  Sense strand starting at position 3603 of SEQ ID NO: 1885142
cgagguauuguuuaacaga

SEQ ID NO: 2319503 - RNA, 19 nt, Artificial Sequence
  Description of Artificial Sequence: Synthetic oligonucleotide
  Antisense strand to SEQ ID NO: 2319502
ucuguuaaacaauaccucg

SEQ ID NO: 2319504 - RNA, 19 nt, Artificial Sequence
  Description of Artificial Sequence: Synthetic oligonucleotide
  Sense strand starting at position 3606 of SEQ ID NO: 1885142
gguauuguuuaacagauac

SEQ ID NO: 2319505 - RNA, 19 nt, Artificial Sequence
  Description of Artificial Sequence: Synthetic oligonucleotide
  Antisense strand to SEQ ID NO: 2319504
guaucuguuaaacaauacc

SEQ ID NO: 2319506 - RNA, 19 nt, Artificial Sequence
  Description of Artificial Sequence: Synthetic oligonucleotide
  Sense strand starting at position 3628 of SEQ ID NO: 1885142
gguucaauuugagaugaug

SEQ ID NO: 2319507 - RNA, 19 nt, Artificial Sequence
  Description of Artificial Sequence: Synthetic oligonucleotide
  Antisense strand to SEQ ID NO: 2319506
caucaucucaaauugaacc

SEQ ID NO: 2319508 - RNA, 19 nt, Artificial Sequence
  Description of Artificial Sequence: Synthetic oligonucleotide
  Sense strand starting at position 3688 of SEQ ID NO: 1885142
augugaaucuaccuaaugu

SEQ ID NO: 2319509 - RNA, 19 nt, Artificial Sequence
  Description of Artificial Sequence: Synthetic oligonucleotide
  Antisense strand to SEQ ID NO: 2319508
acauuagguagauucacau

SEQ ID NO: 2319510 - RNA, 19 nt, Artificial Sequence
  Description of Artificial Sequence: Synthetic oligonucleotide
  Sense strand starting at position 3740 of SEQ ID NO: 1885142
gaggcuaaggccuguaauc

SEQ ID NO: 2319511 - RNA, 19 nt, Artificial Sequence
  Description of Artificial Sequence: Synthetic oligonucleotide
  Antisense strand to SEQ ID NO: 2319510
gauuacaggccuuagccuc

SEQ ID NO: 2319512 - RNA, 19 nt, Artificial Sequence
  Description of Artificial Sequence: Synthetic oligonucleotide
  Sense strand starting at position 50 of SEQ ID NO: 1885143
ggguaagugccuugugcaa

SEQ ID NO: 2319513 - RNA, 19 nt, Artificial Sequence
  Description of Artificial Sequence: Synthetic oligonucleotide
  Antisense strand to SEQ ID NO: 2319512
uugcacaaggcacuuaccc

SEQ ID NO: 2319514 - RNA, 19 nt, Artificial Sequence
  Description of Artificial Sequence: Synthetic oligonucleotide
  Sense strand starting at position 75 of SEQ ID NO: 1885143
ucaacuacuuuguagagga

SEQ ID NO: 2319515 - RNA, 19 nt, Artificial Sequence
  Description of Artificial Sequence: Synthetic oligonucleotide
  Antisense strand to SEQ ID NO: 2319514
uccucuacaaaguaguuga

SEQ ID NO: 2319516 - RNA, 19 nt, Artificial Sequence
  Description of Artificial Sequence: Synthetic oligonucleotide
  Sense strand starting at position 171 of SEQ ID NO: 1885143
cggcuccagcguuaacaaa

SEQ ID NO: 2319517 - RNA, 19 nt, Artificial Sequence
  Description of Artificial Sequence: Synthetic oligonucleotide
  Antisense strand to SEQ ID NO: 2319516
uuuguuaacgcuggagccg

SEQ ID NO: 2319518 - RNA, 19 nt, Artificial Sequence
  Description of Artificial Sequence: Synthetic oligonucleotide
  Sense strand starting at position 190 of SEQ ID NO: 1885143
gcucuuuguuagcugggaa

SEQ ID NO: 2319519 - RNA, 19 nt, Artificial Sequence
  Description of Artificial Sequence: Synthetic oligonucleotide
  Antisense strand to SEQ ID NO: 2319518
uucccagcuaacaaagagc

SEQ ID NO: 2319520 - RNA, 19 nt, Artificial Sequence
  Description of Artificial Sequence: Synthetic oligonucleotide
  Sense strand starting at position 191 of SEQ ID NO: 1885143
cucuuuguuagcugggaaa

SEQ ID NO: 2319521 - RNA, 19 nt, Artificial Sequence
  Description of Artificial Sequence: Synthetic oligonucleotide
  Antisense strand to SEQ ID NO: 2319520
uuucccagcuaacaaagag

SEQ ID NO: 2319522 - RNA, 19 nt, Artificial Sequence
  Description of Artificial Sequence: Synthetic oligonucleotide
  Sense strand starting at position 193 of SEQ ID NO: 1885143
cuuuguuagcugggaaaug

SEQ ID NO: 2319523 - RNA, 19 nt, Artificial Sequence
  Description of Artificial Sequence: Synthetic oligonucleotide
  Antisense strand to SEQ ID NO: 2319522
cauuucccagcuaacaaag

SEQ ID NO: 2319524 - RNA, 19 nt, Artificial Sequence
  Description of Artificial Sequence: Synthetic oligonucleotide
  Sense strand starting at position 222 of SEQ ID NO: 1885143
cgacucaucugcuuaucau

SEQ ID NO: 2319525 - RNA, 19 nt, Artificial Sequence
  Description of Artificial Sequence: Synthetic oligonucleotide
  Antisense strand to SEQ ID NO: 2319524
augauaagcagaugagucg

SEQ ID NO: 2319526 - RNA, 19 nt, Artificial Sequence
  Description of Artificial Sequence: Synthetic oligonucleotide
  Sense strand starting at position 232 of SEQ ID NO: 1885143
gcuuaucaucugcauagaa

SEQ ID NO: 2319527 - RNA, 19 nt, Artificial Sequence
  Description of Artificial Sequence: Synthetic oligonucleotide
  Antisense strand to SEQ ID NO: 2319526
uucuaugcagaugauaagc

SEQ ID NO: 2319528 - RNA, 19 nt, Artificial Sequence
  Description of Artificial Sequence: Synthetic oligonucleotide
  Sense strand starting at position 849 of SEQ ID NO: 1885143
cgggucuaccggagacguu

SEQ ID NO: 2319529 - RNA, 19 nt, Artificial Sequence
  Description of Artificial Sequence: Synthetic oligonucleotide
  Antisense strand to SEQ ID NO: 2319528
aacgucuccgguagacccg

SEQ ID NO: 2319530 - RNA, 19 nt, Artificial Sequence
  Description of Artificial Sequence: Synthetic oligonucleotide
  Sense strand starting at position 1428 of SEQ ID NO: 1885143
cccugaagccuguguauug

SEQ ID NO: 2319531 - RNA, 19 nt, Artificial Sequence
  Description of Artificial Sequence: Synthetic oligonucleotide
  Antisense strand to SEQ ID NO: 2319530
caauacacaggcuucaggg

SEQ ID NO: 2319532 - RNA, 19 nt, Artificial Sequence
  Description of Artificial Sequence: Synthetic oligonucleotide
  Sense strand starting at position 1492 of SEQ ID NO: 1885143
ggccgauuccuggaaaguu

SEQ ID NO: 2319533 - RNA, 19 nt, Artificial Sequence
  Description of Artificial Sequence: Synthetic oligonucleotide
  Antisense strand to SEQ ID NO: 2319532
aacuuuccaggaaucggcc

SEQ ID NO: 2319534 - RNA, 19 nt, Artificial Sequence
  Description of Artificial Sequence: Synthetic oligonucleotide
  Sense strand starting at position 1500 of SEQ ID NO: 1885143
ccuggaaaguuccuggaaa

SEQ ID NO: 2319535 - RNA, 19 nt, Artificial Sequence
  Description of Artificial Sequence: Synthetic oligonucleotide
  Antisense strand to SEQ ID NO: 2319534
uuuccaggaacuuuccagg

SEQ ID NO: 2319536 - RNA, 19 nt, Artificial Sequence
  Description of Artificial Sequence: Synthetic oligonucleotide
  Sense strand starting at position 2020 of SEQ ID NO: 1885143
ucuggaagugucuggaguu

SEQ ID NO: 2319537 - RNA, 19 nt, Artificial Sequence
  Description of Artificial Sequence: Synthetic oligonucleotide
  Antisense strand to SEQ ID NO: 2319536
aacuccagacacuuccaga

SEQ ID NO: 2319538 - RNA, 19 nt, Artificial Sequence
  Description of Artificial Sequence: Synthetic oligonucleotide
  Sense strand starting at position 2021 of SEQ ID NO: 1885143
cuggaagugucuggaguuu

SEQ ID NO: 2319539 - RNA, 19 nt, Artificial Sequence
  Description of Artificial Sequence: Synthetic oligonucleotide
  Antisense strand to SEQ ID NO: 2319538
aaacuccagacacuuccag

SEQ ID NO: 2319540 - RNA, 19 nt, Artificial Sequence
  Description of Artificial Sequence: Synthetic oligonucleotide
  Sense strand starting at position 2267 of SEQ ID NO: 1885143
ggcaaugauccucgaggcu

SEQ ID NO: 2319541 - RNA, 19 nt, Artificial Sequence
  Description of Artificial Sequence: Synthetic oligonucleotide
  Antisense strand to SEQ ID NO: 2319540
agccucgaggaucauugcc

SEQ ID NO: 2319542 - RNA, 19 nt, Artificial Sequence
  Description of Artificial Sequence: Synthetic oligonucleotide
  Sense strand starting at position 2901 of SEQ ID NO: 1885143
gggaaucucuccuguucuu

SEQ ID NO: 2319543 - RNA, 19 nt, Artificial Sequence
  Description of Artificial Sequence: Synthetic oligonucleotide
  Antisense strand to SEQ ID NO: 2319542
aagaacaggagagauuccc

SEQ ID NO: 2319544 - RNA, 19 nt, Artificial Sequence
  Description of Artificial Sequence: Synthetic oligonucleotide
  Sense strand starting at position 2935 of SEQ ID NO: 1885143
ucuacuuguccuugacaag

SEQ ID NO: 2319545 - RNA, 19 nt, Artificial Sequence
  Description of Artificial Sequence: Synthetic oligonucleotide
  Antisense strand to SEQ ID NO: 2319544
cuugucaaggacaaguaga

SEQ ID NO: 2319546 - RNA, 19 nt, Artificial Sequence
  Description of Artificial Sequence: Synthetic oligonucleotide
  Sense strand starting at position 2968 of SEQ ID NO: 1885143
ggaucugcaggugacuauu

SEQ ID NO: 2319547 - RNA, 19 nt, Artificial Sequence
  Description of Artificial Sequence: Synthetic oligonucleotide
  Antisense strand to SEQ ID NO: 2319546
aauagucaccugcagaucc

SEQ ID NO: 2319548 - RNA, 19 nt, Artificial Sequence
  Description of Artificial Sequence: Synthetic oligonucleotide
  Sense strand starting at position 2978 of SEQ ID NO: 1885143
gugacuauuugcucuuccu

SEQ ID NO: 2319549 - RNA, 19 nt, Artificial Sequence
  Description of Artificial Sequence: Synthetic oligonucleotide
  Antisense strand to SEQ ID NO: 2319548
aggaagagcaaauagucac

SEQ ID NO: 2319550 - RNA, 19 nt, Artificial Sequence
  Description of Artificial Sequence: Synthetic oligonucleotide
  Sense strand starting at position 2998 of SEQ ID NO: 1885143
ggucgccagucuuugauuu

SEQ ID NO: 2319551 - RNA, 19 nt, Artificial Sequence
  Description of Artificial Sequence: Synthetic oligonucleotide
  Antisense strand to SEQ ID NO: 2319550
aaaucaaagacuggcgacc

SEQ ID NO: 2319552 - RNA, 19 nt, Artificial Sequence
  Description of Artificial Sequence: Synthetic oligonucleotide
  Sense strand starting at position 3085 of SEQ ID NO: 1885143
agccaacuuuaucuuggau

SEQ ID NO: 2319553 - RNA, 19 nt, Artificial Sequence
  Description of Artificial Sequence: Synthetic oligonucleotide
  Antisense strand to SEQ ID NO: 2319552
auccaagauaaaguuggcu

SEQ ID NO: 2319554 - RNA, 19 nt, Artificial Sequence
  Description of Artificial Sequence: Synthetic oligonucleotide
  Sense strand starting at position 3735 of SEQ ID NO: 1885143
ggaaauacgucccuugcuu

SEQ ID NO: 2319555 - RNA, 19 nt, Artificial Sequence
  Description of Artificial Sequence: Synthetic oligonucleotide
  Antisense strand to SEQ ID NO: 2319554
aagcaagggacguauuucc

SEQ ID NO: 2319556 - RNA, 19 nt, Artificial Sequence
  Description of Artificial Sequence: Synthetic oligonucleotide
  Sense strand starting at position 3790 of SEQ ID NO: 1885143
gguccuugggaaugcguaa

SEQ ID NO: 2319557 - RNA, 19 nt, Artificial Sequence
  Description of Artificial Sequence: Synthetic oligonucleotide
  Antisense strand to SEQ ID NO: 2319556
uuacgcauucccaaggacc

SEQ ID NO: 2319558 - RNA, 19 nt, Artificial Sequence
  Description of Artificial Sequence: Synthetic oligonucleotide
  Sense strand starting at position 3810 of SEQ ID NO: 1885143
gaaagugguucuccaggga

SEQ ID NO: 2319559 - RNA, 19 nt, Artificial Sequence
  Description of Artificial Sequence: Synthetic oligonucleotide
  Antisense strand to SEQ ID NO: 2319558
ucccuggagaaccacuuuc

SEQ ID NO: 2319560 - RNA, 19 nt, Artificial Sequence
  Description of Artificial Sequence: Synthetic oligonucleotide
  Sense strand starting at position 3856 of SEQ ID NO: 1885143
ggaagagcuucuuggaaau

SEQ ID NO: 2319561 - RNA, 19 nt, Artificial Sequence
  Description of Artificial Sequence: Synthetic oligonucleotide
  Antisense strand to SEQ ID NO: 2319560
auuuccaagaagcucuucc

SEQ ID NO: 2319562 - RNA, 19 nt, Artificial Sequence
  Description of Artificial Sequence: Synthetic oligonucleotide
  Sense strand starting at position 3858 of SEQ ID NO: 1885143
aagagcuucuuggaaauag

SEQ ID NO: 2319563 - RNA, 19 nt, Artificial Sequence
  Description of Artificial Sequence: Synthetic oligonucleotide
  Antisense strand to SEQ ID NO: 2319562
cuauuuccaagaagcucuu

SEQ ID NO: 2319564 - RNA, 19 nt, Artificial Sequence
  Description of Artificial Sequence: Synthetic oligonucleotide
  Sense strand starting at position 3869 of SEQ ID NO: 1885143
ggaaauagcuucuuagcac

SEQ ID NO: 2319565 - RNA, 19 nt, Artificial Sequence
  Description of Artificial Sequence: Synthetic oligonucleotide
  Antisense strand to SEQ ID NO: 2319564
gugcuaagaagcuauuucc

SEQ ID NO: 2319566 - RNA, 19 nt, Artificial Sequence
  Description of Artificial Sequence: Synthetic oligonucleotide
  Sense strand starting at position 3880 of SEQ ID NO: 1885143
cuuagcacgcuggaagauu

SEQ ID NO: 2319567 - RNA, 19 nt, Artificial Sequence
  Description of Artificial Sequence: Synthetic oligonucleotide
  Antisense strand to SEQ ID NO: 2319566
aaucuuccagcgugcuaag

SEQ ID NO: 2319568 - RNA, 19 nt, Artificial Sequence
  Description of Artificial Sequence: Synthetic oligonucleotide
  Sense strand starting at position 8 of SEQ ID NO: 1885144
agaccuagcugagaaauac

SEQ ID NO: 2319569 - RNA, 19 nt, Artificial Sequence
  Description of Artificial Sequence: Synthetic oligonucleotide
  Antisense strand to SEQ ID NO: 2319568
guauuucucagcuaggucu

SEQ ID NO: 2319570 - RNA, 19 nt, Artificial Sequence
  Description of Artificial Sequence: Synthetic oligonucleotide
  Sense strand starting at position 112 of SEQ ID NO: 1885144
gcacacaauggucauuaca

SEQ ID NO: 2319571 - RNA, 19 nt, Artificial Sequence
  Description of Artificial Sequence: Synthetic oligonucleotide
  Antisense strand to SEQ ID NO: 2319570
uguaaugaccauugugugc

SEQ ID NO: 2319572 - RNA, 19 nt, Artificial Sequence
  Description of Artificial Sequence: Synthetic oligonucleotide
  Sense strand starting at position 257 of SEQ ID NO: 1885144
ggcagccuauuugaaguua

SEQ ID NO: 2319573 - RNA, 19 nt, Artificial Sequence
  Description of Artificial Sequence: Synthetic oligonucleotide
  Antisense strand to SEQ ID NO: 2319572
uaacuucaaauaggcugcc

SEQ ID NO: 2319574 - RNA, 19 nt, Artificial Sequence
  Description of Artificial Sequence: Synthetic oligonucleotide
  Sense strand starting at position 352 of SEQ ID NO: 1885144
auuucucagugagaaauug

SEQ ID NO: 2319575 - RNA, 19 nt, Artificial Sequence
  Description of Artificial Sequence: Synthetic oligonucleotide
  Antisense strand to SEQ ID NO: 2319574
caauuucucacugagaaau

SEQ ID NO: 2319576 - RNA, 19 nt, Artificial Sequence
  Description of Artificial Sequence: Synthetic oligonucleotide
  Sense strand starting at position 531 of SEQ ID NO: 1885144
ucauuaaccguagguaaau

SEQ ID NO: 2319577 - RNA, 19 nt, Artificial Sequence
  Description of Artificial Sequence: Synthetic oligonucleotide
  Antisense strand to SEQ ID NO: 2319576
auuuaccuacgguuaauga

SEQ ID NO: 2319578 - RNA, 19 nt, Artificial Sequence
  Description of Artificial Sequence: Synthetic oligonucleotide
  Sense strand starting at position 532 of SEQ ID NO: 1885144
cauuaaccguagguaaauu

SEQ ID NO: 2319579 - RNA, 19 nt, Artificial Sequence
  Description of Artificial Sequence: Synthetic oligonucleotide
  Antisense strand to SEQ ID NO: 2319578
aauuuaccuacgguuaaug

SEQ ID NO: 2319580 - RNA, 19 nt, Artificial Sequence
  Description of Artificial Sequence: Synthetic oligonucleotide
  Sense strand starting at position 541 of SEQ ID NO: 1885144
uagguaaauuaggaacagu

SEQ ID NO: 2319581 - RNA, 19 nt, Artificial Sequence
  Description of Artificial Sequence: Synthetic oligonucleotide
  Antisense strand to SEQ ID NO: 2319580
acuguuccuaauuuaccua

SEQ ID NO: 2319582 - RNA, 19 nt, Artificial Sequence
  Description of Artificial Sequence: Synthetic oligonucleotide
  Sense strand starting at position 552 of SEQ ID NO: 1885144
ggaacaguagccugcuaaa

SEQ ID NO: 2319583 - RNA, 19 nt, Artificial Sequence
  Description of Artificial Sequence: Synthetic oligonucleotide
  Antisense strand to SEQ ID NO: 2319582
uuuagcaggcuacuguucc

SEQ ID NO: 2319584 - RNA, 19 nt, Artificial Sequence
  Description of Artificial Sequence: Synthetic oligonucleotide
  Sense strand starting at position 642 of SEQ ID NO: 1885144
aacggcuuguacuccuuaa

SEQ ID NO: 2319585 - RNA, 19 nt, Artificial Sequence
  Description of Artificial Sequence: Synthetic oligonucleotide
  Antisense strand to SEQ ID NO: 2319584
uuaaggaguacaagccguu

SEQ ID NO: 2319586 - RNA, 19 nt, Artificial Sequence
  Description of Artificial Sequence: Synthetic oligonucleotide
  Sense strand starting at position 646 of SEQ ID NO: 1885144
gcuuguacuccuuaacaga

SEQ ID NO: 2319587 - RNA, 19 nt, Artificial Sequence
  Description of Artificial Sequence: Synthetic oligonucleotide
  Antisense strand to SEQ ID NO: 2319586
ucuguuaaggaguacaagc

SEQ ID NO: 2319588 - RNA, 19 nt, Artificial Sequence
  Description of Artificial Sequence: Synthetic oligonucleotide
  Sense strand starting at position 666 of SEQ ID NO: 1885144
ggacaagcuugagaaagau

SEQ ID NO: 2319589 - RNA, 19 nt, Artificial Sequence
  Description of Artificial Sequence: Synthetic oligonucleotide
  Antisense strand to SEQ ID NO: 2319588
aucuuucucaagcuugucc

SEQ ID NO: 2319590 - RNA, 19 nt, Artificial Sequence
  Description of Artificial Sequence: Synthetic oligonucleotide
  Sense strand starting at position 711 of SEQ ID NO: 1885144
cuggaugaauuaugagaaa

SEQ ID NO: 2319591 - RNA, 19 nt, Artificial Sequence
  Description of Artificial Sequence: Synthetic oligonucleotide
  Antisense strand to SEQ ID NO: 2319590
uuucucauaauucauccag

SEQ ID NO: 2319592 - RNA, 19 nt, Artificial Sequence
  Description of Artificial Sequence: Synthetic oligonucleotide
  Sense strand starting at position 988 of SEQ ID NO: 1885144
uccuauucuuucguucuau

SEQ ID NO: 2319593 - RNA, 19 nt, Artificial Sequence
  Description of Artificial Sequence: Synthetic oligonucleotide
  Antisense strand to SEQ ID NO: 2319592
auagaacgaaagaauagga

SEQ ID NO: 2319594 - RNA, 19 nt, Artificial Sequence
  Description of Artificial Sequence: Synthetic oligonucleotide
  Sense strand starting at position 1008 of SEQ ID NO: 1885144
ucgcucguuguuucuuaaa

SEQ ID NO: 2319595 - RNA, 19 nt, Artificial Sequence
  Description of Artificial Sequence: Synthetic oligonucleotide
  Antisense strand to SEQ ID NO: 2319594
uuuaagaaacaacgagcga

SEQ ID NO: 2319596 - RNA, 19 nt, Artificial Sequence
  Description of Artificial Sequence: Synthetic oligonucleotide
  Sense strand starting at position 1084 of SEQ ID NO: 1885144
ggccuauccgucuggaaac

SEQ ID NO: 2319597 - RNA, 19 nt, Artificial Sequence
  Description of Artificial Sequence: Synthetic oligonucleotide
  Antisense strand to SEQ ID NO: 2319596
guuuccagacggauaggcc

SEQ ID NO: 2319598 - RNA, 19 nt, Artificial Sequence
  Description of Artificial Sequence: Synthetic oligonucleotide
  Sense strand starting at position 2360 of SEQ ID NO: 1885144
ucgucagucggguuucuga

SEQ ID NO: 2319599 - RNA, 19 nt, Artificial Sequence
  Description of Artificial Sequence: Synthetic oligonucleotide
  Antisense strand to SEQ ID NO: 2319598
ucagaaacccgacugacga

SEQ ID NO: 2319600 - RNA, 19 nt, Artificial Sequence
  Description of Artificial Sequence: Synthetic oligonucleotide
  Sense strand starting at position 2448 of SEQ ID NO: 1885144
guuaaauacucucuucgac

SEQ ID NO: 2319601 - RNA, 19 nt, Artificial Sequence
  Description of Artificial Sequence: Synthetic oligonucleotide
  Antisense strand to SEQ ID NO: 2319600
gucgaagagaguauuuaac

SEQ ID NO: 2319602 - RNA, 19 nt, Artificial Sequence
  Description of Artificial Sequence: Synthetic oligonucleotide
  Sense strand starting at position 2493 of SEQ ID NO: 1885144
ggaacuaacuaguauuugu

SEQ ID NO: 2319603 - RNA, 19 nt, Artificial Sequence
  Description of Artificial Sequence: Synthetic oligonucleotide
  Antisense strand to SEQ ID NO: 2319602
acaaauacuaguuaguucc

SEQ ID NO: 2319604 - RNA, 19 nt, Artificial Sequence
  Description of Artificial Sequence: Synthetic oligonucleotide
  Sense strand starting at position 2588 of SEQ ID NO: 1885144
uuagacagucagcauugaa

SEQ ID NO: 2319605 - RNA, 19 nt, Artificial Sequence
  Description of Artificial Sequence: Synthetic oligonucleotide
  Antisense strand to SEQ ID NO: 2319604
uucaaugcugacugucuaa

SEQ ID NO: 2319606 - RNA, 19 nt, Artificial Sequence
  Description of Artificial Sequence: Synthetic oligonucleotide
  Sense strand starting at position 2987 of SEQ ID NO: 1885144
gucaguguauagcuagaca

SEQ ID NO: 2319607 - RNA, 19 nt, Artificial Sequence
  Description of Artificial Sequence: Synthetic oligonucleotide
  Antisense strand to SEQ ID NO: 2319606
ugucuagcuauacacugac

SEQ ID NO: 2319608 - RNA, 19 nt, Artificial Sequence
  Description of Artificial Sequence: Synthetic oligonucleotide
  Sense strand starting at position 3024 of SEQ ID NO: 1885144
uugguuuccacguauguua

SEQ ID NO: 2319609 - RNA, 19 nt, Artificial Sequence
  Description of Artificial Sequence: Synthetic oligonucleotide
  Antisense strand to SEQ ID NO: 2319608
uaacauacguggaaaccaa

SEQ ID NO: 2319610 - RNA, 19 nt, Artificial Sequence
  Description of Artificial Sequence: Synthetic oligonucleotide
  Sense strand starting at position 3054 of SEQ ID NO: 1885144
guacauguaacugaguagu

SEQ ID NO: 2319611 - RNA, 19 nt, Artificial Sequence
  Description of Artificial Sequence: Synthetic oligonucleotide
  Antisense strand to SEQ ID NO: 2319610
acuacucaguuacauguac

SEQ ID NO: 2319612 - RNA, 19 nt, Artificial Sequence
  Description of Artificial Sequence: Synthetic oligonucleotide
  Sense strand starting at position 3057 of SEQ ID NO: 1885144
cauguaacugaguaguaua

SEQ ID NO: 2319613 - RNA, 19 nt, Artificial Sequence
  Description of Artificial Sequence: Synthetic oligonucleotide
  Antisense strand to SEQ ID NO: 2319612
uauacuacucaguuacaug

SEQ ID NO: 2319614 - RNA, 19 nt, Artificial Sequence
  Description of Artificial Sequence: Synthetic oligonucleotide
  Sense strand starting at position 3073 of SEQ ID NO: 1885144
auaguagagcuuugccaag

SEQ ID NO: 2319615 - RNA, 19 nt, Artificial Sequence
  Description of Artificial Sequence: Synthetic oligonucleotide
  Antisense strand to SEQ ID NO: 2319614
cuuggcaaagcucuacuau

SEQ ID NO: 2319616 - RNA, 19 nt, Artificial Sequence
  Description of Artificial Sequence: Synthetic oligonucleotide
  Sense strand starting at position 3092 of SEQ ID NO: 1885144
ccaucugauccuugugguu

SEQ ID NO: 2319617 - RNA, 19 nt, Artificial Sequence
  Description of Artificial Sequence: Synthetic oligonucleotide
  Antisense strand to SEQ ID NO: 2319616
aaccacaaggaucagaugg

SEQ ID NO: 2319618 - RNA, 19 nt, Artificial Sequence
  Description of Artificial Sequence: Synthetic oligonucleotide
  Sense strand starting at position 3111 of SEQ ID NO: 1885144
uuuaacguugcuugaggua

SEQ ID NO: 2319619 - RNA, 19 nt, Artificial Sequence
  Description of Artificial Sequence: Synthetic oligonucleotide
  Antisense strand to SEQ ID NO: 2319618
uaccucaagcaacguuaaa

SEQ ID NO: 2319620 - RNA, 19 nt, Artificial Sequence
  Description of Artificial Sequence: Synthetic oligonucleotide
  Sense strand starting at position 3150 of SEQ ID NO: 1885144
aguccaaugaccugugguu

SEQ ID NO: 2319621 - RNA, 19 nt, Artificial Sequence
  Description of Artificial Sequence: Synthetic oligonucleotide
  Antisense strand to SEQ ID NO: 2319620
aaccacaggucauuggacu

SEQ ID NO: 2319622 - RNA, 19 nt, Artificial Sequence
  Description of Artificial Sequence: Synthetic oligonucleotide
  Sense strand starting at position 3155 of SEQ ID NO: 1885144
aaugaccugugguuaguaa

SEQ ID NO: 2319623 - RNA, 19 nt, Artificial Sequence
  Description of Artificial Sequence: Synthetic oligonucleotide
  Antisense strand to SEQ ID NO: 2319622
uuacuaaccacaggucauu

SEQ ID NO: 2319624 - RNA, 19 nt, Artificial Sequence
  Description of Artificial Sequence: Synthetic oligonucleotide
  Sense strand starting at position 3156 of SEQ ID NO: 1885144
augaccugugguuaguaau

SEQ ID NO: 2319625 - RNA, 19 nt, Artificial Sequence
  Description of Artificial Sequence: Synthetic oligonucleotide
  Antisense strand to SEQ ID NO: 2319624
auuacuaaccacaggucau

SEQ ID NO: 2319626 - RNA, 19 nt, Artificial Sequence
  Description of Artificial Sequence: Synthetic oligonucleotide
  Sense strand starting at position 3169 of SEQ ID NO: 1885144
aguaaugucucaucuacuc

SEQ ID NO: 2319627 - RNA, 19 nt, Artificial Sequence
  Description of Artificial Sequence: Synthetic oligonucleotide
  Antisense strand to SEQ ID NO: 2319626
gaguagaugagacauuacu

SEQ ID NO: 2319628 - RNA, 19 nt, Artificial Sequence
  Description of Artificial Sequence: Synthetic oligonucleotide
  Sense strand starting at position 3344 of SEQ ID NO: 1885144
gcaccuacucaaugauggu

SEQ ID NO: 2319629 - RNA, 19 nt, Artificial Sequence
  Description of Artificial Sequence: Synthetic oligonucleotide
  Antisense strand to SEQ ID NO: 2319628
accaucauugaguaggugc

SEQ ID NO: 2319630 - RNA, 19 nt, Artificial Sequence
  Description of Artificial Sequence: Synthetic oligonucleotide
  Sense strand starting at position 3351 of SEQ ID NO: 1885144
cucaaugaugguggguauu

SEQ ID NO: 2319631 - RNA, 19 nt, Artificial Sequence
  Description of Artificial Sequence: Synthetic oligonucleotide
  Antisense strand to SEQ ID NO: 2319630
aauacccaccaucauugag

SEQ ID NO: 2319632 - RNA, 19 nt, Artificial Sequence
  Description of Artificial Sequence: Synthetic oligonucleotide
  Sense strand starting at position 3353 of SEQ ID NO: 1885144
caaugaugguggguauugu

SEQ ID NO: 2319633 - RNA, 19 nt, Artificial Sequence
  Description of Artificial Sequence: Synthetic oligonucleotide
  Antisense strand to SEQ ID NO: 2319632
acaauacccaccaucauug

SEQ ID NO: 2319634 - RNA, 19 nt, Artificial Sequence
  Description of Artificial Sequence: Synthetic oligonucleotide
  Sense strand starting at position 3364 of SEQ ID NO: 1885144
gguauuguucuagguauuc

SEQ ID NO: 2319635 - RNA, 19 nt, Artificial Sequence
  Description of Artificial Sequence: Synthetic oligonucleotide
  Antisense strand to SEQ ID NO: 2319634
gaauaccuagaacaauacc

SEQ ID NO: 2319636 - RNA, 19 nt, Artificial Sequence
  Description of Artificial Sequence: Synthetic oligonucleotide
  Sense strand starting at position 3369 of SEQ ID NO: 1885144
uguucuagguauucgaaca

SEQ ID NO: 2319637 - RNA, 19 nt, Artificial Sequence
  Description of Artificial Sequence: Synthetic oligonucleotide
  Antisense strand to SEQ ID NO: 2319636
uguucgaauaccuagaaca

SEQ ID NO: 2319638 - RNA, 19 nt, Artificial Sequence
  Description of Artificial Sequence: Synthetic oligonucleotide
  Sense strand starting at position 3370 of SEQ ID NO: 1885144
guucuagguauucgaacau

SEQ ID NO: 2319639 - RNA, 19 nt, Artificial Sequence
  Description of Artificial Sequence: Synthetic oligonucleotide
  Antisense strand to SEQ ID NO: 2319638
auguucgaauaccuagaac

SEQ ID NO: 2319640 - RNA, 19 nt, Artificial Sequence
  Description of Artificial Sequence: Synthetic oligonucleotide
  Sense strand starting at position 3380 of SEQ ID NO: 1885144
uucgaacauuuacaaagaa

SEQ ID NO: 2319641 - RNA, 19 nt, Artificial Sequence
  Description of Artificial Sequence: Synthetic oligonucleotide
  Antisense strand to SEQ ID NO: 2319640
uucuuuguaaauguucgaa

SEQ ID NO: 2319642 - RNA, 19 nt, Artificial Sequence
  Description of Artificial Sequence: Synthetic oligonucleotide
  Sense strand starting at position 3640 of SEQ ID NO: 1885144
aguacaaagugguuuagga

SEQ ID NO: 2319643 - RNA, 19 nt, Artificial Sequence
  Description of Artificial Sequence: Synthetic oligonucleotide
  Antisense strand to SEQ ID NO: 2319642
uccuaaaccacuuuguacu

SEQ ID NO: 2319644 - RNA, 19 nt, Artificial Sequence
  Description of Artificial Sequence: Synthetic oligonucleotide
  Sense strand starting at position 3672 of SEQ ID NO: 1885144
agugacuaauucuugcaca

SEQ ID NO: 2319645 - RNA, 19 nt, Artificial Sequence
  Description of Artificial Sequence: Synthetic oligonucleotide
  Antisense strand to SEQ ID NO: 2319644
ugugcaagaauuagucacu

SEQ ID NO: 2319646 - RNA, 19 nt, Artificial Sequence
  Description of Artificial Sequence: Synthetic oligonucleotide
  Sense strand starting at position 3726 of SEQ ID NO: 1885144
ggauaugacccugguaaau

SEQ ID NO: 2319647 - RNA, 19 nt, Artificial Sequence
  Description of Artificial Sequence: Synthetic oligonucleotide
  Antisense strand to SEQ ID NO: 2319646
auuuaccagggucauaucc

SEQ ID NO: 2319648 - RNA, 19 nt, Artificial Sequence
  Description of Artificial Sequence: Synthetic oligonucleotide
  Sense strand starting at position 64 of SEQ ID NO: 1885145
ucuccuuugucccuguaga

SEQ ID NO: 2319649 - RNA, 19 nt, Artificial Sequence
  Description of Artificial Sequence: Synthetic oligonucleotide
  Antisense strand to SEQ ID NO: 2319648
ucuacagggacaaaggaga

SEQ ID NO: 2319650 - RNA, 19 nt, Artificial Sequence
  Description of Artificial Sequence: Synthetic oligonucleotide
  Sense strand starting at position 65 of SEQ ID NO: 1885145
cuccuuugucccuguagaa

SEQ ID NO: 2319651 - RNA, 19 nt, Artificial Sequence
  Description of Artificial Sequence: Synthetic oligonucleotide
  Antisense strand to SEQ ID NO: 2319650
uucuacagggacaaaggag

SEQ ID NO: 2319652 - RNA, 19 nt, Artificial Sequence
  Description of Artificial Sequence: Synthetic oligonucleotide
  Sense strand starting at position 78 of SEQ ID NO: 1885145
guagaacccuuccugagua

SEQ ID NO: 2319653 - RNA, 19 nt, Artificial Sequence
  Description of Artificial Sequence: Synthetic oligonucleotide
  Antisense strand to SEQ ID NO: 2319652
uacucaggaaggguucuac

SEQ ID NO: 2319654 - RNA, 19 nt, Artificial Sequence
  Description of Artificial Sequence: Synthetic oligonucleotide
  Sense strand starting at position 534 of SEQ ID NO: 1885145
gaggcuuucggagaaaugu

SEQ ID NO: 2319655 - RNA, 19 nt, Artificial Sequence
  Description of Artificial Sequence: Synthetic oligonucleotide
  Antisense strand to SEQ ID NO: 2319654
acauuucuccgaaagccuc

SEQ ID NO: 2319656 - RNA, 19 nt, Artificial Sequence
  Description of Artificial Sequence: Synthetic oligonucleotide
  Sense strand starting at position 543 of SEQ ID NO: 1885145
ggagaaaugugaugagaga

SEQ ID NO: 2319657 - RNA, 19 nt, Artificial Sequence
  Description of Artificial Sequence: Synthetic oligonucleotide
  Antisense strand to SEQ ID NO: 2319656
ucucucaucacauuucucc

SEQ ID NO: 2319658 - RNA, 19 nt, Artificial Sequence
  Description of Artificial Sequence: Synthetic oligonucleotide
  Sense strand starting at position 1357 of SEQ ID NO: 1885145
guacuuuguuucuccugga

SEQ ID NO: 2319659 - RNA, 19 nt, Artificial Sequence
  Description of Artificial Sequence: Synthetic oligonucleotide
  Antisense strand to SEQ ID NO: 2319658
uccaggagaaacaaaguac

SEQ ID NO: 2319660 - RNA, 19 nt, Artificial Sequence
  Description of Artificial Sequence: Synthetic oligonucleotide
  Sense strand starting at position 1361 of SEQ ID NO: 1885145
uuuguuucuccuggaaauc

SEQ ID NO: 2319661 - RNA, 19 nt, Artificial Sequence
  Description of Artificial Sequence: Synthetic oligonucleotide
  Antisense strand to SEQ ID NO: 2319660
gauuuccaggagaaacaaa

SEQ ID NO: 2319662 - RNA, 19 nt, Artificial Sequence
  Description of Artificial Sequence: Synthetic oligonucleotide
  Sense strand starting at position 1362 of SEQ ID NO: 1885145
uuguuucuccuggaaaucu

SEQ ID NO: 2319663 - RNA, 19 nt, Artificial Sequence
  Description of Artificial Sequence: Synthetic oligonucleotide
  Antisense strand to SEQ ID NO: 2319662
agauuuccaggagaaacaa

SEQ ID NO: 2319664 - RNA, 19 nt, Artificial Sequence
  Description of Artificial Sequence: Synthetic oligonucleotide
  Sense strand starting at position 1370 of SEQ ID NO: 1885145
ccuggaaaucugugggcaa

SEQ ID NO: 2319665 - RNA, 19 nt, Artificial Sequence
  Description of Artificial Sequence: Synthetic oligonucleotide
  Antisense strand to SEQ ID NO: 2319664
uugcccacagauuuccagg

SEQ ID NO: 2319666 - RNA, 19 nt, Artificial Sequence
  Description of Artificial Sequence: Synthetic oligonucleotide
  Sense strand starting at position 1372 of SEQ ID NO: 1885145
uggaaaucugugggcaaca

SEQ ID NO: 2319667 - RNA, 19 nt, Artificial Sequence
  Description of Artificial Sequence: Synthetic oligonucleotide
  Antisense strand to SEQ ID NO: 2319666
uguugcccacagauuucca

SEQ ID NO: 2319668 - RNA, 19 nt, Artificial Sequence
  Description of Artificial Sequence: Synthetic oligonucleotide
  Sense strand starting at position 1383 of SEQ ID NO: 1885145
gggcaacagagaugugaug

SEQ ID NO: 2319669 - RNA, 19 nt, Artificial Sequence
  Description of Artificial Sequence: Synthetic oligonucleotide
  Antisense strand to SEQ ID NO: 2319668
caucacaucucuguugccc

SEQ ID NO: 2319670 - RNA, 19 nt, Artificial Sequence
  Description of Artificial Sequence: Synthetic oligonucleotide
  Sense strand starting at position 1433 of SEQ ID NO: 1885145
guuuaauguguguccucgu

SEQ ID NO: 2319671 - RNA, 19 nt, Artificial Sequence
  Description of Artificial Sequence: Synthetic oligonucleotide
  Antisense strand to SEQ ID NO: 2319670
acgaggacacacauuaaac

SEQ ID NO: 2319672 - RNA, 19 nt, Artificial Sequence
  Description of Artificial Sequence: Synthetic oligonucleotide
  Sense strand starting at position 1440 of SEQ ID NO: 1885145
guguguccucgugugcaca

SEQ ID NO: 2319673 - RNA, 19 nt, Artificial Sequence
  Description of Artificial Sequence: Synthetic oligonucleotide
  Antisense strand to SEQ ID NO: 2319672
ugugcacacgaggacacac

SEQ ID NO: 2319674 - RNA, 19 nt, Artificial Sequence
  Description of Artificial Sequence: Synthetic oligonucleotide
  Sense strand starting at position 1759 of SEQ ID NO: 1885145
ugagcagucguggaaauca

SEQ ID NO: 2319675 - RNA, 19 nt, Artificial Sequence
  Description of Artificial Sequence: Synthetic oligonucleotide
  Antisense strand to SEQ ID NO: 2319674
ugauuuccacgacugcuca

SEQ ID NO: 2319676 - RNA, 19 nt, Artificial Sequence
  Description of Artificial Sequence: Synthetic oligonucleotide
  Sense strand starting at position 1791 of SEQ ID NO: 1885145
guaacuuacguucgggauu

SEQ ID NO: 2319677 - RNA, 19 nt, Artificial Sequence
  Description of Artificial Sequence: Synthetic oligonucleotide
  Antisense strand to SEQ ID NO: 2319676
aaucccgaacguaaguuac

SEQ ID NO: 2319678 - RNA, 19 nt, Artificial Sequence
  Description of Artificial Sequence: Synthetic oligonucleotide
  Sense strand starting at position 1939 of SEQ ID NO: 1885145
cccagucgcuauuuguaga

SEQ ID NO: 2319679 - RNA, 19 nt, Artificial Sequence
  Description of Artificial Sequence: Synthetic oligonucleotide
  Antisense strand to SEQ ID NO: 2319678
ucuacaaauagcgacuggg

SEQ ID NO: 2319680 - RNA, 19 nt, Artificial Sequence
  Description of Artificial Sequence: Synthetic oligonucleotide
  Sense strand starting at position 1976 of SEQ ID NO: 1885145
uggugucagggcugaaaug

SEQ ID NO: 2319681 - RNA, 19 nt, Artificial Sequence
  Description of Artificial Sequence: Synthetic oligonucleotide
  Antisense strand to SEQ ID NO: 2319680
cauuucagcccugacacca

SEQ ID NO: 2319682 - RNA, 19 nt, Artificial Sequence
  Description of Artificial Sequence: Synthetic oligonucleotide
  Sense strand starting at position 1977 of SEQ ID NO: 1885145
ggugucagggcugaaauga

SEQ ID NO: 2319683 - RNA, 19 nt, Artificial Sequence
  Description of Artificial Sequence: Synthetic oligonucleotide
  Antisense strand to SEQ ID NO: 2319682
ucauuucagcccugacacc

SEQ ID NO: 2319684 - RNA, 19 nt, Artificial Sequence
  Description of Artificial Sequence: Synthetic oligonucleotide
  Sense strand starting at position 2138 of SEQ ID NO: 1885145
ggugaauaauggcugaauu

SEQ ID NO: 2319685 - RNA, 19 nt, Artificial Sequence
  Description of Artificial Sequence: Synthetic oligonucleotide
  Antisense strand to SEQ ID NO: 2319684
aauucagccauuauucacc

SEQ ID NO: 2319686 - RNA, 19 nt, Artificial Sequence
  Description of Artificial Sequence: Synthetic oligonucleotide
  Sense strand starting at position 2139 of SEQ ID NO: 1885145
gugaauaauggcugaauuc

SEQ ID NO: 2319687 - RNA, 19 nt, Artificial Sequence
  Description of Artificial Sequence: Synthetic oligonucleotide
  Antisense strand to SEQ ID NO: 2319686
gaauucagccauuauucac

SEQ ID NO: 2319688 - RNA, 19 nt, Artificial Sequence
  Description of Artificial Sequence: Synthetic oligonucleotide
  Sense strand starting at position 2163 of SEQ ID NO: 1885145
gggacaguuucuguucaug

SEQ ID NO: 2319689 - RNA, 19 nt, Artificial Sequence
  Description of Artificial Sequence: Synthetic oligonucleotide
  Antisense strand to SEQ ID NO: 2319688
caugaacagaaacuguccc

SEQ ID NO: 2319690 - RNA, 19 nt, Artificial Sequence
  Description of Artificial Sequence: Synthetic oligonucleotide
  Sense strand starting at position 2606 of SEQ ID NO: 1885145
guaggugguuggaggagua

SEQ ID NO: 2319691 - RNA, 19 nt, Artificial Sequence
  Description of Artificial Sequence: Synthetic oligonucleotide
  Antisense strand to SEQ ID NO: 2319690
uacuccuccaaccaccuac

SEQ ID NO: 2319692 - RNA, 19 nt, Artificial Sequence
  Description of Artificial Sequence: Synthetic oligonucleotide
  Sense strand starting at position 2616 of SEQ ID NO: 1885145
ggaggaguacuuugcuauc

SEQ ID NO: 2319693 - RNA, 19 nt, Artificial Sequence
  Description of Artificial Sequence: Synthetic oligonucleotide
  Antisense strand to SEQ ID NO: 2319692
gauagcaaaguacuccucc

SEQ ID NO: 2319694 - RNA, 19 nt, Artificial Sequence
  Description of Artificial Sequence: Synthetic oligonucleotide
  Sense strand starting at position 2618 of SEQ ID NO: 1885145
aggaguacuuugcuauccu

SEQ ID NO: 2319695 - RNA, 19 nt, Artificial Sequence
  Description of Artificial Sequence: Synthetic oligonucleotide
  Antisense strand to SEQ ID NO: 2319694
aggauagcaaaguacuccu

SEQ ID NO: 2319696 - RNA, 19 nt, Artificial Sequence
  Description of Artificial Sequence: Synthetic oligonucleotide
  Sense strand starting at position 2622 of SEQ ID NO: 1885145
guacuuugcuauccuguaa

SEQ ID NO: 2319697 - RNA, 19 nt, Artificial Sequence
  Description of Artificial Sequence: Synthetic oligonucleotide
  Antisense strand to SEQ ID NO: 2319696
uuacaggauagcaaaguac

SEQ ID NO: 2319698 - RNA, 19 nt, Artificial Sequence
  Description of Artificial Sequence: Synthetic oligonucleotide
  Sense strand starting at position 2626 of SEQ ID NO: 1885145
uuugcuauccuguaagaaa

SEQ ID NO: 2319699 - RNA, 19 nt, Artificial Sequence
  Description of Artificial Sequence: Synthetic oligonucleotide
  Antisense strand to SEQ ID NO: 2319698
uuucuuacaggauagcaaa

SEQ ID NO: 2319700 - RNA, 19 nt, Artificial Sequence
  Description of Artificial Sequence: Synthetic oligonucleotide
  Sense strand starting at position 2644 of SEQ ID NO: 1885145
agugaagaauauguaguau

SEQ ID NO: 2319701 - RNA, 19 nt, Artificial Sequence
  Description of Artificial Sequence: Synthetic oligonucleotide
  Antisense strand to SEQ ID NO: 2319700
auacuacauauucuucacu

SEQ ID NO: 2319702 - RNA, 19 nt, Artificial Sequence
  Description of Artificial Sequence: Synthetic oligonucleotide
  Sense strand starting at position 2737 of SEQ ID NO: 1885145
agggaauuaccagggcuau

SEQ ID NO: 2319703 - RNA, 19 nt, Artificial Sequence
  Description of Artificial Sequence: Synthetic oligonucleotide
  Antisense strand to SEQ ID NO: 2319702
auagcccugguaauucccu

SEQ ID NO: 2319704 - RNA, 19 nt, Artificial Sequence
  Description of Artificial Sequence: Synthetic oligonucleotide
  Sense strand starting at position 2738 of SEQ ID NO: 1885145
gggaauuaccagggcuauu

SEQ ID NO: 2319705 - RNA, 19 nt, Artificial Sequence
  Description of Artificial Sequence: Synthetic oligonucleotide
  Antisense strand to SEQ ID NO: 2319704
aauagcccugguaauuccc

SEQ ID NO: 2319706 - RNA, 19 nt, Artificial Sequence
  Description of Artificial Sequence: Synthetic oligonucleotide
  Sense strand starting at position 2928 of SEQ ID NO: 1885145
uuugaugccucaguauaua

SEQ ID NO: 2319707 - RNA, 19 nt, Artificial Sequence
  Description of Artificial Sequence: Synthetic oligonucleotide
  Antisense strand to SEQ ID NO: 2319706
uauauacugaggcaucaaa

SEQ ID NO: 2319708 - RNA, 19 nt, Artificial Sequence
  Description of Artificial Sequence: Synthetic oligonucleotide
  Sense strand starting at position 3001 of SEQ ID NO: 1885145
uacucuuugggcugugaca

SEQ ID NO: 2319709 - RNA, 19 nt, Artificial Sequence
  Description of Artificial Sequence: Synthetic oligonucleotide
  Antisense strand to SEQ ID NO: 2319708
ugucacagcccaaagagua

SEQ ID NO: 2319710 - RNA, 19 nt, Artificial Sequence
  Description of Artificial Sequence: Synthetic oligonucleotide
  Sense strand starting at position 3030 of SEQ ID NO: 1885145
aggagauacucccaucuca

SEQ ID NO: 2319711 - RNA, 19 nt, Artificial Sequence
  Description of Artificial Sequence: Synthetic oligonucleotide
  Antisense strand to SEQ ID NO: 2319710
ugagaugggaguaucuccu

SEQ ID NO: 2319712 - RNA, 19 nt, Artificial Sequence
  Description of Artificial Sequence: Synthetic oligonucleotide
  Sense strand starting at position 3089 of SEQ ID NO: 1885145
uuccuuguaucuguaagaa

SEQ ID NO: 2319713 - RNA, 19 nt, Artificial Sequence
  Description of Artificial Sequence: Synthetic oligonucleotide
  Antisense strand to SEQ ID NO: 2319712
uucuuacagauacaaggaa

SEQ ID NO: 2319714 - RNA, 19 nt, Artificial Sequence
  Description of Artificial Sequence: Synthetic oligonucleotide
  Sense strand starting at position 3105 of SEQ ID NO: 1885145
gaaauaaaggacuguguug

SEQ ID NO: 2319715 - RNA, 19 nt, Artificial Sequence
  Description of Artificial Sequence: Synthetic oligonucleotide
  Antisense strand to SEQ ID NO: 2319714
caacacaguccuuuauuuc

SEQ ID NO: 2319716 - RNA, 19 nt, Artificial Sequence
  Description of Artificial Sequence: Synthetic oligonucleotide
  Sense strand starting at position 3147 of SEQ ID NO: 1885145
guaggaucgucguuaggga

SEQ ID NO: 2319717 - RNA, 19 nt, Artificial Sequence
  Description of Artificial Sequence: Synthetic oligonucleotide
  Antisense strand to SEQ ID NO: 2319716
ucccuaacgacgauccuac

SEQ ID NO: 2319718 - RNA, 19 nt, Artificial Sequence
  Description of Artificial Sequence: Synthetic oligonucleotide
  Sense strand starting at position 3148 of SEQ ID NO: 1885145
uaggaucgucguuagggau

SEQ ID NO: 2319719 - RNA, 19 nt, Artificial Sequence
  Description of Artificial Sequence: Synthetic oligonucleotide
  Antisense strand to SEQ ID NO: 2319718
aucccuaacgacgauccua

SEQ ID NO: 2319720 - RNA, 19 nt, Artificial Sequence
  Description of Artificial Sequence: Synthetic oligonucleotide
  Sense strand starting at position 3181 of SEQ ID NO: 1885145
ccaagagauuuccagggca

SEQ ID NO: 2319721 - RNA, 19 nt, Artificial Sequence
  Description of Artificial Sequence: Synthetic oligonucleotide
  Antisense strand to SEQ ID NO: 2319720
ugcccuggaaaucucuugg

SEQ ID NO: 2319722 - RNA, 19 nt, Artificial Sequence
  Description of Artificial Sequence: Synthetic oligonucleotide
  Sense strand starting at position 3195 of SEQ ID NO: 1885145
gggcaacgugcuuugucau

SEQ ID NO: 2319723 - RNA, 19 nt, Artificial Sequence
  Description of Artificial Sequence: Synthetic oligonucleotide
  Antisense strand to SEQ ID NO: 2319722
augacaaagcacguugccc

SEQ ID NO: 2319724 - RNA, 19 nt, Artificial Sequence
  Description of Artificial Sequence: Synthetic oligonucleotide
  Sense strand starting at position 3324 of SEQ ID NO: 1885145
cagggcuugcuuugagaug

SEQ ID NO: 2319725 - RNA, 19 nt, Artificial Sequence
  Description of Artificial Sequence: Synthetic oligonucleotide
  Antisense strand to SEQ ID NO: 2319724
caucucaaagcaagcccug

SEQ ID NO: 2319726 - RNA, 19 nt, Artificial Sequence
  Description of Artificial Sequence: Synthetic oligonucleotide
  Sense strand starting at position 3420 of SEQ ID NO: 1885145
ugcugagcauguuuggaua

SEQ ID NO: 2319727 - RNA, 19 nt, Artificial Sequence
  Description of Artificial Sequence: Synthetic oligonucleotide
  Antisense strand to SEQ ID NO: 2319726
uauccaaacaugcucagca

SEQ ID NO: 2319728 - RNA, 19 nt, Artificial Sequence
  Description of Artificial Sequence: Synthetic oligonucleotide
  Sense strand starting at position 22 of SEQ ID NO: 1885146
ccacucaguaagugaguuu

SEQ ID NO: 2319729 - RNA, 19 nt, Artificial Sequence
  Description of Artificial Sequence: Synthetic oligonucleotide
  Antisense strand to SEQ ID NO: 2319728
aaacucacuuacugagugg

SEQ ID NO: 2319730 - RNA, 19 nt, Artificial Sequence
  Description of Artificial Sequence: Synthetic oligonucleotide
  Sense strand starting at position 25 of SEQ ID NO: 1885146
cucaguaagugaguuugga

SEQ ID NO: 2319731 - RNA, 19 nt, Artificial Sequence
  Description of Artificial Sequence: Synthetic oligonucleotide
  Antisense strand to SEQ ID NO: 2319730
uccaaacucacuuacugag

SEQ ID NO: 2319732 - RNA, 19 nt, Artificial Sequence
  Description of Artificial Sequence: Synthetic oligonucleotide
  Sense strand starting at position 42 of SEQ ID NO: 1885146
gaaagcaggcuuugaaucu

SEQ ID NO: 2319733 - RNA, 19 nt, Artificial Sequence
  Description of Artificial Sequence: Synthetic oligonucleotide
  Antisense strand to SEQ ID NO: 2319732
agauucaaagccugcuuuc

SEQ ID NO: 2319734 - RNA, 19 nt, Artificial Sequence
  Description of Artificial Sequence: Synthetic oligonucleotide
  Sense strand starting at position 66 of SEQ ID NO: 1885146
gggauuaaccaucgcacug

SEQ ID NO: 2319735 - RNA, 19 nt, Artificial Sequence
  Description of Artificial Sequence: Synthetic oligonucleotide
  Antisense strand to SEQ ID NO: 2319734
cagugcgaugguuaauccc

SEQ ID NO: 2319736 - RNA, 19 nt, Artificial Sequence
  Description of Artificial Sequence: Synthetic oligonucleotide
  Sense strand starting at position 106 of SEQ ID NO: 1885146
gggcaaaucugaucauccu

SEQ ID NO: 2319737 - RNA, 19 nt, Artificial Sequence
  Description of Artificial Sequence: Synthetic oligonucleotide
  Antisense strand to SEQ ID NO: 2319736
aggaugaucagauuugccc

SEQ ID NO: 2319738 - RNA, 19 nt, Artificial Sequence
  Description of Artificial Sequence: Synthetic oligonucleotide
  Sense strand starting at position 107 of SEQ ID NO: 1885146
ggcaaaucugaucauccua

SEQ ID NO: 2319739 - RNA, 19 nt, Artificial Sequence
  Description of Artificial Sequence: Synthetic oligonucleotide
  Antisense strand to SEQ ID NO: 2319738
uaggaugaucagauuugcc

SEQ ID NO: 2319740 - RNA, 19 nt, Artificial Sequence
  Description of Artificial Sequence: Synthetic oligonucleotide
  Sense strand starting at position 112 of SEQ ID NO: 1885146
aucugaucauccuaagaag

SEQ ID NO: 2319741 - RNA, 19 nt, Artificial Sequence
  Description of Artificial Sequence: Synthetic oligonucleotide
  Antisense strand to SEQ ID NO: 2319740
cuucuuaggaugaucagau

SEQ ID NO: 2319742 - RNA, 19 nt, Artificial Sequence
  Description of Artificial Sequence: Synthetic oligonucleotide
  Sense strand starting at position 223 of SEQ ID NO: 1885146
cggguuuaguaagcuagga

SEQ ID NO: 2319743 - RNA, 19 nt, Artificial Sequence
  Description of Artificial Sequence: Synthetic oligonucleotide
  Antisense strand to SEQ ID NO: 2319742
uccuagcuuacuaaacccg

SEQ ID NO: 2319744 - RNA, 19 nt, Artificial Sequence
  Description of Artificial Sequence: Synthetic oligonucleotide
  Sense strand starting at position 227 of SEQ ID NO: 1885146
uuuaguaagcuaggaggaa

SEQ ID NO: 2319745 - RNA, 19 nt, Artificial Sequence
  Description of Artificial Sequence: Synthetic oligonucleotide
  Antisense strand to SEQ ID NO: 2319744
uuccuccuagcuuacuaaa

SEQ ID NO: 2319746 - RNA, 19 nt, Artificial Sequence
  Description of Artificial Sequence: Synthetic oligonucleotide
  Sense strand starting at position 228 of SEQ ID NO: 1885146
uuaguaagcuaggaggaaa

SEQ ID NO: 2319747 - RNA, 19 nt, Artificial Sequence
  Description of Artificial Sequence: Synthetic oligonucleotide
  Antisense strand to SEQ ID NO: 2319746
uuuccuccuagcuuacuaa

SEQ ID NO: 2319748 - RNA, 19 nt, Artificial Sequence
  Description of Artificial Sequence: Synthetic oligonucleotide
  Sense strand starting at position 576 of SEQ ID NO: 1885146
ggacguuucugcuccaaga

SEQ ID NO: 2319749 - RNA, 19 nt, Artificial Sequence
  Description of Artificial Sequence: Synthetic oligonucleotide
  Antisense strand to SEQ ID NO: 2319748
ucuuggagcagaaacgucc

SEQ ID NO: 2319750 - RNA, 19 nt, Artificial Sequence
  Description of Artificial Sequence: Synthetic oligonucleotide
  Sense strand starting at position 670 of SEQ ID NO: 1885146
ugcucagguuccuccaaua

SEQ ID NO: 2319751 - RNA, 19 nt, Artificial Sequence
  Description of Artificial Sequence: Synthetic oligonucleotide
  Antisense strand to SEQ ID NO: 2319750
uauuggaggaaccugagca

SEQ ID NO: 2319752 - RNA, 19 nt, Artificial Sequence
  Description of Artificial Sequence: Synthetic oligonucleotide
  Sense strand starting at position 690 of SEQ ID NO: 1885146
gccuuucucuagcccaaga

SEQ ID NO: 2319753 - RNA, 19 nt, Artificial Sequence
  Description of Artificial Sequence: Synthetic oligonucleotide
  Antisense strand to SEQ ID NO: 2319752
ucuugggcuagagaaaggc

SEQ ID NO: 2319754 - RNA, 19 nt, Artificial Sequence
  Description of Artificial Sequence: Synthetic oligonucleotide
  Sense strand starting at position 692 of SEQ ID NO: 1885146
cuuucucuagcccaagaga

SEQ ID NO: 2319755 - RNA, 19 nt, Artificial Sequence
  Description of Artificial Sequence: Synthetic oligonucleotide
  Antisense strand to SEQ ID NO: 2319754
ucucuugggcuagagaaag

SEQ ID NO: 2319756 - RNA, 19 nt, Artificial Sequence
  Description of Artificial Sequence: Synthetic oligonucleotide
  Sense strand starting at position 780 of SEQ ID NO: 1885146
cauggcccuggcuagaaau

SEQ ID NO: 2319757 - RNA, 19 nt, Artificial Sequence
  Description of Artificial Sequence: Synthetic oligonucleotide
  Antisense strand to SEQ ID NO: 2319756
auuucuagccagggccaug

SEQ ID NO: 2319758 - RNA, 19 nt, Artificial Sequence
  Description of Artificial Sequence: Synthetic oligonucleotide
  Sense strand starting at position 782 of SEQ ID NO: 1885146
uggcccuggcuagaaauau

SEQ ID NO: 2319759 - RNA, 19 nt, Artificial Sequence
  Description of Artificial Sequence: Synthetic oligonucleotide
  Antisense strand to SEQ ID NO: 2319758
auauuucuagccagggcca

SEQ ID NO: 2319760 - RNA, 19 nt, Artificial Sequence
  Description of Artificial Sequence: Synthetic oligonucleotide
  Sense strand starting at position 1024 of SEQ ID NO: 1885146
ggccuaaacucgcuuaucu

SEQ ID NO: 2319761 - RNA, 19 nt, Artificial Sequence
  Description of Artificial Sequence: Synthetic oligonucleotide
  Antisense strand to SEQ ID NO: 2319760
agauaagcgaguuuaggcc

SEQ ID NO: 2319762 - RNA, 19 nt, Artificial Sequence
  Description of Artificial Sequence: Synthetic oligonucleotide
  Sense strand starting at position 1059 of SEQ ID NO: 1885146
gaguccucugauuguggga

SEQ ID NO: 2319763 - RNA, 19 nt, Artificial Sequence
  Description of Artificial Sequence: Synthetic oligonucleotide
  Antisense strand to SEQ ID NO: 2319762
ucccacaaucagaggacuc

SEQ ID NO: 2319764 - RNA, 19 nt, Artificial Sequence
  Description of Artificial Sequence: Synthetic oligonucleotide
  Sense strand starting at position 1197 of SEQ ID NO: 1885146
ugggaaaucucagcgucua

SEQ ID NO: 2319765 - RNA, 19 nt, Artificial Sequence
  Description of Artificial Sequence: Synthetic oligonucleotide
  Antisense strand to SEQ ID NO: 2319764
uagacgcugagauuuccca

SEQ ID NO: 2319766 - RNA, 19 nt, Artificial Sequence
  Description of Artificial Sequence: Synthetic oligonucleotide
  Sense strand starting at position 1198 of SEQ ID NO: 1885146
gggaaaucucagcgucuac

SEQ ID NO: 2319767 - RNA, 19 nt, Artificial Sequence
  Description of Artificial Sequence: Synthetic oligonucleotide
  Antisense strand to SEQ ID NO: 2319766
guagacgcugagauuuccc

SEQ ID NO: 2319768 - RNA, 19 nt, Artificial Sequence
  Description of Artificial Sequence: Synthetic oligonucleotide
  Sense strand starting at position 1534 of SEQ ID NO: 1885146
cccagauuccuccaggagu

SEQ ID NO: 2319769 - RNA, 19 nt, Artificial Sequence
  Description of Artificial Sequence: Synthetic oligonucleotide
  Antisense strand to SEQ ID NO: 2319768
acuccuggaggaaucuggg

SEQ ID NO: 2319770 - RNA, 19 nt, Artificial Sequence
  Description of Artificial Sequence: Synthetic oligonucleotide
  Sense strand starting at position 1536 of SEQ ID NO: 1885146
cagauuccuccaggaguuc

SEQ ID NO: 2319771 - RNA, 19 nt, Artificial Sequence
  Description of Artificial Sequence: Synthetic oligonucleotide
  Antisense strand to SEQ ID NO: 2319770
gaacuccuggaggaaucug

SEQ ID NO: 2319772 - RNA, 19 nt, Artificial Sequence
  Description of Artificial Sequence: Synthetic oligonucleotide
  Sense strand starting at position 1548 of SEQ ID NO: 1885146
ggaguucgaaacugcuaaa

SEQ ID NO: 2319773 - RNA, 19 nt, Artificial Sequence
  Description of Artificial Sequence: Synthetic oligonucleotide
  Antisense strand to SEQ ID NO: 2319772
uuuagcaguuucgaacucc

SEQ ID NO: 2319774 - RNA, 19 nt, Artificial Sequence
  Description of Artificial Sequence: Synthetic oligonucleotide
  Sense strand starting at position 1779 of SEQ ID NO: 1885146
uagcucuguccagcgaguu

SEQ ID NO: 2319775 - RNA, 19 nt, Artificial Sequence
  Description of Artificial Sequence: Synthetic oligonucleotide
  Antisense strand to SEQ ID NO: 2319774
aacucgcuggacagagcua

SEQ ID NO: 2319776 - RNA, 19 nt, Artificial Sequence
  Description of Artificial Sequence: Synthetic oligonucleotide
  Sense strand starting at position 3292 of SEQ ID NO: 1885146
gcaauuuacucugugauuc

SEQ ID NO: 2319777 - RNA, 19 nt, Artificial Sequence
  Description of Artificial Sequence: Synthetic oligonucleotide
  Antisense strand to SEQ ID NO: 2319776
gaaucacagaguaaauugc

SEQ ID NO: 2319778 - RNA, 19 nt, Artificial Sequence
  Description of Artificial Sequence: Synthetic oligonucleotide
  Sense strand starting at position 3309 of SEQ ID NO: 1885146
ucauucucgucaucuguaa

SEQ ID NO: 2319779 - RNA, 19 nt, Artificial Sequence
  Description of Artificial Sequence: Synthetic oligonucleotide
  Antisense strand to SEQ ID NO: 2319778
uuacagaugacgagaauga

SEQ ID NO: 2319780 - RNA, 19 nt, Artificial Sequence
  Description of Artificial Sequence: Synthetic oligonucleotide
  Sense strand starting at position 3341 of SEQ ID NO: 1885146
agucuuaacccauaaugug

SEQ ID NO: 2319781 - RNA, 19 nt, Artificial Sequence
  Description of Artificial Sequence: Synthetic oligonucleotide
  Antisense strand to SEQ ID NO: 2319780
cacauuauggguuaagacu

SEQ ID NO: 2319782 - RNA, 19 nt, Artificial Sequence
  Description of Artificial Sequence: Synthetic oligonucleotide
  Sense strand starting at position 3349 of SEQ ID NO: 1885146
cccauaaugugagaauaaa

SEQ ID NO: 2319783 - RNA, 19 nt, Artificial Sequence
  Description of Artificial Sequence: Synthetic oligonucleotide
  Antisense strand to SEQ ID NO: 2319782
uuuauucucacauuauggg

SEQ ID NO: 2319784 - RNA, 19 nt, Artificial Sequence
  Description of Artificial Sequence: Synthetic oligonucleotide
  Sense strand starting at position 3523 of SEQ ID NO: 1885146
aaggauauugaggguguau

SEQ ID NO: 2319785 - RNA, 19 nt, Artificial Sequence
  Description of Artificial Sequence: Synthetic oligonucleotide
  Antisense strand to SEQ ID NO: 2319784
auacacccucaauauccuu

SEQ ID NO: 2319786 - RNA, 19 nt, Artificial Sequence
  Description of Artificial Sequence: Synthetic oligonucleotide
  Sense strand starting at position 3525 of SEQ ID NO: 1885146
ggauauugaggguguaugu

SEQ ID NO: 2319787 - RNA, 19 nt, Artificial Sequence
  Description of Artificial Sequence: Synthetic oligonucleotide
  Antisense strand to SEQ ID NO: 2319786
acauacacccucaauaucc

SEQ ID NO: 2319788 - RNA, 19 nt, Artificial Sequence
  Description of Artificial Sequence: Synthetic oligonucleotide
  Sense strand starting at position 3623 of SEQ ID NO: 1885146
uguccauuggcuuguccaa

SEQ ID NO: 2319789 - RNA, 19 nt, Artificial Sequence
  Description of Artificial Sequence: Synthetic oligonucleotide
  Antisense strand to SEQ ID NO: 2319788
uuggacaagccaauggaca

SEQ ID NO: 2319790 - RNA, 19 nt, Artificial Sequence
  Description of Artificial Sequence: Synthetic oligonucleotide
  Sense strand starting at position 3625 of SEQ ID NO: 1885146
uccauuggcuuguccaaca

SEQ ID NO: 2319791 - RNA, 19 nt, Artificial Sequence
  Description of Artificial Sequence: Synthetic oligonucleotide
  Antisense strand to SEQ ID NO: 2319790
uguuggacaagccaaugga

SEQ ID NO: 2319792 - RNA, 19 nt, Artificial Sequence
  Description of Artificial Sequence: Synthetic oligonucleotide
  Sense strand starting at position 3655 of SEQ ID NO: 1885146
gaucaaggugugugcacau

SEQ ID NO: 2319793 - RNA, 19 nt, Artificial Sequence
  Description of Artificial Sequence: Synthetic oligonucleotide
  Antisense strand to SEQ ID NO: 2319792
augugcacacaccuugauc

SEQ ID NO: 2319794 - RNA, 19 nt, Artificial Sequence
  Description of Artificial Sequence: Synthetic oligonucleotide
  Sense strand starting at position 3695 of SEQ ID NO: 1885146
uuuguaugugcucccgagu

SEQ ID NO: 2319795 - RNA, 19 nt, Artificial Sequence
  Description of Artificial Sequence: Synthetic oligonucleotide
  Antisense strand to SEQ ID NO: 2319794
acucgggagcacauacaaa

SEQ ID NO: 2319796 - RNA, 19 nt, Artificial Sequence
  Description of Artificial Sequence: Synthetic oligonucleotide
  Sense strand starting at position 3763 of SEQ ID NO: 1885146
accaucuaagggugucaga

SEQ ID NO: 2319797 - RNA, 19 nt, Artificial Sequence
  Description of Artificial Sequence: Synthetic oligonucleotide
  Antisense strand to SEQ ID NO: 2319796
ucugacacccuuagauggu

SEQ ID NO: 2319798 - RNA, 19 nt, Artificial Sequence
  Description of Artificial Sequence: Synthetic oligonucleotide
  Sense strand starting at position 3772 of SEQ ID NO: 1885146
gggugucagagcuacaagu

SEQ ID NO: 2319799 - RNA, 19 nt, Artificial Sequence
  Description of Artificial Sequence: Synthetic oligonucleotide
  Antisense strand to SEQ ID NO: 2319798
acuuguagcucugacaccc

SEQ ID NO: 2319800 - RNA, 19 nt, Artificial Sequence
  Description of Artificial Sequence: Synthetic oligonucleotide
  Sense strand starting at position 3821 of SEQ ID NO: 1885146
gaguaaaugugaucucuga

SEQ ID NO: 2319801 - RNA, 19 nt, Artificial Sequence
  Description of Artificial Sequence: Synthetic oligonucleotide
  Antisense strand to SEQ ID NO: 2319800
ucagagaucacauuuacuc

SEQ ID NO: 2319802 - RNA, 19 nt, Artificial Sequence
  Description of Artificial Sequence: Synthetic oligonucleotide
  Sense strand starting at position 3871 of SEQ ID NO: 1885146
ggagcaaguacugguagaa

SEQ ID NO: 2319803 - RNA, 19 nt, Artificial Sequence
  Description of Artificial Sequence: Synthetic oligonucleotide
  Antisense strand to SEQ ID NO: 2319802
uucuaccaguacuugcucc

SEQ ID NO: 2319804 - RNA, 19 nt, Artificial Sequence
  Description of Artificial Sequence: Synthetic oligonucleotide
  Sense strand starting at position 3929 of SEQ ID NO: 1885146
augggaacacugugaugua

SEQ ID NO: 2319805 - RNA, 19 nt, Artificial Sequence
  Description of Artificial Sequence: Synthetic oligonucleotide
  Antisense strand to SEQ ID NO: 2319804
uacaucacaguguucccau

SEQ ID NO: 2319806 - RNA, 19 nt, Artificial Sequence
  Description of Artificial Sequence: Synthetic oligonucleotide
  Sense strand starting at position 3971 of SEQ ID NO: 1885146
gcaaaucuggcuuggguau

SEQ ID NO: 2319807 - RNA, 19 nt, Artificial Sequence
  Description of Artificial Sequence: Synthetic oligonucleotide
  Antisense strand to SEQ ID NO: 2319806
auacccaagccagauuugc

SEQ ID NO: 2319808 - RNA, 19 nt, Artificial Sequence
  Description of Artificial Sequence: Synthetic oligonucleotide
  Sense strand starting at position 30 of SEQ ID NO: 1885147
uggccaaggucuugaaaca

SEQ ID NO: 2319809 - RNA, 19 nt, Artificial Sequence
  Description of Artificial Sequence: Synthetic oligonucleotide
  Antisense strand to SEQ ID NO: 2319808
uguuucaagaccuuggcca

SEQ ID NO: 2319810 - RNA, 19 nt, Artificial Sequence
  Description of Artificial Sequence: Synthetic oligonucleotide
  Sense strand starting at position 43 of SEQ ID NO: 1885147
gaaacaaguuugucucaga

SEQ ID NO: 2319811 - RNA, 19 nt, Artificial Sequence
  Description of Artificial Sequence: Synthetic oligonucleotide
  Antisense strand to SEQ ID NO: 2319810
ucugagacaaacuuguuuc

SEQ ID NO: 2319812 - RNA, 19 nt, Artificial Sequence
  Description of Artificial Sequence: Synthetic oligonucleotide
  Sense strand starting at position 48 of SEQ ID NO: 1885147
aaguuugucucagaagaac

SEQ ID NO: 2319813 - RNA, 19 nt, Artificial Sequence
  Description of Artificial Sequence: Synthetic oligonucleotide
  Antisense strand to SEQ ID NO: 2319812
guucuucugagacaaacuu

SEQ ID NO: 2319814 - RNA, 19 nt, Artificial Sequence
  Description of Artificial Sequence: Synthetic oligonucleotide
  Sense strand starting at position 77 of SEQ ID NO: 1885147
uaacuauccugggcuggaa

SEQ ID NO: 2319815 - RNA, 19 nt, Artificial Sequence
  Description of Artificial Sequence: Synthetic oligonucleotide
  Antisense strand to SEQ ID NO: 2319814
uuccagcccaggauaguua

SEQ ID NO: 2319816 - RNA, 19 nt, Artificial Sequence
  Description of Artificial Sequence: Synthetic oligonucleotide
  Sense strand starting at position 92 of SEQ ID NO: 1885147
ggaacuuuguggcuccaaa

SEQ ID NO: 2319817 - RNA, 19 nt, Artificial Sequence
  Description of Artificial Sequence: Synthetic oligonucleotide
  Antisense strand to SEQ ID NO: 2319816
uuuggagccacaaaguucc

SEQ ID NO: 2319818 - RNA, 19 nt, Artificial Sequence
  Description of Artificial Sequence: Synthetic oligonucleotide
  Sense strand starting at position 200 of SEQ ID NO: 1885147
caaggcugcccuggugaua

SEQ ID NO: 2319819 - RNA, 19 nt, Artificial Sequence
  Description of Artificial Sequence: Synthetic oligonucleotide
  Antisense strand to SEQ ID NO: 2319818
uaucaccagggcagccuug

SEQ ID NO: 2319820 - RNA, 19 nt, Artificial Sequence
  Description of Artificial Sequence: Synthetic oligonucleotide
  Sense strand starting at position 380 of SEQ ID NO: 1885147
aagcauuuguaccgaugua

SEQ ID NO: 2319821 - RNA, 19 nt, Artificial Sequence
  Description of Artificial Sequence: Synthetic oligonucleotide
  Antisense strand to SEQ ID NO: 2319820
uacaucgguacaaaugcuu

SEQ ID NO: 2319822 - RNA, 19 nt, Artificial Sequence
  Description of Artificial Sequence: Synthetic oligonucleotide
  Sense strand starting at position 492 of SEQ ID NO: 1885147
uguggaaaucgaggcucaa

SEQ ID NO: 2319823 - RNA, 19 nt, Artificial Sequence
  Description of Artificial Sequence: Synthetic oligonucleotide
  Antisense strand to SEQ ID NO: 2319822
uugagccucgauuuccaca

SEQ ID NO: 2319824 - RNA, 19 nt, Artificial Sequence
  Description of Artificial Sequence: Synthetic oligonucleotide
  Sense strand starting at position 604 of SEQ ID NO: 1885147
cuuagaagcaccugagguu

SEQ ID NO: 2319825 - RNA, 19 nt, Artificial Sequence
  Description of Artificial Sequence: Synthetic oligonucleotide
  Antisense strand to SEQ ID NO: 2319824
aaccucaggugcuucuaag

SEQ ID NO: 2319826 - RNA, 19 nt, Artificial Sequence
  Description of Artificial Sequence: Synthetic oligonucleotide
  Sense strand starting at position 682 of SEQ ID NO: 1885147
acacauaacugauagguaa

SEQ ID NO: 2319827 - RNA, 19 nt, Artificial Sequence
  Description of Artificial Sequence: Synthetic oligonucleotide
  Antisense strand to SEQ ID NO: 2319826
uuaccuaucaguuaugugu

SEQ ID NO: 2319828 - RNA, 19 nt, Artificial Sequence
  Description of Artificial Sequence: Synthetic oligonucleotide
  Sense strand starting at position 765 of SEQ ID NO: 1885147
agagaucugucccuugcaa

SEQ ID NO: 2319829 - RNA, 19 nt, Artificial Sequence
  Description of Artificial Sequence: Synthetic oligonucleotide
  Antisense strand to SEQ ID NO: 2319828
uugcaagggacagaucucu

SEQ ID NO: 2319830 - RNA, 19 nt, Artificial Sequence
  Description of Artificial Sequence: Synthetic oligonucleotide
  Sense strand starting at position 767 of SEQ ID NO: 1885147
agaucugucccuugcaaag

SEQ ID NO: 2319831 - RNA, 19 nt, Artificial Sequence
  Description of Artificial Sequence: Synthetic oligonucleotide
  Antisense strand to SEQ ID NO: 2319830
cuuugcaagggacagaucu

SEQ ID NO: 2319832 - RNA, 19 nt, Artificial Sequence
  Description of Artificial Sequence: Synthetic oligonucleotide
  Sense strand starting at position 1155 of SEQ ID NO: 1885147
uccuguggcuccuuacaga

SEQ ID NO: 2319833 - RNA, 19 nt, Artificial Sequence
  Description of Artificial Sequence: Synthetic oligonucleotide
  Antisense strand to SEQ ID NO: 2319832
ucuguaaggagccacagga

SEQ ID NO: 2319834 - RNA, 19 nt, Artificial Sequence
  Description of Artificial Sequence: Synthetic oligonucleotide
  Sense strand starting at position 1204 of SEQ ID NO: 1885147
ccaggauggcugugaauag

SEQ ID NO: 2319835 - RNA, 19 nt, Artificial Sequence
  Description of Artificial Sequence: Synthetic oligonucleotide
  Antisense strand to SEQ ID NO: 2319834
cuauucacagccauccugg

SEQ ID NO: 2319836 - RNA, 19 nt, Artificial Sequence
  Description of Artificial Sequence: Synthetic oligonucleotide
  Sense strand starting at position 1222 of SEQ ID NO: 1885147
gcagcaugauccucauggu

SEQ ID NO: 2319837 - RNA, 19 nt, Artificial Sequence
  Description of Artificial Sequence: Synthetic oligonucleotide
  Antisense strand to SEQ ID NO: 2319836
accaugaggaucaugcugc

SEQ ID NO: 2319838 - RNA, 19 nt, Artificial Sequence
  Description of Artificial Sequence: Synthetic oligonucleotide
  Sense strand starting at position 1399 of SEQ ID NO: 1885147
gaaaguauuucugagaagg

SEQ ID NO: 2319839 - RNA, 19 nt, Artificial Sequence
  Description of Artificial Sequence: Synthetic oligonucleotide
  Antisense strand to SEQ ID NO: 2319838
ccuucucagaaauacuuuc

SEQ ID NO: 2319840 - RNA, 19 nt, Artificial Sequence
  Description of Artificial Sequence: Synthetic oligonucleotide
  Sense strand starting at position 1431 of SEQ ID NO: 1885147
gggcuuaguuucccugcua

SEQ ID NO: 2319841 - RNA, 19 nt, Artificial Sequence
  Description of Artificial Sequence: Synthetic oligonucleotide
  Antisense strand to SEQ ID NO: 2319840
uagcagggaaacuaagccc

SEQ ID NO: 2319842 - RNA, 19 nt, Artificial Sequence
  Description of Artificial Sequence: Synthetic oligonucleotide
  Sense strand starting at position 1470 of SEQ ID NO: 1885147
ggagaugugcaaugcuaua

SEQ ID NO: 2319843 - RNA, 19 nt, Artificial Sequence
  Description of Artificial Sequence: Synthetic oligonucleotide
  Antisense strand to SEQ ID NO: 2319842
uauagcauugcacaucucc

SEQ ID NO: 2319844 - RNA, 19 nt, Artificial Sequence
  Description of Artificial Sequence: Synthetic oligonucleotide
  Sense strand starting at position 1498 of SEQ ID NO: 1885147
ggaggacucuagcucccaa

SEQ ID NO: 2319845 - RNA, 19 nt, Artificial Sequence
  Description of Artificial Sequence: Synthetic oligonucleotide
  Antisense strand to SEQ ID NO: 2319844
uugggagcuagaguccucc

SEQ ID NO: 2319846 - RNA, 19 nt, Artificial Sequence
  Description of Artificial Sequence: Synthetic oligonucleotide
  Sense strand starting at position 1522 of SEQ ID NO: 1885147
augauagauuuguaggaca

SEQ ID NO: 2319847 - RNA, 19 nt, Artificial Sequence
  Description of Artificial Sequence: Synthetic oligonucleotide
  Antisense strand to SEQ ID NO: 2319846
uguccuacaaaucuaucau

SEQ ID NO: 2319848 - RNA, 19 nt, Artificial Sequence
  Description of Artificial Sequence: Synthetic oligonucleotide
  Sense strand starting at position 1546 of SEQ ID NO: 1885147
uggucuguuuccucaguca

SEQ ID NO: 2319849 - RNA, 19 nt, Artificial Sequence
  Description of Artificial Sequence: Synthetic oligonucleotide
  Antisense strand to SEQ ID NO: 2319848
ugacugaggaaacagacca

SEQ ID NO: 2319850 - RNA, 19 nt, Artificial Sequence
  Description of Artificial Sequence: Synthetic oligonucleotide
  Sense strand starting at position 1573 of SEQ ID NO: 1885147
agggauccuggaugcuauu

SEQ ID NO: 2319851 - RNA, 19 nt, Artificial Sequence
  Description of Artificial Sequence: Synthetic oligonucleotide
  Antisense strand to SEQ ID NO: 2319850
aauagcauccaggaucccu

SEQ ID NO: 2319852 - RNA, 19 nt, Artificial Sequence
  Description of Artificial Sequence: Synthetic oligonucleotide
  Sense strand starting at position 1626 of SEQ ID NO: 1885147
aacuuucugguaugaaaga

SEQ ID NO: 2319853 - RNA, 19 nt, Artificial Sequence
  Description of Artificial Sequence: Synthetic oligonucleotide
  Antisense strand to SEQ ID NO: 2319852
ucuuucauaccagaaaguu

SEQ ID NO: 2319854 - RNA, 19 nt, Artificial Sequence
  Description of Artificial Sequence: Synthetic oligonucleotide
  Sense strand starting at position 1627 of SEQ ID NO: 1885147
acuuucugguaugaaagaa

SEQ ID NO: 2319855 - RNA, 19 nt, Artificial Sequence
  Description of Artificial Sequence: Synthetic oligonucleotide
  Antisense strand to SEQ ID NO: 2319854
uucuuucauaccagaaagu

SEQ ID NO: 2319856 - RNA, 19 nt, Artificial Sequence
  Description of Artificial Sequence: Synthetic oligonucleotide
  Sense strand starting at position 1637 of SEQ ID NO: 1885147
augaaagaaugagucugua

SEQ ID NO: 2319857 - RNA, 19 nt, Artificial Sequence
  Description of Artificial Sequence: Synthetic oligonucleotide
  Antisense strand to SEQ ID NO: 2319856
uacagacucauucuuucau

SEQ ID NO: 2319858 - RNA, 19 nt, Artificial Sequence
  Description of Artificial Sequence: Synthetic oligonucleotide
  Sense strand starting at position 1641 of SEQ ID NO: 1885147
aagaaugagucuguagcca

SEQ ID NO: 2319859 - RNA, 19 nt, Artificial Sequence
  Description of Artificial Sequence: Synthetic oligonucleotide
  Antisense strand to SEQ ID NO: 2319858
uggcuacagacucauucuu

SEQ ID NO: 2319860 - RNA, 19 nt, Artificial Sequence
  Description of Artificial Sequence: Synthetic oligonucleotide
  Sense strand starting at position 1855 of SEQ ID NO: 1885147
gguggucuggcaggaucaa

SEQ ID NO: 2319861 - RNA, 19 nt, Artificial Sequence
  Description of Artificial Sequence: Synthetic oligonucleotide
  Antisense strand to SEQ ID NO: 2319860
uugauccugccagaccacc

SEQ ID NO: 2319862 - RNA, 19 nt, Artificial Sequence
  Description of Artificial Sequence: Synthetic oligonucleotide
  Sense strand starting at position 1919 of SEQ ID NO: 1885147
gccggugcuccugcaaaga

SEQ ID NO: 2319863 - RNA, 19 nt, Artificial Sequence
  Description of Artificial Sequence: Synthetic oligonucleotide
  Antisense strand to SEQ ID NO: 2319862
ucuuugcaggagcaccggc

SEQ ID NO: 2319864 - RNA, 19 nt, Artificial Sequence
  Description of Artificial Sequence: Synthetic oligonucleotide
  Sense strand starting at position 2186 of SEQ ID NO: 1885147
uguguaugguuuguguaca

SEQ ID NO: 2319865 - RNA, 19 nt, Artificial Sequence
  Description of Artificial Sequence: Synthetic oligonucleotide
  Antisense strand to SEQ ID NO: 2319864
uguacacaaaccauacaca

SEQ ID NO: 2319866 - RNA, 19 nt, Artificial Sequence
  Description of Artificial Sequence: Synthetic oligonucleotide
  Sense strand starting at position 2723 of SEQ ID NO: 1885147
uguggaguuucacgaguca

SEQ ID NO: 2319867 - RNA, 19 nt, Artificial Sequence
  Description of Artificial Sequence: Synthetic oligonucleotide
  Antisense strand to SEQ ID NO: 2319866
ugacucgugaaacuccaca

SEQ ID NO: 2319868 - RNA, 19 nt, Artificial Sequence
  Description of Artificial Sequence: Synthetic oligonucleotide
  Sense strand starting at position 2732 of SEQ ID NO: 1885147
ucacgagucaugggcagau

SEQ ID NO: 2319869 - RNA, 19 nt, Artificial Sequence
  Description of Artificial Sequence: Synthetic oligonucleotide
  Antisense strand to SEQ ID NO: 2319868
aucugcccaugacucguga

SEQ ID NO: 2319870 - RNA, 19 nt, Artificial Sequence
  Description of Artificial Sequence: Synthetic oligonucleotide
  Sense strand starting at position 2856 of SEQ ID NO: 1885147
acauauagcuagucauaua

SEQ ID NO: 2319871 - RNA, 19 nt, Artificial Sequence
  Description of Artificial Sequence: Synthetic oligonucleotide
  Antisense strand to SEQ ID NO: 2319870
uauaugacuagcuauaugu

SEQ ID NO: 2319872 - RNA, 19 nt, Artificial Sequence
  Description of Artificial Sequence: Synthetic oligonucleotide
  Sense strand starting at position 2902 of SEQ ID NO: 1885147
agagaugacuuaugacagu

SEQ ID NO: 2319873 - RNA, 19 nt, Artificial Sequence
  Description of Artificial Sequence: Synthetic oligonucleotide
  Antisense strand to SEQ ID NO: 2319872
acugucauaagucaucucu

SEQ ID NO: 2319874 - RNA, 19 nt, Artificial Sequence
  Description of Artificial Sequence: Synthetic oligonucleotide
  Sense strand starting at position 2905 of SEQ ID NO: 1885147
gaugacuuaugacaguuau

SEQ ID NO: 2319875 - RNA, 19 nt, Artificial Sequence
  Description of Artificial Sequence: Synthetic oligonucleotide
  Antisense strand to SEQ ID NO: 2319874
auaacugucauaagucauc

SEQ ID NO: 2319876 - RNA, 19 nt, Artificial Sequence
  Description of Artificial Sequence: Synthetic oligonucleotide
  Sense strand starting at position 2953 of SEQ ID NO: 1885147
cuacuuauuucuucgugca

SEQ ID NO: 2319877 - RNA, 19 nt, Artificial Sequence
  Description of Artificial Sequence: Synthetic oligonucleotide
  Antisense strand to SEQ ID NO: 2319876
ugcacgaagaaauaaguag

SEQ ID NO: 2319878 - RNA, 19 nt, Artificial Sequence
  Description of Artificial Sequence: Synthetic oligonucleotide
  Sense strand starting at position 2955 of SEQ ID NO: 1885147
acuuauuucuucgugcauu

SEQ ID NO: 2319879 - RNA, 19 nt, Artificial Sequence
  Description of Artificial Sequence: Synthetic oligonucleotide
  Antisense strand to SEQ ID NO: 2319878
aaugcacgaagaaauaagu

SEQ ID NO: 2319880 - RNA, 19 nt, Artificial Sequence
  Description of Artificial Sequence: Synthetic oligonucleotide
  Sense strand starting at position 2956 of SEQ ID NO: 1885147
cuuauuucuucgugcauuu

SEQ ID NO: 2319881 - RNA, 19 nt, Artificial Sequence
  Description of Artificial Sequence: Synthetic oligonucleotide
  Antisense strand to SEQ ID NO: 2319880
aaaugcacgaagaaauaag

SEQ ID NO: 2319882 - RNA, 19 nt, Artificial Sequence
  Description of Artificial Sequence: Synthetic oligonucleotide
  Sense strand starting at position 3017 of SEQ ID NO: 1885147
agcacucaccauugaggau

SEQ ID NO: 2319883 - RNA, 19 nt, Artificial Sequence
  Description of Artificial Sequence: Synthetic oligonucleotide
  Antisense strand to SEQ ID NO: 2319882
auccucaauggugagugcu

SEQ ID NO: 2319884 - RNA, 19 nt, Artificial Sequence
  Description of Artificial Sequence: Synthetic oligonucleotide
  Sense strand starting at position 3032 of SEQ ID NO: 1885147
ggaugaaacucccauuaaa

SEQ ID NO: 2319885 - RNA, 19 nt, Artificial Sequence
  Description of Artificial Sequence: Synthetic oligonucleotide
  Antisense strand to SEQ ID NO: 2319884
uuuaaugggaguuucaucc

SEQ ID NO: 2319886 - RNA, 19 nt, Artificial Sequence
  Description of Artificial Sequence: Synthetic oligonucleotide
  Sense strand starting at position 3549 of SEQ ID NO: 1885147
uccagcuaugccugcuuua

SEQ ID NO: 2319887 - RNA, 19 nt, Artificial Sequence
  Description of Artificial Sequence: Synthetic oligonucleotide
  Antisense strand to SEQ ID NO: 2319886
uaaagcaggcauagcugga

SEQ ID NO: 2319888 - RNA, 19 nt, Artificial Sequence
  Description of Artificial Sequence: Synthetic oligonucleotide
  Sense strand starting at position 90 of SEQ ID NO: 1885148
acugguaggacaugguuau

SEQ ID NO: 2319889 - RNA, 19 nt, Artificial Sequence
  Description of Artificial Sequence: Synthetic oligonucleotide
  Antisense strand to SEQ ID NO: 2319888
auaaccauguccuaccagu

SEQ ID NO: 2319890 - RNA, 19 nt, Artificial Sequence
  Description of Artificial Sequence: Synthetic oligonucleotide
  Sense strand starting at position 91 of SEQ ID NO: 1885148
cugguaggacaugguuauu

SEQ ID NO: 2319891 - RNA, 19 nt, Artificial Sequence
  Description of Artificial Sequence: Synthetic oligonucleotide
  Antisense strand to SEQ ID NO: 2319890
aauaaccauguccuaccag

SEQ ID NO: 2319892 - RNA, 19 nt, Artificial Sequence
  Description of Artificial Sequence: Synthetic oligonucleotide
  Sense strand starting at position 94 of SEQ ID NO: 1885148
guaggacaugguuauugau

SEQ ID NO: 2319893 - RNA, 19 nt, Artificial Sequence
  Description of Artificial Sequence: Synthetic oligonucleotide
  Antisense strand to SEQ ID NO: 2319892
aucaauaaccauguccuac

SEQ ID NO: 2319894 - RNA, 19 nt, Artificial Sequence
  Description of Artificial Sequence: Synthetic oligonucleotide
  Sense strand starting at position 96 of SEQ ID NO: 1885148
aggacaugguuauugauua

SEQ ID NO: 2319895 - RNA, 19 nt, Artificial Sequence
  Description of Artificial Sequence: Synthetic oligonucleotide
  Antisense strand to SEQ ID NO: 2319894
uaaucaauaaccauguccu

SEQ ID NO: 2319896 - RNA, 19 nt, Artificial Sequence
  Description of Artificial Sequence: Synthetic oligonucleotide
  Sense strand starting at position 100 of SEQ ID NO: 1885148
caugguuauugauuagaga

SEQ ID NO: 2319897 - RNA, 19 nt, Artificial Sequence
  Description of Artificial Sequence: Synthetic oligonucleotide
  Antisense strand to SEQ ID NO: 2319896
ucucuaaucaauaaccaug

SEQ ID NO: 2319898 - RNA, 19 nt, Artificial Sequence
  Description of Artificial Sequence: Synthetic oligonucleotide
  Sense strand starting at position 108 of SEQ ID NO: 1885148
uugauuagagaguguuaua

SEQ ID NO: 2319899 - RNA, 19 nt, Artificial Sequence
  Description of Artificial Sequence: Synthetic oligonucleotide
  Antisense strand to SEQ ID NO: 2319898
uauaacacucucuaaucaa

SEQ ID NO: 2319900 - RNA, 19 nt, Artificial Sequence
  Description of Artificial Sequence: Synthetic oligonucleotide
  Sense strand starting at position 115 of SEQ ID NO: 1885148
gagaguguuauaggaauga

SEQ ID NO: 2319901 - RNA, 19 nt, Artificial Sequence
  Description of Artificial Sequence: Synthetic oligonucleotide
  Antisense strand to SEQ ID NO: 2319900
ucauuccuauaacacucuc

SEQ ID NO: 2319902 - RNA, 19 nt, Artificial Sequence
  Description of Artificial Sequence: Synthetic oligonucleotide
  Sense strand starting at position 222 of SEQ ID NO: 1885148
uuuguuggucaugauagua

SEQ ID NO: 2319903 - RNA, 19 nt, Artificial Sequence
  Description of Artificial Sequence: Synthetic oligonucleotide
  Antisense strand to SEQ ID NO: 2319902
uacuaucaugaccaacaaa

SEQ ID NO: 2319904 - RNA, 19 nt, Artificial Sequence
  Description of Artificial Sequence: Synthetic oligonucleotide
  Sense strand starting at position 232 of SEQ ID NO: 1885148
augauaguauuacuuggga

SEQ ID NO: 2319905 - RNA, 19 nt, Artificial Sequence
  Description of Artificial Sequence: Synthetic oligonucleotide
  Antisense strand to SEQ ID NO: 2319904
ucccaaguaauacuaucau

SEQ ID NO: 2319906 - RNA, 19 nt, Artificial Sequence
  Description of Artificial Sequence: Synthetic oligonucleotide
  Sense strand starting at position 276 of SEQ ID NO: 1885148
cuaguuucaguggagugau

SEQ ID NO: 2319907 - RNA, 19 nt, Artificial Sequence
  Description of Artificial Sequence: Synthetic oligonucleotide
  Antisense strand to SEQ ID NO: 2319906
aucacuccacugaaacuag

SEQ ID NO: 2319908 - RNA, 19 nt, Artificial Sequence
  Description of Artificial Sequence: Synthetic oligonucleotide
  Sense strand starting at position 288 of SEQ ID NO: 1885148
gagugauggcaauagaugu

SEQ ID NO: 2319909 - RNA, 19 nt, Artificial Sequence
  Description of Artificial Sequence: Synthetic oligonucleotide
  Antisense strand to SEQ ID NO: 2319908
acaucuauugccaucacuc

SEQ ID NO: 2319910 - RNA, 19 nt, Artificial Sequence
  Description of Artificial Sequence: Synthetic oligonucleotide
  Sense strand starting at position 1017 of SEQ ID NO: 1885148
guaaacaaccauuaguguu

SEQ ID NO: 2319911 - RNA, 19 nt, Artificial Sequence
  Description of Artificial Sequence: Synthetic oligonucleotide
  Antisense strand to SEQ ID NO: 2319910
aacacuaaugguuguuuac

SEQ ID NO: 2319912 - RNA, 19 nt, Artificial Sequence
  Description of Artificial Sequence: Synthetic oligonucleotide
  Sense strand starting at position 1055 of SEQ ID NO: 1885148
auuccagcuguuuaugaaa

SEQ ID NO: 2319913 - RNA, 19 nt, Artificial Sequence
  Description of Artificial Sequence: Synthetic oligonucleotide
  Antisense strand to SEQ ID NO: 2319912
uuucauaaacagcuggaau

SEQ ID NO: 2319914 - RNA, 19 nt, Artificial Sequence
  Description of Artificial Sequence: Synthetic oligonucleotide
  Sense strand starting at position 1073 of SEQ ID NO: 1885148
auacuccugcacugggaaa

SEQ ID NO: 2319915 - RNA, 19 nt, Artificial Sequence
  Description of Artificial Sequence: Synthetic oligonucleotide
  Antisense strand to SEQ ID NO: 2319914
uuucccagugcaggaguau

SEQ ID NO: 2319916 - RNA, 19 nt, Artificial Sequence
  Description of Artificial Sequence: Synthetic oligonucleotide
  Sense strand starting at position 1075 of SEQ ID NO: 1885148
acuccugcacugggaaaua

SEQ ID NO: 2319917 - RNA, 19 nt, Artificial Sequence
  Description of Artificial Sequence: Synthetic oligonucleotide
  Antisense strand to SEQ ID NO: 2319916
uauuucccagugcaggagu

SEQ ID NO: 2319918 - RNA, 19 nt, Artificial Sequence
  Description of Artificial Sequence: Synthetic oligonucleotide
  Sense strand starting at position 1114 of SEQ ID NO: 1885148
agcugauagcccuaacuau

SEQ ID NO: 2319919 - RNA, 19 nt, Artificial Sequence
  Description of Artificial Sequence: Synthetic oligonucleotide
  Antisense strand to SEQ ID NO: 2319918
auaguuagggcuaucagcu

SEQ ID NO: 2319920 - RNA, 19 nt, Artificial Sequence
  Description of Artificial Sequence: Synthetic oligonucleotide
  Sense strand starting at position 1163 of SEQ ID NO: 1885148
gcacuauucgacgaaaucu

SEQ ID NO: 2319921 - RNA, 19 nt, Artificial Sequence
  Description of Artificial Sequence: Synthetic oligonucleotide
  Antisense strand to SEQ ID NO: 2319920
agauuucgucgaauagugc

SEQ ID NO: 2319922 - RNA, 19 nt, Artificial Sequence
  Description of Artificial Sequence: Synthetic oligonucleotide
  Sense strand starting at position 1260 of SEQ ID NO: 1885148
cugaaaugccuaggaaaua

SEQ ID NO: 2319923 - RNA, 19 nt, Artificial Sequence
  Description of Artificial Sequence: Synthetic oligonucleotide
  Antisense strand to SEQ ID NO: 2319922
uauuuccuaggcauuucag

SEQ ID NO: 2319924 - RNA, 19 nt, Artificial Sequence
  Description of Artificial Sequence: Synthetic oligonucleotide
  Sense strand starting at position 1510 of SEQ ID NO: 1885148
ggguuaacgcuucaaagag

SEQ ID NO: 2319925 - RNA, 19 nt, Artificial Sequence
  Description of Artificial Sequence: Synthetic oligonucleotide
  Antisense strand to SEQ ID NO: 2319924
cucuuugaagcguuaaccc

SEQ ID NO: 2319926 - RNA, 19 nt, Artificial Sequence
  Description of Artificial Sequence: Synthetic oligonucleotide
  Sense strand starting at position 1613 of SEQ ID NO: 1885148
ccaccugucccuuaguaaa

SEQ ID NO: 2319927 - RNA, 19 nt, Artificial Sequence
  Description of Artificial Sequence: Synthetic oligonucleotide
  Antisense strand to SEQ ID NO: 2319926
uuuacuaagggacaggugg

SEQ ID NO: 2319928 - RNA, 19 nt, Artificial Sequence
  Description of Artificial Sequence: Synthetic oligonucleotide
  Sense strand starting at position 1696 of SEQ ID NO: 1885148
agcaguagccggcucuaua

SEQ ID NO: 2319929 - RNA, 19 nt, Artificial Sequence
  Description of Artificial Sequence: Synthetic oligonucleotide
  Antisense strand to SEQ ID NO: 2319928
uauagagccggcuacugcu

SEQ ID NO: 2319930 - RNA, 19 nt, Artificial Sequence
  Description of Artificial Sequence: Synthetic oligonucleotide
  Sense strand starting at position 1697 of SEQ ID NO: 1885148
gcaguagccggcucuauaa

SEQ ID NO: 2319931 - RNA, 19 nt, Artificial Sequence
  Description of Artificial Sequence: Synthetic oligonucleotide
  Antisense strand to SEQ ID NO: 2319930
uuauagagccggcuacugc

SEQ ID NO: 2319932 - RNA, 19 nt, Artificial Sequence
  Description of Artificial Sequence: Synthetic oligonucleotide
  Sense strand starting at position 1730 of SEQ ID NO: 1885148
uggcauucucgggaaacca

SEQ ID NO: 2319933 - RNA, 19 nt, Artificial Sequence
  Description of Artificial Sequence: Synthetic oligonucleotide
  Antisense strand to SEQ ID NO: 2319932
ugguuucccgagaaugcca

SEQ ID NO: 2319934 - RNA, 19 nt, Artificial Sequence
  Description of Artificial Sequence: Synthetic oligonucleotide
  Sense strand starting at position 2212 of SEQ ID NO: 1885148
ggaguuugucgagacucug

SEQ ID NO: 2319935 - RNA, 19 nt, Artificial Sequence
  Description of Artificial Sequence: Synthetic oligonucleotide
  Antisense strand to SEQ ID NO: 2319934
cagagucucgacaaacucc

SEQ ID NO: 2319936 - RNA, 19 nt, Artificial Sequence
  Description of Artificial Sequence: Synthetic oligonucleotide
  Sense strand starting at position 2278 of SEQ ID NO: 1885148
acuggaagccagcaagauu

SEQ ID NO: 2319937 - RNA, 19 nt, Artificial Sequence
  Description of Artificial Sequence: Synthetic oligonucleotide
  Antisense strand to SEQ ID NO: 2319936
aaucuugcuggcuuccagu

SEQ ID NO: 2319938 - RNA, 19 nt, Artificial Sequence
  Description of Artificial Sequence: Synthetic oligonucleotide
  Sense strand starting at position 2287 of SEQ ID NO: 1885148
cagcaagauuuguccuggu

SEQ ID NO: 2319939 - RNA, 19 nt, Artificial Sequence
  Description of Artificial Sequence: Synthetic oligonucleotide
  Antisense strand to SEQ ID NO: 2319938
accaggacaaaucuugcug

SEQ ID NO: 2319940 - RNA, 19 nt, Artificial Sequence
  Description of Artificial Sequence: Synthetic oligonucleotide
  Sense strand starting at position 2726 of SEQ ID NO: 1885148
ggagauaucccaggcacua

SEQ ID NO: 2319941 - RNA, 19 nt, Artificial Sequence
  Description of Artificial Sequence: Synthetic oligonucleotide
  Antisense strand to SEQ ID NO: 2319940
uagugccugggauaucucc

SEQ ID NO: 2319942 - RNA, 19 nt, Artificial Sequence
  Description of Artificial Sequence: Synthetic oligonucleotide
  Sense strand starting at position 2738 of SEQ ID NO: 1885148
ggcacuauacauggagacu

SEQ ID NO: 2319943 - RNA, 19 nt, Artificial Sequence
  Description of Artificial Sequence: Synthetic oligonucleotide
  Antisense strand to SEQ ID NO: 2319942
agucuccauguauagugcc

SEQ ID NO: 2319944 - RNA, 19 nt, Artificial Sequence
  Description of Artificial Sequence: Synthetic oligonucleotide
  Sense strand starting at position 2829 of SEQ ID NO: 1885148
uucgauaggaacugugaua

SEQ ID NO: 2319945 - RNA, 19 nt, Artificial Sequence
  Description of Artificial Sequence: Synthetic oligonucleotide
  Antisense strand to SEQ ID NO: 2319944
uaucacaguuccuaucgaa

SEQ ID NO: 2319946 - RNA, 19 nt, Artificial Sequence
  Description of Artificial Sequence: Synthetic oligonucleotide
  Sense strand starting at position 3009 of SEQ ID NO: 1885148
gacaauacaugugugguaa

SEQ ID NO: 2319947 - RNA, 19 nt, Artificial Sequence
  Description of Artificial Sequence: Synthetic oligonucleotide
  Antisense strand to SEQ ID NO: 2319946
uuaccacacauguauuguc

SEQ ID NO: 2319948 - RNA, 19 nt, Artificial Sequence
  Description of Artificial Sequence: Synthetic oligonucleotide
  Sense strand starting at position 3010 of SEQ ID NO: 1885148
acaauacaugugugguaaa

SEQ ID NO: 2319949 - RNA, 19 nt, Artificial Sequence
  Description of Artificial Sequence: Synthetic oligonucleotide
  Antisense strand to SEQ ID NO: 2319948
uuuaccacacauguauugu

SEQ ID NO: 2319950 - RNA, 19 nt, Artificial Sequence
  Description of Artificial Sequence: Synthetic oligonucleotide
  Sense strand starting at position 3111 of SEQ ID NO: 1885148
ccuugauaacucuggcaca

SEQ ID NO: 2319951 - RNA, 19 nt, Artificial Sequence
  Description of Artificial Sequence: Synthetic oligonucleotide
  Antisense strand to SEQ ID NO: 2319950
ugugccagaguuaucaagg

SEQ ID NO: 2319952 - RNA, 19 nt, Artificial Sequence
  Description of Artificial Sequence: Synthetic oligonucleotide
  Sense strand starting at position 3122 of SEQ ID NO: 1885148
cuggcacagaucugggauu

SEQ ID NO: 2319953 - RNA, 19 nt, Artificial Sequence
  Description of Artificial Sequence: Synthetic oligonucleotide
  Antisense strand to SEQ ID NO: 2319952
aaucccagaucugugccag

SEQ ID NO: 2319954 - RNA, 19 nt, Artificial Sequence
  Description of Artificial Sequence: Synthetic oligonucleotide
  Sense strand starting at position 3488 of SEQ ID NO: 1885148
augagaauauuagcaguaa

SEQ ID NO: 2319955 - RNA, 19 nt, Artificial Sequence
  Description of Artificial Sequence: Synthetic oligonucleotide
  Antisense strand to SEQ ID NO: 2319954
uuacugcuaauauucucau

SEQ ID NO: 2319956 - RNA, 19 nt, Artificial Sequence
  Description of Artificial Sequence: Synthetic oligonucleotide
  Sense strand starting at position 3503 of SEQ ID NO: 1885148
guaaucagcauugagugaa

SEQ ID NO: 2319957 - RNA, 19 nt, Artificial Sequence
  Description of Artificial Sequence: Synthetic oligonucleotide
  Antisense strand to SEQ ID NO: 2319956
uucacucaaugcugauuac

SEQ ID NO: 2319958 - RNA, 19 nt, Artificial Sequence
  Description of Artificial Sequence: Synthetic oligonucleotide
  Sense strand starting at position 3507 of SEQ ID NO: 1885148
ucagcauugagugaagacu

SEQ ID NO: 2319959 - RNA, 19 nt, Artificial Sequence
  Description of Artificial Sequence: Synthetic oligonucleotide
  Antisense strand to SEQ ID NO: 2319958
agucuucacucaaugcuga

SEQ ID NO: 2319960 - RNA, 19 nt, Artificial Sequence
  Description of Artificial Sequence: Synthetic oligonucleotide
  Sense strand starting at position 3578 of SEQ ID NO: 1885148
auauaaucuugggugugga

SEQ ID NO: 2319961 - RNA, 19 nt, Artificial Sequence
  Description of Artificial Sequence: Synthetic oligonucleotide
  Antisense strand to SEQ ID NO: 2319960
uccacacccaagauuauau

SEQ ID NO: 2319962 - RNA, 19 nt, Artificial Sequence
  Description of Artificial Sequence: Synthetic oligonucleotide
  Sense strand starting at position 3790 of SEQ ID NO: 1885148
guuugagaacuacaggcuu

SEQ ID NO: 2319963 - RNA, 19 nt, Artificial Sequence
  Description of Artificial Sequence: Synthetic oligonucleotide
  Antisense strand to SEQ ID NO: 2319962
aagccuguaguucucaaac

SEQ ID NO: 2319964 - RNA, 19 nt, Artificial Sequence
  Description of Artificial Sequence: Synthetic oligonucleotide
  Sense strand starting at position 3798 of SEQ ID NO: 1885148
acuacaggcuucucauuga

SEQ ID NO: 2319965 - RNA, 19 nt, Artificial Sequence
  Description of Artificial Sequence: Synthetic oligonucleotide
  Antisense strand to SEQ ID NO: 2319964
ucaaugagaagccuguagu

SEQ ID NO: 2319966 - RNA, 19 nt, Artificial Sequence
  Description of Artificial Sequence: Synthetic oligonucleotide
  Sense strand starting at position 3877 of SEQ ID NO: 1885148
acaagugugccuuaaauaa

SEQ ID NO: 2319967 - RNA, 19 nt, Artificial Sequence
  Description of Artificial Sequence: Synthetic oligonucleotide
  Antisense strand to SEQ ID NO: 2319966
uuauuuaaggcacacuugu

SEQ ID NO: 2319968 - RNA, 19 nt, Artificial Sequence
  Description of Artificial Sequence: Synthetic oligonucleotide
  Sense strand starting at position 800 of SEQ ID NO: 1885149
gggacauaucguuauuaac

SEQ ID NO: 2319969 - RNA, 19 nt, Artificial Sequence
  Description of Artificial Sequence: Synthetic oligonucleotide
  Antisense strand to SEQ ID NO: 2319968
guuaauaacgauauguccc

SEQ ID NO: 2319970 - RNA, 19 nt, Artificial Sequence
  Description of Artificial Sequence: Synthetic oligonucleotide
  Sense strand starting at position 802 of SEQ ID NO: 1885149
gacauaucguuauuaacag

SEQ ID NO: 2319971 - RNA, 19 nt, Artificial Sequence
  Description of Artificial Sequence: Synthetic oligonucleotide
  Antisense strand to SEQ ID NO: 2319970
cuguuaauaacgauauguc

SEQ ID NO: 2319972 - RNA, 19 nt, Artificial Sequence
  Description of Artificial Sequence: Synthetic oligonucleotide
  Sense strand starting at position 811 of SEQ ID NO: 1885149
uuauuaacagcuugggaaa

SEQ ID NO: 2319973 - RNA, 19 nt, Artificial Sequence
  Description of Artificial Sequence: Synthetic oligonucleotide
  Antisense strand to SEQ ID NO: 2319972
uuucccaagcuguuaauaa

SEQ ID NO: 2319974 - RNA, 19 nt, Artificial Sequence
  Description of Artificial Sequence: Synthetic oligonucleotide
  Sense strand starting at position 879 of SEQ ID NO: 1885149
gcggguugugcucucugga

SEQ ID NO: 2319975 - RNA, 19 nt, Artificial Sequence
  Description of Artificial Sequence: Synthetic oligonucleotide
  Antisense strand to SEQ ID NO: 2319974
uccagagagcacaacccgc

SEQ ID NO: 2319976 - RNA, 19 nt, Artificial Sequence
  Description of Artificial Sequence: Synthetic oligonucleotide
  Sense strand starting at position 1353 of SEQ ID NO: 1885149
gugcccauugaucagacua

SEQ ID NO: 2319977 - RNA, 19 nt, Artificial Sequence
  Description of Artificial Sequence: Synthetic oligonucleotide
  Antisense strand to SEQ ID NO: 2319976
uagucugaucaaugggcac

SEQ ID NO: 2319978 - RNA, 19 nt, Artificial Sequence
  Description of Artificial Sequence: Synthetic oligonucleotide
  Sense strand starting at position 1876 of SEQ ID NO: 1885149
cgaucuuggcucuauuugu

SEQ ID NO: 2319979 - RNA, 19 nt, Artificial Sequence
  Description of Artificial Sequence: Synthetic oligonucleotide
  Antisense strand to SEQ ID NO: 2319978
acaaauagagccaagaucg

SEQ ID NO: 2319980 - RNA, 19 nt, Artificial Sequence
  Description of Artificial Sequence: Synthetic oligonucleotide
  Sense strand starting at position 1883 of SEQ ID NO: 1885149
ggcucuauuugugucuuau

SEQ ID NO: 2319981 - RNA, 19 nt, Artificial Sequence
  Description of Artificial Sequence: Synthetic oligonucleotide
  Antisense strand to SEQ ID NO: 2319980
auaagacacaaauagagcc

SEQ ID NO: 2319982 - RNA, 19 nt, Artificial Sequence
  Description of Artificial Sequence: Synthetic oligonucleotide
  Sense strand starting at position 1885 of SEQ ID NO: 1885149
cucuauuugugucuuaugu

SEQ ID NO: 2319983 - RNA, 19 nt, Artificial Sequence
  Description of Artificial Sequence: Synthetic oligonucleotide
  Antisense strand to SEQ ID NO: 2319982
acauaagacacaaauagag

SEQ ID NO: 2319984 - RNA, 19 nt, Artificial Sequence
  Description of Artificial Sequence: Synthetic oligonucleotide
  Sense strand starting at position 2189 of SEQ ID NO: 1885149
uauuuaauuugucggagac

SEQ ID NO: 2319985 - RNA, 19 nt, Artificial Sequence
  Description of Artificial Sequence: Synthetic oligonucleotide
  Antisense strand to SEQ ID NO: 2319984
gucuccgacaaauuaaaua

SEQ ID NO: 2319986 - RNA, 19 nt, Artificial Sequence
  Description of Artificial Sequence: Synthetic oligonucleotide
  Sense strand starting at position 2370 of SEQ ID NO: 1885149
gggauaguuggaggugagu

SEQ ID NO: 2319987 - RNA, 19 nt, Artificial Sequence
  Description of Artificial Sequence: Synthetic oligonucleotide
  Antisense strand to SEQ ID NO: 2319986
acucaccuccaacuauccc

SEQ ID NO: 2319988 - RNA, 19 nt, Artificial Sequence
  Description of Artificial Sequence: Synthetic oligonucleotide
  Sense strand starting at position 2372 of SEQ ID NO: 1885149
gauaguuggaggugaguuu

SEQ ID NO: 2319989 - RNA, 19 nt, Artificial Sequence
  Description of Artificial Sequence: Synthetic oligonucleotide
  Antisense strand to SEQ ID NO: 2319988
aaacucaccuccaacuauc

SEQ ID NO: 2319990 - RNA, 19 nt, Artificial Sequence
  Description of Artificial Sequence: Synthetic oligonucleotide
  Sense strand starting at position 2381 of SEQ ID NO: 1885149
aggugaguuucacccugga

SEQ ID NO: 2319991 - RNA, 19 nt, Artificial Sequence
  Description of Artificial Sequence: Synthetic oligonucleotide
  Antisense strand to SEQ ID NO: 2319990
uccagggugaaacucaccu

SEQ ID NO: 2319992 - RNA, 19 nt, Artificial Sequence
  Description of Artificial Sequence: Synthetic oligonucleotide
  Sense strand starting at position 2384 of SEQ ID NO: 1885149
ugaguuucacccuggagga

SEQ ID NO: 2319993 - RNA, 19 nt, Artificial Sequence
  Description of Artificial Sequence: Synthetic oligonucleotide
  Antisense strand to SEQ ID NO: 2319992
uccuccagggugaaacuca

SEQ ID NO: 2319994 - RNA, 19 nt, Artificial Sequence
  Description of Artificial Sequence: Synthetic oligonucleotide
  Sense strand starting at position 2460 of SEQ ID NO: 1885149
cuuagucuugcugaaucuu

SEQ ID NO: 2319995 - RNA, 19 nt, Artificial Sequence
  Description of Artificial Sequence: Synthetic oligonucleotide
  Antisense strand to SEQ ID NO: 2319994
aagauucagcaagacuaag

SEQ ID NO: 2319996 - RNA, 19 nt, Artificial Sequence
  Description of Artificial Sequence: Synthetic oligonucleotide
  Sense strand starting at position 2492 of SEQ ID NO: 1885149
gcuacuucucaugaacgaa

SEQ ID NO: 2319997 - RNA, 19 nt, Artificial Sequence
  Description of Artificial Sequence: Synthetic oligonucleotide
  Antisense strand to SEQ ID NO: 2319996
uucguucaugagaaguagc

SEQ ID NO: 2319998 - RNA, 19 nt, Artificial Sequence
  Description of Artificial Sequence: Synthetic oligonucleotide
  Sense strand starting at position 2495 of SEQ ID NO: 1885149
acuucucaugaacgaaaua

SEQ ID NO: 2319999 - RNA, 19 nt, Artificial Sequence
  Description of Artificial Sequence: Synthetic oligonucleotide
  Antisense strand to SEQ ID NO: 2319998
uauuucguucaugagaagu

SEQ ID NO: 2320000 - RNA, 19 nt, Artificial Sequence
  Description of Artificial Sequence: Synthetic oligonucleotide
  Sense strand starting at position 2539 of SEQ ID NO: 1885149
aagaauggauucucucgaa

SEQ ID NO: 2320001 - RNA, 19 nt, Artificial Sequence
  Description of Artificial Sequence: Synthetic oligonucleotide
  Antisense strand to SEQ ID NO: 2320000
uucgagagaauccauucuu

SEQ ID NO: 2320002 - RNA, 19 nt, Artificial Sequence
  Description of Artificial Sequence: Synthetic oligonucleotide
  Sense strand starting at position 2543 of SEQ ID NO: 1885149
auggauucucucgaaaggu

SEQ ID NO: 2320003 - RNA, 19 nt, Artificial Sequence
  Description of Artificial Sequence: Synthetic oligonucleotide
  Antisense strand to SEQ ID NO: 2320002
accuuucgagagaauccau

SEQ ID NO: 2320004 - RNA, 19 nt, Artificial Sequence
  Description of Artificial Sequence: Synthetic oligonucleotide
  Sense strand starting at position 2627 of SEQ ID NO: 1885149
ugggcuauuaccugggaga

SEQ ID NO: 2320005 - RNA, 19 nt, Artificial Sequence
  Description of Artificial Sequence: Synthetic oligonucleotide
  Antisense strand to SEQ ID NO: 2320004
ucucccagguaauagccca

SEQ ID NO: 2320006 - RNA, 19 nt, Artificial Sequence
  Description of Artificial Sequence: Synthetic oligonucleotide
  Sense strand starting at position 2628 of SEQ ID NO: 1885149
gggcuauuaccugggagag

SEQ ID NO: 2320007 - RNA, 19 nt, Artificial Sequence
  Description of Artificial Sequence: Synthetic oligonucleotide
  Antisense strand to SEQ ID NO: 2320006
cucucccagguaauagccc

SEQ ID NO: 2320008 - RNA, 19 nt, Artificial Sequence
  Description of Artificial Sequence: Synthetic oligonucleotide
  Sense strand starting at position 2629 of SEQ ID NO: 1885149
ggcuauuaccugggagagu

SEQ ID NO: 2320009 - RNA, 19 nt, Artificial Sequence
  Description of Artificial Sequence: Synthetic oligonucleotide
  Antisense strand to SEQ ID NO: 2320008
acucucccagguaauagcc

SEQ ID NO: 2320010 - RNA, 19 nt, Artificial Sequence
  Description of Artificial Sequence: Synthetic oligonucleotide
  Sense strand starting at position 2675 of SEQ ID NO: 1885149
gaagauuauuuaugggaau

SEQ ID NO: 2320011 - RNA, 19 nt, Artificial Sequence
  Description of Artificial Sequence: Synthetic oligonucleotide
  Antisense strand to SEQ ID NO: 2320010
auucccauaaauaaucuuc

SEQ ID NO: 2320012 - RNA, 19 nt, Artificial Sequence
  Description of Artificial Sequence: Synthetic oligonucleotide
  Sense strand starting at position 2950 of SEQ ID NO: 1885149
gagugagcaccauagcaaa

SEQ ID NO: 2320013 - RNA, 19 nt, Artificial Sequence
  Description of Artificial Sequence: Synthetic oligonucleotide
  Antisense strand to SEQ ID NO: 2320012
uuugcuauggugcucacuc

SEQ ID NO: 2320014 - RNA, 19 nt, Artificial Sequence
  Description of Artificial Sequence: Synthetic oligonucleotide
  Sense strand starting at position 2998 of SEQ ID NO: 1885149
acauucaggguuggagauu

SEQ ID NO: 2320015 - RNA, 19 nt, Artificial Sequence
  Description of Artificial Sequence: Synthetic oligonucleotide
  Antisense strand to SEQ ID NO: 2320014
aaucuccaacccugaaugu

SEQ ID NO: 2320016 - RNA, 19 nt, Artificial Sequence
  Description of Artificial Sequence: Synthetic oligonucleotide
  Sense strand starting at position 3007 of SEQ ID NO: 1885149
guuggagauucuccacuuu

SEQ ID NO: 2320017 - RNA, 19 nt, Artificial Sequence
  Description of Artificial Sequence: Synthetic oligonucleotide
  Antisense strand to SEQ ID NO: 2320016
aaaguggagaaucuccaac

SEQ ID NO: 2320018 - RNA, 19 nt, Artificial Sequence
  Description of Artificial Sequence: Synthetic oligonucleotide
  Sense strand starting at position 3063 of SEQ ID NO: 1885149
agagcagucacagaggguu

SEQ ID NO: 2320019 - RNA, 19 nt, Artificial Sequence
  Description of Artificial Sequence: Synthetic oligonucleotide
  Antisense strand to SEQ ID NO: 2320018
aacccucugugacugcucu

SEQ ID NO: 2320020 - RNA, 19 nt, Artificial Sequence
  Description of Artificial Sequence: Synthetic oligonucleotide
  Sense strand starting at position 3409 of SEQ ID NO: 1885149
cccagugacuguuugauua

SEQ ID NO: 2320021 - RNA, 19 nt, Artificial Sequence
  Description of Artificial Sequence: Synthetic oligonucleotide
  Antisense strand to SEQ ID NO: 2320020
uaaucaaacagucacuggg

SEQ ID NO: 2320022 - RNA, 19 nt, Artificial Sequence
  Description of Artificial Sequence: Synthetic oligonucleotide
  Sense strand starting at position 3512 of SEQ ID NO: 1885149
agcgauuucuuagcaucuu

SEQ ID NO: 2320023 - RNA, 19 nt, Artificial Sequence
  Description of Artificial Sequence: Synthetic oligonucleotide
  Antisense strand to SEQ ID NO: 2320022
aagaugcuaagaaaucgcu

SEQ ID NO: 2320024 - RNA, 19 nt, Artificial Sequence
  Description of Artificial Sequence: Synthetic oligonucleotide
  Sense strand starting at position 3574 of SEQ ID NO: 1885149
cccagagucguugagagua

SEQ ID NO: 2320025 - RNA, 19 nt, Artificial Sequence
  Description of Artificial Sequence: Synthetic oligonucleotide
  Antisense strand to SEQ ID NO: 2320024
uacucucaacgacucuggg

SEQ ID NO: 2320026 - RNA, 19 nt, Artificial Sequence
  Description of Artificial Sequence: Synthetic oligonucleotide
  Sense strand starting at position 3686 of SEQ ID NO: 1885149
agagaaugucugcaaggcu

SEQ ID NO: 2320027 - RNA, 19 nt, Artificial Sequence
  Description of Artificial Sequence: Synthetic oligonucleotide
  Antisense strand to SEQ ID NO: 2320026
agccuugcagacauucucu

SEQ ID NO: 2320028 - RNA, 19 nt, Artificial Sequence
  Description of Artificial Sequence: Synthetic oligonucleotide
  Sense strand starting at position 3767 of SEQ ID NO: 1885149
cacugagauuacuucccga

SEQ ID NO: 2320029 - RNA, 19 nt, Artificial Sequence
  Description of Artificial Sequence: Synthetic oligonucleotide
  Antisense strand to SEQ ID NO: 2320028
ucgggaaguaaucucagug

SEQ ID NO: 2320030 - RNA, 19 nt, Artificial Sequence
  Description of Artificial Sequence: Synthetic oligonucleotide
  Sense strand starting at position 3770 of SEQ ID NO: 1885149
ugagauuacuucccgauua

SEQ ID NO: 2320031 - RNA, 19 nt, Artificial Sequence
  Description of Artificial Sequence: Synthetic oligonucleotide
  Antisense strand to SEQ ID NO: 2320030
uaaucgggaaguaaucuca

SEQ ID NO: 2320032 - RNA, 19 nt, Artificial Sequence
  Description of Artificial Sequence: Synthetic oligonucleotide
  Sense strand starting at position 3791 of SEQ ID NO: 1885149
agccgaccgcguuugaaau

SEQ ID NO: 2320033 - RNA, 19 nt, Artificial Sequence
  Description of Artificial Sequence: Synthetic oligonucleotide
  Antisense strand to SEQ ID NO: 2320032
auuucaaacgcggucggcu

SEQ ID NO: 2320034 - RNA, 19 nt, Artificial Sequence
  Description of Artificial Sequence: Synthetic oligonucleotide
  Sense strand starting at position 3797 of SEQ ID NO: 1885149
ccgcguuugaaaugauuug

SEQ ID NO: 2320035 - RNA, 19 nt, Artificial Sequence
  Description of Artificial Sequence: Synthetic oligonucleotide
  Antisense strand to SEQ ID NO: 2320034
caaaucauuucaaacgcgg

SEQ ID NO: 2320036 - RNA, 19 nt, Artificial Sequence
  Description of Artificial Sequence: Synthetic oligonucleotide
  Sense strand starting at position 3808 of SEQ ID NO: 1885149
augauuugugcaggaguuu

SEQ ID NO: 2320037 - RNA, 19 nt, Artificial Sequence
  Description of Artificial Sequence: Synthetic oligonucleotide
  Antisense strand to SEQ ID NO: 2320036
aaacuccugcacaaaucau

SEQ ID NO: 2320038 - RNA, 19 nt, Artificial Sequence
  Description of Artificial Sequence: Synthetic oligonucleotide
  Sense strand starting at position 3904 of SEQ ID NO: 1885149
gucuguguugagagucgua

SEQ ID NO: 2320039 - RNA, 19 nt, Artificial Sequence
  Description of Artificial Sequence: Synthetic oligonucleotide
  Antisense strand to SEQ ID NO: 2320038
uacgacucucaacacagac

SEQ ID NO: 2320040 - RNA, 19 nt, Artificial Sequence
  Description of Artificial Sequence: Synthetic oligonucleotide
  Sense strand starting at position 3908 of SEQ ID NO: 1885149
guguugagagucguauugu

SEQ ID NO: 2320041 - RNA, 19 nt, Artificial Sequence
  Description of Artificial Sequence: Synthetic oligonucleotide
  Antisense strand to SEQ ID NO: 2320040
acaauacgacucucaacac

SEQ ID NO: 2320042 - RNA, 19 nt, Artificial Sequence
  Description of Artificial Sequence: Synthetic oligonucleotide
  Sense strand starting at position 3917 of SEQ ID NO: 1885149
gucguauugugauuugagu

SEQ ID NO: 2320043 - RNA, 19 nt, Artificial Sequence
  Description of Artificial Sequence: Synthetic oligonucleotide
  Antisense strand to SEQ ID NO: 2320042
acucaaaucacaauacgac

SEQ ID NO: 2320044 - RNA, 19 nt, Artificial Sequence
  Description of Artificial Sequence: Synthetic oligonucleotide
  Sense strand starting at position 3919 of SEQ ID NO: 1885149
cguauugugauuugagugu

SEQ ID NO: 2320045 - RNA, 19 nt, Artificial Sequence
  Description of Artificial Sequence: Synthetic oligonucleotide
  Antisense strand to SEQ ID NO: 2320044
acacucaaaucacaauacg

SEQ ID NO: 2320046 - RNA, 19 nt, Artificial Sequence
  Description of Artificial Sequence: Synthetic oligonucleotide
  Sense strand starting at position 3930 of SEQ ID NO: 1885149
uugaguguucgggaaaucu

SEQ ID NO: 2320047 - RNA, 19 nt, Artificial Sequence
  Description of Artificial Sequence: Synthetic oligonucleotide
  Antisense strand to SEQ ID NO: 2320046
agauuucccgaacacucaa

SEQ ID NO: 2320048 - RNA, 19 nt, Artificial Sequence
  Description of Artificial Sequence: Synthetic oligonucleotide
  Sense strand starting at position 97 of SEQ ID NO: 1885150
gagggcacaugagaaauaa

SEQ ID NO: 2320049 - RNA, 19 nt, Artificial Sequence
  Description of Artificial Sequence: Synthetic oligonucleotide
  Antisense strand to SEQ ID NO: 2320048
uuauuucucaugugcccuc

SEQ ID NO: 2320050 - RNA, 19 nt, Artificial Sequence
  Description of Artificial Sequence: Synthetic oligonucleotide
  Sense strand starting at position 136 of SEQ ID NO: 1885150
gcaaguaagagcuagagga

SEQ ID NO: 2320051 - RNA, 19 nt, Artificial Sequence
  Description of Artificial Sequence: Synthetic oligonucleotide
  Antisense strand to SEQ ID NO: 2320050
uccucuagcucuuacuugc

SEQ ID NO: 2320052 - RNA, 19 nt, Artificial Sequence
  Description of Artificial Sequence: Synthetic oligonucleotide
  Sense strand starting at position 171 of SEQ ID NO: 1885150
ucauauuagucuucggauu

SEQ ID NO: 2320053 - RNA, 19 nt, Artificial Sequence
  Description of Artificial Sequence: Synthetic oligonucleotide
  Antisense strand to SEQ ID NO: 2320052
aauccgaagacuaauauga

SEQ ID NO: 2320054 - RNA, 19 nt, Artificial Sequence
  Description of Artificial Sequence: Synthetic oligonucleotide
  Sense strand starting at position 172 of SEQ ID NO: 1885150
cauauuagucuucggauug

SEQ ID NO: 2320055 - RNA, 19 nt, Artificial Sequence
  Description of Artificial Sequence: Synthetic oligonucleotide
  Antisense strand to SEQ ID NO: 2320054
caauccgaagacuaauaug

SEQ ID NO: 2320056 - RNA, 19 nt, Artificial Sequence
  Description of Artificial Sequence: Synthetic oligonucleotide
  Sense strand starting at position 182 of SEQ ID NO: 1885150
uucggauugaagugcauaa

SEQ ID NO: 2320057 - RNA, 19 nt, Artificial Sequence
  Description of Artificial Sequence: Synthetic oligonucleotide
  Antisense strand to SEQ ID NO: 2320056
uuaugcacuucaauccgaa

SEQ ID NO: 2320058 - RNA, 19 nt, Artificial Sequence
  Description of Artificial Sequence: Synthetic oligonucleotide
  Sense strand starting at position 336 of SEQ ID NO: 1885150
gguggauucuuccagucug

SEQ ID NO: 2320059 - RNA, 19 nt, Artificial Sequence
  Description of Artificial Sequence: Synthetic oligonucleotide
  Antisense strand to SEQ ID NO: 2320058
cagacuggaagaauccacc

SEQ ID NO: 2320060 - RNA, 19 nt, Artificial Sequence
  Description of Artificial Sequence: Synthetic oligonucleotide
  Sense strand starting at position 467 of SEQ ID NO: 1885150
aggguaccauauuauauau

SEQ ID NO: 2320061 - RNA, 19 nt, Artificial Sequence
  Description of Artificial Sequence: Synthetic oligonucleotide
  Antisense strand to SEQ ID NO: 2320060
auauauaauaugguacccu

SEQ ID NO: 2320062 - RNA, 19 nt, Artificial Sequence
  Description of Artificial Sequence: Synthetic oligonucleotide
  Sense strand starting at position 501 of SEQ ID NO: 1885150
uuacuucuuuaguuggaua

SEQ ID NO: 2320063 - RNA, 19 nt, Artificial Sequence
  Description of Artificial Sequence: Synthetic oligonucleotide
  Antisense strand to SEQ ID NO: 2320062
uauccaacuaaagaaguaa

SEQ ID NO: 2320064 - RNA, 19 nt, Artificial Sequence
  Description of Artificial Sequence: Synthetic oligonucleotide
  Sense strand starting at position 503 of SEQ ID NO: 1885150
acuucuuuaguuggauauu

SEQ ID NO: 2320065 - RNA, 19 nt, Artificial Sequence
  Description of Artificial Sequence: Synthetic oligonucleotide
  Antisense strand to SEQ ID NO: 2320064
aauauccaacuaaagaagu

SEQ ID NO: 2320066 - RNA, 19 nt, Artificial Sequence
  Description of Artificial Sequence: Synthetic oligonucleotide
  Sense strand starting at position 504 of SEQ ID NO: 1885150
cuucuuuaguuggauauuu

SEQ ID NO: 2320067 - RNA, 19 nt, Artificial Sequence
  Description of Artificial Sequence: Synthetic oligonucleotide
  Antisense strand to SEQ ID NO: 2320066
aaauauccaacuaaagaag

SEQ ID NO: 2320068 - RNA, 19 nt, Artificial Sequence
  Description of Artificial Sequence: Synthetic oligonucleotide
  Sense strand starting at position 512 of SEQ ID NO: 1885150
guuggauauuucuauaucu

SEQ ID NO: 2320069 - RNA, 19 nt, Artificial Sequence
  Description of Artificial Sequence: Synthetic oligonucleotide
  Antisense strand to SEQ ID NO: 2320068
agauauagaaauauccaac

SEQ ID NO: 2320070 - RNA, 19 nt, Artificial Sequence
  Description of Artificial Sequence: Synthetic oligonucleotide
  Sense strand starting at position 556 of SEQ ID NO: 1885150
gacguauaagugcgugcau

SEQ ID NO: 2320071 - RNA, 19 nt, Artificial Sequence
  Description of Artificial Sequence: Synthetic oligonucleotide
  Antisense strand to SEQ ID NO: 2320070
augcacgcacuuauacguc

SEQ ID NO: 2320072 - RNA, 19 nt, Artificial Sequence
  Description of Artificial Sequence: Synthetic oligonucleotide
  Sense strand starting at position 557 of SEQ ID NO: 1885150
acguauaagugcgugcaua

SEQ ID NO: 2320073 - RNA, 19 nt, Artificial Sequence
  Description of Artificial Sequence: Synthetic oligonucleotide
  Antisense strand to SEQ ID NO: 2320072
uaugcacgcacuuauacgu

SEQ ID NO: 2320074 - RNA, 19 nt, Artificial Sequence
  Description of Artificial Sequence: Synthetic oligonucleotide
  Sense strand starting at position 558 of SEQ ID NO: 1885150
cguauaagugcgugcauac

SEQ ID NO: 2320075 - RNA, 19 nt, Artificial Sequence
  Description of Artificial Sequence: Synthetic oligonucleotide
  Antisense strand to SEQ ID NO: 2320074
guaugcacgcacuuauacg

SEQ ID NO: 2320076 - RNA, 19 nt, Artificial Sequence
  Description of Artificial Sequence: Synthetic oligonucleotide
  Sense strand starting at position 612 of SEQ ID NO: 1885150
uccaguucuccuggaaagg

SEQ ID NO: 2320077 - RNA, 19 nt, Artificial Sequence
  Description of Artificial Sequence: Synthetic oligonucleotide
  Antisense strand to SEQ ID NO: 2320076
ccuuuccaggagaacugga

SEQ ID NO: 2320078 - RNA, 19 nt, Artificial Sequence
  Description of Artificial Sequence: Synthetic oligonucleotide
  Sense strand starting at position 692 of SEQ ID NO: 1885150
cccucucuuggugaucaau

SEQ ID NO: 2320079 - RNA, 19 nt, Artificial Sequence
  Description of Artificial Sequence: Synthetic oligonucleotide
  Antisense strand to SEQ ID NO: 2320078
auugaucaccaagagaggg

SEQ ID NO: 2320080 - RNA, 19 nt, Artificial Sequence
  Description of Artificial Sequence: Synthetic oligonucleotide
  Sense strand starting at position 694 of SEQ ID NO: 1885150
cucucuuggugaucaauac

SEQ ID NO: 2320081 - RNA, 19 nt, Artificial Sequence
  Description of Artificial Sequence: Synthetic oligonucleotide
  Antisense strand to SEQ ID NO: 2320080
guauugaucaccaagagag

SEQ ID NO: 2320082 - RNA, 19 nt, Artificial Sequence
  Description of Artificial Sequence: Synthetic oligonucleotide
  Sense strand starting at position 695 of SEQ ID NO: 1885150
ucucuuggugaucaauacu

SEQ ID NO: 2320083 - RNA, 19 nt, Artificial Sequence
  Description of Artificial Sequence: Synthetic oligonucleotide
  Antisense strand to SEQ ID NO: 2320082
aguauugaucaccaagaga

SEQ ID NO: 2320084 - RNA, 19 nt, Artificial Sequence
  Description of Artificial Sequence: Synthetic oligonucleotide
  Sense strand starting at position 748 of SEQ ID NO: 1885150
ggagcuagcucuuucccaa

SEQ ID NO: 2320085 - RNA, 19 nt, Artificial Sequence
  Description of Artificial Sequence: Synthetic oligonucleotide
  Antisense strand to SEQ ID NO: 2320084
uugggaaagagcuagcucc

SEQ ID NO: 2320086 - RNA, 19 nt, Artificial Sequence
  Description of Artificial Sequence: Synthetic oligonucleotide
  Sense strand starting at position 780 of SEQ ID NO: 1885150
cccauuuccugagcgucua

SEQ ID NO: 2320087 - RNA, 19 nt, Artificial Sequence
  Description of Artificial Sequence: Synthetic oligonucleotide
  Antisense strand to SEQ ID NO: 2320086
uagacgcucaggaaauggg

SEQ ID NO: 2320088 - RNA, 19 nt, Artificial Sequence
  Description of Artificial Sequence: Synthetic oligonucleotide
  Sense strand starting at position 790 of SEQ ID NO: 1885150
gagcgucuaccagguacua

SEQ ID NO: 2320089 - RNA, 19 nt, Artificial Sequence
  Description of Artificial Sequence: Synthetic oligonucleotide
  Antisense strand to SEQ ID NO: 2320088
uaguaccugguagacgcuc

SEQ ID NO: 2320090 - RNA, 19 nt, Artificial Sequence
  Description of Artificial Sequence: Synthetic oligonucleotide
  Sense strand starting at position 809 of SEQ ID NO: 1885150
ggagaacucuuacaacaga

SEQ ID NO: 2320091 - RNA, 19 nt, Artificial Sequence
  Description of Artificial Sequence: Synthetic oligonucleotide
  Antisense strand to SEQ ID NO: 2320090
ucuguuguaagaguucucc

SEQ ID NO: 2320092 - RNA, 19 nt, Artificial Sequence
  Description of Artificial Sequence: Synthetic oligonucleotide
  Sense strand starting at position 1042 of SEQ ID NO: 1885150
gcugaacucgggcagagaa

SEQ ID NO: 2320093 - RNA, 19 nt, Artificial Sequence
  Description of Artificial Sequence: Synthetic oligonucleotide
  Antisense strand to SEQ ID NO: 2320092
uucucugcccgaguucagc

SEQ ID NO: 2320094 - RNA, 19 nt, Artificial Sequence
  Description of Artificial Sequence: Synthetic oligonucleotide
  Sense strand starting at position 2286 of SEQ ID NO: 1885150
uccagaucuuaggagggaa

SEQ ID NO: 2320095 - RNA, 19 nt, Artificial Sequence
  Description of Artificial Sequence: Synthetic oligonucleotide
  Antisense strand to SEQ ID NO: 2320094
uucccuccuaagaucugga

SEQ ID NO: 2320096 - RNA, 19 nt, Artificial Sequence
  Description of Artificial Sequence: Synthetic oligonucleotide
  Sense strand starting at position 2325 of SEQ ID NO: 1885150
gaagucagcgagcaugaaa

SEQ ID NO: 2320097 - RNA, 19 nt, Artificial Sequence
  Description of Artificial Sequence: Synthetic oligonucleotide
  Antisense strand to SEQ ID NO: 2320096
uuucaugcucgcugacuuc

SEQ ID NO: 2320098 - RNA, 19 nt, Artificial Sequence
  Description of Artificial Sequence: Synthetic oligonucleotide
  Sense strand starting at position 2897 of SEQ ID NO: 1885150
uagggaaguucuggguuaa

SEQ ID NO: 2320099 - RNA, 19 nt, Artificial Sequence
  Description of Artificial Sequence: Synthetic oligonucleotide
  Antisense strand to SEQ ID NO: 2320098
uuaacccagaacuucccua

SEQ ID NO: 2320100 - RNA, 19 nt, Artificial Sequence
  Description of Artificial Sequence: Synthetic oligonucleotide
  Sense strand starting at position 2898 of SEQ ID NO: 1885150
agggaaguucuggguuaag

SEQ ID NO: 2320101 - RNA, 19 nt, Artificial Sequence
  Description of Artificial Sequence: Synthetic oligonucleotide
  Antisense strand to SEQ ID NO: 2320100
cuuaacccagaacuucccu

SEQ ID NO: 2320102 - RNA, 19 nt, Artificial Sequence
  Description of Artificial Sequence: Synthetic oligonucleotide
  Sense strand starting at position 2963 of SEQ ID NO: 1885150
gaugcuguugccuguguaa

SEQ ID NO: 2320103 - RNA, 19 nt, Artificial Sequence
  Description of Artificial Sequence: Synthetic oligonucleotide
  Antisense strand to SEQ ID NO: 2320102
uuacacaggcaacagcauc

SEQ ID NO: 2320104 - RNA, 19 nt, Artificial Sequence
  Description of Artificial Sequence: Synthetic oligonucleotide
  Sense strand starting at position 2965 of SEQ ID NO: 1885150
ugcuguugccuguguaaug

SEQ ID NO: 2320105 - RNA, 19 nt, Artificial Sequence
  Description of Artificial Sequence: Synthetic oligonucleotide
  Antisense strand to SEQ ID NO: 2320104
cauuacacaggcaacagca

SEQ ID NO: 2320106 - RNA, 19 nt, Artificial Sequence
  Description of Artificial Sequence: Synthetic oligonucleotide
  Sense strand starting at position 2966 of SEQ ID NO: 1885150
gcuguugccuguguaaugu

SEQ ID NO: 2320107 - RNA, 19 nt, Artificial Sequence
  Description of Artificial Sequence: Synthetic oligonucleotide
  Antisense strand to SEQ ID NO: 2320106
acauuacacaggcaacagc

SEQ ID NO: 2320108 - RNA, 19 nt, Artificial Sequence
  Description of Artificial Sequence: Synthetic oligonucleotide
  Sense strand starting at position 3187 of SEQ ID NO: 1885150
gguaucaggucuguucuga

SEQ ID NO: 2320109 - RNA, 19 nt, Artificial Sequence
  Description of Artificial Sequence: Synthetic oligonucleotide
  Antisense strand to SEQ ID NO: 2320108
ucagaacagaccugauacc

SEQ ID NO: 2320110 - RNA, 19 nt, Artificial Sequence
  Description of Artificial Sequence: Synthetic oligonucleotide
  Sense strand starting at position 3195 of SEQ ID NO: 1885150
gucuguucugaacguuagu

SEQ ID NO: 2320111 - RNA, 19 nt, Artificial Sequence
  Description of Artificial Sequence: Synthetic oligonucleotide
  Antisense strand to SEQ ID NO: 2320110
acuaacguucagaacagac

SEQ ID NO: 2320112 - RNA, 19 nt, Artificial Sequence
  Description of Artificial Sequence: Synthetic oligonucleotide
  Sense strand starting at position 3201 of SEQ ID NO: 1885150
ucugaacguuagucucgau

SEQ ID NO: 2320113 - RNA, 19 nt, Artificial Sequence
  Description of Artificial Sequence: Synthetic oligonucleotide
  Antisense strand to SEQ ID NO: 2320112
aucgagacuaacguucaga

SEQ ID NO: 2320114 - RNA, 19 nt, Artificial Sequence
  Description of Artificial Sequence: Synthetic oligonucleotide
  Sense strand starting at position 3205 of SEQ ID NO: 1885150
aacguuagucucgaugaua

SEQ ID NO: 2320115 - RNA, 19 nt, Artificial Sequence
  Description of Artificial Sequence: Synthetic oligonucleotide
  Antisense strand to SEQ ID NO: 2320114
uaucaucgagacuaacguu

SEQ ID NO: 2320116 - RNA, 19 nt, Artificial Sequence
  Description of Artificial Sequence: Synthetic oligonucleotide
  Sense strand starting at position 3208 of SEQ ID NO: 1885150
guuagucucgaugauaaau

SEQ ID NO: 2320117 - RNA, 19 nt, Artificial Sequence
  Description of Artificial Sequence: Synthetic oligonucleotide
  Antisense strand to SEQ ID NO: 2320116
auuuaucaucgagacuaac

SEQ ID NO: 2320118 - RNA, 19 nt, Artificial Sequence
  Description of Artificial Sequence: Synthetic oligonucleotide
  Sense strand starting at position 3210 of SEQ ID NO: 1885150
uagucucgaugauaaaugu

SEQ ID NO: 2320119 - RNA, 19 nt, Artificial Sequence
  Description of Artificial Sequence: Synthetic oligonucleotide
  Antisense strand to SEQ ID NO: 2320118
acauuuaucaucgagacua

SEQ ID NO: 2320120 - RNA, 19 nt, Artificial Sequence
  Description of Artificial Sequence: Synthetic oligonucleotide
  Sense strand starting at position 3654 of SEQ ID NO: 1885150
aauggugugcgucugaagu

SEQ ID NO: 2320121 - RNA, 19 nt, Artificial Sequence
  Description of Artificial Sequence: Synthetic oligonucleotide
  Antisense strand to SEQ ID NO: 2320120
acuucagacgcacaccauu

SEQ ID NO: 2320122 - RNA, 19 nt, Artificial Sequence
  Description of Artificial Sequence: Synthetic oligonucleotide
  Sense strand starting at position 3822 of SEQ ID NO: 1885150
gccugucugcacucguaga

SEQ ID NO: 2320123 - RNA, 19 nt, Artificial Sequence
  Description of Artificial Sequence: Synthetic oligonucleotide
  Antisense strand to SEQ ID NO: 2320122
ucuacgagugcagacaggc
